United States Patent Application Publication US 2011/0191912 A1 - sequence listing, part 4

SEQ ID NO: 3326 - DNA, 3000 bp, Unknown
  misc_feature (1)..( 3000): cDNA_ID_1840725_gDNA_ID_1620640_Annot_ID_47462 3000 nt of promoter + ATG
ttcaatctctaacgcggagacataaccctaatattacggatggtttatactattaatcttcattaaaaatcgctaaaataggttataagatttccttaacaatgattataaagagcaggcagctatatttaagtatgtgtgatgttcctaataatttgcgattgataagaagaagatattaagatataatttcatgatgcttacattagatttagtccgtagctatatgtaattaataatattattgatttgaaagtgatgcatacgactattgctctcaatgcaaattaattattcacaaatcttgttattttcaataatttgaaggttttgatcaattattagtttataactatgtcattctctagctagtttatatagtcaaggtatgagatttttgcataactgtctatgtgaataatatgttcggcccatgaaattcaatatttagaaatcgtactatgtatgagtgaaggaaaataaatgaatttcttttcttaagtaagataatttaaatatataataatgatagtttaaaaaaaaaaaaaattaaaataacgtagagaacacgagtcgaaaaactagtggttcgtataagcggccaatggtcctcacatcatggcatcatgccatgcgaaaatataccaccaatctttagttttgttttcgtttaattattgaagccaactaagatataaacttttaggttttactcaatatatccgctatgagttgatcattttgaattggtttagtgttagaaatttttatataggaaaatacatgcaacaatctgaaaatgaaaatatcggttagacttagaatttatatcgttttttgggactgacttttgtttggcttgattagaatcacctaagttataacccaatgtgtatattcagaatctcacacaggaaagctagtaggtacaaaatatttgggaaacagagagcagcagcaatatattacaaaataaattaaacatacacacagtcacaaatttattggtggataatattattttttgtctataaagttatcataatgtttccacaattaatgttttctaatttcggcaaataccaaactccattattgccattcgaattaaatgcgctcccctttctctataatgcatagaaaattgacttttgataaaatttcccctttgaccttgcaatccaagggaaatggttggtctaatattttaactaaagtatttctcttcattttaaaatattttatcatcataagacatatcgaacgtacaaaacaattatttcagttatagagaaacttttatcgaaaacaaaaaaaaatgtatatatagagaaactggttttttttttccgttttttttgaaacaggattgagatttatagagatcaaagttaatcaaattgaaataaatattattgcgatgatcctctgacgacaatactataacaccactaatgttcaacatgaaaactcaaccatttataagttgggaaaataattcccttgaactgtcttagatttttaaagctaagtatatcgctcaaactagccgaaaagagttggaaaacctgaaaaactagtccaaagaaaaatcaggatggaagttgaaattgagaggtgcacacaaaaaaaaataaaaaaaattgaaattgagagggataaacgtgacgtggcatcttcatgctggcaacagctaatgtgaaaccttcccacaaagcttggagagcgacgctttttagtcgttcatcaatcctcaccccattgattgtgttactttcattatcacaaactgtttcctaattaaagtcctcttatttcgaatttatttcagtatagtacttgtgtgttaaacttaacaacgttgaaacaactatttccttcatttgcatttgaatgtacaatgaaactacatatttctacattttagtatgagtttttttagtttagtatatttaatgattatctttgtatacaattcaaatccaatatatataagaaactctcattattaatctcgaataagagtacgtacacattaaatcttatatgctaaaactaggtctcgttttagggatgtttataaccatctttgagattattgatgcatggttattggttagaaaaaatatacgcttgtttttctttcctaggttgattgactcatacatgtgtttcattgaggaaggaacttaacaaaactgcacttttttcaacgtcacagctactttaaaagtgatcaaagtatatcaagaaagcttaatataaagacatttgtttcaaggtttcgtaagtgcacaatatcaagaagacaaaaatgactaattttgttttcaggaagcatatatattacacgaacacaaatctatttttgtaatcaacaccgaccatggttcgatttacttgcttaaatatatgacatttgcacttttgagatgcatgttatttacaccttataaaacttacttgaactttaataatatttgaccatatatcatcttggaaatataaaatgtaaacacgaaacacaaaaggaagttttcgttgtatttgcatctatatttctatatttccaaagactaaaacactatcaatgtgttgtgttcaattttgaacgtttaacatgtaagcataaaaacaaactcagaaaaagaagaaaaaaagaagaaaaaaatcatcaaggcatgtctcgtatagctgccacaaacgtaaaaataaaataaaaagcatccataataatggataaaagcatcgtataaacgcaaaatctattagatttttgtttttatgggacacgtataccaattgataaacagaggacggcaccgaaccattttgacttccctcttcttctctccctataaatactttgtacttccccttacggaccctacgaccttttgtttctctcttctctattaatactatagttttcctcaaactctctgattagctcataaatactaaaccagttgaccatttttttctgataaacaatcaatg

SEQ ID NO: 3327 - DNA, 3000 bp, Unknown
  misc_feature (1)..( 3000): cDNA_ID_1820425_gDNA_ID_1620640_Annot_ID_47463 3000 nt of promoter + ATG
acaacatactagtaactagtacttgagtttccttagaacatacaccattcttacaatagttttgttattagatgttcccgttttgtgtataatttgattcttcttctatatggtcttgtattgtggaaaacgattattggggagcaaagaaacatacaccaaaaaaaatatgatcaaaatttttagtgtgtggaacctttcgaaaaccctacgatgttcaagtaagaaattgcaattatatgagatattatatatatatgcaattgttcttagtatttaggtgtttagaatatatactttagaccgttttaagatgtttgttaaaagttagtcttcttctaattagaaacatcttcttttgtttttatgaagtaagtgataagatatacatataatttacctcgaccaagtttgaatacttgctaggttaccatgtcatgtttaatcgtccacatgagatatctgtgtgactgtgtcttcggttcgatgtggctaattttctagaacatgttatcaaaagcaaacgttgttgtaattggctgatactgaggaaaatgcagtttggcaatgacaagaaccacacatatatacaatattgatatctattgaataattatacaatattaaattcctttgcattattcatttgtttcgtataaactaaaacctttgaactctaaatagttgaaaggagcagagtcagcagacaaggaccaaagatcccttcgaccacacatataaaacgatataatttgatacgaaatcgtaatggttgtgcagttgatgttgccacttaagacacttacgtaagacttcatgcaaatataatttaatatacgtacctcttgaatttacgtgttagtttgattatatatatattggtcatttttttggtatttgctcgataatagagttgatgggaaaccttgataatattaaaaattatcatatgaattttggaggaaagacagcaacacactcgagaactctctggaaaattgcgttttcactttttttgttttccaggattagttgatctaaaatctataatatatattaataaatacaacctaataaacaaaaattatttatgtttcagttaatgtaacccattaatatagaagtaatctcgtaaatatggagttgattaaaaatatgtacttaatcaaattcatctatatatatatatatgtgtatatatatatatatatatatatatgaattatattacgatcaaattatcttagcttttaaaataaaatttttttatcttagctcttattcaaaagtctttattccatcacaaggttatgttatcttttgtatttttattttattttatacaaggacttccaagttccaacatttcaatttctaagtacatgcatatcttattaaatagtgatttaaatacacaaaaatatgaaataaattctaaacaaggtccactctataaaagaagaaaacccacaaattccaaagcccaaattaaaacaccaaaagagcccaaaatacaaactcattcttcaccactaaaatattccaaagcaaagcaacgaacataacggataagtgttatcctcatctagtcatcttcaccctctaactcaccgagaaagaaaagtaaagagagtttggtgtcactatgaacattgccattcataattaccgtcactcaaaattcatcgtaaatcctcacatagacaagacttttgcaaggactcgacaggcaagatcaaataatattacattcatgacaagtactcatggaagaagaagaacgatgggactttgtttggtaagagcaagtgccgagaccggagaagaagaatccgacgatcaaaacaagcctgagagaagaagtttcttgagcttagcagaagctggtctagtcgaaatctcaggccttggtgcacacgagaagtttctctgtcgactaacggtaaattaaatcataaatttatccctacatattataaaccctccaataccaaattttaattgcaatctattaataaatctcttacattgttttgaaatatattggtatggttaagataggaaatgaaacattaattttacataggaaattgaaaccatatgtagttgtgaaacaaaagaaaatcttataacacgtcctcaagaaatgaagtgtgattaacagtctatagtaaacatatgtacattaagtaaataactggaatatcatttttcttagaagcatgtacattgatttatagatgtttcgtatgaacttcttcttatattttggaactggatttggcagatatcatcattgaatttgctaagagtgatatcagagcaagaaggatgttcaatagaagagttgaatgctggcaaaatatgtgattggttccttaaggacaagctgaagagagagcataacattgaatctgctgttcttcaatgggatgatcccgattttcctttttaaatatccttattttttacattcaagccacacaaaagtatgatcattaacaaggtgaatatgtatcgtaagtcttaattagtctattgtggtctgactaggaaaatataaaccttttgttaagtcctacaataaaacgtattcaacaattccaaatattatccatgactgaaatacataaagaaaaggtttaaattttatctagaaaccaggaaaaaagacaacagtaaacaaacaattaaaaaagaaaagactttgaaagaaaatccaaaagttgtagaagaaaagacttaaataaacacaaagagaatccaatacgctgtcgtttttgagcaaagtctctatcgacttttttccttccgttaatcaagccatcggatattaaataattacaaaattattttcagacaaaacacggacgcgaaatcaaccaattaaatccacttctctctcaccatctcacgtccgatctctcctctctgagctctcatcacgagtcaacccctttctccgtcgaaattcgcatgcttaaactctgagagaagaag

SEQ ID NO: 3328 - DNA, 3000 bp, Unknown
  misc_feature (1)..( 3000): cDNA_ID_3091295_gDNA_ID_1620640_Annot_ID_163027 3000 nt of promoter + ATG
tcttggcgaagtggtaagctttacttgtttgatcttcttcagggtactagttttatcatattccactaagtagttctcttgttcagtagggtgtgaagcgtgttttaaagtcagtatgtggtacaggaaaagagcttcagcaggttgtccttgaccatcttcaggtacagtattctttacattcctgaaaatggagttatagtttttagactaagtagcgtttatttatacagctaatactttttagatagagttttgtcacgaattaagctttctttttcagcctgcagcagaaattatcggattcaggataggtgaattaagaggtctatcgaggtggcgtgcacggtaccaaggcattggtttggatgagatgctccttaatgaagccactgaaaatactggtctgctacttgtacaagtgcaacggtttatgatggtactatcttctgttgtccaacaggtacagaggcgtgcagttcttttgacactgaaaatcatagttatttagtatgttggctgtcccatgtttcccacgcaatggtcatttcaatagaattataaactttttgtttcagttctcaaatttcttcaactggctcgtcagaagtataaagtatcttatgcaagaaccgaatgatcagcttttgtcatacaacaggtatgcacatgtgtttttatgttgttaaaggtgttaaagccaaatctttgcagttacatggtttgtttctgtggcagtgaactccttgtggtattcttgaagttcttatatgaccaagatcctgtgaaagacctcttggagctatctgaagctggtgatgacattgaaattgatctgtaggtcaactctttctatgtctgtgcttttacctaccttttctgatcacttatcttgtagtcgagcagaatctctgtcaggttacctaaaattttttaagccatttataaccacatacaataggggtagtccaatgtgataatacgaatgaaatccgagcaggtttctctaaccacactaaaacgaaattcagatatgggtaatgtgtgtgcgtttgtgaagcatgaagtccattgtatcatccctagctgttcattcactttgttttacttcatttcatttaaactcttaatgttttaatgtcccagcaaaaccatcggaagagtcaaagagttacttcagtttggagggttttcagagtgtgattttctgcagaggacattggctaaggaattccaacacatggagtctaggtattttctttacatcttcacttcttaaaacataaagtttcttaaaaatgctgcatcatggagcacaacgttggtaaactgatacgtgtaaaaggctatggtagagacaaaggtccgataccatggctgccttggcattttgaaatacaacatgaacaaccatatttatggtattggagtttacttgcaaaacaaagtgtgctgagtctttataatctggacatactttctcatggctttctctgactagacgtcaaattctgattttaatgctttaacaattttagcttcaagatggcttctcaaatgccctttacaacaatatcaagaaagatatcatgtatgaagttgttgcctctttgccctcttcagttgtcaacaacgcaaacacctacaacaattcccatgtctctttccttctataaggtacttgcagcaacaatcttaatgcactttattatgatcccatagggcatccttaggaagagattgctgattgctatctccaaagtcttcatttgctcctgatatactaaagtctctgtttgcttgtgcagaatgaactttctgatgatacaccttgtcaaagtgggtacactgattacatatcttttcaagtccccgatgagaccttcccagagatttcaaactgtattggcatagctaagggttataagcagaattccaacaatgagaaaaatggttatacttctctggaagccgttttgttatctgtacctaatggctacacttgtgttgatttgtctctctacaaggtgaatactcattctcttctgcaacaatggttgatttaattggtatattttttcttttggagttgccttgtaaatcctgtgtctgattttgaaacaggataaagaactggttttattattgaataagacaaatacagattccgaaggctcgggagaagcatgcatgatggttgtacaaactggtgacctcgcattcatttccatttcaggatctagttctctaaaccagtgggagctagaggatttgaaggtattgctaatttcaagcattaacatcgacgtttgttttaaaattagtgaagtttatgtaagaacttatgcatctccagggctcgattgtgaacctggaaatggagaatgaaaaggttcgcaaagtaccacattctgtcattgctcctctagcagtaagcggtaagagcttaattttctgtcttttcttcttcttcaaactagaaatgctttttcaaaatcatgaaataatttgcttaattatttaaaattcttacagcttcaagaggagtggcttgtgtttttgctgaaagaagacgagctttggtgtacatattggaagaagatgaagatgaagaaatctctgatgaaaagtaaacctcctccaatgcctgctttgattgttgtttgtgtagattattaaagttaagaaacagaaacttgactacttgaagttgtaaacggtgacgttttgttagttaatgacttcttctaatgtctgtatcagtctcttcttttcacacttgcgtcataattaaagagggttacgccacgtcagctcagccactcgacaggttaaagcgcgtggttgtcacttcccctttgatcagacaaagctgaccaaaaaggtgggttttttcaaagtccattctttattcttagctcaactaaggaagcaagacgaaattctctctctttctctaagctctacgccaccgtcacggaggttgtcttgttttgtctc

SEQ ID NO: 3329 - DNA, 3000 bp, Unknown
  misc_feature (1)..( 3000): cDNA_ID_3071055_gDNA_ID_1620640_Annot_ID_163026 3000 nt of promoter + ATG
tcaccatcgtcatcatctggaattgcgaaacgtctgtgaccagaggatgtagcagccattggaaggtaagggtggaaagagaaagcattgacggtatctgcattaatcgaatggagtatatatgccaaagtcaggatctcatcaacaattgcagaagctactgaagaactaagtgttagctacctgaagcagcttgatatccagaaacccagtttccggtttgtaaatcgtacatgtgaacaagcccatcctggaatacaagacaaagaggaatgagaaaatggttacatgatctaaccataagagtgttaacagaggaaaaaagattgcttgcagttttatagttaatgaaaaacaaaagctcaggcattagaaaggataggaagatcaaaagtacctgaccaccggtacctaaatgtcgaccacatggctcaatatcaaagaatacacgctggtttgtgttctcagttgctctgtacaatctgatcacacatataaatgatccatttcaaacacatgtcaacattataagagcttcaacatctaccatttctcaagctaagacttctattaacttgaacattgatgtaacgttaatcttaagctgctcatggctcattaagcattaatcttgtttacagcacttgttcttgcttctagattatattgtaaaacaagtatgagcttagaaaccaaagactacccaaaccaaaataaagaagtaaatactcacttatagactatttcaacagatttccgaatatcccagcaaagaatgtaaggatcctgaaaaagagcaaacaaaaaagaaacatttttttggtgaggttaggacaattcatcatcctattacatatcatactctaatattggacaccaacgagaatatctctggacagacgatactttcctccaaaaagggttatccttaaaatggaagtcaagttgcgatataatatgctcaacattcagagggtaaaatgtttataacagtatgttaccttgcgacctcctgtatataaatagttcccatcctttgaaaactggacctaaaagccaccaaaaattcgatcaataattggatcatatcccaatggacaaaaataaggcacatttagtggtcaatgcttacatgtgtaacaccgccttcttgaccatgtaaaacatacaatagctccatgttgtcttctctataaatcccagtagtttgcccgtaagaccccacagccaacattccagaattagttggggagaaagcaagagtagataatatacctggaaattatgaaccagttaaggttgttcttgtttctgtataatctgtaataatattgttatgcagcgtctgagtggaaaagaaagaaaaaaacctgcttggccctctttgtttttctgtagagttgaatactgcctaaaatctcttccaggacgatgaagatcaaacactctgatggagctgttgtaaccagcaaagatcctaaagacataacacaggcaaatgaacatagaccacttttaatcaattctttaccgtgtgggaagatggatacaacttagatgaagtttttgcttacttggttccatcaggattgaatccaactgaaaatgcagcagttatttcatccatagcatcataggcccggtatgtgcatcgaagctgacattgtgttattcacatgtaaataaacaaaaaaggatggtagaaaaaatctccagtaaacatgttaagtttcatggaaaaaatcagcacctcaccagaagtactatcccaaagatgtatcggatggtctctagtggaggtagcgaagacgcatgttaaagggtctgatatcaatcagtgaacagccaaaatcagtaattcaactgatgaaatcattaagccaaaaaattgaaccccttatgatgagcttatctattacctgaaactgacatgtatggataccaacagaaatcatagacagattcaccctcattcactagaagactcgcaccatacgaatctacaattccaataaacacaccatgaatcacaaaattacttcacacatattttacagcatttgccacaacatacaaatgctagatggaaaagctaaccttcttcagggactggcactccatagccattagaatcccctccatcttgtggcctgatggggcaaatttgcaaaactaaagattcaacagagaactaaaactacacaaacatacaaaattattgatacttaagctacaaaaatatttcaattgaaattattcaacttacagatgaaacagactaagtgtattatcttcagagcttgcaaggaaacatgaaccatcaggtgacctatataagaaacagtaacaaaatcagtacctcaaaagttaggcaaaaagaaaaaaccaaactttgagaaagaacaaaactctactcaagagattgatttgaaacaagaagaaaagggtaccacttaagacccttgaggaaattattagggtttcgagctgtcctgaactgcttagagaaatggtgcgttctataaggagagacatcaaatctcatagtaggccaggatgatttttgttctcctgattctaccttaagtccaccattttcttctgctactgcttcttcttcacccatcttcttcgtcagagcttctggaaaaaagcagcagagagaggtttactttcgttctaaaccccagtcaaaatctccaaaacctgaaccaggttttcaatctcagaccgacaaattgaaccgaacttaaaccaaaaaccggattagggattttgattggaatttggaagaaaagcccgccaggtttgtcattagtgcgtctctctcttctcccggcggatcggcgaatcccggcgaccaccgtcttctttcctttatccactctctacagctttcttctcaagtgtttctctctagttacttccttcctacagctttgctagatattgaaaattagaatattaacccctaatcccaaaaacctcggaatgtcggaa

SEQ ID NO: 3330 - DNA, 3000 bp, Unknown
  misc_feature (1)..( 3000): cDNA_ID_1395335_gDNA_ID_1620640_Annot_ID_163024 3000 nt of promoter + ATG
ttttgcaaatttgccccatcaggccacaagatggaggggattctaatggctatggagtgccagtccctgaagaaggttagcttttccatctagcatttgtatgttgtggcaaatgctgtaaaatatgtgtgaagtaattttgtgattcatggtgtgtttattggaattgtagattcgtatggtgcgagtcttctagtgaatgagggtgaatctgtctatgatttctgttggtatccatacatgtcagtttcaggtaatagataagctcatcataaggggttcaattttttggcttaatgatttcatcagttgaattactgattttggctgttcactgattgatatcagaccctttaacatgcgtcttcgctacctccactagagaccatccgatacatctttgggatagtacttctggtgaggtgctgattttttccatgaaacttaacatgtttactggagattttttctaccatccttttttgtttatttacatgtgaataacacaatgtcagcttcgatgcacataccgggcctatgatgctatggatgaaataactgctgcattttcagttggattcaatcctgatggaaccaagtaagcaaaaacttcatctaagttgtatccatcttcccacacggtaaagaattgattaaaagtggtctatgttcatttgcctgtgttatgtctttaggatctttgctggttacaacagctccatcagagtgtttgatcttcatcgtcctggaagagattttaggcagtattcaactctacagaaaaacaaagagggccaagcaggtttttttctttcttttccactcagacgctgcataacaatattattacagattatacagaaacaagaacaaccttaactggttcataatttccaggtatattatctactcttgctttctccccaactaattctggaatgttggctgtggggtcttacgggcaaactactgggatttatagagaagacaacatggagctattgtatgttttacatggtcaagaaggcggtgttacacatgtaagcattgaccactaaatgtgccttatttttgtccattgggatatgatccaattattgatcgaatttttggtggcttttaggtccagttttcaaaggatgggaactatttatatacaggaggtcgcaaggtaacatactgttataaacattttaccctctgaatgttgagcatattatatcgcaacttgacttccattttaaggataaccctttttggaggaaagtatcgtctgtccagagatattctcgttggtgtccaatattagagtatgatatgtaataggatgatgaattgtcctaacctcaccaaaaaaatgtttcttttttgtttgctctttttcaggatccttacattctttgctgggatattcggaaatctgttgaaatagtctataagtgagtatttacttctttattttggtttgggtagtctttggtttctaagctcatacttgttttacaatataatctagaagcaagaacaagtgctgtaaacaagattaatgcttaatgagccatgagcagcttaagattaacgttacatcaatgttcaagttaatagaagtcttagcttgagaaatggtagatgttgaagctcttataatgttgacatgtgtttgaaatggatcatttatatgtgtgatcagattgtacagagcaactgagaacacaaaccagcgtgtattctttgatattgagccatgtggtcgacatttaggtaccggtggtcaggtacttttgatcttcctatcctttctaatgcctgagcttttgtttttcattaactataaaactgcaagcaatcttttttcctctgttaacactcttatggttagatcatgtaaccattttctcattcctctttgtcttgtattccaggatgggcttgttcacatgtacgatttacaaaccggaaactgggtttctggatatcaagctgcttcaggtagctaacacttagttcttcagtagcttctgcaattgttgatgagatcctgactttggcatatatactccattcgattaatgcagataccgtcaatgctttctctttccacccttaccttccaatggctgctacatcctctggtcacagacgtttcgcaattccagatgatgacgatggtgaagataagaacgagcttcaattgaaaggtacattacactaaaacgctaattagttcctctcccatcaatgttaaagacacacaatctaatcgttcctttctctttttgctcacacagctgatgagaactgtgtatctctctggagtttctacgtagaggacaatacttatgatgaaaacaatggcgttgcaagcgagtctcatctccaaaatgtcaccgaagaaatagttttaacataaattttaatttttaaaagctacgttagaaaaaaagaatcgaaacaatattattttattagtcttatccaaagcatattcttaacaaaaacaaaaaacaaaaaaaaaacaaattcccatacttatctccagatgtttcagaatccgatgagctcaagtgggactcttctattttaaaaaccacaacccttcctctgctcattaaattcacaccgttcaagctacctaagcatacacgtcacaacaatcaatggacaaaacactcattatgaacccgcacactcatgatatttcctcccgaataaagtgggtttatcttgtactaactgactgataccgaagaagcttaactcaacttggactgatcgaaacacaaaacgccaatgacggctgtccaataacaaatcaccacgtgtcgaatcggagcttatattcttcagcaaatctctctctctctttttctctactttgctctgtttttggcgttctaaatgatccattatctccatttcatcggtgaattttgtttctccagtgctgttaaagtagttgagtggttctcggagaatctgtttctcaaaagaagcacaatg

SEQ ID NO: 3331 - DNA, 3000 bp, Unknown
  misc_feature (1)..( 3000): cDNA_ID_1820413_gDNA_ID_1620640_Annot_ID_163021 3000 nt of promoter + ATG
tggcttgcaggaggttgaagatgcacagagaattcgtagtactgtcattgattcatttgagaaggcaagtttacctggactaaacgaacaagagagaaagagaatgctacattttgtagttgttggtggtggaccaacaggtgttgagtttgcttctgagcttcatgattttgttaacgaggatctagtcaaactatatcctaaagccaaaaacttagtgcagatcactcttctagaggctgcagaccacatcttgaccatgtgagattttcttactcttaaacttttgatctatatcgaagattagctcatgtcctatggtttgacaggtttgacaagagaatcacagagtttgctgaagaaaaatttactagagatggtattgatgtgaaattaggttctatggtggtcaaagtgaatgataaggaaatttctgcaaaaaccaaagcaggagaggtctcaactattccttatggaatgattgtttggtcaactggtattgggactcgtcctgtgatcaaagattttatgaaacaaattggtcaggtgagtagccaaaggtctaatgataatgctcatattttttcatagtgaacgagctttatcaactcggtctataagatgatttcttgtaaattccagggcaatagacgtgctttagcaaccgatgaatggcttcgtgttgaaggatgtgataatatatatgcacttggtgattgtgcaacaatcaaccagagaaaagtcatggtaaccaaattcagaacctagataaaaatgagctcgcttgtgtatagggtttctctgtttcttatacttttggattgttatggcttttgtacaggaagacatagctgctatattcaagaaagcagataaggaaaattcaggaacactgacaatgaaagaatttcatgaagtaatgagtgacatatgtgatagataccctcaagtggagctctacttgaagagtaaaggtatgcatggcattaccgatcttctaaaacaagcacaagctgagaatggttccaacaagtctgtcgaactcgatatagaagaacttaaatcagctctttgtcaagttgactcacaagtgaagcttctaccagcgacaggacaggtttgttctgtttttacttacttgaaagttttatcttcggtcacaagtgtcacacactcacactcacacactttgtttgctttctcatcctttgtctggtggctttataaggtcgctgctcaacaagggacttaccttgcaaaatgctttgatcgtatggaagtatgcgagaagaatcctgaaggtcccattaggattagaggagaaggtcgtcaccgcttccgtcccttcaggttggttcctagtatctgcatcttaggaggctttagtcacttttgagattgcatgttttgtgaatttctcaatactgattatatactttatagtaaggagacatgagacaatgaatatatatgttatacaggtatagacatttgggacaatttgctccattaggaggcgaacaaaccgcggcgcaacttccaggagactgggtttcgataggacacagcagtcaatggctgtggtactccgtttacgctaggtaacgttaaatgactaatgaaatacgaaatgtattcatatgatttttgtatttttttgtaactttttggttacaagtttttgtttttaataatacagtaagcaagtgagctggcgaacgagagtcctggtggtctcagactggatgagacgattcatcttcgggagggattcaagtcgcatttgaaaatctcatgtctctcttactctctcgtttgaattatcatggatagtcttattgctttttgttttttactttcaaataaaagcataacaacgggaagatgttaaacttcatttggttacttctgtttttggaattggtacgtgaaattgatatatttatattgctggagattggagtataatttcacaaagaatataatctactgcttttcttatagaataacgtttaacattacaagatatgtcgcctagctagtcagaaaaaaataaaaataatacaatgttagaacttttgttgtccttagattttgacaattaattccctttacatgatacagtatcaattatgggagaaagaaataggagaatcttctggcaacacgtaatacttaaattgttcatctttctattagtaaaactaaaaacaaaacctaacctaccaaaccactactctccttgacctcgactaaaatcgcaaacttacctataacttctttctaggtaaaaggcaaccaaaaatattaattcaaatcaaccaccatacactcccgattcatatcgttaaattttttacacgttagcctgctagctaggatactaaaaataataagattactttatactaaggataaaaatgatctactattttttagagtgaatctaccaattaaaaagttttcaaaaataatgtatattgacttatgtgcctggattatttacccatttttgggtgggaatctaaagattttatttccaatttttctcaaatctctataggtattattttttaccacaaaaatgaattatcatctttaagagaaaaaaagaagagaaacaacaattgacttcaaacattgttgtatataacatattccttcggttacatttcaagtgttgtttaagtgtcttacacatatataaagaaacaaacatagattgcgtaattttttttgtcttttttccattaaaacatcattcattatttagaaaaatatattcaaccaataacaaaacagtctgtctaatactaacagtcaacaaaaatatataaagtaataaaaattttaataggatagtttccctaaaacaacattaaaaaaatttaacaaatggagtaacaacagttcatcaacttctcctcttttgtttatataaacacacattaacgattcataagccattgtctactaacaaaacagaaaaagactaaaatg

SEQ ID NO: 3332 - DNA, 3000 bp, Unknown
  misc_feature (1)..( 3000): cDNA_ID_3091303_gDNA_ID_1620640_Annot_ID_163020 3000 nt of promoter + ATG
catgtaaaaaagaaatgtaaacttgggtttgatgataatgaattgttcatgttaaggactaataaaaacagagaagaaagtgtactaaaatcgaaatttgagctctccaattactaaatcggtgctaaatgaaccggtcggtcgtttctatatttgattcgttcggtttatcctttaaccggtcgaaccgaagcttcttttgttcgtatgaagaaaactaaaatccaaatctctctctggtacaccatgagaggagctctgttcagaaatgcatctctctgcgctcgcagaatcattctttcttctaggatctcccccaatgttccctttctcactccaatcgccgctccggctcctcccaaattcagatttttcagttccgaatccggtgagaactcgactactgccactgagtcttcgccgactgattcatccgataagaaggatctcgttgtaaaggatgtcagcaacaaaggtaacagactctatcctctcttcaagcttgtttggttacctcacacttgaaatggccttgtattagttgaaatgtgtgagtctaattctcatctcgccatttctgaatgcctcacagttttcaattgatccttcgatataagattcgtagcttcttatctcctgaactactaggtaatcgtttgaaattgactttatatgttggattttgtggtctcagagcttaaaagccgtatagacaagtctttcaatgagggtaatgaagatgctttacctggagttattgaagcacttctacagagaagacttgtagacaaacacgcagagactgatgatgaattgatggaaaaaatcgagagtctacctttcaaagatgatgtcaaggatgaagattttgaatccgatttcgaagaagcgcattctactgacgaagaacttgaggatttgtacaactctcccgagtatgtagctgaaaagatgaggaagaaagaatttttcaacatggacgataacaagtgggatcacatgattagagaaggtatccaacatggctgtcttaccgatactaaacaatgcgaggagattctcgaggatatgctcaaatgggaccagcttcttcctggtaatgctcttttatttttcaatcttcccgttcatcgactcacatccttagacatagattaggttgattaatagactattgtgcctcgttatagctaaacacactctcttagtggaacttatcttttgtagttaacctttctatttggattttaatgaatcatggtagtagaaccattcttcttttcttaactctttcaaggtaatgtactatgtcggatttgttgcttctcggatcagtagggctgtttagagaatatattggtttgttcctgttatgcgtatgtatgaacatcctctaactgtgtatcttcattcagatgacttgaagaaaaaagttgaagcaaagtttaatgagctcggggatatgtgtgaaagaggtgaaattgaggccgaagcagcttatgagcttttcaaggaatttgaagatgagatggtaattcagtatggggatcagatggaagctgagggtcctccccaatttggtgaaacagatacttctgacaggaatactgacttggatgatccctccggtaaaggcccaatcctcaggtggcaatcaaggatagtttttgctcctggaggtgatgcgtggcatccaaagaacaggaaagttaaaatgtctgttacagtgaaagagcttgggctctcaaatcatcaggctaaaaggctaagggaacttgtgggaaaaagataccattcagggaaagatgagcttacaatcacctgcgagaggtatataaactataaatcttaagcttttcgcgagacaagaatgttgaatcatgtaatgtttttgtcctgtcacaggtttgaacaccgagaagaaaacaggaaagactgcttgagaactctttacgggttgatagaggaagctgggaaagccaacaagatcgctgaagacataagaacttcatatgtaaaacagagactccgagccagtccagcttttatgcagaaactacaagccaagatcataaggtctaaagaatcaaatgccatcaacgcttgaaaaaaacttttcccggttcgcgcctttcttcttgtctcaccaaataatctgtggatcgtcttcttttggcaatcatttgatccggtacgggttttcagatcgatgaagaatctttgatggtaactcctattttagtttggtttgcttcttgtatctcatgaagacatgaaccttggctgtgctgttggtaactccatttgtcttcgtcgggaaactataaacagaacagtccgaccactttttcatgctaacttctagattcataatgcaatgttggtaaaaatagacaatgaatgaaactttttcatgtataaaaaatatggaaacttggggttgataatgaattgttcatgttaagactaaaataaaaaacagaagagggtgcttgtgtggttagtctcaattgttaaatcaacaattaagttctccgattaggcgttgaattaaccggtcgcccgtttttaattttcatcgttcgattttcaacttaacctgtccaccagaaggtcccttttgtgcctaattttgatgaaatgtcgtcatttcgtcgttgaagctacaacacaaaatacaaaacgttgtagttagattgctgaatctctttgtaccggtcaaactcggtcataccgagtatcaatccgaatgatccggtaggaccgggattttaattaggaatccgaatctctaaattccagatgctaccttatacgtgtacgtcttctccgcccttcttattcatttctactctgctgcgttatttctccgtcgtcctcaactcatcgccggcgtttaccatccgctagatccgtcgcctctccggtcgactatttatatggaatcgtaaatttacagacactaataagaatagtttgacaaaatctgtagctggaata

SEQ ID NO: 3333 - DNA, 3000 bp, Unknown; identical to SEQ ID NO: 3327
  misc_feature (1)..( 3000): cDNA_ID_3071063_gDNA_ID_1620640_Annot_ID_163018 3000 nt of promoter + ATG

SEQ ID NO: 3334 - DNA, 3000 bp, Unknown; identical to SEQ ID NO: 3326
  misc_feature (1)..( 3000): cDNA_ID_2140779_gDNA_ID_1620640_Annot_ID_163015 3000 nt of promoter + ATG

SEQ ID NO: 3335 - DNA, 3000 bp, Unknown; identical to SEQ ID NO: 3325
  misc_feature (1)..( 3000): cDNA_ID_3074219_gDNA_ID_1620640_Annot_ID_163010 3000 nt of promoter + ATG

SEQ ID NO: 3336 - DNA, 3000 bp, Unknown; identical to SEQ ID NO: 3269
  misc_feature (1)..( 3000): cDNA_ID_3070966_gDNA_ID_1620640_Annot_ID_163034 3000 nt of promoter + ATG

SEQ ID NO: 3337 - DNA, 3000 bp, Unknown
  misc_feature (1)..( 3000): cDNA_ID_3071051_gDNA_ID_1620640_Annot_ID_163029 3000 nt of promoter + ATG
catctggtagtgataagacactcgtataccaaggacctgatagtaaacttgaaaatctggattggagagaaatgaaaggcccatttgtttcagtatggcttcataatgttccctggggtgctgagaacactttggctgctcctgacgctaaggtcagttaaacattttgaaaccacgaaaacacgatttttttggaatccttttgcgtttacttgctataaaatcttgaaagcttcatatggtctgattaacagttttctgatggcttcctggatttgattgtcatgaaagactgtcctaaactagccttgctatcacttatgacaaagttgagtgatggaacccatgtccaatcaccatatgcatcatatctgaaggtttgccatgcgaacccaattttatagttgtaatatttcatttgatgactttgatgtctcttttcgaaatgaatcggaattttatgattgactaaaaagcttacacgttggtttttactgttgaaaaggtgaaggcattcgtactggagccaggtgcacgcatagacgaaccagacaaggaaggaatcatagattcagatggagaagttttggcaagaggaagaaaatcgtacaaatgtgatcaaaaggctttgatgtcttacgacaagcttcaaataagtgttgatcaaggtttagccactctcttctctcctgaataattctgactgatacatgagatgtgatgagatgagatgaagttgtcccttgtggctataatttgattgatggacattacaatacaaaaaatgagaagatgattcgagttatatagtaaatccctaaagattaccattgagtgtattgtttattgttgtattgctgttgtattgcagttttgagttttttgttagaaagttgtgtgaactaagatattgagaagaccataaatactaaatgtgagatttttttgaactcttggtgtaaagtgtaaacatatttatgttgggggatggtagtcctaaagcttaaagctttgtggcaaatataaaatgaagattaatattgtcaactagcattagtgtgacaaaaagttgggagagattttatgaggcaagcaactaaaaaattgatgcgacatatcatataactaaaatgataaaatattgtccctggaatttaatttggacctaccatactaatgatgacttggcgttatacattgaatattttaattaaaaaaggaataaatatcatagaaaaagcggaaataaataagtaaagtaaatgttgtgagagagctttctttttcagagagtattttgtttagctgatgaggcaaaaacaaatagaagaaattaattacccgaaacaacaacacttcactatttctcctttctcagctgctttcaccattttctctttttctcctccatcaatctttctcacggttttctagggttttatatatgctttcctcttcatccatgtcatcgtcttcgttatctgctagattttgcttcaaccacgaatgttttgagttcaaactcgaccattgccgtcctggttggcgtctccgttctggcgatttcgtcgacctctgtgatcgttgcgcgtaagcaaccttttccgtacttcttttcttcgcttatttttactctccctgttccatttttttgagttgatcatttttttttttttcaagtgtgcttgtctttgattttggaaaacttacttggttgtttttttcctacttctttctttgtgtaatttgggtctgtcttagtaagatgtggcagcctgtggtaatttctgagtttttttgttgtttgctttgttttggagtatagagtccccatgtgttgactacaagccgagaaattaggagccactcttttcggatgttttggaattgtttaacagtgttgaatttaagtgactggaatatagagttttaagcattttgatgggcgtgtgaggactaattcgtttcacctgaattctttatgtggcatcgatgttgtgtaacaagtttagagtctagaggtccaaagtccaagtgacacgaaagagatagaagaagtgatactaggagacaaaataattaaagcaataggaagctactttgcattctgatccattagattcgagaatttgttcactagtggccggttttctgaatttttatattctgcttcatcaaagttagaaattagacacatgattagtttcttaggcttactatgatattttgtgaaataataaattgggtatggtaatggtttctatgtaaacaataaggtcaccttcatgggattgcaaagccttttgagtatcaggaattaactaggaatgagatacttttgctcttactacttcttgattgtaaacatgcatacatgtgttctgtctttgatgggtttatttttggaaaacatgtatcagtttgatgatataatcttcaataattttcgttcctgtatgtagatcttttcttaaaaatgctttgattctttaactatggatgcgtggagactatatagtgtatagtttccttaggcttctgtttttgttctgaaacataaacttcatcagagctgaaaaagtatagttaaagcttacaagttctagttgcattaggcattaaccaacacaaatagtctggtttttctttgtttgatttcagtactctgcagacacgattcttttacctgctctttgcatcaatttcattaacttgttagtgtattatcgattttgcaaatatctaatgattgtattctggttccagctctgcgtatgaacaaggaaagttttgtgacgtatttcaccaaagggcttctggatggaggtgttgtgagtcatgtggaaaggtaactatatgatttactagttaaaattttctatgtctccttggcatcccaaaatcatacatggggtttccagatgtgaagtctctcactaatagcatttcgtgcagcgaattcattgtggatgtattgcgtctgcttctgcttatacgtta

SEQ ID NO: 3338 - DNA, 3000 bp, Unknown
  misc_feature (1)..( 3000): cDNA_ID_1825652_gDNA_ID_1620640_Annot_ID_163008 3000 nt of promoter + ATG
taagctaaggatgatgcatttcttagggtgtgttctcgggtgggcaagaaatcgcggtgaaaagattatcgtgtacttcaggacaaggagacagtgaattcaagaacgaaattttacttcttgcaaagcttcaacataggaacttggttaggctattaggtttttgcatagaaggacaagaacgaatccttgtctatgagttcatcaagaacgctagtcttgacaatttcatcttcggtaattgttttccgccgttttctccatatgatgatcctaccgttctgttttttctgctctgtgttgatctttacgctgttacagatcttaaaaagcgtcaacttttggattggggagtgcgatacaaaatgataggtggagttgctagaggacttctttatcttcatgaagactctcgttaccggataattcaccgtgatcttaaagctagcaacattcttttggaccaagaaatgaatccgaaaatcgcagattttggattagctaaactctatgacacagaccaaacttcgacacatcgatttacaagcaaaattgcaggaacttagtaagttacttcatcttactaactcattaaccaagaaacaccggtataaacccgttattcatcttgtagcgggtatatggctccagaatacgctatttacggtcaattctcggtgaaaacagacgttttcagcttcggtgtattagtcatagagatcattacgggtaagggaaacaataatggtcgatcaaatgatgacgaagaggcagaaaatctccttagttgggtaagtacacaaaaccaaccaggtaattgaggtttgagtttgattcatcatgttaactgaatttgtaattctgtttgtttctcaggtgtggagatgttggagagaagacattatactaagcgttattgatccgagtctaaccacgggatcaagaagcgagatcttgagatgcatacacattggtcttttatgtgttcaagaaagtccagcgagtagaccaactatggattcggttgctctaatgctcaatagctattcctatactctcccaacgccttcaaggcccgcctttgcgttagagagtgtcatgccttcgatgaatgtttcttcttccacagaaccgttattaatgtccttgaatgatgtcactgtttctgagttatctcctcgttaggaagcttaatctgcatatctttttagtttcttcaatgatggattttgtttgtgtgattttttagacagcttggcttcatctagcttttgaaacgagtagaagttatagctttttcttttagttctacacattcgtcgttaatggtagatttgttttgcaaattcgattttactgtgttttaaaacatataacatgaaatttaacttaagaaaatgaaaatagtattagacttttactaagaaaagctttctactttatcctacacatgaaatgcatacacattggtcttttcaaaagcaacaaatcaatgttaaatacagttttctttatcttaactcctaataatgtagctatagaattcatgactaagcattgtggacccttggagcatttttagatggagatgggtgtttgtttctttattaggttttgttgcctagtagccacattctctcagttaaactaatacatttgtaaattttcacttgtaatcaactaatccaccaaatgaatcaataatgtaaactccagaatcgatctggcattgtatgagtatcaatatatgctttagtgccacttgctagtgcaatccacttgaggtttggctgcatcgatattagatataaatacttaagcgtcatgcaaaaaaaagattactaaataattgtagggttattatgggattttaggcgagcaaacaacatttaaactttgaaggaatacaatttgaaatatcaagatacgtaaaatatgtcacgtgcaataaaataaagagaagacccatccaaatcaagtgtgcgatactttgaccatatgagtcaatgtggcggccaaaggcaacaagcatatctaatctaagtattatataactaagcaaatattccactaaactagtatacaaagccaactgctccactaattgcctgacatacttatttattttcaaatttggtaaccacacctatagcttatacattttcttcgatggccttatacaataggaatatactattaccttctcattgttcttattatcatcaaccatttgataaatcctcatcactcttaaacattgactatgaactaaggacgtcagaagtagtccatacaagatatgaatggttggatcgtcctaagtcattgtattaatatacgtttctaatcaatggaaactatataattgtaatataatttttactaaatcatgtaacttgaaaacctaactttctttcttaataaaaattgaaccgctaaagtatctaatccatcatgtgtcaactgacaccgtccaaaatcctcttagagatgtaagaaaaagtttcaaaacaattaggtcagccaccaatcacatatttctatgcaggttgtataatcttgaaaaagaacaaaaaaagtagatgacaaaaaagaattaaaagacaataataataataccttataaagatgataataattcaaacagtttgacctttttatttcaattctctggtccaactttccaacctgacgagacaaaaatatagaaacttctcaacagcaataaaacagcaacctttcctttttgtatcccttctcctttgtcacctctcctcttacttttttatcaataggaagtttccgccattgtgacagacacagttcctctgtttctcttctttcatctttaagcaaacctcaaaaaccaatcctttattacgaagatcctcacttgtgtcttcttctccaacactaaaccccaagaaaatgagattcttccgcaaaacctcactttatctttctctcttcttatacttctttctttatgaatcttccatg

SEQ ID NO: 3339 - DNA, 3000 bp, Unknown; identical to SEQ ID NO: 3332
  misc_feature (1)..( 3000): cDNA_ID_1820417_gDNA_ID_1620640_Annot_ID_47465 3000 nt of promoter + ATG

SEQ ID NO: 3340 - DNA, 3000 bp, Unknown; identical to SEQ ID NO: 3331
  misc_feature (1)..( 3000): cDNA_ID_1820413_gDNA_ID_1620640_Annot_ID_47466 3000 nt of promoter + ATG

SEQ ID NO: 3341 - DNA, 3000 bp, Unknown
  misc_feature (1)..( 3000): cDNA_ID_1820409_gDNA_ID_1620640_Annot_ID_47467 3000 nt of promoter + ATG
aaatcattcaacatacaagattgaatacatcctctatcttgaatacaccctctaaaatattcttttttataaacaaaaattcaatgtttgaaacaaatggaatttaatgaagaatttaatatctgttgactactaaactgttttaaaaaaaaaagacaaaaccaaaaccctcgtcggggcttttaaatgcaacgaccaccaaagtctttctctttctctcagcttcgaaacaccgtcacgccatggaagaagaaactctacaagtcttcttcttctctcatcctctcttctccattttcataactctctacagtctaatcctcatctatttccccaatgatttgcttcgaatctttctctcccctgttcttctcatctccggagctctccttctctctcttctccgtctcggatcgacccgagaacctaacacccaacccgataaaagctacgaggagtctgaagaacctaaggtttttctggttcgtgaatccgatttgatgggtggttttgtggaatggaacttgagagcaccattggaagtgattcacgaagcttacgaagatgaagaagaggaagaagaagaagaagatccgacccggtttagaaaaatggagagattcccatcgttgtcactctgttacccagaatcagattcggaatcggattctgcttcctcgtcagaattcaatttcccggaaatcggtgactggaactcgccggaaaatatgggattcagatgggaagaagacgagggtggaataggatgtgaaggtttgattgagataaagctcgatcattatagccataataggaagatgatgagtaaaacagagattgattttcatgcagaggaagatggtttgatcgagatcgatctttttccatgaagaagaagaagatgatgattctctttgtgcttccgattagaaagcatttttccgattagaaagaaagaaaaagaagcaacaattaatggttgttcatttttttctatacgaatatcatttgtgtaaatattattatacgagtgtaattcaattttcaactttttacacaaggattaattaatctccgatttaacatgatctggaatttaaaagtcgaatttttaagaaaagtttttttttttttttaaagctgaaaatgagtaatatatatacgcagaatttaattaataatccaaaaatgaaactgaaactatccatatctacaccaatttgaaaagaaaaaaaaaaacttttttttttctttaccatttgaaaccagttaacttgtatactttgtttttaatacttttataattaaattgtatacttatttatgagttgtattaccagagtaacattatggattaaatacattacataaatatatatataatatatatatatatatatatatatatatatatatatatatattcaattgctttgtattgagtgattgagatctcgcagatcaaatcaacatatatttcatctatgttgtcaaatgaatagctcattggatttcttctgcgtattgttgttcccacaaagcaatgacataaaacaacattataaaacatgtagaaatgagtgtcacatgataacaaattaaaccaacatatgcaatcaaggcagacttaaggaattcagagttcctgaataaatcttaaaaattggcctttttcatactaaacaacaacaaaattgggcccttttttatgctaaaaaaattcttgaaaatctaaacaaataattgggccttattgaacatacagtatttgtaacaaaagcaaccgattaaatgaatgtagctgtgagtggtcacaagtctaagcttggcttgcctgtaatcatcaacgctatgcgtgtaataatgttgtcttagagtcttaaaatgagtcatccattttaactcacgacccttggttgtagacgtgtagtagacttaaaaaatatttgtcatttgatcaagttggctaatagcctattcctaagtcacatcctaacttattctattgactagataatatacaaacatcataggaagcaaaactttaagcttaataagaagtgctcgatgtcataggtagccaacattgtcttcttgcttactgaacttgatcctctttgcttctctctcgtttactttgtattggagtcattacaaggagagttatatgtatcaaatcgcaaagagacatatgcgacaacgatcagaaaacaataattttacattatgcaaaacgcagatgcatcacatttttattaattcttcattaaaggttcaataccgatatgataaaaaaagaagcacatggacaagaactcttgccgtggccgtcaagtcaaaccaaaaagctggaaaacgacacgagtttctgtttctcctcctctctatttgttggctcagcttttctaatttccttatttctcattttccttttgtccattgcattgacacgtgtccaaccaaaacggttagcatcaaaacagaattatcgtcactctccttctcccacttggcctctccacatcattctttcttctcctttctccatgattctcggctctcgatctctatgtaagcagagaataaccaattcgttcttggagactgaatcgcacatcaagagaaattatgagacctttcgcctacttcgaaagattatcccaagctttccatgattatccttctctctccaaaattctcgtcgtctccaccatcaggtcagtgtaccatctcttcgccgattcatctgtatttcacgtttgaatttctctatttgaaactttgtacttctctataaatttactctgttctgtattctgaacgtatcctccttttgcttttgccataaattgatctgcgtcatgagacttttccttcgcaaaattttgttttcccgtgtatgcaacagagtcttgttatgtttacttgtcatatacgttagatcgaaatctgtgtttacgagagcagagctgatgatattcataatcaaaaatatagatg

SEQ ID NO: 3342 - DNA, 3000 bp, Unknown; identical to SEQ ID NO: 3330
  misc_feature (1)..( 3000): cDNA_ID_1395335_gDNA_ID_1620640_Annot_ID_47469 3000 nt of promoter + ATG

SEQ ID NO: 3343 - DNA, 3000 bp, Unknown
  misc_feature (1)..( 3000): cDNA_ID_1820402_gDNA_ID_1620640_Annot_ID_47470 3000 nt of promoter + ATG
acctgctgaagctcttttcctgtaccacatactgactttaaaacacgcttcacaccctactgaacaagagaactacttagtggaatatgataaaactagtaccctgaagaagatcaaacaagtaaagcttaccacttcgccaagagagttaactaaaaactgattaagcgctgggcttattcgtgcaccacccaaaaggctaagaaattcttcttgaggagatgattccagtcctagtagaaaagcaacaaagccctgtaaatctataagcaattaagcataagagaaaaacctcaaccaacaaactgatagtgacaaataccattatcaatgatcaaggtggaaagagaatgaaacttttcatgaaaagttttcattgcatccgcccattgtttgttcataactgacagggatgctcgaataacctcggtcaaatcttcaatgttagaagcttgttgagcaacctgatgaagctcatatttcctgagataaaaattagaagagataacgaatatgacagatgtaaggcagaaaaacagtgccaattattaaaggttattaaaatcaagatttaaaacaatgagaaggaacaaaagaaagaagcagcggcaaagtatagctaggtttggtgtattaccttttccaaaatatagatgtgtccattgcaaggcaatgtaaaccaggcagatcttgaacatttattttttcctctcttggcttgatatcacaatccttaagctctcctgtgcacattactaccagacggcaaaggtcttttgacagagcaacctaagaaatgaaatatacaaataattaatttgaatctaaagactccttatcatctaccaagctctcctttctttgtttccacaacagacattaacagtctgagacatgagaaataacgagaggccatttatatcatttggaaagcgtggctcttgaaaggatccaagtaccttgtaaatggaagcattaaatagtttgcaagaggcatgctcatcgagatgaggcacaggaagagacagctcgtgtatgttctgatcatggtaatgcaagagcagcagagcaaacacatgaaacaagagaaatgaagacttaaattaaaattatactaagagaatattgctcatagctagaaaagaaataagaaacttacaaaccgtaaactttactcctaacaatattaattacttgttataaacgaacaattaaggatctcagaaaataatttccatgtagaaatagtgttgaaattcattaagcatcctgcaattctatatgcaagcggaatggaaagatgatgaagcatcatcaaccataatacatgaatggataattacggcttactaattacttacagtcaaaagagcgacttacaatctttcctatctgaaatattccaaatatactgaagcatatgttcccatcacgatcaccagtgcaaagaatgttaaacttccggaatgaggtattggatagctctgccaaagagtcttcaccgtcatccatgaaactggagtcaccagctaccagtccaggcatctttggaggtcttggagcaggaggaaaaaaacgggaggtccggtcctcataaactgagaaattaccactttcatcctgtaaaccaaactctaagaaaaagtaagcacaagctcaaataactataagagttgggtgtgaaaaaaaaaactaagagaatagatgcttcaactgggattggtaaaagaaactttctcagtttgtcaacacaaatatagataccgcaaccaaacatgagttcttgtacaactagtcagaggagaaaacatacagtattggattgtccatcctcctcccagttaagacacacgacagctacatcatggggcttcaagttccttaatagcttcccattctgcatgaaaagagtattaccaactttttgatcagcatgatcctttataaataaaacataatactagtttctatacagcaaagtttaaaaaggaatatttaggctatcaacaacgtcatcatgtaaaacatggattagtttcaatctatacttgcctcaacatcgtgaagtgaaatggttccatcctcgagcccaacagctatggctttgccatcaggacgccaacataaagaagtaacaggctttcctataaaccaaaagaaaggaaatacacttagtaccagaactattgacaacctacttcaaattgcattccactttcaatttcagcaaataactaagttccacaaacgaattttcatcaagcctgaaagttaaggaatacaataatcacaaaccatcttgtaatcaaaattgtctactttaaatcaaacaaagtgaacaaaagagagaaactttaccaggcgaaatagtccataatctctgccaattgaaccgatgcagcaaaatcttggagtcctcagtaaccattgccagtaaatccttctccgggttccactcagctatcttaatctaatgaaattgaacatatataaacatctaaatccttaaaagcataaaaaagacacgaactttgagcaggagtagaaccaaaacctgaaaaggtatgggcttgtcgaactggagctggaaaggaatgatattttcttcctcgtcactcgccatttccgacattccgaggtttttgggattaggggttaatattctaattttcaatatctagcaaagctgtaggaaggaagtaactagagagaaacacttgagaagaaagctgtagagagtggataaaggaaagaagacggtggtcgccgggattcgccgatccgccgggagaagagagagacgcactaatgacaaacctggcgggcttttcttccaaattccaatcaaaatccctaatccggtttttggtttaagttcggttcaatttgtcggtctgagattgaaaacctggttcaggttttggagattttgactggggtttagaacgaaagtaaacctctctctgctgcttttttccagaagctctgacgaagaagatg

SEQ ID NO: 3344 - DNA, 3000 bp, Unknown
  misc_feature (1)..( 3000): cDNA_ID_1820394_gDNA_ID_1620640_Annot_ID_47472 3000 nt of promoter + ATG
agtttatgaggaccggacctcccgtttttttcctcctgctccaagacctccaaagatgcctggactggtagctggtgactccagtttcatggatgacggtgaagactctttggcagagctatccaatacctcattccggaagtttaacattctttgcactggtgatcgtgatgggaacatatgcttcagtatatttggaatatttcagataggaaagattgtaagtcgctcttttgactgtaagtaattagtaagccgtaattatccattcatgtattatggttgatgatgcttcatcatctttccattccgcttgcatatagaattgcaggatgcttaatgaatttcaacactatttctacatggaaattattttctgagatccttaattgttcgtttataacaagtaattaatattgttaggagtaaagtttacggtttgtaagtttcttatttcttttctagctatgagcaatattctcttagtataattttaatttaagtcttcatttctcttgtttcatgtgtttgctctgctgctcttgcattaccatgatcagaacatacacgagctgtctcttcctgtgcctcatctcgatgagcatgcctcttgcaaactatttaatgcttccatttacaaggtacttggatcctttcaagagccacgctttccaaatgatataaatggcctctcgttatttctcatgtctcagactgttaatgtctgttgtggaaacaaagaaaggagagcttggtagatgataaggagtctttagattcaaattaattatttgtatatttcatttcttaggttgctctgtcaaaagacctttgccgtctggtagtaatgtgcacaggagagcttaaggattgtgatatcaagccaagagaggaaaaaataaatgttcaagatctgcctggtttacattgccttgcaatggacacatctatattttggaaaaggtaatacaccaaacctagctatactttgccgctgcttctttcttttgttccttctcattgttttaaatcttgattttaataacctttaataattggcactgtttttctgccttacatctgtcatattcgttatctcttctaatttttatctcaggaaatatgagcttcatcaggttgctcaacaagcttctaacattgaagatttgaccgaggttattcgagcatccctgtcagttatgaacaaacaatgggcggatgcaatgaaaacttttcatgaaaagtttcattctctttccaccttgatcattgataatggtatttgtcactatcagtttgttggttgaggtttttctcttatgcttaattgcttatagatttacagggctttgttgcttttctactaggactggaatcatctcctcaagaagaatttcttagccttttgggtggtgcacgaataagcccagcgcttaatcagtttttagttaactctcttggcgaagtggtaagctttacttgtttgatcttcttcagggtactagttttatcatattccactaagtagttctcttgttcagtagggtgtgaagcgtgttttaaagtcagtatgtggtacaggaaaagagcttcagcaggttgtccttgaccatcttcaggtacagtattctttacattcctgaaaatggagttatagtttttagactaagtagcgtttatttatacagctaatactttttagatagagttttgtcacgaattaagctttctttttcagcctgcagcagaaattatcggattcaggataggtgaattaagaggtctatcgaggtggcgtgcacggtaccaaggcattggtttggatgagatgctccttaatgaagccactgaaaatactggtctgctacttgtacaagtgcaacggtttatgatggtactatcttctgttgtccaacaggtacagaggcgtgcagttcttttgacactgaaaatcatagttatttagtatgttggctgtcccatgtttcccacgcaatggtcatttcaatagaattataaactttttgtttcagttctcaaatttcttcaactggctcgtcagaagtataaagtatcttatgcaagaaccgaatgatcagcttttgtcatacaacaggtatgcacatgtgtttttatgttgttaaaggtgttaaagccaaatctttgcagttacatggtttgtttctgtggcagtgaactccttgtggtattcttgaagttcttatatgaccaagatcctgtgaaagacctcttggagctatctgaagctggtgatgacattgaaattgatctgtaggtcaactctttctatgtctgtgcttttacctaccttttctgatcacttatcttgtagtcgagcagaatctctgtcaggttacctaaaattttttaagccatttataaccacatacaataggggtagtccaatgtgataatacgaatgaaatccgagcaggtttctctaaccacactaaaacgaaattcagatatgggtaatgtgtgtgcgtttgtgaagcatgaagtccattgtatcatccctagctgttcattcactttgttttacttcatttcatttaaactcttaatgttttaatgtcccagcaaaaccatcggaagagtcaaagagttacttcagtttggagggttttcagagtgtgattttctgcagaggacattggctaaggaattccaacacatggagtctaggtattttctttacatcttcacttcttaaaacataaagtttcttaaaaatgctgcatcatggagcacaacgttggtaaactgatacgtgtaaaaggctatggtagagacaaaggtccgataccatggctgccttggcattttgaaatacaacatgaacaaccatatttatggtattggagtttacttgcaaaacaaagtgtgctgagtctttataatctggacatactttctcatggctttctctgactagacgtcaaattctgattttaatgctttaacaattttagcttcaag

SEQ ID NO: 3345 - DNA, 3000 bp, Unknown; identical to SEQ ID NO: 3250
  misc_feature (1)..( 3000): cDNA_ID_1820382_gDNA_ID_1620640_Annot_ID_47478 3000 nt of promoter + ATG

SEQ ID NO: 3346 - DNA, 80 bp, Unknown
  misc_feature (1)..( 80): cDNA_ID_2991393_gDNA_ID_1620642_Annot_ID_47504 3000 nt of promoter + ATG
gaattcgttagcgtttatgtgaataatcatccatcatcaggaaagatccgaagaaaagcgacgccgttttaaaggagatg

SEQ ID NO: 3347 - DNA, 2814 bp, Unknown
  misc_feature (1)..( 2814): cDNA_ID_2991393_gDNA_ID_1620642_Annot_ID_47505 3000 nt of promoter + ATG
gaattcgttagcgtttatgtgaataatcatccatcatcaggaaagatccgaagaaaagcgacgccgttttaaaggagatggataaacaaccggcgaccagttggagtatccatacccggccggagataatcgccaagtacgagatcttcgagcgagtcggatccggagcttacgccgacgtttacagagctcgccgtctctccgacggtctaatcgtcgcgctcaaggagattttcgattaccaatctgcgttccgggagattgacgcgctcaccatcctcaatggatctcctaatgtagttgttatgcacgaatacttctggcgtgaggaagagaacgctgtgcttgtgcttgagtttcttaggtcggatctcgctgcggtgatccgagatggtaagaggaagaagaaggtagaaggaggggatggattctcggttggggagattaagagatggatgattcagattttaaccggtgttgatgcttgtcatcggaatttgattgtacatagagatttgaagcctgggaatatgttgatttctgatgatggagttcttaagcttgctgattttggtcaggtgagattatgattgttactgattgtgttagttatttcattgtttgatgcacaaatatgagaaacctctgaatgaaaaatgcttggtttgcttgaaatttggaagagttagtgtaatcaagtggctagaccttatcatttagtgtaatctatgagtttctaaatgtgtgttggcttcttggttcatatacaggctaggatactcatggagcatgatattgtagcttcagatgaaaaccaacaagcttacaaactggaagacaaagatggagaaaccagcgaaccaccagaagttattcctgattatgagaactcacctaggcaagggtctgatggtcaggaacgggaagcgatgagtaaagacgagtacttccgacaggtggaagagctcaaggctaaacaggttgttagagatgatactgataaggactcgaatgtgcatgatggagacatatcttgccttgcaacgtgcactgttagtgaaatggatgatgatctcggtaggaactcgttttcttacgatgctgacgaagcagtggatgatacacagggtttgatgacatcttgtgtgggaacccgatggtttaggccaccagaactgctctatggatctacgatgtatgggttagaggtcgatctatggtcgcttggttgtgtgtttgcagaactcttgtctcttgagcctttgttcccaggaatttcagatattgatcagatcagcagagtgaccaatgtgctgggaaatttaaatgaagaggtctggcctggttgtgttgatcttccagactacaagtcaatctcatttgctaaagtagaatctcctcttggtattgaaggatgccttcccaaccattcaggggatgtgatatcgctgctcaagaagcttatctgttatgatccagctagtagagctactactatggagatgctgaatgacaaatatttaagtgaagagcctcttccagttccagtttcagagctctatgtgcctccgacaatgagtggaccagatgaggattctccgagaaagtggaatgattacagagaaatggattcagattcagattttgatggctttggacccatgaatgtaaagcctaccagtagtggatttacaatagaattcccctgaccttggcatttaaggtacgcagtcaaaagctctggctcgcttaaacacataaatcagtctcttctctctctctctttcttcttcaaagagaatgggtatataccaaaacctgacatgtgtttctttaggtcttgattgatgcaacactctttgttgtttgaagatcttgttacagaataccgcttagaaaattgttaacttttcgttaggacattgtttaggtatcaatggcggcaaaaacttttgaaattcgtttgctcattgatctcacaacttttttttgcgctttgtttctctcatcgatctcagttttatgtgtttatctctccttggcagagtccatggttgagcatcttgatcatcccgacttcccctgaattcgcctactttgtcaaaaatgtgttgtgtgtgtgtgtgtgttgttcctctctctctgcctccctcgtatgaaaatggtaacatttacaattggaaagtcggtgttagcctttagctattagctgaagagctagttttcttgttgcccaggccattctttaccctatttttcatctgaagtaacaatgaaacaaaatctatatatactcgagttttgctttctaggatctgtatttcttaattgtttctatattttgatcaattttgaacttttcatatcaagttatcaacatgtgtagtagcaacccttcaataatgagaccatggaataaaagcctatcctatatgtcatccagtttttgctaagataaattattttcagttacccaaattacataatcaaaactgatatcataaacaacaaaaatagcacacacaaaaatcataactgaatctgattcttccagaaatgtgaactgttgtttactataaaaagaagaaaaccagaaccacaatacatttgactccatgaatcagtcatactagtccaacatactaaatataaaacttaaggggcaatattgaaaattagacaaaagttgatagaccaaaagataaattaataacagttaccagtatctatcgccaagtctcccctagggttttttttctctgaaacggacatcgagaaattccaggagtgagttttgacaatcggagagaaatg

SEQ ID NO: 3348 - DNA, 3000 bp, Unknown
  misc_feature (1)..( 3000): cDNA_ID_1820550_gDNA_ID_1620642_Annot_ID_47506 3000 nt of promoter + ATG
ctgttgtttactataaaaagaagaaaaccagaaccacaatacatttgactccatgaatcagtcatactagtccaacatactaaatataaaacttaaggggcaatattgaaaattagacaaaagttgatagaccaaaagataaattaataacagttaccagtatctatcgccaagtctcccctagggttttttttctctgaaacggacatcgagaaattccaggagtgagttttgacaatcggagagaaatggggtcgacagaaaaagagcagacgacgcaacatcacccgcctcacatcagcagtctcgtcgtacgtccctccggaagcaacgacagagaagacggccgcaacgccgccggagactatgagcccggagaagtctctcgtgaccggccttcgtttaatcgctcggatcggtataagggtgacaatggtggttcgtatctcttctaaacattccagtcctcttttctcctgagtttctcttctcgttattggtttcgatttctgaaattgggggaatgaagaacagaactaagtaggcatcacttgtttctttcactacaaatgcttgtgattgtctacgtcttagtcaatgttttatctcctttgacttgtgattccgatgaggggaattgtgtgtagttatctcgtgagcatttggtgctatcttaaaggtttttgataatgctctcataactataacaatgctgtgtaaattgcaaatgagcattgttcttgccttgaagtacttaggtcttgatgtttacataatgcattgttttcgtaaaagatgcattatgtaatgtatctaaagagtatagtgactcttagtgcgattatacattgctacagatgcatatcaacattccctgttcagttcttagtgaattgtttggtatatgctctgagaatgctgacaccaacggacttgtaatttcacagtgtcagtgctccattttattggtctgcaaagaaaatgattttttgaactttgctgtctgctgatgtatatttgtattatactgtagttgacttagtcttgttctactggctactttttgtgtgtgtgttaggacatagaactcgggcaagttctagctcaccaggccgtcgtggatatgaagatcacaagcatggctctgatcttaatcattcaggcgttccacctcgtggccgtgagttaagcagcagaagggaagcacctgggagacacagagactattccccacccttagctagaggtggagctggtgctcgtccttatcgaagaggtttagatgggcctgaacctccacatggaagggatggcatgagcagaaataatatatcaaaggtgcaaccaagagaaggagattggtactgtcttgatccattgtaagtatccctgctattctaaatttctacaatctcaggttattctatatgaactctatagaatattggtatctcagaacctagagaagtttctaaatcccatattatgtttgttttgtcatgaatacagatgcagaaacttgaactttgcgagacgcgagtcctgctacaaatgcaagaggcatcgttatgcaccggctaatagtcctccactgcctcgccttcttcctcctcccatgaatcattccccaagaagagactttaatggctacagatctcctccgcgtggctggcccagagactacccgccgccaaggcatgaccatcccacatggagagacagagaacgagaccgtccgcattactcagaccatgagtaccctcctagcagaaggatagcatctgactgggcccatacagagccgctcccaaaacctcattatgacagacgaccacctctcagtccacctcgtggtggcagatggggacgagttttgagagagaggagcagatccccgccattgagagatgttccaccaccgccattgagagatggtccaccaccgtcattgagaggaggcggtccaccgctgcacagagattaccgccgtgacagtcactttgacagagaaagacgagacgatgggcgtggcggcagaggcagaatgggaaactcttactgatgcaaaaactgtgtatgtcttgggattttggtttagacagttcaaattttcgcggaatgtgaccttgtattacaccttagattctttgttcttgttagcaaaactcttgtgccattagtgcaaaaaccaaacaaatgagaagcaattttggtgctctttcgtaattaaagaaacatttagggccgaaacaaaaaatatacttcttcttaatattccccttccgtttcggcttccgcttgagaaggtgcgtactatgagttcacgagtggtctatctacgtgtcagttttttattgggtgatagctaaatacacgcatattaaaagggctttttggatatttgcttcaccgtagatcggacggtggaaagagacaaaacctaaagcatttatgaattgacatcgttggatcatcgtatttaacaagaaccgtacgatgagattgccacgcaaatctaaccgtcgaatataatccagaaaattgaaatttcaaaacatgttagagagagggaggaggagagatggtgtgagagaagaagaagaacaaaaccgaaagtatttttttgtgcttttaatttttgtttttaattttaccaaattcctctgagggcttcttcttcttcttctccgtcttcttcttcttcttcttcttcgtttagagctaaaacccaatagaaccctaattctcatctcccttaaagcttatcccttttctctctctatatatatacgcggatcaaattcaaagtctcagtttttgagctttcttaacagccgccgaatcgatttgtgattttcccgctccggagagattcggatctggatttttcgagctgatttgtaggaatttctcgttttctcgcggtgaattatatcaactgtggaaaaaaggaaaatttctgggtttttttggttttggagattggaaaatctttgagag

SEQ ID NO: 3349 - DNA, 3000 bp, Unknown
  misc_feature (1)..( 3000): cDNA_ID_1820546_gDNA_ID_1620642_Annot_ID_47507 3000 nt of promoter + ATG
gtaacttaactctagtgtttttgtttagtggagagagtagtgaagagtgttaagtacttgggggagatttatatagaagagtgaagggttaaaattagggttatagagtgacagatggataagttataaatgaatgttggaccatctcatcacctatatgttcgatgcagatccctccacgtcaagagttacaatttacttctcttatgtatacataaaaaaaaatccattttgttctcttgtaaatcactgatattagttagaagttacttttgacatgatatatgcatgttgtaatgttctatcttcttctatatgtctataattgtttcggtaatttcctggcatagatatggattaattcatcggatactctatttcgtcgatggattctttgtggtaggtaggagggttataaaatggactggagattataatgagattaattaacgtttttccatgcaattttgatcgtatgttttttcttgtcaaataaaaaaattagagttaagagatgtaaagttcaagtgtaaagttcattttcttgcctcactatttttggtgaagtaaaaaaatggcgctcatgggaatttacacaccaaaagactcgactcacattttgtttctccatattgatatacaaacgtattttccgtcagtttacgtacgcagagtatacctcaaattaaaatgcttaaaatcagttctcataatccaaaactctataaactttttgacaaaaagtaaagaaataaaccgaaaatgttaagtataaatagcaccttattaatgtacatatatgtatacactacaagtgcaataaatgagagcatgcagagcatgtggctgcgcccaaaggccaaagttagtagaacatgtaaatgcattaaattgacaggttgggagacaaaaagattaatatggaagattaaaaaaatctttcaaatccataaagtaaacagtatttctcgagaaatgatgatgtaataagtaatattaatacaaaactcgaagctcgtaagttaattggtgattagttgcgtttcttaaggaaattgtttactcaggaagaaggtgaggatgacaaatcagatgtgttttgggtaggaggcaagagtaatgatatttttatttgagttatacaatagtcgagtagatgtattaagtaaaaattgatctatgtcaaatttgttctttgatacataagagatcaaacaattacaatcttgtttagagtttatatatagtgtcggttttgaaatacacagttttaacttctaagcaaaataagaaacaactaagacccatataatttttacaaatcgcgaattcatattaaacattgcaactttaaatggtactagctagttcaaagattagagtttttagtcatttattgacgatactgaactataaacaccctaaaacctggaaaataaattgtcactgaaaattaaatgatcacgagatttcgaacagaagcaatattattctatccaaggcattatgtatctctctgagatattaagaatgacagctgaagccagtgaaaataagttgttcgttgggcctttcttgtagttcagttatttcacctcttcaatgctgttttgtcttcatatcaaaacatattaatatactatagactgtgtaaaaaaaaaaatcatatactatagactatatagtctctctctcttctcttgtgattaatactcgtaagttataagtatgaagcttcaatttaaaatgactttacatttctactgtggtacagctaagagaatagcatacttaatggttgatcatttgatcttgatagtttagtctttgatgtgttggcagcaaatggtatcggactaaaaccgaatttaatctacaataatttgctatcgattcaaattatttgaaactattttagtcatttgtcaaatcattaggctgaaatcgtttaacagaaaacaaaagattgtggatcttatatatactaagtactgaatatacaaaactataaattttcaaaccaacaaatgttagtggacattttcatataattatatttgtcatggtacattatatagcattattcggagaaaaccacaaacgcttatagatatatttgttcacatccttggttttgttcgggcttagatttgctgaaagtaagggtacattaactattgtatacgatcttaatcgtctgaataaaaattactccattaactataatgttaggtttggttcttattggctgcgaatattttattttaattacttgtcaatataatgttttttttttcttaacacttacttgtcaatataatgtttaattattattttatagcacaaacttatttttttaaagaaaaattataaatcattataatattttgtgattttttttttattttttttgtcgtattttgtgatttatcttttactttaataaagtgagtttttttatttattttttgttgttgttgtaataattgaattaagaagatgggcccgtacatggctcaatatacttgtcgttgtagtccactattggcctgcaaatcacaaaaatgtattaagaagcccaatatttgtgggttcgaagtttaaactgaaccggtataagttgagagttaacgattttgaatttggtaactactaaaccaatatctaaaaaggaactctcaacttgtgatgttatcttctaaattattttgttaccgctctatgtttatcaatcgggattcatatagttgaatattaactagctggacaggccccaaacaaatatgaatgcggccttgttgaccagaagatttggttgcttatgacgaaaatgacgaaacaacaagttaggaaagaaatatcgatcacgttacaaatgtaaactcctgatttatcaaaggccccatttttatcacaaaaccagatctttatccaattttgtcactcaccgaataataaagctttcatttttcaatctcatcagagagaaattaagctatg

SEQ ID NO: 3350 - DNA, 3000 bp, Unknown
  misc_feature (1)..( 3000): cDNA_ID_1820542_gDNA_ID_1620642_Annot_ID_47510 3000 nt of promoter + ATG
gatgaagtcattttgatttattttttttttttttttttttttttttgtgtgtgtgttttcctgcttatgaaatagaatagttcaaaaccttgcactatataaatatagagtagtttactatatatcgtttctcagaaattcagaatatatggattaatgtttatttatatgctatatatgataggatatgttattgactgagagtcattatattctataactttgattatttgttatggttatttttttcctggtcaacttctcttttgttttaaaatttaatttaattgataattttgtttaggtaagtagtttatgaagagacaaactgaatacaatatattttggaaaaaaatactgcaaataaagagcattaatttcgttacagtttgttactattgcatttcaacgaatccaatatattgttattaatttcaataacgtaacgtaaaactctgaatactttaccagctacttttatatagttaacaaaaaagtatgccaatactgtatatataactttagtttaagtaaaactaggttaatgaaagaaacagttactttaacatatttattactttatacattaaatttattcgattatagatttcaaattatagtactgttcataatcacaatctaaaccacaatattaaaaaaaaaaaaaatcacataataaactcaaaactaatactagcttacaccacagtataaattagaatttttttatttttaatatattatcacacaaccatctagtttcatcatttaatgtgaccaacctttcagcttcaattctaattaacctatgatcacgtaaatgatttgcagcatgactcttcattaatgcgatgtaataatatcaaaattaccgtttcactttcccactataaaaagaagtaacaataaaaattcttcctaaagtttttgcttgcccggaaaaaaaatgaattacatcaaacaatttatcttggcaatttgcttttatctagtcttaacatgtcaagatcatgttttagcccgcgacaccaccacgagagacatcgtagtcccgaagatttccgagtggcaagttacggttgctaacggtttgaccactggtgaaactcttttcatccattgtaagtctaaggaaaacgatctaggtgatattaacctgaagttcttagatagattttcttggaattttggagaaaatatgcttcactcaactttgttttggtgctatatgagcaaagatgatggtcatatgaatgtaaaagtgttttgggatgatgttattctatttcatagatgtgattggaagaattgtgtttggaccgcaaagaatgatggcctttatctttggaattctgcaatcggtgaagatgtactgtcggagaaatggaaatctggatggtgaaaacatatttttgatttgttggtaattttttaactattatatgtatctgttaattttggcaggcaaaaaaaactgaagtaatactttacttttgtcataaattctctcttatttttttgtatttttcatcgaagatttttgttttcttcgatcgtgtcttggattcaattgtttttggactgttcaagacaatggtttgctgctttataatccacctcatcatagaggttttagattgatatataaaggggattcaccatgattcaattcattgttgaagtcgagagatctttgaaagtttattcgagtataatccatattaaagaaaattcaaccatgtattttgatcacgatatactaataattaattatcagtatgagattttatgtatttgttatttatgggggactcatgggtcaatcatttctaagaaagtatggatcatggattcgttttcgttcaacttatttatgaccatatatacaagtactaatggtgacactagaatacattgtatgacaatagtctcttgaaaacaaagtcaaagcattaaatatagagatcggagtcaacaatttagagtttatagaattaaaaggaaaggaggataagaagaagaagaagaagaaaaacttagcaaatatatgaacaaatatataaagacattgtaacacatttacctctgacataagtttttttacatttgacaagaaagattttagaaaaatgggaaaatctttgctaagtttatttgttatcctcctttcgtttgattctataaactcttatttgatgcctcctctcttcagaaaattcaatgtccaaatagtaaatcaacttgagtttcacaagatactgaaagttcattgcaagagcaaatctcacaatttcccaatcacatatcttaaaattggtgaaagttttcagtttaaatttaaaatttatccaaaaactcagtattggtgtaatttatggcaggtgagaaaacacatttttaacttttttatacatttctttacatattgtcatgtataaaaattaagatgagtatcagtgattgtactataaatttttgaccaactttttatttcatctttgtttgttatagggaccaaattacaaacaccatgtggtttttgatgcgtttcgtccagacaaagattttatagatggtacatgtactggtatgcatcctaatgtatgtagatggactgcaaaagaagaaggagtctatgtccgcaacaaaaagttcgaaggagaatatttcatgtatacatgggatggtccatcaaaacttggaaacatctctccagtgtctgcacctacaagtgaatcagaattggactcatcagtctaaccccacatagatctaaaaaaaattatatcatgatgtataatctttggtatcaataattgtatgttggtttcaattacaagcccaactattgtttgggcctaatatttatatatgggccttagtcaaagattaaaaaaaaaacatttcttcttcccaaagccagaaaatatcagtacaagagtacaagagagaaagaaaggaacctcgaactcagagaaattgagagaagagagaagaatc

SEQ ID NO: 3351 - DNA, 3000 bp, Unknown
  misc_feature (1)..( 3000): cDNA_ID_1820534_gDNA_ID_1620642_Annot_ID_47512 3000 nt of promoter + ATG
tttcggtaatctattgtgcaaacatcggctaaatagtaattacacaggttcttttaagttttaacaaatcgaaacttacttcataatgtgaagagaggagataattcaaaagttactaagtgtcgcttagcgcccatgcgagacaaatggttctgtaaacgtcaatgtagccaccgaacagggctctgcaagggactcagctgcttcaccgaagccttcaatggctccaacgttctccctagctttcacaatgtcaaacaagttgtttggtagctgagccacaccgtccaagaactggatgacgctcgacatgcttggtctgacggctgcaaccggatgcgaacagaacaagccgagcttcagaaccagtgctacttgctcctcaaggtacttatcatcctgctttaccctctcatcaaccacttgcaatatgtcatcttcccaacaatctagcacccaatccgtaagaaccatctcgctcggcgaagatgctcgtggcaagacgggtcttcgcccgcaagtaatctctaacattagtattccaaacgcgaatacatcagaacttgtgcttgccttccctgttcttgaaagctctggtgagatgtatccaaacgtaccagccacgttagaggtttgaggatcaaacccgtgttcacagagctttgcgagaccaaaatcaccgagctttccgttcatagaatcatcaagaagaacgtttgctggcttaatgtctctgtgaataatgacttgaacccactggtggtgtaaatagcagagaccagaagcaacatctttgatgatcttgaatctttgtgaccaatcaagactctgttctggttggtggtagagaaacttatcaagactgccttttggcatacagtcgtaaaccaaatagagttctcctttgcgcctacagtagccaagaagccgaactagattaggatgtctgagacgcccaatggtcgcgatctctgccacaaactctctcattccttgtcttgaatcatgagaaactttcttcaccgcgatgtccatgttagacgtcgataatgtacctttatatacttttccaaaccctcctttaccaagaagctcgctgttcctgaaaccctttgtggcaatgtaaagatccttgtaagcaaacctatgtggaccaaactgaacctcccagtcttcaagaacttccattaacttcttccttttcaagaaaagcatatagcttatggtcaagaagacgaggatggcgaggctggttaaactcaaactaatagccaagatctttttcacacttgtactccgagagtctctaggaagttttggaagacgagaaatatctatatttgaagctgtcccattgagcttgaaggtccaaccaagaatatagtgagatgaacgaagacggcctgtggctgaagtgaagccaacatacatagagtcgaaaagatatggagataaatctttggttagagaaagcaatggaatctttggcttagggagatgaataggatggattgtgacgttaagttgtctccttgaggaatcatattcaatccaggcttgtataggtttttgatttatgaggcggatgtttttgaaagtaccatcatcgtcttcgtaataacctgctgtagaagctttctctgagctcaagctattgatgtcaataccaacatggttattatccatgtcatcaaattcttgattttgaaatgtatcaaactcaactgctacaatatgattagagggatctccattgtttgtcaaattaaagagccctagatattgtgaggatgaactatagggcaagcctttggtgggagagatgacaaatgcaagtccatggccatcaagtgcattaacattagagactatagcgaaaacaaaggtagtggagaaagacgaaacggtaccgtttggtgagttcttgaatctaactggagagttgtagaaaacgtgaccatatgagaattcagacgaatttgtgagcttcatcaagcctttggagttagtaattgcaattccagagttgtcgtacaagtaaccattaaaaccaaactctccttcttcactctgagaaagtgctttgttggagaagaattgcagcaccagaagaagcactagtacaaaaaatttcatcgttttgcaattcttttttcctctcatgaatgatcttaccataagtttttctttttttggtcaaaaccatatgattataatatgaaaaagatctaaataggctttatctgtatgacttggagggtcaaaaactaaagtcttttagactcttagtaataaaatgttgaataagtcttgttcgacgcctcttattgatttattaagaaattgaccagcatgaaaaggaggcattgctactatgtaatgtctgggggggagtttcacatcgatataggctattgatgggccttagtatgaagcccgtaagcccatattgaagctcgagtcttgatggcgcaggagagagagaaaaagacaatcacctgtagtaatctttgaagactcttatctcctctatccaccaagagagggaaaacgaaataaaaatagcacaggggagagacaaaatgagataaggatttgaagcctctcaccactctcctcgttttcgcttcgtgcttatttgtcaaacgcgaacatttcaccgaaacttagcgacttttctcgctttactctttctgggagcaatttctcagagcataggcgagcttaaaggtagctccttttcttagctttgctcaaatgggtttcttagttactcttcttatgtttccgtgataagatggttcgaaatttactagctttcttaatggaaatttttgagtttttctagttagactacaatgaaatttcaattcgaaattgagaaaaagagtggtccttttcttcatatgctttcagattagtctgtgttgttgtctgaggaaagcttgtaattttgacagtgtgtaatggttttctatgtgtaggtgacagttcttagct

SEQ ID NO: 3352 - DNA, 3000 bp, Unknown
  misc_feature (1)..( 3000): cDNA_ID_1820530_gDNA_ID_1620642_Annot_ID_47513 3000 nt of promoter + ATG
tatgtgtcccagctgaagtaacaagtgaagaggttccctcgtcagaaactcccaaggtagtagaagaagaagtgatagctaccaaagctgaagatgattcgccggaaaaagaagagcaaacggaaacacttgctgcagcagctgaagctgaagaggtggttcctccaattccagaaaccaaaagtaagttgactaaaaatcactagattgtaattttttttgtgtgctacttctcatattggtttattatgatcagtatcagtttatcagaatcatttaaaaagattatacaatgtttgtatcttagaactctatccaaggtaacatatacagctaaagcgttggggatactccaaattatagtagagaccttaaccacataaatagtcacatgaactacgtgttctaaaaaaatccagaataatcaaattcatgaagttttgtttgatggagcaaaaggtgataagaaacatataagaccacaaagataaagacattttagttcattgtgtaatgattactagcattgacccttttcttctaccggtgaccaggtgaagaggaaattgttgagaactctattcctccaaactcagccactgatgaagtttcatctccagaagctttagcaagtgaagaggttgagaaggagcaagtggttgccgaaacacctgttgatgaagtcaagactcctgcacctgtagtcacagaagcttcttctgaggaaagtggcaacaccgctactgctgaaagcatcaaaggtccttcttttgtccatcctttacctgttttacttcctgactcatgacctaatggtttatgtgagattccatctcctaacacaaaaatgtaacaggcatttcaccagctctagtgaagcagctgagagaagaaacaggggcaggaatgatggactgcaagaatgctctttcagagagtgagggcgatatggtcaaagctcaagagtacctccgcaagaagggactagcgagcgcagataagaaagcaagcagagccacatccgagggaagaattggtgcttatatccacgacagcagaatcggtgtcctcttggaggttaattgtgagactgattttgtctcacgtggcgacattttcaaggaacttgttgatgatctggcgatgcaggtaactccaagtttctagctgaaacattttcttcgttttgctataactgagaatataatttgacctgacatgtaggtggctgcgtgtcctcaagtagagtatcttgtaacagaagatgtttcagaagaaattgtgaagaaagaaaaagagatagagatgcaaaaggaagatcttttgtcgaaaccggaacaaataagggagaagatagtggacggtcggataaagaaaaggctagattcacttgcattgcttgagcaaccatacattaaagacgataaggtgatagttaaggatcttgtaaagcagaggattgcaaccattggagaaaacatcaaagtgaagagatttgtgaggtacactctcggagaaggccttgagaagaaaagccaggactttgctgctgaggttgctgcccaaactgcagctaaaccgaaagctaaagaagagccaaaagctgaagaggccaaggaagctgttgcaaggtgagaaattttttatagtctttgctcttcttgacatgaattcttataatgttggctatagaaagattcaaactttttgcaatacggcactgcagcccaccaactacagtggtttcagctgctcttgtaaagcaactgcgtgaagagacaggagctggaatgatggattgcaagaaggcattggcggcgacaggaggagatcttgagaaagcacaagaattcctcagaaagaagggtctctcatcagctgataaaaaatcaagccggcttgcatcagaagggagaatcggttcgtacatccacgattctcggattggagttctgatagaagtgaactgtgagactgactttgtcggaagaagcgaaaaattcaaggaattggttgatgatcttgcaatgcaagcagtggctaatccacaggtaagaaaatgtcctcagctgaaacaatggcataaattggttgttggtctctgacctgaaatgtctacgtgcaggtgcaatatgtttcaatagaggacattccagaggagataaagcagaaagaaaaagagattgagatgcaaagagaggatcttttgtcgaaaccagagaacataagggagaagattgtggaaggaagaatctcaaagaggcttggagaatgggcattgcttgagcagccttacatcaaagacgacagtgttctggtgaaggatctggtgaagcaaacagtggctactcttggggaaaacatcaaagtcagaaggtttgtgaagtttactcttggagaagataactgatgagacagacgaagtaaagttttcaaataagggagctctgttttgtgtcatggagtttaaagtaaaagtcttcctttttgttttgtagacaaaatcttcagtattcacattttgattagtttttaatcaaaacctgtaattttttgttcatgaaaatatgagatttgcattatataaatgtgcatttagtgacaatgtgacattatacactaaattcggagaaagattggttataatgaaattttaaaccttattttaaatagaagtttcaaatgaatttccctgaagaagtgaaactaaataaaataattttttgtttccttttggatattatatctaaatataaaaatcaaaccgaccgaattactacatacactacaataatgtttttttccttttataatttgtgggctaaaaaaggtcggtcggcccattttgagcccaataaaatttagggatagataaagacataaagtaacgaacgatattccgaggttgtcatttgctaaggaaaaaaaaaacgaaaacgtgtgtctgtctcttctcgtagcgtctctcaagctcaggttcgtgaacattccaatctctca

SEQ ID NO: 3353 - DNA, 3000 bp, Unknown
  misc_feature (1)..( 3000): cDNA_ID_4262264_gDNA_ID_1620642_Annot_ID_47514 3000 nt of promoter + ATG
gcgttttaattactgctcggtttatatttatttgatgtttgtccaacagttgtaagtccgacattgtcagaggatataaacgggatgtcgtttccacagagtgtttgaatgtagtttttatgttataaataacaaaatagtttattatgatgaaatagatagttaaaatataagtaaaattgaatgtgtatgattaaaattttatgtaatataaaaattactatattaaatattagaaaaagtgtgtagattactatttactatataaagtttaaatattattgataaatatttaaataaatttatatcatacatccgcctatttaggcggccttatctagtatatatatatgagggcgtgtgtagagattatactcagccaccaaacgatccaatattatatatatgtgtgtgtgttctatatgtagacagcgccgaaattaataaccgcataagaaaaacaaaaccggcagttaccattatgcggtttaatttgatgacaggttaaaaaattatatcgatctaatttgatgacaggttaaaaaattatatcgatctaatcatttatagccatcggattgattcgatatggtaggttatgagttataatggagcatgaggttcttgtatggatgttaaatcaaggagggtaagtggcttctttgtctaaagattcacactgtctctttgttctttttttttcttcttttttcgattacgacacaaaccgatctttcactaacgctgtaagtacggtcgtccactgatttaacattttaggtttagtgtaattccattcgatcctcaactaactacatagttttcaattatagtcataattattatgcttgatgaaaagcagaaaaaaatgaaaaaacattaagtataacatcagtactaaaaataaataaaattatagtatgtatttgtcgctcacacaagtctataaacaaacattcaaaaccaacattttaagttacttaagctgtctctcgctagtataattaaaccctagagttacttatgatgtctcttgttaatacagtaaacccaacgtggccatatataataataacaataattaaaaccgccacatgtgatgcaacatccatatagataagtaaatactttgggtaactccaactaatctttagattttatagccttcatatgatttctatagtgatagacacatttttactaaagattcgtatccttagatagctttgtaagtaactaatggcacgattagatggtgagttaaggtggaatataagttgagatgtcccaaaaacgacaaaaaccttgcccaaaaaaagagagagacaaaggaaaagttaaagaaaggcaccttatgattaagacactcgaacttacactaaaacacaaatctaaaaagctttagataagatccaaagatggatccaccttagaggcaggctttaaccaaattactatgcatatgatattttataatactgcaacttacaggtcttttttgtatgtcttcttgctatgtatatacttatcgttgttacaaatgaatgacttaatcaatacagccaaacaatatataaatcactggtagaatataaatgacaatatttcatatacttcttctcatgttatattgttatagcatcagatatattggtttaataaatatgggttaaaatatgagttgaaacgtttaaatgtagattgagtcatccacttaaaaaatatacttggagatagattagatgggcataaatactatcaaagttaaatctgatttgatcatttaaacttttattaatttaagactatgatccaagtatcaaagttttactaataggtcaaattgtaatgtactgtagcatatatgctcgattttgggaaaacattgtctgataaaaatgaaaagtggagtgtggagaccacaattctttttgggaacactgctcaatattgctactgcggctaagtggcaaagagctacccctactgtttctttcctcttttcatgcttctggtggacccaaaaaatgagagcctatgggcccaaaactttttcgagattctcttctctgttctcacccccaagcctaaatatcatcttccatcgcaattattggcgacttactaataatctccattcgttagctaaactactagtgaatttatacaagtttgtgaagtttaaactccaatacgtttgatttattatagaatatgttatgctatcatgcacatgattaaatggttcaccgttattagattatcattatcatcactcaatttcatgagtaaagattggtttcacgagctaacttatgagttatatcaaatcgtctagtgaatctaaaacatataatgttaagccaaactaaacagaattagtgactcattacaacatctctatacatatatcaaaaaggaattgcatacaaaagcgtattttagatactaaatcgttttgcatgatagcataacatgcacaccttcatgagatagcaaattgtttttttcaaatacaaaagtaaaaagtaaaacaaaacgtggaatacgagagtcgagacaagggcataataggaaaggtttcaggacgctttctgtgacctgtcggggagtagatgtctacacaaaacgtaacgtgtatatacaatacattcatgtgtaccattttcttaaatcaacattttgtgtttaaacccgccaaaagaggaaagtacttacttctaattacggtttatatgaatataaaattacgtatactacttccgtccacttttggaaaataatacgattccaagaaaaaagaagattaaaggtaaaaaaataaaaaaaaataaagctctctcacacacctttttatcatttctcattttcactcacaatttgatctcatctttaaatttttttgtttcccatttctctcagaaagtgttctgttctttttttcttttgtaatcactaaatgcttcaaaagtttgtccacaattatatttgaaaaaaatg

SEQ ID NO: 3354 - DNA, 3000 bp, Unknown
  misc_feature (1)..( 3000): cDNA_ID_1396981_gDNA_ID_1620642_Annot_ID_163080 3000 nt of promoter + ATG
tcaagactttgtaactttttctattcaataatgacgttaagagaaaaagaatttattttcagttcctcttctcttactagtttctttttatagaaaccaaaataaagttactgatctaatttttaaaaagggacaattgcatgggaatgtcaatatgattacgcaaacaacttctgcagataaaaatggtttgcagaaaatggaaagcacctatccatcatagctatcttggaagtctcgttatttcaaaaatatttctctcctttttattttcagctacttattaattccataatatttttatattaatatatttcaaaaaaatccagattttatttctatttttagaactataaatcaagaaattatctatgtaatgttaaattcctatttttttttagttattatagaaactgaaaatggtctaattcatacgaagtcgatttttctcacggcatattatgtaaaccatgaatgtattttattagtgattcgtaaaccctaagtttcatatacaataaaaacaaaaatggaacctaaattacgaataacctttatcactatacgataaagtataaaacactaataaatggaccctattacgaccaatcgtaccaatatttggtcgtatctttcatttttatttatttacagatttgtaaattttaaaatagacacttttgtgttggtcaataaaaaaatagactaaaataaaaaatgtatttacaagtgaaaccaaactaaaaccattatgagaaagaatctcacaaaattgaccagagtaaagagagagacaaaaatgggtcgagcaacgaggtggttcaagggtttgttcggaatcaaaccttcctcttgttccggcaccgactccggcactatttctaaccgccttgaccgctctttatgcgacagctacgagactataccacctaacatctccgagaaagaagctgcgtggctaaggtccttctacgcagcgggagaggaggaaaaagagcgtagaacgcatgcaattgcggttgctgccgcgacagctgctgcagctgacgcagcggttgcggcggctaaagcggctgctgcggttgttaggctccaaggtcaaggcaagagtggtccgttaggaggtggcaaaagccgtgagcatcgtgctgctatgcagatccaatgtgcctttagaggctacttggtactaacacaatttttcaatttttctaatcatttcaatatttttaatctttatgtatttgagccgttacatttttgtaacgtaaaaggcgagaaaagcgttgagagcgttgagaggagtggtgaagattcaagctttagtgagaggttttttggtacggaatcaagcggcggcgactctccggagtatggaagcacttgttagagctcagaaaactgttaagattcaaagagctctccgtcgtaacggaaatgctgctccggcgagaaaatccacggtaacacttacttttccggtttggccgtaccgagtttatttatttatttttatattaagcatacttagcaatcaaatctgtttagagttccataatttgatatatcaaacatagagatcattttaaataattttctcgggtcaaaagaaaataatcttaaaatgtaaaaagattgaaactgtttaacctttatgtaaaaagttgaaatcttcttaaactagtttgtaagcagataaacacttttttaactaggctgtaaaagtgttgatgtaactttttacaggaaagattctccggatctttggagaatcgaaacaacggcgaagagacagctaagatagtggaggtagatacagggacccgacccgggacttacagaatccgagcacccgttttatccgggtcggatttcttagacaacccgtttcgacgtacgctttcttcaccgctctcgggtcgagtcccaccgcgtctatcaatgcctaaacctgaatgggaagagtgcagtagcaagttcccgacggcgcagagcacacctcgtttttctggtgggtctccggcgaggagcgtgtgctgctctggtggcggagtagaggcggaggtggatacagaggctgatgctaaccggttctgtttcttgtcgggggaatttaactcgggttacatggcggatacaacgtcgtttagggcgaaactgaggtcgcatagtgcaccgagacagagaccagagagtaatgcttcagctggcggatggaggaggagtatcggcggcggtggtgttaggatgcagagacagtcgtgttcgggtgtcagagaagctgtggtcgggaatatcgagaggcgtaggatgcgttggtgattcttatttccataattattatccgtttagttttggttaattaggggagtaatgttattaatttaatatagtttgatattattatagttttctaagtttcactgacaaaatttaaaattgttgtttcttgtatgctacatattctatttctatgtaagttttttgctacggataatttacatttttattagcttaactaaaattatccgagtttttttatattcggtgttgagaaaacggtactgatcggttagtaaacaattattggttcggttaaatataccaaaccaatattatcggctacaacgcatgcaagagactattttgtaaacaaccacttaaacataaacacgtgttaacgcgattcacatcaacgcgtgtggaaaaaggaaagttgcttccttcgttcttaatcccttctctgtgaacacaaaaacgcgaaataacaaacaaaaaccaatacaagtgatttccattatttctcgtctacgtatacaattgatcttcccccatctccaattcagatttggacagaggtattttttgatccgattcttacgaatcctgaatcttcctcgtagattaatcgatcgatcggttcttaattcgcggaaaattgtttcagtaacctgtgatcgtgtcggttggggtagaagagatcgaagtgggagcaaaatc

SEQ ID NO: 3355 - DNA, 3000 bp, Unknown
  misc_feature (1)..( 3000): cDNA_ID_1820514_gDNA_ID_1620642_Annot_ID_163074 3000 nt of promoter + ATG
ttttttttgctctagtttatgatatttttcctagttcgaaaatattatatgcatgtgtgtatataactatatattgatagtctgtgaggtgaaggattgagcaagttaaaacttatataatgcaatgctctttcgaattcagcattcgtcagtcttatttgacgcgaagtcgaatctattttggaacactagtcagatgtacattattgaggacccatatgagaactacacggattaaaaaaaaaaaaaaaagtcttgcattaactttgaattttggtgaatcatcacatcatataaaattataaatacactatcaccggttctttttacccgtttccatgttaaacatggggttcataatattcatatatgtacactattgtcttgtaaatttttggtatggtacttgatcgtgtttcatgcatttataatcagtcgcatatcatgtacaatagtctccgctgtttgggaacaaaaaatatctagttgtctagtttatggacgaattacaagcaacgtaaaaatgatcgtaaagtcaaactagatgttgtttacttgttttgttcttatacacacaaacaattaaatatgcttttttttgggaaaaaaacgctttgtttacgcttgtgattaggtgcatctggtataacaaaagccttcgatagtctacggtcattttttgtgtgcataaatgtaatagaatatatatataaaatcgttgtgatgacaacaaaacagtgtcataatcgattaaagtaaactgtcatttacgattctagagatcgtaaaattatcaacgatagcaatgccaataatgttatgtaaccatatatactggagtatttgttttgagtaatattaaagataattatgttcagcggaaaaaaactaatgtaattaactaaaatcagataattgttaatgatgaaaataagatctggataagattttgaggggtcgacatcattagtctcctctaattgttgttcgaaaattaatgctcaacttttaatgtatgtactaattgattataaacattatattagtgtttgaaatcaccttaaatcgatagatagaaaaatcattaaagttttttcacgtctagcatttatcaacaacacacatctgcaacattttagccgctccacaatgtagtccgttccggtttttatacatggttccggtttcatccaaatttttacagttattaatagtttatgaatacttgaacaaaattaaactatagtaaaaaaaaaaaaaagtttctctaagattttgctattgttcgattaacttttccactctgattctttggattgggttcttaacagaaaaacaaatacgtgatggtaatcctctctcagtttttaccatcggaaaatgaatttttatgatgtcgtcaaatatcgaacatgcggtaataatcagagacatgcattgctattagtatttcgtttccccacctatattttggtcaaaagcaaacgtgtgggggtatacataccttttctttcatgtaatgatacatgctttttatttgtatataaatataattatattatatgatatctagagtatctaaatttattcagtgatcttcttaatcaaaggttaatcatatcaaaacaacattagtgaactggattgggaccactaatgagttgaaataagttaccagctatttcttctaatatctgataaatactactattagtcataagaacaacaattagaattaataatattcgtaaccataattgagagttgacttgtaaagaaaaaaaaaagttatctgatgtactcaggaactattgcaaaaatactataagagcacaatttaaagattgattagattttttaaaaatgagataatggagaatctaatgatgcagaaattgttgttcccacacggacatacaatatgatagtgtattacttttttgattataatccgttggaagaagattttatcaaaacatcaaaaatttaagacttgtaagacctctaagaaaataatttaatatcattgttcaacatgtatatagtgtaagtactaagtacaccctgtaaccctattagtaatcttgactacctttttttaatagcaaatttggttgtaaatttgctatattaataatgggcttggtatagattttattttagaaggtccattactttcaattggagtaaatgaaccgactttaaagacttttaactcaggccttaatgttacacaatagaataacattatgacccggcccaaataagtcgtcagatccagtaagcgtgcgaccaaactatttgtttcttaccatcgatataaactttaatgattttatacaaattgaataacatatttatacaaattgaataatgatatggataatcccttttatctaaacaaaaagaagtggataatccacatcatatttgtctgtaaattatttgttttagttatctactgataaaaacattgtttatctatattattttatattatgtagagccattatctcttacgattgagcatttttaatcttctgacagaaaaaatgctaagaattaaaaggacaaagaaaaaagaatgtgcaattatcatgtggttgattagaggtttgagaatgattggtgctaccagaaacttaggtggagaaaaggataaaaaccgaaattagacaaaaggttaatttcgtcatttcaacagattctattaccacttcttgttttgtttttccatactttacggacaagaacgagagaagctctcgcttacgtggtttctacactgtttttgacgaacccaccaagctcgagtagatcggtattagatccatcttaggtttctctaatttctctcaattcactccaaaattttgattatttcttctttctggcttgtcaattttagtcatttgtaatccttgcttttgcgatcggaatcgtaaaaatccgatctttcttttagattcgttttgtttttgattccaaatcggaaaaatg

SEQ ID NO: 3356 - DNA, 3000 bp, Unknown
  misc_feature (1)..( 3000): cDNA_ID_2049708_gDNA_ID_1620642_Annot_ID_163070 3000 nt of promoter + ATG
tctaagacatgcgagtattctgttaatataattattactttttatataatagagaactccaattgttgaaacagattaaaacaaagatttggtgtagaagatgatcaaatattacatgaaagaaaattctgtagttcattcttgtatatttttataagatatttagttatattatttatttgaatgaagaaagaaacaaacaaaaatgtaatattttgagatgtctaaggagtattaagatgtccagactaactttaaatttttctccgaagatttattttgagattttttttcgttttaatatttttgatcagtttatgacgataataaaaataaacgaaacttttcttaaatctatagttgggaaagtgattgattttcgtaaaaaccattttccaactaatataacatatgataggaaagtagtcagaaaaatcttacaaaaatgtgcatggaaatggtggaatttacaggtagcattacacataatcatttcatcattaaatgctaagtttatccaccatattggcttggttacagagtctaaatagaaattgcaagagttacatcctagttttgtcaaactttggactacactattacagtttcgcctcttgtaaagaaaaatcgttgaagagaatttcgatgaccagttgtgaatgtcctggactaagttaaagatctcacttctagttgtagtcccggtaataaatacgaaatataggattgtattgtattgtatgttttctgactcgtatattacaagtatatgtaaggatttcttggaaattgaaatcactgggaaacagaatattagggatctccaaaccctaggacattgattccttcgagattactggtcttcttcgttgtaggcaaaaaaaaatggtatttattgttaatttgtatttttctgatcatgcttggacaaaaaaaatgactcgttcaggttagaatttaaaattaagtgtatgcgtcatatgacacaatgctctcgtcatcttgtgtctaacagagtgaaataaagaacgaacaattgtttgtatacacacaaatacaatcgcacctacatgtgcacatattttattacgcttatctatagaaaactgtttgatacattttttcattctaaagtaaatacacaatccaaaaaatactatgtcatgttaagaatgtttagtatatctatttattttaggacaaggaacatttaacatatagtaaacagttttaacaaaatttctctgatttgaaatatattttttatattatcagtaaaaagaaaactgtaaaggtaattatagtcgttgattaagattatacttagttttttaaaataacatgttttaaaaattttgcaaaataagtttttttttttacatgtctcataatttttgtcctcagtttatgttaaaaatattttgttattttgatactaacatcttccatacgctgaaaacatctttgagaatatttttcaaaacacaatatacaaaaatccacagtgactttattccacgatgaaatgatatcaagacatatatgttcttacctttacctttcaacgaaaatgagagaaaaaatatatatatatagtatcacttttagaaaatgtttttttttgctaattaattattatataaaaatgttgagagcaacttgatcatatatgtaataaagtcgcagtgaaaaaaaaaatgtaataaagtcgcataccgacgttgtgactcgtttttatgtaattgattagttaagtacagagttcgttagatgtatttgcattgttacaattacagaaaaccctacgcaacacaattcagtactttttacgtcagcaaaaatagaatctttcgttgaaaataataccagaatcgttcttgtctttaattttcttacctttttgtaattggatatgatttttgactatggaattattattattttattctataaaattatagtttttattattggaatcatttataaatgctattactcagtgttctttaaagtccatactaacgaattcaagtacttatttaacaaaacaaaacaaacaaatactaataaactaaaagtacaaacattactatgttattaaaaaaagcatatagctgcgtgattttaaaggtatatgtgacatataatacaacgacgccgtcgtattttattgaatttttttgtcacttttaattagtatacagtgaggaaataagcaaaaagaaagaaaaaaatattgttggctcggctagtacctataaataaaaacactagtatttggcccaggatataatcattgcaagtttagaactagttagctaatctaaaccgttagatcaaagaagcaatcttactaatcagaaaaacaaaattcaacaagttacaagaatgaaaaaaatagggataaaaaaaaggataattcatttacattcgatcaaaaggcgaatgcatagatcatagatgcaagacacttgtgagttgtgatataaccaaaaatttatttaattatatgtaatatatattcgaaaaatttatacaccgtatataaaatattcgaataatccttttctttgatttaaaaatattttctgcttgttttctcaactcatgtattaatttaaataataaaagtagctaccacctttctctgccccactttaagataaagctaaagcatggaaaaaagcatgggaaaaaagtaaatatatgatatacaatcaaataaatctaaaaaaatagaaaagaaaaattaaaggaacgaaaaaaagagggaggaaaaagacaaaattaaaaaacaaaaataaaaattccaaaaaaattaacatcacatgttatcaaatgagatcaaaatttaagttagttttgagttttctctctctttctcttctctaaaactacttaagctaaagaatcaaacacttctcaacgtttctccaaagcctctgattagtaaacacataaagagatctatagagagagagagagtagagataaaaggtg

SEQ ID NO: 3357 - DNA, 3000 bp, Unknown; identical to SEQ ID NO: 3353
  misc_feature (1)..( 3000): cDNA_ID_4262264_gDNA_ID_1620642_Annot_ID_163066 3000 nt of promoter + ATG

SEQ ID NO: 3358 - DNA, 3000 bp, Unknown; identical to SEQ ID NO: 3352
  misc_feature (1)..( 3000): cDNA_ID_2049714_gDNA_ID_1620642_Annot_ID_163065 3000 nt of promoter + ATG

SEQ ID NO: 3359 - DNA, 3000 bp, Unknown; identical to SEQ ID NO: 3351
  misc_feature (1)..( 3000): cDNA_ID_1820534_gDNA_ID_1620642_Annot_ID_163064 3000 nt of promoter + ATG

SEQ ID NO: 3360 - DNA, 3000 bp, Unknown; identical to SEQ ID NO: 3350
  misc_feature (1)..( 3000): cDNA_ID_1820542_gDNA_ID_1620642_Annot_ID_163062 3000 nt of promoter + ATG

SEQ ID NO: 3361 - DNA, 3000 bp, Unknown; identical to SEQ ID NO: 3348
  misc_feature (1)..( 3000): cDNA_ID_1820550_gDNA_ID_1620642_Annot_ID_163053 3000 nt of promoter + ATG

SEQ ID NO: 3362 - DNA, 1939 bp, Unknown
  misc_feature (1)..( 1939): cDNA_ID_2991393_gDNA_ID_1620642_Annot_ID_163052 3000 nt of promoter + ATG
gaattcgttagcgtttatgtgaataatcatccatcatcaggaaagatccgaagaaaagcgacgccgttttaaaggagatggataaacaaccggcgaccagttggagtatccatacccggccggagataatcgccaagtacgagatcttcgagcgagtcggatccggagcttacgccgacgtttacagagctcgccgtctctccgacggtctaatcgtcgcgctcaaggagattttcgattaccaatctgcgttccgggagattgacgcgctcaccatcctcaatggatctcctaatgtagttgttatgcacgaatacttctggcgtgaggaagagaacgctgtgcttgtgcttgagtttcttaggtcggatctcgctgcggtgatccgagatggtaagaggaagaagaaggtagaaggaggggatggattctcggttggggagattaagagatggatgattcagattttaaccggtgttgatgcttgtcatcggaatttgattgtacatagagatttgaagcctgggaatatgttgatttctgatgatggagttcttaagcttgctgattttggtcaggtgagattatgattgttactgattgtgttagttatttcattgtttgatgcacaaatatgagaaacctctgaatgaaaaatgcttggtttgcttgaaatttggaagagttagtgtaatcaagtggctagaccttatcatttagtgtaatctatgagtttctaaatgtgtgttggcttcttggttcatatacaggctaggatactcatggagcatgatattgtagcttcagatgaaaaccaacaagcttacaaactggaagacaaagatggagaaaccagcgaaccaccagaagttattcctgattatgagaactcacctaggcaagggtctgatggtcaggaacgggaagcgatgagtaaagacgagtacttccgacaggtggaagagctcaaggctaaacaggttgttagagatgatactgataaggactcgaatgtgcatgatggagacatatcttgccttgcaacgtgcactgttagtgaaatggatgatgatctcggtaggaactcgttttcttacgatgctgacgaagcagtggatgatacacagggtttgatgacatcttgtgtgggaacccgatggtttaggccaccagaactgctctatggatctacgatgtatgggttagaggtcgatctatggtcgcttggttgtgtgtttgcagaactcttgtctcttgagcctttgttcccaggaatttcagatattgatcagatcagcagagtgaccaatgtgctgggaaatttaaatgaagaggtctggcctggttgtgttgatcttccagactacaagtcaatctcatttgctaaagtagaatctcctcttggtattgaaggatgccttcccaaccattcaggggatgtgatatcgctgctcaagaagcttatctgttatgatccagctagtagagctactactatggagatgctgaatgacaaatatttaagtgaagagcctcttccagttccagtttcagagctctatgtgcctccgacaatgagtggaccagatgaggattctccgagaaagtggaatgattacagagaaatggattcagattcagattttgatggctttggacccatgaatgtaaagcctaccagtagtggatttacaatagaattcccctgaccttggcatttaaggtacgcagtcaaaagctctggctcgcttaaacacataaatcagtctcttctctctctctctttcttcttcaaagagaatgggtatataccaaaacctgacatgtgtttctttaggtcttgattgatgcaacactctttgttgtttgaagatcttgttacagaataccgcttagaaaattgttaacttttcgttaggacattgtttaggtatcaatg

SEQ ID NO: 3363 - DNA, 80 bp, Unknown; identical to SEQ ID NO: 3346
  misc_feature (1)..( 80): cDNA_ID_2991393_gDNA_ID_1620642_Annot_ID_163051 3000 nt of promoter + ATG

SEQ ID NO: 3364 - DNA, 3000 bp, Unknown; identical to SEQ ID NO: 3356
  misc_feature (1)..( 3000): cDNA_ID_1807786_gDNA_ID_1620642_Annot_ID_47516 3000 nt of promoter + ATG

SEQ ID NO: 3365 - DNA, 3000 bp, Unknown; identical to SEQ ID NO: 3355
  misc_feature (1)..( 3000): cDNA_ID_1820514_gDNA_ID_1620642_Annot_ID_47519 3000 nt of promoter + ATG

SEQ ID NO: 3366 - DNA, 3000 bp, Unknown; identical to SEQ ID NO: 3354
  misc_feature (1)..( 3000): cDNA_ID_1396981_gDNA_ID_1620642_Annot_ID_47522 3000 nt of promoter + ATG

SEQ ID NO: 3367 - DNA, 3000 bp, Unknown
  misc_feature (1)..( 3000): cDNA_ID_1820499_gDNA_ID_1620642_Annot_ID_47524 3000 nt of promoter + ATG
catgaatagtcaaccatatacgttgacttcgctgctttaacaaacatcatgccgttttggtaccataaaattggactccgtgtcgttttaaggttaaattcaaattaattggaataaaaaatgaaacagaaagcgagggataataacccgcttaagttttcaaggcttcttctacaattctctcatttcgaatttgataaagagaggagacgatagtgagggaagagagtgagagagagctgtagcagtgtttgaaatcctttggattgcatcaccaggagcaagagatcacgatggtaatatactctggacgaatgttctctacttgtgattttgtttcgctaatgaacctctgtgatttgtgcattttcctgggaagatcgagtgattattctctatgattctatgaatcgtgattatcttacactgatgatcttagcttgtgattcttcgacttacaagagaattttggatgtattgattcgacctatttgtttgaatgtttagtagtcatcgttatgtgtttctcttactcttcgaagaaatttgtttaaacttatcgttcatcggtagtaatgtttctatcttccgtagttcattacaaatttgtgtgaggaatttccgcaaacacttggactgcatgacgcgaatcgataggttctcgaattagcatttatctagcagccaattctcgcaatcagtgtagtcgctgagttgactgtatatatttttgacattttcgatctggaaactatttgttgacagatcatttgttggatttcgtcattgaagctctgaagttttttttcgtcattctcgtatcaactgaatcgctgctttctattgttgatgatattcagtctaagaaacggggactttcgctggaggagaaacgagagaagatgcttcagatattctatgagtctcaagacttcttcctagtgagcactttctttagtttttacaacttgctaatttttggacgcctttgaactagctttatctaccaagtgatctgatatctagagtcgtgaagtgcatatactgcctaaatttgttgctattgaacttttgggtttgtgatacaagcacttatgggtctctacttttgtaaaaaaatttcagctaaaggaacttgagaagatggggccgaagaagggtgtaattagtcagtctgtgaaagatgttatccagagtttagtcgatgatgatcttgttgcgaaagacaagattggaatttctgtgagtagcttagtgttcctatgttggatctttttatttcatttgttgccatatagtccttgtctctgttatatgttgtttgacggtgttcattattttgcaaatgaagatctacttttggagccttcccagctgtgctggcaatcaagtgagtcaccgttctgtatcctgagatgacatcaaaaagattcatattaatttgagcatagcgaaattcattgtttctgatctcattttgaatgaacagcttaggagtgttcgccagaaacttgaatctgatcttcagggtagtaacaaaaggttagcagaacttgttgatcagtgtgaggccctaaagaagggaagggaagaatcggtaagtattttcagtattgtagaattaatgctcgaataagcttacgtgtgcttttcaccagaattgctgttcttgctgcaggaggaacgaacagaggccttgacgcaactcaaagatattgaaaagaaacacaaagatctgaaggtcagattatacagactatctgtttgcatagagctattcacatgcttaacaagttgctaacagtttcttcttcttaaacagaacgagatggtacaatttgctgacaacgatccagctactttggaggcaaagagttaagttctgcataatacgttacttttgttttgtgttagatctcctatatggttttcccggtcttcgtggagcagaaataagaatcaatcttgtgctttactagctgtatcaatgtgtatattccttctaattttgacagggaatgcaattgaagttgctcaccagtcggctaacagatggacaggtatttcatttctaaaacttgggaatgtgttttcagttttaatacttacgtaattttcactgcagcctagattataattctttcaaacttactcagataacatcttcacactgcgacaatggtgttcaaacaacttcccccaggccaaggaacagctagaacatctatacacggaggtatcttccagatcttttcacttcaaaaggctataaattccacatttcacattctcatacatgaaggagagactaaatcagctgggtaactttcaggcgggaatcactgaggactttgattacatagagttatcatcattccctttgagctcatcccatgaagctgataccgcaaagcagctagtacaagatgaagcttagttctaatactctccagcataacagttaaagaaacaatagcttaagtaaaaaatcttttcactatccttttaagttttctggttttaaaggttgcaacagtctgtaattctctatgtgacccaatcatctaatgtcaaaactcggttacaaattctgtggtcagaaaagatttttattttctttgtatctgtcggctatgtccaagcttggctatgttttgttataatattttattggagttatatatatatcatgcgttagttgttgacccactggttacttcttgatagctgtattaccattttatattctttcttggccgcttttttcagtcgtgagcagcacttatgttatacacctccaggtcaattttgttgctaccagaagaggaaatgggcatagactttgtactttctagtcttttgtgtttttgtgttatcttaaacgcaggttgtctgtttttctgacgatgatgagctgagctttacaaaataagaagaacatgggagctcactctgtttttctcatccttttttccgtcattgccattgccattgtagtac

SEQ ID NO: 3368 - DNA, 3000 bp, Unknown
  misc_feature (1)..( 3000): cDNA_ID_1820598_gDNA_ID_1620643_Annot_ID_47528 3000 nt of promoter + ATG
atttatagaggggagtgaataataaagagagtgtgccaacttgtgtttcttttttattcctttgtcctttcttttccattatttctaattaaaaaaccatgtgtattaattatttgaaatttattatggggaagacagaaactcaaaggagattgagataacattttgaaaagttaaaatacttatgtgaataaagaatgggtcatattgacacaaataaactagtttttcgatcattaattcaaacttgagttgatttataagttgctggtttcaattttattggtgtgtagaaaatgtaaaaagagagaaagtgaggacgaaaggacaggacagagttagggagggattccaaaggtattggcgttgggggaagagagagaaagagagcgtttccgtttctccgcgaacacttgtcgctgactcagactcctcttatattagtattactttcttcttttaagttaaagtattaaagatgtgtactcttctcttttttataagagtacgtactatataatgaaaacaaagctgaatttgggatttgataagttatagacaaatcttacgtcaggagacgatggggtgcacgtggattagaggaaattattggttcagagttgtttgtatttttatgggatgtttaggattttagtatagaaaaatgaaaactaggttattggtagttattgtgtgttacttgatgatgctaatcttcgggtggtgaatgaatcacatttttttagggtttaatcatttggagggaattattgatacaaaaagatactgaaatcaataagcaaatcataagaggacaatgtgttaaaagaaagtaaaaaaaagagaggaccaaatgttgtgcgtatcttgctacgtattcttcttctagtattctctagctagtagctagacacacaataagaccaccctaatacaaatttgaaatcactgttttatgtctcaactttaaacgtttgttattaaatgttaacgatgttcgtaaagaggggcatacatgagcaatatccacgattgcctaactgtgtaaaacttgcgtcaatgtacttcacattcctccaatcactttggaaatgtaaaatgattatcaataaataactagagaggaacgtggtgttcatgagtcatgtcctcgtcgtcttccacaaacgcatgtgtctccataggtataaatcagaattgatatagtacaaaaaagactcttaacttattatatattgagtgtttgactctacgtacctacgacacaacataagtatttgcaatctcttggaactacaaaagccgttattgacttattggcccttcgccatattcaaaggttcttctctatgcgtgcgcctttccctttctcgtacgtatatataggagtatagtttttaaaacattttttttctgtcgtcgtctattttttaaaacatttatttatctgcggcgtagagaaaatgtaaaagggaaagtgatttgcaaatttctcagtggcgaatttacaaaacttctgacctaataagagaaatttctagctcacatcatcttccacactttgtcggaataggtctcaaactactaaaagtattacaattattcatttataaatacgatatttctacctgcaaagcaaatgataatttaatggactagtgagtattgacactggttcagtatttggttgatattttggtttaatgtagaaaatacgaaagaagaagaagaaaacagaatagtgatgtaatggactgatcatttaacttagataacgatttcataaaataatagcaattccaaaatttgagaaaattatcaatcaactactacatgtatttcttttttctaatggtcaggattcaggaagaaaatctggaagtgtatcttcgctttctgctttacgattgattaaatatataacatttcgaagagttttctactaactgttggcaacagtctgttgctgtcggttccgacgttgcaaacttatccaaaacagcatttagttctgtgtaccgtacagttgaactcgctggattgtaacatgcaaagttacaatcatttttttttttaattcgcctgatatatgacctgattagattttagtttttcatagaaatttaaacactaatctcatcattttcaaactaattaataacactagcttacgagactccggaatccaaacttttctttctttcatattttcttactcccacaacaatatcaccaccatttctcctcgtactgttttgtattttatctcatttaactttatcatctttaaccctttatcaaccatgccaaattgcaaaatatttttttgttttgtttttgttgttatcccatttcagttgtcaattagaagcaatgatacaacacctttcattcaataaataaacaaaatttgatggtagccaccaaaataaaacttgatgacgccaagcgtgtaagccacaaccacgaaaaaaacccaacaaataaacataaatgaaattaagtcaaatgaagattcgattagattttttggacaaaatctgtcggatgcttattcatagcatctcctctgttacagcaagaatgaggaagtacggatcaaagagtgtttgaatggttgacctgaagaaggagaagcaattgagcttaagactctctgattcttttcataacataagtcaagaaaatgtcattttcaactttttggtcatgcatgcattgccacacacagagggagacacatgtcttttgatactatccacttggttcagaaaaaaacaaaaagtcacactttttgaaaaagtgaaaacgtctcaagatatggtgaaatctgcaatctttttttactgtctttttgttatgatagataaggaatctgcaagaaccaatgatcactcttttcactgtatcaaggacaaaagaaagagagaaaacaaaagagttatacagagagaaaacgtgaatagagagatcactgtacttattgggttttgatctttg

SEQ ID NO: 3369 - DNA, 3000 bp, Unknown
  misc_feature (1)..( 3000): cDNA_ID_1820595_gDNA_ID_1620643_Annot_ID_47529 3000 nt of promoter + ATG
aaaacgtctcaagatatggtgaaatctgcaatctttttttactgtctttttgttatgatagataaggaatctgcaagaaccaatgatcactcttttcactgtatcaaggacaaaagaaagagagaaaacaaaagagttatacagagagaaaacgtgaatagagagatcactgtacttattgggttttgatctttgatggctccactgagtccaagagtagtggtgaaggtggatttgaagaagaagccatggcagcaggaccagccattgcacaatagatggcatccggagataccaccagtagcagaggtcaaggctggtgagtttttccgggtagaaatgattgatgcaatgggaggtgttatcaaagacaatgactctgcaagcgatatcaagaacctagtcctaactactgtaagtgggttttgtgagaaacatgtgaaaaatcaataatgaaacaatgagtttacttttaaagaaaaacaacttttggtgatatattgtacagactcatcacctaagtgggccgattagggttgtagatgaggaaggtgttgcagctaaagcaggtgatcttcttgctgttgagatatgcaacttgggtcctcttccaggagatgaatggggattcactggttcgtttgatagagagaatggtggcggtttcttgactgaccatttcccttgtgcgaccaaagctatttggtactttgaagggatctatgcctactctcctcagattcctggtaagaagaaaacaattcaatgtcttctatcaagaaacttagtagcataaccatgtagctttccttgttatgattcgttctgttgaatattcaaatgctaatattaccccatcatggcaggagtacgatttccgggtttgacacacccaggagtcattggcactgcaccatcgaatgaactcttgagaatatggaatgatagggaaagacaattagaagaaagtggtgttgagtccctaacactatgtgaggtagtgcatcagcggccattagcatgcctaccaacaactaaaggatgtctcctcgggaatgtacgctattttctgatgctataacaaagtttttgaactgtataaatagtgcttacctctgaattcccagggattcttacataatcctcttgtagattgaagaaggaacaccagaatgggaaaggattgcaaacgaggctgcgaggacaataccaggaagagaaaacggaggaaactgtgacattaaaaacctaagcagaggctctaaaatatatcttccagtatttgttgaaggggctaatctaagcacaggagacatgcatttctcacaaggtgatggtgagatctcgttctgcggagccatcgagatgagtggatttctagaactcaagtatataacaaataagttctctcgactatgcattctcagatgttcttgtatttgtgcagcgtattataaacaattctgaccagataccatgttgtaactccttaataggtgtgaaatcataagaaatgggatgcaagagtaccttacgccaatgggacctacccctctccatgtaaacccaatctttgagataggaccagtggaaccgaggttctcagagtggcttgtcttcgaaggtatcagtgtcgatgagagcggaaaacagcattacctagatgcaacagttgcttacaaacgggcagttctcaacgccatagactatcttttcaaatttggttactcaaaagaacaggtacttgtctttgcagcttgatgtttcttccagaatctagttgatcacacaccaaacatccataaattaaaactacaaagacagaagtgatcaagagaatatggtgtgaacaggtgtacctcttactctcatgttgtccatgtgaaggaagactatctgggatagttgattctccgaatgccgttgctacactagcaatacctacagccatctttgatcaggtatcaattttgcccctctgttctttgcataagtcaaaaagcttctgtataaacctcttgagtttactctgttcttcaccctcgtctctcaataatttgttagcaactgaaaagataggaatgcaaatatgttaattgcgtttgtatgttaatgcaggatattaggccaaagaatcggaaggttccagtaggacctcgggttgtgaggaaaccagatgtactgaagagcacatatgatggaaagcttccaattacaaagaatccaagttcttcctcttagcttctacaaaaaaattaaaattaaaatttagaagctaataccaagattgtataatcaagcatatgttccaataataaagcaataacttggtgttttctttagttggcgtcttggagattccacataaagcaactcacgaaacgagaaagcacacaaagggttaaatttgcaccattcaccgagtaaatccaagatcttcgacataatatagacaagcaactctctagatagtataatcagaaatgtttaaagagagaaatggtttttttttgttggttgcaaattccaaaatcaagaaactatagaaattggaaggtaaatgatatgcgtccttaatctatatgcactatctacagattctgtctcaaaaatagcttactttgaattgcaaaactgcgcaattactaagtcgaatgtaatattcctctctccggacattagaaagaccttattcagaacataagttaagaaaatgtcattttcaacttcttgtcatctatgcattaccacacacagacacaaagagacatacgtgtcttatggcattataagatgaatgacagtcatttgtctagatatagaaaagtctacaatatggtgaaagagggatcttttactgtcctttagttgtagataaggaatctgcaagagcaatgattccttaatacaagaggggaaaacaaaaaacaaaaatatattaacatagaacgtgtgagtagagagagaatataaattaccgtacttattgggttcggtttg

SEQ ID NO: 3370 - DNA, 3000 bp, Unknown
  misc_feature (1)..( 3000): cDNA_ID_1820589_gDNA_ID_1620643_Annot_ID_47531 3000 nt of promoter + ATG
atgagttatgggttgacccaacccattttattatgagttgagttgagttggattacccattttgacacttctaatcttatgtaagatttttttcattatagttatacttttgatgggaatttttttttttttgttaaacatttttgatgggacatccgatataataattctggtgaagagctattttttttatctaaagatttttagttagagaggtgttaatagttatacttaactaataaacgccgagaaaacaacagtaacaactcaattaacaaagactcgttaaaagtaaaatacgtttatattaaagatttaaagtgataggcaaaatgaaaaagaaaatggctaaccatgctcatcgtttatattatttaattttcggatcttcattaggcttataaatttatttttagttgttaacaaaaagatttctctttatactttagcttttgtaatcttgtttggccaaactctttttgaatatatattacatttattggtgagcacattgattattttatgtagccaactaaaccatcatcactatattggtgtctacgtactgtctacttaagtactgttaatggaccacgatttttaagatataaacttacaaaatacatgtttcaatcaaataatgataatcgttgatagttcaaccaattacactaaaaaacattagaggagaaagtggaccaaatcctgaatttgattgccaatgacgggggaaaacatagtgaaaatgtttaagctccgaattaaaaagaacatagaccgtcgtttgaattggtttactatctttacgttcaatcttatatcgatttgttttggtataatttcattttgataaatccaaaatggtttaaatcagattgtatcctatgttcctaactactagttagaataataatctatttttaatattgattttaattcttctgatggagtatataatagtgctcgacaatgtcataatcagtacaaaataaatcacctaccaacctgaactatatgttatatattttgaggggccacgtcaagtgtgccgtttatttttgtgtttatgattgtttaatatttgtgcgtgtgatggtgtttcttgcttagtttccacttaatacacaatcaaatatcaagtggaactatttatgaaaattgttcttcgagaagaattctgaccctaaaaggtcatttgagggcttgaggcttattgtttccaaattacaccagtaaacaagggtttttttttgtcaacaaagattattgtaattcgaatttcgtctacaataaaacaaattttcttactaaaacaaaacaattagctgacggttgatatttcggcttttgagtttaattaactaattggtgattatgttgatgatctttcacacctaatgaagtgtcatgtatatgtatatatgtatatacttatgtatatataaaacgtacatataatcatttgtcatatatatcatcatgtattgcatgactaaactacccttaaaagaggaatacgatagacatgacctttaggaatttgtttttttcttctaaatggattccttcgcttctttttagcctcgtagtgaatttgaacattgcagttatttctagtaagatattttttctgtatttttcggaaaatgttaaaaactaattatacacaatttactttctctctcaactcttattttacgttactgttttttttttcctcttgcaaaattagagctgctgtatttacatttactagtaatttggtagatagacagttaatgtagtatatagatggggttgagggcaaatgattacttgggagatggtgcaatgcatcagagtgatgatgtggaatttaataagtgtgaatttatgggcaaaggaagggaactagtagtagaaagggaaataaatacagtacaagtaagaggaaaacgaaaagagagatagaaaccataataatgagttaacgcagacatagccgccattttcaacttctcactcccacttacaacttctccttctgggcaagttttccacatcaatgctcgtcttaatcaccattaatctctactcatcattaatacgttgaagcccactatttcaaaatttactaggagtatttattcgtgaaaaacatttaaatgtccctaattataagagatttaatttcatatttattgtattaaagagaatttacattagctgtcaaaaaaaaaaaaaaaagagaattaacattattttacagaacataaaattttgaaaatagatagcgccactgcatgtaagaacatacaaatttctttttttcaacaaaatctatttatatttcttctttttttgaacattatgtgtagtttgtagtaaactaaaaagtgtgaccaacacaatttaaatcattcgattttgtagcaaaaacatttttgttccaatttccaagcagcaaatatggtaggaatataaattctttactatttttcctcttaacacataaaagtaaaaaaagcattcaatgatcagttaaaatctggttagaattctaccttatcatttagaactagctaatatttaaattcatatatacaaaaaataaaatgggaactgtagagactagagactataaatagaggattgagaagaagaacttttaaagctctatcaatcatgaactactcgccttctccaacttttaaaactcatcataaatagtaaaaaagtagccggaaaaataaaataaaaagtctatttctctttcctttaaaatccaaatcctataaactcatagctttctctgttctttacttatacctcacgttatacatatatatagagtttctataaatgcttctctttcctctcgaacaaatcttcctcacttctctcatttccacactcaccttcctctctatatattaaaccctatctacttaactcttcttctaactctaatctctctctctatttactctgcttctgttctcactctgaaagaaccaaaac

SEQ ID NO: 3371 - DNA, 3000 bp, Unknown
  misc_feature (1)..( 3000): cDNA_ID_2051688_gDNA_ID_1620643_Annot_ID_163121 3000 nt of promoter + ATG
aacctctgccgttcgattatcctaatgaagcttggtgattaatttcttaataagtactttgatatatataataagtcatgattaatggaaaaatatatgataaaattatgtagacacaaaggaagaggaaaaagctaatgtcattcactttgtgttgtgtataactgaaaaaaaaaattggtcgtaatttttgtgtccatgtcctaatgcatgacacaaccaaatcaaccaatagttttgcatttggtttaaaagtttactcaaagtttgtgtaaagatttctgaggtaaaccttcgtctcttaaccaaaatagaagaaaaaaagaaaaagaaaaaaacattcccccgtttccaaccaattaccaaaactaaactaaaaagtaacttatgggatttgaatccatgtaataatatatcgacgaaattagaagaaaccatgaaattgtgtaataatgtgtctccttcagtccttcttttggtcaattatccacaattatgaaccataattattgagtttggtgatgtacatctagatattagttataatatcacaatcacatgtgaatttatatatgtgagaagaaaattcattttatgaaagcaactctgaatcctggattatataacaaacaatatcacattaacattttgatttcaactttacaacaattaataagcattaataacgaaattaaaacacccatgcatgacaagtatttcacatttgttgattcttaattacataaatcacacataaatacgtaccaaagattctaaatgaacattcaaactgacccgtaacacataaacaaaacaattttttttaagagcctaagtatttgacaacactgtaactcttactcctttgaaacatcttgtgcttactcccaaagctaatcaaaggacttgcctcatctattttctcaaagccacgatgaccaccacaacttctcgaactcttagccttccgcaattttgatggttcatgtcgtgcaccatcaatggtcgcatttctagctgatgcggctcttacaagtttagccacacgatcatcttcagctctcacggaatattgggagtggctagcactgaaacttcgcggaagagtgcttacgttgcagacgggtatcccaaaactcatgccgcttccaggaaggtcatgggaagaaaattgattcatgcttcgtatgtacatgtctctagctttcaccagcatctttatcggaacttttatgtatttgcttagcttcgtctcctttttcttgctcatcttatctttgtcacaaagtgagaagggaaactaagattttgcaatgatttgtgtaagatgctgaacatttaacaagattttgcgatgatttatatacatcatatttgggtcccgactttttaaaatatttatatgtgtatgtacacatacacatttgaacttactatatagtatacgggaataggtattaaacttaaagtatagttttatggcatttgcgtacggagatgcataattgtatgcaataagtaaaagacgatttatgtttttagttgattatttttatatagcgcgagccacgagacgttgagagtttgatggaattcatacataacaaaagatagaatttgattatgataacaaaataaagttatgctactctcaattgtggagcctatttgatcgtaacccctatattattagacccatcgtattcataaatttaaaccatatatgctaagaaaatgtaaagtcaagagttgacttcaaaacatggaaaacatgagatgtgaacatcaaaatttatggaataatcaaattgcaaaaaaattgaatatatgtacatgaacgatccaccgtccaaaaatatgaatatctaataattacctctaaacttcatcatgcactgatgaatatctattatctctaaaccactgatgaataactcaaatattcgtatatatttatcattaattttcgaaggttcaatataaaatagacgaagttatgggcctcagtatatttcagcctgtacgcctgtttcttataggcccatggacggtcggtcctcttgagttatggttgtgtgtgaaatcagaaatttgaatcatgtcttatttatccaacatcatcactttacttctaaaaatttgcaagtaacatattttgtaactaatcatgcaccactaaagtaactaatcatgtaccacccaagtaaaagattataatatttttagggaaaaaaaaaaaaatcgaatttctctgaatgactgatgaaataactggatgaaataactggatgaaatgacggatggattttgtcgataacctcgcgaaattggacctacatttcattcatttatatttcacacattcacaacatcctcatctaccctacacatccatttatacaacaagcatcctacacattcatctatataccatccacatctccctatacattcatctcatctatacaagcatacatcacaccatatccttctaaagctttacctgcagtcgtcatatgtcagtctcaatatacacatacacacgtcacacaccctacacatcctatcatgacattatctatattttgttggagtaagcttgaagcttacttgaagaagaagcaatcaagcaaaaaggaaattagaattatactttgtgtttaggaagttgcctaaatacttatgtgtgttttcctaataggattaggaaattgtctagttcttttcatatataaaggagttgcaagagtgttgcaaaacttatgagttgagagattaagattgtgtgtttttaggttttgagttattttcttaaagcaataaaagagagagtcttttattcataatcttgttcttattcttgagtttgatatatagtttgaatcaataattggtatcagagcataatattgattcaagcatctttacgatcaaacaaaggcaatcaacgaagttagcgttgattccgtacggagaaagaaggtaacttgtgaagaagac

SEQ ID NO: 3372 - DNA, 3000 bp, Unknown
  misc_feature (1)..( 3000): cDNA_ID_1839219_gDNA_ID_1620643_Annot_ID_163117 3000 nt of promoter + ATG
aatcacttcaccttctactcaaatacgagaactgaaaactcaagcacattgcaaagaaaagatcatataacaaagcaaaataagaatagtaacaactttagttgaggcaagcaaacaatcgaacaccttgcgtgcttttttctcataaatcaaagtatataatacggtgaagaaagacggtaccttcaaaatggcatcacaagaagagccggcgatgatctcgccggagataataacgacgaatgtgcagccacggtgagcccaaagataaggccatgcttcacggaaccaacgcacaaactgtttgtcgtcaactggatgctcagcctccacatcgccggctgcagtcaccgcgtagtcaaacatattgcatttcgccgccgttatagaactaaccggcttaaaccatgaacagttaaaccggaattgagtagggtttagcttattttttggtttgaatgacgaaaaattcgactttgattggcgaaagtggtaaggaacatagtagctagaagtagaagaagaacccactaaagctcctcgctccatcttccttagacttcgatgagagaaagaattcaaataaatactaaattgttattgtaactaaaccggcaggtgacggctgattacggtcggagaaggcggcagtagtaccgtagtgggacccacggtaagtaggtattttatttattgtttatttttccatattttcttcaatagtctttttctattattatttattgtttatttttccatattttcttcaatagtctttttctattattatttattgtttatttttccatattttcttctttagtctttctctattactatttgacggaactctttgaatgtctggtcgttacaagcttaagttgtgtccccacatggaagttattcggttgggtccatcgaaggaaaattgattgaaccggtctggtcattctctcccaaactatagaaccaatttcggtctgcatcggagtttcgaagtcgcggacttatcagagtgggctttttaaggaatgtttttagaatatttaccagcccaatcccattttaagtatgtccagatcttaatttggcgagcctttttatatatggtgaacaactgattctaatgtgtatgtttcacttttattagagaaaaaatgtgaaaagatttaatgtgtatgtttcacttttattagagaaaaaatgtgaaaagattcttaaaagtatttatttatgctaattggcaaaactaaaacatcaatttatgtacatcattttagttcttcctctaagatttgattgatttgtattaatggctctgaatactgatactagtttcgttggcaagtaagataagtgataactttgataaagagtgtcaaattacaagtgccacaatttggagtacgtaaccaaattgacataaaacttgaataggtgaaaaaacgagccagaaaaaaaacgaatatcttctgcttatccgaataaaacgaaagtaatattcttacaagatccttccttatgaagtagtgccagtagatatttttatcattgtgattgcgacctgtttgttgcgattcatttatgccaattcacgttactatttatgttgtgataaaatcttttatttttcttcttctttccaaatacttaagtatgcatgattattgatccgtacaagcataaacgaagagctataaagtctccaacggtaaacgtacgtgaaccaaaataacaattcaatattatggttcgaattattctgtgtattttatgtaagaaaataaccaaaaccgactcgaaacaaaacaaaaaaatcttctgaaatgtgaatctttatttcggaaaattcttaacgatagatagtttttgctttaaaattaaatccaaacataaactagaactgaaattcaattcgttgtcaatattttctatacaaaaaaaaaaaagaaatccgaccaaataaacaaaaccataaatagacatctccatttttagttgaaagatgattaaatgcaataaatgtgccacaatcataaatttttccttttcacctaattgaaaattttaatcattaataagaagaatccatggagcacaattattttattttttattttttgctctcatatggtatgttaaattaattttcccttaatttaaattccccatatcaaataagtttttttttttttgagaaagacttgatttcataggagaaatatttgttaatattttcgacaaaacattttctctgtttgatgtatttccatcctcgtacaataaatactctagctattaaattcttagcccaaacgaaaataaagaaaaataaaagggtcctactaataaacaaaacaaaactagtggtcccaatttgaaatatataaaaatatataaaattcataaagctttgtggcttcagagcttccacttccatcgtcgtcttctattttttcttctttcttcgatttcataccaaaacaagaactctctgttttcgacaaaaacgaaaccttgagatctattttgattgacttttaagaaagagagagatctttcttagaagattttgtctcgtcggcattgaagatccaggtaacaaaatctcaccttttctctcctaatttcacgaaatcgaagaaaaattctcataattctcttaattacttatctctcaatttcttaaatcttacagggtttgtctttcgaaattcaggtaattttctcaaatccatttatggattgaagctttaggtaatgaatgagctgaatctgcatataaaaatcgatactttcattatccagaacaaaacaagatttagcataaacgttcaaaattgaaactttgattcctaacttcttggaatgattcagattgagctagatttagatctgtatgattgatattatgggtttggtttgtttatgagtagagagaaaatgggtgatgaggcagagatcaaggaacatttaaagccacaagcttcatctgaaaca

SEQ ID NO: 3373 - DNA, 3000 bp, Unknown
  misc_feature (1)..( 3000): cDNA_ID_3093580_gDNA_ID_1620643_Annot_ID_163112 3000 nt of promoter + ATG
ctcgatacaaagcattaatcttgtctatccccccgagctcatgcccattgtttaatttcgtttaaaatcccgaagtctcaaaattggaataatttgatcgccacgtacgtagcaccattataaaaaataaaataaaaaatctaaaaactaaatgatgatgttattttgtatattaacaagcaaacctacattacataactctccatattttctagtatgtaggaaagtttcggacatatttagatatatgctatatcatgctaaaattccaaactaattaatgaagaaagtgatcaaatctacattatagcctaggctagacataatgcagtagatatttacatcttatgagtcatcaccatctctggtagatcaaatgttctcatgatcagtttcttctacaattattagaagaaaccccacgctctgcttctttgtccctttcttcgaaacctatcgagtgttgcaattcagtttcttatgtaatttctcgaaatctgttcttgcattctaggaaaagtcccatcttaatcttttgaagaatatatatatatatatatatatatatatatatatatatatatagtcgataataatttcggttatatgtgccactatgttttatacacaacaccaaacagccatagcataaatgcataattacattgtttatgtatacagtagaccctaatttgtttctcgcatataaacccatattcattcgctaatttggttgttatgcatgcctgtatgctaattaagatttatatacttggagaaaacatcttccccatggttaggattgtttagccccagaaatgaaccgttaacttatctttttcgattagtaatgaaatgatcaaatatttttacaaaaatattctactatccttcaattaagccatagacaaaaaaaacctgtaggtctcccatcaatcacacaaaggtaaaaaaacagacttttaggtgaccaatttcgtaccattttgtaaaatctaaatcggaacaatgtagagcaaatgatgtagaaaatatcatacattattagaaccaactcaatcaaacctaactcaaaataataattttgacatgactattcccactaaaactacatataagtgacaccggctaaagttttttaaaaattgtacggcataccaaaatcatggaggttgatatgatatgtgtagaatcatccgaaaaatatatatttgtgaatttacacaaatttatgggtcatcaacgtacgtctagacctctttcaaacaactttttatgattgcaaaatgttatttggttaatggatttcgtaacacaacaaatatctcatcaacgaacttcgtccaccacttgaatatgaaaccaagctggttttcttagtcccatatataactgaatttttccttccctagtcacacttttagcgatagcaggagcagtgacatcagtccgaaccgcgaccaagtgaaattacaaccttcaaaaccgttgctaaactgtgatttttttatttttttggtaatggctaaactgtgaattttatccagcagatcacagaatcttggcaacttatggggtaacgaactagcttcccatggcagagtgacaatcggagaccacaaccacacgagcaacttcaacgtcatcccacagctgttccaatgcctgtccaacacataactcagcagaatcgcttaaagaaaaaaaatgattaacagttttattgtttatttttctttctcaaaagcatcccaaatattttagagaagcaaacatataccagagcccaaaatttgttaggccctaaaggccaataaagcaaacaaagccgtgtaaagaaagatcttaatagctttcaaggcctataaaggcccattctaagcccaaatctgcatgtccaacttttttgaaagtgtcattttccatgaagtcaaggtaaacgcattattcaattggagaagaataaaaaacactagttattgaactagaatgatgaacagagacataagcaattagtaccaaacgaataataaaaagacataaagcaatcaatgtttttgagtccaaatagaaccaatgggcttggtccaacgtggcgtccccgaagtgtcgggttttttgcaatagtctctgggtcaacggtcctccaatttctctttatttatataaacgaccccatttcttattattgtcaaaaatcaccgcacttttgtcccacaattgtcattcaatttggtcaaagtgaaatcaacgtgagcagccaaacaacaaaaaaccaaagctacgaaaggtaaacttcttagaaaaatcttgcaaaatatggtccaattaaaactctctgtatattatattccatttttttctatacagtatatattatattgagtaaatctaaaaattacgtcatttactcatccatagtattttactagtttttaaacctttttttttctgtaatcttctaatttttttaattataaaatgtccacattcattcacaaatttgggaataaaaaccaatcataaactcaacaataataacataaacgcgtaatgtactcgtcatggcctgcatgaatgtttcaagaatgatttaacgttcgttataaatggaaagtagtgcatgtctttatttaattattctcttcaataataagtcgaatgtttttattaaaaatgtaagagaaactttgttggacacacgaatttaaaacgagtcaactcagcttctcatcaccaaatgttaataaactcaacgactcggtcaaatgcttaagcaaaaaaaactcagatctttgaataaaaaaaaactttacctttcttctccattaaaagcttccgatttctcttcttcacccaccaaaaaataaaaaggttccttttttcttctccaccaaatatacagaagaatttgaaacagagagccaaacaaaaaagccattgaagctggaagacaaaaaaaacagaggagattgaagaagaagagggagtaagaagatg

SEQ ID NO: 3374 - DNA, 3000 bp, Unknown
  misc_feature (1)..( 3000): cDNA_ID_2999369_gDNA_ID_1620643_Annot_ID_163108 3000 nt of promoter + ATG
agatttaaaagaaaattgcgaaagttcgtagataaaattaaattttgtaatgctatagtatgcgactatctccattctccacaagagaagtagatgtaatagtgagtgttaactgttaagcatttcgggatattactaataatgggcctaaaacttattataaggtaagacccatctttatcaaaatgtttctacaggcccaatatataagtgagagtgacccatgtgtaataatgtagccaatgtagccggtctacataactgaggtccatgctataacaatctgtttttctttatcaatcaatgctagagtttgcccaaaaaaaaaaaaatatatgctagagggtactcattgacattgttactccaaaatatatgaacaaacaaagttaatatatcgatggacatattcgatagttatttatttcacggacacagaaataagatcggtggacaaattaacaaatatacccattcctcagcaagaaacataagatcggccctcacagctgaagctttggcgatgcttctcgctcttcagcaagccaaagatcttggattcacctctctgtcaattgcttctgattcacaacagttgatcaaagccatcacctcgagaactccattaacggagctccatggaatcctacacgatattctcctcctcgcgtcggagattgggtttgttaggtttcactctatccctcgaaatgaaaatcgacttgcagatgccctttcaaaattgggtcttgcttcaatttcgtctttgtacccggttgactccggtttaaatgtttaatttctaatgaaaaccaactttcgcacaaaaaaaaaaaaaaaaaaatgaacaaacaaagtgtatacaattcattaattttctacaacgacaactctacaagtattgatatgatgatagataaattagctaaatagtgaataaaatgtcagttgtttaatagaccacgttgaacatacacgttttaaaatcaaaacacaatcaatttgttgacgtgtttagacatattcgatagttatttatttcacggacacagaaataaattagtttttacttttagtgatggagctgttataggcatgattgttgtacttgttaataatttcccctaatttgtcatattagcaatcgtaaaagagaaagtgcctcatgaactatatgaagaggtcagcgtgagcgtgccagcaacttgagagattcgtgaccaagtatctatcaaaagagctctattattttttgaggctgagtcagcgactaataatttcgttattaaattaccgctttttcatttgtttaatcatacttttcgtatactctatggttaaatcgttaatttgtcgcgaagaggcaatgtgacgttttacacaacataatccaacaaatgaaacaaaaagatattaccataacctattattacctatcacaatcttacctaatctttgtcggtctttgaaatggtacattgcccatcgcataaaggggtatggtgcgactccggctcgtagcagttccgtgggttgatgaatggttgtttcaaaacaataaatgtttcaacttggacgaagataataatttcatgaaaacgaaaccattacatgactatcatcatttcattataagaatataaacatggacgagctcaacatttatttagctgactccttcttttatcatgtgttttatatacaaatacatgactaggatctgacactgtagtattagtattaccaaatcttaaactagacctaattttccctgataaaataatttaaggttattttattccgctgacatttaacatggtataatatatttggacggttcatttcaaacatgtagaatattctaattaaatagaagagactttataatcatattaatcaatatcgataacgtattatccacaatgcaacttattaccctttttgccatgttttgtgaaccgcttggaccgtacaccaaccccaaaatacggtagttcaaatgcggctagcaatgtattttgttgattctaaaaaaaattgtcgattagttatatatatcagacactatctaaaatacccgttttaagtatttggaattaataaaatagtcaaaattggaatactaatttcccataattactaaacttttattttactcgttttacttattatactatccgttatgtacgaactacatttatgtcgtttgttttatctgttttactctaatttgcaccgtcgaaaccatcaatccactaaaaaaaagggtaaattgtaggactaattaatggatatccattaacacaaccatacatcttaatatgaaatgtgtgtaccttttccaaatatacgtcgtcgccaacaactatacaatggataattaaatataaagcagaacatttggataaaggccaatatttgattaaagacttggatataatgtgaaggcatatatttgtttttggatagaataaaactaaaaaaagtgtgtgcttaggaaagttcgtccgacgtgtatatgaatcagcaaatacttatcttgatcctctccgtgtgggtcccatttcgacgtgttcacattttccaccaattaatcaatttagaccattataaatagtctcccgctcgctttgctctcttctttctcttattttcctattcttgaaaacacacaacacatctcatttctccgctgtttcgtcggcaaattttcccatttttgattccgaagataatagatattatcaacagaggataaggataaaacccagaacaatcattataatttagtggtgaagttgaccaaatttataaactgatccaattttaaaatctgtaagtcgtcaatatttctgtgtttttttcttagatctataaaactgaaattcgtaaaatttgttaaattctctttctttagatccaatatttgatctcctatgcattttcatacagattctgaatctgattttttttaccctaacctgttacagaagagatatg

SEQ ID NO: 3375 - DNA, 3000 bp, Unknown
  misc_feature (1)..( 3000): cDNA_ID_2156792_gDNA_ID_1620643_Annot_ID_163105 3000 nt of promoter + ATG
tacctttttcttgtaatgtcaacttgagcaataggaccggagaactcaaccaattaactcaaatatcgtggcattaggctgatgacatgaaattaaagtggagtttgacagctaaacttttgatacacacatactcgacaaaactaaaacaacggtaaacctacaagatcttttttattacatgtgatataaacagaaaaaaggagttaaaaaaaaatgattgaacatgcaatggtctaaatataatcgtgcggtagttaacgactgagcgatttaaatttaacaaggatcgaaaatgatttaaatagattccatcatgagtatgatcactttgatctcagacaattttaattaaaaaagaataagaatttagtacgaaataatataagactagctagggaaaagaagagataaaggctggctaaaaaagggaatgcatggaccacgttttggtggttcccataatcacacgagtactcgtccatattgtaattaggtaacatgtagctttcgactttcctatcgattcacaacgttcaatactttgggaaagaaaattctgataaaaaaaatatgatgttcattctaatcatttcaattttctaaacatatagaagaaatgacatcaaccgcatacggggatacctgcatgatattatgatatgagtatagtaagattaactatgtaaacgcgtaatttggtaaaaataatattaggtgagtgtcatatcagataagaaataatatttcagaagtgaaaataataaacataagtgtattttagatttaaagagaatcatcattagctattgttcctgatagtagtttatcactttatttattatttttgcgcacttcgaaatttatgccatttttcattcgcaatcttaggccatgtgctttgctataatcacacgaatatttctcagataatcgctttgataatttatatatttgttgcttatcatgtttgaccaaaaaagaaaaaaaaaatgttgcatattatcaactttgcacaagagaacaacttgtatgctatctcaatcatgttgactcacccaactcctaagatcataagtagatgccaatctgatgaagggaaaccaaaaaaaaacaattaaaaatccgaagaggcaaatctattggttaatgtgaatagattcgtgagatgtaaaaccatgtgaagatgaaacagcaatgaatcgacttctaacttcttaaagctagcttgcattcattggattcttattggctaccacatgcatcgaacaccaaaaaaaaacccatcaaatatttaacactaatctttcaggatctacaaaattaaatttgaagtgaatctaatcaagaagattttctgcaacgaacaccaaaaaaaaaacatatctttaggtccaaataggttaagaactctttgactttatttcttatatcaatatacttgtttgactcacaatttcacacgtatatatataaactatatattgtttgactcacaatttgacacatatatacatgtataaactatgttacaatgatcctatagtatccataagattcccaaagtaggagagattagggattcactaaaaatagacagttatacaaaactaaaatattttgtaaataatgtgattgatgaaatatattaataaaagaagtgattaataagaagaaaaagaagtgggagagataaaagagagagataatgaaaaggaaaggagaaaacatgtcctgaaaagaaggtaagtttgtctgaagagaagggggcacacaagtaagtgctttgtcagatttcgcgtgcattcatcaaaacaaaaacaaaaaagctcttctttcttcttcttctctctttctttcattcattcagttttcttggctccttcctctcctttcttttctttaattttctcaattttcaaagaagaaaagttgtaccgatttttattaaacgaaaggtcactgtttgattgtgtttaagagaaagaaaaaaagtagaagaatcttttatcatcaacctgatctggtttgtgcttaactcgaagagaggaaaagacttctgttttgtttttcttggtttgtagcgcattttgcgttcttgaggtttaaagtcgaagaacaacaacagctcatacttttttatattttctggtttctgtggggctcatagagagagagaaagaagagagattttatacgattatatagctattagatttttgtggtagtggtgttgtctcatgattaagagaagctttaaagaaaactcaagtttgcttctgaggaagacaatcaagaaaaaggtatccaatttttttttcttgtattcaagttttgcaattgaggatcttagggttttaaagaatcgattgatgtagaaagaactcattgtttttttaattttgagtcctcttgtaccaaaaacgatctctgccactagtgtcatgttatgtttttgttagattcttttttagcaaacatccaaaaaagatttgattcatcttgtctattgaataagtggcagtcttcaatttttttctctgtttttcttgattcttgcaggtttactattaaacgacaacgcttttgcaatcgccaccacaaaaagattcaagctttggattcgttttacttgtggacgactaaacaaataagagattaaaaaaaaaaaggtttcacatggttctgcgtttgtgaatgtgtgaagcacttagataacagagaaaaagaatttgattattttaaagagtttatctctgtgtgtgtgtgtcagtaaattcgagctttgagtgggtgttttgtgcatctctaagtttttatctcttttatataaaatcttatatttcttttttcaatgttctctttgagatgtgagattttcacagtgttgtctccttaagtgtgtaactcaagaagcattttggggagtgataacacacaagctgagtcttttttcttctttctgagatatcttcttctatcagtttcttcttcatcatg

SEQ ID NO: 3376 - DNA, 3000 bp, Unknown; identical to SEQ ID NO: 3370
  misc_feature (1)..( 3000): cDNA_ID_1820589_gDNA_ID_1620643_Annot_ID_163104 3000 nt of promoter + ATG

SEQ ID NO: 3377 - DNA, 3000 bp, Unknown; identical to SEQ ID NO: 3369
  misc_feature (1)..( 3000): cDNA_ID_2156784_gDNA_ID_1620643_Annot_ID_163101 3000 nt of promoter + ATG

SEQ ID NO: 3378 - DNA, 3000 bp, Unknown
  misc_feature (1)..( 3000): cDNA_ID_1820585_gDNA_ID_1620643_Annot_ID_47532 3000 nt of promoter + ATG
tttgatacacacatactcgacaaaactaaaacaacggtaaacctacaagatcttttttattacatgtgatataaacagaaaaaaggagttaaaaaaaaatgattgaacatgcaatggtctaaatataatcgtgcggtagttaacgactgagcgatttaaatttaacaaggatcgaaaatgatttaaatagattccatcatgagtatgatcactttgatctcagacaattttaattaaaaaagaataagaatttagtacgaaataatataagactagctagggaaaagaagagataaaggctggctaaaaaagggaatgcatggaccacgttttggtggttcccataatcacacgagtactcgtccatattgtaattaggtaacatgtagctttcgactttcctatcgattcacaacgttcaatactttgggaaagaaaattctgataaaaaaaatatgatgttcattctaatcatttcaattttctaaacatatagaagaaatgacatcaaccgcatacggggatacctgcatgatattatgatatgagtatagtaagattaactatgtaaacgcgtaatttggtaaaaataatattaggtgagtgtcatatcagataagaaataatatttcagaagtgaaaataataaacataagtgtattttagatttaaagagaatcatcattagctattgttcctgatagtagtttatcactttatttattatttttgcgcacttcgaaatttatgccatttttcattcgcaatcttaggccatgtgctttgctataatcacacgaatatttctcagataatcgctttgataatttatatatttgttgcttatcatgtttgaccaaaaaagaaaaaaaaaatgttgcatattatcaactttgcacaagagaacaacttgtatgctatctcaatcatgttgactcacccaactcctaagatcataagtagatgccaatctgatgaagggaaaccaaaaaaaaacaattaaaaatccgaagaggcaaatctattggttaatgtgaatagattcgtgagatgtaaaaccatgtgaagatgaaacagcaatgaatcgacttctaacttcttaaagctagcttgcattcattggattcttattggctaccacatgcatcgaacaccaaaaaaaaacccatcaaatatttaacactaatctttcaggatctacaaaattaaatttgaagtgaatctaatcaagaagattttctgcaacgaacaccaaaaaaaaaacatatctttaggtccaaataggttaagaactctttgactttatttcttatatcaatatacttgtttgactcacaatttcacacgtatatatataaactatatattgtttgactcacaatttgacacatatatacatgtataaactatgttacaatgatcctatagtatccataagattcccaaagtaggagagattagggattcactaaaaatagacagttatacaaaactaaaatattttgtaaataatgtgattgatgaaatatattaataaaagaagtgattaataagaagaaaaagaagtgggagagataaaagagagagataatgaaaaggaaaggagaaaacatgtcctgaaaagaaggtaagtttgtctgaagagaagggggcacacaagtaagtgctttgtcagatttcgcgtgcattcatcaaaacaaaaacaaaaaagctcttctttcttcttcttctctctttctttcattcattcagttttcttggctccttcctctcctttcttttctttaattttctcaattttcaaagaagaaaagttgtaccgatttttattaaacgaaaggtcactgtttgattgtgtttaagagaaagaaaaaaagtagaagaatcttttatcatcaacctgatctggtttgtgcttaactcgaagagaggaaaagacttctgttttgtttttcttggtttgtagcgcattttgcgttcttgaggtttaaagtcgaagaacaacaacagctcatacttttttatattttctggtttctgtggggctcatagagagagagaaagaagagagattttatacgattatatagctattagatttttgtggtagtggtgttgtctcatgattaagagaagctttaaagaaaactcaagtttgcttctgaggaagacaatcaagaaaaaggtatccaatttttttttcttgtattcaagttttgcaattgaggatcttagggttttaaagaatcgattgatgtagaaagaactcattgtttttttaattttgagtcctcttgtaccaaaaacgatctctgccactagtgtcatgttatgtttttgttagattcttttttagcaaacatccaaaaaagatttgattcatcttgtctattgaataagtggcagtcttcaatttttttctctgtttttcttgattcttgcaggtttactattaaacgacaacgcttttgcaatcgccaccacaaaaagattcaagctttggattcgttttacttgtggacgactaaacaaataagagattaaaaaaaaaaaggtttcacatggttctgcgtttgtgaatgtgtgaagcacttagataacagagaaaaagaatttgattattttaaagagtttatctctgtgtgtgtgtgtcagtaaattcgagctttgagtgggtgttttgtgcatctctaagtttttatctcttttatataaaatcttatatttcttttttcaatgttctctttgagatgtgagattttcacagtgttgtctccttaagtgtgtaactcaagaagcattttggggagtgataacacacaagctgagtcttttttcttctttctgagatatcttcttctatcagtttcttcttcatcatgaagttcatgaaacttggatccaaacctgattcatttcaatctgaaggagacaatgttaggtttgtgttctaatcctcatcttttacctttctgttttatgttcttgattattacaatg

SEQ ID NO: 3379 - DNA, 3000 bp, Unknown
  misc_feature (1)..( 3000): cDNA_ID_2999369_gDNA_ID_1620643_Annot_ID_47534 3000 nt of promoter + ATG
agaaaattgcgaaagttcgtagataaaattaaattttgtaatgctatagtatgcgactatctccattctccacaagagaagtagatgtaatagtgagtgttaactgttaagcatttcgggatattactaataatgggcctaaaacttattataaggtaagacccatctttatcaaaatgtttctacaggcccaatatataagtgagagtgacccatgtgtaataatgtagccaatgtagccggtctacataactgaggtccatgctataacaatctgtttttctttatcaatcaatgctagagtttgcccaaaaaaaaaaaaatatatgctagagggtactcattgacattgttactccaaaatatatgaacaaacaaagttaatatatcgatggacatattcgatagttatttatttcacggacacagaaataagatcggtggacaaattaacaaatatacccattcctcagcaagaaacataagatcggccctcacagctgaagctttggcgatgcttctcgctcttcagcaagccaaagatcttggattcacctctctgtcaattgcttctgattcacaacagttgatcaaagccatcacctcgagaactccattaacggagctccatggaatcctacacgatattctcctcctcgcgtcggagattgggtttgttaggtttcactctatccctcgaaatgaaaatcgacttgcagatgccctttcaaaattgggtcttgcttcaatttcgtctttgtacccggttgactccggtttaaatgtttaatttctaatgaaaaccaactttcgcacaaaaaaaaaaaaaaaaaaatgaacaaacaaagtgtatacaattcattaattttctacaacgacaactctacaagtattgatatgatgatagataaattagctaaatagtgaataaaatgtcagttgtttaatagaccacgttgaacatacacgttttaaaatcaaaacacaatcaatttgttgacgtgtttagacatattcgatagttatttatttcacggacacagaaataaattagtttttacttttagtgatggagctgttataggcatgattgttgtacttgttaataatttcccctaatttgtcatattagcaatcgtaaaagagaaagtgcctcatgaactatatgaagaggtcagcgtgagcgtgccagcaacttgagagattcgtgaccaagtatctatcaaaagagctctattattttttgaggctgagtcagcgactaataatttcgttattaaattaccgctttttcatttgtttaatcatacttttcgtatactctatggttaaatcgttaatttgtcgcgaagaggcaatgtgacgttttacacaacataatccaacaaatgaaacaaaaagatattaccataacctattattacctatcacaatcttacctaatctttgtcggtctttgaaatggtacattgcccatcgcataaaggggtatggtgcgactccggctcgtagcagttccgtgggttgatgaatggttgtttcaaaacaataaatgtttcaacttggacgaagataataatttcatgaaaacgaaaccattacatgactatcatcatttcattataagaatataaacatggacgagctcaacatttatttagctgactccttcttttatcatgtgttttatatacaaatacatgactaggatctgacactgtagtattagtattaccaaatcttaaactagacctaattttccctgataaaataatttaaggttattttattccgctgacatttaacatggtataatatatttggacggttcatttcaaacatgtagaatattctaattaaatagaagagactttataatcatattaatcaatatcgataacgtattatccacaatgcaacttattaccctttttgccatgttttgtgaaccgcttggaccgtacaccaaccccaaaatacggtagttcaaatgcggctagcaatgtattttgttgattctaaaaaaaattgtcgattagttatatatatcagacactatctaaaatacccgttttaagtatttggaattaataaaatagtcaaaattggaatactaatttcccataattactaaacttttattttactcgttttacttattatactatccgttatgtacgaactacatttatgtcgtttgttttatctgttttactctaatttgcaccgtcgaaaccatcaatccactaaaaaaaagggtaaattgtaggactaattaatggatatccattaacacaaccatacatcttaatatgaaatgtgtgtaccttttccaaatatacgtcgtcgccaacaactatacaatggataattaaatataaagcagaacatttggataaaggccaatatttgattaaagacttggatataatgtgaaggcatatatttgtttttggatagaataaaactaaaaaaagtgtgtgcttaggaaagttcgtccgacgtgtatatgaatcagcaaatacttatcttgatcctctccgtgtgggtcccatttcgacgtgttcacattttccaccaattaatcaatttagaccattataaatagtctcccgctcgctttgctctcttctttctcttattttcctattcttgaaaacacacaacacatctcatttctccgctgtttcgtcggcaaattttcccatttttgattccgaagataatagatattatcaacagaggataaggataaaacccagaacaatcattataatttagtggtgaagttgaccaaatttataaactgatccaattttaaaatctgtaagtcgtcaatatttctgtgtttttttcttagatctataaaactgaaattcgtaaaatttgttaaattctctttctttagatccaatatttgatctcctatgcattttcatacagattctgaatctgattttttttaccctaacctgttacagaagagatatggagaacatg

SEQ ID NO: 3380 - DNA, 3000 bp, Unknown; identical to SEQ ID NO: 3373
  misc_feature (1)..( 3000): cDNA_ID_1820574_gDNA_ID_1620643_Annot_ID_47537 3000 nt of promoter + ATG

SEQ ID NO: 3381 - DNA, 3000 bp, Unknown
  misc_feature (1)..( 3000): cDNA_ID_1820566_gDNA_ID_1620643_Annot_ID_47540 3000 nt of promoter + ATG
ttcttaccagaacacacatgtcagtgtagttgccatgagaaaatctttcaggcaaacagttataaagaaggtccatcacatgccaactagatggactagaaggaaggcgagccatgagctcagaatgaagtttgtggagatctgttttcctcaacaaatcgggtaaacggtgttgaagcgaatgaagatccacgacactcggtactttcgttgcagtgtatatagtgagcgccaaaaacaggaaaaacccaatcaagtgcctgcaaatcccaaagaacacacacacacaaacacactcaaggctcttgaactttaaacaaggatacatcaagaaacatgattcaacacttacgtccaaacattcaaagtctcattatgaatggtaaagatgctgagaagaatctgtttgatcggccattcggatcggtaatgaccaatgatgtactcattgtctcttaaataagcaggcaatgaatgaaactccaccaattgatacttgactttctgccataacctcttccctttcacattatgtttcttgtccattgtttcagatgaagcttgtggctttaaatgttccttgatctctgcctcatcacccattttctctctactcataaacaaaccaaacccataatatcaatcatacagatctaaatctagctcaatctgaatcattccaagaagttaggaatcaaagtttcaattttgaacgtttatgctaaatcttgttttgttctggataatgaaagtatcgatttttatatgcagattcagctcattcattacctaaagcttcaatccataaatggatttgagaaaattacctgaatttcgaaagacaaaccctgtaagatttaagaaattgagagataagtaattaagagaattatgagaatttttcttcgatttcgtgaaattaggagagaaaaggtgagattttgttacctggatcttcaatgccgacgagacaaaatcttctaagaaagatctctctctttcttaaaagtcaatcaaaatagatctcaaggtttcgtttttgtcgaaaacagagagttcttgttttggtatgaaatcgaagaaagaagaaaaaatagaagacgacgatggaagtggaagctctgaagccacaaagctttatgaattttatatatttttatatatttcaaattgggaccactagttttgttttgtttattagtaggacccttttatttttctttattttcgtttgggctaagaatttaatagctagagtatttattgtacgaggatggaaatacatcaaacagagaaaatgttttgtcgaaaatattaacaaatatttctcctatgaaatcaagtctttctcaaaaaaaaaaaaacttatttgatatggggaatttaaattaagggaaaattaatttaacataccatatgagagcaaaaaataaaaaataaaataattgtgctccatggattcttcttattaatgattaaaattttcaattaggtgaaaaggaaaaatttatgattgtggcacatttattgcatttaatcatctttcaactaaaaatggagatgtctatttatggttttgtttatttggtcggatttcttttttttttttgtatagaaaatattgacaacgaattgaatttcagttctagtttatgtttggatttaattttaaagcaaaaactatctatcgttaagaattttccgaaataaagattcacatttcagaagatttttttgttttgtttcgagtcggttttggttattttcttacataaaatacacagaataattcgaaccataatattgaattgttattttggttcacgtacgtttaccgttggagactttatagctcttcgtttatgcttgtacggatcaataatcatgcatacttaagtatttggaaagaagaagaaaaataaaagattttatcacaacataaatagtaacgtgaattggcataaatgaatcgcaacaaacaggtcgcaatcacaatgataaaaatatctactggcactacttcataaggaaggatcttgtaagaatattactttcgttttattcggataagcagaagatattcgttttttttctggctcgttttttcacctattcaagttttatgtcaatttggttacgtactccaaattgtggcacttgtaatttgacactctttatcaaagttatcacttatcttacttgccaacgaaactagtatcagtattcagagccattaatacaaatcaatcaaatcttagaggaagaactaaaatgatgtacataaattgatgttttagttttgccaattagcataaataaatacttttaagaatcttttcacattttttctctaataaaagtgaaacatacacattaaatcttttcacattttttctctaataaaagtgaaacatacacattagaatcagttgttcaccatatataaaaaggctcgccaaattaagatctggacatacttaaaatgggattgggctggtaaatattctaaaaacattccttaaaaagcccactctgataagtccgcgacttcgaaactccgatgcagaccgaaattggttctatagtttgggagagaatgaccagaccggttcaatcaattttccttcgatggacccaaccgaataacttccatgtggggacacaacttaagcttgtaacgaccagacattcaaagagttccgtcaaatagtaatagagaaagactaaagaagaaaatatggaaaaataaacaataaataataatagaaaaagactattgaagaaaatatggaaaaataaacaataaataataatagaaaaagactattgaagaaaatatggaaaaataaacaataaataaaatacctacttaccgtgggtcccactacggtactactgccgccttctccgaccgtaatcagccgtcacctgccggtttagttacaataacaatttagtatttatttgaattctttctctcatcgaagtctaaggaagatg

SEQ ID NO: 3382 - DNA, 3000 bp, Unknown
  misc_feature (1)..( 3000): cDNA_ID_1839219_gDNA_ID_1620643_Annot_ID_47541 3000 nt of promoter + ATG
ctaaaacaaaccttattcctagatgatgaagaaacgctatgtcctgcacatatatcaaatcacttcaccttctactcaaatacgagaactgaaaactcaagcacattgcaaagaaaagatcatataacaaagcaaaataagaatagtaacaactttagttgaggcaagcaaacaatcgaacaccttgcgtgcttttttctcataaatcaaagtatataatacggtgaagaaagacggtaccttcaaaatggcatcacaagaagagccggcgatgatctcgccggagataataacgacgaatgtgcagccacggtgagcccaaagataaggccatgcttcacggaaccaacgcacaaactgtttgtcgtcaactggatgctcagcctccacatcgccggctgcagtcaccgcgtagtcaaacatattgcatttcgccgccgttatagaactaaccggcttaaaccatgaacagttaaaccggaattgagtagggtttagcttattttttggtttgaatgacgaaaaattcgactttgattggcgaaagtggtaaggaacatagtagctagaagtagaagaagaacccactaaagctcctcgctccatcttccttagacttcgatgagagaaagaattcaaataaatactaaattgttattgtaactaaaccggcaggtgacggctgattacggtcggagaaggcggcagtagtaccgtagtgggacccacggtaagtaggtattttatttattgtttatttttccatattttcttcaatagtctttttctattattatttattgtttatttttccatattttcttcaatagtctttttctattattatttattgtttatttttccatattttcttctttagtctttctctattactatttgacggaactctttgaatgtctggtcgttacaagcttaagttgtgtccccacatggaagttattcggttgggtccatcgaaggaaaattgattgaaccggtctggtcattctctcccaaactatagaaccaatttcggtctgcatcggagtttcgaagtcgcggacttatcagagtgggctttttaaggaatgtttttagaatatttaccagcccaatcccattttaagtatgtccagatcttaatttggcgagcctttttatatatggtgaacaactgattctaatgtgtatgtttcacttttattagagaaaaaatgtgaaaagatttaatgtgtatgtttcacttttattagagaaaaaatgtgaaaagattcttaaaagtatttatttatgctaattggcaaaactaaaacatcaatttatgtacatcattttagttcttcctctaagatttgattgatttgtattaatggctctgaatactgatactagtttcgttggcaagtaagataagtgataactttgataaagagtgtcaaattacaagtgccacaatttggagtacgtaaccaaattgacataaaacttgaataggtgaaaaaacgagccagaaaaaaaacgaatatcttctgcttatccgaataaaacgaaagtaatattcttacaagatccttccttatgaagtagtgccagtagatatttttatcattgtgattgcgacctgtttgttgcgattcatttatgccaattcacgttactatttatgttgtgataaaatcttttatttttcttcttctttccaaatacttaagtatgcatgattattgatccgtacaagcataaacgaagagctataaagtctccaacggtaaacgtacgtgaaccaaaataacaattcaatattatggttcgaattattctgtgtattttatgtaagaaaataaccaaaaccgactcgaaacaaaacaaaaaaatcttctgaaatgtgaatctttatttcggaaaattcttaacgatagatagtttttgctttaaaattaaatccaaacataaactagaactgaaattcaattcgttgtcaatattttctatacaaaaaaaaaaaagaaatccgaccaaataaacaaaaccataaatagacatctccatttttagttgaaagatgattaaatgcaataaatgtgccacaatcataaatttttccttttcacctaattgaaaattttaatcattaataagaagaatccatggagcacaattattttattttttattttttgctctcatatggtatgttaaattaattttcccttaatttaaattccccatatcaaataagtttttttttttttgagaaagacttgatttcataggagaaatatttgttaatattttcgacaaaacattttctctgtttgatgtatttccatcctcgtacaataaatactctagctattaaattcttagcccaaacgaaaataaagaaaaataaaagggtcctactaataaacaaaacaaaactagtggtcccaatttgaaatatataaaaatatataaaattcataaagctttgtggcttcagagcttccacttccatcgtcgtcttctattttttcttctttcttcgatttcataccaaaacaagaactctctgttttcgacaaaaacgaaaccttgagatctattttgattgacttttaagaaagagagagatctttcttagaagattttgtctcgtcggcattgaagatccaggtaacaaaatctcaccttttctctcctaatttcacgaaatcgaagaaaaattctcataattctcttaattacttatctctcaatttcttaaatcttacagggtttgtctttcgaaattcaggtaattttctcaaatccatttatggattgaagctttaggtaatgaatgagctgaatctgcatataaaaatcgatactttcattatccagaacaaaacaagatttagcataaacgttcaaaattgaaactttgattcctaacttcttggaatgattcagattgagctagatttagatctgtatgattgatattatgggtttggtttgtttatgagtagagagaaa

SEQ ID NO: 3383 - DNA, 3000 bp, Unknown
  misc_feature (1)..( 3000): cDNA_ID_1393996_gDNA_ID_1620644_Annot_ID_47547 3000 nt of promoter + ATG
agtttgcttatcttgacatttagcaaagcttcgactttgaccaaaaaaaaaaaagtagaaaaacaaaacaaattatttcttattataacgtaacaaattataagcttatagttgcggcggataaaataatcagatctaacaagaaagaaccgttacttggaagatggaatgatccatggtaattgaatgaaacactcacctagtccgacatgatcgcacttggctatgcaatgggaatgaaactgtgcgttttagctttgccgttttgttctcaaatatcttctccatgcactttttctgatcggccgaattaaccacaatcgccaaactctcacaattgttatctttagtttctttattcccactcttctcggcagaaccgtcgacacactgttcttcttccaccatgaagctagcaacttgcattgaaccgtggcttgacgagaaaatcatgacaataccgagacctagccagatgagaataggaagaatgatcagggacaaggcgtagtagatgatccattggaatccgctatggttcttgccgtttaatgtccattcaaaagcaaaagcaattccggagaaaaatgtggcaaaactgcctataaaaaagattctaacgattctcgggttaggaacgtcgaaaaatgtcttgatgtggttaagccaacgctttggtggttgcggtggtggactagtgttggtggtctttagcttttggtccatgcttttttttcttttctttaagtggaactttgagagtaagcttgagatgaagagactacataagtcgttgaagcttgactctaatataaggagattattaaatttttttcctttttatttgttgaagttgttcaaattcttgcgatttaatgggtgagatttcgaattttgaaattacaataatacaaagtagatgataatgtaactatttacataaaacaacaaaaccaagtcaaaacagtactactagatatttgccttttaacggaactatcgacagtaaaaacaataacgagcctaacttcatctttcattcgacttttgatcctaattgttaaatctaaagcgacaaaaaaaaaatcaaaagggatgacgagagagcaatacttgatatatagtggctactggctcataaatcttggttacttgatagtgatgtagcggttggtgccgtgcctagcccaatagttcttgagatcaaccggagaggaaagctcatgcccttcaccagctaaacgactaagtaacctggagaagacacttccactcattttcctgccgccaactcgggaatgccgcttgtttggcatctgcgggagcggatactcagacaaagtggttgtgcagcaagatgattgccagccgccattgccccacttataacactgacgagcagtcccggtgcaagtgcacatgggcactggcattgtcatctcatcgaacgtgactaggacatcgttactgtcccaatcctttctgcttttctttccgggagaagcaactggacggttcagatcctcgcccattttctttccctgcttgctctctttcttccttttggtcggtctcgtgttggctgcttcaggtggaatagttgatataggggaaggattaggtaagtggctttcttcagttataaacctttgggaaccaccgcgcttggcacacgacaaaatgtagttaagattgttttcacggtatcgaagagcatttaacgcactttctgtctccatgatagcattatctctttcagagagagctttgtcccgctgctcaagtgcttcatcacgagaggctaatgcttccttagttgctgcaaccgcttcgtttctttccttgacagctgcgtccctctcagcaaggatggagatgatcttcttattcatcaccaatgcattatgttgctcctttttcggcatcacattctactgcacacacacacagtttgtacttaggtttcattcaaagtaacgaaaacatgtttttttgttttagtgatctgcttcttcaagtgtttttgcttaccacagattgtgttcctttgtagtaatcgggcttgtagcgcccattttcatactgcccaccactctccatcctcttactttcaactgcaatggagaaattgatatcaaacattgtgaaactaggctgacgagtaactaaaaacagaaatactccaaatcataagcagttccataacatacatttaacccaaataaatcgagaaatcgtatcatatcccacaagtcagcgtaataccatccaaaccaaacgatgaagaaaacaatggagcaagtaagatacgcgggaacatatatagagttcgaatttcaagttaaagcaacgacgagagagctcccagaagaaccaaaattcgaagaaaatgaaaattgtagagagaaaaacttggcatgctgaaattaacagataggtcaagaacacgattaacgatcgaagacttacggatttcaacgagccttcaggagaaacaagcaacggaaatcgagaaagatctgaggatacttggaaatggtgtctgtgtaatgtggcaagaagtggaagacgagccaggtactctcggttcaatttactaatatacccttgtcttaaaactgctaaacgagagcaagcaagaaggttattattgtctatccatcttactcgtaaaaatgcaaagacgtttctgtttcaatctctccaaatataagccaaacaggatatgattttggttctggtggatcattctagtgggccgtatgatgggcctaagaataaggcaactaatctgggtcgaatacgggtagacccgggttgagatcccgacgtgtgcgcttcgctgttgtagtagtagtatatctcatcatcaatcaggcttttgagcctcggaaactcaatccttgtatattcaacggagagagatctgcgagagaaagagagatcagattccggtgttccaaggaagcacatattttaagatccagaatcgcctgagag

SEQ ID NO: 3384 - DNA, 3000 bp, Unknown
  misc_feature (1)..( 3000): cDNA_ID_1820655_gDNA_ID_1620644_Annot_ID_47550 3000 nt of promoter + ATG
aataataagtagaaacctctgattaattaaggaggaagtagattaagggttaggattacgcgttggtatcaaggaactagaagaagaagaagaaagggaagaaattatttaagattataaaaatcgctcctttaaaatctttttctacgatggaggagaagcttgagagaccagaagagacgacgaccaaatccacgcgccgagagtatcaaataagcatactttgctgtgacaaggcaaaatctgttaattactactttgagtaaatttctccaatcaattactttttttctttaattgtgtgttttgactaacgaaaattatgattaaagtagtacctaacaagaaatgtgtgtagtatgatttaggagaaaatattgggaagaccaaatcttttatagtggatatggttttgagttataagattgtttaaagtccattatatcagagaccattatcagacaaaaagaaaaatgatatcgactaaaaagtgaagacgaaagactcaatgccatctgggaggtcattgatgtgtctccctgaaacacattcgttgtcttgtttcctttgttttggtgaaaaagttttttttgtcacaatctttatatgatttcttggatcctatatctgattttttttcttcctttttttgacggcagctgaaatagttttaggcaacataatgtgctaagatttaggacgtgtgactatttttaaaagtaaaaatataaactaaaataaataaaaaagggggaaaaaataagagccacaaaaggaattaaaaaaaaagacaaagaggtgggtgggccaaatgtcaccagccatttaaaaaattggtggtcgagaagtagttgaaagcaactctcaaaactctactagtggccttggtttaatgttgtttttatttccttgcccatcttctcaatttcatttaactaacatcttcacaattatcttagtttttttttcttttcatcccaaagtttattctttctctcctccataaacattcttttgtagcttgttttatgacactttggcatttgtaaaatttgaaagaaaagttttgacgcaccctattcataaacacgagaatcaatatttgcataattacaatgttctcttctgttgaaaatatagattatggtttttataaaaaacagagcatccaaagaagagagtttgcctgccatgtgcatcattgctaaatgttgggctttacttgtaatgttgggctagatatccattatatttgttatcaaaatatcattatgaccttctgggccgggagaaaaggtctctcactaatgggctacgatgaagtggagtgtgaggtccacgtggcgggtttaaggttcctaattaagtttcaggggtaaaccggtcattaactacccaagccgagagagagagagtctgagaaaccggcgaatagaagaaaagagagaatctttgggaccaaatcaatggagtggtcccttcagacaaaagttaagaagaagaagacgacgacgactacgacgaagaacaaacaactaccaaacttgtaggcagtagcaggaggaagtgggtgggattaacattgtcatttctctctctttttcttttacaaatctttccgttttgttttcttttggttttccggtgagcactgttgtgtttccaattccggcactctttagggttccctttcagaagaaaacttcacattgttgtttctctcaaccgtgacatcttggattactacttctgactactttcctttttcatgtgccccaaaagataatagttactttttcaaaatctggttttgttgtttgggtttgtgtcattcattgataaagtcactaatggagaagtacaaaacaattgcaaaatttcgaatctgtgttgtcattgctgaattctgtagtggatgtttgcttgcagtttagagcttcggagtgcgaagagtgagacacaagaggattctttctggaaccgcattattccctttagaggaggaagaagaagacaactcactcacaaggtaaaaacagctcctttgcatgtttctttatcttgcttgttagagatgtagacaagacacgcactttatagacgcaaaatcttagtattctggttcaagattgagatgcattttgtgataatgattaaatgttctgttggtgcaattgataaggtttcattgagttttgactaagtaaactccaagttactttttttaacctttaaacacgcatttgtgactgaccttgtctccctctccattgatgaattcaaaaactacaaagctattatttttatgtttgattttgcgtgtacatatattataatccaagttacttttcaaagtttagagtatgataacttatttttttgttctctacactagatgtatatgcattttataaggagaagcatggtctgtgggaccatgcattacctctcttattcgattaaacaatgtttagatttggtaaaacgtgacttagtcctcaagcatagtgggtgaccattacagataaagtcggtaatctttgttttgtttttcttcttcttcttcttcttcagttgtggttgatcaccttctaagtaaactgtcttgtataatcctaatattataatgacaagaagtcttctcttatttgtgtctttgtggttcatataaaatgttcaagtgttctctttcatcacaacacagaagcttttccttctccaggcatgtttcatgttttagtctcttagttttagtttggtgagatcagatttctgagtttttccatttatttatggttgtgattagttggaaaataagggtccttcctgcttttgaagttctttcacaagtcctgaatatattttctgcagtaaatatgctaagactccaatcttagaggtcttaagtttgaactgtttcaggaaaacaaaggttcctctggttactctgaaatattcaaaccaatggtgagcaattggtagcacttgctaaagaagatg

SEQ ID NO: 3385 - DNA, 3000 bp, Unknown
  misc_feature (1)..( 3000): cDNA_ID_1820651_gDNA_ID_1620644_Annot_ID_47551 3000 nt of promoter + ATG
ttagcatatttactgcagaaaatatattcaggacttgtgaaagaacttcaaaagcaggaaggacccttattttccaactaatcacaaccataaataaatggaaaaactcagaaatctgatctcaccaaactaaaactaagagactaaaacatgaaacatgcctggagaaggaaaagcttctgtgttgtgatgaaagagaacacttgaacattttatatgaaccacaaagacacaaataagagaagacttcttgtcattataatattaggattatacaagacagtttacttagaaggtgatcaaccacaactgaagaagaagaagaagaagaaaaacaaaacaaagattaccgactttatctgtaatggtcacccactatgcttgaggactaagtcacgttttaccaaatctaaacattgtttaatcgaataagagaggtaatgcatggtcccacagaccatgcttctccttataaaatgcatatacatctagtgtagagaacaaaaaaataagttatcatactctaaactttgaaaagtaacttggattataatatatgtacacgcaaaatcaaacataaaaataatagctttgtagtttttgaattcatcaatggagagggagacaaggtcagtcacaaatgcgtgtttaaaggttaaaaaaagtaacttggagtttacttagtcaaaactcaatgaaaccttatcaattgcaccaacagaacatttaatcattatcacaaaatgcatctcaatcttgaaccagaatactaagattttgcgtctataaagtgcgtgtcttgtctacatctctaacaagcaagataaagaaacatgcaaaggagctgtttttaccttgtgagtgagttgtcttcttcttcctcctctaaagggaataatgcggttccagaaagaatcctcttgtgtctcactcttcgcactccgaagctctaaactgcaagcaaacatccactacagaattcagcaatgacaacacagattcgaaattttgcaattgttttgtacttctccattagtgactttatcaatgaatgacacaaacccaaacaacaaaaccagattttgaaaaagtaactattatcttttggggcacatgaaaaaggaaagtagtcagaagtagtaatccaagatgtcacggttgagagaaacaacaatgtgaagttttcttctgaaagggaaccctaaagagtgccggaattggaaacacaacagtgctcaccggaaaaccaaaagaaaacaaaacggaaagatttgtaaaagaaaaagagagagaaatgacaatgttaatcccacccacttcctcctgctactgcctacaagtttggtagttgtttgttcttcgtcgtagtcgtcgtcgtcttcttcttcttaacttttgtctgaagggaccactccattgatttggtcccaaagattctctcttttcttctattcgccggtttctcagactctctctctctcggcttgggtagttaatgaccggtttacccctgaaacttaattaggaaccttaaacccgccacgtggacctcacactccacttcatcgtagcccattagtgagagaccttttctcccggcccagaaggtcataatgatattttgataacaaatataatggatatctagcccaacattacaagtaaagcccaacatttagcaatgatgcacatggcaggcaaactctcttctttggatgctctgttttttataaaaaccataatctatattttcaacagaagagaacattgtaattatgcaaatattgattctcgtgtttatgaatagggtgcgtcaaaacttttctttcaaattttacaaatgccaaagtgtcataaaacaagctacaaaagaatgtttatggaggagagaaagaataaactttgggatgaaaagaaaaaaaaactaagataattgtgaagatgttagttaaatgaaattgagaagatgggcaaggaaataaaaacaacattaaaccaaggccactagtagagttttgagagttgctttcaactacttctcgaccaccaattttttaaatggctggtgacatttggcccacccacctctttgtctttttttttaattccttttgtggctcttattttttcccccttttttatttattttagtttatatttttacttttaaaaatagtcacacgtcctaaatcttagcacattatgttgcctaaaactatttcagctgccgtcaaaaaaaggaagaaaaaaaatcagatataggatccaagaaatcatataaagattgtgacaaaaaaaactttttcaccaaaacaaaggaaacaagacaacgaatgtgtttcagggagacacatcaatgacctcccagatggcattgagtctttcgtcttcactttttagtcgatatcatttttctttttgtctgataatggtctctgatataatggactttaaacaatcttataactcaaaaccatatccactataaaagatttggtcttcccaatattttctcctaaatcatactacacacatttcttgttaggtactactttaatcataattttcgttagtcaaaacacacaattaaagaaaaaaagtaattgattggagaaatttactcaaagtagtaattaacagattttgccttgtcacagcaaagtatgcttatttgatactctcggcgcgtggatttggtcgtcgtctcttctggtctctcaagcttctcctccatcgtagaaaaagattttaaaggagcgatttttataatcttaaataatttcttccctttcttcttcttcttctagttccttgataccaacgcgtaatcctaacccttaatctacttcctccttaattaatcagaggtttctacttattatttccacttctcatctctttcaatcgcaatctgagttctggctaaagattttgtcttgaaggtgagattcattgttccgaatagagtgagaaaaagacttataagattgaaaaagcaag

SEQ ID NO: 3386 - DNA, 3000 bp, Unknown
  misc_feature (1)..( 3000): cDNA_ID_3409035_gDNA_ID_1620644_Annot_ID_163163 3000 nt of promoter + ATG
ctttctttcctctatattcacgatcctgccattgtacacccaatcatacgctcctgagatcctcatgacttgttcttaccgtactccgcgagacatgcgattgatgattcttgactgtattcattgagaaaaactgttcgcaaaaaccttgagcttcatcatcgtccattactcacctttcagtttcagatgcccaagcaaaaagctccaaggaagcagctcaagtcctataaactcaaacacatcaacaagagtattcaaggtacgtctgacttgttcatcctcaatttgaaattcgtggatattgaaagtgaatcgttcgatgttgttttgtggttaaaaagagggagatgctgtgttgatgcggtcgtcggagcctggaaaaccgtcgtacgtagcgagggtagaggcgatcgagacggacgcgcgtggatcgcacgcgaaagttcgtgtgaggtggtattatcgccctgaggaatctatcggagggaggagacaattccatggagccaaggaggtttttctctctgaccacttcgattttcaaagcgccgatacgattgaaggaaagtgtaaggttcacagtttcagtagctacaccaaacttgactctgttggaaacgacgacttcttctgtcgtttcgagtacaattccactaccggcgcgtttgatcctgacagagtcaccgtgtatgtgttcctacgactctctgttactttattcgagaagaaaatactgattgaatgatggaactattatcggttgaattgaggcttttttggaaattagattgtgttgctttagtgtaggcattgattgttaataattcattgatttgtcatctaaattggtttcatgaagttgtttttgcaaagagaagtaatcaattgagtttaaattgattttttctgtttgcaggttctgcaagtgtgagatgccgtataacccagatgacttgatggtgcaatgcgaggagtgttctgagtggtaagtgttcacttatttgaaactctgttttaatcttcttgagtcacaatctggaattgctcgtatgtttttcgtgtatccatgaggtcctagttgatatgctattgaggttgcttgagatgaatgcttttgtcatgctttacttcggtgatgctcttccttactcatgttcatgttttgtcttatctgatattgtggaaactgcagatgaataggaacataagctgatactctagtctgaacgtttgtaatatctgtgattaacattctaatgtatatgttgcggattttcaaattttcttacacgttactgattgagtcgctgttaaggtttgggtttttctgcagcttcttagtttgtgccttgggtctttcacccatgttagcttgctatatgacacaagtaacgtaaatgaagtcatactgaaacaaatagtgatcgtttgatcttggaagttggaactgttaagtgttaagcttaatctttttacttttttttttgtaaagagaggattaaggttttttgtttcgaatgtctttgtcagttgcctttgatgttacagcaaactaacattggctcaggtttcatccttcttgtataggaacaacaatagaggaagctaaaaagccagataacttctactgcgaagagtgttccccacaacagcagaatttgcacaactctaattcaacttccaataacagagatgctaaggtatttctctatttctcatttcagaaaatatctttagtttttgagggatggtcaaacccgttgcaaataggcttgaataaatttaaggtatttaagttgaccgttcgttccacatataaagctagccttgccaacaattgtaagctcttggactgataaaatataccaacttaaggcagaataaacacataaacccaaagtatatgtgtcattaaggtcaaagacaaccttgtgaaatgttttgtcctaactaacaggtgaatggaaagcgcagcctggaggtaactaaatcgaagaacaaacacactaagcgaccaggttaacataaacttgtaaaggctatagatatctggttggtgagtctgagtatcaatcgtgtaatctacaaaggtggttttgttttctttccctctctagttttttctttcttaaaaaatgagggtttaggtttgttggcttgattgttgtataatttatatgtatagcgtatggtggtttctcatctcctttagttgtcacatataaaatttgggtaaaatggtttgtttataataagaaaacaaaacaaacaaacaaacaaagagagtgttggttccttatttgtttgttttcattgtgaactctagaaacccttcattctttattagtttttcattctttattaattctaaaacgcatattcaaagagacatatttgatcatcgtgtcttcataatttggttcaaagtacagccaaaaaccaggaggtacactaaaaatcaataaaattacattacaaattatttttagtacactgggaacataaataaatgaatcagagaagagaaacatggcaactaccgatcatgagcttctacatttgtctcagaaaaagaggaagatagaactattttttaaagtttttagaaaagagagaattaatattatccaagacaacacggcactgctaacaacaagttgaacctatcccattccattactccatacccattcaatgattaacacgtggttctacatcattggttaactctctcctttccccttggataaggcatcttaaaataataataaataccataaatatcttccgattttttctccgactataataatgatgacaacaatatcttttaaaattatcttaaaagaaaccgaaagctaatctccaaagggaaaaagacgtgtagcagagacctatacatacacctatacattcacgttgcgtgtgataatctactgagggttctatctatattaatccttctctgcttccttcaatctaattgcaaatcaaatg

SEQ ID NO: 3387 - DNA, 3000 bp, Unknown
  misc_feature (1)..( 3000): cDNA_ID_3093898_gDNA_ID_1620644_Annot_ID_163162 3000 nt of promoter + ATG
cctcaacttgtacctttggaccagtactatatagtagtgtttatgtagagacactcatgtgggtgagtgtatgtagaggttgatggggtataagtgtgggcaaaagggtaagaataatgtgttggctttatagataagcagcttaggtttcctttgtcttttttaactccttcctctcattttcttgatttgatagctactctctcctttgctttcaatgcccccaaattgacttgttttggttttggtttcacacccggtttgatctggtttagaattcagggaacttaaacaaaagcataccgggtatgtaagtcaattagtatacgttttaatcacaaattacattaaatttcggtttcatagaaggaggcagatattataattgataggaacttgacggtagtactagtatgattaagttagttaatttttgtttcatttaataacactgagaactattaattggtagttaagctcatttgtttctttagtttaaatgagtcttaaactcttaatgctttagaaaaatattatgtaatttatacgaatgtaaggaaaaacaaaaatgatgaatcagtttaattgtttcttttatattaccgaaataggtaaagaggcctagaagtgggaacttttaaggctcttatggaagaaaaagtgcaaaagtggaatttaatagtacaatctttttggtctaaaattcatctttttagtcagatgctagttaatctaattaatagaaacgacaaaaaaatcgaaataaaaactaattaaagaaatggaaaaggtgggggaactttgagaaatggccagctcttcatgccagcttttgtcttccatcatccatgtgtatatctacttccttttttttttttttttacctcaataaataaatatcgccgctctttttttttatatagattttatgtgtattagttgaacaaatagtataaattattgaatggcaaatccattttccaatcttcttcatacactcaacaaacactgccatgtatttgatattggtttcggtataaacctaaccaaccatagcttatttaaaaaccatagctttatgaacttcaatttattcttacagattttggttcagtttctattccggtggtttgtatcggttctgtctaacttgattgaaaatggtacaatatgctgtaatcgttataaagtggccttaatgaccgttgagaattgagatttagacatgatctaattgtattaacaggctagacatgatcatcgcttgttcatgtatctttttaatgaatgaaatttcttaaatgttctcgtagtaatcccaataaccaaacatactcgtattaatataagctttgcggtcatgtcggccatattgttcgaatttaaatgagtttttttttggtataataaacgctgaatacttttgatataaaataagtagagtggatctgatcttttgaagaataataattttagataatatataatttatgaggaagaagacgacaaaaaacacttttagaggaagaagatatggatgatctctctcgattctcgaatctttcccctcgttacttattttttttttgtcaacttcccttcttgcattaaaaatctatacattcattttgactgactctttgaagaaaatttttaagaatttttgagtttgggtttcaacgaagtaacttcgtcaggacttggtactaaaaaacgatattgttgatctcatttttttttttttttatccaagctgctgcgtggaatcatatcgtcttttggtttgcatttgatgtacataaagaaaaacaaacaaaccaggtaacaaatcgttttcaaagaaaaaaaagaaaaggttctttgcgtgattttaaaagagatcaaattttttatataatatttgtagatcttgagtcacatggatgtactactggactttttgaaaaggttcttcgtgcactttttagacattccttcttataaaatagtatgcatgggacctttaccaattaactactaccatcaattattcatcgatggactccaattaatttcaaatttgtttccatatttttgtgtaacctaacaaaatccaatcattcatcgatatatcactgtccttgttttgtgttaaataatgctaatttgctctgctaattgactattcttcgatttcgatatctattttcttgttaccaagtttaatctcgaattgtcacattaattttcatatttttgatcagtcggtgcgtcaatttttgtgagcggagtattaattatatcgtttgtctttgtctttgtcttaaatccaacaatgggttcgtggaccatttcctgacatgtttattgcttctttcaatcatgtccgtccaaatcccgtagatctcagtgtatattaatacgtacaatcccactttagcttttatttctgtcttcaaaggaaaataagaaaaagaaaaaatcgtatgagagcttttgtggtccaaattgtgactaatttttttgaaaatacgtttgtgtttacgttatatacacatttacgatttacatctccaattgttatatgctttcttgaaatttcgaccgggatattatatgccttgtccaagaaaaaagaaagagagacctgaatcttggaactaagttatttgggggtgtcactcatgggccaatattgggtccattttgaaaagcacatcactatttcaacccaattaatgagagtcccatactaacgctgatgttactattgtaccgaaccagttttgaagcccattaaaagcccaatacgaaagtacgtttgtaaatttgggagcccaagaggggtaaatatggaataaaaaatacgcgatgtggacaaaataatttacagctactatctctcctccgtcttggcttcgtggtggtctctctgacattatcgtcagacaaataatttctaaatatctctcctctcctctcgtttgattccaaaaaaaaaagctcatcgacgaacgaacg

SEQ ID NO: 3388 - DNA, 3000 bp, Unknown
  misc_feature (1)..( 3000): cDNA_ID_3093904_gDNA_ID_1620644_Annot_ID_163161 3000 nt of promoter + ATG
ccaccacgaagccaagacggaggagagatagtagctgtaaattattttgtccacatcgcgtattttttattccatatttacccctcttgggctcccaaatttacaaacgtactttcgtattgggcttttaatgggcttcaaaactggttcggtacaatagtaacatcagcgttagtatgggactctcattaattgggttgaaatagtgatgtgcttttcaaaatggacccaatattggcccatgagtgacacccccaaataacttagttccaagattcaggtctctctttcttttttcttggacaaggcatataatatcccggtcgaaatttcaagaaagcatataacaattggagatgtaaatcgtaaatgtgtatataacgtaaacacaaacgtattttcaaaaaaattagtcacaatttggaccacaaaagctctcatacgattttttctttttcttattttcctttgaagacagaaataaaagctaaagtgggattgtacgtattaatatacactgagatctacgggatttggacggacatgattgaaagaagcaataaacatgtcaggaaatggtccacgaacccattgttggatttaagacaaagacaaagacaaacgatataattaatactccgctcacaaaaattgacgcaccgactgatcaaaaatatgaaaattaatgtgacaattcgagattaaacttggtaacaagaaaatagatatcgaaatcgaagaatagtcaattagcagagcaaattagcattatttaacacaaaacaaggacagtgatatatcgatgaatgattggattttgttaggttacacaaaaatatggaaacaaatttgaaattaattggagtccatcgatgaataattgatggtagtagttaattggtaaaggtcccatgcatactattttataagaaggaatgtctaaaaagtgcacgaagaaccttttcaaaaagtccagtagtacatccatgtgactcaagatctacaaatattatataaaaaatttgatctcttttaaaatcacgcaaagaaccttttcttttttttctttgaaaacgatttgttacctggtttgtttgtttttctttatgtacatcaaatgcaaaccaaaagacgatatgattccacgcagcagcttggataaaaaaaaaaaaaaatgagatcaacaatatcgttttttagtaccaagtcctgacgaagttacttcgttgaaacccaaactcaaaaattcttaaaaattttcttcaaagagtcagtcaaaatgaatgtatagatttttaatgcaagaagggaagttgacaaaaaaaaaataagtaacgaggggaaagattcgagaatcgagagagatcatccatatcttcttcctctaaaagtgttttttgtcgtcttcttcctcataaattatatattatctaaaattattattcttcaaaagatcagatccactctacttattttatatcaaaagtattcagcgtttattataccaaaaaaaaactcatttaaattcgaacaatatggccgacatgaccgcaaagcttatattaatacgagtatgtttggttattgggattactacgagaacatttaagaaatttcattcattaaaaagatacatgaacaagcgatgatcatgtctagcctgttaatacaattagatcatgtctaaatctcaattctcaacggtcattaaggccactttataacgattacagcatattgtaccattttcaatcaagttagacagaaccgatacaaaccaccggaatagaaactgaaccaaaatctgtaagaataaattgaagttcataaagctatggtttttaaataagctatggttggttaggtttataccgaaaccaatatcaaatacatggcagtgtttgttgagtgtatgaagaagattggaaaatggatttgccattcaataatttatactatttgttcaactaatacacataaaatctatataaaaaaaaagagcggcgatatttatttattgaggtaaaaaaaaaaaaaaaaggaagtagatatacacatggatgatggaagacaaaagctggcatgaagagctggccatttctcaaagttcccccaccttttccatttctttaattagtttttatttcgatttttttgtcgtttctattaattagattaactagcatctgactaaaaagatgaattttagaccaaaaagattgtactattaaattccacttttgcactttttcttccataagagccttaaaagttcccacttctaggcctctttacctatttcggtaatataaaagaaacaattaaactgattcatcatttttgtttttccttacattcgtataaattacataatatttttctaaagcattaagagtttaagactcatttaaactaaagaaacaaatgagcttaactaccaattaatagttctcagtgttattaaatgaaacaaaaattaactaacttaatcatactagtactaccgtcaagttcctatcaattataatatctgcctccttctatgaaaccgaaatttaatgtaatttgtgattaaaacgtatactaattgacttacatacccggtatgcttttgtttaagttccctgaattctaaaccagatcaaaccgggtgtgaaaccaaaaccaaaacaagtcaatttgggggcattgaaagcaaaggagagagtagctatcaaatcaagaaaatgagaggaaggagttaaaaaagacaaaggaaacctaagctgcttatctataaagccaacacattattcttacccttttgcccacacttataccccatcaacctctacatacactcacccacatgagtgtctctacataaacactactatatagtactggtccaaaggtacaagttgagggagagagtgagaagaagcaattttgttatattcaagaaacaataaaaaataaagttatttttgtaatacagagaggaaagaaaatagaaagatg

SEQ ID NO: 3389 - DNA, 3000 bp, Unknown
  misc_feature (1)..( 3000): cDNA_ID_3071102_gDNA_ID_1620644_Annot_ID_163158 3000 nt of promoter + ATG
ggtttgggatgtcggagaagattgtggataaggtgagtcgatgaacaagacgctgacgctgtcactctctccattgcaccaaacactctctaactttggtttctggtttctttttattataataaaccctttcaaatatgattatttcacaattaagaccctaaatgtttgattatttagaaagtaatctcacctaagtatctcacggttcagattgcgccgtggttgttttgggtcgttgtataatgggccaaattaggcccaattcgacccatttaaaaaatgatattctctccttcttttttgttggtgggtcactcaacaatgacattctctactgttttgcacacgctttcctgctaaaacaaattaaaattggtacggaccgacacaaatcggagattgatgacgaatttttataaaacataatttaatatttgatagattgtctttttctagccttattaatttccatttcaggtatgtttaagctagtaatttactaacaccaccttttttttttgcttttactaataccacgtattgttttattttctcttttatttcgacattagcaagcaagggaatttaaagatcacaccacatggcacgtgagaaaagaaaagcatacacgtgagccagctgtgcaacgatgctcaaaaaggtcctatgacaactacttagcttcgagaagcaggcactatatatttatcgcataacggtatttatttcattcaataatctttttgttgcataaatttacaaaaatttgagtgtgtgatgtgtacatatttctgacgaatactttttgttgcattatccaaatttttacatgttcccgagccgagagtctaagacgacgatttccaaattattgtcgttgctgttattataattgttaataatagtaagaattattattattatttaggacacgcaagattccacatgatactgcttaagcactacgtcgagctaaaatgaaatactcgatttaaatgaactaccccattagttacttgaagatgaaacgaaacaatttggttttggtcttttggatcatatagttaaacgttatgtatcttactcagtttattttaatgaagtttgttgtttggtatatcaattagccttagatgtcaaatcaaaacgaaacaaaaacatgaaaattcaatttggcgttaaatcaaaataataattaatattccatggataattaatatacacttagcaaattaccgaagtacccttgctatctcgttgtcgtcaataatcaaaattacagtattaacccaattaagagcgtttagcgtctacgtgtaaagcggtatcaggagaaaggagcagcgatcacatgggtggcttaaatctatatcctccggttcctcaccggccaattattctcgcgcgtgtctccgctcctctctgatgcgcgtcactcaaaaagtttgagtcaaactccagtaatatttttgatttattttgtattttcaagaatttcttaaaaattgctgttacgtaatttacaatgcaatgtctcgcggtaaaggtagagccggaactcaagtcagatcaatctccgtgtatgattgtgttcgcatccaatgttaataatttcaggatttgtattttccaagttaaaggatactattgttaactaacgtatatgctgacaaaaaaaataaaaaaataacgaatattataaatttatatcagtcgcataatgaaatgtgtaatttcacccagacaaaaatatctctacagaacaaaaaaaaaacgtttgttatatatgtttattctgtatatttaaaatgtagtctaacgtttgttctatatgtctacaatgtgtatttatatttaaaacatattccatccttaatttgctttatattattgttacaccattcatagtaatggaagaaatatctattggcattctatactttatgatatatatatatatatgaaccaaagtattgtatgtccaactgggacattttatatgacggcggacgaataaagcttagcagatatatatgtacgtgctggtaactccatattcattattttggatttaagttgtaactccatacacaatacacattgatggattagcattgcattttttttatggcattttatatcaaaagattctcaatcaaaacttagatagattcctaaagcttgtaattaaagcatcaaacatatttgttaaccagttattatttttgaaatcgagtagtgttttgttgatgctacatattattccatcataaaaagaaaattaatgtgtgtgtaagtgtgtttgaaataagtcaatatcttagtacagtaattaactaattatacgaagaagaactataagggtaaaaacggtaattacagtatttggtcagccatagttattcccgctcgtctcttgaaaaaaattcaaaccggtaaaccattttggtcatacacgttacagtaacacggtggtctggtcttcaataataaccacgtcagcagcatacagtaaaaactactttaaatgtttttttttattctcacccaagaaaataatttatttttgttttgtcgttctccttcctaaataatttttcaactaccacaattaatttaaaaattaaaaatagagtatatttggaaaggcacaaaaaaaagaaacaaaattcaaaatctgaaatttctcagcctcctcgtttcttcacccagaggagagagaaatctgaggaattcgatcttcgcttaaagaagacgaaacaatctctctctctttctctcttcaatggtctcaccatctctgtctaccatctcctagccaaagaagaagacgagaagaagaagagagggtcacaacaatgctttattcttcttatgtctccagccatgtgagctcccactgacacattctctgcatcttcggaagttttgttttggtttgattcttctcaccgattcctgcgaccgagtttgaccctcgagtttcgaggttagtgg

SEQ ID NO: 3390 - DNA, 3000 bp, Unknown
  misc_feature (1)..( 3000): cDNA_ID_1820631_gDNA_ID_1620644_Annot_ID_163154 3000 nt of promoter + ATG
accacaaatttcaactatccctttacttctatttccattttaatattataatgtattaaaattcagcagaagaaatcatatgaacctaacacgctaggatggagtatatttttcaaagttgaagaaatacagatatttggtgcatgattcgtacatatatgtggagatagtttaaatgtttacgaaagcctcgtgcctatggttaagaaaactctcacctataatgtaaatatgtaatggaaagttacgtttgctgactcaatataattattattgactcacaaacaattactcatctcttaatacatacggttgctatttgacactttattatacaccaaaacatagtcttaatccaaaagtcgtagcagaatgtaggaagattagtagtacaaagttgtgatgaaaattaagggggattaattagagttttaatgaaaaatctttaattttttaatctacaaagcactaggtggaatgttttaattatcttggagttttatcatatatgttaaatcaaacacgtctacacatgtctatttataaatacagataaatatggcttattattaaatttggacttattgatgtaaaatgatatgtaaataagataagttattaatggacttttacgaattcattgaaagtaaacatttggtattactttgaaaatcttaaattattttctgtcatttgtcataatttaagaaatatattagttttcttgaaatgaattagtttgccaattaattcttaaagatcccaaaatatgcagttaattaccgagtcatgggcctcagtacgagaagaaactgatacgatggttcacgaaacataacgtacggatctgaaaacccaataacaaactaaacctaaatgaagcccattatttcagtagtctaattctacctttgcttttaggtccatgtctgtagaaatgaatatccacaatttgatacacataaaaaaaaagataacacacgcatgtgctgtgaggtcacttgtcgtgttccacaaggtacgttatggtaccaatgcaatgagacatagatttgtcagaattctaatattatcttataatgcctatacttattttcactaatcacttgtaatacatttctatatgagtatgacaccaattgtctattgtttatttaactaaaaaaaaaagttgacttttgttagtggaatcttaattaatttgtatcatatatatgattttcaaccaagttaatgttttggacattgtaagatcatattggtttatgataatttcctagggcagaaaatcatgtaagcgtaaagctaagatttttagaggaaaatagaaaaatggtcgataaaggataaggcaaaaaaataacggattattttgcttgtgaaaatggcaaagtcccccacaaatatacgttatattttatttttattttagtttacgtgagctttgtttcgtataaaaagtatgatgaattcatattttttgttttggtaaaatcatatatttgatatttctactcgcctaacatttaactaactacagttatatatatatatatatatgtttggtatgtaatattgacacttaatttttttgtgaaacgctccattagtcaatactttgatacgtacagatatagattagtaatatcatttactgaattattaatgtataaataacacaaatattgatctctcaaataaaatcgtattgtcatttatcaaagattggtttcgaatcgatccacaatgtcgcgacaccttctaagatcgatattcattagtggattcaagattataatgaattgaacactaaatacaaaggtctgatccctttattgtaattcaactggaaaagtgttttgtttttaaatatctcgttattctgagttttattttttgtaggtttcttatgtcgttttgtgttatcagtggaatcaaaaagttaattggttggctttacaagaaggctaaattatatggatgttgctcatatgaagataaagatggcaaagttaatttgtaaagatgagaatacgagagacagagtctttcgtggacgctaaagactaaatcattagaagcgaggcgctacgaacaaaaaaacataaaattgggtaatgttttcttagtaggtaactcatagaaaaaatatttatgtacacacaaacatagaaagattgtgaattttgtgtatactttcctttgcatcttaacgcttaaacgcaaagcccgaatcatgttacagtagcatgcaggtcccacatggtcacgagattctgattttttttttttttgcattatagaaagcagtctttttattatgctaatctcgtcgcttatactatcctttttctattatttttgtcgtcatactatcttttattcattattaaacctaatttacatttataattcccattatattcctaaagagacatgctcattgcattgctaaagagatatttaaaacagaaaatgaaaaaatttcgagcaaaaaccaaaagagtgacacccatgggcttgcttgcccgcgcgctcgcttcagtttcgtttgtcagtactcagtagtgctgccacacgcacaaatgacattattcagttcttattaaattagttgtaaataatatataaattaatccacgattgcaaagtactaattcctaatgcaacacttaaatatattttagttgcaatttttaattccattttctacgtattatccaagcataaatcgcataacaaaaagtactaaatcacataatgactcctttattatgttatactatactatattagtaaaaaaaatatgatctcccacttatatatataaacacatctcgtgacacactcgtagttgcaaacaccgatcagtcacagacagtagcctctcaccatcaccaccacggcggccgtcaccgacgccgatacaccatgaaattacatttacaccctctctcacttgtcttcttctttttcttcttcttcttccgaccgacaatg

SEQ ID NO: 3391 - DNA, 3000 bp, Unknown
  misc_feature (1)..( 3000): cDNA_ID_3071108_gDNA_ID_1620644_Annot_ID_163150 3000 nt of promoter + ATG
atttgacagaagaaagtaagttgtattaaacaacgaacagaatctttttttttttgtgcaaaacgaacagaatctaaaagtgagtatttttgtatcacttgattcatataatgaaagaaaaactaaaaaaagtattaacggatatataataagactctttttattttaaacaaattggggtataatgcaacttttgtcgatgtttaagctttctttaagaccaaccatatgttgaattttgactgtgtgttgatgaaataaaatgcagaaggacaaatacattaatgtctactgtcacacaatttgggatcacattgggccaataaaaagtatgaggcttttctgtaaatctaaaaatatttgggctattaataacaaaacaaaacaaaaaacaagtcaccacaaaaacggcatcgtacaagtttatccaaaattccaaacaatttaacgtcgtttactcttcagtttctcagagatttcaaaattagtttttcttcttcttctgaaaattagggttttttgggggattctcgtgtggataaaggttagtcatttccttaattggttaattgaattgaagtacccagtaatccattggacttagtcatggatttaggtgtgctcagaagaattttcgttttcctgcttacgtatttgacgtttatactctttgattcgattcgttatatatgtttattctgtgattcttgtgcattcgaaggtatttcacttttgttgttgatgcttctaaatccaattcacatccatgtaaccctagttttgttataattagtgattgaaattagtgtatttagtatcaatctggtatttttatccatcccgggatgtcttgtatatgttatccctgagttctctaacatctatcataacttcaaatctctgctttgttgtagccatggctgaacgagaagacgcagcagaggtttctctttcagtgagaaacgaggaagatctttctcctgaatgtgtagcttgggctgattcttgcatcatcagttttctagatgattcagacaacaataattggggaacttttagagatgctttaacagaaatcatcgatatccatcccgagatgtttgttttttcatcaacaacgggaacaagaggtgtcctgtctccagacgaggttatgactgaatccgagactattgatctacggagatctgaaccagcagctggttcagcgaacagtagaactaattcatcgaatgaagaagttagcgagattatctctatgctaacttttgaatcagacccgtcaaagaattgcttagaagattattattttccagagtctatagcagagaatggaaaccgtgaaccagcggacggttctaagacagatcttggaggtgttgaaagtatagaagaagatgggtcagtgagcaatggagaggctaaagaagaaaaaccagcgtcagtatcgtctcaagtattcaaggatgatttcatgagcacatacgttgaagacaatgctgaggattgtaatgttacagaggatcctgtcaaagtaacttcacaagagattttcaaagtgtgggatctagaggttgtgggggacaatgatgaggaagatgggttggtgctgcagctgaagaaggccctcgatgagtcttccactgtccagccccttccacagccactgaatgatgatcaagttgtatcagagaagagcaatatcgatgatctgatatctggaatatcggatctgtctcttgcagaaacttttaagtgaactatgtgtatgtgttttattttgacatcacaaactctcttttgctttactactccttaaccgacacaaaccgggtttgagatttcaaaatctgctactagaccagaccgaaaggtttactgggtcaatttggtgcctacacatccacttggccacctgttgtgcaatgatgacgatgagattgcagtgtctctcgactgatgatgtagacttcacaatctcttaaaaatcccagtacttaacctcagccttaagaaaacgcagggaactacgtcctcacaaaatctttctctttgagtgtaactttcagacgcatctttggctctaaattctaaaaaggaaaattttaataggttttcataatcatgggttcactggattagcatataagtctatggttgagaaacttgagacccagactaacgaaacctctttccggatccaaaggtcctcttgtgtagttgacgtggtaaactctctaccgtcaaatttagacattagctaatctgatcaataatctcggcagctcttaaaaattaaaaattagaaatgatacgaacctcataatttttctttctcttatcaaaacaccatctttgtatctttataagcctgttgccactatttttaattgaaaatgatgcgtttgtcttatgttttctgtcctggagttcaacattatgacaatatgtatagtaaattagtgatatacaagacgtttgcaattcaagaaaaaaacttataaactaattaatattatggtccacggtgctacatattaactcttgatggttttatacatcttttctacatgctaatatgcttttaatattgtagcctaacgttataatttgttttttcttaaagaaacagtatcttgaacgaatcttaactatttctgtacttattcgattttattcgatttttatccgtgtaaaggcaaacgattattatgtaacgacgggcataaaaagagtatcgatttcctattcggagaaaaaaaaaaagataaaaattggagtgtatgtatatttcttgaattgagagtaatacaagattacggtccaggtggcggaatattattggcaaggtcacaagaacctcaaataactgatctgaagagaaatataaatccaaaagagggaggagtgagagataagggtggtgtcataagcgtttactgtgagtctctcaaagaaaccaaaggcagagaaaagagataacacacacaaaaaaaaatg

SEQ ID NO: 3392 - DNA, 3000 bp, Unknown; identical to SEQ ID NO: 3385
  misc_feature (1)..( 3000): cDNA_ID_4262322_gDNA_ID_1620644_Annot_ID_163149 3000 nt of promoter + ATG

SEQ ID NO: 3393 - DNA, 3000 bp, Unknown; identical to SEQ ID NO: 3383
  misc_feature (1)..( 3000): cDNA_ID_3071112_gDNA_ID_1620644_Annot_ID_163145 3000 nt of promoter + ATG

SEQ ID NO: 3394 - DNA, 3000 bp, Unknown
  misc_feature (1)..( 3000): cDNA_ID_1825731_gDNA_ID_1620644_Annot_ID_163142 3000 nt of promoter + ATG
attcaattaccatggatcattccatcttccaagtaacggttctttcttgttagatctgattattttatccgccgcaactataagcttataatttgttacgttataataagaaataatttgttttgtttttctacttttttttttttggtcaaagtcgaagctttgctaaatgtcaagataagcaaacttcgattctctctaattcctggaaattgccacgtcatggtgagtccaataatgaaaattatataacatgtcccacaagcaagaaaatttgtcatctaacggatgtacaagaaaccacgtggtatgatcggcggaattgtcgccaagtttagtttggttttaagattgaagataagctaagtatgtggggtccacttagacttattcttatttaaggagacgaatactgttttttttaagaaaaaataacctacaattttaattattaatgttttttactaattcagaggagattttggttacatttacttttgttatggcatatgggtatattttgtgtgtttatatagtcatatatagttccgaacttcaagtaaataaagaaattcgtttggccaaatttgttgttaaaaaacttttttttctttatattagggttgaacttatttacagaaaagtatattaggtggattatatttgattattcaagttttttttcgtaagccaaatctgaagaaaacaaaagttgcttatcaaagaggcaaagagtatattcgttttataggagaatgtaatattccaaactttggatgtgcatggttatggatgttgtagcatttgcatttgccgagaattataaagatacgtataccaaataaaatacatgaatttctcgaaagccaaaataaaaatttgctctaaactcttaatttgtgatgcaggcataatattgtttgtgaaattaattcaaacgtgatcaagacgaacactgcccccacttatattaatctgattaatatgtttggcccacgtttagatcggtagatcatatccgttgcacatacaaactttacataattactcaatcaaacaattttatttcttaaaccaccgtggtttgatttttaaaacgtgcattatagtttcgttaatactccagtatagtgatgttattcggttcctgttaattaattgtaacacgaccatttatgatatgactacgacttaatccacgtgatttaacaccttaattacgactttcaattatcattttcacacgctgttctatgtcttctattaatttcttaaggaacaaaaatactagtagttcatttaaataagaaaatcattggttatctttgattattttgatgtcaaatctatatttgaaactgaatttttttacaaaaatagaaaatttcttaaaacgtgcattgtaatttgatttcttttaaaaaattaaaataaaaagaattgacgcaacaaaccgcgggtagtgcgactaaacacctagtaaaatactataatcgtagaatcaaataatgatatgtagatatttacgagaaacatggagggaggtggttataaagagtcaatatttgttgtgtggtggggttcatctaattaaaagcaaatgaagtatataattatattgataggtgaaatctagatcttagaaattgtttacaaagattgtaaactctggttaccaccgtttagaacatttttgcaccaagccttgaaacggttgatagattaatcaccaaaatgaacgaacctatctgtcatcgtccttacataaataaacgatgaagcacgagatcaacacagacgatctctaaaattcgtaaacaaagaaattattggtgtagacaaataagtcgggaacaaatcattcaatatggcggtccattacatattatttaaagaaatatataagtaagagaggcataattaaagaaaatacaaagaatggctttttacattgtacatgacaacataaggaggacagaatctttcgtctagacaagaatgtcaattgtggtcggaatagaattgaatctcaaatccatattcaaatcatcaaaaataaaaagaaacattttcgctaaatggttttaacttccatttcggatgacaaagaatattattcctaaaattcattttgtcaaaccagtaatattgtgaaactaaacaagttttagatctttatccaaaaaataaccgtatatatatacaatgtaatcatatgaatgaggaatatatatgttaaattcgtatttgatactcaatatacacagatttttacttaaaaaaacatttgaaataaatggctaaaaaataacaaatccaaatttatataaagttttggatagaattgcattaaatagaaaatcttgggaggttgtggtaaattcacgcgtcttgttgggtgtttttatatttcttctttttctcttacttctcatgaaatccgtgtcttttgtttttctttgttactagtactactttagagtttacactgtcttgctcgtgtcaaaaaagaaaaaaaaaagtcgtcgtctctatcgagtttttttttactattctctctcgagaaaaaaaaaatcaaaggggagagaaaattgcggaggaaaaaagaaaagaaagagaaaatggctctgtgattctccaatttctatagagagagagagaagaagaagattgattagataagtttcttaattcaacgttgagagacagagagaaaaaaaaaaaaagattttgtcattcttcaaaatacgttctcgccatttgcgccattgattaattcaagtgcgttgaagttagaggtaaccaccaacttgcattttactctccaaagctctgatttttctgtcaaattcttttgaaaactttgatgcttgttttcttctcatcattgattcttttttgatgataggttagttctacacaaagcttgatcttttaggggttttctctagttattggagagtggtgagaattagaaactgcattatccgatctaaaatg

SEQ ID NO: 3395 - DNA, 3000 bp, Unknown
  misc_feature (1)..( 3000): cDNA_ID_3071116_gDNA_ID_1620644_Annot_ID_163141 3000 nt of promoter + ATG
tctcttacttctcatgaaatccgtgtcttttgtttttctttgttactagtactactttagagtttacactgtcttgctcgtgtcaaaaaagaaaaaaaaaagtcgtcgtctctatcgagtttttttttactattctctctcgagaaaaaaaaaatcaaaggggagagaaaattgcggaggaaaaaagaaaagaaagagaaaatggctctgtgattctccaatttctatagagagagagagaagaagaagattgattagataagtttcttaattcaacgttgagagacagagagaaaaaaaaaaaaagattttgtcattcttcaaaatacgttctcgccatttgcgccattgattaattcaagtgcgttgaagttagaggtaaccaccaacttgcattttactctccaaagctctgatttttctgtcaaattcttttgaaaactttgatgcttgttttcttctcatcattgattcttttttgatgataggttagttctacacaaagcttgatcttttaggggttttctctagttattggagagtggtgagaattagaaactgcattatccgatctaaaatgggtgatacagagaagtgtaacagtgatatgatccagagacttcattcatctttcggcactacttcttcttccattcccaaaaatcccatttctcagctcgatttaaaccctaatttcatccgctcatcagctcctcaattctccaagcctttcagtgacagtggcaaacgaatcggtgttcctccgtcgcaccccaacttaatcccaccgacttctccgttttctcagatcccgaccacccgacaacccggttcgcataattttaacccgggaggagctaatcattcacggtcaatgtcacagcccaactctttcttctcttttgactccttacctccgttaagcccttctccgtttcgagatcacgatgtttcaatggaggatagagattccggcgtgtttaacagcaaccattcgttgcctccatcgccgttcacgaggtgtaattcgacctcttctagctccttgagagtcggtgagagtttacctccgagaaagtctcatagacgctccaacagtgatatccccagtgggtttaattcgatgcctttgatccctccgagaccattggagaggtctttttctggtggggagtgtgctgattggtcaaagtctaatccttttgtgaagaaggaatcgagctgcgaaagggaaggtgtcggagagagagaagctatggatgatctcttctcagcatatatgaatcttgaaaacattgatgtgttgaactcctctgaagctgatgatagcaagaacggtaatgagaatagggatgatatggagagcagcagagcaagcgggaccaagactaacggtagtgatacggaaggagagagcagcagtgtcaatgagagtgccaataataatatgaattcttctggtgaaaagagagagagcgtgaagagaagagcggctggaggagatattgctcctaccaccagacattacaggagtgtttcagtggacagttgtttcatggagaagttgtcttttggtgatgaatctctaaagccgcctccttctcctggatctatgtcaaggaaagtttcccctaccaattcggttgatgggaactcgggtgctgcttttagcatcgagttcaataacggtgagtttactgcagcggaaatgaagaagatcatggcaaatgataaactagcagagatggccatgtctgaccctaaacgtgtcaaaaggtacaaatattgaatcttgactaacattaccggtttataatcaaatattctgatgtttaaggaatgatcctcttttcagaatcttagcgaaccgtcaatccgcagcacggtcaaaggagaggaagatgcggtacatagtagaattggaacacaaagtgcagactcttcagaccgaggctaccacattgtctgctcagctcacacttttgcaggtgcgttgtttacaatgttataaaagcgcctagattggtcaatttttgttttgttctaacgatcttagttactgcattatccagcgcgatatgatggggttgacaaatcagaacaatgagcttaagttccggcttcaagcaatggagcaacaagcgcgtcttcgcgatggtatacatttctcttcacattgtatcaaatttacgatattattaacatgactttaacaaaaaatggaaccagatcctatatgctttaaaaaaatctccatttttgcgcttaacgaatgtgaaatgacgatttttttcccccgctttgcagctctgaacgaagcactgaatggagaagtccagcgactgaaactggcaatcggtgagagcagtcagaacgaatcagagagatcaaagatgcaatcactcaacgctgagatgttccagcaactcaacatcagccagttaagacagcagccacaacagatgcagcaacagtctcatcagcagaaccaccagaatggaaccatggcaacaaaatctgaatcaaatgaatagagcagagaagttgttgcggtggatcaaagggttggagtttttcaacaagttacatatcaaatcaaacattatatttcatttatgtgcagagtcagttgaatttacatatatatcatataagtccaagaaatttaattttacaatatgttgttatcttagaaagaaaaaattcaatttatagtagatataggtatgaactatgaacacaagttatatgtaatgggattgattgagcttcagacaaaaagattctctgtttgttttgtttttagtttttaatttagtcttggattctgtctctttttgttggtttgtttattttaacattatgggccggtttttggcccattaaacagcatcccaaaacattgttgccttcttcgtctctctctgtgaataatatctaaaaccctaacaaacactatcactcacttcattttcgtgacgacggagcttgaccgctatg

SEQ ID NO: 3396 - DNA, 3000 bp, Unknown; identical to SEQ ID NO: 3391
  misc_feature (1)..( 3000): cDNA_ID_1820647_gDNA_ID_1620644_Annot_ID_47552 3000 nt of promoter + ATG

SEQ ID NO: 3397 - DNA, 3000 bp, Unknown
  misc_feature (1)..( 3000): cDNA_ID_1820639_gDNA_ID_1620644_Annot_ID_47554 3000 nt of promoter + ATG
gtattgattacttaccaaatgacccaaactacgtacgtgaaccagaagttgtagcatatattatgtgcctataaatatgaaccctaaagcccccaaaactacatatcaaaacaacgaaatctcaccaagtcctaataatttttaggaaaatgaaagcttcgatttaccttgtaaccgttttcatacttctacttctgcttctaccaacggcgatccctcacgactattccgatgctcttagaaagtcaatcctctttttcgaaggtcaacgctctggtcgtcttccaaaacaacaaaggatggcgtggcgtagaaactctgcactcaacgacggaaaaaacctcaaaaccgacctcgttggtggttactacgacgccggggacaacgttaagtttcattttccgatggcttttacggccacgatgcttgcttggagttctgttgacttcggacgctatatgtctcagcatgatttcagacataatctcgtagccgtcaagtgggccactgattatctccttaagaccgtttcacaactccctaatcgcattttcgtccacgtacgtcttaactcttaacccatcgtcgttttagtgtaatcgtgcatttggttttcaccatctatggacacaatagttatagtataatatatatatatatatatatatattttgtatattcactaatacataccggtatcaagaatttgtttcaccaattttgtcataataggacaggaatcaaattggatatcttccctgacaagataacaatatgtgttgattagtttcttcttctgtaattattctttttacgagaccacgatttttaatggaaaatattaagaatatctttttattatgtacacaccaacaacacaagattaatattgtataggtcggtgaagtacaaccggaccacgattgttgggaaagaccggaagatatggacacgccacgaaccgctttcgccttagatgcaccatatccagcctccgatttagcgggagaaatcgcagcagctttagcagccgcttcaattgcattcaaacaagcaaatcctaagtattccgcaatattactcaataaagccgtacaaacgtttcagtacgcagattcacatcgaggttcttacaccgataatccgggaatcaagcaagccgtttgcccgttttactgtagtgttaatggatataaggtacatcttgaacatatctcgaatattgtacaatgaaaattaattgggtttaatttcatataatcatcatgttctttcatatatataggacgagttgctatggggagctgcgtggttgagacgagcaaccggcgaagattcttatctgagatacttagtggacaatggtcaagctttcggtgaaagttccaattactttgagtttggctgggacaacaaagttgggggtgttaatgttctcgttgccaaggtttggtccaatttccaaaatcaaactgatgtatatatatatgataagtgtgaccgttaatcattttggttaaacaggaagtacttcagaataatgtgaccgcgatagccgcatataaagataccgcggagaaaatgatgtgttcatttttgccggaaaccaatggtccacatatgtcttacactcccggcggtctcatttacaaacctggaagcactcagctccagaacacggccgcactatctttccttctccttacctacgcagattacctctctacatcttctcaacagctcaattgcggtaacctcaagtttcaaccggattctcttcgccgcatagtcaaacgacaggtatatattagaatcataagatcatttttttcttccataattcttgtgttcgttagtctaagaaaaaaatatttgtgttttattttttgtaggtagactacgttttgggagataatccaatgaagttgtcatacatgattgggtacggcgagcggtacccgggactgatccaccaccgtggctcgtctataccgtctgttaccgttcatccggctgcctttgggtgcatagcaggatggaatattttctcatcacccaatccaaaccccaacattcttataggtgcggtgattggcgggcctgacgtagatgatagatttattggaggtcggacaaatgctagtgagactgagcccacaacctacatcaatgcaccttttgttggtgtctttgcgtacttcaaaagcaaccccaacttctcttgatttcaatttctttcccagatttgtaaaaataaataaatgaaaatgtacatatattgattgaggtaaaagtacgcatcaagagatatatatttatgtatgggaaattcttcaagtaaaggaaaacacatctttaaaccttttagtaatattcttaatggtacttacttattttttttaggtataatttataccgtataaacaatggcaaggtagataaaaaatttttataatgatttattcttatgcaatttacgttttcatgatacaaatttcttttgttttaccgttgtttatctttatgtcttaaagtatttatataattaataaaaattaaaagaatacatattataattataatatgtatttttaaaaaataaaataatatgtatttatattcaaacagaaaattatttattgcagatatggttttatttgtggtaatttagatgatgttttataagactcgataatatttttatcgctttcattcgtttttttttttgccaagtttacatatcctctttatctatagatcaaatttggaaaagaaaaactcgccaatatatccatttaaactaggacaaaaaaaacgatttaacagagaacaaaaagttcttgattgtgataaatcatggtgaggaaagtttagatataaaaatatacaaggagttaaaacatgcgggaaagtttccatagaaaaaaatcgaataaaagtttatatatatgcatcgtcttatttagtcatctctcataaaccctaaaagagaaaacaatg

SEQ ID NO: 3398 - DNA, 3000 bp, Unknown; identical to SEQ ID NO: 3390
  misc_feature (1)..( 3000): cDNA_ID_1820631_gDNA_ID_1620644_Annot_ID_47556 3000 nt of promoter + ATG

SEQ ID NO: 3399 - DNA, 3000 bp, Unknown
  misc_feature (1)..( 3000): cDNA_ID_1820627_gDNA_ID_1620644_Annot_ID_47557 3000 nt of promoter + ATG
taatacgtagaaaatggaattaaaaattgcaactaaaatatatttaagtgttgcattaggaattagtactttgcaatcgtggattaatttatatattatttacaactaatttaataagaactgaataatgtcatttgtgcgtgtggcagcactactgagtactgacaaacgaaactgaagcgagcgcgcgggcaagcaagcccatgggtgtcactcttttggtttttgctcgaaattttttcattttctgttttaaatatctctttagcaatgcaatgagcatgtctctttaggaatataatgggaattataaatgtaaattaggtttaataatgaataaaagatagtatgacgacaaaaataatagaaaaaggatagtataagcgacgagattagcataataaaaagactgctttctataatgcaaaaaaaaaaaaaatcagaatctcgtgaccatgtgggacctgcatgctactgtaacatgattcgggctttgcgtttaagcgttaagatgcaaaggaaagtatacacaaaattcacaatctttctatgtttgtgtgtacataaatattttttctatgagttacctactaagaaaacattacccaattttatgtttttttgttcgtagcgcctcgcttctaatgatttagtctttagcgtccacgaaagactctgtctctcgtattctcatctttacaaattaactttgccatctttatcttcatatgagcaacatccatataatttagccttcttgtaaagccaaccaattaactttttgattccactgataacacaaaacgacataagaaacctacaaaaaataaaactcagaataacgagatatttaaaaacaaaacacttttccagttgaattacaataaagggatcagacctttgtatttagtgttcaattcattataatcttgaatccactaatgaatatcgatcttagaaggtgtcgcgacattgtggatcgattcgaaaccaatctttgataaatgacaatacgattttatttgagagatcaatatttgtgttatttatacattaataattcagtaaatgatattactaatctatatctgtacgtatcaaagtattgactaatggagcgtttcacaaaaaaattaagtgtcaatattacataccaaacatatatatatatatatataactgtagttagttaaatgttaggcgagtagaaatatcaaatatatgattttaccaaaacaaaaaatatgaattcatcatactttttatacgaaacaaagctcacgtaaactaaaataaaaataaaatataacgtatatttgtgggggactttgccattttcacaagcaaaataatccgttatttttttgccttatcctttatcgaccatttttctattttcctctaaaaatcttagctttacgcttacatgattttctgccctaggaaattatcataaaccaatatgatcttacaatgtccaaaacattaacttggttgaaaatcatatatatgatacaaattaattaagattccactaacaaaagtcaacttttttttttagttaaataaacaatagacaattggtgtcatactcatatagaaatgtattacaagtgattagtgaaaataagtataggcattataagataatattagaattctgacaaatctatgtctcattgcattggtaccataacgtaccttgtggaacacgacaagtgacctcacagcacatgcgtgtgttatctttttttttatgtgtatcaaattgtggatattcatttctacagacatggacctaaaagcaaaggtagaattagactactgaaataatgggcttcatttaggtttagtttgttattgggttttcagatccgtacgttatgtttcgtgaaccatcgtatcagtttcttctcgtactgaggcccatgactcggtaattaactgcatattttgggatctttaagaattaattggcaaactaattcatttcaagaaaactaatatatttcttaaattatgacaaatgacagaaaataatttaagattttcaaagtaataccaaatgtttactttcaatgaattcgtaaaagtccattaataacttatcttatttacatatcattttacatcaataagtccaaatttaataataagccatatttatctgtatttataaatagacatgtgtagacgtgtttgatttaacatatatgataaaactccaagataattaaaacattccacctagtgctttgtagattaaaaaattaaagatttttcattaaaactctaattaatcccccttaattttcatcacaactttgtactactaatcttcctacattctgctacgacttttggattaagactatgttttggtgtataataaagtgtcaaatagcaaccgtatgtattaagagatgagtaattgtttgtgagtcaataataattatattgagtcagcaaacgtaactttccattacatatttacattataggtgagagttttcttaaccataggcacgaggctttcgtaaacatttaaactatctccacatatatgtacgaatcatgcaccaaatatctgtatttcttcaactttgaaaaatatactccatcctagcgtgttaggttcatatgatttcttctgctgaattttaatacattataatattaaaatggaaatagaagtaaagggatagttgaaatttgtggttttgtgagtcatcacttttctgtttggagatgaaagatatgttctctttaatctaaacggcattacgcgtaaaaaaatactttcccttaattttcatcacaacctttaattttattactaaacttcctatatatatagtagtcgatgctctatttctaatcacacgataaactttcttaaactttgaggagctctctctctattcagcccttgtttttactttaaaaaatcatgttcaagttacgtgaaattcgtctctttctccaatcactgaacaacaa

SEQ ID NO: 3400 - DNA, 3000 bp, Unknown
  misc_feature (1)..( 3000): cDNA_ID_1820623_gDNA_ID_1620644_Annot_ID_47558 3000 nt of promoter + ATG
ctccgtggtatgggctggtacatgccaacaaatagatctatgccagcataatcctttcattagtccttaaaataaatagtaaatatatataaaagataatgtaaatagaaagaaataacacaggacgttttagtataaagtaaaagcatatattaaaaatgatgtaatggaaacatttcttttttttttgggcaaaatgtaatggaaacataagaactagtatttctacaagaaagtaaaagtatataatgatgttattattgttatcgttgataagaaggaacagaaatatacaaacaactaatccttttgcctttgggctattaaaagtaaagctttgggtcatcacagcccattttcaacaaacgaattgctgacgccattttcactttcccctttagccagccaccagaagaagcttttgcttagtctacaaaatcagttttagcccgttaggaaaacgggaggttattttgatgtttgattttatattcttgtcggtattattggacctgcattgattttcatcataatttgaggacccccggcccaaagcttaaaattttatatatataaagattatgtattacaaaaagcccttttcattgaaaatattgaagggtcccggcggcgttaatcgttatttgagaatttattggcaaactaatccatttcttacatagatattttaacttttaagatatccaaaaatacacatttttgtgaatataatatcctctttctagatgtcattttataataatacaatctccaaatttaaaactaagttatatttatttctatttttacataaaatcttctttaaatataatagtctttggaatctatcaaattgaggtacaaagatttggtgttttgcttttgcatgtttctatgaaaaggttgaagcagagcgtaattaccatcaaaggatccttgaggttattgaacggctagaaggagaggtatatatatctccattggccacatctttctacaatgttaatccccaaatgacataatttccttgtatagatgagatttgagcaacaaagaatcgaagcaactcaaactccacaagtagagaacatcacatcttcgcctcctctttcatattaagaagccaatgatggagtcaatgcttctcaaatgcataatggaacatcagacgccatgggatatttcttaggagaggttggtgtactttaaaatgtcatcattttatggtcgcaagaacttgattaatctcttgagttgcctatctttttccgcacaggtcatgtttccatatcaagctgattcagattttgagctcagcttatcagttggagactatgttgttatcagagaggttagcattcaaatcaaagcatataagataccattctttcgcggctcaggacatcgaataacggaaagaatcttaaaactctttttttttttaatctctgtggactcattcacatgtctttatgatgttccaggtagtgagtagcgtgtgggcagaaggagaatgtaaaggcaacgcgggttggtttacttacatctacatcgaaagaagggatcgtgtcttcgcaactaaggtcatcgaggtcttctagtggcttcttttggtgtgtttcggtgacttttgttgccattgttgttctgtatctaactttttttttttttttttggtcaaaaattctgtatctagctagatttctttttcttcctctctttacttatacacaagatctgatcattgaagcaaaataaatctcatctccgatgatctaacaataatttccataattcaaatgctttcagaaaggatttctcaatacaggttaaaaatatcaatctaatctttgcaaactcattaaactaatttagttactttccttaactttaagaaaacaaatctcaaattttgtggctataccaccattttcattgaaactaactactcaattaacggtctgaaagaggacaaaaagattttcacaagtgtacaccaataaaagaaaatcgtttttttcccttataaaatgacaaaaattaccaagaaattaaatggaacataacttacgacgaaatttacctgacgattttttttccttactgaaaattaccaagaaatcgcgtggaagtcggaaatgttacatacttttctttgtaactacactgcgaaagcaaaaaaaaaaaacataaagtcaaccttttgggaaaattgtcgtctttgacatcagaagagattcaaactaaaatgaatgagtacgttacttgcgttatggttgggttttcctttttaattttagaaacttttcttacttatattttgaatcaacagttgataacacaagtataaattattattttcgccatcacactggagtcaagctcgagagagacttgtttcctaatttaattcataaacttgtttcgacagtgaatatatacatcttcgaagaaataacaccattgacttaaaaccaaaataaataacaatagtcttataatttatattattcacacttaaaattaacaatacaagtcttttcaaagtcttttaattatataaacaatagaagtctttttcattgtctctttttgactaattaataaagaccatgaaaagacttgtattgtaagttttgagtgtaaattgtaataaattactatggttttgtttgttttatatttctgccatctaaataattacattatatgataaaataattaccctagcgacaaatgacagctagaaatgtaataagaacaccaactaaataattatgcaggttaataatggagcaagtgatgttctttctatatactgtacattttctttttaaaaaattatgtaatttcgcagaagagaaaagaaaaacacgtggtgattagagagtagtataaagatagttggttgggttctgtttttttctgtatctcgaggcgccaaaaacaacaacaaaaaaaacttcagagcggtgatcagattcaccgatttttctcaaa

SEQ ID NO: 3401 - DNA, 3000 bp, Unknown; identical to SEQ ID NO: 3389
  misc_feature (1)..( 3000): cDNA_ID_1820619_gDNA_ID_1620644_Annot_ID_47560 3000 nt of promoter + ATG

SEQ ID NO: 3402 - DNA, 3000 bp, Unknown; identical to SEQ ID NO: 3388
  misc_feature (1)..( 3000): cDNA_ID_1820613_gDNA_ID_1620644_Annot_ID_47562 3000 nt of promoter + ATG

SEQ ID NO: 3403 - DNA, 3000 bp, Unknown; identical to SEQ ID NO: 3387
  misc_feature (1)..( 3000): cDNA_ID_1820609_gDNA_ID_1620644_Annot_ID_47563 3000 nt of promoter + ATG

SEQ ID NO: 3404 - DNA, 3000 bp, Unknown; identical to SEQ ID NO: 3386
  misc_feature (1)..( 3000): cDNA_ID_3409035_gDNA_ID_1620644_Annot_ID_47564 3000 nt of promoter + ATG

SEQ ID NO: 3405 - DNA, 3000 bp, Unknown
  misc_feature (1)..( 3000): cDNA_ID_1839193_gDNA_ID_1620645_Annot_ID_47569 3000 nt of promoter + ATG
gagtcaaaattgtgtacagtcagaaattgtaagtttgtgccctacaagatcaaaagaagcaaagacaaaaataaggatctggtgagagtactccgacagaaacaaagttcacttgaatcgtactagaacgaacgtgtaggaatatattacattttgcagattgtagcaatgaagtccaactctaccgaagaggattatatttggatgaggtcctccatattttgcaatgtcagccctttgtttaatgtagtatttgttataatcaaacttttcttctctctaaacaaaacacagaatctataagctttaaaatgcaaatatctctatgagtgatgagacctaaagttcatacatccacaatcaaatccaattacccgattagcccaaacatgtcgtgggatggaggatgaagattcttgtggtctctgatcttccagcttctcattactctgcgatggttcctcgaccaagtctctggcttcttgcttccacattccgttacccatttcttggcaaatatataaaccctatattaataaacttttaagagacttggaacttaagattcaaaccctaatttggaatacaaatctatgcgcgttaagccaaaccacatcattaattaagaacactgtcaatacacaacatgtgagcagcgaagaccacaacagagggaagtgattgagaacagcagatctaagctcatattcaacatgcatagaagaagaaaaccaattttgcatcaagagatactgaaaaatctttcattcataagagttccaagattccataaaaacaacaactatttggaagaagatgaaatggagacatctcaagttctgttccaatgtaaaatacagaccaactaagttcggtttcagaactcaccttcttcacctatgaaatttgacgagatcgcaagaagaatatacaatggattcagtgtttcgtaatcggtgagaaaaagacaaataaataagcttgatgatagcttgttagaccttagagaatagaagattgggtttaaaggctattctctcctttttctttttcatcgactcaactttatggactaatatatgcaatctcatctctttgttctaatttggacaaatacttttagctttttagacatttgttatatgtcacaatgcaattgataaagatataaatttgttgacaatgaatgcataggttcagaaccataaacaccttcaaattattaaaactcaaaaatagaaagtagaaacccaaaaggtagtttcatcagcacacaaaactcaatcctgttaatttaaaagtaacgaaataaagcaattgcaaaattatagtagtcattacaactccacctatatcatgattgatgaagcctccctaagttacatgaatctttctggtggtgagatcaaaactctacttgttcgaggccttgttagacagcttcttcaccggtttcatgcttcttcttgacggaatctgcctcgactttgcgacagtgaaagtagaaaaactgaagcagaataagaaaatcaagaacagcacatcctcctgaatcaactagccatggtagattcggttcgattttcgaccattcgacgctgttcactagtatgcttgcaacataagtcacattgccaatgaatgcaaagaagaacattaatggattcaatccctcaacatttcctctccttacattcatacatatttgaggaagccttccacccatgtaaatcgccgccattgcccaacccaaccacattccaatattgttgttttctcctaagttaccgctagagacctccaaaagctttcttgctcctgctcctccaactacaaacactctatctttccctctcaaatccatacttcttgaaccactcaatacgttgaatgatccaagaaacaagaacaccgagaccacacatagcaacgatttggtagaaggacgcttagcttcttcacgaagcaaaggctcttctacatcaaccatctgatgattccttcggtttttcatcaaccgcgggtaaatatgcccgtagtatatagattgaacatagagaacaagtgtagccagagtatacaacactgccgtgtagaattgaactggaagactagctggttccatcaagcagccaacaacattaaagatatcaccaagcatccatgttgttaagaaggttatagagactccttcaatggacttttgattgtagttagtcataatctgcggtatctcggcaacactccaactgataacactgatgataccaagagatagtgacaaatcatctcgaatcatcgttcttcacgtatgatacagccgaataaacctgttaaaaccctaaatacgaaattacaagtagctgaataatattgagcaatgaacaactcctcttataaaggtaagaagagagttagaagatgaataggaaaagggttttgaaactacaatgaccagattctaagaggaataggaaaggttttcagaattcagattggagaaaacgaatcctatgaatgaattaggttaaaatttttagtttctttctctatataattaaaatttgatatttatcaaaaacaaattaaataattaaaaggatatatccaaataattagaaaaaataagaatctaagtatatatcttgtttatacacgcaatgtttatctcttcaaagtctaggcttttgatcgagtctcctactatactaataccaccaaccaatttaaaaaaaaaacaagtagaaatttaacaaaagtctaacatcttccaaattttttccattttctaaaattatgttttgagtttgacgtttctttgttatttatataaactatagtatgctatcatcttcaatcagaaacagttccacagaagttttctgttttaacttttcctctgtttttgatttttctctctgaatctctccttcatttccccgggaaatagtaccagaaaggttatcatcgatcaaactcttcttggtggattcttcagag

SEQ ID NO: 3406 - DNA, 3000 bp, Unknown
  misc_feature (1)..( 3000): cDNA_ID_1820728_gDNA_ID_1620645_Annot_ID_47571 3000 nt of promoter + ATG
ttaactttctctgcttgctcagtttagtgattctcttgtcataagccaaaccctcccttacaaagttcttgttttcagttcaatcatctctttgttatttatgaaaaattaggactctgtatctactggctgcaaatgtcctgaaggtttccaaggcgacggtttgacgtgtgaaggtacataactcttaacttatcgattaaaatctcgaaagaaaccacataatcatattaccaacaatgtaattatgttttctgatttggctctattgcagatattaacgaatgtaaagagcgttcggtatgtcaatgtagcggttgcagatgcaagaactcatggggtggatacaaatgcagctgttctggtgaccggctttacataaacgatcaagatacttgtataggtaaaattttatcaatcaagatttaagagtactcaaattccataacagtatctaattaatatacattgatgattgtttgttacagagagatatggatccaaaacggcatggtggctcacattcttgatactggctatcgttgcagtagccggtttagctggttatatattctacaaataccggttcagggtactactactctttctgattccacaaaagcatttttgtacttaataacggttttaggattaccaaactaacttttctttggtgttcctattaacagtcttacatggactcagagattatgacgatcatgtcacagtatatgccacttgagagccaaagagctcgtgaagttccatcagaagccgagccttttacactctaatagtatatgaccaaagtaaccaaaactgtcatacacaaagaaatgtttgagatcaattaatgtacatatgaattatactgtaaaaataaaagagtgagatagagttgtgtatattttcatggcaaaaaaataaataatttggatgtaaagagacttttgaagaaaataaaacaaatattgctttcattgagagttgaactcaagacctcccgcttactaaacgggtgctctaaccaactgagctatgaaagcttcttgcaacatattattccaaataaattatatcgtaaactaagagttaaaatcttgaaaacaaaggataacgatcttcgtctccctctgctaaacccattttcttctgttgaggaatggcttcttcagtctctcttcagttcctgaccaacacctttatctccaaacctcaggttcttaatcttatctctctgtatcacctaatgtttctatgtcatgtgtgtgtgtgtgtgtctgtctttgtctgaattttctgagtactcctcatgttttttccggtcggacaaagggtttctgcaacggaattgtgtcagcaccaagacccagaagcaatttattaagagacagacaaaatggtgtacgacccatcaaagttgcgtctattgagacacaacctttccctctgtttcaatctcctgcttccgaagaatcttcctcgtccgaggttaggattttcagttttgagtgttttagggtttatagagttctaaaaggcagtacctttgacaattctttgcattgcccctatctgggagattgatttagagtacaaatgagttctaaaggtagtacctttagacaattctgttcattgcccccatatgtgatattgatttagggtacatatgagttcttaaggcagtaactttagacaattctgtgcattgcctccatctgtgagattgatataggggacttcttaaggcagaaactttagacaatcttgtgcattgccctcatctgtgagattgatgtagggtacaaatgagttctaacggcagtaactttagacaattctgtgcatttccctcatatgtgagattgatttagggtttttgtcttttgtttcttcactagctggagacagcagatccggatttctacaaaattggctatgttcgaagtgtgagagcttatggagttgagtttaaagaaggtccagatggttttggtgtctatgcttctaaggatatcgaacctcgccgtcgagctagagtcagtcttcttagttaaaaagttgacaactttttgttttgttcttctctttagattattttgttttcttttctctctgcaggtgattatggagattcctcttgaactgatgataaccattagacagaagcacccttggatgtttttccctgatattgtaccaattggtcatcctattttcgatatcattaactcgactgatcctgaggtagtaacacatttgtgctatttcgatatcatcaactcgaaagttcttatctttctcaaagtcctttcacatttgtgcttacagattgattgggatatcagattagcgtgtcttctgttattctcttttgatcgagatgatcacttctggcggctctatggcgatttcctgccggctgctgatgagtgcagcagcttgcttttagctacagaggtggattgaattgatatgattgccatttgaaactggtcacatttacttgtgtctttaaactaatgcttgatgatatctaattctgtgtgtttttctataggaagaccttgcggagcttcaagatcctgatcttgtttcaactatcagacaacaacagaaacgaatcctagatttttgggaaaagaattgggtaatgaggccttatatatgtgtttccagtatatcttgacatttggttattgctttgtttttcattggcaaattgtattccgtctcagcattcaggtgttcctctcaaaatcaaaaggcttgccgaggatccagaaagattcatatgggcggttagtatggcacagacacgatgcatcagtatgcaaactagggtcggtgctttggttcaggaattaaatatgatgattccttatgctggtaaggaagagcatgttgtgtagttattgataaattaagatttagtatcaatgaactttttgttgaggaactaaataagaatctcacgattgatcattctctgcagac

SEQ ID NO: 3407 - DNA, 3000 bp, Unknown
  misc_feature (1)..( 3000): cDNA_ID_1820724_gDNA_ID_1620645_Annot_ID_47572 3000 nt of promoter + ATG
ttctgtttcctctctattccttgacaaaagatggagaaatgagcaccaatgttacctaaatctgtggcaggcgagttatcgaggggcgatacttttgttgatggagcagttatcgctgcagcaagaacattacctacttggtcagacatagatcttcctccaataccgagtgcggaaagaaaagcagttaaagaattgcaagatgaatgtcgaaagatgcttgcggaatatcccacaacagcagagcaagaccagaagttgctaggtattacactaaagatatatacaccaatgtgttattatctattatcgctcatatactaaaacttaagctttccctcttgttgttgtgacagattcaatgtcagaagcaaggacaacatttgcaacagcggttaagtatagaatgcacagaaagatgttcatcggaaaaattatcaaggcacttgacatctatcaagaacggttactctattgattcaagcaaaaaataattatgagctgagtgagattcatacttggtgctcactcccttgagctacttagaaactgcaccatgtaattgaaaggttcctgtttttttttttgtttagtgtaaggttatgtatttgtatggaacagttagactaagtgtgttagtttgttttaatcgcaatcacaaacaaatcataacctcttcttttcttggctgctttaatgagtttgattagccaacaaacgctttggaatcatctgtgttttttttttctcttttgattaattcatgttcatgtttttagtccctaagcatgattagtgtctcaaatgttttagggtaattgtgtctcttacgccgaactataatgttgattagtctcaataattgattattacttatactatttattaaccttgtggttacactaatcaatcaaatcatattgcgtttcttctactctttgtctaacattactattttcaaaaaaagttacggtccaaaccaaacaaacctactctgagttatacagaaccataagcaatctatttcttacctttggctacttatttgatactttacattgactaacttgattcttaataattatcttcaatatgttgaatattttatttttgaagtaagaccactatgcgtttcataattcttgccatgcataatgaaattattcctttgaatttaagattaattaaagtataaatcaaccaaacaatagacaaaaaaaaataaaaaaaaataagcatcttgatctttttggtggatcgaagataattcctttgtctcattcttttggatttagaatctcgttcagtagaatattaacatttttaattatagattatcaattatcgaacaagttgttgtacgtaaacttgattcgatctagcgttattacagtcaaccaaaatttatataataataacaatttatgaaaatgacaatattattcgatgtattattccttttttcctataattagataggtgtgattaaattcaagctagattccgaatcgacaacaacatattatatctattattaacctcaatttttgaaggcaaaaaacacacgaaattattcaaaactcacgagttgattctttacttcgatgaacatataaattgggaaagtatcaccgaacttatttgggtaataaagaaaaagatggatgaaaaaattatgtttgcaaattttaataagaattatgtttgacttggtaataaaatatagggcataatcatatgatgccatgttaatgtacgatcataccacaactgctctccttgtcgtgaaaaggttgaagtgatgagaagctaacacactttgtgacataaccaaagccaaaaatatatacttcaaccaagtcattttctcaaccactcttttctccttgtccaaggtcaaagccatgcatcaccattttattttctattattcattattgttacttttcctttatataactaataaaaggtctattactaataaacaactaaacttttcttttctttttgataaaattaaacaactaaacttgtcgaaaagaaataggagaacaaagaactctaacttctcacgaaattgataaatcaaatgattgcgtatcacaaagacactaaaaagaaaaattaaggaatcgtgtagagttgacactctatacattcagagtagtaatcatgtgtttgatagataataaatagataatggaagtatgaaatgagaaaacttgttgggatcatttatcatttgtggaatcctctaaatcttttctaacttaactccaagtcgttagagtccaagagatatgaatcgatcggaacttcaatacagaatttaattagaatatagtggaacaacatccacgaatctaaatgtcataagttgttaattgatcaaacgaaatagaatgtacttattataagcttataattttacaagtttgatgtgaatgtaaagtgtactactccactatttatttatatattctgtggtttctaaagaagaccaaatgtttttttttttttctttcctaagaagaccaaatgttatgtcaaagtttaggcactgttttaattatataacatgtctccacggacgaataaatgtacacacgaacatcatagtacgaccgttgacctttgcccctccattgattgataaaaggctaaaagccgaaacattttcattctacgagccttcccattccatttccccacatctctcctctgacctctctttgacccctctctcctctctctctagatctctcaataaaacagtgaaatagcaaaaaagaaacacaaaaaagagagagagaaagaaactttgttctctctgcatttactcttctccaactcagagatagagtccctatgcaccgtttctaatgaccaatcatctttctccctcttcatcattctctacaacaagaatcacacaaatgccataaaacctccattcttcttcctcagtaaaccaaaccataagacgacgaagaagaaaac

SEQ ID NO: 3408 - DNA, 3000 bp, Unknown
  misc_feature (1)..( 3000): cDNA_ID_1820712_gDNA_ID_1620645_Annot_ID_47575 3000 nt of promoter + ATG
aagaaggtagaacgcgaagaaacgggagaaaacgtggaagaagcatcagtagagtttgtaaatgattgggatggaaacgaaatggaagaagaagaagaagaagaatatggagattattttaatggagatgatgattggattcacgatatatcgcggccacgaagttactgggaagatctaaggaaagaaaggtatcttgaggttctcaacactgaatcagagaagaaagatatttgcaatctcattgagaggtatatatttctatgatcattcatcaaatccctcaaaagcattaaacttgaaactttacttgacttttgatgtttagactaattttaattttgtataccgctgtgcagacgaacagtttccaactttttgactagtgatttgcgacaaaagattgataatttgatgatcactcgcgtgcaaagtcatataggcgtaccactcaatcaaatagaagaaggagacgaatatgaagaagagtgggaagttgagtgttcagcaagaaacgaggaagataatgaaacagaggaagaaccagagaagacaaatcttgaagctccaagcgatgtttgcagccaatcatcagcaaggagtagtaccatgatgtcgtggaatttcagagaccaggacattgacaaggataacgaaccgacaacgtctttgtctcttcctgaacctttagttcccacaaatcaatctgtgagttttgttcttgttttttttcgtcaagtttaggttacgtgttggtgaagtaacctgaaatcttaacttattagacacaggacatgcagacgataagtgatctcaaggaacaaatggagcaacttcaacgagaaatgctcgagctacgaaataccgttaaatcttgcatcgatatgcaacttcatttccagaaatctgtaactcaagatctgtctcgttctggtcagttttatcatcatcatcacattaaacacattttagatttattcgttacaaagaaatcaaactgattaataatcttttaggctcatcagcagaacaacgagtagacccgaagaaagatcctttgaaacgcaagtgttgcgtttgctctgagatgcctgttgattcgctcctgtataggtacttctgtttgatatatcgcaacttcaaatcggaaacgctgaaataataactggcggtcttggtcttccttttaacaggtgtggacatatgtgcacatgtctgaaatgtgctcatgaattgcaatggagcagtaagaaatgtccgatatgtatggctccaattgttgacgttgtgagggcttttcttgattcttaggacccaagaaaccacaaaacattgctagtttctccattgatttgaaaatgtgtcacatttgaatatacataataaacattttgtttgtcttcacgtgttatgccgacttctaaagactttattattctcctattcttctatgaagtgaaaccattactttgtagtaaattcaatttgttgagcaaaagctaaaagtacattaaagaggataataatgaatcttggtcttcttggtgatatggataaggataaacattgtagtatttggaggctatggatgtaagaaaatactttttcgaccgttttgagctttggaaaagttaaaaaaaaattataaagaatttgatttttatgttaaaatatataaaagaaattgaagaaaaggcaattgaaagtttgaaacgttagagagaagccaagcaaaaagacacgtctgcgccatgtgtcttacagattttggaagcttaaaacgaaactgcgtaattttaaaaaagtatacaaaacgatattaacaaacaaattatagaaaaccatattaaaaagccatgtaaatccattttctatacctgcaatgtcaccctcagaaaactcgaaattatacgccatcaaatttagaaacttacatggttaaagcaaactcattaaattgttacgacaatgccaaaaaaaaaaaaaagacacaatcatttgagaaattagctgtgtataccataagcttttcattatgtggttgatttttagtggctgctctgctaataattttctgttgttgattgatacatgacttggctttgagcacatgtcaactttgcgatacgaaatataatggttgttccatattattaaattatcatgaacaatttagattttgattctatgattatatactaaacataggaatcaatagttgttaatcatttttcataaagttgataatttggtcttcaataatagcttaaattgctctctctcttttattgtttacaaaatacactctccttttgacctgaccttcccttcactatacggtttcctctggtgacgtctgcaagtcaaaataatacagaaataaggaatgtgttattattcagccaaatgaagaaacataattattttacatgactagaatttttttttacttttcaataaaaaaagagacttaaatcaaaaatgaaaaaacagagattgaaattaagatttggcatagaattttttcatttaatcaaacacgaaagtcgaattaaaatagtacagaacaaaagaaaaatagaaataaagtaaacactcctagctaaaatctctcctttcataggaatgtctggtaattctacatatgaatggattcagtagttgtcttttgtaagtatcttttttcgttgtactcaaatagcatattaattctggaaatatcattgaacttacatattacagtaattaaaaaaaacataattaagttgtcaaaaaataacaaaacaaataaagaaacaggtgtgttcacactcaaaaaaatacagactagtagaagaattaaaaacgactcttctcgccgactcgttgaaaaagtgagagacacacaacttcggagcgaatctattcttcttcttcttcttcttcttcttcttcttcttcctccgtttttttcatcttcttctctgtttcgagagatccactagtgaaagagtcagcacc

SEQ ID NO: 3409 - DNA, 3000 bp, Unknown
  misc_feature (1)..( 3000): cDNA_ID_1820700_gDNA_ID_1620645_Annot_ID_47578 3000 nt of promoter + ATG
tggtcaatgtaagaagtaatatgtccctgaaagcaaaaaagtttcccctcatcaatgttcgataaatcatttttaacatattctttttaggttttgttaatatgtgctaccgtctaagatccgtatgattctgtttcaatactagttggtactgaaaagagtgattcctaaatttatttacatttaagagtaaatcataaacttatgaaatgtgatattcctaatattttgttcctttataggatgacatgaaaagagaatatgtcattacgggagtcaacacttatatgaagcaatatggtctaaccaaaatggaagctatcagagagcttcaaaacttagttgaatacaaccatacgataatgaacgaagagtttttgaagacaactgatttaccacgccaaattcggaaacaagtcatcaacgttgcacgctctctcaacgtctcctatactgaaggtgaaggatttacccataccaaaggaaaagtcgatgagtatatcacttctttgtttattaccccgattcgtatttgaggattttggaatactgtatcgctttaagttcatatgttaaaacgaatgtgacctttgttcttggtttctttcatagcgacgtttcgtttggtatttgtggtctaagctcagaagtcttataaacgatctacatgatttatgttgttataagttataaatgcttttttttttttccatctggcattgccaaaaagatttttttttttgtaactgttcgattgggaccagccacttaatttttcctttttgaatagaaaatggcaataatttttaacaaagatgattacagtgggtgtttaaaaaaaaaaggtatcaattaaagggtatttctacaatttctcatttaaatatggctaaatcgttaaaaccagtttaatgctaatctaaaagtctaattttgttatatttcacaaatatgtaatatttttcttttatttaatctcaatttgaaggtgtacgcgatattgtaaaaatatgtgtacaatgtacggtgataatgcataatattgatttaaaaagtagtatagggtatatgataatgtaaaaagtagtgtacaaacgacaatttatatcggtgtatatctacataatatgatggtatatgaagatgatataaaatatggtgtacatgatattaagatatacataacaccccatatacaaaagatagaacaatttttgtcaagtgacaatgtacaaaacaaagtttaaataatataatagtgtatgagattgatgtacattgaaatgtacaaactttagtgtactctacataagaatgtacaaacattacctttatttaatggtctacaccatcatggttaatttaatggtgtacatgatggtgtacattagtgaacacatacatatttttattaatttatgaacaattattaatttatttataaatatgagacaagtcggtatacttaacgatttaggagatgttgtgtagaatgatttggtgtataagtgttagtgtacaaaacaatgtttaaatgctagtgtacgaaattaataattgaatatatacaaatcatcttatatttagaagaaaatattaatattttttaaaaaaatattaatttaaagaaaataaataaaataatatgaagatgaaaaatgataattatgatataatagaagttggtcgaaatagttaaataccataaaataaattgggacccatacctaaaactttctcatataaaacaaaaggtatagtggtatttgacaattgtttttttttttgtcttttttagcttattacacataatctctatctcacaaaaataaaataaaaactaaaaaattatttcacaaatttcacaaatttctcaaattaatttttcaaaagtgtctactttgctgaaaaaactcttgtttttaataggtttgtaacgtttatgtttagcaaagtcttgttttttataggtttgtaacgtttgtgtttgtattgtacttttagatttgtaatatgcatcggattcgcttcgatgagatatctgtttttattccatgtgaaaattaggatatttgtaaattaaactgtggttgtgttcatagttttcgtttacagcactttgagtttctttttttggattaactataaaattatcaaagtaaacactaaacagaacaagtttaataatgtatggtatagaaaatctaaaccaaactttagtgtgattacaatatttgatactatataaatatatatacatgtgtgattataatttaataaagatcactaatactattctaattaaaatttggtaaatttcataatatatgagtatatgactaatagtttattaattacagatgtcaaaatattcaggacaattctttttagtaaagtatctttgaatcaatattttttcattgaagcaaatgaatatttgaacaaaatatttaattaaagtttttggagcttacaatatttgatatttttcttagttaaaatagaaatatatcatatgatacattattgttattaattagtaactattaatatcttgtgtttgtgaaaataaagattagaatacatatgatattgcatgtggtttacaaattttgatggtaaaattcactaattataattggtaaatttcaaaatattttactaatattatattacttagttaaaattgtcaaactgtttaggaacaaaaagaacataaggtatctctctatgagtcaaagattgtcatggaattttattaatgactacttaggaacaaaatatttcattaaactatattatttttactttccacaaaaacaattatattcatattgaagtctaataatatttgatattttgcttagttaagaagtttactatctgtgataactagttttacttaacatatttacgcataaaaatctagtgtttttaagataaaaagttatggtctataaattatgaaaacggattccataacattttgtagtgaacatg

SEQ ID NO: 3410 - DNA, 3000 bp, Unknown
  misc_feature (1)..( 3000): cDNA_ID_1820696_gDNA_ID_1620645_Annot_ID_47579 3000 nt of promoter + ATG
gagagggttctatcattcagctttcaaaggaagtcacgagaatctcacgtgcgtcgagctgaccaaaagtgtaacgaacagtgagggtcttttggtcaattctaattctctgtaccttatcttcttcatctctctcgagtttgttagatcggagagcatcacctccggcgagacgtagcgttttccggttaaggaaacgtgaactcgttaaatctttgtgtcatcgattctttacgtttctctgttgttcaatccattcacaaacaagagccgagtacgaatcgagtgattgtgagataacaaatctttacatctttattaagaaattttaaaggaaaccgaggatttatcaggaaaaagaacaatgaattgtaattttcttctctgtttaagttatattgctctggctcccaaaatctttggtacgttcttgttgtgttatagtctataagttatagatgacataaaaggtacagctgcacgggtttttggtggagtgagctatcggacagtgtaaaatttgatggtgaaaatggatttcatatcattagtagatacatggaagtcacattactttttggactaaaatttggatctcaactttctcttcgttcactgaccaatttatttccggtaaataaactctctcgctgatgaggttgcgaaggtttacaataatttcatcaacaacagacatgtcaatttgatccttcgttctgtctctatatatctcgatctcttgaagatatataagataatttcgacagtaatatttatcgccaatttaacaatgtaaaccagtatggtatgactcgagtttgcatttgaccttgtctctgttatgttgagggtattctttttttttggtcgaaaattaagggttttcttcaatgttgtaattatagaataagatcatttaactcgtaacataagaatctaacttcgtctttttgtatttccatgatataaatctcgattaaaatataattatattagatacttaacgtaaatcatgtgtatcttaattacttattattattattttttgaacaagttttacttattatccgcttcctctcttttttacttgggtgatggtctccacaccaaattgaaaggaggaagttcaacttgctaatatacaaggaccagatcaacacaaccatccgacatcgtcactaaacaaatcctaaacctaaagtgagctggttcattgaaaaagcaacccaataaattaatcttaagccaaaacaaactctagtgggagtcatttcaagactataataaaatttaccactagactaaaataattttgacaaactattatattcccatttaacgcatttcaaaatattcttaaagtctttacataggttggcattgtcgtcgtattcaccagattttgagcatattcttcaataatgtgatccataatttaaaggaaatttattccaactaaaaaacaaaagaaaacatcataggcaaaagttaagtaggttatcaaatgttgagaaggtctttttctattgatttcttgatcagtaatagtttttcctagccttttcgactcacatggcaggcatttgatatttttcaataattgttttttttttgctaagagagtaaatatcattagatgaaaattaggtgttacaaagatgaagacctaagagaaagcgccttgtcaaaaaaaagaaaaaaccaaggcgacaataaacagaaactgtaggattgcaaatccgttaatagagccagtgctgcataagacttctaaaattctttaggtgtcttcttgccgttatcgagttaatgatttgacggtctatatccttaaagatggcttgaggcggaatcctgatctgattgtgcatcaagttgttcctctgcctccaaacagtatacactaaagcttgggcaagcaaaagtctaagagttcgcggggaagaaagatttctgactctagtccaagccataagcgaatcccagatttctgtcttcttcctcttttgcaataattgtttcacatgatggatttggacagtgtgtgtatatgtgtatttgatatctcatatctatttacatatgatagctttgtttggtgccaaagttgttttctagacacgtttaatctgcagatctcttttgagaatttatatatttttattttctaaattttattgtatacataactttactggtttactcgctcgatgtgctctcagcatcacctccattgttggcattgacataattttgttaccttgtgtgagaatttttgatatatataattttgaacttcaagtgccgttttaaaaccgtctccaaaagttccttacccaatttactcagaaatatgctagtaacttccattgcatgtataatatctaatgttacatatttaacatctcgttgtcgataatgattgatctttggatagttaaactgaccagcaaatggagtatcactactaaagcgtttcgcgttatccatgtttaaccttgtaagaacattcttcaaatatttctcttgtgacagcatgagaccctttttgcttcttctaattgtcatgccaacaaccagctttgcttcgctcacattttccatggcaaacgcttctgggagtttcattttcaactttttagttttatgcaaattaattaatttgctccctctaagcggtctttaataccatgccaaatttaatctgaacgataaaatatcaaaattaacctacatgaactacctgacgttagcaataagcttcatgacaacaattaaattgcgatatttctaaatctttacttggtcataaaaatattatatatggcacatgtattaaaagcattttttaaattaacaaaaataattaaatgttaaggaaatgaaaattgttcttcccccctgttgagtttgtgaccacgacgctgttgtcgggtaagcaactacgatgtgcctataaatttggggtgaaatgtatccaaaccattgacagaaaaaatg

SEQ ID NO: 3411 - DNA, 3000 bp, Unknown
  misc_feature (1)..( 3000): cDNA_ID_2991149_gDNA_ID_1620645_Annot_ID_163208 3000 nt of promoter + ATG
atgatccgtagcaatttgcttcgttctaaaccctaatttgagatctcaattatgtgattttttcgtttaggttttaatcaggaatgaagcattcaaaggatccgtttgaagcagcgattgaggaagagcaagaggaatcgccaccggaatcacccgttggcggaggaggaggaggtgatggtagtgaagacggacgaattgaaatcgaccagactcaagatgaagatgagagacctgtggatgttcgccgtccgatgaagaaagctaaaacctctgttgttgttactgaagctaagaacaaagataaagatgaagatgatgaagaagaggaagagaatatggatgttgagcttactaaatatccaactagttctgatcctgctaaaatggccaaaatgcagtgagtctttgtagaattttgattgttcttcatgtttctttgatgattgattgtttgttgaattcttcagaaccatattatcgcaattcactgaggatcagatgagtagatatgaatcttttaggagatctgcacttcaaagaccacagatgaagaaggtatatatgttatatgatttgtggttatcaacattcttaattttgtttcattgcaaatatgaaccatttagcttttatgttaatgcagttattgataggtgtcactggtagtcagaagattggtatgccaatgattattgttgcgtgtggtattgcaaagatgttcgttggtgaactcgttgaaacaggtaagccagtgcaaaaatttccaatgattttgtttatgtgccaacaaagctcatttactgaacctcaatacattatctgtagctcgagttgttatggcggaaaggaaagaatcaggacctatcagaccttgtcatatcagggagtcttatcggagactaaagctcgaaggaaaagtgcctaaaagatcagttccacgccttttccgctagtcaacaagagccaaaagagaacttatatcagcctaagactggggaatttaccaatgctgctcaaggataagggtctacggcaggtttaagctggcgagatttgcctatcaatctcatcataaaggagaacttctttggcttccctggtggatcatattgttctttgatgttcttaactttgtgtgacaacttttgtagtaaatcaatctttggatacagaccctgaaatggctatcagtcttacggtttggtttttatttggtttacgtttccagttttcattttcaatacaagatcaatctttgactacagaccacatggcctaaaagtggcaatccggtttactaggttggattcggtttcatttccggttttatagaattcgaaatcaaataaaatcatttgtaatccggtttatttggttaaatttggctatacctaaaaattggttttagtattgattcgtttttggtcgaacattacaagaactgggtttataagttcaaattcaaattgtgtatttcttcggcgtgattgaaaaccgtcgcgatcagaattcggtctactgtcaaaattggtacggagacgttttgaatcacacaagttccggcgaaagaggatctagtgggcctgataatgggccgatctcgaaacgaactattacgtgaagagaagaaaacaaagtgggttgcgaattgaaagtctacagaaaataaaaggactggattggaaaaataaaaagaataaaagaagttttgacacaataacgcacccactatctttctccttcccttccgccttccttcttcttcttcttcttcttcatcctcctcactgtttaacgcagagcgcctccgtttcttctcttctcctcctctctcttttctctctacacaaatatttttcccttcttttttcattctctttattcaatataatccttttgattcgctggtgatcggtacgagaaacttagaatcacacgaggaagctgtgtttcgtttatcctcgtttaatcggaatcgaaatttgttctggagaagaaatttaacgaatcatagattcctgatacaaaaaaaaaactatcacagatcggaatcggaaacgtaaccattacataattcgaatctggttttcacttgggtataatgatgaggtttctcttcttcttcttctccgttcttcttctctctgtgttttttccatcttctctgagtttttctattttccactgatttggttttctgttgttttctggatttctaattagtttctatggatctgagtttgattgtaaaaaaacttgagattgactctaatgtcaaaaacttttgatctcctccagatttcgtcttctttggattcaccagtttttaactaatctcaatttgatccaataaccaaattgtttttcgccttttgaacaaaaacaaaataatctcagagcttctccgtcaaattctgatttgggttattttcaattaaaactcagaagaattttgagaagattaactctaaaatctcgcataaaacacagacacatttttacaatttttcacagttcaatcttccttttcgttttcatgattttgatctaattatttttgtgtttttgattaggtatcagagagtaagcccagattgtcttcctctcacaaatggaggtaagaagccttacttacgaccatcaccatcaagagcaacaaacgaagacaccaccaccaccaccgtcattaccacaacctcaatcgccggaagaggatttaacggcggatcatgcacaaccaccaccaacaacacctcatctctagacggagtccccaaaggattccgattcagatccactcaacagcagcaacaacaacaagatcctagtcctagccgtcgcggcggtgatgtactgttacagtggggacaacgaaaacgatcgagagcctctagagctgagatccgatccaccaccaccatcacaaccaccgccgatgattcttcgtcttcttcaggtcaaggtaagatacaatcaaacaaaccgcaaagaagatcg

SEQ ID NO: 3412 - DNA, 3000 bp, Unknown
  misc_feature (1)..( 3000): cDNA_ID_3091087_gDNA_ID_1620645_Annot_ID_163204 3000 nt of promoter + ATG
ggtggttggagatgcgtttccagctaagtatatgtggattgatgattggttttcaaatcggttcatataaaatcagttatgttcataatgaagttagatcagtcaaatctatctcagctccaacatatttaacctacatggtcaaaggagtgagccactaccggacctagactatgaaatcaagactttttttaactaatcaatataaaaccaaagatgtcagtattggattactccattccgtgaaaacatgtttagttctcatacacaagtagatagaaccgagggttgtatattcaaattcaaaaacccggcaaataatttacttaagtgtttttagtttctctaatttcattctgaaagtttcatatatatggaagaaaattaaaagtaaaagattgagacgttcattttagaaaaataaagtagaaaaaatcaactggtctttggcttttctttttcactttaggcgagtaaagttgatgggggagggcctcctctttgttcttctcaaattttaggcatcttaataatctaaaaacaaagcaaaatcgaataaactaaaaagagcccataaaattgctaaagatggatagatttgtttcagattttctctgttaaataaatcaacttaaggtattccatatcacacttttccacgccaagtactttcgaagttcaaacccttcttgctatcatatgaaagagatatgtattcttgctaattaatttgtcgactataattttataacccacaacatgaatttcttcaccattatacaacctggaattactttatctattttagatgtttttcttacaaaaataataatttccctttagatcacataccacattgatctgcttccctagtttatctaataaatctgatgagtccttttcatagaaatacatattaaaaatagaaaaggagaaaaacaatcgtaaaggggagattacgaaataattcgataataattgtagattggcatgtacatatactactatctttttgcaggttcatggtgtgaaaacttcgaggagtataagctgatgaaacattgggtacagaaacagaatccttgacagagaagttattaatttctttcttctacgacaacaaaaaaacaaaagtagctgcatgcacaattaccaaagattctagttactttggagtttggtttgtacttatttagtggttggacaaagacaatgcatggcctcttaattaaacctgatggattagattttgattttttagttaatggagcataaaacgttagagtgacataaaggtacgatgtttaatgcagggtaattatatgatttatagctagtacataaattccacccgaaataaaacaaaaatcgattcatgcgttcgacaaaatgataagagtgagacagatggaaatttaatatattaaaataaagtatttcagcaacatgtgatattgtgtgtttcttaattttatattttacgatttctaaggttttcttaaaacccttccaatatttttttgttttttttctttcttaataatgttttaaaattattttgctttattattttatttttctaataatcgaatagaaaaaataaatttaatatggttgcctttaatggactgaatagacattaatcacgtaagaaaaagcattgatcttcaaacaataagcttaaatagtagttattttttgattcgataaggtaatttggttttactttatttgttgtttattaaactcacaaattcattcaaatttggattgcttaagaatgtgtttttcatcttagttcaatttattcaaatttggatcacctatgtagaggatttccatatttctacaaagtacaaatcaaaaggggaacacaacaaatttctatgaattaattatttattaaaaagttatcaacgaaaacgtctcccaagcgtatatacaaaattagcatatgccataggtaaatttaaagcttgaaagtatcattttatttgcaggaagcggcaatttagtaagaagtactcaaagtatcatttaccaaaagtatatggttttgggaagagttgttagggatgtattctttctaaacagatgatatgacgatgttcttgaaaactaatgttaaagacggaatctctggcatcttcactcgggagatatattaaaccgttgattgtagttagccatgtacttagcttagtgcacaaataatctgctgcaagaaatctttttctattataatatctctcatttaaacattagaacatattgtttaacttgttcttctagaaataaaactgctaatttcttatggtaaactattttcctttagattgcacaatcgaactcgaaaatctagtggagactatgtgactatgtttatatatatgaaacctaaatcaaattatcccaataattgggagacacaaaagaaaaattacgaaagaaaacaggaaatcaaatcaaaagataaagagaaggtaaaaaaaggcaagaagcactaatgtttaatatttatagttttctccattaaagaaaaagcgatgatgtgtgttctcatcttttgtgaaagtatatatattgcttttgcttttctcaaaagcaaaagactcatccaacaagaacaaaaaaaaaaactaaagctcaatccaaaagacgaagaatgcattggatactacaacttctttttcacttttctttcaaatttacaattatgattttcacaatacagtttattcaaaaataaataaaaaaacgaggcatgaaaataatgattatcctcttcacttattaagccactcactataagcagagcaactccagaacatagtgagcccccaaaacattaaagcatgatgatgtctaatgatgatgatcttcttcgttccatttctctaaatttttgggatttctgcgaagacccttcttctctttctcttctctgaacttcaagattcgtgtcggacaaatttttgtttttatttttctgatgttaca

SEQ ID NO: 3413 - DNA, 3000 bp, Unknown
  misc_feature (1)..( 3000): cDNA_ID_1841067_gDNA_ID_1620645_Annot_ID_163203 3000 nt of promoter + ATG
acaaaatctgatagattgacgtcaaaaaaaaacatgataggtgtctattaataaataaaatgtcgatgaacaagacatcgaacatacaagtattgtgatgtatgtatatatacgtgtgttatatatgtgaaaaatgattaaatgaatgatatattgatatatcataagatcttgtataatgagatggttgtccattgttttgttcatcaaagacaacagatagtgaaggcaacccatgtgcatgtacactgtcatcatggccaccagtgtattaccatttcgaaaaccttataagttgtattcttaattaattacgataaataaagatagcataatgcatagttattggaaaaaaaagatatataaatgcagccgtcaaatttgtttttattttgtcaacgccgtcaaacatatatatacatacaagatcatgtgttttttacaagataaaaaatctcttaatttttatataaaagactcttagcaacctaattaaataagtggatcatcttctgattgattgttaaattaaattaagttatttgatgagtacagaactattaagaaaatcattgaaaaataataattataatatcgtcgtgaaccattgaggttcgttattttgttctctttatatgaagtgaattaagagtgtaaaccatgtttgatggcgatttcctagtttgataaagatattgagggtgggatgtttgtcttgtactataattaattatctgtaatcattttaatttaatataatttttttttgttttttagacagcctaatttctttcaaacagctaagccacgtgaaatactttccttaacttttcagtaagttttaactattttgatcattcggttttaaataaaaaccagtggtgtcaaactatcaaacctgatcaaatagtttcaaacctattttttgactaaaatcaaatccacaatttggttaaaactaaaaatatctcttcatagaaggatggaccattgaagaatactttctcttttctatttttatttgatttagaaaatcatattcattacaaaaggaaaaaaaaaataattttttgtatcctaaagttataacttacaattttccacacttcagtttggtagtattaatttatctatttttatcaaagtttggttttaggaaaaatgtatcttttcatataaaaaatatatagatcttcaaagaaactgaattgggttttcaactattttatcgtttgacactactttgacttatcaaaaagagttcaaaatagaaaaatagaatcgaatcacacgtttcagtgtaagagggatttgatattggtcgacattttaaagagttgttttgtttttttttccaatctgcatggtttttcgttccgttgaaccaaattcaacactttgtataaaccgaatagtaatatactagacgtacgccaataccaaaaataaaattaaaactcaattcacaaattgaatctacaccatatcatgcatatatatcagcaacctagaataatcaatgaaatttaatcgaggataatcaatatccaactcaacgataatcaaaagcctaataatagatcaatgaaatcaaataactaaacatagtaatatacattgatttgtgttaaacagaataatatacattataatagtatgaaaatatgaatataatgagataagaggcgtatatgttacaactacagatcaccatccacaattaacaatccgattggtgcgggccattgtttcgatatttgccaactgtgattgatgtgactgccagctggcatattttcccctcctgattacgtttttaccctttcctcttctgtttcaccgttaattcaattttactatttgtaccgctgtctttcaccttttttaagaaaacccaacccgaaatcataactataccgaaatcacatgtcttcatggtgacgtaacaagacttattttccggttgaatttggtttaacctattgagattgtgctaaccgaaaacagaaacggttatgacgccaacgaggcaagaggggtaaaacgagaaagaggggatggcagaaatcgtaattaacaaggaaaataaagggtggtttcacgataagtctgtctatatgacgcgaaagggtttcttaaattcagagagacaattaatcagtttcgtgtgtttggagaagaagaagaacagatcaaatacgaggagagatctctaaagagatttatcgtttcaagtaagtctctttatcaaactcttaatataaacaaatcaaaacatgaacacgtcgtgtcttcgtttcgattctagatacgattttttagttcatgtgaatgaactctgttttattactactagggttgttcaatatttttccgagaattaccagaggaacaaagttagtgattatattgatgcagagtatgaagtaattatatacataaatcatgttttgttctcaagcatctacgttgaaatatatataagaagtttttttttggtgaaaaaatatgtatgagaagttcatctttcataatagtgaaacaactctctttcataccaaaaaaaaaatttgaaaaaaaattagtgaaactctctttgtccgattaggttaggtttggactcagaatcaaaatacgattagcataacaaattttttggcatggcaattattgtctgcaggtaaaatataccaatagaaacatatttttaggagtagttaagattatgattgaagaaatactattacgataagcataaaattttcttttgctgttcttggtttttgtcgttttatagaacattgaatatgtacttttgttttttttcaccagtagatatgtactatacacacataagtaacatgggtagtttatatagagagagatttgatttttcgtatatttcttttgttgaaaataaatatgtgtaaaatttattgtttattaatttgacagatttgttcacgttgagaagtttaatttagattaaacaacaaaaag

SEQ ID NO: 3414 - DNA, 3000 bp, Unknown; identical to SEQ ID NO: 3410
  misc_feature (1)..( 3000): cDNA_ID_1820696_gDNA_ID_1620645_Annot_ID_163193 3000 nt of promoter + ATG

SEQ ID NO: 3415 - DNA, 3000 bp, Unknown; identical to SEQ ID NO: 3409
  misc_feature (1)..( 3000): cDNA_ID_1820700_gDNA_ID_1620645_Annot_ID_163192 3000 nt of promoter + ATG

SEQ ID NO: 3416 - DNA, 3000 bp, Unknown; identical to SEQ ID NO: 3408
  misc_feature (1)..( 3000): cDNA_ID_1820712_gDNA_ID_1620645_Annot_ID_163188 3000 nt of promoter + ATG

SEQ ID NO: 3417 - DNA, 3000 bp, Unknown; identical to SEQ ID NO: 3407
  misc_feature (1)..( 3000): cDNA_ID_1820724_gDNA_ID_1620645_Annot_ID_163185 3000 nt of promoter + ATG

SEQ ID NO: 3418 - DNA, 3000 bp, Unknown
  misc_feature (1)..( 3000): cDNA_ID_3071141_gDNA_ID_1620645_Annot_ID_163184 3000 nt of promoter + ATG
tttactgttgttttgtttgagttcaaagatttaaactttagtctgctatgttattagccaataggactttatgggttatgctgcaaaaatacattttgagcagaaagatatattttttttacaaagaaagattaaaagtttaatctctcaagtaatctttgctccattattggatgtttttaggttgctactttgccttaaaagcgtggcacgcgcagcaagcaggcgcggctgcagttcttgtggcggataatgtagacgagccattgttgacaatggattcaccagaggagagcaaagatgcggatggtttcatagagaagctaacaatcccatcggtgttaatcgataaatcatttggagatgacttaagacaagggtttcagaaagggaaaaacatagttataaaactagattggagagagtctgtgcctcatcctgataagagagtagaatatgagctgtggactaatagcaatgatgagtgtggtgcacggtgtgatgaacagatggactttgtcaagaactttaaaggtcatgctcagatactcgaaaaaggcggttataccgcgtttacgccgcattatattacttggttttgcccttttcagtttataaacagtccacattgtaagtctcagtgtataaaccatgggaggtattgtgctcctgaccctgaggataatttcagagaagggtatgaagggaaagatgttgtgcttgagaatctgagacagctttgtgtgcatagagttgcgaatgagagtagcaggccttgggtttggtgggattatgttaccgattttcattctcgatgttcgatgaaggagaagaaatacagcatagattgtgctgagagtgtcatcaaatctctgagtaagaatcttttttcttttcctttttagattttaaagaaagagagtcttctttgtttaggttatgaatctttaagacttttttcagatttacctattgagaagatcaagaaatgcattggtgatcctgaggctgatacagagaaccaagttctgagaactgagcaagtatctcaggttagtttcttaatctatctttatttagagttttgaagaaacatttcagaggtttggttactaactgtaactatttcaagattggccgaggaaaccggggagatgttacgatattgccaacattagtcatcaataacgctcaatatcgaggtttggtacttgatattttttcagtttcactctctctttatgaagatgctgaagtttctgttgttattggttgcaattgtgaagggagattggagagaaccgcggttttaaaggcgatatgcgctggttttaatgaaacatcggagcctgccatttgcttaaacacaggtctagagacaaatgagtgccttgaaaacaatggtggttgctggcaggatacaaaagcaaacatcactgcttgtcaagtatgtcgtaaaaccgagcttaccacatcacatctcaccactatattgaatatcagtatcaatttgtttggaattgttttgaaaactagagaaaatgtgaaaatctagagagatattttctagtcctataatacttgaatcttttttgtttgatcaggacacattcagaggaagactctgcgagtgtccggttgtaaaaggtgttcaatataaaggagacgggtacacttcatgtacacgtaagttgttcacacatttcacacaacatagctctcaaatgttgagaccggtttcttgaatagtctctggtttgtgattgagctttgcagcttatgggcctgcgaggtgtactatgaacaatggaggttgctggtctgacacaaggaacggcttaactttctctgcttgctcagtttagtgattctcttgtcataagccaaaccctcccttacaaagttcttgttttcagttcaatcatctctttgttatttatgaaaaattaggactctgtatctactggctgcaaatgtcctgaaggtttccaaggcgacggtttgacgtgtgaaggtacataactcttaacttatcgattaaaatctcgaaagaaaccacataatcatattaccaacaatgtaattatgttttctgatttggctctattgcagatattaacgaatgtaaagagcgttcggtatgtcaatgtagcggttgcagatgcaagaactcatggggtggatacaaatgcagctgttctggtgaccggctttacataaacgatcaagatacttgtataggtaaaattttatcaatcaagatttaagagtactcaaattccataacagtatctaattaatatacattgatgattgtttgttacagagagatatggatccaaaacggcatggtggctcacattcttgatactggctatcgttgcagtagccggtttagctggttatatattctacaaataccggttcagggtactactactctttctgattccacaaaagcatttttgtacttaataacggttttaggattaccaaactaacttttctttggtgttcctattaacagtcttacatggactcagagattatgacgatcatgtcacagtatatgccacttgagagccaaagagctcgtgaagttccatcagaagccgagccttttacactctaatagtatatgaccaaagtaaccaaaactgtcatacacaaagaaatgtttgagatcaattaatgtacatatgaattatactgtaaaaataaaagagtgagatagagttgtgtatattttcatggcaaaaaaataaataatttggatgtaaagagacttttgaagaaaataaaacaaatattgctttcattgagagttgaactcaagacctcccgcttactaaacgggtgctctaaccaactgagctatgaaagcttcttgcaacatattattccaaataaattatatcgtaaactaagagttaaaatcttgaaaacaaaggataacgatcttcgtctccctctgctaaacccattttcttctgttgagga

SEQ ID NO: 3419 - DNA, 3000 bp, Unknown
  misc_feature (1)..( 3000): cDNA_ID_3091075_gDNA_ID_1620645_Annot_ID_163216 3000 nt of promoter + ATG
attgtgtgataatttcatatacagagttgcaaaggagcctgcattagaggaatggtctttgatggctaaaatgaccgacaaattgcatgttccggtgtgttcctggtcctaccgtgacatttcaggtttagtttatatcactggttttcagctggtgactgacttcattatgttttgagtttataggtaagaattgctgtggttgggaaatacactgagctcttggattcgtatctttccattcacaaggtaaacctttgcaggatacatcaatcccaacaactttaaccacaaatctaaggcctttctatgatcgaactccacacaagccatagtctataatatctcactatatcaactgtggtatttaataaaaggaattcttgtgtttgatgatcaggctctcttgcacgcttctgtggctaggcgcaagaaacttatcatagattggatttcagctagtgatcttgagcaaggtgcaaaaaaggaggtatgtttacactttacactaaagctctattacttagacaacatatgaaacgtaagaaactgaagcaaaatgatttctctctgcagaatccggatgcatataaggccgcctggaagttactcaaggtctgaacattctttcattcccatcaaatgaatcctgatttcttgtgtcgagataggctttccgttgataggttttatgtaattattcttcagggtgctgatggcgttcttgtgccgggaggttttggcagtagaggtgtagaaggaaagatgctggcagcgaaatacgccagagaaaacagaattccataccttggtatctgtctaggtatgcaactcgctgtgatcgagtatgcaagaaccatactcggtttggcagatgcaaatagcactgaacttgatcccaacaccaaaaacccctgtgttattttcatgcctgaggtttgttgccttccacattttctgtttgagtttcagttacttcactctatataagtcgcgattatattccgtgtaatttttgtttgaagcaggggtcgaaaacgcatatgggaggcactatgaggttaggctcaagaagaacttattttcattctaaggactccaaatcagcaagactgtaagcacgaagttctttctccacccaaaagagtttcatctttatgcatctttgagcttaacctatatattatgatgcgtttgaatgtttcagatatgggaacaaaagttttgtagatgaaagacaccgacacagatatgaggtatttaagcatccgacacagttttgtggcagctctcagagtatacaaaaaaaacgcatctctttgacattttaagctaaaacaagatgctttcttacaggtgaatccagccatggttccacgttttgagagctctggactcacattcacaggaaaagacgagacagggcagcgaatggaggtaaaaacggatcttttacaccacaaaaaatttcatcttcttgattataattcttgacatttgaaaatacagatcattgaactgcctaaccatccgttttacgtcggagctcagttccatcccgagtacaaatcaagacccggaaaaccatctcctctgtttctaggtgaagagaaacataaaaataatgcaaaagccctcggtttctttcttcgtgtaagcacataccttaactaaaacctttttttgaattaaaaattgcaggactaattggagcagctagtggagaactagacactgttctgctacaaagctaccaagaaaccgtcgttccacgttctctacccaacggaaaactagagagagtttactggaaaggtgcagcgaagaagccagtcagtgttgtgtacagtttatgtgatcgtgtctactcgtgaacaccgtatctgcatcaacaatgacttctctctaaaaaagctatttatccggaatttttaacatggatttcttcacctgtggagggagagagaaggcaatgagtttgtacagtttgaagattggctttttatgagatgcttttcttaagattatgaagtagaagatgaacactaagcacaagcagcattaaaacatatattacctttgtcttttgtaatgggtagtattaaagagagtcttgggattgactctctgtctccgttgctgtgtttcttagattcttatgtagtagtattaatcagtagctttttccttttgctcttttttttttttgggttgttatggtttaaccatttccagagaagtaccgatgtttttccggtacatagtttgatttctctgtatgttaatgtagccttattctcatgttatttgaatggttataaaactagttctctttttacttgtgttttgatttcacaaaatggtgcatctctagaaggtcttgttgtatgtcctttcttgaagttggtgaaaatgcaagtttctcgacggttttgtttaatccgttggacttgtcgtgctaaaaatgtctagtttcttagcgaagagactaaaccaactcaaacaaagcgtttgagacttaagcgggcgtttctttttaagttgttatgggcctagtcttttttggtgatagcgcaggcccatatttaaatgcgcgcgctacttcggttatggcgccaatctggtgaatataatcgtcgcttctctgtttgatccaaatcttttggggttgaatattgtacaccaactgttcgatgaaatgtcttacagagatttcgtcctgattcatttacctcactaattgcgagccttcttgccgtcgtcacggtatgctacctaattggtgttaagggttgtcgtaatcttcaatcttttctcgcctagctctcgttttaggcttttgtaaagtttacttcagttttaggaaagagtatcgtcttctatgagtttgatatagcttgtacttggctcggctgaattatggctctttaacccttccttgggacttttgtcttattggtgtcagaattcgtagaaatttaggtttgctaaagcttgaag

SEQ ID NO: 3420 - DNA, 3000 bp, Unknown
  misc_feature (1)..( 3000): cDNA_ID_2135650_gDNA_ID_1620645_Annot_ID_163210 3000 nt of promoter + ATG
ctgctttttttaacaaaattgtgaaaatcatttgatcttttgtttatttatgtgatcagtttaatacactatatttattcagtcaaaacctgcatttttagtcttgttttttcaactgagtattgattaacaggaatggaaactgattatatattgaattgtaaatgcagcagcagaaacggagaggattgaaaggcatggagaatatggacaccgactccgagtaaattttttgttccttgtttcattttctttttgtatggtttacgatttctcttttgaggaaaacaaatatgaagatgcacgtgtggcttgcttgtgaagagcgtgcgaagtatgccaacagagaaccagcagagcgagctatcgatcgagaaattactctatttttattttaatatttactcttatttttccttcttttggtttttttttggggggttcctaaattctttttcttttgtttcgtgtacaaaaaaaaatggtggagatcccttcttcataaatcataattccccttttataattatgaagaaaataaaagttctctgtctctttgaagactctttattgcttaaaacctaaataaaattcgataagcaagaataataaagtaataatgaatcttataatccttaaagaagaataatcaatttaatgaaatatttctctgattacgtctaaacgttttgacttcgttatgttaggccggaccggtccggtctgatttgaaccggagagggtggttatgtggattttaatgtctttggccttttggttgaatcaatttttgaaaaaccctcgcttattctactaacccttttcttcctaacctatttgaaatacaattttacccttctcttttactttttttaattttttatttattttttactaccaaataatttattaaaatcaaccaatcatacgcattctctctcttatctcattaatcacttaaatctacaaaaaaaggctggacaactgaaaccaataggcacaactatgttgatggacttctacgaaaacatataattacatactgtttttttttttctttttgattttcaagttatagtcaaaaagacttcagtcatacgcattgcttataatggatactattaaatttttttgtcgtatttatacaaattaatatgttttgtattggtacaactaagtacaacccgcacaactaagatctattcactttgctagttttcagaatattataaaatatgaaaatttaaaacaaaactaagaaaacttaaataatgcatacacaatggtaatgaaattacataattagtttttgacaaaaatcatattttctaaattaatgaaactcttatcacaaaatctaacattcatacactaacaaccttatactttcatggttactttgtatattttaacaaaacaaattaaaaattttaaacacttgtatttagataaatataaatacaccgatacaaagtaatggtattttgatgggggaataccatatgttccacccataaaaattagttttgagttgataacaactagatttattatattctcgatattgtacaactatgagcaaaaatgtgcaaccgagtacaactgtacaactatgggcaatatatttttcagatatttatagatattttttaaatatttgtagataatttataataaaaattagctttatttttttgtgataaaaatgtttagttttttttttgtcatcaaaaatacttaattttatagttaaataaactatttttttccctttcaaacttttttttttcttctcaaaacactattgtttaataaaataaatactaacattcataattttttgtgttttgttttggatcaaaatacgttgatgtgtacattcatatttattttggagttttttttgacaaaaaatcttagattcatacataaactaagatacatagttttacatgagcgtaccagttgtacctaaacgcttagatgtattattttaaaacaaaaagacagccgaacaattgtatataaacccaaaaacccaacataattatatctaaaaatttagccacaattatacctaaaaccaaaaacacaacactacgtaataacttaaacaagacgccttcttcttctctttgtcattctccttctcaatttctttcttctcctccccttttcttctagtttttatcacaaactatctctaaggaacaaaattcaaattcattcgaatcccaattgtaatcctaaaaactaagtcataatggctattagaagaggcttttaaggaacaatttcgattttaaatcgataattaattcaaatttgaattgtaatcataaaaatccaaattataatcgaaatttcatccaaaatccatcattttcaaacaaaatcaaagagaaaaaagatcaaactatcaaatctaataaaaaataaaaccctaattaaacacaacaccatcaatcatcatatatagaatagagatggatttttggattgatagaaacaaatgaaaaggtaaaaaagatggatatttggattgatagaaagaatgaaaaggtaaaaaggagacgaaagattatatatggaatagagagaaaagagtaaagagaagaagaagaagaaacaaatcaaaaattttgtttttgttgaattgagagaaaaataaattgaagatgaaaaaaaattgatctgagaaattagatttttttttctgttgagaagaaaatatctaacattgttatggatttacatctaacatagagattgggttataaataagtgaaaaactctagttttacttgttttttactattattctgaattgaaatagataaataaacatatgttttttataagggggctaactagagaatgtttgaagctgagggggtggagtaagattaaaatactggttatgttacgttataaattaactcatcggctttaatttaaaccataatcttgtaagaaagaatcaaaaatctgaataaacca

SEQ ID NO: 3421 - DNA, 3000 bp, Unknown; identical to SEQ ID NO: 3405
  misc_feature (1)..( 3000): cDNA_ID_3071145_gDNA_ID_1620645_Annot_ID_163183 3000 nt of promoter + ATG

SEQ ID NO: 3422 - DNA, 3000 bp, Unknown
  misc_feature (1)..( 3000): cDNA_ID_1820684_gDNA_ID_1620645_Annot_ID_47582 3000 nt of promoter + ATG
tcaacaaagtagtctccatgctcatctcgatgtattttgccattatgttcaaaaacttgtcaatcagttcttgacttggttacacaaaaaatgatattattctcatatatctaaacatccataagctttttctttgacttaagagtgaagaggatttaataataaaccgtctgctatattatacaatgttttgtatatatttcctataatatgaaagtattagaagatattctttcaaccaattttgattcaaacaactatttaagaagctaattctcccacaccattccataagttcataaaatatgtttaactggacacaagaatggagtatggtttgtgatagaccgataaaagtcatcatcccagaaataaatgtcaggattacatatcgaaagttaaaaaaaatatacgctaaagtaatagataatgtgcttggaacaagtgccatttgcttagaggttcgttgttttttttttttttttttttttttttgataaacttgtaaatatcattaaggaatgaaatgttcaggcgttacaaaaagagtttgacctatactttactaccttgccaaaaaagaaataaaaaacaaggtggcataaaagacaaatgagaaaaaaagaaatcctcattgaagccaaagctgcatcaagcttgcaaactttctacggtttctcctagccgtgattgagttacgcactaagcgatcaacttctctgaaaaccatggaggagggaatgacttgttggttgtgtagaagattgtttctctgcttccaaatcccatagatgatagcatgagctactagttttctaagcagagtaggcgaacgatttgaagaacccttaacccaagatattagtgctgcccaagaagcaaaaaccatggacgtcatgccgaggcggctctgcgccatcgaaagactataagggcaatttaacaacagatggtctctcgtctcatcatgcacattacaaagacaacatgatttgggaatgttcattccccaagccacaagacgcatacatgttggtaacctatccaattgggcaatccacattaagaaaacaacaattacacttatattcataggagtaactctcagcaagattcttatggttggtacattgatggggttcggtgtaaaggattctcctctgcaaaaacttggtctgttttaagacctaaatataagttcgttgttttctataaatataagtgtaattgttatactttagcaagaaatataatttcatactcttcttctccaaaacatttcaagcttttcgacgaattgagaacccacgtgaaactatgtgtgaatcttatttcaacatatctacacaacaaaatgttatctaatttatcagattttcttcattttctaatgctaatccactttgagttcacgacgacgatgacaacaacaaaagcaaaactgcattttgatatatgccattgccaactaattaatgcgataagaaaatcacatctaagaataaacacgatttaactttagtagcaggctactttaaatggaaggtttacgcgatagtttgacccattattctgtcctactttatattttcttagtcttcttttgttccatactctaatttatctcttttatattttaatttagcgtagtgtttagttttacttttgtggcagacaatatatttctgtgtcaaaaaattaaaagaaagaacaatctttttccatttaaagttaatcgagggattatagcaacccatttcggaagacaagttgcttaaaaggactagggtcaccaacttttaaaaaaagttataggccatttttcttttataatagtctaataatactaaatcaacagtcattttagtagaaactgcctatctatctatttgacacataagcaataccccaaacttttgcatgtttagaattttctcaattaattaattaaaaaaatgtttcgaaagtttatttctccatctcctccacccacaatcccacgttctcttaattaggattcgttgacaatacttttgttttcatcccgtaaacacataaataattaattagtttctttttcttcttcttttgagatactatttgctgttcttttgagatactatttgctggaatttggatcaaaattatacttaaactggattagcaattgaaggtaattaaacatgcatacaaatacagatatattcaacgacaaaatctcttccagatatttcttattgatattttggtctatctctttgacagacttttatttataagtgattcaaaatttctagagttcacatgtatttattttaggggaaatagagaagattgttttggaattgtaatggtatgtgcatccgatcgtttatggctattggctaacaagagaaactgctaatatccaactaaatctatgtttcctctgtaagtatataaattcagtcattatgtttgttacttgagttaattcctattatccatatttgttcaaatatatgtatatagataactaaatttgatatttgttatcttttaaaatatatactaaaactaagtccctgcatagcaggagccataatgctagtgattatatatgaggaagggtcaccgatgtttttacttatttactaaaaatgtttatcagaaaatattataatataatatacatatttttgaaagctaaaactataaaaggggcatcttttattcttgatttgggtcactatttaagtatttttattggactagtttttggccaaatccgtcgagaatttttttaaatttgtctccttcccaagcgagatttcaactatagggcttaataacgcaaaatctttggagaatctaaaaattcgccacttacccaaaacccacttaagagaaccatctattttaatatttgatttgccagctaaaacgatgcgatcctaaaccctataaaacactcagtagagatatgctcaaatcacaccattcctaaataagcacaatatg

SEQ ID NO: 3423 - DNA, 3000 bp, Unknown; identical to SEQ ID NO: 3413
  misc_feature (1)..( 3000): cDNA_ID_1841067_gDNA_ID_1620645_Annot_ID_47584 3000 nt of promoter + ATG

SEQ ID NO: 3424 - DNA, 3000 bp, Unknown; identical to SEQ ID NO: 3412
  misc_feature (1)..( 3000): cDNA_ID_1820677_gDNA_ID_1620645_Annot_ID_47585 3000 nt of promoter + ATG

SEQ ID NO: 3425 - DNA, 3000 bp, Unknown
  misc_feature (1)..( 3000): cDNA_ID_1807228_gDNA_ID_1620645_Annot_ID_47590 3000 nt of promoter + ATG
aaaatgttgaatcactgaagtacttttctaacaatgagaatgacgactgatctttatctctatttcaaatagcattgttctggtatatcttttgaatgatttcaaccataaatattctagtaacatgtggaattctaactagctttatatatatatataatgtatattaaatacataatgtatttctgtactgtatgcatatatatgttaaatcatgaaatgcaaacatatgattctctttagttattgttattaacagaaaaaaatttacattttcagataattgtactcttctcatgtctttaaaacatcatattagaggaatatttatgtacggaggttcacgtaatatagtgtataactgtaacttttcccaaagttttataatttcaaaaccaaaaaaaaatggaaacttttggttggtagatttttttaaaaacaaatctgccaaatcgatactttctttgtttaatggaccagtgataaatagatttagagaaagaacatttttaatctcttttacatttttaatagttagttccacattaacatgttctgccaattaatttgggggttaaggactgttcttgattcaaatatattttttgtttaattgtttaataaatttttggtagaagtttacttttgtaccagtgataaacagaatagtaattttatattttacataaaatttggtaggcattaactattgtaatcaaatttccttgataagcacaacaagatcagatgcatgtggaccctcatgatcattttagcttagatctccaaaataccataactgccgctggttattattctatgctatttagcatttgtttctaaatcgtttttatagttgacacttaacacatgttgacactactttagtacatagaccatagtttcaggttatttattgatttttaacaatgtatattagtatgatttatgaaaccatatatatttctctttcaacagaaaacacttattgtacatgtgacatattttgtcacatcttcgatagaaatacatatttttaataaaaacaatatcctaattcctaattaagaaattccggagatccaaggtgactgagaattcgcaatagagtaccatgaatcataaggtctaaaacttgcaatatgcatcggccagaaaagatgacacaattactctagcgtttgtaatgatatcaaaatactaaagaaagatgggataattatgcattttacgcgctagaaatatgtgtagtataattattttttggatttactgttgtaaaattcgtcagaaatgcaagtcactaaacaacagcaacaccacagttgtattgttatatatcagtataaatttatattcatatgatataaatttagcttctagaaaagtagctagtcactaatcaataaaaatgcataaaacttacactatcaaatgatttcaatttgcataactacaactcatggatttcatggtaaagaaacttagaagctactacaatagaccgtggactatttctaaacaaatgcaataatgaaactgtttaaaagctattaccaaattttacccgcaaataacattatatttgtttctggagccaaaattaaaagtccatttcctatcttgatttatgcttgtacccatactatatcttcaatgtttcgataattagtaattactccaatataaatatatatttttttaaagtttttgtttttactattactttttttatgtttaaactttttaactcactaatcttttttcttacaaaacctaatctacttttactctctaaatcggtggactatatatatatatatatatatatattctcttcttctatgacaaatatttgtctcatttatatttactttgactaatagcataattacacataatataatagcacaaaagataacaattcacttgtgaataaaaaaaggaacgaccgcatcgcatgcattagttaataccgttgctggaattgcggttcacagggctctataagtcccgtatccataggatccgacacgaaaatatattattttcctatatataaaatagaaaataaagttgagagataacagaagaattaaagttgagaaaattcgaaataaaatgataaaaaaaacattaaattactacaacaactcgtgggtgaaaaatgactttaaaacatattttaaaacttaacaatatcctattttaaaatttcaacaaaaaaaataatatagatatgaaaatccgagcattacagacaattagcttaggaaagagaaacatagtcctaatcaccaaatgttaaacacagtgtaagagattttgtcttctttcttttgtctaagattttaaaacaaaataaaaataacaagagagagagagagagaaagattagtttaagaattaaactgctaattaaatacgaaacagtaatcttctcttcaaatgcttataaaaaggcccttcacaatctctcattcaattcacacttcacatttggatatctctctaagtctctctatactttcatttctcgtttcataatattaggtaagtctaattaaatatctcatctccttaatttttttattcgctcactaatctctctacacctttcagctaaacacaaaacaaccaaaagctcaggttcttgtgttttggtcctctgtttatttcttgctcaaaaaacaaccaagagctcacttgctcttaatcacaaactgagacttttctcagtcttcctctgctttaactagtttacttgggacagattctgtataacataaacttaaatcaggacatgtaactgaaacatgtcaagtttctaaatttaacttgagttctaaaaccgttaacacaaacacaaagctgtatgctttcctctctgtttctatgctctgttttccattttttgctctctgtcctctcttgcttagtaaggtctgtttttttttttgcaggaaacttgttagtgtttaaggaaacaaaaggaagaag

SEQ ID NO: 3426 - DNA, 3000 bp, Unknown
  misc_feature (1)..( 3000): cDNA_ID_1825700_gDNA_ID_1620646_Annot_ID_47591 3000 nt of promoter + ATG
caaaaccattctaaagacgcatgtgatgtttttagccaaatggcatacatcggttataattgacatgtcgatatactataaagtatccactcatatcttttgtttaatttttttagttctttccatagtttctgtaatatttcgcgatcatagctataaaattttaatcaaataaaatcttataatttgatcatctcatttatttttataaagtatatgatgctgtatggggcgcagtcactgaatctcaaatcttttacgtataaatcattactgttttattgataaagtaagctcagtctttcgcacgacatcaagattttatacgatatagagtttttggtaccacgatcgcaacgtataataagatagtactgtaactaacagtcacgtgatggaatttgaaattagttaaactctaaccaattaactatacgtacattttacacgtggtaaaacaaaactaaagcaagaagattcaattgtttcttttcttcacgcttgtgacactttataacccaatagtccttgtctttatagtttgattacttttgtccgttagtgttcaccttaattatggcgtttgtaaatttgcggagatggaaaagagtgaagtatctaatcttgacctacatgaaaatcatcaatccactataataaaatcctctagaccacacttaattagtcaaaatctaagtttaataagtgacatagttatgtttaaactaataaatattaatatatttgtcaattaatgtctatatatcaagaaaatattatggtcctaaatattaatttatagattttgtattgaatatatatttaatagtatttctttattagaatcatttcagttatgttctatgcaatgtgtctaaatattatattttattgcctctattacctatatagattttatttatataaatatatagtaattcacaatcgtgttttacttaatccctggatcccacccgcagtttcgtgtggccctcttcagtcttcactcatcagaccgaaagaaggaaaaaaaaagagagttaaaaagcataaaacccattttccaataagagttttctttttctcttcttcttacgtgtacgatcccaatctaacaacacaaaaagggttcagttttcttatctccattttgatcatgtcaaaaaccccacatgtccacccataattcctcctcagtctttttataaacaaaccattttcttgcttttgctcgcaaaactttaaccttaaaaaccaaaccaaaaaaaacaaactaaattaaacttatggatgtgtcaaatgagacagtggaaagaaccgatctccggacacctttagtagatccggcagacacggaggtgaaacctctaccagaggtcgggctcgagagcgtattaacggagagtagcttgtcataccggaggcgtgtgtacttaggagcctgtatagagttgaaagtacttttccggttggcactaccggcgatacttatctatttagtcaactccggaatgggtatatccgctcgtgtcttcgccggtcatgttggtagtcaagaacttgcggccgcgtccatcggaaatagctgcttcaatctcgtctatggacttatggtatgatttacgttaccgtacccatatgaatatgatatgaggagacatgttggtattatatatgaagatttatactaattattattttcatttgttataagcgttatcgtatatttagtgaagtaaatggtggagtaaattataagcattataatttagttggaaattaaggattaaagattttgattttctcgttttgtgtgttgacataacatataaaagtactcatatattattaacctaacctaaatggctaaaagcttagcaaaccacgtttattttgctaaggataacagcctgtaaacgatgctgtatttttctatcttatattcctatatcctaatttgttcttacaatttaatgattacataccatttattcggttcttttgtcttatgaatctttaccattttccttcaattttttaatttttattttggggtcaactactaggcacgattttaattttaattttcctactaggcacgatttcttcaggcgttgaatttactcgtattgatatataaactattaccgccatggtaactatgaatgaagttaactactcgatattcttagggatagaaacttacgtaatgcaactaattgcattaacacacgatcacgataagagtttttactagacgaaatcactatggtgagtttttgtgtgaaaaagttcaacttttggattttgtaagagaataatctttcacttccttagaattccgtgaaacgattcctttttcttgtcagctagtataacttaacgattaattgtaactgtcgttttgcttaataaatgatataattgcattttttgtcgaccaaaataaataattttttgtagtatcgtttgttttgcaagtcattcttttgaatattattgtatgcttatgatgagtagtcaattaaatatttatgattttctctttggattatagtgtaaaactgagctttctaatttttgcccatgtgagcaatttgtttgtttacctaatattaggactttctactgttttctcttactttatactagaatttgtaaagatcttctacgttagatttgttttcttttgtgtgcaacacgttctattgtttaatatgaataatctacaatatgtacttttttcttggatcatcatatcgttctttgttttattgttcatttaagaaaggaaaaaagatataaaaaaatagatacccattttcaataaaactttttcttttttaattatgtgtacaatctctatttataacacactaaagagcttcattttgattatctcaaaaaaaaccacacagatccttaaatctccaaatttcctcctcagtcttatcattatagacaaaacccttttctttgtaaattttttcccaatctatg

SEQ ID NO: 3427 - DNA, 3000 bp, Unknown
  misc_feature (1)..( 3000): cDNA_ID_1825696_gDNA_ID_1620646_Annot_ID_47593 3000 nt of promoter + ATG
tgatgattgagtttgttgagataagtatttatagcttaaatgtttgattgttaatattaaaaaatggatataaggctcgagggaaaaagattagatttgtacggccatgttgggagagaatacaaaggttgattagtctttacgtagaaggtcttgtttttcaaagttacgttgtaattagttgaccaaagctgtttcatcctcatccacttcttgtaactgatttacttccaaaacagaacacaaaaaaaaaaaattgtcgacatgaattacttcaagtaaattgcatcttacgtacaacttctatattaagatattggataacattttatttttcgtttgataatcttatccgaactcatttttgagattacgtgaaaaagtgataagatacgaaaattgaactctaaagttagataatacagtataaattcgtcttgaaaaaatgatgtaaaaagtaaaaacaaattagatttttttttgttgtcaacgagcaacctatcctatgaccaaaaaaaaaaaccttcaaactttatccctaatatttgacttagtgaattaatgaggaccgtataagagtatattcagagatgtaccacaaaaatttagtgtccactagctttttggtaatatataatttaataattaattataactttggaaagaaaaaaaatataaggggaaaatatcagttaactgatggaagttgatgggagtggacttaaaagttgcttagttcaaataattgtctattatgtcggccgtgcccttccaaagacttgcaacttacaacaatgattttagttgttttatattctaattaacaaaatattagttgttggaaatattagtattttttttgataaccattttggtaatttagtaactttattcactaacgttatattacgaggttgggacatgatggcatcgtcaaaagatagtgacttcgaatctcttacaagatagttaaataatatatttctgcgtggttcaacaccatggtaacaaaattgtgtatcaatacctgaatcaattttttcatggagggttacgccaaaaatagtctaattattttgtatggaaaatatgtagtactttttcacgtgataaaagaaataaaagtatgaaatggcgtctaatctatgggtaaaaattttggttaaaaaaggaataattatttttgtttctttttttgactcgaaatatatttttgattataaaagaaggaacgtgtgaagtgtcacactgtcagcttatctatttgcatgggaagggcatcgctttttgactttttcttgtcttactgattcctttttcacttatataatctctttctcttcttcctccaaattcacgtgtacaatattgtacagtatattgaaattttggtcatcgtacttagttgctctgcgtatgaacagaaccaggtcaaaactacgtattgcaaatttccaccaagaaaaaaatagaatacggtcaagtattttcatttttctcgtccattattttcatccattagatatacattcaaataccaatagcaagaattacgtacagtataactaattctatatggcattatgtcatttcttttataggcattatgtcatttcttttataggcccatattgagtaactgaaataggcctgattcacagttaaagtagtgtatcgttggggagcccgtttcccccaaagagaaaaaatcgttatataccaaacattgaactaaacaaatacgaatcgaccaggaaaaaaatgaactaaacaaataagaataagtcaataaactgttcaggacttcatgcttacaaaaggaattgagtatttttaaattctaatactagataaactatccgtgtatacatgcagattttgctcataatattttctatctcactaatagacaatcaaaatttgactaatttttatactttctttacatcttataggattagaactagatttaccgaaatttatttatcttctcatgacaagttagttgacacatggttttcttaaaatttgaaatattttttttgagaaagttcgtcttaatatatgagagatttgacacacatgaactgataaaatccaatcaatcatatttcatttgttaatggcttaataaattattacatatcaatcacttggacaatggagtatgggacatgcatgtcacgtgtttatggtataagattatgtaatgaattcgaatatgaatagtggaaaaacgataagagtttgagtaatcaattgattaataaaaacactaataattgaggcaaagttaaaaagaaggaaaggacagaacaatcatggaccacatgtagactttgctagtttagttcgtcggtctccatcgttagccattcactctccaatccaacaacaccctcgtcgagtccggtctcaatctgcctattgatgggttcagattagaccacgtgtcaacgttaatagacaaaattagttggacctgcttgcaatgagtgaacacgtgtcgaacagctgaactgcgacatatcttgtgtgctttcccatgcggagatatatatagaccccaccttcagctacagagaatgaaataagccaattatatgtttatgtaattttgtcgaatctgcaccatctctttcggatacatacaaaaataccaaaaactaaattcgggggaataaactatagtttctcatttcaaatctttttttcatgtaaactcaaagcatttgccattcatatatttcacgtatgcttggctaagcttaacgactattgtacatactaggacgtgcacaaatctctaaatggtaccatgattttagttatacttcaatactgtgaatgagggttttaaatgacaagaatatcagaagtttcacggactatatggattaatatagatttgatataaaattccttacttatcaaaattaatcatcgtgtgtctcacaaatctatattgaagctactgtagaaatgttgttagaatgcatg

SEQ ID NO: 3428 - DNA, 3000 bp, Unknown
  misc_feature (1)..( 3000): cDNA_ID_2027168_gDNA_ID_1620646_Annot_ID_47596 3000 nt of promoter + ATG
ggaatttccatcgatgtcacagatctctctcctttagagtgagtgaggagataacgtgtgagccacgggatccgaattaaccacaaaagacacaaaccttgtaccacaaaagaaaagccccactttgtctttaatcggtttctgttacatgatatgtaacttacatccagaacattggctcactggatatttgtgatgggcttcattgggcctttcaggcccatagttattactcaaattgggtatgattttgttggttaatgttgagatttgtgtgtttgggtggttttgtctcatatctctcttaagagggaagtgtaacctactaacctcctcagacaatccacacagtatctattgattaaatgatggctttaaatctactgaaagtaaaaaaaatggttgctaaattaactttacaaagagatgaaataaagctgtcacatctataactaaagagaaatgtgttatccgatcaaatcttgttcttataatgcttaaatccttcaactagctcatatcacatggaatttatacggtccttggaaccttctttgctatatatagcggttgctacttttaaagaagggaactagaagacatggcaactacttcagagttcatattcttcactatatcagtatatctggaaactaagaatttgagcctagattgctttaaaagtctggtgagagaaatatattagttaacgttttttttgtcttggtattgaatcttgcaggccccattgtgaatgcaacgttgaggacacggatgagtacagtgtccatttgtcagatgaaagatccatgattaactactaacttgtcttaattcaattttgataaccgggtttgtttggtttcctatacactggaacttaaccggttatcatcaccatgaacacaacagttttacatgttacacgtcaatttttagttagaacttgctaatcagtatttagtgtttagcactcgtggagccactgagctagagagtgacatcactagaaggtccccagagactcatttggcgacacttggataaggaaacaaagtgtcggtggtcacagttcattcatttttaattgaaaaaatcaaatttgttcatttaaaaaaaaaattggaaaatccaaatatccaaatttgaagtgaatttgaatctgcagattcaatgtgatcttggtaaaagcaccgatacttcccccagatgaaaaaaaaaaataaaaaaaattctaggattaagaaaagaagaagaatcgaattagtagtaatgtcctctcattttatagctctgttacatatttatttagttttaatcattctaaacaaaattagtcctttgttactgaaacgagaaacataatagttccgcaacaaataatagtggagcctttagcttttaattagatatctagtttacctctatgaaaattagttaagaatatgaaagataacataatttcagatttttcttaattttgcagggacatattagtatacctatttaccttcttagtttatgtgaaaaatatcaaaacaacgtttatgttaaaacataggaaaagttcaaaatgtactctaaactaaattcaatatttaacttcaacccacaaacagataaagtatagggaacactcaagagtgaagagtggtgaacgtgttttattacatcacatggatcaagattcattcaatatttgagaagactttacgatacgaatctactgacaattactacaataagtaaaatagttggatatataaataactacagaacaaaaagtaattgaatatgtacaaatggaattatatcttgaactaaataatcgaaatgtacttgaaaaaataagaatccaccttgagttcatcgaaaagaaagattccataacctaaaaggagcggtttatccgttgtattaaaaatttaacaataacaaatgtttcaggtaattgcaaatcgacccatgaatatattttgactttagctattccaccccataaatattatttgttatagccgccccctttgtgtgtattattaacaaaagaagcataagttttttttgtaagattctttttagtcataggggccactgatgccactcaatgagaccaaaatccaaaacttagtgattggttttttgtttgacaaaaaaatgtgaattgtttagttaaccaaaatactcttctaaatgaggtaaactatctaacaagccatccacattaatatctccaacctaaacttatttattttctcatagcactgtgtaggactctaactagcatgatctatggtcactcacccgtccttcgaaatagtaacaaagttgggttttagatttcttaccgaaattaaatttccagtagaacgtctagcatacatttgagtaatttcaatgaaactccacaaattaatttttatcagtttggaaaatatatgttttggcaacagtccatatgaaagttcatacattaaaaaaaaaaaacgtagaaaaactttgttattttttctcaaattcaaacttacactaatttagctgtcgcatcaattaagtatgatttttttttctgtttaaagcttataatgtgtctgcaatttgataaataataaaaaaaattacataagtttcttataataagtctacgcttttcaattttcattgaatatagattcttaatcacgactgaacggaacatacaattattgtagtcttataataatattgttggtttctcaaagtgaaaatgaataaagcttaatgatatatgatctgtcacgtacttaaacatatagaaacagtagcaaattcaccaacttgcctttaatttactataaccttcaaattaagcttcttttattttatgaaaaataaataaagaaaactccatttccctttatttaaggaggctgcattgcttgctcactgactcaactcaagagtggtgtagtgagagaagaaagatagagaaaaaaaatgggaggcaaaggtgtgatgatg

SEQ ID NO: 3429 - DNA, 3000 bp, Unknown
  misc_feature (1)..( 3000): cDNA_ID_3071158_gDNA_ID_1620646_Annot_ID_163256 3000 nt of promoter + ATG
tcactactcactatatatatatagaaaatgatatcaagagattcaagcattacaactaagcatatacaccacgagaaaatcaaggtttcgatgtttgttaaaataaattgatccataattcacgaatatttttcaagcttcaatctgaatttgtgttttttttaacgttaatccgaatttgttttgtgtggaaagttctcatgttttttcgatttttgtttttccggacgtggtaaatgtatggaaatgaggaaagatgttcaagaaactgtagaagcaataaaattatgggctgaactctacacaataaggcccttttcaaatagtcttcagctttatggaccaggctacacaaattcatcacatttgaagcaattggtccgatgagtttttttttcattcaatgaactttgtattgttttcgtagttgatttctatagtctcatttgcatttcctcgacaatgactttggcatgtgctcacttgatttgatgttgtgacttgtaaaatttatgtcacagtcataagttgtcatcagttgtgttgtgtatttatcgaaaagaaaacataaaactatggtttgagatagaattcatttggagctactaattaaactgaattggaagatatacattatacagagtatagaaaattcaatcgcatctttcgtttgtccttctcttatctttcagtgattttgatgcatcaacctacaaaaaatcgttaggatttacataattgaaaacttgtaacgttaatttaatcttttttgctacgtataactgtctgacttgattagctcaactactcatcaaaatttaagttttccatgtgatttataacaagtcttgttccaaagaagttaagatttcatgaaaatatatatacataaatagttaaaacttacaacagtaaccaacacactgaagttttttttctatataatgctcaattataaaatagatatacgttatttaaaataatccaatacaaggtcacgggatttcattccatggaataaagtctctctttcaatacattaaaaaagcaatactgattcttcctaataaccctcatttaccccacattgagttcatgtgtttttttttagttcacctatacaatacaaaagataagaaattatacgatatataaaatgtaaacgaatgaaactacatgaatgtgacaaagtaacataaaactacacgaatttatggtttccagtgtccggcgaattcatttattggtaagacgtaagagacaaattatatgattctaccattcaaattcaaatatcgttctaaactttgtataaaaacatatagaatgaaaaaccaagaaaaatctcgttctaaactttttttgtatcaaagatataatgaaaagatgaataaaatgggggaaaaaagttgatttaatatatcattgatgttctattctctgtcaagaacaagcgggcgtataagctattagccagattggatccacacatgatttcactttgagctttaagtagagtctcttttaaatgtgtattttactcattgattaacatgagaggaataatagttttcataagagtacaaaaaaataaagtatataacatgagaacaggccaaaaggtaacattatgctcgtggatttcatgagtggacaatactatcttttactctatgtagtctattattagtcgttttcacgaaactatcccacatttcttttgtccatctatatcctgtcgttttcctttttgctgctatatcattttttagaattctctcaaaatttacatttttttttgcaaaatacaaccttcacgtattcttttgtgtgttctaaattgtaactctgttttataaaacctcaatttgttttgtgtagttgaatttactagccaactaattaagccgagtgtttctaatcgtcaaatcatttttcagaaaaaagtcagccaacttactttctcaccaacaataagccaatttggttcttatatactcactcaatattcaactataatttacaaaatacttttactattatgaaaaaaactcatgcatagtgtcttcaatgtaagtatgtcctacaaaatgttttagagttggctggtcaataaatgatagattcagaattcgtaaagatgatgatatatagaaagagcttttacagtagcaagtacaaataattgataaccaaatgggtagaatttaactcgaagacgtggcagagaaggtgtactataaggaatttaagaacacaagtagaggattaacaaaagaagaaaaggctttggaaaaagcaaaacaaaactgatagcgaaagccaaatagcccaaaaagaacgcgagtcaaatgttgcctcccaaaatttactatttttttactctcatattaaaatcactctaaatatacatagaaaattgttctccaaaacattaaaatatgttgaaaaaataaaatgaaagcaaattccaaactcccaccgacaccaacacaaacacacaagtcagtaagtcagattcaattatcaaatatggtcaagaaattcaacaatctcatatcaatcacacaagataaagtataaaaagacttatataaatgattgaatcagtgatattaactactattaacaatcttgtcttatgagttaaatgaagtcttaaatacgttttaccaattaatgtgaatgaatctacggagaaacagaggtttttagtataataatcataaaataaacctgaattaaaatattatatactaaaaaatagtttctctctcttcataactcagagcaagcttggaatcaatctctcaatctctcactctctcactacctatccttttctttaatggcgatgtctctaactactactatccccaacacacactgttactcttcttcttcttctctgtcactgtctattctctcttttggacctttcatggctatgtttctctgcaatggaagtccaagctcgtgatcaccaacaccgacacgcta

SEQ ID NO: 3430 - DNA, 3000 bp, Unknown
  misc_feature (1)..( 3000): cDNA_ID_2049766_gDNA_ID_1620646_Annot_ID_163242 3000 nt of promoter + ATG
atctggagaaccatctagtggttgaggaatggttccatcaaggaaaccaaactttttcctagaccgcaacgccgtcttgaaaccacatgcccactcttcatagttatttgtcttcagtatcggatgggagatcacagctcccgaattgtcagctgccgttaagtcgtacggcaaaattgtgcgtcggacctcaattacagatggaggtggtggtggagcatcagccatagcttcagagaaaactcacttgaaatactcaattcgaaaaacccagattgcgctctgataccatgacaaacttaagacaagatgtagtttggtttatgttgtcttgtcttattaaagaggcgttaaaaccttacttatacaaagcaaaagatataacctaaagtattgcacaaaggaaatgactaaacaggacaaatatatattgttgactaagctaactaaaatattgacgagcaatagcttcaacacttttaatataccaaccaattaatactggaccctaccttcatttttactactatggttatgattgtttgcgagtaaatgatttgattaatatgtattatatgtatgtcgtatgtatctgtaggtacaagaaaaagttggagcttgactcgagatttctatctgatttttatgacgaaatcaaatgttgtgttcttatttaaagtgaaaaaatattttgttttactagccatcagtgtagagtttttctggatctatagttttcagtataacctgcaaatttgagattagctaactaaaaataaataacactttgaaaatggaagagaaattatgttaaatgtaaattgatgaactttaattaggaaattttgttgtatacaatttttttttggatgaagtatacaatttgttttcattcaactgtttacagatgaataatttgttatgtgatatgttatcataatgttgacgtgtaaattatctttttcttcttctttttgttgctgttgttgaagttgatgtataaattatctaataaactttataccttaaaccaaaattctactcccttaataaattagagcaataacatgttaccgtccgtttcttaggggtcgtcaagattggtccgccttggttttaggggtcaagattggtcgcgattataggccagatatatttagtaaatgaaaattttggaatgaccccaaaatgtaagaccaagaatacttggattgaaaatttgcataatgtttataatgtttgaacatctgcatcctcacaatttttataatgttttgtttaagggaagtttatcaaagtttttgggagtaatttcttttgagtttctaacctatttccacaaacgacctatcaataaataaaactataatataccgtagttatgattaagaaaaaatcaaacatactcatataagtataaataagtggagttgttatttttcttcaagaatatgatatttactggttattgacgagaggaatggattccatatgacttaatgaataattatgattagaagaagaaaagaacaggaaaaaagctaatcttagtttgtagagttcaacgttcagtttggaaaatggatcaataactacttcgaaaggtataaatgttacttgagattgtaagaaaatatatttcatttatttctcgtgaaatcgtacctctttcacttttatccctttgtttcaccttgagctaatttttcctcaaaaatccgattaatcatataacaatagatatttttcgagtacgtagaatataagttcaaaatccgaatcatcaatattataaaaacatagaatgtacatggtaactaaagtaaaatacagctgattttaacacattcccaacaaacttgactactccatatttttcttcgaagtctacacacttacgacaaatttgcattatatgcgtggcactaattttgtcttaaagactctattgcatgatctcatgcatgccaattaatatcgtatcccacttgcggtttgcacatgcaccggttaaatagttttaatatttgatttgtttatcaaagtatagatatcagaataatacacgttgtgactaaaaaatagaatatttcgacgatccttagatactttgtaaacataaaataaaaccttactagaagtttagatgcatgatttcatcaaaaaatgttaataatcattattgactcatggtttaacgctatgaattaaaacaaataagataaacttgacggctcgttttcatatttctttttttttgaagagaggaaagttaattatgtgagagagagaacgatagtcaaaatgctttttaataggattattactcaactttccagtttaagacaatggaaccatcaactgtgtcaatatcgccattacacagcctggtagaagaataattaggtatgacttctgcgtttcatcaagtaaaaggaggtggagcctaccttcttttttactagtagtatgttttggttgtttacaagtaaataatttgattcaagtataacataacaattaccatgttcaatgaacctagcatgttctgtaagataattttgatgagactttaaagttgaagttacaaattgagtagagcaaataggaaaaaaaaaattgaattgtcgaatttgattatacctactcttgttgtcatttcgtgatattgaagaatatttctaggtggtacatttattcaaataaaacaaattctaaaaattaatacttgaattcaacatcataaaaagtagaggtcagatattaaaatgaaaattcctaattgcaaaaccatcttaaaatagaaaacataagatagattcaaaaatatttctgtctttttgttgatgcgaaactttacaaacttcaacacataattacatcctttatacaagtaaaggctagattagtaattaattaatttctaatgtcccttatgtaatcactatatataacgtacattctcaacctgataatatcactgagcctcacatctcaaca

SEQ ID NO: 3431 - DNA, 3000 bp, Unknown
  misc_feature (1)..( 3000): cDNA_ID_2049774_gDNA_ID_1620646_Annot_ID_163239 3000 nt of promoter + ATG
gaggatgctagtgagaaagttgatgtctttcaagaaacagggtcgaatgttcttcagactatatattgtggagctatcagctattgaggctctttccttctagttttgagttgaggaagcgtttcctggagattgtgacaccaagcttgagtcaatacaagaggtcaaatcacaactctttttccttaacattgcaggttcttagctcttcctcgtcctagtcttattcgatacaaagattgcattgaaacagagagcaaccttgcaccactaggcgataaagactgtctcactaatgtccgaaagttatatgattctgctgttgcaagttactactcaatggagaacaaggtaagtttttgtttcacagaactcaaatttaggcttaccctgaagccactctgcatacaaatgttttgtggtgtttattgccgcgccagaaagactctaaaggaagcagcaggtttcattcttcgatctgatttgttagtcttatgatggaaacacaatgttattgcccccacaattttgttatataaaacagactctagtagattttatattaattttgttaaggtttatatatacatattcagtagacaatttgattgtgaatacaaactattcaatgttaaaagcaagactcgttctaaggaggcaacaacaagtgaaccataatttatacttttgaggatttagagattttactgattctaattggttgaccaaaatcgccacaggagaatccaacaactacgaactggtcattggtcaagagtctcttcctattggtcaaacattttctattcctctattgttcaccggtacatctcacaaactatatatacattagatcttctgctctttaggttcaacaaacaaaacaaggaacaccagaaataaacacaatcataatcaacaaaaccagaaaacaaaattctccagcaactagatcgatttaaaccggtgttgtctcctctatatatatcagatggcgtcattacaggcttcaagatttatgcttactacttcttgttcttcttgcacaagaacaagatccgcaatctcaatcccaaagttaccaaaatttaatgtctcgattccgcaaataccgatcaagaaccggaatttcagagtcgaagaaccgattcttcggttggatgggtttgctgaagatcttgatctttcgttgtcagagagacaaaggcaaaagaagagagggtgcgatgatcaggttttgcaaaggtcgcggctcatggcggttcttgaagaagttatagatagagtggagatgcacaagaacattggagagcaacgcaataactggaactctctcttgctcaattccgtcaatatgatcactctcactgccgctttgatggccggaatagcctctatgaacgccagtggaatagattccgtttccgcggtgagtatagcttctacggtgttgctggcttctgctacaggtttggctgccttgatgaacaagattcagccttcacagcttgtggaggagcagaggaacgcaacgaggctgttcaagcagctaagaaacagaatcgagatggttctgagggagaaaagtgaagatggaatcagtgaagaagacgtgaaagaagcgataaagagagtgctctgtttggacaaagcttacccacttcctctagttggcaccatgctcgagaagttccctcaagaattcaagccagcgacttggtggcctgaaacaaaacccgaacccactcattccagaacggaagctaacgggtggaactcggagctagagatggagatgagagaggtggttgaggtaattaagagtagagatgcagaggagtacgagaagttaggtaacgtggccttgaagttaaaccgggttttggcaatctctggaccagtgttgaccggaattgctgccgtaagttccggttttataggtcacggttcaggtttagctggagtagtagcaacaacgtgtgcttcattggctgccgtagtgaacacgttagagcacggaggtcaagtagggatggtggttgagatgtatagaaactccgccggattcttctctcttatggaagatacgatcaaaacagagagacgagagaatggacaagttttcgagaccaaagtagcgttgaaacttgggagaagcttgtctgaattgagagatctggccagaagatctagcttgtctaggttacaaggatcagccatagatgaatgcgcaagcaagctcttttaattagtctacatacaaattgatattcattaattatttttgtgtatagagaaaatgatagatgatttttgaatttctatacaaacctgaatataactatgcaaattagttttggttacttatcttttaatatattacgcttttactctccctgtgataacctagtgcagatcatacaaagctaaaacaaaagttttgtatatacacggttaatatttagacatgtaagttatgtaacaaatctataatccattatgctctgatattatcttattattcaaaattggatgtattccagaaatattgacatatgacgttttttgtgtaactaatataataatgaattactttatgcatgtatcttgtgtacgtatatcttgatttataaatttctacaaatagtaaatactgatttttgtgttgatgaaaatttatttataattataaaatagataacaaatttaacaataccgattcttatatttatgaaatttgtttatttttaatcttttataaataggtaacatatccaaaaattactatacacatacatatagattatggacatgaaccctattattgttttccaaaactcatataaagaaagaaagaattacatgttatataaagagaagatttatttgagaactttaacaaaaataaataatattctttgagaaatacttttgatgaactatccctctccaaggtttgatggatcaagctggtccaagcttccttcagatcttctgaat

SEQ ID NO: 3432 - DNA, 3000 bp, Unknown
  misc_feature (1)..( 3000): cDNA_ID_1820776_gDNA_ID_1620646_Annot_ID_163235 3000 nt of promoter + ATG
tgaatccaaagagagatcatagtgagagtgaacttgacacaacatttcttacaaatcaaacgcagattggttgaaatgttgttaaaagaagagtctttggagactaattcttgatttactacgcagaaatgtgatgcaaatggatctaaatcctctaaaattagggtttgataagctcaacgcaaggatttagtgactgggtttcgttaactaaacatcatcacaatcgatttcgattccaaatctaagcctctcgagtacgggagcaactaggttcatcaatctcttatagcttaatacgaatctacttagagatcgatacgaaacttggaatcggaatgagagaaagaacttacataaaattggagatcggagactgtgagagcaactttgagaacgcggcgctgatgaagaacgcagacaagggttgggttttttggcgttagtaaacccttttcctatttcttttttgttttctcacccaaattatttgtaattacttagtataaatattttaaaaatcatgtatatttccaaataaaattcagaagacaaaaaaagtataaatagtacaggttactctcacattctcactatacaattctaaactagtgtagtatttatatttaatttatacaattccatcttcaaaattttttttgcttaattttgattttgattttttaatatacaaatgcaatgtatttaccacgccttaaacttttactgaaataacttatatatactatgctagatatagcgtaaaatcattaaattacatatttgagtttttgaaaaaatgtaaatatatataaattaataagcttaattacaaataggaccgtccattgtgtatatagtattgtgattgcatagtctaaagtattatcttaaacgaaattgaaaaataaccaactttcttttttctagacgggtcacgataaatggttaatttttaatagatcactaatacagtaaatcactgtaaatctgataacttatttcatccataagtaagtttgtattgcatttgggctactacagaaccaaaggatacattattaggaataggtggagagagacaaaaaaagagtattactggccttcatggcctctttgtgaattgtggccttatatattaggtaatcaattggcccattccaaagaatgtttcgttcattcttatacattactactacattgctaagtgctaagccccccaaatagcaaattctagaataacttttacatgttttgccacttttttattccgacaaatcacgatttatccataggaaaagttgccaactcacccaaacaaacgctaacatccttagaaattaagcagttgatgatcattacatgtgtttttggtgtcatatgacggattcatcaaatcatgttagaatgatgatgttggaaaagaaacacgtaagtagatagcattgattgagatctaaaattgcatttagtaacgaagatcccgtcgattccgtcgtaataactaaagcggtgcatggcaatatgtatattattaatattcattgaggaatgaggaactttcctacacgtaacgaatatacaataatattcctagttagtccaaaatgttggataaatgttcattcatgagttgtgaaaaaaagaaactaaaataatttcaaaaattgttagtattattataattattttttaacaaaatgtttcggttggtgtcatattcttaaagaaaaaaccaataatcaccattacaactaattaagcttaaaacccataaatcacaaacttttcaaaggactgacttccttctaccgaaattatcggaactcattgatgacataaccagacttgcttttgtcgaatgtacctatgattacaaaacatgacacattatacattcacacatacatgagttttggttatttccattatgatatataatatcacacttcaaataacagactttttcttgtttgtctttttcttcaatctttgctaatggtgcagaatggtactcaagcacgtgaaaacgcagaaactcgtatcatccgcttcatttccacggtacaccctcaccttcataactccgatctgtgatctccaccgtccaatagcattgacttcagctcaatatttaatccggcggtccaactattcaattcaagatttaacagaagcatgtgattcttacctcctgacagctcacacgccgcgtttcaaaacaccttcacttgcggacaatacggagcaatggtcgatgtactcttgacccaaagaaggcccaaacatctttaaataaaattaattgtaaactttttgatgagtgagatctaaaaagagtaaaaagacagagaatcttatgataaatttaatatttgttttgctattgtatataaccaactattatgacatagtttgcaatccaaggtgttacaccgaatcggtaaataactaaatactagcttgctcaatctaatagctagagctaataagaaaaatgtatttcgttaggataaataaaaatatcattatgtttacttgaatatttgaaaaaaaatttggtacatgtaaacgaaatttcccaaacaatattctaaagtgtgaaaggatttaaaaatgacgttgactttaggaaaaagtctcttcagttttagttaaaacatattgttaataatgcaaatcaagctcgaaattcaaccaaaagtttataagtgtaaattacttgaaaataatataaccaaataaatttgatgattttgataacattcgaggatatatgttactacatttacgtattttcttaaaattatttcttcaatacaaaaaaaaaaacatattaattacgtcggtgccactgccactaatatttaagagggcatcattaatagattctccattccaaaatcctctgtatatggatctacacctctcctcagtctcatactcaaatcaataatccaaaccccaaaaaaaagaaaaccagagaagagagtttaaaaa

SEQ ID NO: 3433 - DNA, 3000 bp, Unknown
  misc_feature (1)..( 3000): cDNA_ID_2999737_gDNA_ID_1620646_Annot_ID_163232 3000 nt of promoter + ATG
tatatcgttggttttcaaaaaaaaaaaaaaatttgatcaagcaagattcgtaatttcttatgaaggacaataatatcacaagccttttcgagtaaattaacattgtcctcttcaaactttaacaatatctataactatagccaaaaaagattagaaagtgtaatttgaaaatggcttaggcaaaagcataatttaagataaagcaagtcttttcatatagtacatagttttttgtcttctagcatgaatcagactctatcaataattttggcaggtcttagtagaaatagtaccaaaggctaccactcctctatctaacccttttaattattatttatttttcacaaaatttaattcatagttatggcaccccaaaaaaaagtacgaaattattacagttttggaggtttctgaaacctctgcctattgtggaggcttttgattcctttgaagcaatcaatgacctctctgtctctcatttgccagcaaagagagattgtttaatgttgtttatggttcacatttttatacaatatcacattttcactgaatcttcctctgcgtctctcaggtaatttaattctctcttttctctcccatcactctgtctcttctctttattgggttttagataaaatgatggaataataatttcatggattcaggaggaagaagatcattcagttgaagcacacatttaaagggttttgttgagaggcaatggaagggggagaagagtttcaagaagaagaagtgtggtcagttttgagagaaagtgaaactcaaggtcctgaaatgaaaatgtccaaaagtaacaatctcttctcagcctcttcctcatcttctgcgaggtacattcctaaaggcaacgaggtctctggaggggcaaaacagtcatctgctccaatgaatattcctgactggtccaaggtttatgggtattcaaagaagaacacaagcagccacttgcattcatgggccattgacgatgatgatgaaggctcaatggttcctccacatgagttagtagcaaaaagacttgcaagaacgcagatctcatcattctctatgtgcgaaggaatcggaagaacgctcaaaggaagagatctcagcaaaacaagaaacgctgtcttaacaagaactggtttcttggaatcgaatatcacatcttcatcaacaacatcaccaccatagttttggcatggcatggagcatggctggatgatcaatatcacattcacacaaaaccctttttagcaccataccatatcattatcatgaaaaaaaaacctaaaaccttatggtatccacatgatttttattaaatatcaatgttattgtcgttatcaccatgtagggaatcatgacactaccaatatggttgagttctctttttttttttttgttgttgttgttgttgttgttgttaggtttttggatttttttagataagtatgatgacgatgaggatgacttgtcaatcccatgcatgggcccataccatttttctcatgttatgtttgtagttctcaatggtcttttaactctttagcagtgcttagtgagcttaaattatagtttagcaaaacaaaatggcatatactttggaacctttgaatgtgagaaatttgaaagcactctcgatctcttcaccattttggcctcgaccaagagagaaaaatgtagcgaataatgttaacatttttggtccgacacaaggttaaggggctcgttccatattgctcactacctttcacttttcaatgttatatagcaactagacatggtgttactaggggaatggggtatatgtatctgttatctatttcggtgtgttgatttaattttttacttcgtgtattcttgaaccaatctgcaactgaaaaagttgtatttgaatttggattaattcgtttcgttgctaaatatccatttcaagatatacataataaatatattagttaatttactatggtaagatatattttcaagaatgaagttgtataaataaaaatacttgtttcgataattttcagttttattcacgtcggtactatctcacccgtactaaatttgaattgccgacaaacaaaaaaaatgtcaagttcggttggattttttattttgtttggatctactcaatatataaatagtaccaatcacactataaacgaaatttactcatctttccttggccctagcaacggttcatgataatcattctttctttttacaatttactttttcgaaataaaaaattgtagtaaaattacagtttcaactaaaaaaaaatcttgtacagaggtgccacaaaaatgcaattcaattttatataaaaatacaacgacaacaaatttgttactttgtcaaagcggattatttggcacgaaaaattcgtgcggaaccgctacatatcatttttgtaaataattttcttcaaaattggctcgtttgagtcataaataacacctgatgacaaaaaaaaaaaaaaaatttttttgttactttgtaaacttttgctaaccaaagcctatataaaggcccaattagcccaaaacgacacaaaaatgtgtgaagaaataaacagatggtggtgacgtaagacaagtgtaagagatttcttgtaatccaatcaacaaataataataaacgaattccaagtggtttacttattccagaaacagttccgtgtaggcaaccattaggaaaaccctaactaaattccattattaatttcttttataatccctttctcttgacattgacttctctctctcgattcttcttctccagtttcaatcaaactcaatttcttctcaacgaaccctaatttccaacaaatcggattcagtttcttcttcgggtatgtttcttctcaccaataaattcgagatcttttagggttttctgggtttgtttctcccccgatctagcagacgatcgagtttattaattatgatctttgcttgcttgaaattcgcagagactaatcgaatcgca

SEQ ID NO: 3434 - DNA, 3000 bp, Unknown
  misc_feature (1)..( 3000): cDNA_ID_2027168_gDNA_ID_1620646_Annot_ID_163228 3000 nt of promoter + ATG
aacctaagcaattggtcccctggaatttccatcgatgtcacagatctctctcctttagagtgagtgaggagataacgtgtgagccacgggatccgaattaaccacaaaagacacaaaccttgtaccacaaaagaaaagccccactttgtctttaatcggtttctgttacatgatatgtaacttacatccagaacattggctcactggatatttgtgatgggcttcattgggcctttcaggcccatagttattactcaaattgggtatgattttgttggttaatgttgagatttgtgtgtttgggtggttttgtctcatatctctcttaagagggaagtgtaacctactaacctcctcagacaatccacacagtatctattgattaaatgatggctttaaatctactgaaagtaaaaaaaatggttgctaaattaactttacaaagagatgaaataaagctgtcacatctataactaaagagaaatgtgttatccgatcaaatcttgttcttataatgcttaaatccttcaactagctcatatcacatggaatttatacggtccttggaaccttctttgctatatatagcggttgctacttttaaagaagggaactagaagacatggcaactacttcagagttcatattcttcactatatcagtatatctggaaactaagaatttgagcctagattgctttaaaagtctggtgagagaaatatattagttaacgttttttttgtcttggtattgaatcttgcaggccccattgtgaatgcaacgttgaggacacggatgagtacagtgtccatttgtcagatgaaagatccatgattaactactaacttgtcttaattcaattttgataaccgggtttgtttggtttcctatacactggaacttaaccggttatcatcaccatgaacacaacagttttacatgttacacgtcaatttttagttagaacttgctaatcagtatttagtgtttagcactcgtggagccactgagctagagagtgacatcactagaaggtccccagagactcatttggcgacacttggataaggaaacaaagtgtcggtggtcacagttcattcatttttaattgaaaaaatcaaatttgttcatttaaaaaaaaaattggaaaatccaaatatccaaatttgaagtgaatttgaatctgcagattcaatgtgatcttggtaaaagcaccgatacttcccccagatgaaaaaaaaaaataaaaaaaattctaggattaagaaaagaagaagaatcgaattagtagtaatgtcctctcattttatagctctgttacatatttatttagttttaatcattctaaacaaaattagtcctttgttactgaaacgagaaacataatagttccgcaacaaataatagtggagcctttagcttttaattagatatctagtttacctctatgaaaattagttaagaatatgaaagataacataatttcagatttttcttaattttgcagggacatattagtatacctatttaccttcttagtttatgtgaaaaatatcaaaacaacgtttatgttaaaacataggaaaagttcaaaatgtactctaaactaaattcaatatttaacttcaacccacaaacagataaagtatagggaacactcaagagtgaagagtggtgaacgtgttttattacatcacatggatcaagattcattcaatatttgagaagactttacgatacgaatctactgacaattactacaataagtaaaatagttggatatataaataactacagaacaaaaagtaattgaatatgtacaaatggaattatatcttgaactaaataatcgaaatgtacttgaaaaaataagaatccaccttgagttcatcgaaaagaaagattccataacctaaaaggagcggtttatccgttgtattaaaaatttaacaataacaaatgtttcaggtaattgcaaatcgacccatgaatatattttgactttagctattccaccccataaatattatttgttatagccgccccctttgtgtgtattattaacaaaagaagcataagttttttttgtaagattctttttagtcataggggccactgatgccactcaatgagaccaaaatccaaaacttagtgattggttttttgtttgacaaaaaaatgtgaattgtttagttaaccaaaatactcttctaaatgaggtaaactatctaacaagccatccacattaatatctccaacctaaacttatttattttctcatagcactgtgtaggactctaactagcatgatctatggtcactcacccgtccttcgaaatagtaacaaagttgggttttagatttcttaccgaaattaaatttccagtagaacgtctagcatacatttgagtaatttcaatgaaactccacaaattaatttttatcagtttggaaaatatatgttttggcaacagtccatatgaaagttcatacattaaaaaaaaaaaacgtagaaaaactttgttattttttctcaaattcaaacttacactaatttagctgtcgcatcaattaagtatgatttttttttctgtttaaagcttataatgtgtctgcaatttgataaataataaaaaaaattacataagtttcttataataagtctacgcttttcaattttcattgaatatagattcttaatcacgactgaacggaacatacaattattgtagtcttataataatattgttggtttctcaaagtgaaaatgaataaagcttaatgatatatgatctgtcacgtacttaaacatatagaaacagtagcaaattcaccaacttgcctttaatttactataaccttcaaattaagcttcttttattttatgaaaaataaataaagaaaactccatttccctttatttaaggaggctgcattgcttgctcactgactcaactcaagagtggtgtagtgagagaagaaagatagagaaaaaaaatg

SEQ ID NO: 3435 - DNA, 3000 bp, Unknown
  misc_feature (1)..( 3000): cDNA_ID_2992970_gDNA_ID_1620646_Annot_ID_163222 3000 nt of promoter + ATG
aaagcacacaagatatgtcgcagttcagctgttcgacacgtgttcactcattgcaagcaggtccaactaattttgtctattaacgttgacacgtggtctaatctgaacccatcaataggcagattgagaccggactcgacgagggtgttgttggattggagagtgaatggctaacgatggagaccgacgaactaaactagcaaagtctacatgtggtccatgattgttctgtcctttccttctttttaactttgcctcaattattagtgtttttattaatcaattgattactcaaactcttatcgtttttccactattcatattcgaattcattacataatcttataccataaacacgtgacatgcatgtcccatactccattgtccaagtgattgatatgtaataatttattaagccattaacaaatgaaatatgattgattggattttatcagttcatgtgtgtcaaatctctcatatattaagacgaactttctcaaaaaaaatatttcaaattttaagaaaaccatgtgtcaactaacttgtcatgagaagataaataaatttcggtaaatctagttctaatcctataagatgtaaagaaagtataaaaattagtcaaattttgattgtctattagtgagatagaaaatattatgagcaaaatctgcatgtatacacggatagtttatctagtattagaatttaaaaatactcaattccttttgtaagcatgaagtcctgaacagtttattgacttattcttatttgtttagttcatttttttcctggtcgattcgtatttgtttagttcaatgtttggtatataacgattttttctctttgggggaaacgggctccccaacgatacactactttaactgtgaatcaggcctatttcagttactcaatatgggcctataaaagaaatgacataatgcctataaaagaaatgacataatgccatatagaattagttatactgtacgtaattcttgctattggtatttgaatgtatatctaatggatgaaaataatggacgagaaaaatgaaaatacttgaccgtattctatttttttcttggtggaaatttgcaatacgtagttttgacctggttctgttcatacgcagagcaactaagtacgatgaccaaaatttcaatatactgtacaatattgtacacgtgaatttggaggaagaagagaaagagattatataagtgaaaaaggaatcagtaagacaagaaaaagtcaaaaagcgatgcccttcccatgcaaatagataagctgacagtgtgacacttcacacgttccttcttttataatcaaaaatatatttcgagtcaaaaaaagaaacaaaaataattattccttttttaaccaaaatttttacccatagattagacgccatttcatacttttatttcttttatcacgtgaaaaagtactacatattttccatacaaaataattagactatttttggcgtaaccctccatgaaaaaattgattcaggtattgatacacaattttgttaccatggtgttgaaccacgcagaaatatattatttaactatcttgtaagagattcgaagtcactatcttttgacgatgccatcatgtcccaacctcgtaatataacgttagtgaataaagttactaaattaccaaaatggttatcaaaaaaaatactaatatttccaacaactaatattttgttaattagaatataaaacaactaaaatcattgttgtaagttgcaagtctttggaagggcacggccgacataatagacaattatttgaactaagcaacttttaagtccactcccatcaacttccatcagttaactgatattttccccttatattttttttctttccaaagttataattaattattaaattatatattaccaaaaagctagtggacactaaatttttgtggtacatctctgaatatactcttatacggtcctcattaattcactaagtcaaatattagggataaagtttgaaggtttttttttttggtcataggataggttgctcgttgacaacaaaaaaaaatctaatttgtttttactttttacatcattttttcaagacgaatttatactgtattatctaactttagagttcaattttcgtatcttatcactttttcacgtaatctcaaaaatgagttcggataagattatcaaacgaaaaataaaatgttatccaatatcttaatatagaagttgtacgtaagatgcaatttacttgaagtaattcatgtcgacaattttttttttttgtgttctgttttggaagtaaatcagttacaagaagtggatgaggatgaaacagctttggtcaactaattacaacgtaactttgaaaaacaagaccttctacgtaaagactaatcaacctttgtattctctcccaacatggccgtacaaatctaatctttttccctcgagccttatatccattttttaatattaacaatcaaacatttaagctataaatacttatctcaacaaactcaatcatcaaataaacacaacaaaatgggaaactgcatatgcgtaacggaaaaaacgacgacgtcgtggtcaggagacgataatggatcatataacaagagaaggagaagaagaagatccaccgtggttcacgacgacaacgacgacggagagaagctgctcggagaaacaagcaacgttacgtcaacaagttcgtcatcgtcttctgagagaagagagattaagataaggataacgaaaaaggaacttgaagatctcatgagaaacattggtttgaagagtttaacggcggaagagattctttctaagttaattttcgaaggtggagaccaaatcggattctctgcggtcgatgtgacgaatcaccaccaaccatggaaaccggtgttgcaaagcataccggagatggattagtgttatttttttatttttcttataaaaaaatagataaaaaaatctgagtgatg

SEQ ID NO: 3436 - DNA, 3000 bp, Unknown
  misc_feature (1)..( 3000): cDNA_ID_2999737_gDNA_ID_1620646_Annot_ID_47598 3000 nt of promoter + ATG
tattatttatttttcacaaaatttaattcatagttatggcaccccaaaaaaaagtacgaaattattacagttttggaggtttctgaaacctctgcctattgtggaggcttttgattcctttgaagcaatcaatgacctctctgtctctcatttgccagcaaagagagattgtttaatgttgtttatggttcacatttttatacaatatcacattttcactgaatcttcctctgcgtctctcaggtaatttaattctctcttttctctcccatcactctgtctcttctctttattgggttttagataaaatgatggaataataatttcatggattcaggaggaagaagatcattcagttgaagcacacatttaaagggttttgttgagaggcaatggaagggggagaagagtttcaagaagaagaagtgtggtcagttttgagagaaagtgaaactcaaggtcctgaaatgaaaatgtccaaaagtaacaatctcttctcagcctcttcctcatcttctgcgaggtacattcctaaaggcaacgaggtctctggaggggcaaaacagtcatctgctccaatgaatattcctgactggtccaaggtttatgggtattcaaagaagaacacaagcagccacttgcattcatgggccattgacgatgatgatgaaggctcaatggttcctccacatgagttagtagcaaaaagacttgcaagaacgcagatctcatcattctctatgtgcgaaggaatcggaagaacgctcaaaggaagagatctcagcaaaacaagaaacgctgtcttaacaagaactggtttcttggaatcgaatatcacatcttcatcaacaacatcaccaccatagttttggcatggcatggagcatggctggatgatcaatatcacattcacacaaaaccctttttagcaccataccatatcattatcatgaaaaaaaaacctaaaaccttatggtatccacatgatttttattaaatatcaatgttattgtcgttatcaccatgtagggaatcatgacactaccaatatggttgagttctctttttttttttttgttgttgttgttgttgttgttgttaggtttttggatttttttagataagtatgatgacgatgaggatgacttgtcaatcccatgcatgggcccataccatttttctcatgttatgtttgtagttctcaatggtcttttaactctttagcagtgcttagtgagcttaaattatagtttagcaaaacaaaatggcatatactttggaacctttgaatgtgagaaatttgaaagcactctcgatctcttcaccattttggcctcgaccaagagagaaaaatgtagcgaataatgttaacatttttggtccgacacaaggttaaggggctcgttccatattgctcactacctttcacttttcaatgttatatagcaactagacatggtgttactaggggaatggggtatatgtatctgttatctatttcggtgtgttgatttaattttttacttcgtgtattcttgaaccaatctgcaactgaaaaagttgtatttgaatttggattaattcgtttcgttgctaaatatccatttcaagatatacataataaatatattagttaatttactatggtaagatatattttcaagaatgaagttgtataaataaaaatacttgtttcgataattttcagttttattcacgtcggtactatctcacccgtactaaatttgaattgccgacaaacaaaaaaaatgtcaagttcggttggattttttattttgtttggatctactcaatatataaatagtaccaatcacactataaacgaaatttactcatctttccttggccctagcaacggttcatgataatcattctttctttttacaatttactttttcgaaataaaaaattgtagtaaaattacagtttcaactaaaaaaaaatcttgtacagaggtgccacaaaaatgcaattcaattttatataaaaatacaacgacaacaaatttgttactttgtcaaagcggattatttggcacgaaaaattcgtgcggaaccgctacatatcatttttgtaaataattttcttcaaaattggctcgtttgagtcataaataacacctgatgacaaaaaaaaaaaaaaaatttttttgttactttgtaaacttttgctaaccaaagcctatataaaggcccaattagcccaaaacgacacaaaaatgtgtgaagaaataaacagatggtggtgacgtaagacaagtgtaagagatttcttgtaatccaatcaacaaataataataaacgaattccaagtggtttacttattccagaaacagttccgtgtaggcaaccattaggaaaaccctaactaaattccattattaatttcttttataatccctttctcttgacattgacttctctctctcgattcttcttctccagtttcaatcaaactcaatttcttctcaacgaaccctaatttccaacaaatcggattcagtttcttcttcgggtatgtttcttctcaccaataaattcgagatcttttagggttttctgggtttgtttctcccccgatctagcagacgatcgagtttattaattatgatctttgcttgcttgaaattcgcagagactaatcgaatcgcaatggctaagagttccttcaagatctctaaccctctcggtttgtttcttcaaatccctttctcatcgaattttcaattacttgattttttgttgagtttctgaattctgttaaaacttgctttagatcgtgtatggttttgattttggaactcaattttgattggttttgggatcagatttaatctctgcatacgcttttgattcttcctttgttgttcgtttctctgtttttgtttctaagccaagctgtgagattttatagatatctctgtttaatgatgtacttgtcattaatcttgtggttatgttttgttaatcagaggcaagg

SEQ ID NO: 3437 - DNA, 3000 bp, Unknown; identical to SEQ ID NO: 3432
  misc_feature (1)..( 3000): cDNA_ID_1820776_gDNA_ID_1620646_Annot_ID_47601 3000 nt of promoter + ATG

SEQ ID NO: 3438 - DNA, 3000 bp, Unknown
  misc_feature (1)..( 3000): cDNA_ID_1820769_gDNA_ID_1620646_Annot_ID_47603 3000 nt of promoter + ATG
ggcgtggttgtggtagtttctacggaaaaggtgctaaaagatatggcggtggaggcggaggaggaggtggcggtggaggaggtggtggtgaaggaggtgatgggtatggccatggagaaggatatggtgctggagctggtatgagtggctatggtggtgttggaggaggtggaggaagaggcggcggagaaggtggtggcagtagtgcaaatggaggttctgggcatggaagtggatccggtgctggtgctggtgttggtggaacaactggtggagtaggaggaggtggaggaggcggtggcggtggcggagaaggaggtggttcaagtggaggatcaggtcatgggagtggttctggagctggagctggtgctggagttggtggatcatctgggggagctgggggaggtggaggaggtggtggcggagaaggcggtggtgcgaatggaggttcaggtcatggaagtggggctggtgctggtgctggagttggaggagcagctggtggagtaggaggagggggaggaggcggtggtggagaaggcggtggtgccaatggaggatcaggtcatggaagcggatccggtgctggtggtggagttagtggagcagcaggtggaggaggaggaggaggaggaggtggtggtagcggtggtagtaaagtcggtggaggatatggtcatggtagtggttttggtggtggagttggctttggaaatagtggaggaggaggtggtggtggtggaggaggtggaggtggaggcggtggtggaaatggatctggttatggaagtggtagtggttacggttctggtatgggaaaaggtagtggtagtggtggcggtggtggtggtggtggtggaggtagcggtggaggcaacggaagcggaagtggaagtggagaaggatatggaatgggaggaggagccggaacaggcaatggaggaggagggggagtgggttttggaatgggcattggatttggtattggcattggaggaggaagtggtggtggtaccacttatcaaaccaatcttaccggtgataaaaattctccctagtgagtagggacttactccatacatatcttatttgtcaactccatttaataaggattttgtttcaaattttgatatctagttattctatttgataaatcttatcgataaaatcatgtacgaattcgttttccataatgaataaaattacaatacgtttttgtatttttttttttttactgcaactaaaaccacaaaataaaatttagaaactcaccaagtagcaacataacataacgttttgaaaatttggttttgtcgtttaaaaaatattgtgatgttagccaaattagattagttacataaatggtttttagcttgtgtatgaatctgcacaagtctatgaatataccaaccgaaaacataatcgaccgtttcgatcccgcgaaatatgaaatgcttaatacaatactatataccaatggcccaataagttctttaaatgggctttatttaaaacccaaattagacccaattgtacattcttctcgccggacctctcttcattccatggcggcgcgtggctataaggtaaagaagaaatcggtttctgatttttccggcgtgggtacaagttatcagctttcttgttgggtattttacgatgttttgattgtattgatttggctgcaattagatgtgtaggctttagctcaagtgattgagtttcaccctaaagttgctagagtgtgtatatatacatgcttcgccttcggaattagattgaaacttgaatgttgctgcagctcgtgctcttatgttgaatggtttgagaatgtacttgtaggtggagtatcttcaaatggaactcagtgttttacataagctgaaagcgagtagaggtgctcttgatgaagatagccgccgaggttgatgttgtaatggaaagatgagaacaaacagctgtttatgttgttagatgagaaagaaggaaatgaagactctaatgttgaggatgctagtgagaaagttgatgtctttcaagaaacagggtcgaatgttcttcagactatatattgtggagctatcagctattgaggctctttccttctagttttgagttgaggaagcgtttcctggagattgtgacaccaagcttgagtcaatacaagaggtcaaatcacaactctttttccttaacattgcaggttcttagctcttcctcgtcctagtcttattcgatacaaagattgcattgaaacagagagcaaccttgcaccactaggcgataaagactgtctcactaatgtccgaaagttatatgattctgctgttgcaagttactactcaatggagaacaaggtaagtttttgtttcacagaactcaaatttaggcttaccctgaagccactctgcatacaaatgttttgtggtgtttattgccgcgccagaaagactctaaaggaagcagcaggtttcattcttcgatctgatttgttagtcttatgatggaaacacaatgttattgcccccacaattttgttatataaaacagactctagtagattttatattaattttgttaaggtttatatatacatattcagtagacaatttgattgtgaatacaaactattcaatgttaaaagcaagactcgttctaaggaggcaacaacaagtgaaccataatttatacttttgaggatttagagattttactgattctaattggttgaccaaaatcgccacaggagaatccaacaactacgaactggtcattggtcaagagtctcttcctattggtcaaacattttctattcctctattgttcaccggtacatctcacaaactatatatacattagatcttctgctctttaggttcaacaaacaaaacaaggaacaccagaaataaacacaatcataatcaacaaaaccagaaaacaaaattctccagcaactagatcgatttaaaccggtgttgtctcctctatatatatcag

SEQ ID NO: 3439 - DNA, 3000 bp, Unknown
  misc_feature (1)..( 3000): cDNA_ID_1820765_gDNA_ID_1620646_Annot_ID_47604 3000 nt of promoter + ATG
ttctgacgggacccaaagggaagaacttccggtatcaaacagaacagtgaaagtttggcctggattgccaatttggatcttcccatagtacagaaagtcctttacgttcttcaactgaactccatcattgtttgttgacaaggcatgatctatctgcaacgggattctcacaagcgcttctgacacagaaagaaaggaaaagatgaaaaatatactcgtatacattgttgagatgtgaggctcagtgatattatcaggttgagaatgtacgttatatatagtgattacataagggacattagaaattaattaattactaatctagcctttacttgtataaaggatgtaattatgtgttgaagtttgtaaagtttcgcatcaacaaaaagacagaaatatttttgaatctatcttatgttttctattttaagatggttttgcaattaggaattttcattttaatatctgacctctactttttatgatgttgaattcaagtattaatttttagaatttgttttatttgaataaatgtaccacctagaaatattcttcaatatcacgaaatgacaacaagagtaggtataatcaaattcgacaattcaattttttttttcctatttgctctactcaatttgtaacttcaactttaaagtctcatcaaaattatcttacagaacatgctaggttcattgaacatggtaattgttatgttatacttgaatcaaattatttacttgtaaacaaccaaaacatactactagtaaaaaagaaggtaggctccacctccttttacttgatgaaacgcagaagtcatacctaattattcttctaccaggctgtgtaatggcgatattgacacagttgatggttccattgtcttaaactggaaagttgagtaataatcctattaaaaagcattttgactatcgttctctctctcacataattaactttcctctcttcaaaaaaaaagaaatatgaaaacgagccgtcaagtttatcttatttgttttaattcatagcgttaaaccatgagtcaataatgattattaacattttttgatgaaatcatgcatctaaacttctagtaaggttttattttatgtttacaaagtatctaaggatcgtcgaaatattctattttttagtcacaacgtgtattattctgatatctatactttgataaacaaatcaaatattaaaactatttaaccggtgcatgtgcaaaccgcaagtgggatacgatattaattggcatgcatgagatcatgcaatagagtctttaagacaaaattagtgccacgcatataatgcaaatttgtcgtaagtgtgtagacttcgaagaaaaatatggagtagtcaagtttgttgggaatgtgttaaaatcagctgtattttactttagttaccatgtacattctatgtttttataatattgatgattcggattttgaacttatattctacgtactcgaaaaatatctattgttatatgattaatcggatttttgaggaaaaattagctcaaggtgaaacaaagggataaaagtgaaagaggtacgatttcacgagaaataaatgaaatatattttcttacaatctcaagtaacatttatacctttcgaagtagttattgatccattttccaaactgaacgttgaactctacaaactaagattagcttttttcctgttcttttcttcttctaatcataattattcattaagtcatatggaatccattcctctcgtcaataaccagtaaatatcatattcttgaagaaaaataacaactccacttatttatacttatatgagtatgtttgattttttcttaatcataactacggtatattatagttttatttattgataggtcgtttgtggaaataggttagaaactcaaaagaaattactcccaaaaactttgataaacttcccttaaacaaaacattataaaaattgtgaggatgcagatgttcaaacattataaacattatgcaaattttcaatccaagtattcttggtcttacattttggggtcattccaaaattttcatttactaaatatatctggcctataatcgcgaccaatcttgacccctaaaaccaaggcggaccaatcttgacgacccctaagaaacggacggtaacatgttattgctctaatttattaagggagtagaattttggtttaaggtataaagtttattagataatttatacatcaacttcaacaacagcaacaaaaagaagaagaaaaagataatttacacgtcaacattatgataacatatcacataacaaattattcatctgtaaacagttgaatgaaaacaaattgtatacttcatccaaaaaaaaattgtatacaacaaaatttcctaattaaagttcatcaatttacatttaacataatttctcttccattttcaaagtgttatttatttttagttagctaatctcaaatttgcaggttatactgaaaactatagatccagaaaaactctacactgatggctagtaaaacaaaatattttttcactttaaataagaacacaacatttgatttcgtcataaaaatcagatagaaatctcgagtcaagctccaactttttcttgtacctacagatacatacgacatacatataatacatattaatcaaatcatttactcgcaaacaatcataaccatagtagtaaaaatgaaggtagggtccagtattaattggttggtatattaaaagtgttgaagctattgctcgtcaatattttagttagcttagtcaacaatatatatttgtcctgtttagtcatttcctttgtgcaatactttaggttatatcttttgctttgtataagtaaggttttaacgcctctttaataagacaagacaacataaaccaaactacatcttgtcttaagtttgtcatggtatcagagcgcaatctgggtttttcgaattgagtatttcaagtgagttttctctgaagctatg

SEQ ID NO: 3440 - DNA, 3000 bp, Unknown
  misc_feature (1)..( 3000): cDNA_ID_1841509_gDNA_ID_1620646_Annot_ID_47608 3000 nt of promoter + ATG
atcagtatccacgactgcaaaccagggaaatctggaaaggtgaggagcagcccgacgcatgtcggtcaccgtaagggatcggacggtgatgccatcactatttttggttcgtcgaatgtttggatcgatcattgttacctagcgagttgtacggacggactcatcgatgtaatccatgcttccacggcaatcactatttccaacaactatttcactcagcatgacaaagtcagtttcagtttttcaaaatcattaacatagctatttaatgtcttgggaagttaatatcacattttgatatgggttgttatatatgtataggtgatgttgctcggacacaacgataattttgtgaaagatgtgaaaatgaaagtgaccgtggcattcaatcattttggaccaggacttgtggagagaatgccaaggtaattactatttaattttcctttcttttttcatctaaaaaactaaaattatttgcccaaaaatattagaataactattaagaatttttagagcagaattagaaatgtaatgatgagcataccaaaaagacatgtaatgatgtaaaattgtgtggtgggtgcagggtaagacgaggctacgctcatgtggcaaacaatagatacgataaatggataatgtatgcaattggtggtagcgccgatcccaccattttcagtgaaggcaactatttcattgcttctgataaatcttacagcaaagaggtaatttaattttatcctcctaatccaatattataattacatatttacccctcggatctgaacatgtaggctagtgatggatattattgctgttattgtatcaccatctatatattcaacaaaccagcatattgcaagttttaacgaagaaaaaaagatagattcgaaactcgactattaatactattttgacctacaaaaaaaagagtcatgttggtctttttagccgaaagtatttttggacattttggtcccaatttcatattatagattaattcctaaattgtttatgaaaaagaatgaatttagctcaaaaacaagaaaggtaagtagactttaattacaattttcttatccttttttatatattttaatatcggtttctaaggactgaataactgcttgaccattattattccaccaccaaaatttaatccgctgatttttccaaataaatgacggtagctaagctaaccatcggactgcctacttatctaaacttctagttttggttatgtaatgattaatgtctaaagatcattatgcacttatgattaattcatgaaaataaaatgctaagcataactaaaataaacaggtgacgaagagagaagtaaaaggaggatggaacaattggagatggagaacctcaaacgatgttttcaagaacggagctttcttcgtaccttctggttatggcagcattccgctaccgtacagttctgctcagcgattcacagtcgctcccggaaacttggttccttctttaaccgcagacgctggccctctaaactgcaaccgcaacggtccttgttattagtattcaatactcttttcacgagatgcatctaattattttctagtatagcacgttacttttcgtttttaacttagttgatctatatatgttgtggtctggatttgctacacatgtagcactggtgtactagttatgaaagatgataaacgtcaagagtttaatttgtaagaaataaattttgtgtatctatttgcgttttctctcgaacctgatttattgacggttttggttcagtccggattttttgatcatataaatactgcaatatatgattgagtacagcggacaacaaatattaaaacgtatgatcgttaaagtttatattggtgctgtgctcaaatccgttaaaatttcttattttatcatcttcttctcttctacgtgtactaagaaaaaagattttactacgtccgtctgtaggaatggatcagacacgagaggttacttcgtatggtcatttatggatttatacgagatagtaaagggatacgagtttagttttggattatactctgcgaatttcagtgattttcatcgtaagagaactcccaaactctctgctcattgttactctgcttttctcagtggcaacatcacttttcttggttctcaaggcatcacgcaattgcagaggaacttctcttcttcatcttcttcgtagtaatcttttgaatttagtttattctcatgaatctgattccttcagatttagcgaaaaccatgtgaattgtgccgaacgaaatctcatcttttagggagaaccctcagacctctctgttttactgtgtttgaattgcttgccgttttaaagtctatcatcctaattttgtttttccttaaaacggtatgctttccttgatctcacgtaatagtgggatttcttttttcttttttcacactgtgaccctaatgtattacataattttcaacacaccactcgctcatataaaattatttgtaattctgtttaatttaggtttggtatgattccatttttggcttgataccggttcggtttttgcttaaaagaaaactaaaaaaaaaaaaaaaagcaaacataagaaatggagtgtttgaagtaaaagaaacaaaaaatagtaatggattggtacacgtacataaaacaccccatcagataaacattatactaattaatgtaatgtaatacaattaactaaacaaaatacattaagactttggaattttccatccaacaagtcggcttgagaaatgttcgtggggaagcacgaacatgtgatcttgtgcaacaacaccaaagtctcaccaatacaactttgatctttaggccaatattaggaaaagatcgtgtttaccacaccttctaatctttccgacacaatctctcatctaaacacttccttaagtacttgcccatcttttctcttttcttagtatcgatccctactcaaaccataaacccacccaaccatg

SEQ ID NO: 3441 - DNA, 3000 bp, Unknown
  misc_feature (1)..( 3000): cDNA_ID_1820743_gDNA_ID_1620646_Annot_ID_47612 3000 nt of promoter + ATG
cttttttcccccattttattcatcttttcattatatctttgatacaaaaaaagtttagaacgagatttttcttggtttttcattctatatgtttttatacaaagtttagaacgatatttgaatttgaatggtagaatcatataatttgtctcttacgtcttaccaataaatgaattcgccggacactggaaaccataaattcgtgtagttttatgttactttgtcacattcatgtagtttcattcgtttacattttatatatcgtataatttcttatcttttgtattgtataggtgaactaaaaaaaaacacatgaactcaatgtggggtaaatgagggttattaggaagaatcagtattgcttttttaatgtattgaaagagagactttattccatggaatgaaatcccgtgaccttgtattggattattttaaataacgtatatctattttataattgagcattatatagaaaaaaaacttcagtgtgttggttactgttgtaagttttaactatttatgtatatatattttcatgaaatcttaacttctttggaacaagacttgttataaatcacatggaaaacttaaattttgatgagtagttgagctaatcaagtcagacagttatacgtagcaaaaaagattaaattaacgttacaagttttcaattatgtaaatcctaacgattttttgtaggttgatgcatcaaaatcactgaaagataagagaaggacaaacgaaagatgcgattgaattttctatactctgtataatgtatatcttccaattcagtttaattagtagctccaaatgaattctatctcaaaccatagttttatgttttcttttcgataaatacacaacacaactgatgacaacttatgactgtgacataaattttacaagtcacaacatcaaatcaagtgagcacatgccaaagtcattgtcgaggaaatgcaaatgagactatagaaatcaactacgaaaacaatacaaagttcattgaatgaaaaaaaaactcatcggaccaattgcttcaaatgtgatgaatttgtgtagcctggtccataaagctgaagactatttgaaaagggccttattgtgtagagttcagcccataattttattgcttctacagtttcttgaacatctttcctcatttccatacatttaccacgtccggaaaaacaaaaatcgaaaaaacatgagaactttccacacaaaacaaattcggattaacgttaaaaaaaacacaaattcagattgaagcttgaaaaatattcgtgaattatggatcaatttattttaacaaacatcgaaaccttgattttctcgtggtgtatatgcttagttgtaatgcttgaatctcttgatatcattttctatatatatatagtgagtagtgaccgaatcaaactggtctttacattagtagcatattagtgggctccagattcggaatcgaaataatccatgaacgtataatatggtcgtggccactcataaggtgaacgtatatatagaagctgcgaaaatctaatctccaaagttcaataattcaacaacttcctttttatttcgttgtataaatgactcaattaatattctgatttagtggagtatgaaagaaacaccgcatcttgcatgattattaacataaagttcacacagtatagcccaaaataattactcattttaagtattgtttatttgctttaagaagcaccactcacacgctccgcgagtgcactcattattaacctgtgtccccacgataagggcatgtctcaccaatcgttacgctagaatctctacaaaagtttgtacgtgcactacacaagctttagtttgtgcgtgatctgaaatgtcacaacattttctgcccgttacaaagttcatgttccaactaaccgttacgatactaatacctagctaccactcaataaattctcattattaaaatactatagttaacagtcgcaaggaagaagaacaacaacatacacatactcaagaaaggatcatcaatggtccattatttaatttgaaaattcgataaaaggaaaacacttactacaaagaaaatgatttttgcgtcaagatcacaattgattaaaagctaaaaacaaaggaagattcggaaaatactaaattaattcttatagaattatataatcaaccgaccaatgttctttgttttaggtgaacaaatttcacaaaagaaccaacggcactaagaataaaatattcgaaaatcgaattattaaaaaaacatgataaatattaaataaatacttttgataagccaatgagcgtaataataaccaaaaataaaaacctcagctcgtcttcgttcttctttttcttccttgcgactgtacgatctcctgatctccttcaccgcctactctcttaaatcttaacccttcgtccgtaactgcttctcttgtcagtttctatagcaacattatctcaaatagttctattgataaattttatatcaaaaaccttaaaaagtttcattggtttacaaattttaccttttttcgtttgtgtgttgcgtgtgttactaaatcactgaagagggtaaagagaaaaacaaaacaaaaagttcttagctttggatgaatctggaagtgatccaaaacactggcttattccactcctcttctctagggtttctctctaattctgaacttgctttctctgaatctcattatttcggtggagtaaatttggggttagctcacattttatggtctgagttgttttatgtctctgtaaaagattcgaacttgtttttggaatttagattgtgtggggttttgttcctaaagttttcacctttatggattttttcatgttctgtatataattagcaggggtttcacttagattccaacttgaatcacttcaaagatcacaaagcttcaatttttaacaaaatttggttgcttctttgtgtgattaacaggttgaattgttagttaatagatg

SEQ ID NO: 3442 - DNA, 1944 bp, Unknown
  misc_feature (1)..( 1944): cDNA_ID_2991550_gDNA_ID_1620647_Annot_ID_47616 3000 nt of promoter + ATG
gaattccagtattgtttccgcaagtatgtgtttatagaaaaaaaaacttttctttgttgttgaagggtatagttttgttaatgaaatgttttttatggaagtgcagtacagtaacaccggtccacttccctcacatggatttgtaagacagaggttctgggaggttgagactaaaccacctcctttgccatcactttctactgctcatgttgacctgatcgtaagatcatccaatgaggatttgaagatctggccgcataagtaagattcttgaaacatctctctctctctctcattttcaacattttttcagatatttgattaggaatattttacataaaatatggagactgttttttaatctatgtatccatttcaggtttgagtatagactgagagtagcattgggacatgatggagatttgacgttaacatctcgtgttaagaatactgatacaaaaccatttaacttcacatttgctcttcacccctacttcgctgtttccaatatcaggtaatccaaggagtcataacttcacgttgatatctttttttttggttgtgttggtgtaagtgtcattgaatcagctggttgttgtattcagtgaaatccatgtcgaaggattacacaacttggattaccttgaccaacaaaagaacagaacacgtttcactgatcatgagaaggttataactttcaatgctcaagtaagcctctttccatttgccaattcaaatttcaacccttttattattttagtccatcactaaaaaaaaacacaccttgcaaaaaaagcttgacaggttgtacctaagcactccagatcaactaagaatcgtggaccataagaaaaagaagactattgttgtacacaaggagggacaagttgatgccggtaattacaaatttagatttgtaaacatacatagacatagacacagtcacacagaaacagattgttttagtagtactaatgatggatcacttgtaattacaatgtgcagtggtgtggaatccatgggataagaaagtatccgatttgggagttgaagactataagcgttttgtaacggtggaaagcgcggctgtcgcgaaaccgatcacagtgaaccccggcaaagaatggaaaggaatactccatgtttctgtggttccatcaaatcggaaagcttgaccctataaaagtcttgcattcatcatcctcatcctttaaaaaaaaaaacttaaaactgtctttattaaagtatacttaatgttcccgagagacatcacatggtgaacacaaagttagttgggttccaaactggactcttgaccagttttattgttttgtaactttagcattcatgaataaaaaaagtgcgttaattacaataattgttaaatgtaattaaataaaagtgcgttaactacaataattggatattggttatttgcaaaattcatgttcttaaatcatcagtctaaacaaaaaaattagattagccgaagatttcttcttctacccttgatgatactatttgggatgggcttgcttagatgtgccgaatccaattctcgtttttgggtctatctatatttgggctgggctttataagaggcgaagcccatgtcgaacaatcaatttttttttaattttatatttcttttgggagtctgttctgtcgtattgattaataaagtaaaaaatcttagccacaaaattaaatcatctccaagacgtatcaatatcatcatcaatccaccaatgaaaagttctctctttttttttcccactcttactctgttctcgctacagaatctcctgggaaaaaaaaaaaagaaacttgatccacccgaattccccaaatcttcacaatttctggaaactctctcgatcgtgaagcagaaaagtgaggttccaaatgggttctgtttcgggtcaaacccgaattacaacgatg

SEQ ID NO: 3443 - DNA, 3000 bp, Unknown; identical to SEQ ID NO: 3147
  misc_feature (1)..( 3000): cDNA_ID_1820858_gDNA_ID_1620647_Annot_ID_47619 3000 nt of promoter + ATG

SEQ ID NO: 3444 - DNA, 3000 bp, Unknown
  misc_feature (1)..( 3000): cDNA_ID_1807006_gDNA_ID_1620647_Annot_ID_163287 3000 nt of promoter + ATG
gtacacactgcagatttttgagaagaaaatgatacagagcttgagagaggtctaactataatctgtgtatatagggtttatatatatatctaagtcccctcctttttcctttgacaaggatgagactttccatcatatatatctcaagattatggcgtataagtcagagaacccattagagccaccagaaaacaacaatcactagtagcaagagggagaatcccatcgcctgcaacatcaccagattttcaatttttcatcattctctccaaaaacgtatacagtaatatgagatagagaaaaagagttattacagtgattgcggaagcagcaaggccggctctttctctaggatccttgcggtagtagttcccgaaatataaaagtgttgcatagtaccataagaaagggaacacaaaacccaagagaaagctgcaaaacaagaagatagcttgtaaatctaaactgaatatagagaagctgcgttgacttcaactcaaaaaaaacttaatactctctactcacgagaaccatccgattccacaaccaaagcatggaagaggcttgtcatacactccattttccacctcgtctacgtcttttacaagcgtatatcttcctttcccacacaccatagcatctatcatacaaagccaatgtgtattagcttatggaaaaggtgcaaaaatcaaagtgcaggagttccacacatgaacaaatcttttaaagagaaggcttgtggagaatagtggtagtagtacctttaactgcagagtaatatttagcaactggtctcacgagaccggcatgcttatcagctacggatttaaccagctctgcacttccatcaccacgctctttaacagctgcaaataacagataagatttaatccaaagaggactctacttggacatcatgagaaggtacagagttaacttaatgttatctcatctcaagaccatgcccccttgttcctaaaacaaaaatttatgatctttgactgttggtgaacaatcacttccagctagtcaacaacttagttgtgagatttagatgatcctctattctagtaacaagaactaacaaagcacatatcttttgaggactaatatgaatcgaaagagataaaaagggaggaagatgattactttctcccatacgttcttcagcagatgatgaaaatgctaagctcttgcttataagtttgtgtcgtgacccacaagatcttcaaattgcctgcaacaaaacattaacaatatgaatgaatttcagaaaggaaaacatagaaaacagagacgatttcagctaaaaccgtagcagcaatcaaaccaacaagaaattgaaatcagcgtaacagaagcatgaaaaagtctgaatcagattatcttctctatttggaaaaagaacatatatgagacaataggacttcaaattcatcggaagaatgaaatccacacgaaccggagactgctccgggaagtaaaaggaaaccgatggagatgaataacttaccagattataatttctagagcacaaattcgagaagagatttgatttcaagggcagagggaatataaatatcggatcaagaaatctggaagcgagagagtcgtcgtgcttcgtcttcttcttgtgctgcttgtttcaacttcgtcagcgtgataaatgcgtagagagcggaagatgcaagaaaaatgaaagtctattttttcttttgcctaaagcaagtttgtctcttttctagtactattttgcttaattaaatacttttaatgtcttaacaactatacgagtatttaattcttccactaatcttttgtccttttcatgatttatattatgtaatcaataatgatgtttttactcacataattttgtagtgaaattagctctaagaaattacaatttttctatttcttttttttttttggaaaaatgaatggacttttcttaaacaacactttttcaaaatgaaataaacattattttggtattatattttttatatatatttttttttgtaattcagaaagcttcgacactgttagatttagaccattctagatacgttaccagttaccacttaccagtagccacataacagtactagttcatatatagcataaatagttaccagattttgatgttttcaaattaaatatgcgactaaaactctaaaatcattcaaagttattattatttatgagtttagttttcttcttttcctttcgtacaagttagatatcatgtataattaaccaactgtccatcataatctcatatattctggatcaaatcgtccgtttaatatagttgaatatgtctctataattattttaaaatgttacttgtgttatttaagtaatacagaattatgtaatagataaaaaattgtttgaccaaaaaaaaaaagagattaaaaacaatgttaacttttcgtccaagtagacaccacataccaagttaccaacaacacttcacatttgatcattttagttgatctcttccatccatgtggtattaatctaaaatatccaatgattatgacatcttattttattttggcaacgatcgagtattaccattaattaaaatcaacatgctattaaataatccaaataggcaaaaacttcacaatcaaaagagaagaagaccattcgtcgaagaaaattactcacaagagtataaaactatatatatgatcagcctattcttaatgtgaacattgagaagtggggaggttaaaatgcaatgattttgatccaaagttattgttgacaaagacaattaaagaaggaaaattcaaaggagagatgagtcaaggacaagtcaacgaccatttcgtcttcgtcttcttctttatactcattagctacacgacgtcgacggttcgtcattcttcctctaagctttatctttctgatctctgaccttgtgtctctgtgcatgtgtgtttatctgctactgtgttttgtcggtttgatctccaaaaaccagac

SEQ ID NO: 3445 - DNA, 3000 bp, Unknown
  misc_feature (1)..( 3000): cDNA_ID_2049850_gDNA_ID_1620647_Annot_ID_163281 3000 nt of promoter + ATG
aataaggttctttgacgggcttggtatgtttcctttgtgatgggatcttcggttttggtctgttttgttttgtgggattcttctttcatctttgtaatcttttcgccaactatagtttgtttgcttcctttcgataggggtttagacttcacaaagtttttgtcttctgtgtgtttaagattgtatttcatcatagtattagaaatataattcagatgacaaaaagatgttagatttatggaattatcgtctgacatcgagactacagttataatggcatttatgtatttacgctataataataatattaaaaaattttacaagtctactcgttttattgtaaacacccaattgttactttgaaaacttaaaataaaaagtcaaaattgtaatttacttctaggtcatcatctttcacgaaaaccctaatcgccgtcagcttttctgaaaggctcttctttttggtactctgttttttttttcctataatttaatcacttatcttaaccatgaattctacaaatttatgataaatttacagatttctaaccaaaaagtaaaattctaggtgatttcccaatccgacttatttctttatggtcgaataaaagttatacactaacagaaatatagttttctccatggttgtacatagctttggtgacttaaacagttttaaattatcaatgaagataatgaaatacacaaaaagttgttttacaaagtactaataaaactgaacatgaaagaaataaagtcaaatcttaaagagatgcttcttcaccaaatacatgatgctgggagtttcataatcacttgatcgtctctattgcctcaactttcttctgcaactttgtcctccagtttgatctttgttgatcttatgagatttaccatggaattcttgatgatgtaatttaagccttttcttagtctcattcttagaatgaattaactctgtatgtacaaccaacatttgtgaagtatcaaacaaactattgcactttagacatataaatgaactgtctttctcaaacggcaggctatatatccaaccaccgtctttttcataatcgatttcgtcatgaatttcttcaaggacctctgttggtttacagatatatttcaccgaccgaccatttttatgaacatattgctcatgatagtgttttggggaggatgaaaatatatccaaatgctgacgacatgcatagtcttgttgcgaacaaaagaaatcgatgggtttaggtgtgaaggtttcatactgtttatcaaaatcatttggggggttaactgtagatttcaaaattggtggataagaagtcatgaaacggttgacacgatcattatcattttggacaatgaccatattgcttgtcggaataagagcatgatacctttttgcgatggtttgagtgataaaaacttgagaatagttaacaaaaccactagtttgagctatgaaaggcatactgaaaggagaaaccatgttggttctcaatgaagatgaagaaacttttgaaacatgggaactagtaaaaaaagaagatggatataaattagcatggtttttgttgttagaagtaacgaacattgatgaaaccattttagactggtgatttatcgaacttgagtttatttggatgggaaaatcactgtgattcatagtacaagggagcgtgtgttttaaatactttgcatatctatctatttatattagattattatttattagtataccttaataaaagggtaaattggtttttatattaaataaaaaagactaaagtggaaatttttaaaagaaagaaactaatttatacatataaggaaatgaatatttttgtggactgatatctaattttaatatctattactataaaaaaaatcttcaaatttgtaattttctatatttttatttggaaaacctctatttgttttggtagtatttggctgttatttcaaaattagtttatcactttattgtttttacttatttgggatgtgtaagttgagaatcatttattatatcgtttatcccattgatttccatttaaagtgcaactctcacaaaaaataaaaataaaataaaattctaaaaatttagttcaacagatttttatgtttcagtcaaaagttatggtaacagaggtccacttaataaatttcatttaattcatatcttaaattttggatttatatgttatattttttacttctaatcttcaatatgtagatatctaatatacgatgaaaaaaatgtatactttgaatataataaagaagaatataatatgatttttgttcgacgatacaaaaagtttagatataattagtttaataattaaaatattacaaaaagttcttttatttttttagcaaaaaaaaatagaatttccattgaaaaaccaatatgttgagtacatgatataatcttgtgatcatagatattacttaaaagaactatcacaattagaaattaacttaagaaaacaatgaacaaatagttaaatgacttttaaaaaatgtacacaatagaataataagagagtgattacataaaataaaaaattaaagtacaaaatacaatacaccggtcaatgtaaaaaaatatctcataacatgaatcggaaaaacaaaatttccagaaagaaaggaaaaaatatgtaaaaaaagcaagaaagatatatatttttttaagtaaagtaataattttattaataaaaaaacaaatattaatatttctcaaaacaaaataataaattgtataacaattttcatgttatccctttttaataagattttatttttttacatatctttttaattagataacatgaccattggattagcgattagcgtgtaggtgacatcgacggcccagaatgctcggcatatttaccaaaacatccttcgaattttaaacccctagctttttttccttttttcttcaatctccctcgcctttacgaattcgaaactcaaaaactcaaaatcatg

SEQ ID NO: 3446 - DNA, 3000 bp, Unknown
  misc_feature (1)..( 3000): cDNA_ID_3071196_gDNA_ID_1620647_Annot_ID_163280 3000 nt of promoter + ATG
tctccttctacgtgatttactgtgttcaaagctaattcgaatttggggatttttaatttctatttctagggtttcttaatcataagtaggaagattcttgagttgtgatcattaaagttgtgaacttttatcccctagttgtgcaatttgattactttatggttccaattatagtttgaagtgttcactaagttaattacttgctcaatgttatgttttaggtgttaatatctggtaaggaagaaccagaggcctacatgtcaccggcaatggacgcagtgttgagggtgtttagacgtgtttcagggttgcctgataatgatgatgatgatgttcaaaacgctggaagtgtcttctcttcagtgcgtttattagttgcttcaacgcaggcgattaatttgattggaaaacaaggatctttgattaagtctatagtagagaactctggtgcatcagttcgtattttatcagaaggtattatctatcatctgcagttttctgtttttacctaattgatctctttgtttgtgattgttaaagtttagtttttgctatttcaattcatgtctgtttttttttctaaaattggtgtctttgttgccagtttcttatttctctacttttttctgccagaggaaacaccgttttatgctgcacaggatgagaggatagtggatttgcaaggggaagctttaaagattcttaaagcattagaagccattgttggacaccttaggagatttttagttgaccatactgttgtccctctcttcgagaagcaagtaagcttgcttgtttcaatcgagattattcctttcccttttttttcttttctgaattattgttatcttttcttatcttcagtatctagctagggtctctcaaactcgccaggaagaaccgttagctgaaagcaagtcatctctgcatactatttcgtcaaatctaatggagcctgatttctccctcttagcacggagggaacctttgtttctggagcgcgattctcgggtggactcacgtgttcagccttcgggagtttctatctacagtcaggatcctgtactgtctgccagacactccccaggtcttgctcgggtttcttctgcttttgtgacacaggtagattcccttaaatacaacatcagctcctgaaaacgagtttagcgatatcatcttacttgttatgattagtcttccagcagtgattttgatcttaacacatctaacttgtttctctgaactagtagtgacgtttctataatggattctcttactaggtatctcaaacgatgcaaataccattctcctatgcagaggatattattggtgtagaaggagctaatatagcctatatccgtcgaagaagcggagctaccataaccattaaagagagtccgcatcctgatcaaatcacagtggaaatcaaaggcacaacttctcaagtacaaactgctgagcaactaattcaagtaagaacacattcgatctgtatatatatatatatactttctgcgacgtggcattgtataaacactaagattatgcttgctttgcatcctaccccgcctgcttcatcataaccgtattcttttgtttacgtgtgtgtaggagttcatcatcaatcacaaggaaccagtttcggtatcagggggatatgccagaatcgactctggatatgtacctgcatatcctcctcagctaagtaaccgtcaagagccgctcccgagcacctacatgggcacagagccggtgcagtacagaccaacagcatactctcagctggggggtccttctacctacacaccgaccctgactgggcaaacttatggttcggaatatagaccagcttctgatgttggtggctacagcagttataatctttgaattggttgctgtgtttaagtttatttgcagattaatttctctttagagaaaggctcatttataatataatagagagggaaaaggaacaagttctagagagccaatgtagttgttggaatgtgtaatgtaaatctaggtgccctttttttttttttttttcatacctcgatatatgtcacactacgtttctggtcaaataagaacatgttttttctttcttttttgtatgaatttgtttatcagaagtcagaatgattcagttttaagaaatttttagttaacgttttacaacaataacctgtaggagctttttcttaattgaataagtttaagctttctattttgatctgatgatgctaatatgaaagcattctccgaagaaccaaaccacatgagactttttgatttcaatgtccattcgtaactagtaacggaaaagatcagacagaaaaaatgtaccaatcattccatatttgtagttttacatgatatagtaatattctctaggtgtttaagttgtatatttcatgatttttacacattttaaaacctgattaaggcctgtttttaactttttatttcttcaaaccgtaagaaacaatccttgcaagaaacaatccttgcttcttcttctttttttcgtcaagaaacaatccttgctatattttcatttttacagcttcttgtttttaagagagcaaatataataaataaggacggctgaaaagaggtatatgtatcacaaaattaaacaaaagagaatccacctatcgacatagacgtggtatcctttcgatatcgacagaattatgttgaacgcagcaagttggccattaatcaaatctttgacgcgtggaatcattctattgtcaatgaaaacaaatattaaagaacaggtactacctatatacctaatagattcctctaacccgtcaaatgtcaatgtatcgaccgttacaattatgcacgtcttctaattgaaacattctctactttgccaatgtcttatccccaaaactacatataaatatgcatttacgggggcttagaatttcatcacaaaacttgcaagtatcattcacaggagagggaagggagagctcatcatacgaa

SEQ ID NO: 3447 - DNA, 3000 bp, Unknown
  misc_feature (1)..( 3000): cDNA_ID_2990640_gDNA_ID_1620647_Annot_ID_163279 3000 nt of promoter + ATG
tatccgtgtacgtggccggatctcattgcgtttgttagatttctgtgatgacgtggtgttttcctttacactaggaaacttcaatttggcattggaatgtaacatatggctaaagtaactttatctgcttaacatatttttcaaatatctaaaactatttctagaccgaattttagatatgtgactaagaagatttcttgatttacatcaaccaaaacaagagcaccatgtgctgtttcttatatggatataacagttcgaaataagttatcgtcttcatacatccctagaaccccaacgactggactaaaaccctcaacttctaaaataagacttattgtagaataataccaaattgtgaaaaaaaaaacaaatataaattattgactatagtttgaagtaagtcgtaattttttccgcaaggtaaattcattcaaagttaaaatgtggagagtgagagaaagagagtcgcgtggctattgggtaatgagaaacgattggacccatttggtatcattcggaagtgatatgtggcagagggcaatcatacgttttcgtcatagcgttagattttcttacagtttcttagagattatttcgattgtttgtgtcaaacgagtttagtatgttactgctattgaacagtagtattttctcatgtatcgatatgaatacgtttactctttttctttttttcacacaatcagatgaatatagggatgaatatacgtagttttgtctttgtcatatactagattatattcccaccagtcattttcctatgtatttaacaagacaagacgtagaaaaatgagaattttagtacttgagttaacatatttaaagattatattcccatcagtcattgaacatatgtgtacatatatatacgaggagaatctataacttagtaaggagggaaatatgagattttatttctatagagaaaagaaaggataaaacctctctctgccaacactggccaccgtctccaaagtccatcccagttaatttttattttttggaatcttcttatgttattactctttcttttcttatgacaacatgtcaacatgtgacctgtcgtcttctactttcttttcttcagcttttctccttttaagcagaatattcaatctatcttcaaattcatatctgagttttgtactataaaagaaaagcagacattaaaaaagatttgaatataaaacaaatgtattggagtggtaaagcacatcttcatcaaacatttttaaggagcatcaatctaattggtcgatggaaatggaagtaaaggaatagaagattgtttgtgttccatgatgatgtatatatatgcctaattaatgttactgttagttacctttggataacaaagatatttaaagcggtttaatgcttattaacggttgatggatgttaccttttctttttgacatcacggtagatgttacctttcataggtgttgaatagacagattggggacgttaattagtaatgatgtaattagttagagctaaatagtgctaataaatatatgtaagaaattgttcggaaagtaactaaaaaaagttcaattcatgcaagtagacacttcaaatgtgataaatgtataagtatgatgttaagcatgtgacccttgagagtcgattagggcactgtacaagattgacccaaatagttacaaactacaagtgaactctcttccattacatatctacgtgtattgaggggaccattatcgtacgtatacacgtatatatgttttgccctaaattcccaattttaattcagcatgggggacggactcattcaatagcatcgtctttcactttccttcttcggtttaaaatctcattttagtttctgatccaaaaaaaaatgtttgatcaaagatcaaaaacttagatagaaacaaactgtttttttttcttaaatcaagaaagtctaaaaaactaagatacaaaaagggactcgcagcggcagagagataagtatcttacgggccagcagataatttctatgttacgtccctttcatccccattgcatattgcatatgaagacaacggatattaactaaaatcttccaaaattacggtataatgaataataatacacttctgtctcatatagtattctattatattgttcgaaaatgttcttatttacatatctatttatattgttaattgattgcggctattactgtggatattcatcgtaactattttaatcaatacaaatcatgcaaaatagtgaatgacttagaaaagttgaaaccacatatgattgagtttagggggaaaagtataaaagaaagcatgactagtatgttactatgtagtaagcttcaaacatatatttaagaaaatactatatatagatacatatgatataacataacattaaaatatatggtgaaacattttttcttaatatcctaagcttcaaacatatacccaagtagagaagagttggagtattcattctttggttaaacatagacctaatacatagctcatatggacaatttttcgacaaaacaaaaatgatagcaaatgggctaaaatggtttcatatcgaaaagcccaaaccattaagccaaaacgacgtcgtacgatatgacagcggcgattcctataaccaccaccagaggttaaaaagtctctctctttagctatcttttttgtgttaccggttcaaatggccgccgtcgcagattccgttgagaacaacggttccataaacctccctgagaatgaaaaccttataccggcgggattcagtgccgccgcattgcttgacgaaaactctggcgctttccctgaattgaatcagcccgatagcttagctgctgctgagactaccttccccgatacgaacgattccgcggaggagaggtggccaggttggcctggtgattgcgtgtttcgtatgatcgttccggtgactaaagtcggagctattattggacgcaaaggtgactttataaagaag

SEQ ID NO: 3448 - DNA, 3000 bp, Unknown
  misc_feature (1)..( 3000): cDNA_ID_2990640_gDNA_ID_1620647_Annot_ID_163278 3000 nt of promoter + ATG
tcaacgcagatcaagttttgcaatatgaaaaaaaaattataatgtttgtgtaaatgttttttgttatattaatgaaatttcactatttctaacatattaatactaatgtatactgaatcatcttttcaagatgtaaaaaaacatataaatttaacaactgttttgaataatattgacaatcatttttgtagaatgctgagtggaagattagtatgtcattcatttaattacacttaaatatacatggataattaattaggataagttttcttatcaggcgttttcgtgggacaagtacataattaggttaatttcttatgggattctactctctttttttaaaaaaaaaatctagacatttccaaatgtcgatcgaaaacattataaccgaccacctgtataactttccgtcgatgtcccccgtatgtacaaaacttaacaggtcaccttatccgtgtacgtggccggatctcattgcgtttgttagatttctgtgatgacgtggtgttttcctttacactaggaaacttcaatttggcattggaatgtaacatatggctaaagtaactttatctgcttaacatatttttcaaatatctaaaactatttctagaccgaattttagatatgtgactaagaagatttcttgatttacatcaaccaaaacaagagcaccatgtgctgtttcttatatggatataacagttcgaaataagttatcgtcttcatacatccctagaaccccaacgactggactaaaaccctcaacttctaaaataagacttattgtagaataataccaaattgtgaaaaaaaaaacaaatataaattattgactatagtttgaagtaagtcgtaattttttccgcaaggtaaattcattcaaagttaaaatgtggagagtgagagaaagagagtcgcgtggctattgggtaatgagaaacgattggacccatttggtatcattcggaagtgatatgtggcagagggcaatcatacgttttcgtcatagcgttagattttcttacagtttcttagagattatttcgattgtttgtgtcaaacgagtttagtatgttactgctattgaacagtagtattttctcatgtatcgatatgaatacgtttactctttttctttttttcacacaatcagatgaatatagggatgaatatacgtagttttgtctttgtcatatactagattatattcccaccagtcattttcctatgtatttaacaagacaagacgtagaaaaatgagaattttagtacttgagttaacatatttaaagattatattcccatcagtcattgaacatatgtgtacatatatatacgaggagaatctataacttagtaaggagggaaatatgagattttatttctatagagaaaagaaaggataaaacctctctctgccaacactggccaccgtctccaaagtccatcccagttaatttttattttttggaatcttcttatgttattactctttcttttcttatgacaacatgtcaacatgtgacctgtcgtcttctactttcttttcttcagcttttctccttttaagcagaatattcaatctatcttcaaattcatatctgagttttgtactataaaagaaaagcagacattaaaaaagatttgaatataaaacaaatgtattggagtggtaaagcacatcttcatcaaacatttttaaggagcatcaatctaattggtcgatggaaatggaagtaaaggaatagaagattgtttgtgttccatgatgatgtatatatatgcctaattaatgttactgttagttacctttggataacaaagatatttaaagcggtttaatgcttattaacggttgatggatgttaccttttctttttgacatcacggtagatgttacctttcataggtgttgaatagacagattggggacgttaattagtaatgatgtaattagttagagctaaatagtgctaataaatatatgtaagaaattgttcggaaagtaactaaaaaaagttcaattcatgcaagtagacacttcaaatgtgataaatgtataagtatgatgttaagcatgtgacccttgagagtcgattagggcactgtacaagattgacccaaatagttacaaactacaagtgaactctcttccattacatatctacgtgtattgaggggaccattatcgtacgtatacacgtatatatgttttgccctaaattcccaattttaattcagcatgggggacggactcattcaatagcatcgtctttcactttccttcttcggtttaaaatctcattttagtttctgatccaaaaaaaaatgtttgatcaaagatcaaaaacttagatagaaacaaactgtttttttttcttaaatcaagaaagtctaaaaaactaagatacaaaaagggactcgcagcggcagagagataagtatcttacgggccagcagataatttctatgttacgtccctttcatccccattgcatattgcatatgaagacaacggatattaactaaaatcttccaaaattacggtataatgaataataatacacttctgtctcatatagtattctattatattgttcgaaaatgttcttatttacatatctatttatattgttaattgattgcggctattactgtggatattcatcgtaactattttaatcaatacaaatcatgcaaaatagtgaatgacttagaaaagttgaaaccacatatgattgagtttagggggaaaagtataaaagaaagcatgactagtatgttactatgtagtaagcttcaaacatatatttaagaaaatactatatatagatacatatgatataacataacattaaaatatatggtgaaacattttttcttaatatcctaagcttcaaacatatacccaagtagagaagagttggagtattcattctttggttaaacatagacctaatacatagctcatatggacaatttttcgacaaaacaaaa

SEQ ID NO: 3449 - DNA, 3000 bp, Unknown; identical to SEQ ID NO: 3145
  misc_feature (1)..( 3000): cDNA_ID_3594389_gDNA_ID_1620647_Annot_ID_163275 3000 nt of promoter + ATG

SEQ ID NO: 3450 - DNA, 3000 bp, Unknown; identical to SEQ ID NO: 3146
  misc_feature (1)..( 3000): cDNA_ID_1820850_gDNA_ID_1620647_Annot_ID_163274 3000 nt of promoter + ATG

SEQ ID NO: 3451 - DNA, 3000 bp, Unknown; identical to SEQ ID NO: 3147
  misc_feature (1)..( 3000): cDNA_ID_2049863_gDNA_ID_1620647_Annot_ID_163271 3000 nt of promoter + ATG

SEQ ID NO: 3452 - DNA, 3000 bp, Unknown
  misc_feature (1)..( 3000): cDNA_ID_2049808_gDNA_ID_1620647_Annot_ID_163305 3000 nt of promoter + ATG
ttcttcttctccttttaccaatctttgtacagttgaagctgaagctcaatgaaggaagaagaagaagaagatattaaaattgagagagcgaaaaaacgaattgttcttttgtgatcaatcaaaagacttggtttctgtctgattctcaccttctcctccaagttatgcaaatattattctccattaattagtggaagttaattaattagtatgattttaattttaatttctgctttcgctttattttatttgtcttgaagattcgaagttaggttcctttttaaatgtgacgattagactctgaattgataatgtatttttgaacgagtaaacaatcaacgacaaattacaaatctgaatctaaaaatgtatcgacgctggtctcttcgaaacacgagatacaatatcaattaagatgtaaagtgagctgaattacacttccaacaggaacttcatctgtgtgtgcatcaacacttgcttgttgtgagctctagagagtcgacagcatttacataacagtaaaaactcctgttgaggaattacttatgtgcttcgacggccttagagtaaaactcccatgactcgtgtgtctcagttatggcagtttgaccgaatggattctccgctacaaacttctgaacgttctccgcatccgctaatctttctagatacttccttagctcaccctcaggccctgtctcaagaaataaaacatcagtgtgctattatgcttaccattttattgaaagagaatgatgagtgatttaagactaacccaatgcagaatcttgacggtttgtgtactggtacgggctagggaagattccagtgtgtggctaaaagagaggaagagcaataccaacggatgttgaggttaaaagtgacacattcaatgcataagcctattcaaaggtgctcgagtacacttacaggattacacaaggccttgtcgggtgaatcgtcaactagcaaagtgtttgtctcatcatactttcgctttccacaactgatgcatgtcccaatatggtcccatactcttcgtaggtccttgaggaacaaaggtttatccttcttctcctgagttttaaacttcgttgtagtgcatatattctgatcctgtgtccataagattcattagctagctggtttttggaccaactattagaatgagttctgctcatacgtaagctacatatctcatagtcaaagaaatgcaaagttcacaaagattgtagactgtgtttctacaatctcaatctcaactgcatttctcataatacagtccttctcatataggaactgcatttctcataatctactctcaaagtcaagaaaatagctcatagaggttgcagggatcacttacaaaacagaacaacagattcctcgcatggtttttcatgacaatgttgatcatataatccaacccactagtaagagaaaaaggagagacagagttaattgaggaattaaacttcgtatatgtataagacacctaactaagaagagtcaaagacaatgcattttgggttttgaatcagttcaagaagctcacacacgtctggaagaccatatcgcaacatcaaatctctcaaagcaaaagtcgagaaaactaggaagaaaaggcctcctgaagactataaaaggacaaagaaattactctgcagtaaaagaaacataaaacaacttacaagtagcgacgttgaaattgattctttcttacctgatctgtatgatactttaccatctggaagaaatgtacctgtaaaaccctgaacaatatctgcaaggattccatttaaatcaaatataaccaactttctggtacgttgagctttacatgtgcatctaggtacatctccagtttctgatgaaataactccttgagctacgttatcattttgtattaagacagaacttgacaatgacgtttcaagcttttccctgtcaaattctggttcttcatctttcctaggtaatgaaacatcatccttcccctccatatcatcagttttatgatctaaagaattttttttcctcttgctcttctttgttttgacctcaaccttgctaacaccttctgctcccaaatcattctgatcaacttcttcctttttttcatttttctttatactatcctcctccatattgtcagttttatgatctaacaaatttttcttcttcttgcttttctttgttgtcacctcaaccgtactaacaccttctgctcccttggcatcctgatcaacttctccctttctatcctttttcctttttttggtatttttatcatcttgaacgctttcccccttagttgcagaatcttcaatgttactagccaaatccttactggcaatctccccatcagcattcccttcataatttttcacaccttctccattcgattgatacaacaaagactgtactgactcactatccatggtggcaactgattcgcagtttgttttgttttttatcttcctcttctctcttttgtgaccatcatcactaacaccttctgcgtcgagtgcatcctgattagattcaatatttttatcttttgtcatttctttacgttttccagatttctgaactccacttttctctctcgttgcagatttttcaattttaattgtcatatcctctcccccgaactcttgtccagcattcccatcaaaattttgcatgtctttttcgtttgactgattcaacaaacactctactgatcctgatggctcaaagacctccatatctgcagatgaagttttcttcttctttcccttccgttttttgctccttacatcacatacacctgctccaagaacgtcctctttaacttcagtgttttcatctgtttccttctctttagtttttccgagattctgaataccgttttcctccccatttacataattttccgtctgacttgccgaataactaattaactctcggccaccattcccatcattattttccacacgctctactggcccgcttttc

SEQ ID NO: 3453 - DNA, 2277 bp, Unknown
  misc_feature (1)..( 2277): cDNA_ID_3073773_gDNA_ID_1620647_Annot_ID_163304 3000 nt of promoter + ATG
ttcgccgcgcctcttcgtctccttcacagagatactcttcgtcaatttgaaaacttccaggtaatctcatctttttcttcttcttcttctccttctatttgtattaagcgtagcctgagaaatctcctggtcggttttgagacagtgccctgtgctctaatttcggttgataccttgacatgtccgtctcttcttcgagggtgatttttgtttttcaaattcagatttaagatgtgacccagttactaaaacttctggttttaaggttgccatcatttatgtggaatatcctcagctcgattgaatctggcagtttttcgtttttctcttgttaatggtttttgttaagaagcgttttggtgttttagtgaataagaacactgccaatcatcatttcacgaacaatggtattagaaagtgcataattttctggatggctgcttctttggttggaattgtttgattcacatttaatacatagtctctattgctcagtttccaatcacttaagagctccgtgttgggttttctagagctaccgtttgatggatttatgtgaggcatcttaatttatccgttctttgtgaatcatcacttcacttgtgctaaacttgagaaaacgtttcccttgatagttttgaactgcagctgatttccgactaaattaaaggagtaatggagagtgtttcagtggaaacactttcagaaactggaaactcaaatgacggtcaaacgaatccagaattgattgataagcataagaagagatcggggaaaaagaagagaaaatcgaggaaactggataatgaggtgaaggataatgattctcatatcagtagccaaattgggaacgcagatgaggccttttcatctcaagaaaaaaaagaaggggaaaatgagaaatccactagtgaaagtcaagttcggttatccgagaatcttttgtcttcattacctgcagagtcctgtcaacgagattcagtctcatgtgaagagcctagagctacactacatcatacagacccaatctcatgtgaagattctctaccagatgataataggaagggttctagtacaaaaaaatcaaaaaggagagagaagaagaagaagaaagaggacttgtcctgtgaagagaaattgttggatgaagttgaaaaaatcaccagcgaagaccaagtgcatccacccaacaatcctttgtcaaacggtatggtacaagaaaggtcaggtgaactaactcaggattcatgtgagaagcctggagcggcacaaatttgtacagacccaaatctgtcaacctgcaaagattcactgccagatgctactaatatgactagttcctcgaaaagaaagagaaacaaaaggagggatagaaatgtactgaaagaaagtggtgttgatattggtagcaccaatgcagaggttgctgtaactgacaatactactactgaagctgaaggatcaagatcgatgagtatagaggaaaactccgttgctagtgttttgataaatggttgtctgaaatccaaggttgatacagtggaacaactagatggcacagatgttcaaatcaatgaaactgtcttccaaactcagagtactaaagccaagaaaaggaagaagaaaaaaaccaaaacaatggaggcctgtgatccattaggaaatactctgccgacctccacggaaagcgggccagtagagtgtgtggaaaataatgatgggaataaggaaaaagatggaaacactgaagttaaagaggacgttcgtgaagttaaatacgatactatttctgaagctgaaggatcaaaatcgacgactaaagaggaaaaatctgttgctagtgttgtgataagtagttgtctgaaatccaaggatgatacagtggaacaaaaagagtgcacagatgtcaacatcagtgaaactgtggcccaaactcaggatcctaaagccaagagaagaaagaagagaaagaccgaaacaatagaggtgtgtgacccattaggaaatactttgtctacctccatgaaaagcgggccagtagagcgtgtggaaaataatgatgggaatggtggccgagagttaattagttattcggcaagtcagacggaaaattatgtaaatggggaggaaaacggtattcagaatctcggaaaaactaaagagaaggaaacagatgaaaacactgaagttaaagaggacgttcttggagcaggtgtatgtgatgtaaggagcaaaaaacggaagggaaagaagaagaaaacttcatctgcagatatg

SEQ ID NO: 3454 - DNA, 3000 bp, Unknown
  misc_feature (1)..( 3000): cDNA_ID_3091862_gDNA_ID_1620647_Annot_ID_163302 3000 nt of promoter + ATG
ttgcggtgatatattaatttcagtcagtccaactttattataagagagtgttggggtttagtagattttgtatgaaaggcttgtattttattttttatggaacttgatatcccaacaatgtggttgttcttgttcattcgcatgttttttgtgtttctaagttttgagagttgatataagaattactttaatttgtcaagatctcgtcaagtgtttatacttgatgaaaatcttttggggatcaaaacggtttgaagtaaagatcgtactgtcgtactggtgtctgtagattgatattaaactcgaacaacatgattattgtaatataccttaactaccatataatttttttcaattctttctggatacaattgtaagaaaacagaaaaatcggaaaaatgagaaaattcaccaaaactaatggggttgttttgaaattagtttgatacttgaggattgacaaacgaattctacttttccggggaaagaattagagagcgaaacagaacaaaacaaacaaaaagtcatgtctccgacgacgacatcgttacgatccctaagcttctcgctttacgcttcttctaattctactccgatttctacaccaattgaggcccgacagttactgagttcatgcaatagattctacggtctgtcctcttcgagctcttcttcctcccttactacttcatctttgatcggaaatcttgttttctcatcaaggaatcagtctctctccgtaaaggtatacaatttcgtaaatttttgtgatggatttcaactttacggcctaaattcgagaacccatgttccacttattgagaaatctgcttaattcttatgtcacttgtagtcgattgggaaattagggatttctatatgtgccattgattgtgattactctttatgtggtctttttggtccatttgaagatgttttaagttaggtctctcagccacatagacgattacattagtcctgtgtttaagttcacactgtcttactttgattgaagctaggttgcgttaagggcttttaaataacatctaactttatgagtgtttggtgttgtcagtgtggctacatattgatgaaatgtatgtgtgttttgggataggtccaagcgttagctgctgaaaccgaacagccaaaatggtgggagaggaaagcagggccaaacatgattgacattacctcagctgagcagtttctcaacgcgttaaaagatgcgggagatagattagttatcgtagatttttacggaacttggtgtggttcttgccgtgcaatgttcccaaaggtaactttcccgttagctacttaacgattgtatctcttcgtgtatactcgatcatctctcatttcattcagttcgcgagtcttgaaccattatgtttcttaagcttgctcaaattatcggcttgcttattctaaagctgagactcttttcttattcttttccagctctgcaaaacggcgaaagaacaccctaacatcttgttccttaaagtaaactttgacgagaacaagtctctctgcaaaagcttaaacgtcaaggtgttaccgtatttccacttctaccgcggtgctgatggccaagtcgaatccttctcatgctctcttgccaaggttagttcttcttgtcccagctttctttaatttcaaacgtcacttgtctatcacgaaaccagagaatagttactgcattgtatagtcttgatggcgacctctaagtctaataagcgtctgcaaacatttatgcagttccagaaactgagagaggcgatagagagacacaatgtaggaagtatcagtaacatctcttcttcagcttctgagaaagttgaagattcaagtgaataatcaatgcctggttcagattgatcacagattattttgttaaatcgcttccctgtatatatgttgactgcattttccatgtggtgcatcataatttttgtacataaataaatgagtctgacttcgagttcatcgcctatcaagtatcagcttccctaaaccgagtaaaaccgggaagtgttgggtttcaaaattaacttggtgagttaacagttaacacacacatccaccgtttttagatagataagaggatgccctaataaaaccactgctttgtcttgggtaagaagaaacgttaacatgttagttgtcctacaaattcattcatctataaacgttaaagtctgtattaacgaatgaaagtaatcaaaagctacatatttattacacaaacaaaaatgcatcagttgcatctcgtctaagaaagcattttttcttcactcgaagaaaaataacaagaagttgaagccttaggctcacgagccaactcctttaacatgtcgagtttctaatccgagtaaaggatttgtatttcgtcgagaaagttgccgcttcttcaaatgtttggcatttgttaagttgcaacttgtctctcttcttcacgttgtccattgtatccttcccactggaatctttgtaggtggaataacaaacaaggaggaacagaaatcggtttgctaattggcgggttaatagttttgtaaaatggtagattaaacatgcgctctatcctgtaacatttctgagcttgagaacttgtagttgaggagaattcagtagcaaattcgttagtagcttccaccgctcgtttttcctagtattgtagctccaaatgtacatcattaatagatcatataaaagaaaattataatttcaaaaaaggctcaagttgaagtatccaacggtggtcaatttaagactataccaacgcctgtacttcaaaagtttctgcaagtattcattagcagtgacgaattcaaatttgaaaaaaaaaacttttatctgtaaattctccatccttaacggtcaaatttagtcgggcagcagacaaactctcaagtccgatcaggaaacgaaacgagaacaaaagaaaagagattggattttggtgacggcgtttccttcgccgtcgtgttcacc

SEQ ID NO: 3455 - DNA, 3000 bp, Unknown
  misc_feature (1)..( 3000): cDNA_ID_2051606_gDNA_ID_1620647_Annot_ID_163300 3000 nt of promoter + ATG
ttgatattgtatatatacatcaaacaagttaaataatggttttatccatattttctaaattctcctaattaactctactagagttaatatgtgtgtatatagtcacacatatacacaaacatttgtttctgctcgtggtctatatattgccttttaaaagggtcaaacatagtatagcttggatccttctttacttgtccctgatctctcctaatctctcgtcttccctctcttttgtgcttcatcgatctctatcggtcatgggttccaattttcattacacaatagatctcaatgaagatcaaaaccatcagccttttttcgcttctcttggatcctctcttcatcatcatctacaacaacaacaacaacaacaacaacattttcatcaccaagcttcttctaatccctcttctttgatgtcaccgtctctttcctactttcctttcttgataaactctcgccaagatcaagtatatgttgggtacaacaataacacttttcatgatgttcttgatacccatatctcccaacctctcgaggtataatttcaaatgaatttcatgtcaatatattaactcttgatccttatatatatggtttatattcatatggaaatttcagaccaagaactttgtatctgatggtggttcatcatcaagtgatcaaatggtgcccaagaaggagacacgactaaaattgacgataaagaagaaagataatcatcaagaccaaaccgatcttcctcaatccccaataaaagacatgacaggaactaactcgctcaagtggatatcttcgaaggtgagattaatgaagaagaaaaaggcgattattaccaccagcgacagcagcaaacaacacactaataacgaccaatcctcaaacctaagcaattcggaaagacagaatggttataacaacgattgcgtgattaggatttgctccgattgtaacacaaccaagactcctctttggagaagtggtccgagaggtcccaaggtattaatcacacgtctgttaattacacatatatgcgtaagcttttttttggttttaatgttaaaagtagatgcctaagtaatgtcatatatactcatattgattattagaagctcacgaagaatatgtctttttatagtactaattaatagcaaatgaaaagtaaatctacaaatctctaactggtaaaaacaatttcatgtagcattataagttggtttaaacagattaatctttgagatcttctaaaattcatgttacaagataattaactaaattatcatgttttttcttgttttgttattacagtctctttgtaacgcttgtggaataaggcaaaggaaggccaggcgggccgctatggccacggcaaccgcaaccgcagtctctggcgtatccccaccggtcatgaagaagaagatgcaaaacaagaacaagatatcaaatggagtttataaaatcttatctcctttgcccctaaaggtaaacacgtgtaagagaatgatcacactagaggagaccgcattagccgaggatttggagacccagagcaactccacgatgttatcatcttcagacaatatctatttcgatgatctagcattactgttgagcaaaagttcagcttatcagcaagttttccctcaagatgagaaggaggctgccattttactaatggctctatcgcacggaatggttcacgggtgattattttaagtattttaattataactcgcatgcttaagaaataaaatataaaccataccataagccctcatagctagtaatatctagattatttgatacatgaaattttgttgcggtgatatattaatttcagtcagtccaactttattataagagagtgttggggtttagtagattttgtatgaaaggcttgtattttattttttatggaacttgatatcccaacaatgtggttgttcttgttcattcgcatgttttttgtgtttctaagttttgagagttgatataagaattactttaatttgtcaagatctcgtcaagtgtttatacttgatgaaaatcttttggggatcaaaacggtttgaagtaaagatcgtactgtcgtactggtgtctgtagattgatattaaactcgaacaacatgattattgtaatataccttaactaccatataatttttttcaattctttctggatacaattgtaagaaaacagaaaaatcggaaaaatgagaaaattcaccaaaactaatggggttgttttgaaattagtttgatacttgaggattgacaaacgaattctacttttccggggaaagaattagagagcgaaacagaacaaaacaaacaaaaagtcatgtctccgacgacgacatcgttacgatccctaagcttctcgctttacgcttcttctaattctactccgatttctacaccaattgaggcccgacagttactgagttcatgcaatagattctacggtctgtcctcttcgagctcttcttcctcccttactacttcatctttgatcggaaatcttgttttctcatcaaggaatcagtctctctccgtaaaggtatacaatttcgtaaatttttgtgatggatttcaactttacggcctaaattcgagaacccatgttccacttattgagaaatctgcttaattcttatgtcacttgtagtcgattgggaaattagggatttctatatgtgccattgattgtgattactctttatgtggtctttttggtccatttgaagatgttttaagttaggtctctcagccacatagacgattacattagtcctgtgtttaagttcacactgtcttactttgattgaagctaggttgcgttaagggcttttaaataacatctaactttatgagtgtttggtgttgtcagtgtggctacatattgatgaaatgtatgtgtgttttgggataggtccaagcgttagctgctgaaaccgaacagccaaaatggtgggagaggaaagcagggccaaac

SEQ ID NO: 3456 - DNA, 3000 bp, Unknown
  misc_feature (1)..( 3000): cDNA_ID_1820805_gDNA_ID_1620647_Annot_ID_163293 3000 nt of promoter + ATG
atcagcctttgtatgtcaaggtaattgttaatgagaaagttttacaaaccattttactaaactcaatgtagatctgtgtatactctttttgcttatgtttacttatctgcagcagtgttagttttctatgtgcatcttaatgaattctacttggtatcttgtaatggcacagcgttatgagattgtgaatggcactactgaagttgaactggctccagaggatgataccaaggtggaccaaggagaggagaaaactgcagaaggtaacttcatgagcactatgtcttctttgtttgttgttaatctttttggaaagacaaaaacaatttaacatttttctctgtttttcattgcagagaaaggagttccaagtttctggctgacagctctgaaaaataacgatgttatttccgaggaggtagcctatatgcagttttggtgttcgttttataaacactccaatcataaccatggaatatgagcataacttattgtcatttatgtcaggtcacagagcgtgatgaaggggctctcaaatatcttaaagatattaagtggtgcaagattgaagagcctaaaggattcaaacttgagtttttctttgacacgaatccgtattttaagaacactgtcttgacaaagtcttatcatatgattgatgaagatgagccactgcttgagaaggctatggggtaactacttatactctcttgcaattgttgtatacttttaagtatattctgcttattagctgattgcattgagctgcttattttttttcttcgcttatattgcaaatggattcttattctttcaccattcattttcaggacagaaattgattggtatcctggaaagtgtctaactcagaagattctcaagaagaagcctaagaaaggttcaaagaatactaaaccaatcaccaaactcgaagattgtgaaagcttcttcaacttctttagtcctccagaagttccggatgaagatgaagatatcgacgaggaaagagtaagataacgattgttagaaaaacctgtcatcatttagttaatgtatttagtaactctttctcgttctttgatgcaggctgaggatcttcaaaacctgatggaacaagattatgacatcgggttcgtctttttctaaacacactttctctgttgattttatgggtttgcttttgagtcatgggactactttatcactgcaatcaaggtggttaccctttcattattatctgatcacaagtactttttactttctgcagatctactattcgggaaaagattattcctcgtgctgtctcatggtttactggtgaggctatggaagcagaggattttgaaatagatgacgatgaggaagatgacattgatgaggatgaagatgaggaagacgaagaggatgaggaggacgatgatgatgaggatgaagaagaaagcaagaccaaaaagaaggtataaagtgccccaagtatagttgtttcttttttttttttttttcttcatgccacgttagttttttactaatcctttgaaatcgcttaatatttttttttgcagccatcaatcggcaacaaggtatgtaacctttcagaactaaagtttatttgattttggaactccaacattcaaataaccaaacacaagaagtttcaggctgagcattgtgatgaaaatagaaattaatatcggaaatgtaggctctagaggcccatgaatcatacagattgctgaaagtaactgagcaatcctaaaaagtatgaatcagtaaataggtagttacgtagaagactctgagaaggatacatgaatgacacagcagagactaaacaagctctttaatcatggcatgggcagtacgagatagaaccattctcatgaattcattttattactatagtagcaaactagcaatcagtgtctatgtttgtgataaatgtgagaatcatctgcttaatttttttttcctcttggactgcagaagggagggagatctcagatagttggtgaaggtaaacaagatgagaggccacccgaatgcaagcaacagtaatcttttactacgctctaccagacataaaaggattgcgtgaaaatataattcaggtcattctctgttcatcaagaatgaggattgagaaaaggttttgggatttttaaaagtgaaattcatcttgtaggagtttcgttcgtttttctattggtgtgtttattttctctaaagcactttaataatataccttggtatttaatttatgaatcaagcatcatcatccctagtctctgcattcactacttcatcccctacctaaactttgtcgacgaaagagattttaataaccatttagatagtaatgggtagtgggaatgatcattattcttttgttcaccgtcctttgattttcaatggtaaccattttgttgtgtaagactacaaaagatgaataattggactatgaccatattatattagtcaagtctaaatcggtcgaaatcagttcacctttaagatgagtaatttgactaaatgcctccgcttgttcaacactaattataatttaaattattgtagaaggaaaacacaaagaaagtgaggttccgaacatccacaatttggactaatcacatactacttaagaagtttaatgcatcattagagctaaatgaggggaaaaaaaagctagctaaataaacttgagacacttgtttgtgtttggtgttatgaaaaacaaactcaaaagtcgcaacactgtttggtaaattggagacatgcgaagaggggaccgcttcgttaccattcagagtatttgacgtaatatattccgttttaagaaacctatctagtttccaagaaatttactaataaaggtgcttgagaaagaccgttgttgatgatacgtttttttatttgctaatgaaacgattcggtcgttgtttcttgaaattccactgttattagactcttgactctgttttgtttcccgccgatctcgtgatg

SEQ ID NO: 3457 - DNA, 3000 bp, Unknown
  misc_feature (1)..( 3000): cDNA_ID_1820809_gDNA_ID_1620647_Annot_ID_163290 3000 nt of promoter + ATG
agtaaaatggtttgtaaaactttctcattaacaattaccttgacatacaaaggctgatacagcgtttgatacttggcttcaagaatagctctctcctcacggaattttgcctctagttcatcatgttggctctgcgtggaaagaagtcatcagtaatcaaaacgcaacaccttacttttgaaactttaaattcagataagcagggagaaaactcacacaaaacaaaacaaaccccattaaacgatatatagcacacatagtttggtaaaatgtgaaagaaatttcgctaacctgtatatccctcaaggcatcaacgcgctttctcacattgggagtcagattctcgagcacatcagaacgctgaccagccagattctgcagcttgttctgtgaattaataacaatgtattaacaactcataaactatcattgtactagaagaatgacattgaaaccaaaacactaaacaccaagacacggcttatagtatctaaacaatcagaggaaagtaactcaacatcctccatatctttcaatagcaaatgctcacgggacagtttacagaaggggaaaaaaactcacctttagagcattgacaaggccagctcgatcctcgtccttaagagctgcaaaaaaacagtaaacaaaaggaacaccagtcagataacagaggaaattagggttaaagcagctctggcttaagaggcggagaaagagataagagtaatcgtgagtaggagtattttaccagcagtaagatcggagacgttgaagctatccttgtcgttgctcatcttctgaggatttggtgaagagagagattttgaagaagaagaagcagaagagactagggacaagggttttggggaggcgactcgtaacccttaaatcctctttgtttttttgtttttttctctccctccttttcacaccaaaattataacaaatgccattttagttttttctctttttatatatacttttctttctctaaaaattgatgtttaatgttttaaaaagcaaaattaagtttattgaattaaataacatgcaaaactttacatacatatatatatggataatgagaactgacttatatatagataattaaagtttatttatgaattcaatcaattataaatatatataactaatatataaactttaattatctatataattaaaattttgcatgtaattatattaattatctatatacttatatatatatatatacacttatatatatttgattcttcaccaaatacagtacaggttagtgaactttaatgggatcaaatagaagatttctgaatctgttagtactaaggcccatcccaagaatgagccttccaagcccaatacactgattacttcttttgttcacatacactgtacatactaattaaaaacaaaaaacagtccacaacaaaaacaaaaaaacagtccacaacaaaaagtcatatcccaaaaggcacaaagatctttagtttggtttaagctcatcccgagttcaaacgaattaaacgtactctaatctagattagctcatcacgacattttcaatttgaagtttcaaccttttatacgtctgaccagaaacacaataaagaagcctcacgcgtagcatttttttttaaccagaaaaccatgagacaaattcaacctaatcagataactgtaaatcatttcattcatcctattaaaagcaaaggtgaaaagctttttgtacctccacgactcccacttaagagaaacattttgtagagctttcaagtcacgcgtagcaaacacacctggtaagtggtcaatctttttatatcatatagccatcataagagtatcattaatagtagtttcttagcataatcttaatagttcttatgaatatttttataattgattttgaaaattttgaagttaagaatttagttaagagattgaaattttggcaatatgcaatggtggactcttaacttgagttcttaaaaaaaaaattggaaaaaaagtagaaacattataattttaaaaaacttaataattattacaactcaaaaaatttgaaacatacataacataaaattttaaacaaatatgacaaacaattagatttaatacttaatttatctaagaattaagattaattgaattaaaacattatatttaatacctaatttatctaagaattaacctaagaaacattagatttggctcttatataagagtcatttttaacaattaattgaattataacattaaatttaagacctactttatctaagaactaaccttataaactatgaataatgatggtctaagcgcgcttgttgttgaaactctcaaataaaccggataattttaaaaccaggtttagtttagttggtagattcggctcaaatagtagtatttttgtggatttaaagatgctcagcatgtatatacatatgtgttctatagatgttttacacattttttctattttactattctgcttgccataatcattagattgtttggttgaaccgaagcatagaaaccaaaccgaacatagcacacagcaacaaaaccggaatcattcagaggtaaataatttttttacattacccgcaactgcaaggaaagaggaaaaaaaaaaagacgcaaactttgagaaagacatcctcatcgttttctgtccatcgaagctctttttttttttttttttttttatcttcgtattcaattcttgagaggagagagagagagagaagcatcccagaaaacgacattctgttcatatggagttttttcaccagatcgagagcacgaagaagatgattactgggttttgatttagtcggcgaaaaatccgtaatctcattgttcgtgatctctgggttgtttttctggattgctggtgcggctgattctagtcaggattgtttttggggtccctttcgctctatttgaatctgcgtctgggttgttaagattgtacaaggggtttcgtggttatttatg

SEQ ID NO: 3458 - DNA, 3000 bp, Unknown
  misc_feature (1)..( 3000): cDNA_ID_1820817_gDNA_ID_1620647_Annot_ID_163288 3000 nt of promoter + ATG
accgcactaagccactctctggcacgatttgagcagcttcgtccctctagaccgtcttgttggatccgtaaagtcaggtcatcacgtatggccttcaagtcaccgatggctgtttcaagatcagtgatggcttgtctaagatcagtcttatgtcctcttctctccgccatattcatagattcacacaacacctgagcacagccaacgataagagatgagatgaaatccatttcgatgatttctcgctctttcttttacttgtctgagctaactaactaataaagatgaggtgttgactcataaagattaaagtaaagtcaactttaataaagctgtcttgcttgcttgtatgacttggttcaagaaacgagtagagagagataggaatcttcctcgaagtctcgaactgttgtttgcatgcttgtaatttctactggccaagtgaaggcccgataacaaaattggccctctaagagccttttaatgcctatagggtttttttgttgggtcaacaattccaatgatggtgcattttttttatgttgaatatatacaagatttgttgcatattaaaaagactggtcaagtaaagtgtttcaccgaaaatgggagacatcaagtacttatgaatgatgatatatgtaccgttctttagaattagttctgtgactttattacgagttagaacaaacctacttctacttctcttatccactttgcccgcaatcgcaaggaaagctaacaaattcaattaatcacacattaaacaaaataaattactagtgttcatatttgtctcggctttcttctcagtttatctaaaagaaatagctttcaataaaaaatcaatgttttttctacttttgtaataatttgtaaaaaaaaaacggtagatgattggtacattgtatttgaggtgtcttgggtattttgtctcttgcccatcatccaaagcccactttcacacatctcccatatgaataacatatcattacacattgtccaaagaaaaccgcacaagtggcatcaaacatatggaacatgaataaatacttcttttttatctatctgttgacgaataaatatttattgagatattagagaaaatagaataataatgaggagaggaaaaaagagagtttaaagacaagatatttacggaatttaatgggacgaaagaaaaataatataaaagggggacctgtctttgtcagtgcaatgaacctttttttctttcgatcaaatctctcccgccacccaactaacacatcttaaaccgtacacgtcaccctctctccttcccattttcttcgtctacgtgtcgaccatccaccggtttttgttttctgctaaacgtgggacctattcacatttttattttattttaaaaaattggacggattctttcatgttctttgggtcgttgcataattatgtccatgagtctatccatcaaaataccttcggaatcatctttttattttatatatatactgcgacaacaataattttatgttttgtactgtcttttctggtcaataaaaaaaactaaaaatttggtcgaatttaatggacttccatgaccaactcttcatttcccttaaggataaattgagaagaaaattatatactggaatttgaaaaagctttatataattgtaacgtatttttataattgcacgacaaatctcttttcttgattttttgtatgaaactacaaagaccaatttttctaacaactaagattcagttattatttttggtcacataaataaatgagacgataacttcataatggttttggttttgagtttgaccaaaaatggttttcaagataaataattagatgaataatgaaacgtaccccttaaataacaattatttagatattttaccggtggtctttcatttttcccgaatataaaacattgaattcttatctaaaggacaaagtattgttcttattctgaaaatgacacaaatttaaaatttttatttaaatctatgaatatctaaatggtatattatgtttggtgttttttagtccaatgattaggaattacgaataatgttttcgtaattcaaactctatttatttagattgaaaactatatgacaaataaaataattgcaaaacaatacaagatttaactcggactacgacacgtcatttaatgaaagtcatctttatgaaaatataaaatccattaaactgatgacctaactaaagttaaaagcaaacatattttattttgtttgacaaacaaaaaagaaatatatttctcccaaagaaaaaaaaaaccaaaaaactttatgtttgttaaaaaaataagaaatgataaaagcattttttttaaaaaaaatgttgaatataggaagtctgaagcaagtgtctttttatgaattaaatagtttaaaatttcaagaacgaaacatctccccttattacaaaaaataaataagccaaaaaaagtatcactttaataatgtaataaaataaagtgatatgtatataagtatacatacataaatagtagattcgaagcaattgttgcattagcctacccatttcctccttctttctctcttctatctgtgaacaaggcacattagaactcttcttttcaacttttttaggtgtatatagatgaatctagaaatagttttatagttggaaattaattgaagagagagagatattactacaccaatcttttcaagaggtcctaacgaattacccacaatccaggaaacccttattgaaattcaattcatttctttctttctgtgtttgtgattttcccgggaaatatttttgggtatatgtctctctgtttttgctttcctttttcataggagtcatgtgtttcttcttgtcttcctagcttcttctaataaagtccttctcttgtgaaaatctctcgaattttcatttttgttccattggagctatcttatagatcacaaccagagaaaaagatcaaatctttaccgttaatg

SEQ ID NO: 3459 - DNA, 1908 bp, Unknown
  misc_feature (1)..( 1908): cDNA_ID_2991550_gDNA_ID_1620647_Annot_ID_163268 3000 nt of promoter + ATG
gaattccagtattgtttccgcaagtatgtgtttatagaaaaaaaaacttttctttgttgttgaagggtatagttttgttaatgaaatgttttttatggaagtgcagtacagtaacaccggtccacttccctcacatggatttgtaagacagaggttctgggaggttgagactaaaccacctcctttgccatcactttctactgctcatgttgacctgatcgtaagatcatccaatgaggatttgaagatctggccgcataagtaagattcttgaaacatctctctctctctctcattttcaacattttttcagatatttgattaggaatattttacataaaatatggagactgttttttaatctatgtatccatttcaggtttgagtatagactgagagtagcattgggacatgatggagatttgacgttaacatctcgtgttaagaatactgatacaaaaccatttaacttcacatttgctcttcacccctacttcgctgtttccaatatcaggtaatccaaggagtcataacttcacgttgatatctttttttttggttgtgttggtgtaagtgtcattgaatcagctggttgttgtattcagtgaaatccatgtcgaaggattacacaacttggattaccttgaccaacaaaagaacagaacacgtttcactgatcatgagaaggttataactttcaatgctcaagtaagcctctttccatttgccaattcaaatttcaacccttttattattttagtccatcactaaaaaaaaacacaccttgcaaaaaaagcttgacaggttgtacctaagcactccagatcaactaagaatcgtggaccataagaaaaagaagactattgttgtacacaaggagggacaagttgatgccggtaattacaaatttagatttgtaaacatacatagacatagacacagtcacacagaaacagattgttttagtagtactaatgatggatcacttgtaattacaatgtgcagtggtgtggaatccatgggataagaaagtatccgatttgggagttgaagactataagcgttttgtaacggtggaaagcgcggctgtcgcgaaaccgatcacagtgaaccccggcaaagaatggaaaggaatactccatgtttctgtggttccatcaaatcggaaagcttgaccctataaaagtcttgcattcatcatcctcatcctttaaaaaaaaaaacttaaaactgtctttattaaagtatacttaatgttcccgagagacatcacatggtgaacacaaagttagttgggttccaaactggactcttgaccagttttattgttttgtaactttagcattcatgaataaaaaaagtgcgttaattacaataattgttaaatgtaattaaataaaagtgcgttaactacaataattggatattggttatttgcaaaattcatgttcttaaatcatcagtctaaacaaaaaaattagattagccgaagatttcttcttctacccttgatgatactatttgggatgggcttgcttagatgtgccgaatccaattctcgtttttgggtctatctatatttgggctgggctttataagaggcgaagcccatgtcgaacaatcaatttttttttaattttatatttcttttgggagtctgttctgtcgtattgattaataaagtaaaaaatcttagccacaaaattaaatcatctccaagacgtatcaatatcatcatcaatccaccaatgaaaagttctctctttttttttcccactcttactctgttctcgctacagaatctcctgggaaaaaaaaaaaagaaacttgatccacccgaattccccaaatcttcacaatttctggaaactctctcgatcgtgaagcagaaaagtgaggttccaaatg

SEQ ID NO: 3460 - DNA, 3000 bp, Unknown; identical to SEQ ID NO: 3146
  misc_feature (1)..( 3000): cDNA_ID_1820850_gDNA_ID_1620647_Annot_ID_47621 3000 nt of promoter + ATG

SEQ ID NO: 3461 - DNA, 3000 bp, Unknown; identical to SEQ ID NO: 3145
  misc_feature (1)..( 3000): cDNA_ID_1820846_gDNA_ID_1620647_Annot_ID_47622 3000 nt of promoter + ATG

SEQ ID NO: 3462 - DNA, 3000 bp, Unknown
  misc_feature (1)..( 3000): cDNA_ID_1820838_gDNA_ID_1620647_Annot_ID_47624 3000 nt of promoter + ATG
ttgtatcttagttttttagactttcttgatttaagaaaaaaaaacagtttgtttctatctaagtttttgatctttgatcaaacatttttttttggatcagaaactaaaatgagattttaaaccgaagaaggaaagtgaaagacgatgctattgaatgagtccgtcccccatgctgaattaaaattgggaatttagggcaaaacatatatacgtgtatacgtacgataatggtcccctcaatacacgtagatatgtaatggaagagagttcacttgtagtttgtaactatttgggtcaatcttgtacagtgccctaatcgactctcaagggtcacatgcttaacatcatacttatacatttatcacatttgaagtgtctacttgcatgaattgaactttttttagttactttccgaacaatttcttacatatatttattagcactatttagctctaactaattacatcattactaattaacgtccccaatctgtctattcaacacctatgaaaggtaacatctaccgtgatgtcaaaaagaaaaggtaacatccatcaaccgttaataagcattaaaccgctttaaatatctttgttatccaaaggtaactaacagtaacattaattaggcatatatatacatcatcatggaacacaaacaatcttctattcctttacttccatttccatcgaccaattagattgatgctccttaaaaatgtttgatgaagatgtgctttaccactccaatacatttgttttatattcaaatcttttttaatgtctgcttttcttttatagtacaaaactcagatatgaatttgaagatagattgaatattctgcttaaaaggagaaaagctgaagaaaagaaagtagaagacgacaggtcacatgttgacatgttgtcataagaaaagaaagagtaataacataagaagattccaaaaaataaaaattaactgggatggactttggagacggtggccagtgttggcagagagaggttttatcctttcttttctctatagaaataaaatctcatatttccctccttactaagttatagattctcctcgtatatatatgtacacatatgttcaatgactgatgggaatataatctttaaatatgttaactcaagtactaaaattctcatttttctacgtcttgtcttgttaaatacataggaaaatgactggtgggaatataatctagtatatgacaaagacaaaactacgtatattcatccctatattcatctgattgtgtgaaaaaaagaaaaagagtaaacgtattcatatcgatacatgagaaaatactactgttcaatagcagtaacatactaaactcgtttgacacaaacaatcgaaataatctctaagaaactgtaagaaaatctaacgctatgacgaaaacgtatgattgccctctgccacatatcacttccgaatgataccaaatgggtccaatcgtttctcattacccaatagccacgcgactctctttctctcactctccacattttaactttgaatgaatttaccttgcggaaaaaattacgacttacttcaaactatagtcaataatttatatttgttttttttttcacaatttggtattattctacaataagtcttattttagaagttgagggttttagtccagtcgttggggttctagggatgtatgaagacgataacttatttcgaactgttatatccatataagaaacagcacatggtgctcttgttttggttgatgtaaatcaagaaatcttcttagtcacatatctaaaattcggtctagaaatagttttagatatttgaaaaatatgttaagcagataaagttactttagccatatgttacattccaatgccaaattgaagtttcctagtgtaaaggaaaacaccacgtcatcacagaaatctaacaaacgcaatgagatccggccacgtacacggataaggtgacctgttaagttttgtacatacgggggacatcgacggaaagttatacaggtggtcggttataatgttttcgatcgacatttggaaatgtctagattttttttttaaaaaaagagagtagaatcccataagaaattaacctaattatgtacttgtcccacgaaaacgcctgataagaaaacttatcctaattaattatccatgtatatttaagtgtaattaaatgaatgacatactaatcttccactcagcattctacaaaaatgattgtcaatattattcaaaacagttgttaaatttatatgtttttttacatcttgaaaagatgattcagtatacattagtattaatatgttagaaatagtgaaatttcattaatataacaaaaaacatttacacaaacattataatttttttttcatattgcaaaacttgatctgcgttgagtttgctttctttcaaaattcataatctcagaagaaaactacattaggtctctcttccccctagagccgctactccctctcactttttcactttttgacctctctgttttcgcatcaacaaagtgatgatatttcactaatcaatcaaacagagagactcaacttatttgactatataatgtttgacaaaccctaacggatcttttctcttttctttcttacaccatctcgtgcttctcccaatccaatcactgccccctctctctctctctctttggggaattcttacttccatgacctctctgcctctctctaatcttaaatgttctcttcttttttctgtaggagtttcctttttagtatactgaatcttaccttttccccatttaagttttaacctttttgctatatttagtaaacaagattttgtcatagggtttagggtttaacaatagacttcatacgaaaactttctgactttatatttttccttttcttaaaaaacacacactaactttaacctcaaattcaacagtcatcaagatttttctcggattctaatcaaacgtccacaggtgaaaatg

SEQ ID NO: 3463 - DNA, 3000 bp, Unknown; identical to SEQ ID NO: 3446
  misc_feature (1)..( 3000): cDNA_ID_1820835_gDNA_ID_1620647_Annot_ID_47626 3000 nt of promoter + ATG

SEQ ID NO: 3464 - DNA, 3000 bp, Unknown; identical to SEQ ID NO: 3444
  misc_feature (1)..( 3000): cDNA_ID_1807006_gDNA_ID_1620647_Annot_ID_47632 3000 nt of promoter + ATG

SEQ ID NO: 3465 - DNA, 3000 bp, Unknown; identical to SEQ ID NO: 3458
  misc_feature (1)..( 3000): cDNA_ID_1820817_gDNA_ID_1620647_Annot_ID_47633 3000 nt of promoter + ATG

SEQ ID NO: 3466 - DNA, 3000 bp, Unknown; identical to SEQ ID NO: 3457
  misc_feature (1)..( 3000): cDNA_ID_1820809_gDNA_ID_1620647_Annot_ID_47635 3000 nt of promoter + ATG

SEQ ID NO: 3467 - DNA, 3000 bp, Unknown; identical to SEQ ID NO: 3456
  misc_feature (1)..( 3000): cDNA_ID_1820805_gDNA_ID_1620647_Annot_ID_47637 3000 nt of promoter + ATG

SEQ ID NO: 3468 - DNA, 3000 bp, Unknown
  misc_feature (1)..( 3000): cDNA_ID_1820801_gDNA_ID_1620647_Annot_ID_47639 3000 nt of promoter + ATG
aagaagttcaaacatacaaaaacgtaggctctagacctttcttttgacagaaccaagtaagggaccatgcgaattggtttggatgtcttttcttacaaactctcatatataattgaacataaaagctgcctattgtaagatcaaagatgtatgattatggaccaagtaaaggtaacatatgtaattttcagaagaggaaaaaaacttaatactttatttaactcgcgcgcggtccgtttcagcgggtatccatcaactactataagccctagtagcacccattgaaacaatgctaagggcaagagggaaacatacacaaagaacagaatctgaatcacaataaatgaagtaagaatccgatcagatagatatgtatttaggaaaaaaacagaagtggcatgagaaaaataaacgatagagagatgggatacgtatgcggcatagggatcacaaattctctcaccctagtgacactttgagaggaacaagacacatatttagacatacatatgagactgtatgtatatctatatatgtgaatgtcagtgaaattggggttatgtccaacattttggtacttttcatgacttgtctcttgttttggtttcttctatataataaaatttcccaaaagggaccattacctctctgatcttcaccaccgtatcaatctgtcttgtgacatatattgatctgtgtgatgtgaactttctttttcttcgatattatcatctaatctttacatgcatcattatcacaaatatacttttcattcattagatcggattttctaagattttcttagctatatagtccagactaatcttcaacgtacgcatatatagatatatattaattatgtggtggtcaagcatatacgtccccaaacccaaacccaaaccctagaaaccctagaagataatctctgaagaataaatgcgtcgccgtcgctatcttgttgtctacaaaggaaaacggtttagaacagccgaattttatccaggtttggttcggtttggttaatgatctggtttggtccatgtttgcttctatcccattattttgttattgggctgaaaaaaactgggcttttaaaagggcatctgtttgttcgaattgaaacatataattttcccattttttctcccattaagagaagaaacaaaagataaaggtggaaatgggagtatgggacaatatattttgtctttagaatttactttttctttttttttggttttaatgttaagacagaagttacttttaactagattaaattcgtttttcgagcacctaaccaagttttaatttacaacaatgttgatagtgtgacacactataccaacacaaaacttctctcttttcacttgtccagcagaataacttatgattagttagagcattgttatttcattttagatttgttcaatgacctcctttcctctgtcttttcatacagaacgcgaaacgtaggagacgtcaaattaagcattagaaaccaatttgtttgtttttgtattgtgaaaatccaaggtttcgtatgctcctaactactttgatacgctataataaggtgatatttctcccgttccaattgcaatttcataacagtaatctaggtttatgataaaagaatttccaacttatttgatttttcttttcgaactcttcactttaacatgcgatttgttttgtttttcaaaatacatgtatagttttttatgaacaaagtaagtgtacacggtattattatatctgtcacaatggttagttggtgaacgttgggggattggataggggggtgttagtaagatttggttaatagagccaggtggcattctttgaatggttagtgggcgtcgaaggtaaagctttgtagtcaacgaagttaagtcataagatgcggcaacttgactttatcaacgaaccaatgtgtcaactaaacctcatttcatcacttcaattattgaattatagattaacacaatatcctactatagttcacgaggcctacatttgattaatccaatatcctaacgagttaaatatttaacatttaacagtcaaacaaacaatgcaacatttcttaaagtttgcctaaaatttaatttattaacataatttacattcatataagaaaatatatatagtttgtcatcaataaatatgcattgcacgatcgacttttactatggtgttctacatgttgtctacttagagtcacggaccacacaacttccaatatattccattttcaaagattcattatggtctattaaatgttcaagaataatagatacagtatgttttaacatataagttaacataaatctcataatatgaaatcagtatgttgaaaatctacatactttaattttacatctctctaaatatgatgtaatactcaatcttgaaaccaaacagacatgttagagacaaatatttaatttggatttttttaatgaaatttgatagatttcatatctaagtgtgtttggttatttaactactcaacaagaaaaaaaaaattagaaaatgggaaaatggatcttaaagaaataggaaaattgcaaattactcaactggtaactggcaaggtaccaagccaagggtttaaagtcacccgcccaaatgaagtaaactgggtcccactaacttccgattaaaatttgtaaatgacaatgagacaaaaataatacttccataattcaaaatcattattggcaataggagaattataaattgttatttatccatgattatattcttaattactctcccaaatgttctcattttggtgcaagtactctaatactccttaagatagtataataatgagatgacatgtgtgtcaaccttaatctataaatagcttcaagaacctcataactccaaacccaataatacccaatacataacattttcggtggaatcttcttttctccacacacaccaaagaaaaaaaaaacatccaaaggtttgcaaataaggaaaaagatg

SEQ ID NO: 3469 - DNA, 3000 bp, Unknown
  misc_feature (1)..( 3000): cDNA_ID_2051606_gDNA_ID_1620647_Annot_ID_47641 3000 nt of promoter + ATG
atgtactcacgtgaacctcttaatttattacttttggtttgtgttttcctccacagtttgacaagggcgataaatattttttattcacaaaataactatagataagttttagatctcagccgttgtagttcgaattaagcaaatttaaccagcagtgcactagtagttcaatcggttatctaaactttagtatagatctcagctgtctataatctatccgttaccattatctcttacaatctctaacgatatcattttttactagcaccaatattcagacagttgattgctcttcatcagtctctaaacatggccatataatccttgcgtaagtttatataacactggtctctgccctaaattttcgagggatccattttcctaaaaaagatttaattgtatagatttttgttagtgagcaagacacttgttaataatgctatgtactacatatatatgtatctttcaccaaatcagtttttcaaatttataaacataaaaagtaagaattgaacccccaaaaaaatacaagaagtaaatataactaaacttctattcttcttttttttttcttttttgttgaagaaatggtatttgtatttcttaatttgtttttctttttgcttaataacttcttttttatacattagatttttgatattgtatatatacatcaaacaagttaaataatggttttatccatattttctaaattctcctaattaactctactagagttaatatgtgtgtatatagtcacacatatacacaaacatttgtttctgctcgtggtctatatattgccttttaaaagggtcaaacatagtatagcttggatccttctttacttgtccctgatctctcctaatctctcgtcttccctctcttttgtgcttcatcgatctctatcggtcatgggttccaattttcattacacaatagatctcaatgaagatcaaaaccatcagccttttttcgcttctcttggatcctctcttcatcatcatctacaacaacaacaacaacaacaacaacattttcatcaccaagcttcttctaatccctcttctttgatgtcaccgtctctttcctactttcctttcttgataaactctcgccaagatcaagtatatgttgggtacaacaataacacttttcatgatgttcttgatacccatatctcccaacctctcgaggtataatttcaaatgaatttcatgtcaatatattaactcttgatccttatatatatggtttatattcatatggaaatttcagaccaagaactttgtatctgatggtggttcatcatcaagtgatcaaatggtgcccaagaaggagacacgactaaaattgacgataaagaagaaagataatcatcaagaccaaaccgatcttcctcaatccccaataaaagacatgacaggaactaactcgctcaagtggatatcttcgaaggtgagattaatgaagaagaaaaaggcgattattaccaccagcgacagcagcaaacaacacactaataacgaccaatcctcaaacctaagcaattcggaaagacagaatggttataacaacgattgcgtgattaggatttgctccgattgtaacacaaccaagactcctctttggagaagtggtccgagaggtcccaaggtattaatcacacgtctgttaattacacatatatgcgtaagcttttttttggttttaatgttaaaagtagatgcctaagtaatgtcatatatactcatattgattattagaagctcacgaagaatatgtctttttatagtactaattaatagcaaatgaaaagtaaatctacaaatctctaactggtaaaaacaatttcatgtagcattataagttggtttaaacagattaatctttgagatcttctaaaattcatgttacaagataattaactaaattatcatgttttttcttgttttgttattacagtctctttgtaacgcttgtggaataaggcaaaggaaggccaggcgggccgctatggccacggcaaccgcaaccgcagtctctggcgtatccccaccggtcatgaagaagaagatgcaaaacaagaacaagatatcaaatggagtttataaaatcttatctcctttgcccctaaaggtaaacacgtgtaagagaatgatcacactagaggagaccgcattagccgaggatttggagacccagagcaactccacgatgttatcatcttcagacaatatctatttcgatgatctagcattactgttgagcaaaagttcagcttatcagcaagttttccctcaagatgagaaggaggctgccattttactaatggctctatcgcacggaatggttcacgggtgattattttaagtattttaattataactcgcatgcttaagaaataaaatataaaccataccataagccctcatagctagtaatatctagattatttgatacatgaaattttgttgcggtgatatattaatttcagtcagtccaactttattataagagagtgttggggtttagtagattttgtatgaaaggcttgtattttattttttatggaacttgatatcccaacaatgtggttgttcttgttcattcgcatgttttttgtgtttctaagttttgagagttgatataagaattactttaatttgtcaagatctcgtcaagtgtttatacttgatgaaaatcttttggggatcaaaacggtttgaagtaaagatcgtactgtcgtactggtgtctgtagattgatattaaactcgaacaacatgattattgtaatataccttaactaccatataatttttttcaattctttctggatacaattgtaagaaaacagaaaaatcggaaaaatgagaaaattcaccaaaactaatggggttgttttgaaattagtttgatacttgaggattgacaaacgaattctacttttccggggaaagaattagagagcgaaacagaacaaaacaaacaaaaagtc

SEQ ID NO: 3470 - DNA, 3000 bp, Unknown
  misc_feature (1)..( 3000): cDNA_ID_1820791_gDNA_ID_1620647_Annot_ID_47643 3000 nt of promoter + ATG
cgagagttaattagttattcggcaagtcagacggaaaattatgtaaatggggaggaaaacggtattcagaatctcggaaaaactaaagagaaggaaacagatgaaaacactgaagttaaagaggacgttcttggagcaggtgtatgtgatgtaaggagcaaaaaacggaagggaaagaagaagaaaacttcatctgcagatatggaggtctttgagccatcaggatcagtagagtgtttgttgaatcagtcaaacgaaaaagacatgcaaaattttgatgggaatgctggacaagagttcgggggagaggatatgacaattaaaattgaaaaatctgcaacgagagagaaaagtggagttcagaaatctggaaaacgtaaagaaatgacaaaagataaaaatattgaatctaatcaggatgcactcgacgcagaaggtgttagtgatgatggtcacaaaagagagaagaggaagataaaaaacaaaacaaactgcgaatcagttgccaccatggatagtgagtcagtacagtctttgttgtatcaatcgaatggagaaggtgtgaaaaattatgaagggaatgctgatggggagattgccagtaaggatttggctagtaacattgaagattctgcaactaagggggaaagcgttcaagatgataaaaataccaaaaaaaggaaaaaggatagaaagggagaagttgatcaggatgccaagggagcagaaggtgttagtacggttgaggtgacaacaaagaaaagcaagaagaagaaaaatttgttagatcataaaactgacaatatggaggaggatagtataaagaaaaatgaaaaaaaggaagaagttgatcagaatgatttgggagcagaaggtgttagcaaggttgaggtcaaaacaaagaagagcaagaggaaaaaaaattctttagatcataaaactgatgatatggaggggaaggatgatgtttcattacctaggaaagatgaagaaccagaatttgacagggaaaagcttgaaacgtcattgtcaagttctgtcttaatacaaaatgataacgtagctcaaggagttatttcatcagaaactggagatgtacctagatgcacatgtaaagctcaacgtaccagaaagttggttatatttgatttaaatggaatccttgcagatattgttcagggttttacaggtacatttcttccagatggtaaagtatcatacagatcaggtaagaaagaatcaatttcaacgtcgctacttgtaagttgttttatgtttcttttactgcagagtaatttctttgtccttttatagtcttcaggaggccttttcttcctagttttctcgacttttgctttgagagatttgatgttgcgatatggtcttccagacgtgtgtgagcttcttgaactgattcaaaacccaaaatgcattgtctttgactcttcttagttaggtgtcttatacatatacgaagtttaattcctcaattaactctgtctctcctttttctcttactagtgggttggattatatgatcaacattgtcatgaaaaaccatgcgaggaatctgttgttctgttttgtaagtgatccctgcaacctctatgagctattttcttgactttgagagtagattatgagaaatgcagttcctatatgagaaggactgtattatgagaaatgcagttgagattgagattgtagaaacacagtctacaatctttgtgaactttgcatttctttgactatgagatatgtagcttacgtatgagcagaactcattctaatagttggtccaaaaaccagctagctaatgaatcttatggacacaggatcagaatatatgcactacaacgaagtttaaaactcaggagaagaaggataaacctttgttcctcaaggacctacgaagagtatgggaccatattgggacatgcatcagttgtggaaagcgaaagtatgatgagacaaacactttgctagttgacgattcacccgacaaggccttgtgtaatcctgtaagtgtactcgagcacctttgaataggcttatgcattgaatgtgtcacttttaacctcaacatccgttggtattgctcttcctctcttttagccacacactggaatcttccctagcccgtaccagtacacaaaccgtcaagattctgcattgggttagtcttaaatcactcatcattctctttcaataaaatggtaagcataatagcacactgatgttttatttcttgagacagggcctgagggtgagctaaggaagtatctagaaagattagcggatgcggagaacgttcagaagtttgtagcggagaatccattcggtcaaactgccataactgagacacacgagtcatgggagttttactctaaggccgtcgaagcacataagtaattcctcaacaggagtttttactgttatgtaaatgctgtcgactctctagagctcacaacaagcaagtgttgatgcacacacagatgaagttcctgttggaagtgtaattcagctcactttacatcttaattgatattgtatctcgtgtttcgaagagaccagcgtcgatacatttttagattcagatttgtaatttgtcgttgattgtttactcgttcaaaaatacattatcaattcagagtctaatcgtcacatttaaaaaggaacctaacttcgaatcttcaagacaaataaaataaagcgaaagcagaaattaaaattaaaatcatactaattaattaacttccactaattaatggagaataatatttgcataacttggaggagaaggtgagaatcagacagaaaccaagtcttttgattgatcacaaaagaacaattcgttttttcgctctctcaattttaatatcttcttcttcttcttccttcattgagcttcagcttcaactgtacaaagattggtaaaaggagaagaagaagatccattaaaccgtatctatcttttctctctccacttctatttccatg

SEQ ID NO: 3471 - DNA, 678 bp, Unknown
  misc_feature (1)..( 678): cDNA_ID_1820787_gDNA_ID_1620647_Annot_ID_47644 3000 nt of promoter + ATG
ttcgccgcgcctcttcgtctccttcacagagatactcttcgtcaatttgaaaacttccaggtaatctcatctttttcttcttcttcttctccttctatttgtattaagcgtagcctgagaaatctcctggtcggttttgagacagtgccctgtgctctaatttcggttgataccttgacatgtccgtctcttcttcgagggtgatttttgtttttcaaattcagatttaagatgtgacccagttactaaaacttctggttttaaggttgccatcatttatgtggaatatcctcagctcgattgaatctggcagtttttcgtttttctcttgttaatggtttttgttaagaagcgttttggtgttttagtgaataagaacactgccaatcatcatttcacgaacaatggtattagaaagtgcataattttctggatggctgcttctttggttggaattgtttgattcacatttaatacatagtctctattgctcagtttccaatcacttaagagctccgtgttgggttttctagagctaccgtttgatggatttatgtgaggcatcttaatttatccgttctttgtgaatcatcacttcacttgtgctaaacttgagaaaacgtttcccttgatagttttgaactgcagctgatttccgactaaattaaaggagtaatg

SEQ ID NO: 3472 - DNA, 3000 bp, Unknown
  misc_feature (1)..( 3000): cDNA_ID_1820979_gDNA_ID_1620648_Annot_ID_47645 3000 nt of promoter + ATG
atataacgaacgatataaaaagtatataagaattggtcaacggaaatggttgttaatttctctacaattgtgacacatcagtgtaagtaatgtgaacacttgatagcatacagtgatagaaacactccttttcaggtttcgaatttagagcaaataagactttagttatgaaagaaactggtccaggtagagggtatcgtcgatatgaggaatcgtctccataaacccatatttagtatcctggaccttcatgcatgtcacgtgccgcatggctctacttccacacaacaattttgtttgattttgatcttttaatatatatcgaagtattactgttaattaggatcgaaattttatagatcatcatcatataatcaaatccgacaagaagaatggattaggccgatgtttttggcatcaagttatttcaggaacacaagtgtttaagtggtccgttcaacagcgaattatattattttcaaagtttggtgggtcttgatcaaatctcaatgattaaatctagtaaacttaactacatacgaagactcgataagaattgtaatgtatgtgtgaaattttaggtagttagttcttggtcaatacagtcaaatcaccgcatcaaaacattcacatgaatagatttgacgttttcttgtcttcgaatagtatttgactaaacagtaatcagaaaagagaaaagaaacaatgattaagaaccgcgtggataataaagttatgagatgctctcactcatatgaaattatgaattgagtttggtttgacatcaaaactttaaaaatcaaatttagaaaccatcaacttagattcactaggcatttaagtaccctaaaatacatccgtagagtttaatctcgattttttttttttaagttgattgttgaccaacaacattacaaaattaataagtgacctagacgtcttagattttatatatatatatatatatatatagatatatatatatcaaaaatacgacgaataaacaacaaatgagtacacttctcgagaatgacctactatttggatttatgtgatacggtgtcgtatagtgtctttattttttaattaagctaatagtttgataaaagttttaagataaaaaaataaaaaattataaacatgtccgctctggccactggtgcggctcgcctagacgtattagatttgttaaattcaactaatgagctacaaaaattaagttattacttgtataagatggggttttggataacctaattatcataatttatctatctggtttattattccttgagatttatccttttgtcgaaagagattattccaaatctaaagtttaatgaaataggtttattggaacttggagctgtgataaataatacgtgtcgttgtgaattcaattatttaaattcaagtttttggacggtgttctgctggttcattgtctttatacgttggttattaccaacatttaagtctatatattcaatcatattgaataaaataacgaacaaaactaacaaatgaaactatatacagttacataaatggttcctgttacgtaatttgttttttctaaaaatcaattttaattatgtaaactcctctcctatatgaaagaatacaagctaagtaccaacagtagttgttgttgctctaaaacatatacaaaagtataaatagagcatatttacacacgtaaattgtcacttctccatagtatacttttatatatatgtgtttcggtgcggcacatggaacataaagaaacaaccaaaatcttctgaaacatagggaatgtgcaaagttaatttgtaaacatacaataattagaatactaagataaaattttagtcctaatttagtcttagcagtagtatgtcagtatctttttgttatgtcctaaaatgttagatacctccaaatcttcatatatatacatgttaaccacattattcaaatcttgaagatattagttattattttcataaaaaatttaaccacaatattcagatcgtgaagatatagttatatatatacagacaaaagacacccatcttttttacctaggaaaataaatcataccactttgttagacgtgctttaaactagagccgtttgaaattaatctttttacataattgaccactatatatatacacgtgaagcatccaaatactccacatatatgtgtgaatcagtgcatgccatgtacgttaaaaagctgttataaaaaacaggtgtaagaagatatggaaataaagtgacaaaaaacacattaaataaaagagagaaacatagagataaaaatggaccgactcaagacaagagaattgaagcagagtgcacacacatactcagtaataggccgctgctacggtctctgaataaaggagatcatcttcgcagttcactctcgttcatttattatgtttccttatctcttactgatcacattcaattccaaccatacaaaaagtttttttcaccccgataattttgactgcgcgataaaattaattacaactactatctaatctcgtctttaatacagtactaatatcaactaatagaacaatttcgactgtaacaagctacaccaatgattcggagcttgagttaataaaggcaaaaaagaattacaattacatttgtagactcgtagggtgattcagtctctagaccaaaagccaagcagtaacttttaaaataatttacagttttttagagaacattttttgtttttcatttatcttcagaaaaatcttgataatcccaataatcaatctttacaatacaactttaattgtgaaataaacaaaagtaggccacttttattaaaaaaaactcaaaccccaccattttctcttgttcttctttatctatctctatctctccactctctgtcttacattaaaacctcaaaaacatttcctttcctctcatcaatctaaagttgaagtcactacgaagaaatagtaagtaaagaagttgaagatg

SEQ ID NO: 3473 - DNA, 3000 bp, Unknown
  misc_feature (1)..( 3000): cDNA_ID_1820975_gDNA_ID_1620648_Annot_ID_47646 3000 nt of promoter + ATG
tgatcatttttttaagattttggcttctggattctaaaggtattgactttgatcttgtttttgcagaccgctagggttattgagaatgcggaaggaagtcgaaccacaccatcggttgttgctatgaaccaaaaaggggaactccttgttggaacaccggctaaacgtcaggccgtgaccaatccaacaaacacgattttcggttctaaacgtttgattgggagacgttttgatgatccacagactcagaaggagatgaaaatggttccttacaagattgttaaggcacctaacggtgatgcttgggtcgaagccaatggacaaaagttttctcccagtcagattggagctaatgtcctcactaaaatgaaggaaacagctgaagcttacctcgggaaatctatcaacaaagctgttgttaccgttccagcttatttcaatgatgcacagagacaagccactaaggatgctgggaaaatcgctggtcttgatgtccagaggatcatcaacgaacctacagctgctgcactatcatatggtatgaacaacaaggaaggtgtcattgcagtgtttgatcttggaggtggaacctttgatgtttctatcttggaaatctcaagtggtgtttttgaggtagtcccttgtttcttcttctgctatgttatttttttttgaattgccttttctcttttgtgggtatatgattatttttctcttatcaggttaaagcaacaaatggagatacctttttgggaggagaagactttgacaacaccttgttggagtacttggttaatgagttcaaaagatcagataatattgatctgactaaagacaaccttgccctccagaggctgagagaagctgcagagaaggccaagattgagctctcatcgacaactcagaccgaaatcaacctgcctttcattacagcggatgcttcaggagctaagcacttgaacatcaccttaactaggtcaaagtttgaaggtttggtgggcaagttgattgagagaacaagatccccgtgccaaaactgcctgaaggatgctggagtcacaattaaggaagttgatgaggttcttcttgttggtggaatgacccgtgttcccaaagtgcaagagatagtttctgagatctttgggaagagtccttgtaaaggtgttaacccggatgaagcggttgccatgggagcagccattcaaggtggtatcctccgtggtgatgtgaaggatttgcttcttttggacgtggttcctctctcattgggtattgaaacattgggtgcagtcttcaccaagttgattccacgaaacaccactattcccacaaagaagtctcaggtaatgaatcttgacagagtacaatatcagagtgcgtctgaaaactgttgctgacttttatttttgtcattgtgatttggttcttaggttttctccacagctgctgacaaccagatgcaagtgggaatcaaagttcttcagggagaacgtgaaatggcggctgacaacaaagtgcttggagaattcgaccttgttggcatcccaccggcacctagaggaatgccacagatcgaagttacattcgacattgatgcaaatggtattactactgtctcagcgaaagacaaagcaacaggtaaagagcagaatatcacaatcagatcttcaggtggtctctcagacgatgagattaacagaatggtgaaagaagctgagcttaacgcacagaaggatcaagagaagaagcaacttatcgaccttaggaacagtgctgatacaacaatttacagtgtagagaagagcttgagtgaatacagagagaagattccagctgagattgcctctgagatcgaaactgcagtgtctgatctcaggactgctatggctggtgaggatgtcgaggacatcaaggctaaggtcgaagctgcaaacaaggcagtgtcgaagatcggagaacacatgtctaagggatctggatcatctggttccgatggaagctctggtgagggtacaagtgggactgagcagacgcctgaagctgaattcgaggaggccagtggttcaaggaagtgaggttgccgctaaccggttccatacagaaatcaggtttttcccaaaataagtttacatgcttatctcctccctcacaaatttgattagttttgtgtatttaaaaccttatttgagaggtatcatctcttcgaaacctattgagagtcccggatgtagtttgtttgattggttattttcatgaagtttacggttattatcttgaccggttaaatgagtcaatttcacataagattatgaccttttaagtttggtttatggatgaagaatggcgataattgaattgttttgtaacccttggaactttgaaagtaaaacagtttataggaaaatctgggctttgtcggtttttgtagtgcaaagaagcttgatgaaaaagacttggtcatgttgttggcgttgtcgttgtaaggcctcaaattcaattacttgtggaacttacctttgtccatgaacggagacaaagttagcgaaaatgtcagcaaattatggacatgcattttgttcctcgaaggtcgataatcttatgatctcacgcaatttccacctttttaaaattgttggaacgcatattcaaatgttgattaagaaaattaaattataacgacatagaagaaacagttccatacttaaagattttaaacttttttttaattcctcctggtcagaggggtaatatcgtaattttctaaaggcaaagaacaccgctataaatagtggctgttgaagtcgtcttctctctcaaacaaaattcaagagtcagctttatcagagaaagtttcccccattggtacagtttgattctctcttattcaaactttttcaaaagcgtgttcttttgcaagataagaagataaagaccaaaactttgggtcaattatatagacttttcattttgtattttgcaggtgaaaatttgtaagagatg

SEQ ID NO: 3474 - DNA, 3000 bp, Unknown
  misc_feature (1)..( 3000): cDNA_ID_4262366_gDNA_ID_1620648_Annot_ID_47647 3000 nt of promoter + ATG
cgtcgatcactacgaggtaacgataacaataaacgaacgaaacattcatctaaaagttagactcatttcaagaagaccttataatattgtttttgaacagggagcaccattaacggagtacacattgagattgataggatcggacgtagaacattacataaggaagatgttgttcgatggagaaatacaatacaatatggatgcaagagttcttaatttcagtatgggaaagcctcgtgtacaattcaataccagtaacattgaaggtggtggagatggtcagcctcaagaggacgcttagtgaaacaaactctattttataatcatgtaatgggaatataaatatattgtagtatgctttttaattttgtctatcacaaagtaacatatgtatatatcatgacatatgctataattatttttgtaataatcaatcttaagtttctttgtcttttcttgttaatgtaaggtcttaaggtcatgtgaatatgtaatgtcaaagaaactcaattctggtcttgctcattcatgttccttactccttgcctctttttaaaaagatttcaaactgatgcaaaacttgttagttttaacatttttacccaaaaagttatattaagtttttgaatttgtcaacgtttactaattatttacaattaaaaccctgttcttcttatcctctggtgtttctcgttgttcgtcaccaagacgaactttgtgagggagaaaaaatggcgaatttactggaaacatcaatctttttctcctctgctgataaattactgtctttcccgcctaagaattctcaaacccatcatctccctttctctgctttcatcaatggaggaagaaagatacgcaaaagctcaactatcacctttgctaccgacactgtcacttacaatggcactacaagtaagctcataaaccctaaatctctaatctttctgtctaattaccaataaattctatttctttagattccaatttgtattaattgtcaccattagataagctaaacccttttcatagactaggattcgtctagttagagaagctttttttattgaagatagaaattttgtgtttaggtgcggaagtaaaaagctctgttgaggatccaatggaagttgaggttgctgaaggttacactatggctcagttttgtgacaagattattgatctcttcttgaatgagaaacctaaagttaaacaatggaagacgtatttggttttaagagatgaatggaacaagtacagtgttaatttctataagcgttgcagaatccgagctgataccgaaactgatcctatattgaagcagaaactggtatctttggaaagtaaagtcaagaaggtatttatagtgttgtattttgtgtttattagtgaactcaggttagtttattgttgttgttgtgtacttataggagtgagtattgttgcagatagataaggaaatggagaaacacaatgaccttttgaaggagattcaagaaaacccaacagacataaacgcaatcgctgccaagagacgcagagactttacgggagagtttttccgctatgttactttgttatcagaaactcttgatggcttggaagaccgagatggtacttaaaacattaatcatgttgcttacttattgattcccacagtttcatgattgttttgttatttttgagcagctgttgcgaggcttgcaactagatgtttatctgctgtgagtgcttatgacaacacgttggagagtgttgagactctagatactgctcaagcaaagtttgaagatattttaaactctccatccgtggattctgcttgcgaaaagatcagaagtttagccaaggcaaaggagcttgattcctcattgatcttattgatcaacagtgcatacgctgctgcaaaagagtctcaaactgttacgaacgaggtaatagccattggattacaatcttctttaatattcttcacaatcttctcaaatcgatatcgtattttttgaacaggctaaagacataatgtatcatttatacaaagctacaaagagcagtcttagaagcatcacaccgaaagagatcaaacttttaaagtacttactcaacataacagaccccgaagaacgattctctgccctagctacagcattctctcctggtgatgaccacgaagctaaggaccctaaagcattatacacgtaagtaacataaagatgcacactttagtgtttcatctttaaccacaaccattgattctaaccaagctgatgacacaggacgccaaaggagctgcataagtggataaagataatgcttgatgcttaccatctcaacaaagaagaaacagacattaaagaagctaaacagatgagccaacctatcgttattcagcggcttttcattctcaaggacactatcgaagacgagtatttagacaagaaaacaatcgtggctgatgaaactccaaagaaggaagaagaagatacgactattgaagattttttgaactgaaaattgtgaaatccatgaacacactctgtttacaattagtaccttttatgtaatggggaaaagagtaattttgtagaattctcagctataattgcaattacgactaaatgtgaggtctaatttgtaattaatatttttggcaaaggtcgggcctggctatgagatcaataagcccatgtagggtccaggttagtaagaaaagtcaacataatacttgtagcccacgaatatttttgattggtattcctatattaccccgtgtaatctatgttactttataaaaacaccataaggttataacagtcattttgagtttaatcaacctttattataaggccttaaaccctacgcgtaagcagcagccaaaacatttcttgttcatctctccgaccttaaaccctccgatccaaaaatctccaccgactctaatccaatcaaatggcctccgtcgcgcttctacggtcttttcgtcgccgtgaagtccaaatg

SEQ ID NO: 3475 - DNA, 3000 bp, Unknown
  misc_feature (1)..( 3000): cDNA_ID_1820955_gDNA_ID_1620648_Annot_ID_163329 3000 nt of promoter + ATG
taaaaaataatttactgacgcaggtagacgataagtacatgtactcggtggaaaacaaagacaacaaagtacacggttggatatcgtcggaccaacgtatcggtttctggatgatcacgcccagcgacgagttccatgcatgtgggccgatcaaacaagatctcacttctcatgtgggccccaccactctttcggtgagtacatacattctttttcaaaaaaaaaaaaaaaaaaaccaatttctagttttaattgtaaaatgttactaaaaatttaaaataacagaaatgtgatatatggtttggatgattgtgggtgtggcatgattgattcgatgtactattgattttattgagtctacattgtgtatttctgtttatctcttattcaattctaagaatattgtgtgttttagatgtttacaagtgtacattacgcgggaaaagatatgaacacaaattataaaagcaaggaaccgtggaagaaggtgtttggtcctgtctttgtttatctcaattctgcttcttctcgtaatcttctctggaccgatgctaaacgacaggtcttttacctatcaatgaccccattctttcattcgctttaatatcatcatcattattgtttacgtaaaactaaaatgttttagaaactatatatatatatgtagatggtttccgaggtccaaagctggccttatgatttcgtgaaatctgtagattaccctcttcatcaccaaagaggaacagtcaagggtcaattatttgtcatagacaggtaaataaatctatcattttcttagaaaggtttacttacaattacatgcaattgtatatcgtcaaaataatgtttttcaatccatatgtgagttattacaaaatgttgcagatacatcaaaaacgtgacgtacttattcgggcaatttgcttttgtgggattagcattacctggtgaagctggttcttggcaaaccgaaaacaaggtagtacactactactatatttgaaatttgtaaatatataccattacattgccatgacaggtacatgcaaaagagagtgatttttgtcatgagatttgtaaaacaaatttactgttactttcatgctacacaatatatatcgtccgtttaggtgatcgaaagtactcatttgctccgatttaaagattgatctatgaattgactatgcggatgaagtaacgatcttttttgccaaatggactaaactaacggcttttaataatcttttacaataaaatctggacaaagggatatcaattttggacacgagcagacaaaatgggaatgttcacaatagcgaatgtgagaccagggacgtatagtctctacgcatgggtttctggatttatcggtgactataaatatgtgcgtgacattaccatcacaccaggtacgtttcttttatttatatcacatcttttagtataaacattacacaacatgaaatgtgtgttccgtgtcccgttgatccaactacagacgcattaatggccattatttggtccatatgtttttatgtaagggttataattgttatgtgccacagctgaagatgtaataaggcccattactaggcctaagtatcgtggtgcatataattatgtatgtgtttggtttggccgataggtagggagatagacgttggacacatagtgtacgtgccaccgagaaacggcccaacactgtgggagatcggacaaccggaccgaaccgcggcagaattctatatcccagatccggacccaacccttttcaccaaactttatctaaattactcaaatcctcaagataggtaacatattaagcatctaattaaatattatttacaatatacttttattttaatatactaaatggtgttttatttaatttatgtaataatacagatttagacagtatggtctatgggatcgttacagtgttttgtatcctcgaaacgatcttgtttttactgctggagtgagtgactataaaaaagactggttctatgcccatgtcaacaggtaataatttttatttttatttttttgatgattcaaagtgttgttgtataaatcactgatctctctcgatacaaaaactatatattttataatatataggaaagctggaaatgggacatataaagcaacgacatggcaaattaagtttaatttgaaagcagtgattcaaactagaatatacacacttcgaatagctttggctgcagcctcaacaattgatctactggtttgggtcaacgaagttgattccaaacctctattcataactgggctaatcggtcgggataacgcgatcgcgaggcatgggattcatgggttgtacaaattgtacaatatcgatgttcatggaaagttacttagggttggtaataatactatttttcttactcatggtcggaactctgattctttttcaggtgtaatgtatgattatcttcgtttggaaggtccttccggagtttgataaactaaatacatatattaatgtgtaagtaataggagggattatatattttaattagtagtcaaaagtctaaaatatatatagaaaaaaattgtttgacaattaaatttgttacttatttggcctattttagtttttcttttgttattaatgtaaaactaatcattcgataagttcatcaagttcttcatactttagagtatttttaattaaaaacaaaaaagtggccaaaactgatttataaagcatatagttatatcaaatagtacaataatcacgatgcatgatatatttgttagtatatgaacattataagtaatatgtttatgttaaatatgttaagaaaaaatacatatatgtaagtcaacttctgattggtatgagagacctaaagtcaaaacgatatttctcaaacgaaacgtcagcgtttagccccatttatgttctcactcttttctatataaaaagaaaggtactctagctcgcttaattgttcgaaacaaagggagtgagag

SEQ ID NO: 3476 - DNA, 3000 bp, Unknown
  misc_feature (1)..( 3000): cDNA_ID_2156699_gDNA_ID_1620648_Annot_ID_163328 3000 nt of promoter + ATG
aaagttaacaatacaagcttaggatttaattttggtttttggatataggattttgatattatattttaattaaatttcttacggtttaatagaaaaaaagcggtcactgaaaatgaagaatatgagcacgaaaaatttatagaagttttgaaattcctttattaaaattcctagaatttttttactaaaaaaaaaaaaaaaaaaatcagaccaagcgtcacacacactgaaccaacgtatcaataggtaattgttgttagctttaatatataataaaccatagtcaataatgtgcatttaataaacaaagcagtcgagatcaacggtaacactagttgaaaatgtcatcatagctcactatattttgaattttcatttttatataatgattcatttttcgttacatgtagttcttaaagtaatccgggggatatcagagcatgatttaaagcggtagtgtgttgcataattggggtatagctaaaaaaggaattgaccattaattttactaaagagtggccaaaatttatttgccatttacaatcaaataatttaattataagatccattattcgttacaatagatgccctctatattatgcgtatgtatgtacgaatctaattttattgatatttgcaaagatgtttatggacttgtgccatgattcgatgatcagttcgtaagaccttccttattattctgatggcccaaaccagaagcccactaaacaaagagtttttttttttttttttttgaccgcgaaccattatataacgaggcttaaaccattagattcagattctactagtactgacgtctccattaattgatcaaacatttggtaacttcttcctacattagaggcgtttattggttcatggattttaatggatttaaatattttctaaaaagttttaaaattatgcggattttatttatttaaaatcaaattaaatggatttgaaaatcatacaacatggatttcaaaatctaacatctagataacttttatgataaaacaaaaaaatagcatataaaaataagaaataatctctagtattgctggttttttggatgctttgttctaattatgttaaagacattgttgggaatttttttgctgtatcccacgcttacagactactacaactaccatccttgaatctctctcttctcttagctatttattattaaaaaaataaagttgctctacgagacacatgcattctaaaaaatagaaaatgttgatattgtcatttctttgcaaatccacccaaaaataacgtggtggaactagggattttcacctctttattgttaagaaaaatatattttcaaatccattcaaatttattgtgaaatcaaatccatacccaaatctccaatattgaataaatgatgattttaactaatatttaaaaatcatagaaccaataacacatgatttttgtaaagattctaaaatcaatgattgattaacacatgatttacttgaattttcaaattcattataatatatgggccaataaacccccttcaattatctaatggcaactttattctaataggaatatttgcacctaatgacacttaaagaacattagttatcaatgtaaacactttttgatttttaaagtgtatatttttaaagttacatttatttatgtatattatttaatgataattaaaattgaggtcaactcatcctaacttaatcaaattaaatgtaatctttatatttttaaattgtttaatattttcctacacattaatatattatttaaaatatatcaatactacctttttttgtctaaaatatcaatattacctctctttagtatattactaagataattgttttctgaattgaattcaaatttattgcatttgactgaataaaaagttctgtaccttttctttgatgaaacatcttaaaattcttaaagtcaaatttcaaaggctttgaactcaaatacattattacttattagcaatgatttggtaggttcatcatgtccattaaaacttaattaataatcttttctcttaaattacataactatttaatacgaaatttcctatttggaatatgcatttctcttaataatgtgacatatgtggttcttatcaataaaaaccaaggagtctttaattcaaaacacacataaactctattagtcaaaagttattatggagttatcccttataaatatgatattatatataaacacggaatttcttacatgtgtaggaaaagtagataagagatttaaagtaacttgattttaaaagaccctatattttcagaatcaggtcgtcttaatgtcaaatagtgtaatttgacccaaataaaaataaatcatgaagcacattgaagtttcgaaaaagatgatgtaaaatttggaaaattaagataatctgaacctagtttatacacatcaaaaaaatctgaacctagtttattaacttaccccccatttcacaaaattaaaaggaataatatttgaggaaaattaattttatttatcatatatatatatatatgataccacaaatacaaatataaatgaatacatacctcctccgcctttgtactgatcgagcataaaaggttatgatctcttcttcttcatttttgttaataagatggtaagatacaatattttacgagagatataactttcttcagtggagagagctcctcttatccgaggaatcaaagctgcaaaggaatccaacaaaggagaagataaaccgttaaagtgtctaagtcaacgtaagtgtttatatatatatatatgattttttttgtagtgttatatattgaacgtgtaaggaggttatatagacattaacgtatagatctagatctacgacactgtcttcgctgattacagtttatacaagaggtttgacgtaatcggtctatagaccatgtctaaactaatttcagtttctgttttattttttgtcggaggtttagcgaattggccaaggag

SEQ ID NO: 3477 - DNA, 3000 bp, Unknown
  misc_feature (1)..( 3000): cDNA_ID_3071266_gDNA_ID_1620648_Annot_ID_163327 3000 nt of promoter + ATG
agggtaatctacagatttcacgaaatcataaggccagctttggacctcggaaaccatctacatatatatatatagtttctaaaacattttagttttacgtaaacaataatgatgatgatattaaagcgaatgaaagaatggggtcattgataggtaaaagacctgtcgtttagcatcggtccagagaagattacgagaagaagcagaattgagataaacaaagacaggaccaaacaccttcttccacggttccttgcttttataatttgtgttcatatcttttcccgcgtaatgtacacttgtaaacatctaaaacacacaatattcttagaattgaataagagataaacagaaatacacaatgtagactcaataaaatcaatagtacatcgaatcaatcatgccacacccacaatcatccaaaccatatatcacatttctgttattttaaatttttagtaacattttacaattaaaactagaaattggtttttttttttttttttttgaaaaagaatgtatgtactcaccgaaagagtggtggggcccacatgagaagtgagatcttgtttgatcggcccacatgcatggaactcgtcgctgggcgtgatcatccagaaaccgatacgttggtccgacgatatccaaccgtgtactttgttgtctttgttttccaccgagtacatgtacttatcgtctacctgcgtcagtaaattattttttaccctttttaacttcaacggtattattactttttttttccagaaatagaacttttcttaaatggacccctaaatgggcttaaagaggaatccacagtcgagtgattttgatttgactttgataattatgatgaatttttttattttatttttccaacaattatgatgaaattttgagtgtctttttttggtagtccggtttcatatgaagtataaccggtgtaaaacaaaactcatatgattcgtatacgaatgtttttcagtggtggatcaatattttatcgtatatgaataaaattatatgtaatacctgccctttaagcatatgattttgtggatttatcaaatgaacagcttctttgtaagccaatggactggcacgacctttggtaatgtctcgatctgtatcaaaaggcattattttttgccgattatcggaaacagccatgaaatcgaatctgcaaacaaaataaaaattttattttctcaattataataacaatagttaaaaatatgataaacacacaataattactttgttgtgttaagcttgaagacgattctgatttggtccatgtccacgtcaggccaacctattaacctctccaatacagcgtacatgtatattccggatacacctcttcgaataatatatctttaaagaaacattctcgattatatgataatctatatgatttaacttctccaataaaaaagaaaagaaaataagtagtgactactcttttttttcggcaaattgacgtaccgtttgtctacgtttaatgggattcctgagccccgttgagagaacgttctcgaaaatgaaatttcaatttgttcacttgtttgatttacaatatcgaattttgttcctactaaactgttagaacataaaattaatataaaaaaataaaaataaatatttagtaggtatgattatgaaatatatatatatatatatatatatatatgaacgaaaagatacaaagagagatttgaaaactcactaatcagttgacgatacttgtcctggtttgtaccatactacgtcccagtacctatgtataatgataattttatatgacgaaactcatgtttatgatacttttctcatcacatgctatataagttaaggtataagtactgtacccccgattttcaatttggtcgttcaacacattgtttaagccattgtacttgattctagttattaatccttgtggactcgagaaggtaacatcgatgataccgttatcaacgaccaccttaaattaacaacaacaacacaagcatgcatatctcatatataagttaacaatattcttggaccggaatattttaatatataaaagaatataacgttatacgtatagacatttgaaccgtacttggttatcaccaactttcttaagcgtaaccgggggagatgcaagtttatgtcccgcttttgcgatgttgaatttgtttctgtaataagaagaattacaaattaagagagagagaaaaaaaaaaaaatgttcacttgaattgacctatgtgtagatattcatctgtgtgatagatacaaactggaaataaatctaatatgtttaacatttacattttaaaatttaaaattttaaaataatacgtacaggatcgtggcataggaccaattcaataaacacaaatattgcgaggaaaaaaaaaaagattttatttcttttaagtttcaacaatcttttacacatattttgtaaagctcgattcagtgaaaatacatagaagttaagagcacataccgtgatgtttgagaatgaacaccttgaagaaggaaaactagaacgaaaagtggagttagaacccggcgaccagccttcattcccggagctccgtattccatctccttggccaattcgctaaacctccgacaaaaaataaaacagaaactgaaattagtttagacatggtctatagaccgattacgtcaaacctcttgtataaactgtaatcagcgaagacagtgtcgtagatctagatctatacgttaatgtctatataacctccttacacgttcaatatataacactacaaaaaaaatcatatatatatatataaacacttacgttgacttagacactttaacggtttatcttctcctttgttggattcctttgcagctttgattcctcggataagaggagctctctccactgaagaaagttatatctctcgtaaaatattgtatcttaccatcttattaacaaaaatgaagaagaagagatcataaccttttatg

SEQ ID NO: 3478 - DNA, 3000 bp, Unknown
  misc_feature (1)..( 3000): cDNA_ID_1820967_gDNA_ID_1620648_Annot_ID_163325 3000 nt of promoter + ATG
attttgtatagctcatttcattatgatattgaacgcgagttgctttgagtagaaatcaagcattaagccatcgaaagtaacagacgttatatagttatttgatattaaatttcttgccatatttggaaacttacgacaaaacaattaatatgatgaatctccgcaactccaagtccctgtctgacacgtgtacttgatatcgtttaaaatcatttattaattgacacaaaaataatttattcatttgtatttctaccgaaagccatatggactaatatatgttgtactagattaatactgtatgtttttgttcaatccattctcttacttttttgggtaaatatcttttggacagatctaattaatatagtataagttttcctatgaccataataaagggccagaatatttttaattttcttttaatcacctctaaaagatactaattaaattaagtaaagcagcatataaagcaagagggttttgtcagagaaacacagtcctgtgatgcgcccattcactattttcacatgacatttgaaataagacttaagaataaattataaataatgtacggacatgttaaaaaggaaatattattgataatggaaatttacctaactcacactaagtttaatattatttcactcctttttatctaaacaattccattaagtttccactatctcccgtaataaacaaactataaaaaagaatcagtgattaaagttgtatatatgacacacatttaagctatatctatatattctcttaacctaggaactttataagaacttctctctatttcattggtttgataaaatcatacacacaaatactaattttggactagaaatttagtacttttctatgtattaaatctacccaaaaatgtctcaaactgagaggtgagtgtgtatgtgtgtgtgtgcatatgcatatatatacttagtttattcctcgaatagattgttgactcttggctcaaccttcctctctctctatttctacctttctctttctccttattcgttcatcttcatattcccttcccttttgggcttggtaagatctacaaaaaaaaaaaccctaaaaaagagaagaaccagaggagattcaattagaggataaaattgatgggaagagggaagattgtgatccaaaggatcgatgattcaacgagtagacaagtcactttctccaaacgaagaaagggccttatcaagaaagccaaagagctagctattctctgtgatgccgaggtcggtctcatcatcttctctagcaccggaaagctctatgactttgcaagctccaggttcttcttttaaaattattcattctgaaatctttatatcttcttgattttgtggatgtacatctacggagatgttgtgtaccactgtatgcatataattttatgctacggttttgtttattagaaggcttggtgatattcactgagatatatgtagctgtgggatctattcaaatatagtggaattttttcgcatctggcggtccgtagaacatgttacattaattttcccgtatgtacaataagatgtgtcttgtatagccgacaaacagttttcttacaacaaagaaagattaaaaatgaggtagaagttttaaagaagagtaatatttttgaagctgaaaaaataatttgaagtagtttctttgcttcatatttgggtgattatatgtacccatcatcagtatgttttgaagtactttcctaacatatgtttatgtgtatggacattgacttataactaactaaggctcattgtttgcattttccaaatttagatatgtttcagaaatagatgagaaaacaagtgtgaatgcccaaacatcactattggaaagctaaaaaagaattataattggagaccacgagttagaagattggtatgtagaggacttaatttctcaaatccaataaactggaagctgatttagtttaacccactaacaaaatgatctatttatactcgtaaacataaacatgtttttgatatttatatataatcatatatattattactaaacgatcagattactctgtatatttaactttatatctgcaaaatcgttataattgtctattttctgagtaagttattctttgttaaaagtttgattaatataaaaaaaatatagagataaaaaactaattattagaaaacatatataaacatgtaattctaaatcatataatattttgattatatattttgaaaatttatataatttcatatttatcaattaaaacaaccaaataaaagagtatggtaatgcgaatttttgtttttccctattttccttgaggaattttatattagcatcaaccttaagcattattaattcttcacgtttgtcttttgataacatttctcatgtatcatagggtttacgaacctcttggtaaatgaaattacttagcatatttagtcaagtttatataccattcttaaaactaactaacaccatgttattgtttgcttggatttaaaataaagtgtgccatgctaatgcattacatttatgtcattttgtttatagcttagaactggattcctttaaagttcttgcttatctacaccctagaaataacatttaagcatttgtttttgttacttattgaaaaaagaaactaacatctacttactttatatatagtttatctagtttgtgtaacaaattcgtattactgctgagttcaagattatatacattatgtgaaatgtatgtatgtgtacatatataagcgtgtgtaaataatgttgccaatgcaggaaagtctatattgcacaaatttctaggctatgagttttttctttacgtatgaaagctttttaatggagtacttggaaaaacttcacgatcgaaaattaatatcttttacgtaatttactctaagagatgatatgatatgagtgaattatataccatgaacaaggtatactaatattaaatattttgaatagcatg

SEQ ID NO: 3479 - DNA, 3000 bp, Unknown
  misc_feature (1)..( 3000): cDNA_ID_3071268_gDNA_ID_1620648_Annot_ID_163324 3000 nt of promoter + ATG
ttttgatatttatatataatcatatatattattactaaacgatcagattactctgtatatttaactttatatctgcaaaatcgttataattgtctattttctgagtaagttattctttgttaaaagtttgattaatataaaaaaaatatagagataaaaaactaattattagaaaacatatataaacatgtaattctaaatcatataatattttgattatatattttgaaaatttatataatttcatatttatcaattaaaacaaccaaataaaagagtatggtaatgcgaatttttgtttttccctattttccttgaggaattttatattagcatcaaccttaagcattattaattcttcacgtttgtcttttgataacatttctcatgtatcatagggtttacgaacctcttggtaaatgaaattacttagcatatttagtcaagtttatataccattcttaaaactaactaacaccatgttattgtttgcttggatttaaaataaagtgtgccatgctaatgcattacatttatgtcattttgtttatagcttagaactggattcctttaaagttcttgcttatctacaccctagaaataacatttaagcatttgtttttgttacttattgaaaaaagaaactaacatctacttactttatatatagtttatctagtttgtgtaacaaattcgtattactgctgagttcaagattatatacattatgtgaaatgtatgtatgtgtacatatataagcgtgtgtaaataatgttgccaatgcaggaaagtctatattgcacaaatttctaggctatgagttttttctttacgtatgaaagctttttaatggagtacttggaaaaacttcacgatcgaaaattaatatcttttacgtaatttactctaagagatgatatgatatgagtgaattatataccatgaacaaggtatactaatattaaatattttgaatagcatgaagtcggttattgatagatacaacaagagcaagatcgagcaacaacaactattgaaccccgcatcagaagtcaaggtatacatatagatatagcgacaactctaaagatatgtgattatatattgattgatgctttagcatgatgtttgatttttgaaatgagattttggtttactgagctgttcaaagtttgatgagttatttgtgttgtgtgttacagttttggcagagagaagctgctgttctaagacaagaactgcatgctttgcaagaaaatcatcggtatcgccttgaacttttataacattttgtattaagaattagtctttgatcaaaatatagaaggcatgtaaaggaaatgaagaaacttgtagttatggattgcggtatgtttgctatgaagcaggcaaatgatgggagaacagctaaatggtttaagtgttaacgagctaaacagtcttgagaatcaaattgagataagtttgcgtggaattcgtatgagaaaggtacataaatacatatactctaccttctattatatgctttggagtgtattactcaaaagattgactatagaacacaacggaaatcaatagaacgattgcttttccggattcacaggaacaactgttgactcaagaaatccaagaactaagccaaaaggtcactatgatgagatatatatatacacacactgacacacacaaatatcccctaccaaaagttacaattctaattttgggatttttgttgatcgtggtgcagaggaatcttattcatcaggaaaacctcgatttatctaggaaagtacaacggattcatcaagaaaatgtggagctctacaagaaggtaacaaatcatgttttacaaaaactccattttctttggagtaagagcttcgaagtgatatggcttcgactttcaggcttatatggcaaacacaaacgggtttacacaccgtgaagtagctgttgcggatgatgaatcacacactcagattcggctgcaactaagccagcctgaacattccgattatgacactccaccaagagcaaacgaataacagagaggtaaacttttttaattgatcttgatgtttcacaaacatgcatgcaccatttaggcattttatatattttatgtaactcgttaaaaactttcacagattgaagttggaagataccatgatgttgaagaacactccaaaggccttggtttgaataaggttcttgaactggaaacctctatacaccaagccacgtacgataagcagcatggttcttctaacatagtcatattttcaatcctaaatataattaaagcatatataattaaaatccggtgttgttatactcatcttgagtattaatattgtacttgtttataaccatagattcgtcaattaatagagaaaaatcatatgaattattatcctcaaaactctctcaaatatcaatattcttagatcaataatttgtttaatatatataaccatgcacttggtaattctaaaatgttaaataaacattttctgttaagttttttgttttgttggttttattttgtaaattcaccataattctgttaatcttattcccccaaactaaccggtttggaaactatataaattaaattgatgtgtgataactgaatcggttatcgttgactgcactgaccagaaaccaataaaggttctgtcttaaagggaaacaaatcatcgtcgtcaccaaatcatcacaattcacaaaggttggtgtagacagggacctgagagataacgacaaagaaacaacaaatataaaataaaaatcagaagaaaatataaataaaaaaagagggaaaaaattcgaaaatttgctgcaaccaccaaaagctcagccaaaagcagaggccacaattctctcaaacaagataaacccaattttgttatttttgttctctcttctctctcgttcatgtttcaaatctgtttctagggtttcacaaaccagagatagagagaggtttagcgaaaaatg

SEQ ID NO: 3480 - DNA, 3000 bp, Unknown
  misc_feature (1)..( 3000): cDNA_ID_3071272_gDNA_ID_1620648_Annot_ID_163323 3000 nt of promoter + ATG
tcagaagtcaaggtatacatatagatatagcgacaactctaaagatatgtgattatatattgattgatgctttagcatgatgtttgatttttgaaatgagattttggtttactgagctgttcaaagtttgatgagttatttgtgttgtgtgttacagttttggcagagagaagctgctgttctaagacaagaactgcatgctttgcaagaaaatcatcggtatcgccttgaacttttataacattttgtattaagaattagtctttgatcaaaatatagaaggcatgtaaaggaaatgaagaaacttgtagttatggattgcggtatgtttgctatgaagcaggcaaatgatgggagaacagctaaatggtttaagtgttaacgagctaaacagtcttgagaatcaaattgagataagtttgcgtggaattcgtatgagaaaggtacataaatacatatactctaccttctattatatgctttggagtgtattactcaaaagattgactatagaacacaacggaaatcaatagaacgattgcttttccggattcacaggaacaactgttgactcaagaaatccaagaactaagccaaaaggtcactatgatgagatatatatatacacacactgacacacacaaatatcccctaccaaaagttacaattctaattttgggatttttgttgatcgtggtgcagaggaatcttattcatcaggaaaacctcgatttatctaggaaagtacaacggattcatcaagaaaatgtggagctctacaagaaggtaacaaatcatgttttacaaaaactccattttctttggagtaagagcttcgaagtgatatggcttcgactttcaggcttatatggcaaacacaaacgggtttacacaccgtgaagtagctgttgcggatgatgaatcacacactcagattcggctgcaactaagccagcctgaacattccgattatgacactccaccaagagcaaacgaataacagagaggtaaacttttttaattgatcttgatgtttcacaaacatgcatgcaccatttaggcattttatatattttatgtaactcgttaaaaactttcacagattgaagttggaagataccatgatgttgaagaacactccaaaggccttggtttgaataaggttcttgaactggaaacctctatacaccaagccacgtacgataagcagcatggttcttctaacatagtcatattttcaatcctaaatataattaaagcatatataattaaaatccggtgttgttatactcatcttgagtattaatattgtacttgtttataaccatagattcgtcaattaatagagaaaaatcatatgaattattatcctcaaaactctctcaaatatcaatattcttagatcaataatttgtttaatatatataaccatgcacttggtaattctaaaatgttaaataaacattttctgttaagttttttgttttgttggttttattttgtaaattcaccataattctgttaatcttattcccccaaactaaccggtttggaaactatataaattaaattgatgtgtgataactgaatcggttatcgttgactgcactgaccagaaaccaataaaggttctgtcttaaagggaaacaaatcatcgtcgtcaccaaatcatcacaattcacaaaggttggtgtagacagggacctgagagataacgacaaagaaacaacaaatataaaataaaaatcagaagaaaatataaataaaaaaagagggaaaaaattcgaaaatttgctgcaaccaccaaaagctcagccaaaagcagaggccacaattctctcaaacaagataaacccaattttgttatttttgttctctcttctctctcgttcatgtttcaaatctgtttctagggtttcacaaaccagagatagagagaggtttagcgaaaaatggcgatggccatggctcttcgaaggctttcttcttcaattgacaaacccattcgtcctcttattcgatccacttcatgttacatggtaacaaccctaaagtttcttccttttatctccgaattttataatcggattggaaattttcgattttttttttttttttttctgatttctgtttgttccgttgcagtcttctttgcccagtgaagctgttgatgagaaggaaagatctcgtgtcactgtgagtttaagcgcctttttgtatctcttgtttgtttatagttttccttgtggttgaagcaatggttttgattgttgaagttctatgtctgtttcaaattgatgtatggagttctatttttggtgtgactgaatctaatgaaacttatgtctttgtaaacgttcgtttcagtggccaaaacagcttaacgcacctttagaggaggttgatcctgagattgctgacattattgagcatgagaaagctagacaatggaaggttagtttgtctctgagattactatctcttaaatcttgttccttgattgattattataagttaggctgatgtttgtaacgcttgtgttattatagggacttgaacttattccatctgagaacttcacatctgtgtcggtgatgcaagctgttgggtctgtcatgactaacaaatacagtgaaggctatcctggtgccagatactatggaggaaatgagtatgttcaggaattttcaatctgacacatttagtttcaggacatgattgcttgaccaatctctgtaataagaattgaaatctcaagtaccttttgctttgtaggtatatagacatggcagaaaccttatgccagaagcgcgctcttgaagctttccggttagatcctgaaaagtggggaggtaaattactactttcatgtatatgagaaacaagaaatctgattagtcctttgatggcttatttgactggatcttacagtgaatgttcaacctttgtctggatctcctgccaacttccatgtgtacactgcattgttaaagcctcatg

SEQ ID NO: 3481 - DNA, 3000 bp, Unknown
  misc_feature (1)..( 3000): cDNA_ID_2156691_gDNA_ID_1620648_Annot_ID_163322 3000 nt of promoter + ATG
ttttgtatctcttgtttgtttatagttttccttgtggttgaagcaatggttttgattgttgaagttctatgtctgtttcaaattgatgtatggagttctatttttggtgtgactgaatctaatgaaacttatgtctttgtaaacgttcgtttcagtggccaaaacagcttaacgcacctttagaggaggttgatcctgagattgctgacattattgagcatgagaaagctagacaatggaaggttagtttgtctctgagattactatctcttaaatcttgttccttgattgattattataagttaggctgatgtttgtaacgcttgtgttattatagggacttgaacttattccatctgagaacttcacatctgtgtcggtgatgcaagctgttgggtctgtcatgactaacaaatacagtgaaggctatcctggtgccagatactatggaggaaatgagtatgttcaggaattttcaatctgacacatttagtttcaggacatgattgcttgaccaatctctgtaataagaattgaaatctcaagtaccttttgctttgtaggtatatagacatggcagaaaccttatgccagaagcgcgctcttgaagctttccggttagatcctgaaaagtggggaggtaaattactactttcatgtatatgagaaacaagaaatctgattagtcctttgatggcttatttgactggatcttacagtgaatgttcaacctttgtctggatctcctgccaacttccatgtgtacactgcattgttaaagcctcatgaaagaatcatggcacttgatcttcctcatggtggtcatctttctcatggttatcaggtgccttcaagttaactttgtatgtcatttcggaactctctgactctgatgaataacagtttctttcttcttatttctcatcagactgacaccaagaagatatcagctgtgtctatcttctttgaaacaatgccctatagattggacgagagcactggctacatcgactacgatcaggttcttaactcttctattaagcaatcatagtaacttataactaacccgcttcataacaatacataagtctttaattttgatttgcagatggagaaaagtgctactcttttcaggccaaaattgattgttgctggtgcaagtgcttatgctagattgtatgactatgcccgcatcagaaaggtaatttcagtctcatatccaactacagaacagattattgtaatcagtagtgagttttgattcgaactcttttcccaggtctgtaacaagcaaaaagctgtaatgctagcagatatggcacacatcagtggtttggttgctgctaatgtaatcccttcaccgttcgactatgctgatgttgtaaccaccacaactcacaagtcacttcgtggaccccgtggagccatgattttcttcagaaagggtgttaaggaaattaacaagcaagggaaagaggtaaaaaagaaaaagaagcaaaatttgaaccaaaatgttttagatttatgtataatctttcacgtcattcatttgttgtcttgaaaggttttgtatgattttgaagacaagatcaaccaagctgtcttccctggtcttcaaggtggtccacacaaccacactatcacaggactagctgttgctttgaaacaggtacggtgaggcacggaatggaactaacgttgcttattggatttgcggtttctgtaaccttcaaatggtttgaaaatgcaggcaactacttcagagtacaaagcataccaagaacaagtcctgagtaacagtgcaaagtttgctcaggtactaatcccgtgaaggaaagaaaaacacatatggcgtagtatctactttgattatatctctacattgttgtttcgtgcagactctaatggagagaggatatgaacttgtttctggtggaactgacaaccatctggttctagtgaatctaaagcccaaggtcacttgatctttttttgtatataatcttcttttatatttcttagttaaaactcattttttattcgattttgtttgcagggaattgatggatctagagttgagaaagtgttggaagctgttcacattgcatccaacaaaaacactgttcctggagatgtttctgccatggttcctggtggaatcagaatgggtaaaaatcacatttaaccatttttctttttggtattcgaatggagttcttcttgatatcctctgccattgttattttcaggtactcctgctctcacttccagaggctttgttgaggaagactttgccaaagtagctgaatacttcgacaaagctgtgacaatagctctcaaagtcaaatctgaagctcaaggtttttacttctctgatcacgatgctatgctttccgttcttatatacaatgattgaactcatttgttatgtttctaaaaccaggaaccaagttgaaggatttcgtgtcagcaatggaatcctcttcaaccatccaatccgagattgcgaaactgcgccatgaagtcgaggaattcgctaagcagttcccaacaattgggtttgagaaagaaaccatgaagtacaagaactaaactgtttcaccccacaagtgttttctgttatgctttgaattcccatggaatgtatagatgatacatgtaaaactctattttcacgctatgcgaaaaataatgatctgttaaattttctctctatacatcaaaaagaaatatacttagacaaaaaaaacacatacaacaaaacagtgaattccctaaagaagattgtctttagctcacaagtgacttaagagtaaccacaaaataccaacaaaacgagaaagggataaataagaaactagaagttgggagaggctcatccacaagctgtggtcatttctcaacctcatcaaatctctttacaagaatatggttctgtaaccggacaacatctcaaaacttgttctgttttttttttttcatttcttagacagaaaaatg

SEQ ID NO: 3482 - DNA, 3000 bp, Unknown
  misc_feature (1)..( 3000): cDNA_ID_1808991_gDNA_ID_1620648_Annot_ID_163321 3000 nt of promoter + ATG
gctagattgtatgactatgcccgcatcagaaaggtaatttcagtctcatatccaactacagaacagattattgtaatcagtagtgagttttgattcgaactcttttcccaggtctgtaacaagcaaaaagctgtaatgctagcagatatggcacacatcagtggtttggttgctgctaatgtaatcccttcaccgttcgactatgctgatgttgtaaccaccacaactcacaagtcacttcgtggaccccgtggagccatgattttcttcagaaagggtgttaaggaaattaacaagcaagggaaagaggtaaaaaagaaaaagaagcaaaatttgaaccaaaatgttttagatttatgtataatctttcacgtcattcatttgttgtcttgaaaggttttgtatgattttgaagacaagatcaaccaagctgtcttccctggtcttcaaggtggtccacacaaccacactatcacaggactagctgttgctttgaaacaggtacggtgaggcacggaatggaactaacgttgcttattggatttgcggtttctgtaaccttcaaatggtttgaaaatgcaggcaactacttcagagtacaaagcataccaagaacaagtcctgagtaacagtgcaaagtttgctcaggtactaatcccgtgaaggaaagaaaaacacatatggcgtagtatctactttgattatatctctacattgttgtttcgtgcagactctaatggagagaggatatgaacttgtttctggtggaactgacaaccatctggttctagtgaatctaaagcccaaggtcacttgatctttttttgtatataatcttcttttatatttcttagttaaaactcattttttattcgattttgtttgcagggaattgatggatctagagttgagaaagtgttggaagctgttcacattgcatccaacaaaaacactgttcctggagatgtttctgccatggttcctggtggaatcagaatgggtaaaaatcacatttaaccatttttctttttggtattcgaatggagttcttcttgatatcctctgccattgttattttcaggtactcctgctctcacttccagaggctttgttgaggaagactttgccaaagtagctgaatacttcgacaaagctgtgacaatagctctcaaagtcaaatctgaagctcaaggtttttacttctctgatcacgatgctatgctttccgttcttatatacaatgattgaactcatttgttatgtttctaaaaccaggaaccaagttgaaggatttcgtgtcagcaatggaatcctcttcaaccatccaatccgagattgcgaaactgcgccatgaagtcgaggaattcgctaagcagttcccaacaattgggtttgagaaagaaaccatgaagtacaagaactaaactgtttcaccccacaagtgttttctgttatgctttgaattcccatggaatgtatagatgatacatgtaaaactctattttcacgctatgcgaaaaataatgatctgttaaattttctctctatacatcaaaaagaaatatacttagacaaaaaaaacacatacaacaaaacagtgaattccctaaagaagattgtctttagctcacaagtgacttaagagtaaccacaaaataccaacaaaacgagaaagggataaataagaaactagaagttgggagaggctcatccacaagctgtggtcatttctcaacctcatcaaatctctttacaagaatatggttctgtaaccggacaacatctcaaaacttgttctgttttttttttttcatttcttagacagaaaaatggttgcagcattctcttacactgcctgcaccaagctttctctattacatccttctatggttgctcaaatccgaccaagaacaacacaaaaggcgttcgtggtgacaaatccggaacaagacagtactcttgaagtacaagaaacagagacactcaaagaagagcaatcaacagagaagatgaagaagcagccaacaccattgagaccagtggagaaacagctgaacgtgaagagcaagggtatgggcgattttggtggtcagtggctaagcagtgtcacacgtcacgttaggatctacgctgcttatattgatccagagacttgtgagtttgaccagtcacaaatggataaactcactttgattcttgatcctactgaagaatttgtgtgggatgatgaaagctgtaacaaggtctattcttatttccaagaactcgtcgatcactacgaggtaacgataacaataaacgaacgaaacattcatctaaaagttagactcatttcaagaagaccttataatattgtttttgaacagggagcaccattaacggagtacacattgagattgataggatcggacgtagaacattacataaggaagatgttgttcgatggagaaatacaatacaatatggatgcaagagttcttaatttcagtatgggaaagcctcgtgtacaattcaataccagtaacattgaaggtggtggagatggtcagcctcaagaggacgcttagtgaaacaaactctattttataatcatgtaatgggaatataaatatattgtagtatgctttttaattttgtctatcacaaagtaacatatgtatatatcatgacatatgctataattatttttgtaataatcaatcttaagtttctttgtcttttcttgttaatgtaaggtcttaaggtcatgtgaatatgtaatgtcaaagaaactcaattctggtcttgctcattcatgttccttactccttgcctctttttaaaaagatttcaaactgatgcaaaacttgttagttttaacatttttacccaaaaagttatattaagtttttgaatttgtcaacgtttactaattatttacaattaaaaccctgttcttcttatcctctggtgtttctcgttgttcgtcaccaagacgaactttgtgagggagaaaaaatg

SEQ ID NO: 3483 - DNA, 3000 bp, Unknown
  misc_feature (1)..( 3000): cDNA_ID_2999395_gDNA_ID_1620648_Annot_ID_163366 3000 nt of promoter + ATG
agaaaatgtttgataaagattcatggaagttcagtttaccaaaagaaaggaaagccaagaataactggttatgaacaagttcaaaggttataaatctgtgggtaaaaggactcttacggatttgtttgaaggtcgttgattggttaagatattcagaaacgaattgcagatctctagagaattgcaggttttcgaaactaagttgcagatcctagaataagttgcaggattctgaattattatgttttttagggctgagtaagctaagaagaggttattggagtgattcagtgggattcttagaagaagaaaatggaagagacaagtgcaagtgctgcatgaactgtctcaaggctactcacttcaataatgtgaaagtgtcatgtatctagtttgataaacgacacatctcaatgctggtggcagtggctgaaaagaagctctagaaggaagcaaatgcaagaaatttaaactgcatttagaagacagtaactaaggagtttgagttagctgtctgcatcatgagaagattacataagtaactactcaagggaaattcactcgcaggttagtcaagtgaacggtttttcaaagtatcagagaatcataaagaagacaaaggctctagtaccaatttttctgttatccacctgttttatatatagatttgaagagatgagatttttaaattgctacaaaagagagagtctacaatttcacaagcttgtaccaatttcagcaaaatgattggacaaacttgtaccaatatatttaacatgtttagaaaatattcaactcacttagtttgatttcttcagctgcgattctttgaatcaagttttcagttataagcttcaacctgtaaaaatggctgcagaacaaaatgatgaggaaattttttagtatcacaaagtccagattcaagttttttttcaattgtatctaaaacacacacaactttcagattgaataaaatctgaatttcattctcagcaggggctaatataaaaatgacaaaaggagaggaggaggataggagctatatgtctactatttttagttttttagccaatgagagagctccacttcataccccacttttaccgatcgtgccatttcacagtcactctcacccatgtcgcgttgagcgcgtgtctacgatttctaaagggggttaatccacaaaaatcattcatttttcgatccacgcacctcattctcaaaaacccgtcgcgtgtcttatttttttttgttttcttctctaaaccaaagtaaaccgaaccaagatcaatttgaatttcaaaaccaatgtaaacccataaaacccatcgctgtttcactttcactatccaattccaacgaaccagattgataattttgattcgattccacacagagatcataatctaaaccaatgcgattaataagagagccaaatcttacagtatagcttaaaatcttagctaaatcccaaaaacacgagattctaggcgaaaagagaagaaaaaaaaattgccagaatgcataaacagcagaggccagaggcctccattttcaccggagtgacaaattccgggattacttcctggtcggaggtgaagagtcggagtgaaacggcgacgtttatacgtgggccataaatgggctttgacggaactcaaattatattaaaagtatatttagcattcaagtaattaatttagaaattcatttgtttctgtaaaatatatatatttgctgtaaacaacgattgtgattctggtttctggatacttataaagcttttagaaggaaaaaaaattcaaataaattgtaaaaaaaatatatgtaaatgatatttatccttttaatatttttgagcattatggctcagatttatatggaaataattagttagagagaactttaattagtggaaattctcaaacgattatattctatacataaatcgtgtgcattaataacctgacttcaaagttcaaagtcttaacacttgccataaatgtttcgatagtaatatcaattttatattaggagaaaaactaaaaactatgttaaatctgtgtcagaattataataatccctttatcttaccatacatttagttgactcacatttttacttcatcacccaactgttctcagagttttactgaaatttctcatcatctctaatcactgcattgtagattctcagtcacatgacatcatctccgatgggaaaacacggcgggtcaaagactagaaccaccgtttgtttatcagatggtgttatctttctcgccggagctttcatgtctcttaccctcgtctggtcttacttctctatcttttcaccttctttcactttcaccttcaccggtttacgtcacggctgcgaatcggttcaatgttccggtttaaacatgcaattagaccctcccgagcccggtttttacgacgatccggatctaagctactcgatcgagaaatcaatcacaaactgggacgagaaacggcacgaatggtttaaatcacacccttcattcaaacccggttcagaaaaccggatcttaatggtaaccggttcacaatcctcgccgtgtaaaaacccaatcggagaccatttgttactcctccgatgtttcaaaaacaaagtcgattacgctagaatccatggtcacgacatcttctacagcaattctcttcttcatccgaagatgaattcgtattgggcgaaacttccggtggttaaagctgcgatgcttgctcacccatttatggattgaagctttaggtaattttctcaaacacatttatggattgaagctttaggtaatgaatgagctgaatttgcatataaaaaatcgatactttcattttccagaacaaaccaagatttagcataaatgttcaaaattgaaactttgattcctaacttcttggaatgattcatattgagctagatttagatctgtatgattgatatgatgggtttggtttgtttatgagtagagagaaa

SEQ ID NO: 3484 - DNA, 3000 bp, Unknown
  misc_feature (1)..( 3000): cDNA_ID_2107046_gDNA_ID_1620648_Annot_ID_163365 3000 nt of promoter + ATG
aacctgagagcggtggtcgaggctgctgctgatatcaatctcggtgagccagattgggagctggagcgtagcgagtttatcgaggatggctctcatcagcgctacgtttggcgtcgtgaagtgaccctcgagaccgattccgtccatccttatgccgtcgtaccgttggagttccctcaccctggcgatgtattcgtcaaccgttgacttctcgtcgctgcaagtctccaccacgttgaaatcattgaagaacagagtcgccaacgagtcaatctcacgaaccgcggcgaagaacccgtacgacgttcttccccagtctgctctcgtagaagtcgaagtgaagcatctcgttgctcacgtcccaatgcacgaactctcctctgtaccgagtcattagactcttgattcgccggttaaccgccgaccggagatcttcgccggttagattacgaacccagtcgggattgtatttgggatcctcccagaatatgttgtggccgcgagcgatgattctgttagctctgacgagattcatcatcttatcagccaatgtgtagttgagtttgccttgatcggactccgtcgcgtaccatttcagctcgttctcgaataccgtggcgtcgaatctcttgacgaaccattcctaccaaaacagaatccgtttaaagaagcaaagacattgttgttttagtgtagactttagcgagtgtgttttacttggtaaggaatgtttccaaggatagttttggagatggcagatccaatggggaagtctttagagatctgctctactgtcacctctgctccttcaacgctctctccgttttcttttgacacgtgaattgtcactgctcgttttctcgcttgaaaatgagtgttaagagggaaccacataaagaatacagtttgcgattttgatgttagaaatgagtgtgtgtattatgcaacatggtaaactattattgtgtcgatagtcttcctagctagaagagttaggcagcgtgtcctgtttatcttaacagcggtacaagacaagtatgagttgcatttcagctacaagagagtacaagagattgtctgagattaaggcattgttttgtgatacatcagcttaagctatatcatcatcaaaacatgaagaatgctccatgtaaagagaggacaaggttgcagttattaaagaaaagttcttggtggttcttttgggaataaaagaattagattgagtggctacatgaagaaaggagatgtgtcacacgttttggcacactttcttaagagttatgtcacagaaactcattcggatacattagaacgtgtgagtgaatcaaagaaacagtgaagagcatgcagcataactcatagaagagaagctgagcttacaaagacaaagtgacatccttttttttagtttctggtgaagctatgttcatggaggttgtcttaggtatgtagctcaatggatgagtcaaaaggctgcagaaaatgtttgataaagattcatggaagttcagtttaccaaaagaaaggaaagccaagaataactggttatgaacaagttcaaaggttataaatctgtgggtaaaaggactcttacggatttgtttgaaggtcgttgattggttaagatattcagaaacgaattgcagatctctagagaattgcaggttttcgaaactaagttgcagatcctagaataagttgcaggattctgaattattatgttttttagggctgagtaagctaagaagaggttattggagtgattcagtgggattcttagaagaagaaaatggaagagacaagtgcaagtgctgcatgaactgtctcaaggctactcacttcaataatgtgaaagtgtcatgtatctagtttgataaacgacacatctcaatgctggtggcagtggctgaaaagaagctctagaaggaagcaaatgcaagaaatttaaactgcatttagaagacagtaactaaggagtttgagttagctgtctgcatcatgagaagattacataagtaactactcaagggaaattcactcgcaggttagtcaagtgaacggtttttcaaagtatcagagaatcataaagaagacaaaggctctagtaccaatttttctgttatccacctgttttatatatagatttgaagagatgagatttttaaattgctacaaaagagagagtctacaatttcacaagcttgtaccaatttcagcaaaatgattggacaaacttgtaccaatatatttaacatgtttagaaaatattcaactcacttagtttgatttcttcagctgcgattctttgaatcaagttttcagttataagcttcaacctgtaaaaatggctgcagaacaaaatgatgaggaaattttttagtatcacaaagtccagattcaagttttttttcaattgtatctaaaacacacacaactttcagattgaataaaatctgaatttcattctcagcaggggctaatataaaaatgacaaaaggagaggaggaggataggagctatatgtctactatttttagttttttagccaatgagagagctccacttcataccccacttttaccgatcgtgccatttcacagtcactctcacccatgtcgcgttgagcgcgtgtctacgatttctaaagggggttaatccacaaaaatcattcatttttcgatccacgcacctcattctcaaaaacccgtcgcgtgtcttatttttttttgttttcttctctaaaccaaagtaaaccgaaccaagatcaatttgaatttcaaaaccaatgtaaacccataaaacccatcgctgtttcactttcactatccaattccaacgaaccagattgataattttgattcgattccacacagagatcataatctaaaccaatgcgattaataagagagccaaatcttacagtatagcttaaaatcttagctaaatcccaaaaacacgagattctaggcgaaaagagaagaaaaaaaaattgccaga

SEQ ID NO: 3485 - DNA, 3000 bp, Unknown
  misc_feature (1)..( 3000): cDNA_ID_3071232_gDNA_ID_1620648_Annot_ID_163362 3000 nt of promoter + ATG
ctcaggatgtgaacatagttgcgacatacagtgaccattacggcaatatacgccttggtagggtgaaaatgggggatctttcaccttcttgggttttggagaatcctgcctatcaagttagccgcaaaacaaaaggttcgcaggtaccaaacatttcatgttctggtttttagttttaatgagatttgatcatcagtttaagaatagaactgtatatcctatgggcatatggagttctatagtagaaaacttaaagtgtgtgaagtgattacttaccactcttctcaccgagcaaaaaatacctctcatgaacttcatttgttctaaccttgtgtttcttgaatttatccttaagcttgctcatattctttgttctctagttgctgacatttttttgtatggaattagctagttataccacgggattcatttcaaaatgatactggaatggaagataatgcaagccattctacaactaatcagactgatgaaagcgaaaatcagtttccaaacgtggattttgcaagcccagcaaaactgaagcggcaggtgatctgtcaaatagccttcttttctaatctctggatgccttaacactatatgactgagattgtaacaactgtagaccctttcagattttacgtcaggaaaggagaggtcaacgaactttagagctgatccgacaagaaaaggaaactgatgagcagatgcaagaagcagccattcagaagtcaatgagctttgaaaactcagtcatagggaaatacagtatatggaggagagactatgagagcccaaatgctgatgctatcttgaagcttatgagagaccagatcataatggcaaaagcatatgcaaatattgccaaatcaaaaaatgtaaccaatctgtacgttttcttgatgcagcagtgtggagaaaataaacgtgttataggtaaagcaacctctgatgctgaccttccttcaaggtacttttttacattcctcttgtcagcaatctttgtgggacaacaatctttgttgaaactttttccatcccattttctttgctagcgctcttgatcaagcaaaagccatgggccatgcactctctcttgcaaaagacgagttatatgactgccatgaacttgcaaaaaagttccgggccatccttcagtccactgaacgcaaagtagatggactgaagaaaaagggaaccttcttaattcagctagctgccaaaacatttcccaagccattgcattgcctgagtctgcagctagcggcagactattttattctaggtttcaatgaagaggatgcagtgaaagaggatgtcagtcaaaagaagcttgaagatccttcgctctatcactatgcgatcttttcggataacgttctggctacatcagtggtggtgaactccactgtcttgaatgcaaaggaaccgcagaggcatgtgttccatatagtaactgacaaactgaattttggtgcaatgaagatgtggtttcgcatcaatgctcctgctgatgcgacgattcaagttgaaaacataaatgatttcaagtggctgaactcctcttactgctctgttctacggcagcttgaatctgcaaggctgaaagaatactatttcaaagcaaatcatccttcatcaatctcagctggcgcagataatctaaagtaccgcaacccaaagtatctatcgatgctgaatcatctcagattctaccttcctgaggtttatccgaagctggagaagattctgtttctagacgatgacattgtggtgcagaaggacctggcaccactatgggaaatagacatgcaaggaaaagtgaatggtgcggtggagacgtgcaaggagagcttccacagatttgacaagtacctcaacttctcaaatccaaagatttcagagaattttgacgctggtgcttgtgggtgggcatttgggatgaatatgtttgacctgaaagagtggaggaaacggaacattacagggatatatcactattggcaagacttggtaaggcattggaaatttctcaaaagaaatacatataaatatttttggatgatgaatggatgtgtcaattaatatatgattgatgcagaatgaagacagaacactgtggaagctgggatcgttgccaccggggctgataacattttacaacctgacgtatgcaatggataggagctggcacgtactagggctgggatatgacccagcgctaaaccaaacagcaatagagaatgcagcggtagtgcattacaatgggaactacaagccatggctgggtttagcattcgccaagtacaaaccgtactggtccaagtacgttgagtacgacaacccttatctccgacggtgcgacatcaatgaatgaatgaagagatggtggaggtagtatacatgatgaagcactcaaaggaaactaaataagtaaaaattgttttcagtttaccataatactaggaatcagcagacaatcacacatgacgattaattaaatagaatctcttgtttttctcaaactcagaaaaactcaccaaaggaaactgaacaatcttttcactcggagtgttgttcttcacttgtttttttggtatcaacgtgactgaaaagcatatgggccttagaatgcgatgctttgtctatatacagtgtgtacagtgagtaaaactgccccgtgaatgcacataatgggccttacactggcccatcattgctttactctcctctctagctagcgacgagatgagtaaaacgccatctctcggagcggaacggctctgctctgctcttatcctctgtctgatccgtctccatcaccatctccgttctacaggtaaattgttttgcttcgcgctcctccgattgattattcactgatcagattctaataattataatcctgagtcctcgtttggttgatgttgaagcaccgcagatcctctttgaacttgttatttgtaagcttcttcttagtttctccttaatcgcagtgaa

SEQ ID NO: 3486 - DNA, 3000 bp, Unknown
  misc_feature (1)..( 3000): cDNA_ID_3071236_gDNA_ID_1620648_Annot_ID_163358 3000 nt of promoter + ATG
gcatagcagtatttctgtggcaatcgcatccgctgtacccttttcttctatttctcaacagagatgaagatcacaacaggtgattcaatcccctctgtaatcgtttcctttgatgagattgtactaatcttttgtgtaaattgtcaagggcgacagaggcgctgcgttggtgggaagacggagagacggtgggaggaagagaccttgttggcggcgggacgtggctgggctgcacgaggcatggccgtctggctttcctcaccaatttcaaggaagcctcctccttccctgctgctaaatcccgtggagatctgcctcttcgttacttgcaggtctacaccaccacctaatatgctttagattgtctctcatgttagagactgagagtacttttaacgttttggtgagaacagagcgaaaagagtccggccgagtttgccgaggagatccaagacgaaatttcactctacaatggctttaacctggttgtcgctcatgtcttgtccaaatccatgatttacattaccaaccgaccaccccacggtgacaagctcgtgacgcaagtctctcccgggatccatgtcctttccaacgccaacctcgactccccttggcccaaggtaagtaaatgtgggccatttctccctttatttaccttttgcagactcccccaattgcgtgtttttgtctctgcagtgtctgaggctgagggagggtttccaacagcttctggctgagaacgggagcggtgaattcccggtgaagaccatggtggaggaggtgatgaccaatactgtcaaggacgaagaaaccgagctacctcacgttttcacaccagagacggaataccatctcagctccatcttcgtcgacatgcagagaccaactgtaaccttccttttttagagtacattgattgtttgtttaacactttccataaatattcagtctcactcatggagatacaggggcgttatgggaccagaagcatctctgcgatcatcgtcaagtcccatggagatggtggtggtgatggtgagatttgcttctacgagaggcatcttgaagaaggcgattcatggaaggaacacactcaacagtttgtaataatacaaaaccaaagcatttgattagctagccaggcttatttcgcgagcttcccttgcttgtaacattgagaaatcaaaactctcacatatgttgtacatgtaaacacaaaacagaagacagagctgatctcttttattccaaaccatcaaaatacaaatacaatcacagttactcttaaaaccacaaccaattccatatacataattgcacacaaggagagaaaaacctctccaatctctgacttcacggacgctcacactttgacagagaagatctcactcagggaactccaagttcccgacacagcaagaaccacacctagtaccacaatcgctgtgtctgaactccattgcagccaccccatctcttccttgaacaccaataaatgaaacaatgcaggtaacacaaagcctaacacacagcaagtgctgctgccaaccaatgacaaaaaatctgcaaagtttggcacaaaaagagccaccagagtcactgctaagacgagtacccatctgagccacgcagagtacatcccgcgtgagaaacgcctctccactatctcaaacactggattcatcatcaaggggaaggtgaagaagaggttgatgcacagtccaagctggacaacagtgctgacaagtcctgcccccaagttagcagtgataatgtccatggtgtcctcaccaaaagccaagtaacctaagataccaaatgcgatgtatatgagagagatgaatcccatgccgagagccaagactttgccaaacttgtccttgtccttcatctccgattcaagaggcaagaccattccaacgccttcgaaggaatagacagcgacgcccataccatacaagaagagggacataccaccaaaggcaaccacgtcaggcctttgcttgagtataatcatggaatcctcaacaatgaccacagccatagcgccaagatcaacaatatcggcgaagatgctgagaggagccaagtgagtgagcgtcttgatcgaattcaaaccgagctgaaagggaaagcatccccatatgtagagactcttagaagacacgcccaggaattcagaacccagccttgtaaactgatgcctcagactggtgggcgattcaggatcggatagattagctaaagtagtgccgatgaagataagatatccgacacaaaaaccagcttgagacagaatgataaataagtcaacgacgatcctccccaaggagccgcagacggcgaatccaaggtcaccaaaagagccgatcttggagatgccagcattgaaagagtcgagcttgcggcgggtatagacaagaagcatcatacagtgatgggtcaaaacagagacggagacgaggaggaggacacccatgagccatccggttcgcttgaaggcgtaaggaagaccaagaacaccagcgccgacgacagcgatgaagacgttggcgaaggtcttaaactggctggagaggggaggtcccttgccgagaagaggcgagtcctctctggccggtggaggtattttaagggtataagaggaggagctagcttcgttctgaaaacccatctgatgattttcgaccgaatctcagaaatcgaagaagatggggatggatattggcgaatggcgacagcaagataattggatgaattgcgtgtagagttggtggactctcttttttggtttgttgtcagagatttacagaggaagaagctcggctctatttatggatgaaatgaaatggtcatcttatcatttttactgggaaacggtaccgtttttgttataacgcacgacgccgtttcaaacaacttccttattagctagctccctcccggcggcaaacaccagaagatccaccggttttgatctggttgtttgtcgtcgatatg

SEQ ID NO: 3487 - DNA, 3000 bp, Unknown
  misc_feature (1)..( 3000): cDNA_ID_3071240_gDNA_ID_1620648_Annot_ID_163357 3000 nt of promoter + ATG
cgaaggtatatccccttcttctttcctcattgggacttgtggaatcctagatgaccatggttcttggaacctattgaatactatacaaaattaactttctaaatggagtagaagacttatacattgatttctgagtgtcttgtagatatgaagaaccgccaggacgaagaacttgtgcagcttaaggatctaatccagacgtttgaaagtgccttactatcacctgtaaaactcattttcttgctttctttttattagtttttctactaatgcttattttcttcctccagaaaaaggaatagcaaaactcactcaaggtggacaggtctggataagaagatgcctttcttcgtatttgtaactgctatcacttgctatatatatacatctaacctgtttcttgttttttatttagcagatgcctgtggctgctgtagtggttatggcctgcagtcgtgcagactatcttgaaaggactgttaaatcagttttaacgtgagatactatactgatttaattcttataccacattttgattgaactatctaatggctatttctttttttatacagatatcaaactcccgttgcttcaaaatatcctctatttatatctcaggtacttaatttgcagggtggtggtctcttagactgttttatattcaacgaattactaaccatggtcttttccaacgacatattttctgacaggatggatctgatcaagctgtcaagagcaagtcattgagctataatcaattaacatatatgcaggtaatttaatctagcgtgatttttctcctcactgttcaagtagataaatgaggatgaaggctcgttttccccttttcagcacttggattttgaaccagtggtcactgaaaggcctggcgaactgactgcgtactacaagattgcacgtaaggactggtttctcttttctctgcgtccctccagctccattactgaaacactttttaatacaggtcactacaagtgggcactggaccagttgttttacaaacacaaatttagtcgagtgattatactagaaggtggcgctttttaacctttcacactcatcgtaccttgctgttgtattgtttaagaggggctgtctttaccttgtggagtattgcttaagagaggttatcttgtctctttaacagatgatatggaaattgctccagacttctttgattactttgaggctgcagctagtctcatggatagggataagtatgttacctactgaagctagactcttatagtataagtttccacagagtatacaaatgtttttattactgtttctcattcttttctggtccaaacatgtgttagaaccattatggctgcttcatcatggaatgataatggacagaagcagtttgtgcatgatccctgtaagattcttcttcttcttcttctttaccttgcttcctctcttgcctgttctttcaatacctcattatgtctagctcatgcgagctaaaataatctgcagatgcgctataccgatcagatttttttcctggccttgggtggatgctcaagagatcgacttgggatgagttatcaccaaagtggccaaaggcatatccttatatgcttttttttctttcaatctcgatgactatagtttgacgcttcttaaattctaaaaaaaaaaatagtttgacgtttctaagacttttcttaacaaatatccacttactgggatgattggctgagactaaaggaaaaccataaaggccgccaattcattcgaccggaagtctgtagaacatacaattttggtgaacatgttagtacccgattatgctatcctatatatcatagttttacaagtctgtttttgtaatgctgttaaattgacctatgttcgctgcatatgacttctgctttctgtatgaaaaatgtattattgcagcttcgtcctatagtttcccgacacatggatgtagacagtcaataccacataatatatttttgcatttcatacttatccataaccttgttatattaatttggcaggggtctagtttgggacagtttttcagtcagtatctggaacctataaagctaaacgatgtgacggtaagcgtaagtgtgttttttacccccttttgttgcatcactagttttcactggtttcctatttcattcataaaggttgactggaaagcaaaggacctgggatacctgacagaggtaacatttacagaactccggccttttttttttataccattttgcatgttttgagtggagaaatgtagtttttaacctgttctctcatgtctatcaaagggaaactataccaagtacttttctggcttagtgagacaagcacgaccaattcaaggttctgaccttgtcttaaaggctcaaaacataaaggatgatgttcgtatccggtataaagaccaagtagagtttgaacgcattgcaggggaatttggtatatttgaagaatggaaggtaaatttgagatgattgaactataatcttcaataattgtaggtccaaatgggtcactttttttgtacccctttgattgtgtaggatggtgtgcctcgaacagcatataaaggagtagtggtgtttcgaatccagacaacaagacgtgtattcctggttgggccagattctgtaatgcagcttggaattcgaaattcctgatgcaaaacatgtacttctccaaccagcatcatttacatcttaaccattgcttacagttctgtgctaaccgggtttcacaagcagatgaaaggaaaagaagattttggaccgcatgcagcctccttctagcagctgttaggttgtattgttatttatggatgagtttgtcgagcggtggggttaactttaacagcaaggaagctctggtgacctggctgattggcttagaagttatgggaaccccttgaaagggtcagggttaaatatatttcagttgttttattagtgattatcttgtgggtaacttatacgaatg

SEQ ID NO: 3488 - DNA, 3000 bp, Unknown
  misc_feature (1)..( 3000): cDNA_ID_3093746_gDNA_ID_1620648_Annot_ID_163356 3000 nt of promoter + ATG
tcgtatttgtaagaatttataaacaaaaagcaatgattaaaacatttacaatgacattatgacaatgaattcgaatgtacttttcaagtcactcgtaaaagaatataaattttttaagagataacataagacttttaaatcgataagtgaataacatagagtttgtcattttaatacaaatcactgccgataattagactgaaatggaagaaaatcagacggagacaatgatgtccttaaggggaagaagagtgaaatgaggtagcggtttgaggtggatgagaacatgtgtatacgatgatgactcttgtttgatgggacaaccgtgagtcgacttatccagcgtcccatctctatagacaaacacattttcgtcctcttccatgcgacgccactttctgttgttatctttggcacgttgcagcggcattcccctgcatcatcaacattcattatccatctagatgtaaatgagaaagtgggcatatatccacgtgtgtacctgacatggaagagatcagagacatcaagaaagaaggtcagtgcgtcaataaaagcctggtaggtggtgatatggaggccgtcgatgtggggatagggcagcctgggcctggtggtggtggtggtgggagaagagaggaaaacgtactctttgaatcctcctcctgctccggtggcctgagcgacgaagcccatggtggacatgattggttcaagctcctcgtgcgtcataacaggcttgaaggttctcgtgtgccacaaggccagtttcctcatactgcactcctccatcatctctctcgagatccacaagtgagtgagtgtagggattatggttacaattagtttggtttttctttcttttgcccttgttatttcatttattcaccaaactgccattcctttctgccacgtggccttcttcatcccatttgtgagcaattcaatttagtaatccatttgctgctctgtagtggaagtagttgttgttgttgttgcagaagaatccgaatccaattcaatgagtcttcttcgtcttctcctcgttgttgttgttcttcatctttctgcggtggccggcgacgacgccatcgtctccagattccaggagtacctccgaatcaacacggttcagcccaacccggaatactacaaagccgttgactttataatatctcaggcgaaaccactgtccctcgaatctcagacgatcgaatttgtaaaaggaaagccgcttctcctcctcaaatgggttggctccgacccaaccctacctgcctttctcctcaactcccacaccgatgtcgttcccttcgaggactccaagtggactcaccatccgctccaagctcacatggaccaccatggcgacatctatgccaggggttcccaggacatgaagtgcgtcgggatgcagtacctcgaggccatacgcaagctccaggcttctggcttcaagccactccgatccgtctatctctccttcgtccccgatgaagagattggcggccacgatggcgcagagaagtttgctgaatcccaattattcaagagcttgaacatcgcaatcgtgctcgacgaaggtaaacactcttctggatttgattcttgattataacagccaagcatcatcttatacaacaaagtgaatcaggcctgccatcgcctactgagagttacagagtattctatggagagaggagtccctggtggctggtgattaaggctaaaggtccacctggccacggtgccaagctctatgacaactctgccatggagaatctgctcaaaagcattgagagtattcgcagattcagagcttctcagttcgatcttctcaaagctggtgggatagctgaaggcgatgttgtctctgtgaacatggccttcctcaaggctggcacaccttctccaactgtaactacttttttcttcattcatattatgtatgattccaaagttgatgtctttatctgagaatctggctctttctttatcctcaagggtttcgtaatgaatctgcaaccatctgaggcagaagctggtttcgacattcgtgttccacccagcgttgatgctgaagcactcgaaagacgtttagtggaggaatgggctccagcagcacgaaacatgtcctttgaggtaatttcttggccacctgtatctctttctcaatgaatttgaagaaactgtccagtcttgaagccaagtagcaacacaaagtcccctttttttatgaacaaagtctactcgacaactttaactaattaagatgttagctggggcagttcaagcagaagcttacggggaagcaattccttacagcagcagatgattcaaatccttggtgggggctcttggaaaatgctgttaaggaagccggaggtaggaccagtaagcctgagattttccctgcatcaacggatgctcgctactttcgcaaggctggcgtgcctgcctttgggttctctcccatatcaaacaccccgagtctgcttcatgaccacaatgaggtacatacatgttgatactcactttgctcattgttggaggatcatcattcatgttgtttatctgtgttgcagtatttgggtaaagctgagtacttgaaaggcattgaggtgtatgtttcaatcatcaaagcttatgcatcatatgaaagcaaaagtggttcacgagatgagttatgagggtctcaacacagcccattcaagtcttcctttcgcaaatttgtacaatcaataagatctgaatccatcctgtgtttgttgtggtaaatcagagacatcttgttcttgttgtgagacagttggcattggcaaattgtattattcattcctgctttttcaatgcttcttcttttttctccttgtgtttcctcgtcgttgatgggccgtacaaattaggcccattagcatgatccagtacgaaatccatttaatgtaaacccaaccagtcctcctatctcttcgttcgtgactctctctgctctgctcccaa

SEQ ID NO: 3489 - DNA, 3000 bp, Unknown
  misc_feature (1)..( 3000): cDNA_ID_3071244_gDNA_ID_1620648_Annot_ID_163355 3000 nt of promoter + ATG
gtctaatagcaacaaatgtgaagtatgaaaatgttaaaaataacatattgaaaaagccatacaaaattgaatctagcaatgttatagtctctaattttgccttgctccagaataatgatctaactccgtctctcactactgtattttctcctgttttcaggtagtgacggatctctaccgaatccatcagcagtcattgttggcatcgcacgttactgttatactggagatactctcatcaatctcatcacatgcccaccagttaaattctgatttgatattgcagaagaaagtgaggagagcgtgctctatcctggagctctctgaacctcccatgcttcatttcgaaaatgacacgtttcagaactacctggacattcttcaagccatagtgacaaataatccaggagtgtcgttggagctaaacgtagagtctcagctgatgacagtgtgtatgcaaatactgaagatgtacctgaaatgcactttgtttcagggtgatgagttggaagaaaccaggcagcccaaaaactggattctacccatgggagcagcctcgaaggaagaagcagcagcgagatctcccctagtggttgcagtgctgaaggctctgagggaactgaaaagagattcattcaagaggtatgcaccgaatttcttcccattgttggtggagcttgtgcggagcgagcacagctcttcacaagtcccacaagtcttaagcacagtgttccatacatgtatgggtgcaatgatggatgaataatagggtggttataagtgggttttgacattcgagcacctgaaggatattgattaacaagcagacacaaatcactcttttcttcttttgttttttcttctcgacggagatgcgagatttacaggttttgtgctgttgattgatagtgctgatataaagtaattgattactgtttgtagaaactaagaaaagaatggtgagattaggagggtcattgcattttgtctgcaatgcctattttcttccttccagtcgtgatcaatgtgcataatatactctcacacagctaaatgcggtccaagtaaggattgtgaaggatatattatataaaaagaaaaaagaaaagagaagacaaagatgagccactcgtggaaagtcatttatacctccttgaaatgaagtgatgatatctaatgactccaaagtcataataaagtcaccgaaagtgaatcatgatttgaagaagataaaggagtcaggagtggaactgctttccttggtatgtcattccgaagcgccaatacggaggagccacatcataagaggcaatggttttgccgcctttgagagtaacctcgaaagagagagactgtccgatgagatcgagagaggagtgccagttctgtccccagtttctggccattgggatccaagccgttgtgtggcccttcactttcacaccaaccacttccccgtcgaggcccacattgcttatcaacacctggaaaaagtgggagctcccgctcaagctgaatctcaacccgcctctccgcccacacttgaccctcctatactgtataggtatcatctcagctctggtttctgcgatccctgtgaaggcggcatgagatagttccaagtgttcctttgggaagttgcaccaacctccgtaatcggaggagagtcccgaattgggaggacagaaatcggtggcggtgaccaccacggaggggctgccttgaagacaccaacggatgtggttcacgcaccgcacttctagacaagctccgcagctgcttcccctgttgaacagcttcccgctcaggcctgcgctgtagccggcaaagctgctctgcctcagatctccatacccacaagcgcctcctatcagaaccaattagtctagttagtcctgatgaaagaagaaagaaaaataggggggagagagagaaaagagaaccagtagcgacggaggaggagccgtctctgtctctagaaagcgtggctgtggctatcttccagtcatcttcggcagtggcttgaaagaggcggcagagaatgaagaagaggcacaatgcgagttgctgaagcccagaatccatgaacaagaagtgttgttgggatcctcacagtcagtcacaggtggcagacaaaagtgatgcgtttgagagagttttgggggttccttttgatcatcaggctccgcttttcaagacttgtggggatgcgacaaaagattgctctgacatgttttgactttgacagtccgtttcagaccaattataataaaaaaacaaaaaagggaacaactatacgttttccaggcccatctcattcggaggcccactttcaatacgacacagaatcaagacaagagacgcaagacgaacttcttgagcccttttgttaattcaatgggccctcactaagaagcccataataaaataaaataagttctattttcaaacattgtactattactttttgtaccggccgtgtttattcaattctcgtatttgtaagaatttataaacaaaaagcaatgattaaaacatttacaatgacattatgacaatgaattcgaatgtacttttcaagtcactcgtaaaagaatataaattttttaagagataacataagacttttaaatcgataagtgaataacatagagtttgtcattttaatacaaatcactgccgataattagactgaaatggaagaaaatcagacggagacaatgatgtccttaaggggaagaagagtgaaatgaggtagcggtttgaggtggatgagaacatgtgtatacgatgatgactcttgtttgatgggacaaccgtgagtcgacttatccagcgtcccatctctatagacaaacacattttcgtcctcttccatgcgacgccactttctgttgttatctttggcacgttgcagcggcattcccctgcatcatcaacattcattatccatctagatgtaaatgagaaagtgggcatatatccacgtgtgtacctgac

SEQ ID NO: 3490 - DNA, 3000 bp, Unknown
  misc_feature (1)..( 3000): cDNA_ID_1820885_gDNA_ID_1620648_Annot_ID_163353 3000 nt of promoter + ATG
agatccgcaaagctagcagcttctgccatagcttcaaaggatagaagagctcctccatcatcagaaagatagcatgacaccttctccaccggataatcaacggccaatatggacagaatcgtgttggcggtgacaaggggcggctctttctctggatctgccgttgacacaaaaaggtcaatacctgggagatccgacctccctgttgggttggagggagaaggcatgtcaaatttgtcacgaagaacttccaggtcagtggaccggtttattggacacaacttagggatctggtctagaatccatgaaaatccaaaccaaagctcgcatattatagacatgagccataaccatattgcgtcttcgttaggatttcggatcctccaagttagaaaaaaacatagcacgacaaaacgaatgacgattagtaatctgtaaggactaatgatggcggctggaatagggattcgtcggctcagtggccgccatggcttgtcagctgtttccaccatgccgcctctcatcccttcatccatatcatcgccatacatttcgtcttgaggccaatacgcattaccgtacccatatgtgccttgcgtctcgaatagccatctgttgtgatcaaattcaccgttttggttcctcttcatcatagacatgttgttgttgttcccacgttgatctttccctggagctggtaaggggagagcaccactagaatagtcaggcgtatcgtcatctaggtccccgattttgtattgttccttgcatcctggacaaaggcctgtctctttctgggcgtccatgaagcaatccctacagatcttaaacctacaaagacaatcatcaccacgtttgttggttagttagaattaaacctcattttcttgtgcaacaagtaaaagatatcaattagtgtttattaatatataccggcattcacatggcatcacgtcctttcctctctcgtctttcatgacatttccgtcgcaagcaggcatggcacacgaagagcctttagcgccagccatctgagggtgtgtgacatctgaatcgatcactttgtccataagatgtgcacgtgttacactgttgaaaccaccagtaaataaagaatttgacacgtattgctcttcggctttggtggccatgggctgattgtccggcgtcggaggtatgtgcaccgtatagttagaataatccccggagagctcgcctgataattctatattatctcgagataaactcacatatcttccgctagatgttcgtcttgcaaatttgacggtttggccgctaccggaattgttacggacctttttagaagtttgaggaggcgtggacgccattgtgaagccaaacaaaggagcttggtttctgcaatgtgatcatgcagtataaagatgaaacgtgacttttttaccttcttgttgattttggcaaaacagagagaaagataaggaggagagaattatcaggacacaaaactgtttatgccatggattcctatttttgggcttctatgtatcatgcactaacctattttaggaagctcgagggttttgttgtttattctattttgggattttaacatattctttcttttaactcaaatgatttattctggaaccccattcttcgctcatacaagccgatggaaaatttcctacttttttagttaacgcacagtccatattttttttattattcaactactaactatagaaatgatccttatcgtttgattttttttttttttttttttggcaactattctcgttactaatttaaaatgtggattactgcataatttcatattgaataagattagatatccttaattcgtcttaacactacgcttgttttcaattttcaacttgtttgcttgttttttccaaatttagataattggacttagcttcaaaaccgatgatcttaatgtgaattaatcatctaccattacttaataaggaattgtgttaattagtattgtactatacttttactttggaatttgaagaacttaacccaattagactaatttcaaatacaatataaaggagctaacggttaaatggcagatttctaatactaatagttttggaaattgatatgtaagagctatattataaactaagaatgatgcatgatttactgatagctaaatggatggacttagtttttgtataaacacatacaaacattgtttagctacacaatattctactagcgtattactaattgacagtacaatagtgaaattgaagaagcatcaaaaatatacttgcaatacatagaaggttcagtgtaacaaaggggttatatttggggactagctagagagacggtgataaaattgttggacgtctgtttcagagtacacgggaatatcccaacgtccacaaacgcaaatatgttaagatctagctaggcttatgcatgtaaaactggcggtagaaaatcacgataacatatctcgtaggcttgaccagatcaagaagcaccatccaaaactcgtctgatgatcccatgctgtctagtgaggttgaacagacaatattgggaagtatacataagagaagctgactcgtgaggttgaatagataaagtgtaacgtactagtgtttttttgttgttgttgtaatagtactgttgatggattttgataacgttcgttaaattatgtttatggatttactagttggaaacgagttatttttatatggaatcaaagaacatcttgttaacgatgttaaaaaccacttaaatattttttgttaactttaaaacggtgaatttaaacgataacattatgttaaattgagatttaaatgattttttttcctatgggctattaaattataattaatcaaatacaaaacgctgaaaggtaagaattaagaatgaaagaaacgcagcgtttcgtttcgacaaagtccccgggttctgggttggccttttatcattttgaatcgccgtgagaagtcgaatatgcgttag

SEQ ID NO: 3491 - DNA, 3000 bp, Unknown
  misc_feature (1)..( 3000): cDNA_ID_1820889_gDNA_ID_1620648_Annot_ID_163352 3000 nt of promoter + ATG
tgtcaatgattaggtttgggtcgtggcaaatgttctcgagtaagctgagcacggtcattttctgcacgaaacttggctggagaacattttcaaggacccggaggacaagcatcggaaagaatatacctacttctgatttcatacccgatctatatttccgtagtaaggttgtgaagatagcacactgaagttgaaaaatagacataaccgaaagtgcgctattctttaacagcgacaagcagagcaactgcttgatggcatttagaaacctgcatattttttggggagggagagtgagctcttggagttcattactactgagagacgactagactaacctgtgaaatgaaagataaaacaacttgcctttcgtcagagagccaaattgggccgccgttatcaatgatgactttgagcaactcgagagacaaagtcttgcctctcacaagaatctgatcgtcggtgttctcttgtgacgagaacttcatagacaacttacagagatttttgaagagaaggaaaccgtcttccctgatcttgctgcctgtgccttcatcctcagttgaagaagcaccttcctctggtggttggactagcgcgaaatccggaggaggagctgcttccccggccgtaatgacgtcgttaatgaatccctgacaaatatgaacagagttcccttcgttgacattcttatccgtgatggcaagcaagtcgttgacattaaccgttttgagtgatgcatccatggaattcgcctcggatctggtgaagacgatgagcatgatctgagccagcacagatttagcgcagatctggttggtcccgttgaatccgccgagatacacattgtagcaggtcctgactagatggagcaaacaatcgccacggattaggatgcgaggagatctgacggcggcgaggaggacacgaaggaccgccagctcaattgactcctcgccgatgccgcaaaccttgcagatcgcatggatgagcttgtagagaagagaatcaggggacgaggagcagacctcgccccggaggagggagagagagaagagcttgaaagagcaatcgagagcaggctcaataaccttagcatagccggtatcaagagagagaaggagtggctgaagaacggcatctgcatcggaggtagtgagaccgaagagaggcgacgaaggatcgggagaatcggagagagcttcgagcttgtcgagtacagacttacaggcggaaacaaggaaggtgtgcttgcgccaggcggcattttttatgatcttgtccaaagatggcccaatcacccggccgcatctggtggcgccaccaaggttctgcgacgacgacatctaacgcatattcgacttctcacggcgattcaaaatgataaaaggccaacccagaacccggggactttgtcgaaacgaaacgctgcgtttctttcattcttaattcttacctttcagcgttttgtatttgattaattataatttaatagcccataggaaaaaaaatcatttaaatctcaatttaacataatgttatcgtttaaattcaccgttttaaagttaacaaaaaatatttaagtggtttttaacatcgttaacaagatgttctttgattccatataaaaataactcgtttccaactagtaaatccataaacataatttaacgaacgttatcaaaatccatcaacagtactattacaacaacaacaaaaaaacactagtacgttacactttatctattcaacctcacgagtcagcttctcttatgtatacttcccaatattgtctgttcaacctcactagacagcatgggatcatcagacgagttttggatggtgcttcttgatctggtcaagcctacgagatatgttatcgtgattttctaccgccagttttacatgcataagcctagctagatcttaacatatttgcgtttgtggacgttgggatattcccgtgtactctgaaacagacgtccaacaattttatcaccgtctctctagctagtccccaaatataacccctttgttacactgaaccttctatgtattgcaagtatatttttgatgcttcttcaatttcactattgtactgtcaattagtaatacgctagtagaatattgtgtagctaaacaatgtttgtatgtgtttatacaaaaactaagtccatccatttagctatcagtaaatcatgcatcattcttagtttataatatagctcttacatatcaatttccaaaactattagtattagaaatctgccatttaaccgttagctcctttatattgtatttgaaattagtctaattgggttaagttcttcaaattccaaagtaaaagtatagtacaatactaattaacacaattccttattaagtaatggtagatgattaattcacattaagatcatcggttttgaagctaagtccaattatctaaatttggaaaaaacaagcaaacaagttgaaaattgaaaacaagcgtagtgttaagacgaattaaggatatctaatcttattcaatatgaaattatgcagtaatccacattttaaattagtaacgagaatagttgccaaaaaaaaaaaaaaaaaaaatcaaacgataaggatcatttctatagttagtagttgaataataaaaaaaatatggactgtgcgttaactaaaaaagtaggaaattttccatcggcttgtatgagcgaagaatggggttccagaataaatcatttgagttaaaagaaagaatatgttaaaatcccaaaatagaataaacaacaaaaccctcgagcttcctaaaataggttagtgcatgatacatagaagcccaaaaataggaatccatggcataaacagttttgtgtcctgataattctctcctccttatctttctctctgttttgccaaaatcaacaagaaggtaaaaaagtcacgtttcatctttatactgcatgatcacattgcagaaaccaagctcctttgtttggcttcacaatg

SEQ ID NO: 3492 - DNA, 3000 bp, Unknown
  misc_feature (1)..( 3000): cDNA_ID_1820909_gDNA_ID_1620648_Annot_ID_163346 3000 nt of promoter + ATG
gccgtcgatgtccgcaacacgctttctctcaacgggcgacaatggtcaagtagacgagcagcagaaccctccagagcccttacccaacagacccttgcgaggggagagatcttccaactctcacagagaaccacccgctagacaagcccacaaccttggaaagagtgatactactctgtctgacgatggcttcctcgaacagttcaagcttggagtcaatcaggattcacgggaaacccccaaaccggaacaatacccgcaggagcccttaccgccgcctgaggattccgatgagatcttcaagaagatgaaggaaggaggtctcatccctaacgccgtcgccatgcttgacggcctctgcaaagatgggcttgtacaagaggccatgaagcttttcggattgatgcgtgacaagggtacaatccctgaggtcgttatctacactgctgtcgttgaggccttttgcaaggctcataaaattgaagacgctaagaggattttcaggaaaatgcagaacaatgggattgcccctaatgccttcagctacggtgtgttggttcagggattgtataattgcaacatgcttgacgatgctgttgctttctgtagtgagatgcttgagtctggtcactctcctaacgtccccactttcgttgaattggttgatgccttgtgcagagtaaagggggttgaacaagcccagtccgctattgataccttaaaccaaaaaggatttgccgttaatgttaaggctgtcaaggagttcatggataaaagggctccatttccgtctttggcttgggaagccatcttcaagaagaaaccaaccgagaaacccttctgatttacttacgcagtgctgttaagtatgccgtctcagtaagatgttttcttgacttgtaataacaaccttgaaagtgaaaatcaatatgagtcttcctttttctgcttggagtcaggtatcgagtttttttttttttcctatgtcctttaaaaatgtgtagttgtagatgtagttccctgttttcatgcattctaatattgattgcaagttcaatgaatagcgttgtgttggcggtatagggtgtcaaattatgcttgacgcttatcagtcattaccaatgatgtatgtgactgtctattgcaaatgtggccgacttcatgaacaaatatgaacaatagtatcattggttacatacaccaggcataaaactacatcatcctccaaaggcactgctgatctcagggacgtggaggtctgttctgtagaagctggcgctatattgaatacaaaatgcgtggagtcaacattaaaatagtttttatgattcactcggagatctttacttgatttggtcggctgtattatattcgtgaactcggaagtcaaggcctgtcttgatggaagaatgactccttacttttaatatatatataaataatacactggatatgaatgccatcttttgtttgtttacttttggcgtcatgtgattcttgtattgtttactattgttaaatgcaagtatcaggtagtgcttaagatggaagcatgtgcatctcgtatgttgaccataacctctccaagagttttcttggagttgggagaatcgctgacttgattaaagaaaaacaacaaaagaatataataagagatgggaggtggggtcggcgccgtccctactcgatgatattagtctataaaagagagggaaggaatgaggtaaagaagcagaaagctggagaaagatgatttcaatgttgtttccgcggtcgcctttgtgcacagcagccatagtattctacacatgtgtgtgcattcccttggggaggttgaagaagaatggtggagatgcggatgcgcatgatgatgacggttacaacctagtgggagtgatgtttggggacaaggaaaaggaggaggaaatttgctgccccatatgcctggtggagtttgaggctgaggatgcggtgacccatcttcccagatgcgctcatctcttccatatcaattgcatagaaccttggcttctccgtggccacctcacttgccctctctgcagatcatttgtattggctccaactcctcctacacaaaatgtcaataatgcacactcctcttccaccttgtatctctctatcttcttctttttctgtatctttctccatctacttggatacttgtagcctagcttccttgttaacacacccattctttatttaacatgtattttgtcttagtttccaagcacatattgtctccatctccttttcaatcaagattttgtggattactcagttttatgatatactgtactaaacagagacaaaagcagcacgagtttagttttaccagccttgcctagtgcctactgctgctctagtgctctgtttcctaattgatttgttactctgcgtaagaccattaagtaaacgggctaaaggcaacttaataggccttatttttaaaacacattaaaagtgggcctcattttaaaccataacagattaaaagtgggcctttccattataaactgaaagtagaaaaagttggaagagaagagtaagtaggctacagtttcagtcagaggtgaaagaaaatctgaaagcaaagcagagagcagctcccttcccctcggcgaggaggaaggaagaagaaagccagagagagagagagagatcatcgcagcttctcctccgaccatttgactgcgactgtgattacaacacaccgttgatcctacgaaaaaggtcagtcagactctcttccttgtctgcgtgattccattttccggcgtctgtctagcctcgccgtcttttaatatctttcactcgccttcctgtctcttctgcacactagatttgattttttcgtaacttaaaaaaatgttgttgttgtcattcaaacgcgtccatggctcagctactccgcggctagggtttagttatcattttttaataatataatttttatggatcggcgtgcgtgcagaggtaatg

SEQ ID NO: 3493 - DNA, 3000 bp, Unknown
  misc_feature (1)..( 3000): cDNA_ID_2156727_gDNA_ID_1620648_Annot_ID_163345 3000 nt of promoter + ATG
atggatactggcggcaattcgctggcgtccggacctgatggtgtgaagaggaaagtttgttatttctatgaccctgaggtcggcaattactactatggccaaggtcatcccatgaagccccatcgcatccgcatgacccatgccctcctcgctcactacggtctccttcagcatatgcaggttctcaagcccttccctgcccgcgaccgtgatctctgccgcttccacgccgacgactatgtctcttttctccgcagcattacccctgaaacccagcaagatcagattcgccaacttaagcgcttcaatgttggtgaagactgtcccgtctttgacggcctttattccttttgccagacctatgctggaggatctgttggtggctctgtcaagcttaaccacggcctctgcgatattgccatcaactgggctggtggtctccatcacgctaagaagtgcgaggcctctggcttctgttacgtcaatgatatcgtcttagctatcctagagctccttaagcagcatgaggtttgtccacctgcaccgttttgatatatgctagggatggttatgtcgtttctgaatctctaactcttcctctctcgtttgcagcgtgttctttatgtcgatattgatatccaccacggggatggagtggaggaggcattttatgctactgacagggttatgactgtctcgtttcataaatttggtgattactttcccggtacaggtcacattcaggatataggttatggtagcggaaagtactattctctcaatgtaccactggatgatggaatcgatgatgagagctatcatctgttattcaagcccatcatggggaaagttatggaaattttccgaccaggggctgtggtattgcaatgtggtgctgattcattgtctggtgataggttggggtgctttaatctttcaatcaaaggtcatgctgagtgcgtcaaatttatgagatcgttcaatgttcccctactgctcttgggtggtggtggttacactatccgcaatgttgcccgttgctggtgctacgaggtactttcttctgttcattttatgctgctctagctttgcattgaaatttccttggtctctgtaccaaggttagccctctgtgacgcctctctttctttgaatttattacaacaaactgtttatatgacagactggagttgcacttggagttgaagttgaagacaagatgccggagcatgaatattatgaatactttggtccagactatacacttcacgttgctccaagtaacatggaaaataagaattctcgtcagatgcttgaagagattcgcaatgaccttctccacaatctctctaagcttcagcatgctccaagtgtaccatttcaggaaagaccacctgatacagagactcccgaggtatgccacttgagcaaatcatttgaagtgtgttggctcctttatttctgttgcccattctttcttgcatttcctcatgggttttggtgagcttatctaagtgtaactgcagttacaataagaattttctaatttaaacagctgggctggtaaataatgttcgtccagttagatatgtataagtattccttgattgatgactctggttgttaccaatcttagttttgtaaaatatgccttctatgtaaattataggttgatgaagaccaagaagatggggataaaagatgggatccggattcagacatggatgttgatgatgaccggtatgaaatatatatgtttcctcccctttttatttttggttcgagtcagcggtgtaatgtttacttaatgtgggatcgcattgtgcagtaaacctataccaagcagagtaaaaagagaagctgttgaaccagatacaaaggacaaggtactacagcattatctcttaattgtttcgatttctcagacactttttctggtacaaacatttgaagtcattagttcatctaggtttacagcattttccagaacagcacaatgtgctctgataacattacactttttctcatcccgagacccaaaacctaaagattccagaatgagtctcattctgacattaagtcagttagtttaagctggagatacattcacatgagggtagcgaatctttagctacggttaaatcatttagcctaggctatttatttagtatgctcccagctccaacaattgacctgattagatagtgtgaccgtctagccaagctgagctgaatcatctctgcctctcaattcctaaagccgtctccttttcttccgagattaatttatttatcatggcatgttgttcgtgcaggatggactgaaaggaattatggagcgtggaaaaggttgtgaggtggaggtggatgagagtggaagcactaaggtaaaatgaagcagtggacagggctgaaaagggtgggaatggtggttttctaaagtggttagttttgattgcaggttacaggagtaaacccagtgggagtggaggaagcaagtgtgaaaatggaagaggaaggaacaaacaagggtggggcggagcaggcgtttcctcctaaaacataagactcggagcttctaatttcttgctactttttctgtctatcaaatgttgctagttaagtttctggagttgttgttgttgtaagcactcctctgttttagaggattgagcacggatatgtatttattcgttgcatgtctgaatgatgatatgatatgacaagacgagctattccttttgctatatatttattgattgggccgaagagatctgcgtctgcccaccccaaaaaaataaagaattgatgtgctaaacgcagcaatgaacatcatcaactagtgaagtgggtggagaagatgttttcctgtaacacaattgatttctaactctaaattaaaaaaatgtaaatccctttaagactattaagcgtctctctgtctgtctctcgtcgttctcgtttttgattgcttagttttttcccgggagactgaaacatg

SEQ ID NO: 3494 - DNA, 3000 bp, Unknown
  misc_feature (1)..( 3000): cDNA_ID_1820933_gDNA_ID_1620648_Annot_ID_163336 3000 nt of promoter + ATG
tcgtacggccaggctttgacttctttttcggactgaaaattgatataactaaaattaatgacttatctttgtaaattactttaaattaataaagtaaaagacaattaaaaaaataacctgttgtttagcatcttcccataacaaatcttgaggcttattgttgctggtagaatcagagtttaagtaaataaaaacaggtcccaagacctttttccacgcttcaccaggtctgtaatgtgcctccatgtccgcaccaacataatgtccgcttataaaagtctgcatatgcaaatcagttaagtaacgaaaacattaatactactatatatagtaccaaaaatgtaatctatgcttaatagctttggacgatgtctttaccgtgatggccgtgggtccgacgtgagacgtgagctcttgtttgatcggtccaccggagcgatattcaccgcttggtgagatgatccaaaagccgacacgggacttggttgagatccaaccgtgcactttgttgtctttgatctcacatgtgtactggtacttatcatccacctaatatatatcattcaaattaacgatcaaaattcgagacttcggatgcaagaacaattaaatattgcatccaaaaccgtatgcaaaagactaggtacctggtttttgaacatggagttatgaggatgagtcaattgtacagcctctttataaccaagagccttggcatgaccacgtttgatgtcacggtcatcttccgttggcatttctctttgtcgattatccgccaccgccatgtaatgaaatctacaaacatattttgtgatagtttagataaactcttttttttttttttataaaaacaaataattaacaaaacattggaatcgtataagatacctctcagggttgagtttgaaagcgattcgaattaaacccatgtcgagttctggccattcgggaagtctctcgaagattccgtacatgtagattcctgaagtatttctacgtatgatatacctcttgtctacgtttaatggaatatgaccatcctcccatgttctagagaacgatatctccacttgttcttgggtttgagtgatgattctaaaatttgttccttcgattctgaaccgaaaaataaatatgagtttataaattagaaaagattcattaaaattataaaccctaagataagttagatacttgctctataaatgtgaacgtgtgtatgttttattaaataatttaaactgacaaatcagacgaagtattaagtaactaacctagtttaattaccgatctaagccgccttggcgaatgtttgttccttgccatgttatgtcccagtacctacataaaatcaaagtaataaatcaggacaattttatgtacttacattacataagctttttgagaaataataattgattactacaatattagtttactgaaaattactcaccctctatctcggagatgtggatgaagaacattatcaattcctttgtatttgatcccagttataagtccttgaggattcgagaaactgactctgattatcccattgtccactatcacctgaaaattattagttttatatgtacgttagaatgtataatcatccgattattgattaaaaaatactattgaattatcattaaccctatatacctctctagtcccatgatgtctgcttcttatctgctgcactgttggagctcttgcacttattccatctaagttcctgtacaattttaataattacgcataaataaagccaatgcattgaatactgaaaacgcacacttataattaaattaattgtaaggcaaagagagggagttgaagtttgtttctaaaaaacaagatcgattgttacaagttaattaatacacacgttatgatcctaaaaacaaacttcttaattttatatgcatcaagaagttttttttcccttgttgataatcaaaaattttatgtcaaaatctagaattacttcaaactcatacgagagtcatcacaattgctagctaaaaacaccaatgaaatatgtatgagaatcgagaaacatgtgaattttgtgcacatacaacgtatatgtggatatgtgtttcatcgcaacttgtgaagaaaaaaagaaaaaaaaaactgaccttgtcggcttggaaaaggagagtggaagaagaagcaacagaaggaaacaaataaataacgaagcgatcttcttctgcgataccatcttttcttccagaaactcgagatttgaaataattaatgtttaagaataagatctttgcttctatgcatatattttatatgcgtgtgtgttgttaaacaaagtccaagactaaacgggaatagtaggtgcaccaaaacctaactaggagttactttgacttgtgaatgctgacattattagaacattagacttctaatatgacttagattcatagaagataatacgtaaaagatttagtttctggtatttttccatttttttttttgtgtatttccttttttttgtttaatagaagtaataaagaatacggaggataataatgacaatattcctgatgagaaagttgataattttctaaaagtttcacaaatcttgagcatgtatatattgtgaagtgttgtgttcattgtaacgtcggattgattgcatgaattaaatgaatatgacaaactatttgagaatgtaaataatgttttcttgtcctacgtatgacattatatcatctatacatgaatgacgtccatggcggttatatttgaataattgaaaaatacatgattttgcttcaaaaatagattgacctaagtccatgattttgctttaattaagagttaagacaaacaaaaactacaatctaaataaataatgataaaaaataataatataaaaatatttttagtaaattaatcaaaaaaaaaagagagcatgtgagctcacacataagacagcaaaaagagctaaatgcagagagcttcagatccgaccaaaca

SEQ ID NO: 3495 - DNA, 3000 bp, Unknown
  misc_feature (1)..( 3000): cDNA_ID_3071262_gDNA_ID_1620648_Annot_ID_163335 3000 nt of promoter + ATG
gaacgcagtgctatctttgaatatggttgtaacctttctactagctttcatactggacaacactgtacctggtagtaaggaagagagaggagtatatgtgtggacaagagccgaggacatgcagatggaccctgagatgcgagctgattactcattgccaagaaaatttgctcagatttttggttgcagatgttgttaagtagatatttaagctccaatttcagtttttcaatagcttccccacttgttcttaatatatggaagaaaaggttctcatggaaaaagagttgcaggtttgtgggataagaatatcaaatctttctggaacaatatcatagtgatagacccatccagtgttgcgtttgcgtttgttggggaccttataaagaagctggctaattcacaggatggaacagagtacacaatacacaaaaataatgaattttcctcaaagaatgaaatgttgatgttccgtgttactgtcataagctatgatatttaaaacttacaagaggtgtacatgctagctttttttggcttgggaccgtatctacgcggttgaagaaggaaaaaaaacaaaaaaaaaaagtcttggatcagtacttgacgacatggtggcgtaaccatagttcatacatgatcatgtgaaatgcgtcgaatttgactggaggtgagttccattgaaaatgcttctgcacctgcacaacaacaaaaccaatcagcttcttgtatacaatactggataagatggtgaaattctctttaccttgaccaagttgttatgcaacgaaacaaactctgagtgaggtatgttcttgaggatctgcttaaggttatagacatcttgctctctgagtacaaccgcaaattttcgccaattcaggatgtcgttgaaagggaggtcgtagtagtctgataatatgactggccaaaaacaaatgccgacaaaataacaagatgcattagttcagtttctttgaaggtatatcgttttgacgagtgcagaaagagtataagaacatgtaccaggaatacatccgtaatggatcgagtccgttatgcgagcgctgtttacttgagaaccaccagggcatatgcagaatttagtccggtagaatctcttctgatacaccaaatgccctgtagctctgttaattctgttgtttgaaatatcaagctctgtgtcgttttcccacacatgagcaagtataacccgtatcttagaatttcgatgaccagcccaaaaaccaagagtcgtcctgtaacaccaccatttaacagtattagtaacattgagccaacaatacaactccaggatctaccagagttcctaataaaagagggaggacttagtttaccgattctcaacatcatttccaccagcagggagagcaaatggctgaagaacttgaggcaaagcaacatctttgtgaggaatgaaaccaacattgtagctaggtgagcacacaaccctaatagtattcttaatcagaagcggagatccctcaaatgctctaacaccaacatcatgacatgtaacaaagaagtgatctgctcctaaagttctattccaataaggatacttagctatcaatccatcaacatagttttgaacaatcacagtcatattttcatatgatgttccctgcacaacaaagatcatcacaattcaatcatcaaattcatgaaattgcaaattctcagtgaatcaaaacttgtaaattcttactttgcctcgcatcttgtgacaagagattggaatgaagaagagatctgcttcatctggatctagggttcgaaatcgactctctctaatgttctggaagaagtacccctcactagcgtatttaccggtgactttcctcggcgtttgataaaacgtatttggatcgccgtcgggataaatataaaccttgaatctcttctccatctcggcgtaattcaatcggaaagcctccggtgagtgataaacatcggagtaggtttcttcttccatcgtcggtgtttcgttatcagtcttatactcattcacgaaggtatgaggaacatgaatcggtgttaccacgatgacaggagacggcggcgaagtgcgtaaggaattgagagagaggtagaagagggaaatgaaagtgagaatagcgacggtgaggagtgagcttttgagtgaacataacggcgaagatccgccgccggagaatgagaactgcgacggtttaacgatcgtcattgtttggtcggatctgaagctctctgcatttagctctttttgctgtcttatgtgtgagctcacatgctctcttttttttttgattaatttactaaaaatatttttatattattattttttatcattatttatttagattgtagtttttgtttgtcttaactcttaattaaagcaaaatcatggacttaggtcaatctatttttgaagcaaaatcatgtatttttcaattattcaaatataaccgccatggacgtcattcatgtatagatgatataatgtcatacgtaggacaagaaaacattatttacattctcaaatagtttgtcatattcatttaattcatgcaatcaatccgacgttacaatgaacacaacacttcacaatatatacatgctcaagatttgtgaaacttttagaaaattatcaactttctcatcaggaatattgtcattattatcctccgtattctttattacttctattaaacaaaaaaaaggaaatacacaaaaaaaaaaatggaaaaataccagaaactaaatcttttacgtattatcttctatgaatctaagtcatattagaagtctaatgttctaataatgtcagcattcacaagtcaaagtaactcctagttaggttttggtgcacctactattcccgtttagtcttggactttgtttaacaacacacacgcatataaaatatatgcatagaagcaaagatcttattcttaaacattaattatttcaaatctcgagtttctggaagaaaagatg

SEQ ID NO: 3496 - DNA, 3000 bp, Unknown
  misc_feature (1)..( 3000): cDNA_ID_1820951_gDNA_ID_1620648_Annot_ID_163331 3000 nt of promoter + ATG
gtccctgggtaacacaaattttctttactcaacaaataacattatttcatattaaaataaactataaatgctagcaaacgtgattgttactatttcaaataatatcaacctatatctaagattttcttgcatattttaccggatgagacatgttaattcataccattgttattgtaaaatcaaacaatggattgcacaaaaaaaaaaaaaaaaggctctaatgatgacatttaatcggaattaaattgtttcaggcatgagattgtgggcgtggtgactgaagttggagccaaagtgaaaaaattcaacgctggagacaaagtcggagttggctatatggccggctcgtgcaggtcatgtgacagctgcaatgatggcgacgagaactactgtccaaagatgatcttaacgtccggagccaaaaactttgacgataccatgacccatggtggatactccgaccacatggtgtgtgctgaggatttcatcatccgtattcctgacaatctcccattagacggtgccgcaccactactctgcgccggggtcacggtctactcccccatgaagtatcacgggctcgacaagcccggtatgcacatcggtgtggtgggactaggcggtttgggccatgtagcagtgaaatttgctaaggctatgggtactaaagttacggttattagtacttcggagcgtaagagagacgaggccgttactcggcttggtgcggatgccttcttggtgagccgtgacccgaaacaaatgaaggatgcaatggggactatggatggtatcattgataccgtatctgcgacccatccacttcttccgctgcttggtttgcttaaaaataagggaaaacttgttatggttggtgcaccagcagaaccgctcgagcttcctgtttttcctctcatctttggtatgaacctatttgtcagtcatctttaaacattatcaacaatatagccaccaaatttgcggttatagtaacaaatccgtatacttttccattgataattaaatctagtgattattttgtcacaaatctaatcatatttgaagagtaaagccactaaacgttgagaatatggtcttcttctttttgtgtgtgtgtggttgtatacataaagggcggaagatggtggtgggtagtatggtaggaggtataaaggagacgcaagagatggtggatttggctggaaaacacaacatcacggcggatattgagctcatctctgcggattatgtcaacaccgccatggaacggcttgcaaaggctgacgttaagtaccgatttgtgattgatgttgccaacacgatgaagccaactccttaactagaaagcttaagaattgaatatccccaaagcttttttcatgtttttgcttgtttgtttgatgttgtttgctggcgactttgtgtgtagtattaccacactgcatgtactttatcagttgaataaacttgaatattgtatttaataagctatctacattagattttggggaagtttgattaaaatttattccgattgaagattttagttggcgatattgtaagattacaaacatattaaggttgaaatgtgatgggttcgaatgatagaaacagttttgtttgaccgacacgagaaagtaatgagaacacactgatttaaattgatgactagaaactaccaagatatttattggtcagatttcgtaggactaatcaaatcaaaaactacttcttttgagacaaagtgcatgtatcttagaaaattttcaatgattccgatctttaattagcaatgtaaacacatttttactatggaatatgttacgtggacggaactgaattgagtttccgaatggaaaaatatggaccacgtgaacagatacatatatggttgagttgagcaaagttcaaaatggtccgtacacactgactaattgtcagtattctaacaacgttaatttcgtggtgcacgaaaacaaaatgacgatgtggttgcacaaggtccacgttcttgtatattgttttttaatgtgctaattgtgcgctaaaataaatttaattgtataaaattagtatagtttatatttttttaatatgtatatgttcattcaaaacatttggataatatatgtttactatgtgatagactgatggtggaacattttatccatcttatatgcatatgaataaaaattattcaaaatgtttgttgttgttcagattattaattattaaagaattagaaaattttggaattacaggtatatatgtatgtgttgtatattgtatatttaaattattatgtatatttatatttaaatttttctattttcataaatcgttagtatataattgtgtcacatctaatattattagaagacaagttggacttttcataataaaataaaacatatcttttatcaaattaaccttttcctttaggtgcccaaatccgtagcaccatcaaatacctaagatatactttttatttccaaaaatcctttcgtttgatctaatattaataatataaacgatcaaacaaaacgatttttagaaatcaaacgttcaagtttgatcgttggtcgtcgctaatttaagtttgatcgactgctcatgttccgtgacaatgttaaaactgaatacatgaaacatgttttttttttgtgcatttgattttaataattttttaaaaactgataacacccgaaaaaaacagcaagaaactaaacaaggaagaaaagaacggtcggtgaggaactctcgtgaaagtcttcaaaagacttttaacggaaaaacaaaaaacaaaaaacaaaaactcttgtgaacgtaagtgcatggaccgaattgcacccgatcacgtcggttccacaatcctctcctatattaaggccttcactgctccttatcatctcaaacttctcatttattaataagtgtcattcaaaagaataaaatcaaatacttacttttgaatccgtttttttcattgtttgatcgatt

SEQ ID NO: 3497 - DNA, 3000 bp, Unknown
  misc_feature (1)..( 3000): cDNA_ID_1807550_gDNA_ID_1620648_Annot_ID_163330 3000 nt of promoter + ATG
agatggagagattatcaggagagaaagagcagagcgtagaggcgtttggatgggccgcgagagactcctcaggccatctctctccctttgtcttttctagaaggtaacggtgactgagtgatgatgaggatggtgttacatgatggatcgatgattattatagccattatgatgatcacgatatgtgcaatgtgcaggaaaacaggagaagaggaagtgagagtgaaggtgttatattgtggaatatgtcatagtgatctccattgtctcaagaacgaatggcattcctctatttaccctttggttcctgggtacgcaaattctttttctttcaataacattaactttcataaattttcagttatgttcaaaataattatatgatcattgtgtcgcttacattatagtactcccagtaatttttgtttctatttgatgtttaagattatatctacaagtttgaccactctagaattcacatggcaattataaacaatgtagattttgatcccgaaaaactcgagtcaagaaaatcgaacttttgcttatggttatttaaatacccaaggattaggtatatattggtgaaatgaagttaacatatgtttcatgaaatattaaaaacaaggagttgtttggtaaaatgcttaattattagagatcaaaatataactgagtggaagtaaatgtggcaaattcttgtttgtccactgtttatagtggagcacttacttagttcttttctttcggctaaattaaatatacagttgaataaaaacacatttaggcagatttattactctcaaataagttctgcaaaaaaatgagagcactcaccgttcattattaccatcattacttaaagttgactattgttagtttccactctctttttttttttttttttttttttttttttttttctgttttgacaaatgatttctcatatagtgacttgtcttttttggttaaaataatataactttattatattataggtaaatccacgaacacacagatcaatataagtgcaacacaaactaaatacatggggcactctttttatattgtttcaagttcaaatgtataaaagttttaaaatattttttaatataaataagataagataaacattaattattacttttattttgttattaatgctagttacattgccagattaatgttagaaatactatattaacgtatggttacgttgtttagtacagtcacgagattattggagaagtgagtgaaatagggaacaaagtaagtaaattcaatcttggagacaaagtcggtgtgggatgcatcgtagattcctgcagaacttgcgagagttgccgagaagatcaagaaaactactgcacaaaagcaatcgcaacctataacggagttcaccacgatggaacgattaactacggtggatactccgaccatatcgtcgtcgatgaacgttacgctgtcaaaattccacacacattgcctctagtttcggccgcacctttgctttgtgcaggtaattcaaatcaaatatggctatatatttaaaaccaaaaaaaaagtgtggtagttgttaagattatcgatatttacaaattacaaacatgaaaaaaaaaaaaaaaaaagaagaaattatctacgtttctatcaatttttacttttcatctgatgatcatgaatatgatttcaattaatataccgtttgtaacgtaacatataggcatctcgatgtacagtcctatgaagtacttcggattgaccggaccggataaacatgtcggaatcgtggggctaggtggtcttggacacattggtgtgagatttgctaaagcatttgggacaaaagtcacggtggttagttcgaccactgggaaatctaaggatgctcttgacactcttggagctgatggattcttggttagtactgatgaagaccaaatgaaggtacgtaatcttaaaccattcattaattatgcgaataaaacgtaaaaaacgttatcaggtttcaactttatttaggctgcaatgggaactatggatggcataattgatacagtttctgcatcgcattcgatttcacctttgattggactactcaaatccaacggtaaacttgttctactcggtgcaacggagaagccatttgatatatctgcattttccttaatattgggtatgcatatataaccctacgtaatagaacgttatattagtctttcacatctagactatgtatcgagtatgatgaaaccatgatgcgacaggacgaaaatcgatagcgggaagtggtattggaggaatgcaagagacacaagagatgattgactttgcggcagagcatggcataaaagcagaaattgagatcatatccatggattatgtgaacaccgccatggatagacttgccaaaggggatgttagatatcgatttgtcattgacatttctaatacattggctgctactcgatcttaattaaagtcgatgttctatatgtattcaaaataatctggatttcaatcccacaaaacttaaggatatatatatatatatatatatagtctattttatataaatggagtatagtcaaataaatatgcattatcaacgatatatagtcttctattacatagatacgtgggagttcacccaacgtagatacgttcggttgaaacaagtcaatttcatcaatgcctcttccaaaaaaaaaacaaattgcattattgatgaacacatgcatcattatcaaataggttggttaaaatgaccaagatgactaaagccaatcacactactaccagatcgagtaaccattagggaccattaattcacgtggacgtagtgaatatggtccttgtgaattaatgagtacgtaattgtcctcattcatatatggatcggttccacaaacatttcctgtataaaattctacatctttcctctcattattatctctacacttctcatctctcaatcccattcgcttattatttatccat

SEQ ID NO: 3498 - DNA, 3000 bp, Unknown; identical to SEQ ID NO: 3474
  misc_feature (1)..( 3000): cDNA_ID_4262366_gDNA_ID_1620648_Annot_ID_163320 3000 nt of promoter + ATG

SEQ ID NO: 3499 - DNA, 3000 bp, Unknown; identical to SEQ ID NO: 3481
  misc_feature (1)..( 3000): cDNA_ID_1808991_gDNA_ID_1620648_Annot_ID_47648 3000 nt of promoter + ATG

SEQ ID NO: 3500 - DNA, 3000 bp, Unknown; identical to SEQ ID NO: 3479
  misc_feature (1)..( 3000): cDNA_ID_2999381_gDNA_ID_1620648_Annot_ID_47649 3000 nt of promoter + ATG

SEQ ID NO: 3501 - DNA, 3000 bp, Unknown
  misc_feature (1)..( 3000): cDNA_ID_1820967_gDNA_ID_1620648_Annot_ID_47650 3000 nt of promoter + ATG
tagtttcttataactccaataaaagaactatcatttttagcaatttataaaaccaatacaccataatttctctttattatttttagttatctttggtatagtatcgaatcttaaattaattactatcagaggtatacactaaaaatgaaataatggccacaactttggaacatttagtacaatttccaccagtcttcaagttccaaggccatcttttaaactcgacctttgcagttacatactaaaattattattatcttcggaaatctgagaacatgtttaaattataaactttatggacccaatatgtgggatttaagttttaaaacatcaaaagggacaccaccttatctccttttcttggtctgatcaataatctaaacaaggtttattatcattcacactaccactctgattaccctctcacgtgaattctatagcaccaaccagaaaaaaaaaaactatactttatagaaccaatatctattatacattttcacttaacatatttttttgtcaaatggtagacgactacttatgaagaataatggagactaattatgaagaataatgaaacattacggtattcaaatgggaatataatctctgttcttgactaaactaattggacataaacgcatgatgaaaagttaaatctaaaatatagcattaattatatacttaacatgctttgttggtgtaaagttccaagaatcacctgaaaaactatattctatatttataacaataggtgtctgtaatataaatctgctacttgaacaacagatagtcagtagtatgggtgtattatttaaactctatagtaagcaatttaatttggtaaagaaataggtcatctgtgaaacctattactctttggtaactagctcttatggattacagattctatacatgtgttagatatttggtttagtcattacaaaacatttcttaagaaataggtcttatatatatacacagcaaagataaacacacacaattacacaaaacaaatattgttaaaggggttttaagaaccaaaataaacaaagattgtgataattctagattgtttatgttttagacttgaaaaatatggaaaacgtagacaataggcttgaaacgtaaaagaaagagtggtataaacccgtcgaactaaagataataatgattataattggtaaaatcgaaatgattcgctgatgattgacacctggcgtgaatgagactgaatcttttatcttaagaggacgataattggggatttggtcacttggaagttggaagcaactttaagattctttgttaatagaaaaagagccaaatctgaatttgagtttgagattcgagatgtgattggttcgaagcagtccagcccacgtggtcttaatagatctttaattatcatgttatctatctggggcccacctaaatcttatacatcaacggtataaaatcgaacttggttattagggtttgagcttggtttagttcggtttaaaggacatttgctacttttaaatcaaattcaattgatggatacattcgcgctaggggtggtgatttatggcaagtttgagggttggtcaaagttaaagtttagacattcaaagaaactaaaataaacacacaaaaatagttagtaatgaaggatcaggtgtacggattctgcggtggagcgtgcgaagacttccatcaattggtgttctcaggagctgttcctgcttctcccacgtgtgcctgtcacaaatgcatattacattttagattgtatatttgcaatatgcataagcttgaaatataagttacggtttatatatatatggccttctgagtgaaaatattctatatataagtgaaaattttgtatagctcatttcattatgatattgaacgcgagttgctttgagtagaaatcaagcattaagccatcgaaagtaacagacgttatatagttatttgatattaaatttcttgccatatttggaaacttacgacaaaacaattaatatgatgaatctccgcaactccaagtccctgtctgacacgtgtacttgatatcgtttaaaatcatttattaattgacacaaaaataatttattcatttgtatttctaccgaaagccatatggactaatatatgttgtactagattaatactgtatgtttttgttcaatccattctcttacttttttgggtaaatatcttttggacagatctaattaatatagtataagttttcctatgaccataataaagggccagaatatttttaattttcttttaatcacctctaaaagatactaattaaattaagtaaagcagcatataaagcaagagggttttgtcagagaaacacagtcctgtgatgcgcccattcactattttcacatgacatttgaaataagacttaagaataaattataaataatgtacggacatgttaaaaaggaaatattattgataatggaaatttacctaactcacactaagtttaatattatttcactcctttttatctaaacaattccattaagtttccactatctcccgtaataaacaaactataaaaaagaatcagtgattaaagttgtatatatgacacacatttaagctatatctatatattctcttaacctaggaactttataagaacttctctctatttcattggtttgataaaatcatacacacaaatactaattttggactagaaatttagtacttttctatgtattaaatctacccaaaaatgtctcaaactgagaggtgagtgtgtatgtgtgtgtgtgcatatgcatatatatacttagtttattcctcgaatagattgttgactcttggctcaaccttcctctctctctatttctacctttctctttctccttattcgttcatcttcatattcccttcccttttgggcttggtaagatctacaaaaaaaaaaaccctaaaaaagagaagaaccagaggagattcaattagaggataaaattgatg

SEQ ID NO: 3502 - DNA, 3000 bp, Unknown; identical to SEQ ID NO: 3476
  misc_feature (1)..( 3000): cDNA_ID_1820963_gDNA_ID_1620648_Annot_ID_47651 3000 nt of promoter + ATG

SEQ ID NO: 3503 - DNA, 3000 bp, Unknown; identical to SEQ ID NO: 3475
  misc_feature (1)..( 3000): cDNA_ID_1820955_gDNA_ID_1620648_Annot_ID_47653 3000 nt of promoter + ATG

SEQ ID NO: 3504 - DNA, 3000 bp, Unknown; identical to SEQ ID NO: 3497
  misc_feature (1)..( 3000): cDNA_ID_1807550_gDNA_ID_1620648_Annot_ID_47654 3000 nt of promoter + ATG

SEQ ID NO: 3505 - DNA, 3000 bp, Unknown; identical to SEQ ID NO: 3496
  misc_feature (1)..( 3000): cDNA_ID_1820951_gDNA_ID_1620648_Annot_ID_47655 3000 nt of promoter + ATG

SEQ ID NO: 3506 - DNA, 3000 bp, Unknown
  misc_feature (1)..( 3000): cDNA_ID_1820941_gDNA_ID_1620648_Annot_ID_47658 3000 nt of promoter + ATG
agatgtgattcagtcaacaccaaattctgctactacaacaactacagcttgtctcagccacgtcactactgcaagaactgtcgtcgttactggacacgtggcggcgccctccgtaacgttcccatcggtggctccactcgaaacaagaacaagccttgcagcctccaagtcatctcttctcctcctttgttctcgaacgggacgtcatcggcgtctcgtgagcttgtaagaaaccatccatcgacggcaatgatgatgatgagttctggtggattctccggctatatgtttccgttggatcctaacttcaaccttgcctcgtcttctatcgagtctttgagttcttttaaccaagatttgcaccagaagcttcagcaacaaagactcgtcacttccatgtttctccaagattctcttccggttaacgagaaaacggttatgtttcagaacgtagagttgattcctccttcgacggtgacgacggattgggttttcgataggttcgccactggaggaggtgcaacaagtggcaatcatgaagataatgatgatggggagggtaatttgggaaattggttccataatgctaataataatgctctgctctaattatcaattatcatttactctctatttctctaaatattgtagctagcatgcagaagctatggctgataaaactagtaataatttcccctttgtaatttttagcataataaatttgcttaatttccaagagaaaaaattaacttattaaatttactcattcctaattataaatcgctgaatcaagaatttctgtgataataatcatgtaccaatgtaactgcatagacattataatattatacacgtataataaggtgaagaagcaagaggaacgtgaagtagaagaggacaagttcagctttaggcagagacatgtgagaaactcatgaactctcttatgtatgtgagacattcccatacatgatgaattgatgatcatgtcatagatacatcatacatccatcatcattggtctaaagtcataaacttctctatataacttgatcctggaaccttcgagataccttttaccttcatcaacctcctgattctcgcaacatcatcccatcttctattagcagcaaaaatattagacagcaacacataaacaccactatcttcaaactcaatatctaaaaaactatctaatatctctttaggaagctccattaatgtccctctattcttacaagcactaagaatagctccacatatacgtacatccggtttaaccggcattgctttgacgagttccaatgcttcatctaacaatccagctctacaaagcaaatcaatcatgcatccataatgttctagcttaggaaatagattgtattctctgcttttcattttatggaaatatcttctcccttcatcgactaaacctgtgtggcaacaagcatttagagccgcgagaaaagttaccaggttcggcttaaaacctagcttaaccatttcttcaaagtatctaagggattcaagtccatgcccatggatagctaaaccacctaacagagcattccaagtaaacacattcttacttctaattccgttgaaaatctccaaagctgtttcgatgtagccacattttgcatacatatcaacaatggcagttccaatatgcgtatcccatttgattccagcggttaaaatatactcatgaacccatcttccgtgatccacagctcctaagctagcacacgcagagagaacacttgtaagtatatgcccatctggctttataccagaagacgtttgcatcagagaaaacaagtcaatcgcctccttagatctttcacagtgaaccaacccactaatcatactattccaagaaactttatctttcttttccaactcaccaaaaactctcatcgcatcagacaattgctcacatttcacatacatatctataagagcattaccagtctctaagctgatcaaagatgccctttttaagatcaacccatggattcctttccctaaacttaaacaccctacccgcccacttgagaccaatacacaaacatacgtagccaaattaggctcaacatccatctttgaaaacgtatccaaagcttccttatacaacccagtcctcgtgaaaccagttataatcccagtccacgaaacaacatctctcacaggcatttcaccgaacactttacatgcattccttgattctccacacacaccataaaaatgaacaagcgagttttgcacatagatatcatcgtaaaaacccatcttcgtaacaattccatgaatctgtttcccttctctgatccctgaaaacttcccacaagccttaaaaactggaggaaacgtgaacatgtccggtgaaaacccattactcacaaatgttttgtaagcaaaaatcgtcactcttggtttatcacaaactgcatagcttgataaaagcgtgttgtatgagaaagagctcaacacagaacggatactgtggagaattacagagctgtaagatgcaaaatctgcggatttgcccagaaaggtcacgactttgttgatgattaagtcatcacgaagaagatcacgagtaatcaattgagtctgtatctgtttgaaaacgcgaagagagctgcatcggctgatcaattccagaagaactgatttctccggcaaatacatctagtcgcaaatagtgatcaaacaatcacatgggggttctatgttaatctgcatttgtagaacgagttcgattcacagaaagaaccaaatttgcagattcatagacggagaagaagcggaagactgaaacagagagctaacctgaggatgacgaagagggtttaccgttaaaaccacttattgggcctattattgggcctatctttttaacagattgggcttttctataaaattcttagacctctctagactctaggcttcaccggagaaagaagagaaatcaatcggattagttgcagaagtgca

SEQ ID NO: 3507 - DNA, 3000 bp, Unknown; identical to SEQ ID NO: 3495
  misc_feature (1)..( 3000): cDNA_ID_1820937_gDNA_ID_1620648_Annot_ID_47659 3000 nt of promoter + ATG

SEQ ID NO: 3508 - DNA, 3000 bp, Unknown; identical to SEQ ID NO: 3494
  misc_feature (1)..( 3000): cDNA_ID_1820933_gDNA_ID_1620648_Annot_ID_47660 3000 nt of promoter + ATG

SEQ ID NO: 3509 - DNA, 3000 bp, Unknown
  misc_feature (1)..( 3000): cDNA_ID_1820929_gDNA_ID_1620648_Annot_ID_47661 3000 nt of promoter + ATG
agttgataatatagataatagattccccggacaagttaaactagattcagtttgataagactaattcccacgttattacgatgaagcaaaagccaaatcaaattgtgtggtcaactcaaaatcaatctttttgttaaagaaggatattatcaataacgactaaacaaaacaaaaattaaccaacactatttctagaacattcatgaaagtattatctccgtataggctataattaaattataaagtctttcttatctctaaatcataagatttccctagtaatctccacgagctaaagtcagaagaaccaaaggcagatgagtacgccacgtgtacataacttgagcctcatacacacgcaaaacgattggataaaatagaacacatcatcatcatcaatttttgtacggttgtaagaagccacttgtcaaagaatcaacggtaaataagaactcttctccttcttttcgtatcttaaatttatataacaaaaatgttttaatatttgagaaactccatcaatcaatcataattattttagtttaatgattggagagaccgatcgtgaatttgtggccgttggatcaaaacttaatccaaaagattggagaaatcgatttataaattgcagaagaagacgactagctgttgagtacaagggacgacgaatttggtcggagggataataatggaaggagatgatcgataatttgggtttttagggttcctcttctctgatccttttgataattttcaccgtttttttgggggttttaaaatttcttcaaattctagttgatttcattttcaaattctggtgaaacattatttgtgtttcaatggtgaagcttagatcttgagctaagagttaagaaaatttcatctttttcctgtgaaagttttgtcctttttagattttgttttttttttattctttaaaccgttcattgatttcttctgagtcattagaggttgatttattgcaagcaaaagggttttcaattgtgtgttggttgctgtgatctttgaccagattttatggtggaatttctgaaaaaagtatcaatccggttcttgaaatgatgaagagaccgatcccaagttggccatggtggttattaggaagtagaaaagagaaagaaactgaagctcttaagtttcctacaaagatagctcgagtaaataagaggaaagagcttgaacttgagagctttggttcgtctggctctgaatctgtagatgttgttgctggtgatggacctgaatggtctgttggatggactgagccacatggacctgatttccaaagtgatgatgaaggaaatgatggtggcttcttagtgttggttccttgttatagagctgttgttgaaggctctagtaataataataaccagctcttgagtgctgtcaagaatctccccaatggtttgcctcctggtatgaatcacccctaatttgtggtcttggtttggtgtagtgaattaccatagccttctctcttgggattgatggtctattggatataatgcttgtggttttggtttagtgaactaccaaagttgctctctttagaggtttcttttcacatttgatcccatgtgcaaattgtccacagtctttgctatttgatgtttcaacagtttttgtcctaaaccaaagtgaaaacttttctgaattcattcttatcaaatttgcagatgggaagaattacatggagcaatggctttcatctctgcaaaaactttgaccaggtctcttccttgtgtagttagttagtagtaagtagttttaatacgctctgaagaatcattttggttactacatttatcctgaaaaccccaaaaaaaggagaaaaagggaatagaaaagagggaaccaaaaaaaaaacacaagtagttttatggtttagattaagatgatgggtagttgcttacattgatcctggaaacggatcaagtccaagaaaaagggaagaaaaaaatagtaaaaagaagttgtggggttgggaaagctatggagaagaagtagctttaagattggttacattcagaaaacagatcaaaatccaagaagtgaaggtggatatcaaattacattgatcctggaaaaggattaaaaccggaaagaaaggaatacgaaagcagtgctaaagatttttatcaagatgatcaaattgatggtgtgagtgggattcttcaattggtttggaaattcatgtaaagtcttgtaaatacaaaaaaaggagagtgatgtatatactcttgtaatctatcgtgtcctgtatcataacctcctcaagactgagattgtaagtgattgtagattgtatgtaatattaactaccattgatccttttattgtatgtagaaagtagaaacactatttgccattgtaatcctctttaaacatcctctgtatatctatccctttatatatatttcaattggagaatcagaaatatattttttgaattctgaatgtccacattcttagtagtgagtaagagatattatgctttggatctattttatgatttcaagagtaacaaaagggtacaaattttgataaaagaaaactctgtttttgttgtacatatatatcaatgggtcggaaggagactaaaggactcaggggtccatatctcggaaatatggtagttaagcatccaccgtcaagttctaaatacatcattaagcagctaatattgaatacttagtcttaaagcaaactttattattggctttaatcatgtatataataagatattttcatacatcataaggatagtttagtcatttagttgaggtaaagacaaaccgctgatgtcgacatgagtgagaaagtgaaataacgttacgctctgtttctcacttcagagagccaaaaagttagcaaaaaaaggaagaaaaagaagctggaaaatgaacttacagctcaagttcacttcacaagcttctctagtctttcttaaattttgagtctttgttggaaacaatg

SEQ ID NO: 3510 - DNA, 3000 bp, Unknown; identical to SEQ ID NO: 3492
  misc_feature (1)..( 3000): cDNA_ID_1820909_gDNA_ID_1620648_Annot_ID_47669 3000 nt of promoter + ATG

SEQ ID NO: 3511 - DNA, 3000 bp, Unknown; identical to SEQ ID NO: 3491
  misc_feature (1)..( 3000): cDNA_ID_1820889_gDNA_ID_1620648_Annot_ID_47675 3000 nt of promoter + ATG

SEQ ID NO: 3512 - DNA, 3000 bp, Unknown; identical to SEQ ID NO: 3490
  misc_feature (1)..( 3000): cDNA_ID_1820885_gDNA_ID_1620648_Annot_ID_47676 3000 nt of promoter + ATG

SEQ ID NO: 3513 - DNA, 3000 bp, Unknown
  misc_feature (1)..( 3000): cDNA_ID_1820881_gDNA_ID_1620648_Annot_ID_47678 3000 nt of promoter + ATG
accaggcagcccaaaaactggattctacccatgggagcagcctcgaaggaagaagcagcagcgagatctcccctagtggttgcagtgctgaaggctctgagggaactgaaaagagattcattcaagaggtatgcaccgaatttcttcccattgttggtggagcttgtgcggagcgagcacagctcttcacaagtcccacaagtcttaagcacagtgttccatacatgtatgggtgcaatgatggatgaataatagggtggttataagtgggttttgacattcgagcacctgaaggatattgattaacaagcagacacaaatcactcttttcttcttttgttttttcttctcgacggagatgcgagatttacaggttttgtgctgttgattgatagtgctgatataaagtaattgattactgtttgtagaaactaagaaaagaatggtgagattaggagggtcattgcattttgtctgcaatgcctattttcttccttccagtcgtgatcaatgtgcataatatactctcacacagctaaatgcggtccaagtaaggattgtgaaggatatattatataaaaagaaaaaagaaaagagaagacaaagatgagccactcgtggaaagtcatttatacctccttgaaatgaagtgatgatatctaatgactccaaagtcataataaagtcaccgaaagtgaatcatgatttgaagaagataaaggagtcaggagtggaactgctttccttggtatgtcattccgaagcgccaatacggaggagccacatcataagaggcaatggttttgccgcctttgagagtaacctcgaaagagagagactgtccgatgagatcgagagaggagtgccagttctgtccccagtttctggccattgggatccaagccgttgtgtggcccttcactttcacaccaaccacttccccgtcgaggcccacattgcttatcaacacctggaaaaagtgggagctcccgctcaagctgaatctcaacccgcctctccgcccacacttgaccctcctatactgtataggtatcatctcagctctggtttctgcgatccctgtgaaggcggcatgagatagttccaagtgttcctttgggaagttgcaccaacctccgtaatcggaggagagtcccgaattgggaggacagaaatcggtggcggtgaccaccacggaggggctgccttgaagacaccaacggatgtggttcacgcaccgcacttctagacaagctccgcagctgcttcccctgttgaacagcttcccgctcaggcctgcgctgtagccggcaaagctgctctgcctcagatctccatacccacaagcgcctcctatcagaaccaattagtctagttagtcctgatgaaagaagaaagaaaaataggggggagagagagaaaagagaaccagtagcgacggaggaggagccgtctctgtctctagaaagcgtggctgtggctatcttccagtcatcttcggcagtggcttgaaagaggcggcagagaatgaagaagaggcacaatgcgagttgctgaagcccagaatccatgaacaagaagtgttgttgggatcctcacagtcagtcacaggtggcagacaaaagtgatgcgtttgagagagttttgggggttccttttgatcatcaggctccgcttttcaagacttgtggggatgcgacaaaagattgctctgacatgttttgactttgacagtccgtttcagaccaattataataaaaaaacaaaaaagggaacaactatacgttttccaggcccatctcattcggaggcccactttcaatacgacacagaatcaagacaagagacgcaagacgaacttcttgagcccttttgttaattcaatgggccctcactaagaagcccataataaaataaaataagttctattttcaaacattgtactattactttttgtaccggccgtgtttattcaattctcgtatttgtaagaatttataaacaaaaagcaatgattaaaacatttacaatgacattatgacaatgaattcgaatgtacttttcaagtcactcgtaaaagaatataaattttttaagagataacataagacttttaaatcgataagtgaataacatagagtttgtcattttaatacaaatcactgccgataattagactgaaatggaagaaaatcagacggagacaatgatgtccttaaggggaagaagagtgaaatgaggtagcggtttgaggtggatgagaacatgtgtatacgatgatgactcttgtttgatgggacaaccgtgagtcgacttatccagcgtcccatctctatagacaaacacattttcgtcctcttccatgcgacgccactttctgttgttatctttggcacgttgcagcggcattcccctgcatcatcaacattcattatccatctagatgtaaatgagaaagtgggcatatatccacgtgtgtacctgacatggaagagatcagagacatcaagaaagaaggtcagtgcgtcaataaaagcctggtaggtggtgatatggaggccgtcgatgtggggatagggcagcctgggcctggtggtggtggtggtgggagaagagaggaaaacgtactctttgaatcctcctcctgctccggtggcctgagcgacgaagcccatggtggacatgattggttcaagctcctcgtgcgtcataacaggcttgaaggttctcgtgtgccacaaggccagtttcctcatactgcactcctccatcatctctctcgagatccacaagtgagtgagtgtagggattatggttacaattagtttggtttttctttcttttgcccttgttatttcatttattcaccaaactgccattcctttctgccacgtggccttcttcatcccatttgtgagcaattcaatttagtaatccatttgctgctctgtagtggaagtagttgttgttgttgttgcagaagaatccgaatccaattca

SEQ ID NO: 3514 - DNA, 3000 bp, Unknown
  misc_feature (1)..( 3000): cDNA_ID_3071240_gDNA_ID_1620648_Annot_ID_47679 3000 nt of promoter + ATG
taatttaatctagcgtgatttttctcctcactgttcaagtagataaatgaggatgaaggctcgttttccccttttcagcacttggattttgaaccagtggtcactgaaaggcctggcgaactgactgcgtactacaagattgcacgtaaggactggtttctcttttctctgcgtccctccagctccattactgaaacactttttaatacaggtcactacaagtgggcactggaccagttgttttacaaacacaaatttagtcgagtgattatactagaaggtggcgctttttaacctttcacactcatcgtaccttgctgttgtattgtttaagaggggctgtctttaccttgtggagtattgcttaagagaggttatcttgtctctttaacagatgatatggaaattgctccagacttctttgattactttgaggctgcagctagtctcatggatagggataagtatgttacctactgaagctagactcttatagtataagtttccacagagtatacaaatgtttttattactgtttctcattcttttctggtccaaacatgtgttagaaccattatggctgcttcatcatggaatgataatggacagaagcagtttgtgcatgatccctgtaagattcttcttcttcttcttctttaccttgcttcctctcttgcctgttctttcaatacctcattatgtctagctcatgcgagctaaaataatctgcagatgcgctataccgatcagatttttttcctggccttgggtggatgctcaagagatcgacttgggatgagttatcaccaaagtggccaaaggcatatccttatatgcttttttttctttcaatctcgatgactatagtttgacgcttcttaaattctaaaaaaaaaaatagtttgacgtttctaagacttttcttaacaaatatccacttactgggatgattggctgagactaaaggaaaaccataaaggccgccaattcattcgaccggaagtctgtagaacatacaattttggtgaacatgttagtacccgattatgctatcctatatatcatagttttacaagtctgtttttgtaatgctgttaaattgacctatgttcgctgcatatgacttctgctttctgtatgaaaaatgtattattgcagcttcgtcctatagtttcccgacacatggatgtagacagtcaataccacataatatatttttgcatttcatacttatccataaccttgttatattaatttggcaggggtctagtttgggacagtttttcagtcagtatctggaacctataaagctaaacgatgtgacggtaagcgtaagtgtgttttttacccccttttgttgcatcactagttttcactggtttcctatttcattcataaaggttgactggaaagcaaaggacctgggatacctgacagaggtaacatttacagaactccggccttttttttttataccattttgcatgttttgagtggagaaatgtagtttttaacctgttctctcatgtctatcaaagggaaactataccaagtacttttctggcttagtgagacaagcacgaccaattcaaggttctgaccttgtcttaaaggctcaaaacataaaggatgatgttcgtatccggtataaagaccaagtagagtttgaacgcattgcaggggaatttggtatatttgaagaatggaaggtaaatttgagatgattgaactataatcttcaataattgtaggtccaaatgggtcactttttttgtacccctttgattgtgtaggatggtgtgcctcgaacagcatataaaggagtagtggtgtttcgaatccagacaacaagacgtgtattcctggttgggccagattctgtaatgcagcttggaattcgaaattcctgatgcaaaacatgtacttctccaaccagcatcatttacatcttaaccattgcttacagttctgtgctaaccgggtttcacaagcagatgaaaggaaaagaagattttggaccgcatgcagcctccttctagcagctgttaggttgtattgttatttatggatgagtttgtcgagcggtggggttaactttaacagcaaggaagctctggtgacctggctgattggcttagaagttatgggaaccccttgaaagggtcagggttaaatatatttcagttgttttattagtgattatcttgtgggtaacttatacgaatgcaaatcattctatgcagtttttcttcgtcccacttgttttggcttctctattgctagtgtacatatctcttcaaacatgtactaaataatgcgtgttgcttcaaagaagtaacttttattacatctttggcgagtagccaatcaaggcactcgacccatcttctctggtataacccgtcaactagaatctgaggccatgggatcattaaaggtttgttccgatgcgaccaattggaggtcttgatttgtctcatgtgaagtaggcctaagaaaagagccttgtggagttcccctgcatttttagaatattctaattaaagagacagatctgttgatgactattaatcaaagatatcttcttcttttgttatttttagtcaggatgtggagacgttggcgagaatattgcaaaaccatgttcaacaatgtgtatcatcggatctgcaccaatctgacttaattttcatccattcttatcatctttgtctggtacacatccatctcttcctctaattcccctgttttgatgtctctccttattattgcgatttctttatgctaaattcgtataatgtttcagatcttgctatgggacttgctctgttttcctctgatggcaaactaatttggaaggggaggtgaactaacttggtaagggatttgtttgatgggcaattctttacaagccaaaccacttctaatacattttgtctttcaacgatttgtttcagcacacaaactggcaaaagacgcccccaggaagaagccacaatg

SEQ ID NO: 3515 - DNA, 3000 bp, Unknown; identical to SEQ ID NO: 3486
  misc_feature (1)..( 3000): cDNA_ID_1820873_gDNA_ID_1620648_Annot_ID_47680 3000 nt of promoter + ATG

SEQ ID NO: 3516 - DNA, 43 bp, Unknown
  misc_feature (1)..( 43): cDNA_ID_1821058_gDNA_ID_1620649_Annot_ID_47681 3000 nt of promoter + ATG
gaattcaagaactgagggtcattttgtcactcctaaagtgatg

SEQ ID NO: 3517 - DNA, 3000 bp, Unknown
  misc_feature (1)..( 3000): cDNA_ID_3439905_gDNA_ID_1620649_Annot_ID_47682 3000 nt of promoter + ATG
gttggcccggtatgatcaaagtacttgcatggaatttgtgaagaatgggactttcaatgcggtcacatggcatttgtttcagttcacctcatctcttgactcatgggtgaagctagggaagcagaactgcaagctttcatctaccttgatggttgaacagctccggttttggaaggtctgtatccatagtggctgttgcgtatctcgcttcccagagctattcccagctctgtgtctgtggttgagttgtccatcattcgaaaagctcagggagaaaaatctcatcagcgagtttacttctgtgtcaaacgaggcctacctggtccttgaggcttttgccgagacacttcctaatatgtactcacaaaacattccacggaatgaatctgggacatgggactggagctatgttagccctatgattgattcagcactgagttggataacattggccccgcaattactcaagtgggagaaaggaatcgaaagtgtctctgtatcaactactactctgttgtggttgtattcaggtgtcatgcgtacaatttccaaagtccttgagaaaatctctgcggagggagaggaagaacctctaccatggctaccggagtttgttccaaagattggccttgccattatcaagcacaagcttcttagtttttctgttgcagacgtaagtaggtttggaaaagactcttccaggtgttcctcttttatggagtatttgtgttttctaagagaacgatctcaagatgacgaactagcattagcttctgtgaattgtcttcatgggttaacacggactatcgtgtccatccaaaatctgatagaatctgctagatccaagatgaaagctccgcatcaggtaagtatttccactggagatgaatctgtgcttgcaaatgggatactggcagagtctctggctgagctaacatctgtgtcgtgctcttttagagattctgtttcatcagaatggcccatcgtgcaatcaattgagctacataaacgaggcggattggcccccggcgttggacttggttggggagctagcggtggtgggttttggtcaaccagagttctgttggcacaggctggtgccggtcttctgagtctctttcttaacatctctctgagcgactcgcagaatgatcagggatctgttggctttatggataaagtaaactccgctttagctatgtgtttgattgcaggtccaagggattatttactcgtggaaagagcctttgaatatgtccttagaccgcatgctttagaacacctggcctgctgtatcaagtcaaacaaaaaaaacatatcgtttgaatgggaatgcagcgaaggggactatcatcgtatgagcagtatgcttgcttctcacttcagacatagatggttacagcaaaagggaagatcgatagccgaggaaggggtcagtggggtaaggaagggcacagttggtctggagactattcatgaggacggtgaaatgtcaaatagttcaactcaggataaaaaatcagactcctcgaccatagagtgggctcaccagagaatgcccctacctccacactggtttctcagcgccatctcagcagtccacagtggtaaaacctcaacagggccaccagaatccacagagttgcttgaagttgcaaaagctggagttttctttcttgcaggacttgagtcatcgtctggttttggatcgcttccctctcctgttgtgagtgtaccgttggtttggaagtttcacgctttgtctaccgtattgcttgttggaatggacatcatcgaagacaagaacactaggaacttgtacaattatctgcaggagctttatgggcagtttcttgatgaagcgagactaaatcaccgtgacactgagcttctgaggttcaagtcagacattcatgagaactactctacttttctggagatggtggtggagcagtatgctgcggtgtcatatggtgatgtagtgtatggccggcaggtctcggtttacctgcatcaatgcgtggaacactctgttcggctttcggcatggacagtgctctccaatgcccgtgttctcgagcttctgccgagtctagacaagtgcttgggagaagcggatggttacctcgaacctgttgaggtaatttacaaaaataataaaatgttgatagtggtgaataatggcatcttgagcatccaactaagataaaatggtgaattgatattgcaggaaaatgaggccgtccttgaggcctacctgaagtcatggacttgtggggcattggacagagctgcgacgcgtggatcagtagcctatacgctggttgtgcatcacttttcatctttagtcttttgcaaccaagccaaggataaagtatccctgcggaataagattgtcaagactcttgtcagggatttatcaagaaagcggcatcgtgaggtaacttgaaatccctcatctcttgttcaatgtcattctggggactgaggatgataatgaaacgtggaaataatgtttcaggggatgatgttagatctcctgcggtataagaaagggtctgcgaacgccatggaagaagaagtgatagcagcggagacagagaaaagaatggaggtgttgaaagagggttgcgaagggaactccaccctcctcttggaactggagaagctgaaatcagccgctctctgtggaagaaggtgaacgagagaatgagaggaaagaaagtctgtgtgtttctttctctgttttgaggttctcttacagatgaaaagctgtgtaattaaaaatcgatgttcttcttctgttcttgtaagattttggatttttccaatttctgacaaagttcaattaaaaaacttgactgacattttgaaagcgacgtgtctgtcttagaaatcaatcatatattggcacttcctatcaagagagtttggctgaacccaattttactaaattatcattatctcaaacacaacaaggatagatcatcctcataggcg

SEQ ID NO: 3518 - DNA, 3000 bp, Unknown
  misc_feature (1)..( 3000): cDNA_ID_1821046_gDNA_ID_1620649_Annot_ID_47685 3000 nt of promoter + ATG
taaagcagcaaattaatttgcagatgaatgataatgagcctctgtatttgtttgtgtgttgctccccttattcaattgattttgatttcctttgtaagttgctgcaccacactatctctatctcaaaaaaaaaaaagcttttaatgaaagaaaaaactcttcatttagcatcaaagcaaatgcacccaaaaatagaaaaaaaaaaaaaaggctcacgccgaagcaataaaaccaccacaaaaagtcaaaagccaaagtcaaaagagaggcttcgtgggccctaaaagggatacactttggttctctgtttctgttcttcttctctaataagtttttctctagtcgttcaatattacttaacgataaatcagactttttaaactcgatctggtggggacgatgagtggaaggccggcgaaaaggccgaggaccgaccattccgtcgtgaatgtctgggaaagggagctgggtctcttacccaatcgcagtttctcaaaccgtttttcagcatccgaggtctattgattcactctttttctttctttctttagggtttcgttgaatatattgcgttactttgctcctttgtttatgtttaacagccacccaatgcgttacgaacaatatgctactcaatgaacgtttttagattcttcttctcaattgtctttaattttactctaattgctttcagaagaatgtgtttgcaaatgataaaatctttattgtccaaatgtctagtgataggaaaccaaacaactatcttaattagatattgatgattttacaaaagcaggatctattgcggcgtcttggacttgacaagaagcttgataagcataagggatgtgtaaacacagtgagtttcaatgctgatggagatatcttgctttctggttctgatgacagacaagttattctttgggattggcagactgcttctgtcaaactctccttcgattccggccacttcaataatattttccaagccaaatttatgcctttctctgacgatcgtaccattgtcacatctgctgctgataagcaggtaccactctgcctctcctcttcatacctcctaccgcgaaccacacctcttgatagctcctcatgttacaactagcttatgttgatttttgtaacaggtccgctattccaagattcttgaatctggacaggtagagacttctttgttgggtaagcatcaaggacccgtccacaaattggctgttgagcctggaagtcctttctcattctatacttgtggtgaggatggggctgtcaagcatgtgagttgtatttttcattttgttttcttatcgtctgtttttatacctaggccgcctaaaacaacacgtattttcagtttgatcttaggactcgggtggctacaaatcttttcacttgtaaagaagcaaagttcaatttagttgtctacttgcatgcaattgcagttgatcctaggaaccctggtcttcttgccgtggctggaatggatgagtatgctcgtgtctatgatattcgtagctatcgctccgagggttggtataattttacccaacccatagaccacttttgtcctggccatttgattggagatgaccatgtaggaataacaggtctggctttctcggatcaaagtgagctccttgcttcgtatagtgacgagttcatctatcttttcacccctgatatggggcttggcccaaccccatatccatcttcaactaagactgaggagaggatgacgcctcaggtttataaagagcacacgaaccgtgaaacagtcaaaggtgtcaacttttttggacccaagtgtgagtatgtggtaagtggttctgactgcggccgaatattcatctggaggaagaaagacggagagcttctccgtgccatggaagcagacagacatgttgtcaattgtatagagtctcatcctcacatgccactgatgtgtagcagtggaatagatactgatatcaaaatatggactcctggaggaaccgagaaacctctgtcgccaggaaatgcgaaacaggtaatgccacatctattgctaacctcgtttgcttcttttatttttggtgtttgaagactcggaggatatgctttagttaacaagaatgtaactttggatacaatacatgtgactggaggctgaatttggttttggaaggcaaactaaatgtttgtatgtttgcttcttggaaacaggcttcgggttttggtaacccacgatggttcgacggatattatgtggatgacgatgatgattctgacgatgaatctagtgaagagagttcagatgatgatgatagttcggaagaggaggagaatggtgaagttgatgttgagattacgaaggatgatgataatgatcatggggatgatgatgatgatgatgatgaggatgatgatggggatggggatggggatgagggatgagatttgtatagacatgtatttatctaaacacaaaataaaacagcatatggtaacagtaccaaagaaaggattagttatagtttagttagatgtcatcatcgtggatacaaaatactattcaatagacattttcattcttaaccaaatggatcacatacataatcagcttctgtaatgtcagattgtcagtttcttcaatgaactagaatttccaacaatccaaattccaaagtaatttaaaatgtaaaagatgtcattggtaaaatgggtttataatccaggaaactttgagcccaaaaaaggcccatagatcatcgaaggcctttgatatctgcgacggcgagatcagcttcgtcttcctccaacgctcgatttagggaggatggtggtttctccggggctgctctcaactgtttcaggtcactattcgctccggttgcttcttctatatactttcccactgctttttgatattgtccttagtaatcatctagcttcgattttggttcataggcgtaatccgattggctccgtcacaccggattctaagacgcg

SEQ ID NO: 3519 - DNA, 3000 bp, Unknown
  misc_feature (1)..( 3000): cDNA_ID_2158388_gDNA_ID_1620649_Annot_ID_47686 3000 nt of promoter + ATG
gaaaggattagttatagtttagttagatgtcatcatcgtggatacaaaatactattcaatagacattttcattcttaaccaaatggatcacatacataatcagcttctgtaatgtcagattgtcagtttcttcaatgaactagaatttccaacaatccaaattccaaagtaatttaaaatgtaaaagatgtcattggtaaaatgggtttataatccaggaaactttgagcccaaaaaaggcccatagatcatcgaaggcctttgatatctgcgacggcgagatcagcttcgtcttcctccaacgctcgatttagggaggatggtggtttctccggggctgctctcaactgtttcaggtcactattcgctccggttgcttcttctatatactttcccactgctttttgatattgtccttagtaatcatctagcttcgattttggttcataggcgtaatccgattggctccgtcacaccggattctaagacgcgatgggttcggacccatttgcttcaagttttctggggatttggtaatttacctttctttctattgcggcttaacagcttaagaagcttttcacttaagctctgtttgagtgtgtagagtatcaatgggagagtcagtcataaacatgtgcgtggaagtggcacggtgggatctgtaggttccgctcgtgaaagttggagctctcataagaagcttcccgaagaagagcccttatggctgagtcttcttagagacatggtctggtatgaaattctcccactgagtctagcttttaatatatatatctgctggaagagtctgaatgttgcattatattgaattgcatttttcttgtgagaaggagcacgagatctctcttgtctttcatggctgagcaaccaagtcagctgaaatacatagagtggccaacttttgcaagcacggtatgtcttgttgttgttgttacaacatatgagaaagaaagagatagtttgtgggtgtaactttgtttttttttgttttggtaacaaacagctaaagactgctacactgagtctgtgtctggtagctgtattcattgttgcgctatcatcggtggatgctgctctttgttacatattggcgttgatcttgaggaaagccccatgaggaaggcaactccattatcatttgtctcttgtagccttattgataggtgaatgtttttgatgtagatagaatgcaggaggatgtactcaaaatcaatgtgtttctaaaagttgaattgaaatgaaacctctctggtctagtatctctcacacattaagggaaatccaatcatatatgtcccaagcaaatcacaccataaataataaggaaggattcaacatgttgttggtttacaagtaagagaataagatgatgctaggtgctacttgagaacaacagcagcattgcgaatggagagatactggtggacttggtcggaagaaagtgatctcacagtctggaaaacatgagcattagcatagcggaggtttgttcttgggtccacataaggtgcctgcgagggattagagaagctcattgagttttgttgtttttgggtagtgaataaatttgtagaaaagaatcgatcactcaaaaacagaataaaacctcatatccagtaatatcgcaaagtctcttgcatggttgagtggaaggaggcgattcaatgttaacatctgcgaggcacaaagaagatttgatttttgattcaaacagagtcaaaaatccattcaaaatcagaaatcagagagagagaaaagagttacaagtggggaggtcgggaggaagatctgggaagttctcagcttgaagaatctgcttgaggtgtttccaccttctgctgcttgattgtgcttttgggtacttttcgtaggcttgcttcttcttaaagctcaatcgcgacgccaccactatatctgcctccatcaactctctctccatctctctctctctctctggaaaaaaaaaccttattaattccgacgaggagaacgacgacgacgaaggcttctttcttatacggtgtcctcttaaaaatcaaaccggtccggtacggtagtggaatgaacaatttagtaaaccgatagcagtgtttacattggaaaccgaattgaatgaagtgaagctgtttctttctagatcccccaaagcgagttcatcatcttcttcgcctggattcgatcaagactagcactttcatcagatttgattacaatctctcttatcttccaagttataatcataatatccgagcaatttgggatctgggtctttcctctacattcaatttcttaataaagctggcctctttcttccgagatggttcttgagcgatgatgagtgactctcagcgatcactttctgtgcgattgagccgccggggtgagagaagcaatcattactcacaatctaaaggtctcaacccaactctttttgaactaatgatcatcactttcttttaggtatagtggtttacacatgaaaatttgaagatgacccccgttatagtgttttgtttccactatagaagaatctaatgcgtaatgaatgattatgtcttcgtaatgaatccctaatggattctattactttgtctccaatgatgcagatgctgtggctggcttcttctctcccaccagattgcatgctgattacactttgaaaaaaatttggaaggcaggcttccttcgcttgcttcttgttggcggcattgtctggatgctactcattctatttgccctcttgtttcatgtttggtcctgtcaatcttccctttctttcttctcaggtttcctccaacttctttacacttgccattcttcactaaatctatcatttgtcatacactcaatagaagatgttgttattgtactagttactccaaccatcttctgcattcaccgcagattctatcacagtaacctcatgttctttgtaatttcgttgcagctatttgcaacaaagaaggcagactctatgtc

SEQ ID NO: 3520 - DNA, 3000 bp, Unknown
  misc_feature (1)..( 3000): cDNA_ID_1821038_gDNA_ID_1620649_Annot_ID_47687 3000 nt of promoter + ATG
agattgttcaatcactagactaatcagtctcactataatctcctacagattcatttctattgccactcataacaattgagttttctcacttttttgctctttagattgtctttgagttcattcaggtcttgaagaagagcactcttttaagctgtgtgaaacttgcgccgttcctgtgaagaactacttttggcattgcagatttcagagagctgtgatttgtgctatcttaaaaacggacaagttctatgttgtggcggatgagatgagggatgctatctgggttgatgaattttctgaatgcctgtctctggccacggtcagatcagcaggctcgttctgcctcagattctggtggccgccaagagggtttgctctggttcagagactccggccagcacgtctttggtgacttctccatggccgtcgttcaagccaacagcttgctagaggaccagagccagctcgagtctggctctcttagctcccacgactctggtccctttggcacctttgttggcgtctacgacggccacggtgggcctgagacatctcgcttcatcaatgatcatatgttccaccacctcaagagtgagtcgctcaacctatgcttttaactcttgtttggattagctaatctagaaaggaaatatagaagcatttctctaatagcagcactagtccagaaaatggttctagttttgatctctcatcttttatgttatgcacagggtttactgcagagcaacagtgtatgtcatcagaggtgataaaaaaagcgttccaagccactgaagaaggcttcttatccatagttacaaatcaatttcaaactagacctcagatagccacagtgggatcatgctgtcttgtaagtgtcatctgcgatgggaagctatacgtggccaacgcaggggactcacgggccgttctgggacaagtcatgagggtaacaggtgaagctcatgccactcagctctcagcagagcacaacgcatctatagagtcagtgagacgggaacttcaggccctgcatccggatcatccagatattgtggttctgaaacataacgtctggcgagtaaaaggcatcattcaggtatttaataaactagagttggactaaatctgtttttgtatgtcttacaattcctgttgtctttctgagtggctttatgactatactcaggtttcaagatccattggtgatgtgtatttgaaaaggtcagagttcaacagggaaccactgtatgcaaaattccggctgaggtcaccgttcagcaagccattactgagtgcagagccggcgatcacggtgcatacactggagccgcacgatcagttcattatatgtgcatcagatggactgtgggaacatatgagcaaccaagaagcagtagacatagtccagaatcatccgcgaaacgtgagaacacacaccccactctgtttgtactactagactatatataaagaatgcacataataataaggactctttaatggcaggggatagcaaagcggctggtgaaagtagcgctacaagaagcggcaaagaagagagagatgagatactcagacctgaaaaagatagacagaggagtgaggagacatttccacgatgacataacagtgattgttgtcttctttgatacaaacctagtgagcagaggaagtatgttgagaggaccagccgtgtcagtgagaggagcgggtgtgaatctacctcacaacaccctggcgccttgcaccacgcccactcaagctgctgctgctggcgcctcctgactattgaatttttacggtgtccttaaaattctttccaagatccttcctgtaactatatataaatatatatatttgattattattatcattgactgggaaaggatatatcatcatcaagtgggaaaggatatatcataatcaagtggttagttttgtttgttccctttgttagctgtgtactggagaaagaaaggtgacaagaattcttcttcttcttcattaattttcattgcttgctttttaaggtattactgattcagactagagaaactcagcttattctcagaccatggccttacaaaacacatggcctttggtatgcagttgtgttctgaaccaatcaataagtctcagctctcatataatctcgcctgagagttttcaacttttcttaaaatgaaatttttagattttttctctcattattaaatctctcggaaatgcaaatagcaaagagtttaacacatatatcaatcaatacttgatttattcttttcttttttgaaaaaaaataaagaaaattattaaattttgataaatactattttgtattaattactaattagtaaacttatgattttctaaaagaccataattttctgtaaaatctaaaaatagcgggacaaaataaatcttaccaaactaggttttcttataacttaggtgttttaaataaaataaaaaaatcataccaaattaagtagaacgttggatatgttttttttctcttcaaaaattttaaagtataaagatgagaaaatgattaatgtgataatatgggaaagtaaaaggctataaatgtaattagctgaaagttatgaaactgattgaattgaaatcggtggtatgtatgtatagtccaccaacatagatctctctcttgctgtggctcctttcttcctctacacagatctttggattcagaagaaagaggtacgtacactctaaacaatgtctttcccatttctctacttgtcgattattcccatccatttgttatcttcgttttgaatttgttgttaggttttatgctctgagggtaagtaatcccgttgatctgatcgagaaattcatattgatagagctctaaaattgggtaaaatggaacgaattaagtagattcacgtccatcgctttcctttgagtctctgattcttttatttgttgctgacatgttcgtttgtttgctctgatttctgaagatctaaaatg

SEQ ID NO: 3521 - DNA, 3000 bp, Unknown
  misc_feature (1)..( 3000): cDNA_ID_3071426_gDNA_ID_1620649_Annot_ID_47689 3000 nt of promoter + ATG
ttaagtaaggaaaccatcggaagaaagcaaaattagtgatgcggcaagcaagaaaaaaaaacaaaaggatttatgcggcagattccaactggttcgtattcgctaccaaaaaaaaggaaactttaccttgcaagatgttggaagcaactcaagttgagcaagaaaatgaatgaagagaaggatctcaagaggacggaggagatgtgggcgtggaatttcagagcttgtagatctactacgactacggatggatcaaccaaacacaaaatttatacttttatataaaaatgaacaccgatttttattattattaaattaaatataagcgagcggatgaggaagaagaagaccaattgacaaaaaaaaaaactttttaagaagaaaaaaaaatggttatcccctcagaaactaatgatctttctttcaatgtctggaaacagtgaacaatgaaggtaaaagagagagagagagagaggtcaagtcgccgaacgagacatcctccttcgacgtttttatgtaaaaaaaagaaagaaagttggagttgttttttttatcttctctctttatctctctctatagtcttaagactaagagtgattcttaccagacaagacccataaaagaccaacgatggcgaggtcggagccagcacatcaaaggtcccagctttcgggctccacttccctctcgtccttttttgcctcattagatggacaacaccaaacagtggcaaagaataatattacagtttttttagggaagaaaataaaatagttgatattattgatataataattcattcaagtctcctctttattttaaaaatattcaactcttttactttagacattatcataaactggggtcaaacggaagatttttcttcaacgtttaataaaatctcttaacacaaatcaaagaagagtaaaaatatacggtttcgataaaatttggttatgtggcggtgttacatgactacgactgataaaactacacgagtacttttgtttttctgtcaccaagatttatttcttttacttactccatgtgtttttttctttcttcgttaaaactactcctcgtaaattataatcaagattttaagcagtgtgcatataaaataaaatacatgtacagtctagaaataatatatgtggattcatgaatctttcatttttaatttccccacacaatttgtatcaaacgtttaatgcccataaaagtggtggtccaggaccctgagattaaaattttaaaaaaatatatagagaagaggcttgggcttgaagaatgaaaaattgaataacaaatatttaaaaaaatttgggacccgaaagtgattgggataaagtgagatatgtcactttacctaacattatttaattttatattaatgtatgtaccactaaatttggcccttttctccccatcgactctttgtagttatttatacttttgtagtaccaataatagaagaatcaactataaaaatttcagctcaataaagaaaaacagaactatgaattaagtgagaaactcaaaagcctgcttctaaaacatgaatacgtccacgataattatcactaagttctagataatctaattttgcgggaccaaattgatgtatatgcgaactttttcatacttttttcaccaacaaatgtatatacttcccatcatgcatgctcccatggtatctcgccgagtgtcaatatatgtgaacttacataaccaaaaattgatttataaagataacaataataagggagacctaaaaatagagaaaagggtggtgtggactgtggagaaggtccctacttacagaacatagcttccatcaatcacacaaaaatccaaccactctgaacctttcacttcaggaccaacttcgttatccaatcatctcccaatatgccaatactttcacttatatatgaacgtgtatatataaacccttcacatttacttcacaaaaatatcttttaaaaaaagatcataatcacaactactaagctagaattttttagtaaatttactactacggtaattataaacaaattatataggtttcttaaatagtagaacttaaaatataatgcaaagttatgtacgaatactatcttttaattaaaaataacgataagaatgttaaaaaagaaaaaaaaaaaatcatgttgatgatatatatgttgaagtaaaatttagttattaggtttaggtatacgtcaatcattcatgatacatggatcccaaacccataatatatcatgcatcgatctctgaaaatcaccaaagcaaaaaaaacccatgtaacatgatatactatattatgcatcatttcgccaatgtaacttctctgatgccctgaacctatttcacatatgactcatgggaaagaccgacaaagggatcgtattacccaaatatggttacgataacatccactgaatatcactcaaaatgaattattgtctcttactagatatattacggctagttgatgatttgtttgaaaagtttaatcttacaaaattattaatagatttgatgctgctcaaagtggtctcttttatttgcaccgcaaaaagccagtatatatccccattagaaaagacgtgacaaagtgtttaatagatcctttatgttttcctcggacccatgcatatataagtgtatttaaatcttttataaggtttttatagccataaataaacaaatttagttcaaaataagaataattaagtaattggaatagcgagacacgttccttgagatgataacacgagcatatattcttcatcacttttgtttgcttcatatcatatacgctaacttatgtgtgtgtgtaatatatgatctcagaactaacaagtaagaagaagaagaatgtcggagagtttcaaagtgtgcttctgttgcagcagaagctttaaggagaaaacgaggcagccaccagtgagcatcaagagactcttcgaagcttactcaagaaacggcaag

SEQ ID NO: 3522 - DNA, 3000 bp, Unknown
  misc_feature (1)..( 3000): cDNA_ID_1821026_gDNA_ID_1620649_Annot_ID_47690 3000 nt of promoter + ATG
tgaacctatttcacatatgactcatgggaaagaccgacaaagggatcgtattacccaaatatggttacgataacatccactgaatatcactcaaaatgaattattgtctcttactagatatattacggctagttgatgatttgtttgaaaagtttaatcttacaaaattattaatagatttgatgctgctcaaagtggtctcttttatttgcaccgcaaaaagccagtatatatccccattagaaaagacgtgacaaagtgtttaatagatcctttatgttttcctcggacccatgcatatataagtgtatttaaatcttttataaggtttttatagccataaataaacaaatttagttcaaaataagaataattaagtaattggaatagcgagacacgttccttgagatgataacacgagcatatattcttcatcacttttgtttgcttcatatcatatacgctaacttatgtgtgtgtgtaatatatgatctcagaactaacaagtaagaagaagaagaatgtcggagagtttcaaagtgtgcttctgttgcagcagaagctttaaggagaaaacgaggcagccaccagtgagcatcaagagactcttcgaagcttactcaagaaacggcaagatgtctttcgatgagcttctaagatttgtgagtgaagtccaaggagaacggcacgcagggttggactacgtgcaagatatcttccacagcgttaaacaccacaacgtttttcatcaccatggacttgttcatctcaacgccttctatcgctacctcttcagcgataccaactctcctcttcccatgtctggccaggtatctaagtttggaaactttttatggatttatttcacaaatggttttgtaattgggtatattatatgttcttggttgggttaaggtgcatcatgacatgaaggcgccgttatcgcattactttgtgtacacgggacataactcttacttgactgggaaccaagtgaacagcagaagcagcgtagaaccgatcgtgcaggctctcagaaaaggcgtaaaagtgatcgagctcgacttatggcctaatccttcagggaacgctgctgaagttcgtcatggcaggttggtcccactaacgaagtcttataatcaacaaacagactccaaaaaatgtcacacactatatgtgttttggttctctcatcaggacgcttacttcgcatgaagatttgcagaaatgtctaaccgccattaaggataacgcgtttcatgtgtctgactatccagtcatcatcactctcgaagatcatttgccacccaagcttcaagcgcaagttgctaaggtaagttggttttgcagaaacagagtatatatttcgttctctgaaaaagagtgatttacaaatttgattgattctatgtttgtagatgttaactaaaacatacagagggatgctgtttcgtcgtgtctcagagagttttaagcattttccatcaccagaagaacttaaggggaagatcctgatctctacgaagcctccaaaggagtatcttgagagcaaaactgtacacaccacaagaactccaacggttaaagagacttcgtggaacagagtagcgaacaagattcttgaagaatataaagatatggagagtgaagctgtaggatatagagacttgatagcaatccacgctgcaaactgcaaagatccttcaaaggattgcttgagtgatgatccagagaagcctatacgggtcagcatggacgagcagtggctagacactatggttaggaccagaggaacggatcttgtcaggtaaaatatagagtgagaggagtcataatgttgaacctttttcgactcaagagttataagatgaacctgagtcagagtttgaaaaaaaacaaaaacaggtttacacagaggaatctggtgaggatatatccaaagggcacaagagtggactcgtcaaactacgatcctcatgttgggtggacacacggtgctcaaatggttgcttttaacatgcaagtaagtggaactggctcatcatcgtttgacttgttaaaaaatggttgaataatatttgtgttgaaaagggacatgggaagcaactatggataatgcaaggaatgttcagggggaatggtggatgtgggtacgttaaaaagcctcgcatcttgctagacgagcacacactcttcgacccttgcaaaaggtttcccattaagaccactcttaaggttaagatttacactggcgaaggatgggatttggatttccatcatacacactttgatcaatactctcctccagatttcttcgtcaaggtaaacaacaactactactcttcttttaaactagatttcttcgtaactgtgtgtgtgttgcatttgctgcatcagattggaatagcaggagtaccgagagacacggtctcatacagaacggaaacagctgtcgatcagtggtttcctatatggggcaacgacgagttcctgtttcagctgtctgttccagaactggcgcttctgtggttcaaagtccaagactacgacaatgacacccagaatgatttcgcaggacagacatgtcttcctctgccggaactgaagtccggagttagagccgtccggcttcacgatcgaacaggcaaggcctacaagaacacgaggcttctcgtcagcttcgccttggatcctccttatacgtttcgttgaatctcgttttctttccgaaataagccacacagtgtgtatctctgtttgcacgtttataaatttataatgtacaattatttgcgccctagctagaacgggataaagtgtgacaacatataaatactattaaagattcgatatttgatgactgtagccgcctgcctagaacggggtgccttgtttgacttgccaacttcaaccacatttctttttgtttacttgaaagttaaaaataaatactagagaggaagaaaaacagagctttctttctaagatcatcaacgcacc

SEQ ID NO: 3523 - DNA, 3000 bp, Unknown
  misc_feature (1)..( 3000): cDNA_ID_1821022_gDNA_ID_1620649_Annot_ID_47691 3000 nt of promoter + ATG
tacgtttcgttgaatctcgttttctttccgaaataagccacacagtgtgtatctctgtttgcacgtttataaatttataatgtacaattatttgcgccctagctagaacgggataaagtgtgacaacatataaatactattaaagattcgatatttgatgactgtagccgcctgcctagaacggggtgccttgtttgacttgccaacttcaaccacatttctttttgtttacttgaaagttaaaaataaatactagagaggaagaaaaacagagctttctttctaagatcatcaacgcaccatggaagaagaaggcagcccagatatcatcatcgttggcgccggtatctccggcctttccaccgctgttggactacacaggtgtgtgtggcgtgccttttgagttgttattaagcagagtaagttaactaaagtggtgtgtgtcacaggcttgggatcagaagcatggtgctggaatcttcggagacactgagagcgacaggatttgcatttaccacttggttcaatgcttggaaggccatggaagctctcggcgtttctcagcatattcgcagtctccatgatcgccttgaagggtatcaaactaacactattattactattcatatataatcagctcagtaaaaaaggggactcatctttgattttgctgcagatgggtggttggaacaatttctgcaggaactcctcccacagagatgctgtttccagaatccgagtatgtttcttcttctctgcacagagcatatgaatgttaaaacaataaataagataacttcaataatattgttgaatgattttgtcagagaatatgagtctcgatgcgtacagaggaagctgttgttagaggctctagcaggtgagttgcctgaagagaccatcaggttttcgtctaaggttgttcatattgaattgtctggatgctacaagaaggttcatctctccgacgggaccattctcaaaaccaaggtaaataactacttgtcctctgtaaaccatgtgaggcctggtcttgctacggaattgtagggtttctaaacgaaatgcaggttttggtagggtgcgatggagtgtactcagtggttggtaagtggctaggcttcaaaaatcccgctacaactgcccggttagcaatccgagggctcacacattttccggaaggccatggatttgggaaaaggttcttccagttttatggagacggcgttcgttccggttttatcccatgtgaccacaacactgtctactggttcctaacccacacctccactgatataggtgaagatatgcaactttacctgatatctaatatctaactacaagcagcttcttgttcatatcatactactgtctttgactcttctccttgcgcttgttagatgaggagacaaattcggaaatcctcaaagagtttgtgctgaacaagatcaaagacttgcctgaaaacattaagaatgtggtggagaccactgatcttgatagcatggtgatgtctcaactgaagtaccgacctccatgggaactgctatggtcaaacatcacaaaagacaacgtgtgcgttgcaggagatgcacttcacccaatgactcctgatatcggacaaggaggttgctcagccatggaggatggagttatccttgctcgttgtctaggtgaagcgataaaggcaaagagtctgaaaggtgaaacagaagaaaatgaagaagagggttataagaggattgaagaaggtttgaagaagtatgcaggagaaaggaaatggagaagcattgatcttataacaacggcatatacagtaggattcatacagcagagcagagggaagtggatgaacatgttcagagacaggttcctgtcgtcttacctttctaggatgctgctgaaaaagtcccatttcgattgcggaagccttgtcccatgatgattctcaaacataagtcaaaagcttgtgattcttcttgtcatcaccaactgcagaacagttttcacctttggtttgcttcaaagactatctatctgtttagtgttatttcatataacaaactcagaattaataaagtaagtttgtgtagtgaacaagaagctcttttattttttacggcaatctaaagctctgatatcaacaagtgatgaatgagaaaagaaaatgactacttcaattgaaccatagcagaagttatgtttattacattataacgtatgcgagcctcgttcaaacaggaatggattcagaaagaaaaagaaaaggaacctgaaggctgaggagagatttgagtgttaggaaagagagaagaggcaaggtgacaaaagttcccactggatcgaatcgcatcagcggcaaccccggtggccggcgatggcgagcagcgatgaagacgcatgtgatcatctgggcggggctgggtttttaaggaatttctcctctatttgggcctttcttttttctattttaaggcccattttgtgactgcttatgggcccatttgaatacaggagaaaggtcgccactattgaccaagtcatggttgctgccacttgattgataaagaaaaacgaaaacaaacaattatgtgatttagatctgagtctgaccaatattgttatatctttaggaatttgtttgtttgtaataatttataagtcaatagtcaaatgaatggttatcgtagacttttccaattgccattttcttgtttataaaaatatccataatacacagacttaaaggggcctctgactccattatatctatcgaatcatatataccagtcgtagtatgacgcgttgaagaacagaaacgaaacgaaccaaaaagtcttctccggcaactttagatcctccagcagcaaggtactcactcttatgaattcctaacatatgtataattactatacaaccaaggtactaatttgcatgccttcttatgttccggtctaaccacagatcatttctcaatcccatcctttgcctcaacccaat

SEQ ID NO: 3524 - DNA, 3000 bp, Unknown
  misc_feature (1)..( 3000): cDNA_ID_1022149_gDNA_ID_1620649_Annot_ID_47693 3000 nt of promoter + ATG
taaacactttgatacataaatgttacaacttgtattatattgttcccttgttttaaggatgtcctaggttaaagagggaagctcggaacccttgtttcaactactctctctattttaatttaatggttttcttaactacaacttgatccgcatttgaagctttcttcacaattacaaaccataaatgaaaataatttaattttgggtagaaatatttattaacattaaaagtctttggaagaaagggaaaaacacatattgcaatcataaagtgtaaggaatacagaccaaggaactaaaaccaaaacaagaaacctaccgttatggtattaatgtacaaaacaagacattaaattaagccataacaaattgaaacagtagtagtccatatgacatcacatgaccacacaagccgccgggttctcgtcgctaaatgcagtggtgtagcggacctcggtggagctagcacgagccagctgcgacactccggggtcgtcgactcttcggacataaccggagggtgccttcttgtcgtagacaccggcagcgtaaggatgagcgaccacgtcgtagggcacatatggccagagctcgactttcttgccggtcctgtgagacattcgagccaccaccttgttgggatcgacgtagccgactacagtgactttatgggctttgggctccaacgtcacagaagacacacccttcatgccttcgacagaacgccgcactttccgctcgcaaccttcgcagtccattttcactttaatctccaccgtctatcctcatcaagcagtcgacacaaaacgacaaaattagcctactttaaaaatatctaagaagaatagtaaatgtccacaattgaaagactttaaccatatcatcatgactagtgagaaaaattaacgtggttggtttccccggaaattaatgattttatatagtattcctgacagcgagaagaatacaaatcccggtgtaaaatctaacagatggctgtatcaacttatatttcagattaaaagaatctattcggtcggcgttaggaaggaacattaactcaaaacaaaaactgcttcaaataaaatcccacttatatcatgtaacaatttggatatacttcttcagataaaaaaacacagagatattaaaaaagatctgaagtaagaaaggtaacacaaattagccagccaaaaccacaataataaacttgctaatggcagtctatttatggaactataatatacgagatctactaagtaacactcaaactttcctagtaaccatcgaagctagtttctactagactcattcatcataacttttcaacgaattattatgtttgtttttttgcaaaccaagatctaagttatcagctgaatctgctaagataagaaaaggaagagggaaagtacctgcaactgtttgcgctttttaatcttgtgaccatgagagcagtcaaacatttcagagacatgatcaagaacacccatttcttcttctttttattccagaaaaggaaaaacctgaagaacccaggagagttaagaactttctttaggaggaggaggaggagagagtagtagagcagagagtgaaatctgtaaaaaagaggggcaaaagggaaagtggaggtgtaaagaagtaaatgatgaattgggagaatatatataggcattattgtaataagtaatacagtatgtatctaattaagtgaatgatggatgggtcacctttcttttctggtcccagcagtttcctagtcgccgtctcgattcttctcttcttgctaacggtttcctaatttctagtttttttttttcggtttcttttttggattggcttaaaacatttcttcattccaattccatgaatgaaaaaaaaaagagttgtaatttgtaagaaaaaaataaaattacaatggataataaaattttctgttttgatgatgactgagactgatcttgggacaagagtcgtgcgttagattttctgctgctttacttttttttttgtttaataaataataataaaaaaaatatattcttggtgcatgggaagaaagtaaagagaggagttattgtttttggataatcgatgatgactcgcaaagtcacaccgacgtaccgaccttgatgaccagatttgtttattttatgaagcccactccaaaatttggtctaggctttctaatggatttttctgaggcccacttacttaccattttatatttttggcgattttttgacaaaaatcaaccgagttttaattccatttagatttgcaagacttgcaagtagaaccatctggatatctggacccccatgggattcaagttcatatatccgaaaatcccatcatcaattatagtcttaagcgatgaagatacaaaggtttgtggaaattagtaatgagtgagtaatgactaatgacacaatccgaattcagcagtaaataaagtgtgcgtggaagaagaagaaaattaacgatatatgcgtgtatgtattgtttgcaaataaaatatgcaaattttcagtgttgaagcggcgaaaccgagaaaagttttacaaataatttaacaaatgttagtactgtatttcacaaattgaatttgagaatattaaacgaaaaaacgtttttgcttgagagagaggcgaatctgattcttgtgagagcttccaacaaagtctgcaggctcatcctgcggatcccttcgttcccaatttctcttaggcaggtgagaaatatttaatttccccatacttactttgagatttgatatttccagttgcgtctgaaaatcgattgacctactttgtttgtgtgtgtgtgttcacgtatttaccggatttggggttcctctgtccgtacgcattttcccacaaagtttgttccttttttctttctaatctcgtgtaggtatcccttcattggcgagatccttgttttcttcgttggggaacagattgcccaaactgaagtctctctctctctgttatg

SEQ ID NO: 3525 - DNA, 3000 bp, Unknown
  misc_feature (1)..( 3000): cDNA_ID_3410055_gDNA_ID_1620649_Annot_ID_47694 3000 nt of promoter + ATG
ttgatggaccaaccaaatatgctcaaagccaagagtaaagagagcggtgaaatctgcatcaatgatttcactaccacctgaggtttgaaaacaattggaaccatgaataatgcagtaggaaaagctcaagagattaaaggggaaagagaatagaagagaagctcacgttcatcaagttttcggtttggttcgttgctatgagaagaaggattatataaagaacctgtagtcatttgactatttgagaaactctgtgtttacaatatctcccaatagaaatacattgaaaaaaagttaagtagctcagatatcaatgatccaattacctcgcaggaaacacagcaataacccatgaacatccggtttccataatagagtctaaagagccagctcgtgctatctttcacatccttatggctggtcttccctgataggaaggtactgcgaatcaagtattaaattcctggtttgctatgtacaagaacaatacatctaagaagttgaatgaagattttatgtagcaacaaagagtacctgtacatttgcagccagtgactagcgatatctaaagccagcaatgacaggaaaaccaagctaggcctgtttgtaattgtgaaagtccaagactacatgttaaacaaagattacgtagaaaaccagataagtccatgaaacggagatgtcagtgtaaagaagtagagaacactgacacctgtatatctgggagagaatcacgagaagacaggctgtgctgactctgtaaccatgcgcagaccccaaaatatatgacaaaaatgttaaatgagattaaaagaatgagcaagttgaaactcgggaatatgtagcggaagattcacctatctgtaaccatatccaaaacagctccaaatgtagagactgaaaggaaaagagttgtgtgttacgttcaatcgtttctgataatgtagaacaagaataaactgtgtatgggactaaaaatattgatcaatgagacaatgacatgaaatgtcatatttaatcaatgtcaggatcatagaggaagcataagtaatgagttagttgaagctaagaaaagagatggggagaatgaaaagagcaccttggttaaatttacgagcgcaccatccatccacagcatcacaacaaaaactggaaacaagattgggtaaagagtgactaacatatgaaagaagaagcaccaaacacacaagatcaaaaaaggagaagaacatgatgttggtaccacaaggataaagtcacctgaaaaagtacaagagggagaagagtgtcttgttggagaagcacacagagaaggcaatgcagttcaagagaactctcatgtaccctgccaattttgcatgtaacaacactaatctcatatggtttaaaaaaaatgaaatttttaaagacagaagaaaggaagtagcaaaaaaccgaccaacgatattgggaatgtagaggtagactgacaacgtcgccggtctctgtttagccataacagagagagagagacttcagtttgggcaatctgttccccaacgaagaaaacaaggatctcgccaatgaagggatacctacacgagattagaaagaaaaaaggaacaaactttgtgggaaaatgcgtacggacagaggaaccccaaatccggtaaatacgtgaacacacacacacaaacaaagtaggtcaatcgattttcagacgcaactggaaatatcaaatctcaaagtaagtatggggaaattaaatatttctcacctgcctaagagaaattgggaacgaagggatccgcaggatgagcctgcagactttgttggaagctctcacaagaatcagattcgcctctctctcaagcaaaaacgttttttcgtttaatattctcaaattcaatttgtgaaatacagtactaacatttgttaaattatttgtaaaacttttctcggtttcgccgcttcaacactgaaaatttgcatattttatttgcaaacaatacatacacgcatatatcgttaattttcttcttcttccacgcacactttatttactgctgaattcggattgtgtcattagtcattactcactcattactaatttccacaaacctttgtatcttcatcgcttaagactataattgatgatgggattttcggatatatgaacttgaatcccatgggggtccagatatccagatggttctacttgcaagtcttgcaaatctaaatggaattaaaactcggttgatttttgtcaaaaaatcgccaaaaatataaaatggtaagtaagtgggcctcagaaaaatccattagaaagcctagaccaaattttggagtgggcttcataaaataaacaaatctggtcatcaaggtcggtacgtcggtgtgactttgcgagtcatcatcgattatccaaaaacaataactcctctctttactttcttcccatgcaccaagaatatattttttttattattatttattaaacaaaaaaaaaagtaaagcagcagaaaatctaacgcacgactcttgtcccaagatcagtctcagtcatcatcaaaacagaaaattttattatccattgtaattttatttttttcttacaaattacaactcttttttttttcattcatggaattggaatgaagaaatgttttaagccaatccaaaaaagaaaccgaaaaaaaaaaactagaaattaggaaaccgttagcaagaagagaagaatcgagacggcgactaggaaactgctgggaccagaaaagaaaggtgacccatccatcattcacttaattagatacatactgtattacttattacaataatgcctatatatattctcccaattcatcatttacttctttacacctccactttcccttttgcccctcttttttacagatttcactctctgctctactactctctcctcctcctcctcctaaagaaagttcttaactctcctgggttcttcaggtttttccttttctggaataaaaagaagaagaa

SEQ ID NO: 3526 - DNA, 3000 bp, Unknown
  misc_feature (1)..( 3000): cDNA_ID_1821010_gDNA_ID_1620649_Annot_ID_47696 3000 nt of promoter + ATG
tgtgcaagaaactaccttctgatgcatctgattatgttatggaagctgtacctttgctgacaaacctacttcagtatcatgattcgaaggtaattgacctgctttctgttataatatggtactaatatctagttccgctcttaccccagtctcctccataatctgttcgtatgatggtaggttttggaatatgcttctatctgtctgactcgaattgctgaagcatttgcaccgtatcccgagaaattagatgaattatgtaaccatggcctggtgacgcaagctgcgtctcttatttccacgagcaattcaggaggtgggcaagcatctcttagtgtgtcaacatacacggtaagcgtaaaatctttattgtgttttatttatccttatacacaagatgacattttcaccatattgtgcacaggggttaatccgattactttctacctgtgcgagcgggtcacctcttggattcaggacattacttcttcttggtattagtagcattcttaaggatattctgttgggttctggggtctctgctaatgcatctgtatccccagcactgagccggcctgcagatcaggtaattaccttttctgtttaatacctgactgaaataagaatagcttaaatttagggtacattctctatttcgggcatagtttcctacttgtttttgtattaccaagttttacttaggtgtttgtatagtgtattgatcatagtctatatacaggtcttataatctgtacttatgttggagtactcttatgcctgttctgctcttatgttagatctaggttttttatctcatggtctctaattctggaatctataaattttgctttatatattagatttatgagatagtcaacctagcgaatgagctcctccctccattgccagaaggagttatctctcttcctactagcacaaacgctcttgtgaaaggttcatgccaaaagaaatctagtccaagtacttcaggaaaacaagaagatattctaaaaatttcaccaagagaaaaattacttggtgatcaacctgaacttctgcagcagtttggattggatcttcttccagttttagtgcaggtaatttttctctgcgttggctacaagataatgctcatactacctgctgttttgtctaattattcttgttttcttttgcaacagatctatggttctagtgtcaatggtacgattcgccataaatgtctctcagtcattggaaagttgatgtatttcagcagttcagaaatgattcaatctctaattggtgacacaaatatttcgaggtatgctgtttacgatataaattaagtttgacacgacagtgtgtgcaacttcttacatttttttcttcttatgtagcttcttggctggtgtcttggcatggaaagacccacaggtcttggttcctgctctacaagttgcagagattttgatggaaaagcttcctgaaacattctcgaaagtgtttgtgagggaaggggtagtccatgctgtagatcaacttgtcttggttggtaaaccatcccatgcctcacctactgataaggacaatgactgtgtacccggatctgcacgatctaggcgttatagacggcgcagtagtaatgccaattccgatggaaaccagtcggaagagcctaagaatcctgcgtcccttaccataggggcaaaccataattcccttgatactcctacagctagcttcatgctaagggaaacagttagttcctgcgccaaagcattcaaagacaagtacttcccgtctgatggtggggatgttgatgttggagttacagatgatcttttacatctgaagaatctttgcacgaagctaactgctggtatagatgatcataaagtgaaaggaaagggaaaatctaaagcctctgggccattccttggcgatttctctgctagcaaggaagagtacttgattggtgtcatttctgagatacttggcgagataagtaaaggggatggtgtctcaacttttgagtttattggcagtggtgtggttgcagcattgcttaactatttttcttgtggatacttttccaaagagaagatctccgaacttaatttgcccaaacttcgccaggagggactcagaaggtttaaagcttttctagaagtcgctcttccttttgatggtaatgagggaaaggtccctcctatgacagttttgattcagaaacttcaaaatgctttatcgtcactggagcgctttcctgttgtccttagccatccctcaaggtcactaagtggaagtgctcggctctcctcgggtttgagtgctttggcacatcctttaaagttgcgattatgccgagcatctggagagaaaacactacgtgattactcctccaatattgtacttatagatccattggcaagcttagcagcagtggaggaatttctgtggccccgagttcaacggagtgaatctgctctgaagccggcagcgcctattggcaatacagagccaggcacgttacctagcggtgctggtgtttcatcaccatcttcgtcaactccagcttcaaccactcgtcgtcattcttctagatctcgatcggcaattaacatcggtgatacttcaaagaaagatcctgtgcatgagaaaggtaccagctcatcgaaaggaaaaggtaaaggcgttatgaaaccggctcaggcggataaggggcctcaaacaaggagcaatgctcaaaagagagctgttcttgacaaagatactcaaatgaaaccagctagcggagactccagttctgaggcatgttacagtgctaagtttttgataacataaatgttttacttcgttacttcgttacttcgttacatcatgatcttgtggtgtgatttacttactcaacacaatcttacttgtatgccttgcaggatgaggaattggaaatatccccagtcgacattgatgatgccttggtgattgaagaggatgacatttctgatgatgaagatg

SEQ ID NO: 3527 - DNA, 3000 bp, Unknown
  misc_feature (1)..( 3000): cDNA_ID_1821006_gDNA_ID_1620649_Annot_ID_47697 3000 nt of promoter + ATG
tttttagaatacgatcgacaacactaatcatatacgtatgtagtaattcgtatgtcaggagaatagttgaagaatagaacacataacagtatataggagagaataattaaactatagtatctactgtgtactgtccatgtatgctaaacaaaaaaagttgaacttaattgtgaaatttggtaagttaggtggaaaatgtgagaagaaacgaaaaagaataatggtttattgaaaaagatgaaaaaaccgaaaaagagagagagagagagagagagtagttgaatttcaatttgtttaatctattggtacaaaatcactcacctcatgcatgatgatggccctcttctagaaggttaggttcttagctaaaggccaagattcttcaattcatcaacaaaagtttacgtccatttacatctgaatcaaaattaaaccccaatcagtcagtttttcacattcactatttatacccaattaacttatttactgctctttcttttttcttgcaactaaattgtaagagacaaattcgtaatattgttttatgaaaaaccaaatgcagcaacactacatgcaaaacgttttttaacatcatgggagaataatagttctccaggtgaattattctctctgttgtttttttttgtttttttgttttaggaataatatgttattacttgttagtagtactactaatgggattgtaaatgacgtggaggaaatagcgatgtgctataatataaaagcaaaacttgtgtcacaaatataatatagaagcgaaatcacaatgtactgattaatttggcattttctttaagtaaatatactgatattaaaaaagagtaggataattatattatttaggttgctgccaaaaacaaaaaaaaactatatattatttaggtccgtatgcggttgggacgtgggatttggttcaccttccactttattattattgttttaataatggattcatttgtttgatatttaatttcaactttgcgtattcagatacaagaattaagatcaccttgatctcaaggtaaagattagattttattgacgaccaaagaataagttaagttttccataatagttgagttgtgataaactgatagagtctttaatttcagaagagtaagatgctactatgatctgtttcccttacgagacgtgaaaataaggtggatggttggtgacggtggatgattaattatacacataacttgtcacaccacaccatttgtaaagagtggaatataatagggatagagaggtccatatccaccaatgtatataaatgtgaaggtatttaattgtgcgtctacatttttatttcttaagttgagattttttcatttctttgccgagccttttcttgtttgttacatttttctttcttcttgttaattggtaaatacaaaccactatcgtggaaaaagagatataacaatacgataagccaaattatcaaaagaaaacaaagataagccaaattaaccgaaccaactatgacaaagtttctaagagaatgatcttgagtttaacgaataaactagattcgaaattagattccccgcgcaatcttatactataatttgtgttggaaaatcctttttctttgatatttaatataaagacgaaacttgaggaagaagaaacaaaaatatatatggtctttcacgacatgtaacaaatttttttgaagcaaatacatatttccgctggcagatagtttcaatgacaaaaaaacagtcataaggaacgaacgcaagcttcgggtatgcagattatatgattgatattaattaaagttttttgtttgaagtggaatgaaattgtaactttttgataccaaaaaaacaaaaaaattgcaaacgagactcttacgacagtaaaatgaaaaagaacaattactcgttcatgagtgggtgtggccttggtaaatcataattcataatagtgatcactagtgtcgtccctggttttcattaagtatggaattggaatcaaattagtgtcccagactataaattccaaccaaacaaaataaagaggtaattgcattttccattattttttgtaatataaatgatctatgtaatctacttaacaaagatgtcttgttttagaaaaaaagtagtagaagaagaaaagacaaccaaatctctaccgaaccacatgaaaaaccaaatctctaccttaaattgtttatatatatattaacgtatatacatgtcattgagtagtttatatatacaacgaaagtgaagcgctctacaactaatgggctttaaaatctctatgaaagcctttgcagagtacgatctataacagatggacgggcccggcctttatacaacaatatgttttattccaattacaaagaggccctcaagttttgtgtgatatatttttccaaatgtgaaaaaacttaaaaacgcaggaaggaccgggtatgatacgaaacgacatcgtatgagatgggttcgatggagtgaaggaaacacacgtagcccgatcgccgtgtcagtcacttgttgtggtaaggaaagaacaaaacgctaccgtattcgtccccggtcgcctctctctctctctcttttctttttttatataatatttatatgtcttcttctattttattcatcagtcgacggactctctcgatttagggttttcttcttctaatctctcttttcatcgtctctgcccaaattggatcccctccttccttcttcttccatctctcttctcaatccctttgttgatttccaattcgtttgattcgcatcatgctctctcaatagctctctgggttcgatttgagaggttcttcttctctggcgttttcgactaattccggtggctaattagggtttcgtgcgagtttcaattggatccctggagtgaattgatctgagtgagatgcgagcgagtgtccgatcagaatctttctgatcgagcgaatcggaaactcggggtttcttcctttgtatg

SEQ ID NO: 3528 - DNA, 3000 bp, Unknown
  misc_feature (1)..( 3000): cDNA_ID_3074301_gDNA_ID_1620649_Annot_ID_47699 3000 nt of promoter + ATG
ctttgagaattctcttatcagactttcttcgaagcccgtctcaatgtcttcgtgaatttttcttttaatactggtaaaagaaactatactaatattttaatgcacatgaagataataatactcctttggacggtataatacctgtatacgtgactaatcaacgaattaaatttgagcattgtggtggcgagatcttggatcatcttcgcttggccgcttgggcggtggtcgtcggcatcgtcactaattaattattgtgattaagaaaaaatgctaaattgagtttcgtcgtcttctgcttctgcttaagcttcttcatcatttagctccagaggcggagctttcttctctctctgtggacgaccatggcggcggacgacggcgaccccactaaattcgctgcaatctacgactcatcctctccgtcacaccctcttctctctaaaccctccacgtccgctctcgattctccgcgtcgaagtgatcccgaatccgacccaactcagtttcttcagatctcctacaattttggcccaagaactttcaaggacatccctttcctacttctcttcgatcttctcgtactctccacctttggttttggaatcttctccatttttcatagaaataacgattacgggaactcctcttccttcacctacgatttcacctctagctcctgcgtcaaaaattctacctttacgaaaatttcggatgggtactactgggcttcttcgagtgtcatgtacggcatggtttcttcgtctgatccagtctttgagaaggatttgatctggacacttgttgtaacgcttattttaagcgtgcccttctgttttagcgtcctgcttttgctcaaacactacactaagcagattgtttatgcttgtttacctctctttgtcctttttcccatctttttcaatgtctattggtttgtcgcctgtactcttagctcttcttgtagcgatgccctccctctagcttacagaatacttgtcctagtctttgttttcttgatcatcgggatcattgtctggatcatagtagctaattggcacagaattgatcttactatccaaatcatcagtgttgcatctgatgccttgtccaaaaatttgaaactttttgttgtgctgccgctgctgactctcgggttagtggtgtactatgcgccgattgtggtgttcttggtgtttgcaaggtttaatgggaagtttgtgccgcgagagttggatggtcagtacttttgtgagtggaaagaagattcttgggttcctgcgtattacgctcttgccattttaacgatgatctggtctcttgctgtaatggtggaaatgcaagtgtatgtgataagtggagctattgctcagtggtatttctccaaggaagactcaatccctaaaaaatgcatccggagttctttgaggtgactcgctgccacatctttctctattttattcttgttatcaatgaatttgctgtgcagtttctcttacaatcaatggtgctcttagttctaatatatgttttgtgtgatcgcgggagtttttgctttgagttctcttagttttgtttcctcataaaatataatctatggtcattcgaagtatcccttgcttggcttcgttctggagtattcagtgattctaggtcatggtattcatagtcttggccttatagattggatattgtattggaatccatcatctgaacttgtttggtactttaaatgtgaaaagagacaacagacagtggtatttttgaaaggagattatagctttgaggatccaaatttgcattagtcttcaaatctgttgttggtttatgtcaaagcatgtgtgaatcttattattttttgtatctgtctcttcaggaatgcatttggtcaatcctttggtacgatatgtgtatcaggacttctcatatgcattgttcgtgtggtccgggcaattgtggacaatgcaagagaagagaacacacaaggaatagtgaacatggttctccgttgctgtgcaaacgccttacttggtgcccttgactatctcaacaagttcaccatcaactttgctgcaataacaggggaagcgtattgcacctctgcgaaaatgacttacgagctgttaagacgcaacctactgtcagctgtatttgtcgaaacggtttccaccagaatcctaaccggaatagtctttgtcctgtcagccgcatatgcagtcgcggtaagtattatcttctgcttgtctcaccaaccaagcatttaataattgccataatgactaattccggggtttgatgatgcgcaaaagcagacatgggctgttctgagaggagtgagcaacctgggtatagattcgtacgtggtggctgtactggcgtgggtgttactgattgtgatattggctttctttgtacatgttcttgacgatgtgattgacacaatctatgtctgttacgcgattgatagagacaaaggggatgtatgtaagcaggaagttcacgaggtttatgttcacttgcctatcagcagaagcacaagatcttctctcatcccaaatgctcttaatgcatagcagaagatgatccaacgtctctgcttgttgtatctttttttgtttgttagcaccgttgtaaattcctctctggtgaactgtggtttgtcttcttggggtttatattgatgttttgtagagttatggggtaacaatgttgaataaaagaaagactttagttataggaattactgtaatgtggtctgtgtttcttttattcattaataaatcaactttgttttgctttttatcaaaaacaaccattggggctaaattgaaataaacgtaaaacattagggtctaaaaggagaaagtaaaaaagtaaaggggatatttaaagaagaacaatgttattattatcggtctaaactaaaatctaaatcttgccttcctgactttctctctacgacagaatttttgaagcttctctctgcttatcgacacgatg

SEQ ID NO: 3529 - DNA, 2053 bp, Unknown
  misc_feature (1)..( 2053): cDNA_ID_1820987_gDNA_ID_1620649_Annot_ID_163413 3000 nt of promoter + ATG
ttcattttctatagacattgaaatgaatccatgttgacacattttcttaatagcagatgatccatcagcaatagatttcttatccactatgttttgtttcaccttttggttctgtgcctttctgctatcatttgtttgagaatatttgcatgtcaagaaatgggagtatgacttgcttgatgaatggtgcaggtttcggaggttatacatatttgttagagccactttggtgggtaggcttggtaacaagtgagttcaaaaaaaccatcttttattttccatatgactcttcccatcttaaaaaccatcgttctaaatgtgagattttgtaactcagtgacttttggagaaattgctaactttgtggcttacgtttatgcacctgctgtactagtcactcctcttggcgcattaagtataatcatcaggtttgtactgtattggcatctttttgagtggtatttcaccttttctctgactaaccttttcatcttttgccctgattgctccctcctagtgctgttttggcacatttcttgttagacgaaaaacttaggaaaatgggagtttggggatgtgtttgttgcattgtgggctcagttatgatcgtcatacacgcacctcaggagcagactcccaattctgtagaagaaatctggaaactagcaatgcaaccaggttttgctttttctacctctctctctctctgtgtttatgttactgatatagacaataacgtatatcccttctcttttttgtgtgagacagcttttctaatttacgtagccatatcaatgtcgatagtccttgctttgattctctactgtgaacctctctgcggccaaaccaacattcttgtgtatatcggaatttgttcattgatgggttctctcacagtaagcatctcggaatttagtgctgagctctatatcttttcccattttttgttctctaaaggttttaatttcaaataggttatgagcatcaaggctgtagggattgccataaagttaacatttgaagggataaaccagatctggtatccagagacttggttttttgccatggttgcagcaatctgtgttgttatgcaaatgatttacctcaacaaggtaagaagaacctgtgcatgtgtctgtgtgatgtagtgttgagcacactttggccaatggttaatagtagtcatatgttttgttttgtcaggcgctggacacattcaacgcagcaattgtttctccaatctattatgtgatgttcacaacactcacaattgtcgctagtgcaatcatgttcaaggtagagagatttcaacaaacattaaagagtaatgatcctcgtgtttcaagattgtcaaatgaatcacctttttcttaacaggactggaatgggcaaaacacagacagcatagcctctgagatttgtggattcatcacagtgcttacaggaacggttatactccattccacgagagaagaggaacaagcttcgccacgacgaatgagatggcaggattcagggaagagctttgacgaagaacatttgacaagtttgtacagtcctgaatattaggaaggtaacaaagatttaaaccttgtgctgaacggaaggatgttgggatccgaatcagaagatcatctaattaatctcttagtggggaaaagaatgtaaactagctttctgtatatacttgatagttttgtaacagtcttttgtatacaaatttgtccactgtttgttcatattcatttctttttgagctcttaggacagatttgttaccatatatagatcatataacattgactattattattttgatccaacaacactgtttccttctccttgtaggtgaaggaatggaaaatatactaaataataaaaccctattgatatgatgaattcataaccgtccgatcaaaacccaaaaagatctaactataaaaaggaaatcgagattcggtgagccattcattgtttttgattcacacgaagagaagagaagaagaagaagaagaagcagaagaagagaagaagagaagaagaatccaatcatg

SEQ ID NO: 3530 - DNA, 3000 bp, Unknown; identical to SEQ ID NO: 3528
  misc_feature (1)..( 3000): cDNA_ID_3074301_gDNA_ID_1620649_Annot_ID_163404 3000 nt of promoter + ATG

SEQ ID NO: 3531 - DNA, 3000 bp, Unknown; identical to SEQ ID NO: 3527
  misc_feature (1)..( 3000): cDNA_ID_3071309_gDNA_ID_1620649_Annot_ID_163402 3000 nt of promoter + ATG

SEQ ID NO: 3532 - DNA, 3000 bp, Unknown; identical to SEQ ID NO: 3525
  misc_feature (1)..( 3000): cDNA_ID_3410055_gDNA_ID_1620649_Annot_ID_163400 3000 nt of promoter + ATG

SEQ ID NO: 3533 - DNA, 3000 bp, Unknown; identical to SEQ ID NO: 3524
  misc_feature (1)..( 3000): cDNA_ID_3071317_gDNA_ID_1620649_Annot_ID_163399 3000 nt of promoter + ATG

SEQ ID NO: 3534 - DNA, 3000 bp, Unknown; identical to SEQ ID NO: 3523
  misc_feature (1)..( 3000): cDNA_ID_2156638_gDNA_ID_1620649_Annot_ID_163397 3000 nt of promoter + ATG

SEQ ID NO: 3535 - DNA, 3000 bp, Unknown; identical to SEQ ID NO: 3522
  misc_feature (1)..( 3000): cDNA_ID_1821026_gDNA_ID_1620649_Annot_ID_163395 3000 nt of promoter + ATG

SEQ ID NO: 3536 - DNA, 3000 bp, Unknown; identical to SEQ ID NO: 3521
  misc_feature (1)..( 3000): cDNA_ID_3071426_gDNA_ID_1620649_Annot_ID_163394 3000 nt of promoter + ATG

SEQ ID NO: 3537 - DNA, 3000 bp, Unknown; identical to SEQ ID NO: 3520
  misc_feature (1)..( 3000): cDNA_ID_1821038_gDNA_ID_1620649_Annot_ID_163391 3000 nt of promoter + ATG

SEQ ID NO: 3538 - DNA, 3000 bp, Unknown
  misc_feature (1)..( 3000): cDNA_ID_2158388_gDNA_ID_1620649_Annot_ID_163390 3000 nt of promoter + ATG
ctggaggaagaaagacggagagcttctccgtgccatggaagcagacagacatgttgtcaattgtatagagtctcatcctcacatgccactgatgtgtagcagtggaatagatactgatatcaaaatatggactcctggaggaaccgagaaacctctgtcgccaggaaatgcgaaacaggtaatgccacatctattgctaacctcgtttgcttcttttatttttggtgtttgaagactcggaggatatgctttagttaacaagaatgtaactttggatacaatacatgtgactggaggctgaatttggttttggaaggcaaactaaatgtttgtatgtttgcttcttggaaacaggcttcgggttttggtaacccacgatggttcgacggatattatgtggatgacgatgatgattctgacgatgaatctagtgaagagagttcagatgatgatgatagttcggaagaggaggagaatggtgaagttgatgttgagattacgaaggatgatgataatgatcatggggatgatgatgatgatgatgatgaggatgatgatggggatggggatggggatgagggatgagatttgtatagacatgtatttatctaaacacaaaataaaacagcatatggtaacagtaccaaagaaaggattagttatagtttagttagatgtcatcatcgtggatacaaaatactattcaatagacattttcattcttaaccaaatggatcacatacataatcagcttctgtaatgtcagattgtcagtttcttcaatgaactagaatttccaacaatccaaattccaaagtaatttaaaatgtaaaagatgtcattggtaaaatgggtttataatccaggaaactttgagcccaaaaaaggcccatagatcatcgaaggcctttgatatctgcgacggcgagatcagcttcgtcttcctccaacgctcgatttagggaggatggtggtttctccggggctgctctcaactgtttcaggtcactattcgctccggttgcttcttctatatactttcccactgctttttgatattgtccttagtaatcatctagcttcgattttggttcataggcgtaatccgattggctccgtcacaccggattctaagacgcgatgggttcggacccatttgcttcaagttttctggggatttggtaatttacctttctttctattgcggcttaacagcttaagaagcttttcacttaagctctgtttgagtgtgtagagtatcaatgggagagtcagtcataaacatgtgcgtggaagtggcacggtgggatctgtaggttccgctcgtgaaagttggagctctcataagaagcttcccgaagaagagcccttatggctgagtcttcttagagacatggtctggtatgaaattctcccactgagtctagcttttaatatatatatctgctggaagagtctgaatgttgcattatattgaattgcatttttcttgtgagaaggagcacgagatctctcttgtctttcatggctgagcaaccaagtcagctgaaatacatagagtggccaacttttgcaagcacggtatgtcttgttgttgttgttacaacatatgagaaagaaagagatagtttgtgggtgtaactttgtttttttttgttttggtaacaaacagctaaagactgctacactgagtctgtgtctggtagctgtattcattgttgcgctatcatcggtggatgctgctctttgttacatattggcgttgatcttgaggaaagccccatgaggaaggcaactccattatcatttgtctcttgtagccttattgataggtgaatgtttttgatgtagatagaatgcaggaggatgtactcaaaatcaatgtgtttctaaaagttgaattgaaatgaaacctctctggtctagtatctctcacacattaagggaaatccaatcatatatgtcccaagcaaatcacaccataaataataaggaaggattcaacatgttgttggtttacaagtaagagaataagatgatgctaggtgctacttgagaacaacagcagcattgcgaatggagagatactggtggacttggtcggaagaaagtgatctcacagtctggaaaacatgagcattagcatagcggaggtttgttcttgggtccacataaggtgcctgcgagggattagagaagctcattgagttttgttgtttttgggtagtgaataaatttgtagaaaagaatcgatcactcaaaaacagaataaaacctcatatccagtaatatcgcaaagtctcttgcatggttgagtggaaggaggcgattcaatgttaacatctgcgaggcacaaagaagatttgatttttgattcaaacagagtcaaaaatccattcaaaatcagaaatcagagagagagaaaagagttacaagtggggaggtcgggaggaagatctgggaagttctcagcttgaagaatctgcttgaggtgtttccaccttctgctgcttgattgtgcttttgggtacttttcgtaggcttgcttcttcttaaagctcaatcgcgacgccaccactatatctgcctccatcaactctctctccatctctctctctctctctggaaaaaaaaaccttattaattccgacgaggagaacgacgacgacgaaggcttctttcttatacggtgtcctcttaaaaatcaaaccggtccggtacggtagtggaatgaacaatttagtaaaccgatagcagtgtttacattggaaaccgaattgaatgaagtgaagctgtttctttctagatcccccaaagcgagttcatcatcttcttcgcctggattcgatcaagactagcactttcatcagatttgattacaatctctcttatcttccaagttataatcataatatccgagcaatttgggatctgggtctttcctctacattcaatttcttaataaagctggcctctttcttccgagatggttcttgagcg

SEQ ID NO: 3539 - DNA, 3000 bp, Unknown; identical to SEQ ID NO: 3517
  misc_feature (1)..( 3000): cDNA_ID_3439905_gDNA_ID_1620649_Annot_ID_163386 3000 nt of promoter + ATG

SEQ ID NO: 3540 - DNA, 3000 bp, Unknown
  misc_feature (1)..( 3000): cDNA_ID_1820996_gDNA_ID_1620649_Annot_ID_47701 3000 nt of promoter + ATG
actccggatgcattttttagggattgagtcttccttggagaaataccactgagcaatagctccacttatcacatacacttgcatttccaccattacagcaagagaccagatcatcgttaaaatggcaagagcgtaatacgcaggaacccaagaatcttctttccactcacaaaagtactgaccatccaactctcgcggcacaaacttcccattaaaccttgcaaacaccaagaacaccacaatcggcgcatagtacaccactaacccgagagtcagcagcggcagcacaacaaaaagtttcaaatttttggacaaggcatcagatgcaacactgatgatttggatagtaagatcaattctgtgccaattagctactatgatccagacaatgatcccgatgatcaagaaaacaaagactaggacaagtattctgtaagctagagggagggcatcgctacaagaagagctaagagtacaggcgacaaaccaatagacattgaaaaagatgggaaaaaggacaaagagaggtaaacaagcataaacaatctgcttagtgtagtgtttgagcaaaagcaggacgctaaaacagaagggcacgcttaaaataagcgttacaacaagtgtccagatcaaatccttctcaaagactggatcagacgaagaaaccatgccgtacatgacactcgaagaagcccagtagtacccatccgaaattttcgtaaaggtagaatttttgacgcaggagctagaggtgaaatcgtaggtgaaggaagaggagttcccgtaatcgttatttctatgaaaaatggagaagattccaaaaccaaaggtggagagtacgagaagatcgaagagaagtaggaaagggatgtccttgaaagttcttgggccaaaattgtaggagatctgaagaaactgagttgggtcggattcgggatcacttcgacgcggagaatcgagagcggacgtggagggtttagagagaagagggtgtgacggagaggatgagtcgtagattgcagcgaatttagtggggtcgccgtcgtccgccgccatggtcgtccacagagagagaagaaagctccgcctctggagctaaatgatgaagaagcttaagcagaagcagaagacgacgaaactcaatttagcattttttcttaatcacaataattaattagtgacgatgccgacgaccaccgcccaagcggccaagcgaagatgatccaagatctcgccaccacaatgctcaaatttaattcgttgattagtcacgtatacaggtattataccgtccaaaggagtattattatcttcatgtgcattaaaatattagtatagtttcttttaccagtattaaaagaaaaattcacgaagacattgagacgggcttcgaagaaagtctgataagagaattctcaaagcccaactagccgtattaaagcccaaatcatcgcatgcaagagtaatagtcctaactcctaaggagcgtgtgactgcatcacaagggcagatacgtttgttaacttgggcccaattgtcacttgtaaagctaaatctttgaaatcttttgagagtttaaactttaaagatatgaaatttagctaaattcgtacaaatttatatccaaatgttgacaacaacgtaatctaaaaatgcatagacgacaatattggtttccctttgtatcaactaacaaaattaatttttaaaattttggtggttctttagttatggtaattggttccttttgtattgttttccaaatatttgagttctataaaataagaaattaaaaacattagtacaaaatcttgtaaatttaaatttcgaatcaaactaaatatgttaattcaaaatctctaacttttaattatatattttataataaagtaaaaaactatattcaatatttttattatcagatatatccatctcctatagaaaacaaatctggatcgtagcgtgagtttgcattttgcaggcgtgagagttttttgcacgcacacacacacaaacacaaaacaagcaaatggtaagatttaggtaagaaacttgtaaccaaagcatgcatcaacccgtggtactctaataggctagtatctatataaaagcacaacttcacatgacaaaaaaaaccacttcgcatataacaacatcatcacgtgaactcactcaataggttcagtgtttctgacatattgttccctctctgaatgaaactctcccaaatagagaatggcctaaccacctatccaaccgcatcaaggcacttggtttcatccccttgatttctctctttttttcttttcctatcgcaggattttgtgttcttgttttgaatatgaaatgttcgtcgatgtgttgtttgatcctcttggccctttctctcctcaccgccttcactcttgcttcttcgtcaaatggtacacacaagtatattatagcataccatagtatataacatacatgtatacagaattttagcttgatatatgatgtttttactcttcaggtatagatggacctttctacgactctactgcctacacagaggtttttaaagctttgagctattaattcaatttcacaagatatgtaattgcgcatagatagaaagtatatatacattatgtggtatgtgaaatgcaacagtgtagagccgaagcagagaagccactatacaatggaggaatgctgaaggaccaaaagccttccgtcccaggcaaagactctctcacaggcattggtgctcattacacaccaacttacatattgcacaatctcacacagaacaccatctattgcttctccagttaagcatttcatgctttcatctctagaatgttatatattcgttaacagatgaaatgaatgtgatgatctgactgatggacacagtatgggtgaagatagaggctggtgctgcatcagctcatgtaagagcaaggctgagagcagacaacgccacattaaactgcgtcggttctgtaactgccaaac

SEQ ID NO: 3541 - DNA, 3000 bp, Unknown
  misc_feature (1)..( 3000): cDNA_ID_3410059_gDNA_ID_1620649_Annot_ID_47702 3000 nt of promoter + ATG
cgagtttactctcaacggcacaggaggactagatttttacgacgttagcctcgtcgacggttacaatctcccgatgctaatcttgcccaagaaaatcgtcattggaggatgcggagccaccgggtgtctcgtggacttgaacggcgcgtgtcccagagacctaaagctggtgacgcgtgggaatgggaacggtgttgcttgccgtagcgcgtgcgaggcattcggagacccaaggtattgctgcagcgatgcgtacgccacgccggacacgtgtcagccttcggtttactcgctcttctttaagcatgcgtgcccacgagcatacagctacgcctatgacgataagacgagcacttacacttgcgccaccggagccgattacttcatcatcttctgtccgccaccgtatacaaggtgagatattgaccgttttgcccctctgttcgctttggaatatgctagggatgtttcttgttatttagtatatgagcaggaatctaatctgagccacactgttgattattatggactttagctaacgtagttactcgttatgatttgtagtcttttagatcatatgatcatcttctataagcatttgattaagattgtagtgtctactagaagcatttggtatgattataaatgattgtaaaggtctactataagcatttggtatgagaaagtagtgttgattaaaagggttttgttttaatggttggaaaagcgggtagcaacagttggattgagttcgacaaatatagattgaagtgctccattgttataaatgtacttaggtgtaatgagcttagtaagttgttgactatgagttttgttttgcagcgagaagcttttaggatcgaggaaagatggtgcaacactgccactagtaaacaagagcatgattcatttgccgcatccgcacagcagctgagccatcttcttattatatgtcttaagtccttcttacatcaggtccgtcttacatgggtactcgcattgtctgttgaggttactatactgttttcatttcctctttcttgttgcaggcagatagaaaattcatgtgtagaaaaatgtcattacggttaataccaaggtagaattacttctttacttgatagaaaaattcatgtgtaaatctttacttgttttacacttgttacttctttcgaaattgttccaagaattgttgtttctgtcctctgctctttctttgtcaaacataaggaagaaagaaatctattttgtctagtaatttaaaatagcaataattggccagaaacggataaaggggtcgataaaattagtcccacaagcccatttgcacagcacgctcgtctgcaaaaccaaggcttactactacctttatcgttcaatttcttaagttttacacttatactcctttgggctagcttattattctgtaccaaaatttagttactccaatgtgaatttgcctttttgagcattgttaatttgcaaagtaacagaaaaaataaagaaaattgtaatttgctttttgggaatatatatacatcaggcttttgtagacttacaaaagttcttgggaaaaaaatcgacatttaaataaaatgtagtttgtcagttacctgggcgaagttaaaaatattgaaaagatttaggagtcaaagactcggtcagggcccagctctcaatggtagtagtggcatgggtgagataagactctctctctcgctttctcttgttcctcaaaagacgaaagacagaagagagttatatcctctgtatttcgccactaattcttccagctgtgttcttccatgtgtcacgatctaacatcgtcacattttcatacattgatcatcaacggttagtggctcaaaccatactagtagtctcagtaaatccacagtctccacccttaaaataatccttctaataacaaaaacaaagaaagggaatgtcaaaaatatggcagtaattggtttactttttattttacttgtaagttggtagttggtacataatcttgtttgtttggctctgtgccaaaagttatgtttctcgttattatttttggggatagttagttttcagggattgtgaaaaataagcaattatcacgattcaaaactcgaatttcaaagaaatttgggtttaaagttatgtggactgtggacaatcacagaaatgaatatgctttaacatagtttcggtaggtcccccttttagccccaaagcttctcatctttctttgtctttttcttgttgtgttttgaacgcgggtccactttccaccttcacatgggccgactttcaagcccaattagtgtgggctaataacatagtttttttttacacagacaaagctcctcaaccaattgatacgaataaatacggcgttgtcatcataattttacacaaaatgaaaatgaattttaattaatttagacatagtagtactagtatacacagaaaatcataacaatacaattatatttttttacaagtgaaataataatgaataatgatattgaaaaccatttggtcctatctcttcctacccataaatcttttttgtagttattttaacccaattaaaaagattcaataataagtgcacaagagaaattttgtcaggtttcaggcatagagcccagtaacactcaataacaaattcaaggaaaaaaataacaaaaccccatttcaactcaaatagcttcacagttttactaatctctctcatcttcttcccaacatcaaagaagacctttacttctggttagaatagaccaagaacactgagtacgacaaagaaccatgatgaatctttcttctcgtcgcgcctcttccactctcacattgagcttcactgttctccttttagcttccacaggtataaccagaagaagaagaagagtctctcactcacttacttcaaagtctatcacatctacttacactcgtttcaaagtttcattttttttagtgatttgtttctttatcttttggatg

SEQ ID NO: 3542 - DNA, 2053 bp, Unknown; identical to SEQ ID NO: 3529
  misc_feature (1)..( 2053): cDNA_ID_1820987_gDNA_ID_1620649_Annot_ID_47707 3000 nt of promoter + ATG

SEQ ID NO: 3543 - DNA, 170 bp, Unknown
  misc_feature (1)..( 170): cDNA_ID_1820983_gDNA_ID_1620649_Annot_ID_47708 3000 nt of promoter + ATG
ttcattttctatagacattgaaatgaatccatgttgacacattttcttaatagcagatgatccatcagcaatagatttcttatccactatgttttgtttcaccttttggttctgtgcctttctgctatcatttgtttgagaatatttgcatgtcaagaaatgggagtatg

SEQ ID NO: 3544 - DNA, 3000 bp, Unknown
  misc_feature (1)..( 3000): cDNA_ID_1821117_gDNA_ID_1620650_Annot_ID_47711 3000 nt of promoter + ATG
gaggtaatagtaatattattaaactattaaaatagtaattaaaattaaatagaaaagttactttttcttaatttatgtgcgaaacttaaaacatcaaacttacagagagagtaatatataacatgatatgagatgaaactgtacggtgtcgttgcataattacataaactagttataaactcacacactgccttcatttcaggtcgagacagaacttattgtgtgatttaaatcagacaaaccttcgaactttgactttttcatcgcctcctgtcccttcgccgcaaaatactagtctaaacgctcaactcctctctcctgtcttataaacttttttttttagaaaatgagatgatcaatcgaattttgttgtgtgtgacctcaaactgacaacttccagtaattgtaatattaccaatttttttataaaaaagatgaacttcactttagagcaatagcaatccctcgagtctcccctatataaagattccaactccttaacgattcatctaatgaaaaaacacacacaccaaaaatatcagatatctcaaacaatgtcttcagtttttggatctgtccatatcttggccatgatagccatacaactcctccttacacacagtgtttcatctctgaaccttaccaatgcgtatctgcaccacaaatgcagcaacactcaaggaaaatataagcaggggagcgcgttcgagaaaaatctcaacttagtcctcagtaccatcacctcgattggaaattttcgtgacggtttccgctacaccgaagaaggtgaggatcccaataacgtctttgtcatgttccagtgtcgcggcgactcctactggtccaagtgccccccttgcattagcaccgccgtctctggggtaattgtgacttcaatattataaattagcagtcatatagttacatgtaaaaattacgatgagcacacacgtcggttaattttttttgtcaaatcttaaatatgtgggcaatgatcctgatactttatataaatgattgaattgagacaaaactgatagacattaaaggctagttaaaaactactgattaaacaatgcaatattgttcttgatatatatgtacgtatatgtatgtgacagcttcgtaggagatgtccaagaaataagggagcaataatatggtatgaccaatgtcttttaaagatatcttcagttgcctccttcaataagatagattatgagaacgatttctatttgtccaacccaaacaacatgagtgatcgggggttgttcaacaaggagacgtcggctctcctggagaagctggcatataaagcctccgatagaaacaacttggatggtaaacaattggtgttgtacgcagcaggggagaagagaattgggacaaagaaggtgtatgcaatggtgcagtgtacgaaagacttaatatttacaaagtgctttgagtgtttggaagggattttgaggaagtttccacagtgttgtgacggtaaacgaggagggagagttttcggtacgagctgtaactttaggtatgagttatatccttttcttagaaactacagcaacagtacaatgagagctccatattaaatgaaagggttctagagataaacagtcttataatatacactgtgttgcattttagtacgtgaacttgagcgaataaatgtactttcctctttgtgatttttgttttttttttgtgaacttgagttattaagaggaaatcttcaagtaaagaatttatctaatagtatatacatcccacatagaataccaaatagctcagctcatacaaactctctcataatgagagaaaaaaatcctgaaataagggtaagaaaaactcttatgcctcaaggttttagtaaatctcataattttggccgaaccacaaaaagagacgtgcgaaacaaaatagtagaaaattgatttcccgaatcgacaaacatggactaaactatatgtatgatacataactggtcgtacttacaatgatgatacttggtttcacgaagacgagggagcctggagatgaatgatggtgataaggccatgtggcatcatgtcttgtgccggagtcgatgtatgtagaagtcggaagaaatagtaaattcacatttatcagcttcatgataacttcatttgccaacaatttttagtatatgctaacattaatacgcttggatgtatatattcatcatttgtttacaaaaaaataaaaatccacaagacataaattagtgtttgatagaaaccaaatagtaaataattacaatattcttagtcacttagaaatctatgtaatatgcctaaattaatcttttactctcttctcgtagcattatactttttattttattttagactctgagatgaaagacaatgctattacagtgtcgaaatcacattatcttgaatagtctaattcttttgaatgcaaccatgctctacgtgaagtagagttacaatatctttggattaaaaaatatgagctaattgcaatggaaatgagataactacaattgaaaattaaccttctttcacagggacactacgcatgaaagttaaaacatcttagcccaaaatccccagagccaaaattctattgctcctgtacaaaaccagcggtgcactacaagtttggtatgattctattttctcagagttttaacttagtaaagtatttgaactttgactttttcatatgctctccacatccctcgccgaaaataccaaactcctctctcttggttgttacagacgaaaaacaaaatcttctccaaactaaaatgatcaaatccagttttgtataaggtaaccaaaaaggaattgaataccgtcttgaaaaactagtgaccaaaatattgaagccaatcagctaaaattcttcctagtctcctgtatatataaacatcacaccttaacgcttcatttatactaaaaaacaaaaaacacccgactcttgaaaaaaataagcaaaacaaaatacaat

SEQ ID NO: 3545 - DNA, 3000 bp, Unknown; identical to SEQ ID NO: 3544
  misc_feature (1)..( 3000): cDNA_ID_1821117_gDNA_ID_1620650_Annot_ID_163428 3000 nt of promoter + ATG

SEQ ID NO: 3546 - DNA, 3000 bp, Unknown
  misc_feature (1)..( 3000): cDNA_ID_2173238_gDNA_ID_1620650_Annot_ID_163437 3000 nt of promoter + ATG
ttcgggcgggctggttttcacctaacgtcacagccgattttttctgtctaagttcgggttagatgttaagtgcgagactgagctcggctttataataaaagtattcggcgtgtactgggcgcgagacgtctctcggcttatgcccagtaggcctatgtataatttaaagagggagttctgggctctgtataaaaaataagtgaggcggactcagcatattagttggggagcgagatgctgggctcggcttactccccgtagagcatctgttcggcagatcgcgaaattcagggttcggcttatatttctgtccgaaccagagcttaagtgcgagaaaactggtctcggctatccctattagaaaaattaagtgtctaatagggcgtggattatttcaccactgcatccatgtgagacgcgcatcgaacacctggccagggtgccgagagttgatttattacagatcttaaagcgaattccgtattgagaatgcaaactttaattttattaagtggtatagctgcatccttacgaaggattgcctagttagggatcaagccattcgtagttcgagttctaacggagaggtcggattaccgagctcgtgtttttttttttttttttttttttttttttttgcatagacgagtgtttcgaaaatctatgcaaaaaaatataacagataatgcatgtatatgattgattgatgtttgttagattataatcgataatacttatctcagcggtttggagatggagatgatgacatcaacgatatggacgatctgaatatccgaaattgtaaacgtcgatggatgaaaatctacatttgagatgttcgttagagaagatctcatctttacgtagaaagagaaaagcaatgatgaaagctagtgatataagcgaaaatgtcaatcaagcttaactaatatgtaagaaagtaattgaacttatcttttatgtgggaggtcgtggagacggagacagaattggagatcgcatcattgatgaatgagtggaagccttgagcgattgctagtgatgatccattgtatgtacttccttttgctgatttatagaagaactgataacttccgtttgaaccgttaaattattgatcccaccgttgaatctttagctgatagtcccacgaagattttgtccgaattttagtcagatcggatattgcctgaggcttctaccgtcttatgaagttgctgtgacagagtttatttttcttcctttggctgattcggagatgcattaataactttattctgaaccgttgatttctagatcccaccgttgaatcattatctagtagcgtcaagaatcactctgtaaatttatagctagatcggacgtcgtatgtatcttccatgatcctctgaagtcgctacgacaaagtcgttttttcttgatttctgcagtttggatgattctgggccaactttgaaggtgatttgcagatggagattaacaccaattggtaatccgcttacgggaaatgattccttgtagtgagatcttcgctaagagtacttagttagaccttaggtctttctgatgcgtcgggaaaatgtctcgcaaaagctctagttgcacatcaaattttgtttcagactaggcacattgaggactattccaattgtttcttgtacaggaagcaagatgaataacttcttgatcttgagtccgtttgacgaacagtcaggtgtggtggactatcggattgatagtggtcacgttggagcctttgtatcgggttttcgaccttatctccggcgccggagagtttctcaacctaccatctccactctgcttttaaattccttcctttgctatatttgtttttggtttcggttgctccggtagcaacatacgatcctcagtgaatataggaggcagtatccagtgatgcttactctttggctgacttctggtgatctttcttctttacttctctttcctttgaattttcattacacgacatgattttgtgagatctgaacaacgtcttgtgattaaggaagataaagcagaagctctccaaggcgaggaagggacgatttttcttagatatatgttgcgttctatgcctctgacacatggtccgtggtgatgaggcgtggcgatgacgtgaagctttttaaattgaagaccatcggtgacgaggtgaagacgtgaagcctaagatgggaatgttggtggaatcgtcctggaaacgacgatggacgtaaaatcggtcacaaaggtggctgatctgatagccgcagacatgcatctttgggctacagccaggacgtgcttgtcgcagaaaaacagtaataactcttgttaaacgtaatcaattgaggcaaggatgaatccgttagaaagataagccttgtagcttcaaaatgatgtgcagatcggctcctggttccttttagatcgccgggaaatcgatctgaaagcagacagatcgggtgtagacggatctgtgtctcgataaacaacgcatgcttgagagaaaagcctataactctcggaagacagcaccaaatggagcaaaatcgatcttgttggaaagataagcctcagagcttcatgatgatattaagatgggctcttgatgttttctgaatcgttgggagtttgctttctaatccagttgctcccacagttcgaatctgcgatttgacaggtgtcatatgtttcattgaaacagtgataacgcttagtaaacagctcggaattggatgaggtcggtctctattgaaagataagcctcggggctcagttgatacttagatcgcctcgtgatgccttttagatcgccgggaatttgattccgaggtcaacagatcggatatagatcgatctgtattttgtcagtcttctgcagataaacggcagtatctccgagaaaacagaccctaacgaagtgagctggggcttgttaaaaagaggagcctcagcctatgcaatgtgcttttcaagatcatcactaagacgatg

SEQ ID NO: 3547 - DNA, 3000 bp, Unknown
  misc_feature (1)..( 3000): cDNA_ID_2173249_gDNA_ID_1620650_Annot_ID_163440 3000 nt of promoter + ATG
tcaatattgataaatgtgactacaatctaagtcaaaagattaggaattatgatgatgtttatattaatgaatatgaccttcttgaatagtttatccgttttcatctcccaataaacagatggaataaccaaacatctacacgaacttcattagttttatcatgagaatgtcattcaaaaccaaccttgtttctaaattgttaagggcggctataatcaaagtcaaacaaaaacaaagtcgttattccaatgcatgtcgacactaatgagtttcttccttatatggatattaatttcaattagttttttaggatgtgcgattgcaatgattgtattgtaatttcaactaaaaatgcaatcatttgttgctatattctcatttctttaatcaaattatggacaaaaaaaaacaatagatggtgatcaaagcagtttcgctgcctagttgtagcgactgccttataaccatctaacgtgataagccaacgaatggatagcaaacaaataattatccagagacatgtcatatataaaagactttgtataactacgtaataatttctctatatgcatacattctttctacgtgagtaataattgagagtttaaacaaatgcaactttgttttctttctctcatatacaaagaaaaaatagtcagagcaactttgttttctttgcttttcctttattttttcaaacgaaaggagacgaaaataaagacgtcagtatccttcttgtagcgtaattataatagagacccacctaagacctaaccaccttagactgctgaattctttgtgcacaaaaagaaaaaaaaaacaaaaaaagactgctgaattcttttagtcattaggtttaccagcaaaaaaaaaaattttttagatatattgttggcttgtagtctcaaaaacacttgcttttcagttttgaacttaagtttaaatattaaattcgacgtaagaatgtaattttagagacgggctctataagcatgtgagatgtgctaatgagtaagcttctaggtttggggtttggttaaccaaaccggaactacataagtgcatttgtgtagagactatgtgacagaatttccaaattctttattttgttactctagggagtagggtccaaatatgaaatatactgtatattgttttaaatatttttagcctataactactgttagacaatagacggtcttaaaactttttttttttctttatatacttaattagaaattaatgcagccaaatccaactacatttaacctattttgtaccttaaactgtacctaatcgagatcaaacccgaaaaatatttactgtagttctagtcaagttcaagttcaaacttgtacattaattcaaaaataaaataaaatcgatttgaatcaaagcaaactaataaaccgggtttccaccaatagtccaatactccaaccgaaatctgaccgaattgaacttaatcgtagtattatacatttaagattagtatatagtaatacacaagagcgagaagaaacaagaaaagaagtatagaaaccctagaaaagaaaagaaaaaaaataaccacaccgcagaaaccgcccgccgcatattattcatcttctttctttatttccagattacttatccgtacacgtgtatcgcaatgaagagaggaagaagagttaaaaaggtaacttttataattcgaattttgggattttctaatcgggaaaaatgtcaaaaaaatcatcactttgccaaaagtggtgaaacaaagcaccaattgggtctggtgaaattctcaattttggttgaattttcttttaaattattaactttcgttgactttgccaaataagacatatcgttaagtcaactaacggactaatttaacggagttagagtcaacgttaacttttttcgttaagttctgaaacgacgtcgttttgagtatttttctaaaaaattaaaatcattacaaatcaagctcactggtaagattcgaacaagggaactgacaacgtatagcgtagtagtcaaccatcaagctaaagtatttattagctaattgacacacaaatatacatatattaatcatatacaagtatttattcacttaaaggtataatgattgatgttttttgtgataacatgttcctctagtccactatattaatccattacggagagaactatctaaaaattgtataatcgcaattgtaaattgcaaatctattaacaaaactaagatgtgttcacatgcacacttcgataaacattcttccatatatcttttgtgttaaggcatgttttaaatgatcaaatcacatattgattttatttgaaagtatatcaatataataaactgtttagaagatgttttgccaaaaaagaaaaagatgttttgttcttcttggaagtgtttgttaaagcccaagagagacttcaagctcacaatttctcaaagatccattaatactgggccttagttagatatccatattacatgttaaggcttcacgggttcgaatccagttggtgttcttttttgaacagatttttgtttttttttgtttttaaacataaaacgacgtcgtttctaaaaattaataaaaaaatagaaacgttgactctaactctgttaaattggtctgttagttgacttaacgacatgtcttatttggcaaagttaacgaaagttaatgatttaaaagaaaattcaactaaagttgagaatttaattcaccagacccaaagttggtgttttatttcaccacttttggcaaactgatgatttttatgacatttttcccttttctaatccgagttttcgagtttgattttgaatttgcatacaattttttttaggtcgtcagagattatagaagaatctgggttttctggaattatgagaatgctcagctacctaggggattcaatcgaacgtatgttgttcggatgttccgtaattttatgaggagtagaggttattttggacaaataagcatacta

SEQ ID NO: 3548 - DNA, 3000 bp, Unknown
  misc_feature (1)..( 3000): cDNA_ID_1821103_gDNA_ID_1620650_Annot_ID_47716 3000 nt of promoter + ATG
cccagtattaatggatctttgagaaattgtgagcttgaagtctctcttgggctttaacaaacacttccaagaagaacaaaacatctttttcttttttggcaaaacatcttctaaacagtttattatattgatatactttcaaataaaatcaatatgtgatttgatcatttaaaacatgccttaacacaaaagatatatggaagaatgtttatcgaagtgtgcatgtgaacacatcttagttttgttaatagatttgcaatttacaattgcgattatacaatttttagatagttctctccgtaatggattaatatagtggactagaggaacatgttatcacaaaaaacatcaatcattatacctttaagtgaataaatacttgtatatgattaatatatgtatatttgtgtgtcaattagctaataaatactttagcttgatggttgactactacgctatacgttgtcagttcccttgttcgaatcttaccagtgagcttgatttgtaatgattttaattttttagaaaaatactcaaaacgacgtcgtttcagaacttaacgaaaaaagttaacgttgactctaactccgttaaattagtccgttagttgacttaacgatatgtcttatttggcaaagtcaacgaaagttaataatttaaaagaaaattcaaccaaaattgagaatttcaccagacccaattggtgctttgtttcaccacttttggcaaagtgatgatttttttgacatttttcccgattagaaaatcccaaaattcgaattataaaagttacctttttaactcttcttcctctcttcattgcgatacacgtgtacggataagtaatctggaaataaagaaagaagatgaataatatgcggcgggcggtttctgcggtgtggttattttttttcttttcttttctagggtttctatacttcttttcttgtttcttctcgctcttgtgtattactatatactaatcttaaatgtataatactacgattaagttcaattcggtcagatttcggttggagtattggactattggtggaaacccggtttattagtttgctttgattcaaatcgattttattttatttttgaattaatgtacaagtttgaacttgaacttgactagaactacagtaaatatttttcgggtttgatctcgattaggtacagtttaaggtacaaaataggttaaatgtagttggatttggctgcattaatttctaattaagtatataaagaaaaaaaaaaagttttaagaccgtctattgtctaacagtagttataggctaaaaatatttaaaacaatatacagtatatttcatatttggaccctactccctagagtaacaaaataaagaatttggaaattctgtcacatagtctctacacaaatgcacttatgtagttccggtttggttaaccaaaccccaaacctagaagcttactcattagcacatctcacatgcttatagagcccgtctctaaaattacattcttacgtcgaatttaatatttaaacttaagttcaaaactgaaaagcaagtgtttttgagactacaagccaacaatatatctaaaaaatttttttttttgctggtaaacctaatgactaaaagaattcagcagtctttttttgttttttttttctttttgtgcacaaagaattcagcagtctaaggtggttaggtcttaggtgggtctctattataattacgctacaagaaggatactgacgtctttattttcgtctcctttcgtttgaaaaaataaaggaaaagcaaagaaaacaaagttgctctgactattttttctttgtatatgagagaaagaaaacaaagttgcatttgtttaaactctcaattattactcacgtagaaagaatgtatgcatatagagaaattattacgtagttatacaaagtcttttatatatgacatgtctctggataattatttgtttgctatccattcgttggcttatcacgttagatggttataaggcagtcgctacaactaggcagcgaaactgctttgatcaccatctattgtttttttttgtccataatttgattaaagaaatgagaatatagcaacaaatgattgcatttttagttgaaattacaatacaatcattgcaatcgcacatcctaaaaaactaattgaaattaatatccatataaggaagaaactcattagtgtcgacatgcattggaataacgactttgtttttgtttgactttgattatagccgcccttaacaatttagaaacaaggttggttttgaatgacattctcatgataaaactaatgaagttcgtgtagatgtttggttattccatctgtttattgggagatgaaaacggataaactattcaagaaggtcatattcattaatataaacatcatcataattcctaatcttttgacttagattgtagtcacatttatcaatattgagtcatttcattatcaaaaccttctttatctagtctagtcaaacgtcatttagtctagtcaaacgtcattatcaaaacctttttttttttttgacatcatgtaaaagatttgaatcgagatttacacgattatgaaactacaaccactattttgcacccaaaaaaagagaaaaaaaaaaaaaatacaaccactatatctacaaactaaggtttaaacatgtacaaaaatacttgagggtttaaaaataaaatttgactaaatttatttttaaaccctcaagtatttcgaacgtatctgacacgtgtcaaatcgccgcgtctgtacgcgcgcgtgaagctcaggaaccgaagcgtctcgtaggtttaatgatgacctcgtaggtttgccgcccattcgcctctatttatattagattaaaccctcgggaaatcattttccgccgcttgcaagaagaatctaaggtagctctcgctctctcctctgcgaattattttgtactctcgattctttatcgatttttccggcaatg

SEQ ID NO: 3549 - DNA, 3000 bp, Unknown
  misc_feature (1)..( 3000): cDNA_ID_1822833_gDNA_ID_1620651_Annot_ID_47729 3000 nt of promoter + ATG
attacagttaaatcttgagattagcaaccccaagtttcaagattaatggtcaaagaatcattgaaatgcaacagaccaaatagtaagcaatcaaggcttttgttaggcatatactcgtagaccaaaattctttcctctccttgtaatgaaaatccaagaagcctaaccaaatttctgtgttgaagcttggcaactacaacaacctcggtcttgaactccgcttcgccttgtcttgaatttttcgacaatctcttcaccgcaacttctttcccatttgaaaatgtaccctatccgtttaactttttaatcagcatcatctcgttatccaatcaaagaatcaatacgaagtacttaacctagggtgtacttgaagatattatagtataccttgtaaacctcaccaaaaccacctcgaccaatcttattactctctgcaaaatcatttgttgcagtttggattgttctatagtcgagctgtagtgagtctgcggttgccatatcatctcctactgcacaataaacagaacaaatgtcttagtaatcagctaaagaggctgatgaatgacgaccactaatatatcaaacctaattaagattgttagtaatctttaccctccgatgcagatgctgtgtcaaaagtcttctttttcttttttgcaaggaaacaataaccaactaaagctatgaaaagcagaacagccagcacaacaacggctaccactaacactgttgagttcccacttttccctgctttttaaagatcattggcttaagatcagataatgccacagagtataaaaatacaaaaattaatcaaaacaacaaaactttccctactagtatttcaagaaagcaggggaaataaaaagagaggacggagaatgagttcaccaggtaatgaagaagatgatatcggaggagtagacaccaacgactccctcggtggtggtggtggtggtggtggtggtagtggtggtgtttcaatggcgctttcattgtagaacgggtaaagctcgtaccttgcagtacaactcggccagtaaagtcttgctcctattctggaaagagccattccattgatggaactttgcaaacaactcaagcagtctgctcttgtaagatcaggagtgcactgaagcagcccgtacaaattctggtatgcggtcaattcggtattcaccgtatataattttctagaactgttggctgctttaccggcagcttcactcatcgtggaggaaacaaaacttgtgaacccgtctatttgtttttgattaggagaaatagtgttggtgttactcaagataaattctccttcgtttgtaatggccgtcgatagaatattcttgtgagaatatctgagtatacattgctcgtagtaaaacacggcttctcttaccttgggacaaagatttaaggtttgattgacagaaaaggctacgcagttacggcaaacttccggtgagacgtctccgcggcaaaggaaaagtccggtgactctgtcgggggcttttcctgcagtggcgttttggaatccggtggagtaagaggcgttacgtgaagatagagaggacaaaagggttctgagattggtggagtaagtgctgttacttgagtaagttgtcgtatttggacaataatgatttaagtaaaaaggatcttgagcagaagctgtgaaggagctagtgaggaatgagaaaaggaaaaggaagttgaaagatataagagaagacattgtttgagtaccttgatttgagtttcacatcatagagctcccatttataagctgatcactagcgtgtagtataagatgggttgtggtgactataagagtcaacaagtcaaagtaaatgattctttttcttattattgtcatttctcttaaacaacatatatttttatttgggaaaagcccacgttaaaattaacttgaatttgaatcaaaatttagttatttgatcagtgatccacatatcaccagttgagcccaataatgagtgtataaacgggagctccttaaaagttgggaaccactagcctactacaacttggtattagaaacaaaaggaattcaagaatgagattcttgttgtagcaaagcttaacgcagaatttcggtcaagcttcgatttttcttagttaaattacttccatttttgtttcataatattttagtgcctgacaagtaagtgtaagatactcttgtctagaattttatttactagagagtgaaaacaaaagggtgcagagaattaatggcttatctgctgattcttacacaatcagtttgttttgttggaacagagatgtgataagtaagtacggttttctgcagaagcaagagagtttgtgaggaacagagagatgaaatgatgtaagtaggcaagtttcagttctttgtttcccaaaatgactctaaaattcttatacacagttgtaaagttcagaaggaaaagtactaaaatatgaagtcaacgacaatctttagagtcaaccttccactaagagtgttgattggtttgatgaagcagtgaaggctagaaactgaagcaactagggtttgggaagttactgttttaacttgtaactgttcgtttgttacttctttggtaaggaagtaaaacggtgttgtcttattgacccaaagtctccgcggcttgctgaataatcacaaacctattaaatatccaactccaataggttcatctttttccggaaacagattcatgaaaacttaaaaatttataattgtattttctctggttttcgctttcacatgtttattctaacatttttatagttgattcattttagttaacatcaatacaagttgatgttactcgtctagttgaccttgacttgcaagatattgtattattttacaaaaaccaaaatttgactggcttggctggtttcacattcattcattagtactcataaaccaatcattaaaagtaagaaaaaaaaaacagagaagaaaggtgaagaaattggataatg

SEQ ID NO: 3550 - DNA, 3000 bp, Unknown
  misc_feature (1)..( 3000): cDNA_ID_1822829_gDNA_ID_1620651_Annot_ID_47730 3000 nt of promoter + ATG
aaaaggatgttacccgcttttaggtctcgatgtatgattgtgagtcgtgaatcttgatggagatacagaattcctctagcaattcctcctatgatcttgtaccgtgtagtccaatccagctggctctgcattctagaatctgcacatccatatagttagaatacctaaaacatgagttccaaaaggaaatatctttcctaagctaaatcttaccaaacaagaagtaatcaaggcttttattagacacaaactcgtagacaagtattttctcttctctctccaaacaaaatccaagaagcttgaccagatttctgtgctgaagctttgccacaacaacaacttcgttcttgaactctttctcaccttgtcctgatgttttcgatagtctcttcacggcaacttgtactccattaggaagtgtgccctaaaaagattgtgaattaaacagagccatccccttatttgatcctcttatgcaagtaacaaggaaactcaatgaaccggtagtagtaccttgtaaacttgtccaaatccaccttgaccgagtttgttacacatcgaaaacttatctgttgcagcttcaataaccttgaaatcaaactgcagtgaccctgcagttgtgatgtcatcctcttctgcaaaatatttaagaattcaaatccataaaagtttaagcaacggacacatagattttggaatctttaccatcatttgcacctggtgtatcataagtcttctttgctctctttgatgcatggaagctaaaaacagctacacaaataagaactgagatagcgactggcacaacaattgctatgattatcactgtagaatttttgccttttcctgcataagtcttagattagacatgaactaaaaccaaactaactattaggtaaataaataaaacagagctctaaccaggcggaaaggaaggagttgaaaccagtggcagtggaggagccgaaaccggcggaggaagaacagttccctctatagtttccttgtaaaaggggtaaacctcgtaccttgagttacaacttgggacaagaaatcttcctccaactttgttgaaatataattctttgatggattgttgaagacacattacacaatcttcactagtcagatcaggaatgcactgaaccgatgcataaagcgactgagacgaactgaaatccgacttcttaaccgcgaatttcttgcttgtactattagccgcttcctctgcagactttttcatcagagaaagcactgcatcattaaaccggtcagattggtccgccgtaactttctgagtgttccaagtgattattgtagttgtggttacagtatccatgaatatattcctgtctgagtatccaagcatgcactcatcatactgaatcaagaactctttcccacctggacatcgactccgagtgtctttagcagcaaagatgacgcactcacggcaagattctggcgagagatctcctttgcagagataaagtccgaacaccatgtcggagttttgaccctttgtgagactatgagatcccaaagagaagtaagcattgttagaagaaagagaggtcaaaagtgtttggagatttgagaagtaaatggagtttcttgatatcctgttagtacaaacatggccaacgtaagtagggtcttgtaattgtgcagaaactctcaagcttccaatgaagaaggttagaaggaagagaaagtttaatgaggtataagcagacattatccaatttcttcacctttcttctctgttttttttttcttacttttaatgattggtttatgagtactaatgaatgaatgtgaaaccagccaagccagtcaaattttggtttttgtaaaataatacaatatcttgcaagtcaaggtcaactagacgagtaacatcaacttgtattgatgttaactaaaatgaatcaactataaaaatgttagaataaacatgtgaaagcgaaaaccagagaaaatacaattataaatttttaagttttcatgaatctgtttccggaaaaagatgaacctattggagttggatatttaataggtttgtgattattcagcaagccgcggagactttgggtcaataagacaacaccgttttacttccttaccaaagaagtaacaaacgaacagttacaagttaaaacagtaacttcccaaaccctagttgcttcagtttctagccttcactgcttcatcaaaccaatcaacactcttagtggaaggttgactctaaagattgtcgttgacttcatattttagtacttttccttctgaactttacaactgtgtataagaattttagagtcattttgggaaacaaagaactgaaacttgcctacttacatcatttcatctctctgttcctcacaaactctcttgcttctgcagaaaaccgtacttacttatcacatctctgttccaacaaaacaaactgattgtgtaagaatcagcagataagccattaattctctgcacccttttgttttcactctctagtaaataaaattctagacaagagtatcttacacttacttgtcaggcactaaaatattatgaaacaaaaatggaagtaatttaactaagaaaaatcgaagcttgaccgaaattctgcgttaagctttgctacaacaagaatctcattcttgaattccttttgtttctaataccaagttgtagtaggctagtggttcccaacttttaaggagctcccgtttatacactcattattgggctcaactggtgatatgtggatcactgatcaaataactaaattttgattcaaattcaagttaattttaacgtgggcttttcccaaataaaaatatatgttgtttaagagaaatgacaataataagaaaaagaatcatttactttgacttgttgactcttatagtcaccacaacccatcttatactacacgctagtgatcagcttataaatgggagctctatgatgtgaaactcaaatcaaggtactcaaaca

SEQ ID NO: 3551 - DNA, 3000 bp, Unknown
  misc_feature (1)..( 3000): cDNA_ID_1821185_gDNA_ID_1620651_Annot_ID_47732 3000 nt of promoter + ATG
caccaccaccgccgctgcctccgttggcatctccttcactatctggtgaacagtttcttctacctttgccctgtttacttgatctttgcagtattaccaatatggaacgcagagttttcaatttttgttttgttataagtctactattttcttactaaagcagatgatctgtttaaacgcagataaaagtgggaattcaaatgtggtcgtggtagccgttgttgtgcctatcatagtcgctgttctgattttcatagctggttattgtttctttgcaaagagggcaaagaagacttatggcacaacacctgctttagatggtaaagattcaagtccttaattggtttgattaatgtttttgactaatatattttgtctttctttttctgattactaagacatttattttgcaacagaagatgataaaacaaccatagagtcgctgcaacttgattatagagcaattcaagctgcaacaaatgatttttcagagaataataaaattggtcgaggaggttttggtgacgtttacaaggtataatattatatacttctacataatttatcgattgttttgttttctttttgctacaacacatttggataatgagattgataaaaatggatagggtacattttcaaatggaaccgaagttgcagtgaagagactgtcgaaaacatcagaacaaggtgacacagaattcaagaacgaggttgtagttgttgcaaatcttcggcacaaaaatcttgttaggattctcggattttctatagaacgagaagaaaggatattggtctacgagtatgtagaaaataaaagccttgataacttcctatttggttagttgcatttgatgatttgtttcattgattcgttaaccagtcctgaaacatggttagagctaactactattcatggatgttcacagatcctgcaaagaaaggtcagttgtactggacacagcgataccatatcattggtgggattgctagagggatcctatatcttcatcaagattcacgactcacaatcatacaccgtgaccttaaagcgagtaacattctcctggatgctgatatgaatcctaaaattgctgattttggaatggcaaggatctttggaatggatcaaacccagcagaacacaagcagaatagttggtacctagtaagtcttccacttgactactctctcacatgttgaacattttattttgataacatattaaagtttttgatgtggatatccagcggttacatgtctcctgaatatgcgatgcgtggccagttctcaatgaaatctgatgtctatagtttcggagtgttagttcttgagattataagcggtaggaagaacaacagctttatcgagacagatgacgcacaggacttggtgacacatgtaagtttaaaggaaaggagttatatatatgtacctctcctcatcctacaataagcaatagttgcaataactgtttgactgattgattctaggcttggaggctttggagaaacggaacagcgttagacctcgtggatccattcattgcagatagttgccggaagagtgaagtggttcgatgcacccatatcggtcttttatgtgttcaagaagatcctgtaaaacgtccagccatgtcaaccatttccgtgatgctcactagtaatacaatggctttaccagcgcctcagcaaccagggttttttgttaggagtagacctggaacaaaccggcttgattcagatcaatcaacgaccaacaagtctgttacagtatctattgacgataagtcaatgtctgatttagatcctcgttgaatatggtgttattaaaccttacgattgaaatcaagtttaattaagcctatatttacatatttctaaacttgatgaaccatgttgatcctttagttttgatttggtttgatatttgttttcaagaataatcaatttagtctcagctatcagcatcaccaccgattgaaaaattcattacctaaatgagagggagagaacacttaatgttggcattagagttttgtccattctaaaaatttgtgcattattttggagttcatttcaacaaaagaatcgctttagcaatacctctaatgattttgtgccatttgattttgaaaacagagggaaaacagagtacagtgggatggtgatttgcatgatttgtaaagtggtgaaataaatgaaatgtgaaccatctaacacgtcaaagtttttttctttctttcgttgtaaagtaaactagttgaatttctaagttttgacgcctatcaatctatttccgagaaagatataaaataaaaatattggagttgaatattatttaataggttgatgattattctgcttggcgccgagactttgggttaataagacagcacagttaaacttccttgacagacaagtaacaaacgaacagttattaagtaaaaacagtaattacacaaccctagtttgattcagaatcagaaccaatcaacacgctcagtggcaggttaacttgtaaagattatctttgaatttttcttttagggctcttccttgtttaactttacaactgtgtattagatttttaaagtcattttttgaaacaaggaactttacttagatcagtcccaatctctcttttcctcacaatttacgacatttaaaagaaaaaaaatcgcttacattgactactgacttagtcgtaacaaaccgtcgtatacttcacgttactcagtactagtcagagagagtatcatggaagctccacgatgagaaactcaaatcaaggaactcgaaaaaaacaaaaccatgtcttctctgatcttattatgtatatagtttcaatgtaaatattatggttttgtataggtttaattggagtctgtataggtttggtttagctggtttagaggctttggtttaggcctggtcaaatgtatataaacccacaattgtatcttttaccagattaatgagaatgagattgtttactaat

SEQ ID NO: 3552 - DNA, 3000 bp, Unknown
  misc_feature (1)..( 3000): cDNA_ID_1821177_gDNA_ID_1620651_Annot_ID_47735 3000 nt of promoter + ATG
ttttgcaaagactaacaagctaggtcaaggtggatttggagaagtttacaaggtatagatatagtctttagttctctagctacctggttcattacagagttagggtaaattgatcatatcatcatccgtttttagggcacgttagttaatggaacagaagttgcagtgaagaggctatcgaaaacatccgaacaaggtgcacaagagttcaagaacgaggttgttcttgtcgccaaacttcagcataggaatcttgttaagcttcttgggtactgtctggaaccagaggagaaaatacttgtttacgagtttgtccccaacaagagcctagactacttcctttttggtatgtggcattaccatatacatattaacctgagattctgagtagacatatatgattgtaatctctaagtggctcatgactacttgtgtacgtgcagatcctacaaagcaagggcagttagactggacaaaacgatacaacattatcggaggaatcactcgaggaattctatatcttcatcaagattcacgactaacaatcatacaccgtgatctcaaagccagcaacattcttctagatgccgatatgatcccgaaaatcgctgattttggaatggcgaggatatctggaatagaccaaagtgtagctaacacaaaaaggatagctggaactttgtaaaatactaaccttatgaacagaagttttcaagaatattttcttggacattctaatttaatctttcttgtgtgttttatcttgtagcggttacatgcctccagaatacgtgatccatggccagttctcgatgaaatctgatgtctatagcttcggtgttttgattcttgagattatatgtggcaagaagaatagaagcttttaccaagcagatactaaagctgaaaatttggtcacctatgtgagtaccaaagaagaaacttagtgcatgatccaatctaactttgtttgttagttattgattaatgattacattgttgtacaggtttggaggttgtggacaaacggatcaccattagagctcgtggatctaaccatatcagagaattgtcaaacagaagaagttataagatgcatccacatcgcactcctatgtgttcaagaagatcctaaagatcgtcccaacttgtcaacaatcatgatgatgctcactaacagttccctcattttatctgttcctcaaccacctggattctttgttccgcaaaacaaagaacgtgatagctttttgtcgagccaatttacaatgggatgtacttctcagactaaaaatgatgtaaccattacaaatctagatcctcgttgaagttgctgttccaattgacaaattggaattgttactgaaaacaacgcagattccacatgtgaggtattatttcacttgaaaatgaaatgtgatgatccatagttatgtaagatttgtgagtcactcaaagttatttttcatacaaactctttatcatttctacattgtaacattggtttgttgtattgaagatttctgatacgaatggcttcaaaattttataaacataccaattcatgtatagtagtaacgcaaatgttgttatgcatgtaaaaaagctctgtaaattagacggattcggtttggctttaccggtagacgaatttctacgaatatttacccaaaccggtttatttactaaacctataccatatgaaccggaaaccaaacgctattaccgacttttcttcttcactctcttcgtcggaatcagcctttgcgcattcttctgagctcggatttagggtttagcattctggttctaatggcgtttaatgatattgattatcggatttgtttgtgctcttttgttagattttgatgtgtttaatggcataatcacgatttagctaagggctccgggccaactgcgttttccggtgggaaatgtaatccgtctccgatgcttatttggggtaagagagcaaacatgggataatactgcatcaatttgatagacctctatcactaatctgttgtgtccttatttataagctttggtaaatatgtgtgttcatgatttgatgattaaattatgtacagccagctttggaggtcgagccagtctgcaaacaggcccacttcccaaactatcaatgatgtaaccattacagatctggaacctcgttgaagataattgaaacagtcagaagccatgtttaggtgttttatctgtttgtagactggctcgaagttataaacaaactctatcaatgtctacactgtaatatcagccctttgttatgaaatattttgcattctatttggactcaattgttgctgttgttactcacactagtggttcgttgctactctgtttcagccaattacgacatgttcttctggtttcggcgtgattcatatgtacgcattcttacatgactcaacccaagagacactgattaggctataaattgagacgaacagaacacaacgaaaaaaggtatgctaatcttctgtttttttcttttaggcttttacaatgctttgattgccaaatgtatatgtatagtctgggaatgtgctgagcagcctatgacaaaagccggtttatttgtgaaattaatgacactgacactttagcccaatacttttcttgttcctctccatctgcctctgcgtcactgggtttgattctatgaatactttatcctttatgtcattatctgagtcaacattccaatcaatattcaacaacccccttattatataatgtgaacaaagaaaatattattgacttttagcttttgacattgactttgacttttgacactcgttttcgtgaccatatttgtaggtttcaggaccactgtcatcaatttgacgaattcaatatttgaaaattttggagagaagcttcgattttgcttgtttaaactggtaagaaacgtacagatgcgtcaaacactaaacacaaagatctagcttttgctttaatcttcaagaaacaatg

SEQ ID NO: 3553 - DNA, 3000 bp, Unknown
  misc_feature (1)..( 3000): cDNA_ID_1821165_gDNA_ID_1620651_Annot_ID_47738 3000 nt of promoter + ATG
tacgttggatgtgcagaccatagaaggaggggtcagctggattggagaacacgatacaacataatcaggggagtgactcgagggattttatatctccatcaagattcacggcttacaatcatacaccgtgacctcaaagcgggtaacattctcttagatgtcgatatgaacccgaaaatcgcggattttggtgtggctaggaattttagagtggaccaaactgaagctaccacaggaagagtagttggaacattgtaagtaattgttaacttcaattacactctgtctattcccttttctttccctaataaaacttaaagtgatatgtgctgtgttttgcagcggttacatgcctcccgaatatgtggcgaacgggcagttctcgatgaaatctgatgtttatagttttggagtattgattctggagattattgttggcaaaaagagtagtagcttccatgagattgatggttcagtaggaaacttggtcacatatgttagtcctacaaagccaatgcaatcttgaacttatttttgacctctttaaactttgatacaagaatgaacattggtttattgtgacttaacaggtttggaggctttggaacaacgaatcattcttggaacttgtagacccggccatgggggagagttatgataaagatgaagtcatcagatgcatccatataagcttattgtgcgttcaagaaaatcctgcagatcgtccaacaatgtccacagtgtttcagatgctcactaatacttttcttactctgcccgtgcctcaattacctggatttgttttcagggtcagatccgagccaaacccattagccgagagacttgagcctggtccgtctactaccatgtcgtttgcttgttccattgatgatgcatcgatcacgagtgttgatcttcgttgagattagaggttaatgataatatgcatagcttttcataagccaaaaatctaatggtcactttcattataaactcttcctgtcttgttttcccacttaaaaagacaaaagcagttgacttatagtagtagtcaatcctctgtttcacgtaacagagagaagaagaaaatattcataataattaggagattcatgatctgaaacaaaagctgaggaaatcgaacaatgtcttctggtgcctctttcatcttccttttcttcttcctcactagcttcacagcttctgttgaaaatgttttctatataaagcatatttgcccaaatacgacaacttattcaagaaacagcccttacttgactaatctcagaacccttttgtcttctctttctgcccccaacgcctcttactctactggattccaaagcgccagggcgggacaagcccctgatagagtcaccggacttttcctttgccgcggagacgtctcaccggcagtttgtcgtaactgcgtcgccttctccatcaacgacacactcgttcagtgtccgagtgagagaaaatccgtgttttattatgatgagtgtatgctcagatactctgaccagaatattctctcgacccttgcatacgatggagcatggatcaggatgaacggaaatatttcaattgatcaaaatcaaatgaaccggttcaaagattttgtgtcgtctacgatgaatcaagctgccgtcaaagcggcgagcagtcctagaaagttctatacggtaaaggccacttggacagcactccagacgttgtacggcctggttcagtgcactcctgatcttacaagacaagactgcttcagctgtctggaaagttccatcaaattaatgcctctttacaaaactggaggaagaactctttactctagttgtaattcaaggtacgagcttttcgcgttctacaacgaaactactgttagaacacaacaagcaccaccaccgctacctccttcgtctactcctctggtgacatctccttcactaccaggttaatttctccttcctctgtttcttaccctgatttcttgaaattagtcctttcaatttattttaggtttgttctgccactatcaaatcttaagccaatgatctttgaaatgcagggaaaagttggaattcaaatgtgttagtggttgcaattgttctgaccatccttgtggctgctctacttttgatagctggttattgttttgcaaaaagggttaagaattcttctgataatgcaccagcctttgatggtaacattcaaatgattaacaatctcaattgggtttgactataatcttgtttgctatttttctgatcacagagacttttattgtgcaacaggagatgatataacaaccgagtcgctgcaacttgattatagaatgattcgagctgcaacaaataagttttcagaaaataataagataggtcaaggtggatttggtgaggtttacaaggtactattactacgaaattctcttaactttgtacgtttaattgaaatgttgtgtcaactcaacacatttggataacgagatgatgttgatgaaaacgaatagggtacattttcgaatggaactgaagtagcggttaagagactgtcaaaatcttcaggacaaggtgacacagagttcaagaacgaggttgttgttgttgcaaagcttcagcatagaaatctggttaggcttctaggattttctataggaggaggagaaaggatattggtctacgagtatatgcccaacaaaagccttgattactttctctttggtcagttgcattttttgctttatttcaatgattctgtagctattcgtgaaacttgggggactaagcaatatctcacacagatcctgcgaagcaaaatcagctggactggactcgacgatacaaggtcattggagggattgctcgaggaattttatatcttcatcaagattcaaggctcacaatcatacaccgtgacctcaaagcaagtaacattctcctggatgcggatatgaatcccaaacttgctgattttggactggcaaggatctttggaatg

SEQ ID NO: 3554 - DNA, 3000 bp, Unknown
  misc_feature (1)..( 3000): cDNA_ID_1821149_gDNA_ID_1620651_Annot_ID_47742 3000 nt of promoter + ATG
ccctgctttgaggtctcgatgtataattgtgagtcgtgaatcttgatgaagataaagaattcctctagcaattcctcctatgatcttgtaccttcttgtccagtctagcttcattttcatcgtagagtctgtacagcgtatttcaaatgttaagaacaaagaatggcatacaatttgaagatatcttggctacgtactaaatttaactgaccaaagaggaagtgatcaaggctcttgttgggcacaaactcgtagacaagtattttttcttctccttccaaacaataaccaagcagctttaccaaatttctatgttggagctttgcaacaacaacaacttcgttttcaaactctttttcaccttgtcctgatgtcttcgatagtctcttcaccgcaacttgtagtccactactcaatgtaccctacacgagtaatttattttaagataaccataagtatataggaattgtcggtaagattaatcatgaaaatgaagtactcaaaatgcaagtatacaagtagaagttagtatttgttacaaatataggatgataattaacgactagagtttctttgttccgcaacaacctttgcaagtacaaggttgctgcactcatcccatacatctcaactttcgaagtaatgtgtgtgagatttgatttggaaacaggggaaaaacagagtacattgctctgttcaatggtaataataccttgtaaacttcgccgaaaccaccttgacctagcttgttaattggcaaaaagcaattcgttgctgcctcaattgccttaaaatcaaactgaagtgatcctgcagtcgtaatatcattcccatctggaaaagaaaacttcaacagctgaattaagtaagagcacaacagactattcattctatgaggagatatgtttatcactggtgtgcttaccttcagctactggttccttctcattaagcgtcctcttatttttagccctgacactaaaaacagctactaatagaagaaaaagtacagtgattggaacaacaactgcaataattatgacagaggagtttccaccttttcctgtatcaacaacagcaagaattttttaagcaaaattcttgtatgaaacttgtgttgaaatatgtagtcaaaggaaagggactgttcataccaggacgtggtgatgaatcttgaggtgttccaacattagattcgttgtaaaacgcgtaattatcgtatcttgaagcacagctcggcagaagaatccttcccccaattttgtcataggttacttgattgatgcctattttcagacagtctaagcagtcttgttccctaagatcaggagtgcaccgaaccattccgtacaaactctgggatgcatttaaatcaatttttctcacagcccattttttgaaactcctggcggcttcaacggcggctaagttcatgggggtcaagaccaaatctctgaactgatcttgtttgactgatagaggattcctagcgctctgcatgaacattcctccatcggtgtttagagtggctactatattcctgttagagtatctgagcagacactgctcgtaatagaacacgccttctttatcttttggacaccgagtcaacgtttcgtttacggcaaaggtgacgcagctacggcaaacttccgacgagacgtcgacgcggcagaggaaaagtccggtgaccctgtcgggggcctgtcccgccgtggcggtttggaatccggtggagtaagaagaagcgttaagggaagagagagaggacaaaagggttttgagattggtggagtaagtgctgttacttgagaaagtcgtcgtgactgaacaattatgatataggtagaaagtattttgagcagaagctgtgatggatgagaaaaggaaaaggaagatgaaagagatcagagaagacatggttccttttcctcgatctgggtttcagatcatgtagctctcaatttttgaaactagaactatatttttcccttttttctatgagaccaacaagtcttagtaaacgccggttttattttattttattttgtaatgtcaaacttgtatcgcgcaaaataataactattattaaaaaaagacaaagagagagtagttacgatttctaaattacaataaactatttgtcaggaattaaaggaaaaaaaacagcctaacttagttggatatgataagatattatttgtcagaaaagaatcttttctctctctctctcaattttctaatacaagatattatttttatatttttattttttcgtggacatcagaaattcagaattatgatagcatgaaaaatcagcgtgaggagagtaccgcaaatattgtcttaaattgtatttacgctgtaatttaagcttcttaaaaaaaaaaaagttttaaaccattttcaactctattttaaaagaattgtattctaatgatcatctccaaaataaagttttttcaaaaataaaggaaaatatagaagtaaccatcgaagatgtctttacgtaaccgaaaaatagcattttacactttacatcacaaaattaaagtcactatgcttcttatttgtggagaaaacaaatcgaatctagcttgatcatttttgcgtgttttgagatgacaattttttctttctgcgtgttttgactttttagatatgagtcattaaatgcattcacatcctccaagcatgtctactagcaggtcttttccttgttctgtacgtagatgatgcatcgatcacggtttttagctctcgttgaaattgaggctaatgattaacatgtatattctttcataagccccaaaacctaatatcaaagattgactcacatagtccaagtctagcacaaaaatttcaaagttgtcaatttcttattaatgtgcatggttattcaaatggaaattttaaactgatgattaaatttctaagaaccacaaatagtcaaatactaactacaccacccacacattatctcaagaaaaaagaaaaatg

SEQ ID NO: 3555 - DNA, 3000 bp, Unknown
  misc_feature (1)..( 3000): cDNA_ID_1821137_gDNA_ID_1620651_Annot_ID_47745 3000 nt of promoter + ATG
tatatgattgtgagctgtggatcttgatgaagatgtagtatcccttgagcaatccctccaatgatcttgtatcgccgagtccagtctagctcaccttgcttttcaggatctgcacatctccatgtacaatcatttactttaaagctgtagaagaatcctttgagtaatcattctgttaaagggaactataccgaatagaaaatagtcaaggcttttgttgagaacaaactcatagatcaaaaactttccatctccttgcaaacagaacccaagaagcctagccagattcctatgctgaatttttgatacaagaacagcctcgttcctgaacttttttgtgtcttgtcctgatactttcgagagcctcttcacggcaacttcagttccatttgaaaacttaccctacagagcattgaatgaaacaacaatcgccatttattaccagtaacttagcctatgtgtttgacttggcaaatttggcaaaccgatagcttaataccttgtaaacttccccaaatcgaccttcgccgagcttattgctcttcgaaaacttattcgttgcagcttcaattgtcttaaactcgtattgcaatgaatttgtagtagaaacatcactatcagctgaaaagaaagcgtgtattagttatgcttcgtctcttggctaaggagacaatataggcttataatgaaaaaaaaataccgataaaaagcataaatcacaagacactaacattcaaattcagttctttgcaaagactttctcctccagcaaataaaaaatcctagaacaactagtatcaagacgatgacaactgctggaacggtaatcaccactacaattccagctgagactcccctgctatctgttcatgacatagataattgagtttatttcagttttttcttacaggcatagtttaatcggtttgaatacttaccattatctgtagtgttcgccccgtgacctacagaaggtggtcgcggtacattcattggaggtttcggaggagtagccaaggtaatgttatgaaaagccttagagaatgtaaaaagctgccaccggaaaaagcagattggccgcataacatagcctccagtattatttccacagcatgactggtactcaagtacgcctcgttggagacagttgttacattcgtcagaagaaatatctggcgtgcattgcatcaatgcgtagatattctggaattttgtcaagttcgcaaaatcaactctgtaatggttatcactggacgatggtgtgcttcttgctgcggaggctgcagtaatcgtacgagatgttaagtcttcccatatgttcttgaaatccgttagatctgaggcgatagttgcagtgttcaagaccaaatactgaggctcaatctcccaaaaagctgcagatcctgagaaagaaatgttggagtagcggacaaggcacagcgttggatcaagtgcccaataatacgcgtctgtctggttaacacagtcctgtatcaaccagcctgccgcaccctttatacaattaaaacagtcacttggagttgatcttgggatgcacatccctaatgcgtagactcgatcttgctcttctccaatcgaaccgtagtagaaaccatcttgagaggcggtattgttaggaagagaagagaggataagacgacgatttgaatcgtatgtaccgttgggtgtgaaatatttacggttctctatgcatgtttgtgctgaaacagaagcaacaccaaaggctagaagaataaaacagaggattgataagaaactcctctgcttcattttgccttacgagattatagctgtgatctttgtgttagtaattacgcatgtatctgtttctaacccgttcgaacagataagtgaagtttctctgcgatttttctaatgttgaatccatcaaactaataagtggtccctaaacctacatagtcgatggtaaaatgtcaataatgtttgaaagtttagataataccctgaaaatgacgagtcccttcgtttacttgtaataatgggtgagaactacgacacagttccatagcaactttcatatttcgagaattaaattatattccgcagcaaatgctatgtccttgtaaagctctgtttttagtctatgaccatacttgtaaaacatgttgtttttttttgtgtgaattaacagttcattcaaaataaaaataaataaataaataatcgaaaatgtaactctgtggttattgtagcttgaaaaaacgaataatcaagtgtgttgttcattctcttcgttcgttgcacactggtatagcttgttgctgtcatctactgctgactccagcgataatgaaacgatcagaaccacgaaatttactagaactcagcttatcggaacttggaaggggaccagatgagtattaggctaattcgtcgtgttgtatttttcaactaatgcgtcagtgtcgtttttattttcaactaatgcgtcagtgtcattagtttcggaaataaacgatatttgttttgtttttgtattgggtcctatatcgagcgagattggcatgtgagttgggttggctagggaaaatggtaaaatctccacattttgttttgaaaatgtgaaaaatacatttttccctacagcggggatatgaatcagtactatttataatgcaagatatgtaaatttaaaagacatcataagaaaaacaaaactacagaatttcgcttaagctttcaaagatatcgatttgaatataatggtgcatttgcggggttcagtttccacggaaccggtaaatttaaaagccaaataccttaaaagagttgtgaaacagggttacaaatatacatagtggattcgtatgaaaaagaagggaggaatgagtcctacacgtagtcacatcacatatgaaagagattgcttttgaaaatcgaatcctcttctaatattaaatctttcaagactggaggttttaaacaagaaaatcaaactcgatgcaaaagaacaaaatg

SEQ ID NO: 3556 - DNA, 3000 bp, Unknown
  misc_feature (1)..( 3000): cDNA_ID_1821133_gDNA_ID_1620651_Annot_ID_47746 3000 nt of promoter + ATG
aagatttttatgctgaagtcttgctacaagaagcacctcgttcttgaactctggctcaccttgatctgatggtttagatagtctcttggcagcaacttctgttccattcggaaacataccctgctcattcgcatgacctttactatcagaattagcatctgagtttataatacaatcaagtagttgagaaaatttaagaacatcatgccttgtaaactgcaccaaatccaccatgaccaagcttgttactcttatgaaaattacttgttgcagcttttattgctctaaaatcgaatcgaagcgaacctgaggacgctgtaagatcatccgtagctgcacaaatatactgttatgctgtagagtttccaagggacattaacatctctgaaccgtagacaagtatttttaccatcatctggtgatgcagtaccataaggcctcctaggtcttcttgaaacagagaaatacccatctgagaagaaacagagacataacaaaagtgttggaaataattttaccctaaaatgttgttctgagataatgtcgttctagcaaaccattgaaaactcactttcacttgcaaatgattggtaagcttttctcctcctagaaacagcgtatccaagagcaagcagtacagtgctcacgacgacggaaacaaccgcaattgccacaatagatcctgtagatatatttttgccatctgcgcgaaagctgtcactcagaatacaatccaaattggtttaagggcataaagtattttaaatgcgaatttttttagaaacttcttttaaattttttgaatatgaaacaatttttttttgtgaaacgaatatgaaacattattacacaaaaataacaggaggttgtgttttctttttgagtttgtattttcaagtaaacaaaaataaatgcaaacacatcagcaaaaatcgagatccaacacagcagaaaaagttcaaatgaagagttcatatctttatattatatacctttcttggttgtgttagagtgaccattatctaattcagaagggggagttggtaacatcccatttatgaatagtcccaagaatggctgtagatcccatcgcatgaaacagctggtccttgcaatatagcctacttgtatcccccggcagcatgacctattatctatcctaagatgttgtaaacatttctcgcagttcaacttggttaggtctttattgcattgcgcgatggcataaatgctcctgaacgggaacgacccgagctcttgtatgctgttggcgtacaatgaaccatcaactttgtttatcacacgatccatcaaagcctgccatgtagatttaaactccgtcaagttggtttggccgaacgatgtgttatatttgtactcaatatactctgcccatattatgtcttcgtcgagcgatccattaatcaagtggtttgagtagcgtaccaaacaaagcgagtctccagaactccagtctatagcttctgcctgattaggacatgtgtgtagcaaggtatgagatacactcgtgatacaatccgaacaatcctgtgttgtagtacctcggctacacatccccagaccatgtgctatgtttggaccgggcttgaacggagtcttgtagaagccttcattatccttgacacgagaaggaagagacgagagcatggctcggaggtttatgtcgtaaggaccattggctttgaaaaaatcagatctctgaatgcaggttggtgcagcgacagcacaagagcttatgaccacaaaccagaagattgctcgcaagtcgaccattttgttcttttgcatcgagtttgattttcttgtttaaaacctccagtcttgaaagatttaatattagaagaggattcgattttcaaaagcaatctctttcatatgtgatgtgactacgtgtaggactcattcctcccttctttttcatacgaatccactatgtatatttgtaaccctgtttcacaactcttttaaggtatttggcttttaaatttaccggttccgtggaaactgaaccccgcaaatgcaccattatattcaaatcgatatctttgaaagcttaagcgaaattctgtagttttgtttttcttatgatgtcttttaaatttacatatcttgcattataaatagtactgattcatatccccgctgtagggaaaaatgtatttttcacattttcaaaacaaaatgtggagattttaccattttccctagccaacccaactcacatgccaatctcgctcgatataggacccaatacaaaaacaaaacaaatatcgtttatttccgaaactaatgacactgacgcattagttgaaaataaaaacgacactgacgcattagttgaaaaatacaacacgacgaattagcctaatactcatctggtccccttccaagttccgataagctgagttctagtaaatttcgtggttctgatcgtttcattatcgctggagtcagcagtagatgacagcaacaagctataccagtgtgcaacgaacgaagagaatgaacaacacacttgattattcgttttttcaagctacaataaccacagagttacattttcgattatttatttatttatttttattttgaatgaactgttaattcacacaaaaaaaaacaacatgttttacaagtatggtcatagactaaaaacagagctttacaaggacatagcatttgctgcggaatataatttaattctcgaaatatgaaagttgctatggaactgtgtcgtagttctcacccattattacaagtaaacgaagggactcgtcattttcagggtattatctaaactttcaaacattattgacattttaccatcgactatgtaggtttagggaccacttattagtttgatggattcaacattagaaaaatcgcagagaaacttcacttatctgttcgaacgggttagaaacagatacatgcgtaattactaacacaaagatcacagctataatctcgtaaggcaaa

SEQ ID NO: 3557 - DNA, 3000 bp, Unknown; identical to SEQ ID NO: 3194
  misc_feature (1)..( 3000): cDNA_ID_1807311_gDNA_ID_1620651_Annot_ID_47749 3000 nt of promoter + ATG

SEQ ID NO: 3558 - DNA, 3000 bp, Unknown; identical to SEQ ID NO: 3215
  misc_feature (1)..( 3000): cDNA_ID_2134228_gDNA_ID_1620651_Annot_ID_163476 3000 nt of promoter + ATG

SEQ ID NO: 3559 - DNA, 3000 bp, Unknown; identical to SEQ ID NO: 3556
  misc_feature (1)..( 3000): cDNA_ID_1821133_gDNA_ID_1620651_Annot_ID_163472 3000 nt of promoter + ATG

SEQ ID NO: 3560 - DNA, 3000 bp, Unknown; identical to SEQ ID NO: 3555
  misc_feature (1)..( 3000): cDNA_ID_3071384_gDNA_ID_1620651_Annot_ID_163471 3000 nt of promoter + ATG

SEQ ID NO: 3561 - DNA, 3000 bp, Unknown
  misc_feature (1)..( 3000): cDNA_ID_3071396_gDNA_ID_1620651_Annot_ID_163468 3000 nt of promoter + ATG
tttcttcgtctttttcgtcataagcttcagtgcaatttctgtttctgcacaaacttgtgacaatactactgggactttcatacccaatagtccttatgataagaaccgccgactcatcctctctactctagcttctaacgtcacggctcaggagggctacttcatcggttcgattgggattgctcctgaccaagtctttgccaccgggatgtgcgctccaggttctgagcgtgatgtttgctctctctgtatcaggtccacatcagagagtttactacaaagctgtctggaccaggcagatgctttcttctggtcaggtgaagaaaccctttgccttgttcgctacgctaaccgccccttctctggattgctcgtcatggatccactaggagcgatattcaacacaggagaactcaatacgaatcagactgtgtttgatatcgagtggaataatttaacttctagtatgatcgccggaataacttcttcttcatcaggggggaacaattcgtctaagtactactcagacgatatagctcttgtgccggattttaagaacatatcagcgttgatgcaatgcacaccagacgtttcgtcagaggattgtaacacttgcttacggcaaaacgttgtcgactatgataattgttgccgtgggcaccaaggcggcgttatgtcaaggccaaactgctttttccgatgggaagtgtatcccttctctggtgctattgatcagattaatttaccaaagtcaccgccgccttcagttacatccccgtctcctatagccaacataaccaagaatggaaagtccttgttggaacattttcagaaaattgtcttgttttgtttctgtttgtttttttttctttttttggtttttgtgtatttatgcttttgatgagttgtgttttgtgcagatagtagaatatcaggaggaaaaatcgcagcaatagttgttgttactgttgttacaataatattggttgttttaggctttgttatttccaatagaagaaagcaaaagcaagaaatggatcttccaagtgagttttctttgtttgtttgttaaaaccttgattgttttcggtcatgagaccttatactttgaagtggtactttttcacgagcttatttatggtttcaaatgaagcggaatctgttcaatttgatttaaagacaattgaatcggcgacaagcaacttttccgaacgtaacaagcttggtaaaggtggattcggtgaagtttacaaggtaatatataggatctttgttgtccatctagtttgcttcttttgtggagaataggctatgtgcttaatttgttagtattttcaagggtatgctcatgaatggcactgaaattgcggtgaagagattgtcgaaaacatcaggacaaggtgaagtagagttcaagaacgaggttgttgttgttgcaaagcttcaacacataaatcttgttagacttctcgggttttcgctacaaggagaagagaagttactcgtctatgagtttgtttcaaacaaaagcctcgattatttcctctttggtatgtaatatttaactaaaaacagtttcctctttggtatgtacgttttaactcatacatgtataagtatgcagatcctacgaagagaaatcagttggactggacaatgcgacgcaatatcatcggtggcattactcgagggattttatatcttcatcaagattcgcggctgaagatcatacatcgtgacctcaaagcgagtaacattctcttagatgcggatatgaatccaaaaatcgctgatttcggaatggcaaggatctttggagtggaccaaactgttgccaatacaggaagagtggttggaaccttgtaagtatcatcttaaaatggactttgagatttttgatcattagtttaagagaccttttttgacttccagtttataacctctatttttcagtggttacatgtctcctgagtatgtgacacatggccaattctcaatgaaatcagacgtctatagttttggagtattgattcttgagatcattagtggcaaaaagaatagcagcttctaccaaatggatggcttagttaacaatttagtcacatatgtgagtcccaaactttatttgactctcttaaaagttaaaacactgatcatagttctgaatgtgtatatattctacaggtctggaaactttgggagaacaaatcattgcatgagctcttagatccctttatcaaccaagatttcacaagcgaggaagtcattagatacattcatattggactgttatgtgttcaagaaaatcctgcagatcgaccaacaatgtctacgattcaccaaatgctcacaaacagctcaatcactctgcctgtgcctctgcctcctggatttttctttaggaacggaccaggatcgaacccgggtcagtcgaacagcaagtcttttgcttgttctgtagatgaagcaacaatcacggacgttaatcctcgttgaaaattcagcatttggttttttcttgtttccacaaacgtctatcatttatttattgtccgtttatgaaaaagtttacaaagggtcattttttcaggttgaagattcaaatttgaagtttctatattagtcaagcatgtctacaatagctcgagtgctgactattataatttatagtaattgtaggaccgatcattagtgttagtcctcgttgaaagttaggccaatctaaaccctttatcaaaaaagaaaaataagctttggccaatgttgactttatattcttttataagggtaaaaccgtaataataaatattgacttagagaatccaactacgtcttccccttaaaatccaaagtagtcaatgtctggttaatgaggatgggtcattccgtcgttcgagtagaaaattcagaagttatgggccatattaatgataagaaccactagtagtaaccaacaacaacaccagtcacacatttttctaaagaaacaaaaagaaaatg

SEQ ID NO: 3562 - DNA, 3000 bp, Unknown
  misc_feature (1)..( 3000): cDNA_ID_3071400_gDNA_ID_1620651_Annot_ID_163467 3000 nt of promoter + ATG
caaacgtgtttaatggacaaaaacatatgcatatattcatacatgcttacttacttgctctcctaaacccaaacaaaatctctatgatattcataatgaaactgaagaatctcttgccaatcttctgttttttccttgtaagcttctctatttcatctgcacaaaaatgcggaaaaactggtttatttaaacccaacgataagtatgatataaaccgtcacctcctcctttcttctctagcttctaatgtctcagctcgaggcggcttctacaatgcttcgattggacaaggacctgatcggttgtatgcttctgggacgtgtatccaaggttctgaaccagagctttgctcagcttgtatcgactctgcttttattagggtgataaagaaatgtcacaaccaaacagaagccctcgactggtcctcctttaacgaggagtatccttgtatgatacgttactccaaccgttctttttttggattacttgagatgacaccatttttcaagaattacaatgctacagatttccaagtcaacttgacagagttttatcaaaaatgggaggctttgatgcttggtgtgatagctgatgctatctcgtcgccaaacccaaaattctatggtgccggcactggaaaaattgggattcaaaccgtttacgctttcgtgctatgcagtaaggatatatctccatggaactgttccagatgtttaagagggaatgtggataactataagttgtcctgcagtgggaaacctcgtggccatagtttcagcccgagctgttatatgcgatgggatctctatcaattctatggatttattgagtatagggcttctcccacgcttcctcgtgaaaaaggtagaatctcagaactatctgacggtactagctttttagtctcatattttcccttaagcgcaataatcgtaggtgatttggccttgttcagatggcggaaagatttctacaagaaatatcctcggaatcactgttgctcttgccttttttatcacggtactgcttgttctagggtatgctctttctaggaggagaaaagcctaccaagagtttgcaactgaaagtgagtttttttttttgttttaacaattatgagttcagggcataaacgtttttaaatatgtcaattcagttgtctctttctctgttcttcaacgatggttatatttctcttgcagggaggtcaatgaccacttatggtactgcaccgccagatgatggtaagagactatacagctatttgcattaaaactgttaatgtccctttggatacgtttccaccataacactatgtatatatgctttctgctgcagatgatattacaacttcaggttcacttcaattcgattttaaagcaattgaagctgcaacaaataattttcagaagagtaacaagcttggtcatggtggatttggtgaagtttttaaggcaaaatgttcttaaactttctcaactactagtttgtgttataaacttagttgccaaaaaaaaagataagaaattctgatagtgagtgaagatcatatgaattgacagggaacttttccgaatggaacagaagttgctgtgaagaggctgtctaaaatttcaggtcaaggtgaagaagagtttaagaacgaggtgcttcttgtagcaaagctccaacatagaaatctcgttagacttctggggttctctgttgaaggagaagaaaagatacttgtctacgagtatatgccaaataaaagtcttgactattttctctttggtaagaaacatatgatatataggattagattctctgaaacatttgtttttgatctcttacccatagtctaatggctctatacgttggatgtgcagaccatagaaggaggggtcagctggattggagaacacgatacaacataatcaggggagtgactcgagggattttatatctccatcaagattcacggcttacaatcatacaccgtgacctcaaagcgggtaacattctcttagatgtcgatatgaacccgaaaatcgcggattttggtgtggctaggaattttagagtggaccaaactgaagctaccacaggaagagtagttggaacattgtaagtaattgttaacttcaattacactctgtctattcccttttctttccctaataaaacttaaagtgatatgtgctgtgttttgcagcggttacatgcctcccgaatatgtggcgaacgggcagttctcgatgaaatctgatgtttatagttttggagtattgattctggagattattgttggcaaaaagagtagtagcttccatgagattgatggttcagtaggaaacttggtcacatatgttagtcctacaaagccaatgcaatcttgaacttatttttgacctctttaaactttgatacaagaatgaacattggtttattgtgacttaacaggtttggaggctttggaacaacgaatcattcttggaacttgtagacccggccatgggggagagttatgataaagatgaagtcatcagatgcatccatataagcttattgtgcgttcaagaaaatcctgcagatcgtccaacaatgtccacagtgtttcagatgctcactaatacttttcttactctgcccgtgcctcaattacctggatttgttttcagggtcagatccgagccaaacccattagccgagagacttgagcctggtccgtctactaccatgtcgtttgcttgttccattgatgatgcatcgatcacgagtgttgatcttcgttgagattagaggttaatgataatatgcatagcttttcataagccaaaaatctaatggtcactttcattataaactcttcctgtcttgttttcccacttaaaaagacaaaagcagttgacttatagtagtagtcaatcctctgtttcacgtaacagagagaagaagaaaatattcataataattaggagattcatgatctgaaacaaaagctgaggaaatcgaacaatg

SEQ ID NO: 3563 - DNA, 3000 bp, Unknown
  misc_feature (1)..( 3000): cDNA_ID_3071404_gDNA_ID_1620651_Annot_ID_163466 3000 nt of promoter + ATG
tttacaggcttggaggttgtggagaaacgattcaccattagaactcgtggatccaaccatttcggagaattgtgaaaccgaagaagtgacaagatgcatccacattgcgttgctgtgtgttcaacacaatcccacagatcgccccagcttgtcgacaatcaacatgatgctcataaacaattcgtatgttttacctgatcctcaacaacctggattcttctttccaataataagcaaccaagaacgagatggcctcgactctatgaacaggtccaatccacaaactatcaatgatgtaaccattacagattttgaacctcgttgaagttgctattccagtgagacattgttccatttgaatgattatgtatctaagtatctttatcattcctacgttgtaatatcagctctctgttttatgggagtcttgacgtataatatccaaaccggtcttatatttgatatgaatgttacttaactcggtttattttctaaaaacgatattatgtaaaccggaaactgatactctgtttttgctcaacactcagatttaggaattagggattatcattttgcttatctttagaaactgatgtctcggtcagctttgatcactgaaatttggttttaatttgtgtgtagacaccattgtttgctgcgttgaaaactggtttcgtcgaattgtgaagcagcttatgagtcttcgtttttttttgtctttaattcttcgtattctcatctctgatagcgttgctctgatttttccaatcaatggttgaattttccactttgttaaagtttttgtatttgtgttgaattatctctgcgttgaaaattctacgacgtgttcttttaagtgccacatgattcaggaattgcacgagtcaaacgaatagaaacatttgactgagaaacatgcgaccaacggttcaatgaaaacttgcgatcgaaatttaatggacgtgaatatatgcatgtacaatgcaaacacaattgcttgctgtcctaaaccaaaacaatatatgatcttgaaaatatatttaaaatcttttgttttctccttgtaggctttcctgttgtgtttgtaccaagcgggaaaactggcgtttttacacccaatgataagtatgatacaaaccgtcgccttctcctctcttctctagcttctcatgttgtagctcgaggtgacttctacagtaattcacttggccaagtctatgatcgggtgtatgctttggggatgttcatctcagttgttgaaccaaaggtttgctcaaactgtatcgaccttgcttctaaagaggtgttagaggaatgtaccaaccagacagaaggcattgcctggcccgaaaatgggattctttgtatggtacgttactccaaccgttcgttttctggatcacttgagatggaaccaaagtatatatgcatgtacaatactggagatatcggatccgaaaactttgataacctgtgggacgacttgacaagtcgtatgatagctggagttatatgatcgttttgtgcgtgtttgtaacatatttatactatctataaaaaggttttcttaaaaatggggatggtttgatgatataaggttttgtccgaaccgcataacttccttttccggtaaaaggttggcaagccggatatcgagattggaagggacagtgctgagcatggacaggtaaggggggtgagttttgtgctttaacctcaatccgcttgtgcgaagtactcgtcacatgtacgattctagccgggctatttctagcacggttcatgatcgctacatacaaagcctttttattttattttaattatgtaatctcaagagccgtttatgtttctgtacaatattgtgtgatcactaccaaatgatctgagtgtatgccatggtgatgcttctataaaccctataatctcttcaatcttgtgtgactaggatatgcttggtagttctataaaatggtgtacaattcaatttttttttgggtttggtttgacatgggagtatgtgataggttcatcactctggtaacgtgctacacaagtaactgaatcttttttgcaaaaccaatgaaagaaggatatactacaaaaccggttaatttgcaaaaccaatgacacaatacatagccctctgcaacgatcatctgatcttctgcatctgcctttgcttcgtcaggtttggtgataggagacttagaagtttttgggttcaacggttaacacatatggttaggaatgatgatgaaattcaacgttttccactagcccaaaaccattgacttttgtcgcgggtccgtttcacgccgtatatgtcgaacatggagggttgaaggaccactgttatcagtttgacgaattcagtatttagatattttcagagaaactcgatttcttttttagtaagctataaaaaacgcgtaaacaaaagacaaagaattagcgattaaaaaaaaactagggataatcttttaaagaattaacgcttaattatatctaaatcattaactgaatagttcattattcacgtcttattagcgaatggagatagtgcgctaggttataataggagctaaggtaacttagagctcacgaaagagtaaggactcatcaggaactggtggctgactggtgctttttaaggggtttgttacgtggcaattgcgacgtcttttgaatgcgttttggttttaaaggtaagaaattggttaggaaaaagctacgtaatttggccgtggatgagtgttaaatgttaatggtacctcgaccccagcctcctgacctagtacatatctacattattatttgaaaggatttaaacataataatactgtatgaacagaaaaaaatgaaataagacttttgattttcatcttttgttttgtgacatttagaaagtttctgagaaacaacaattgctgtttaaattgctaaggaacgaacagatgtttaaacactaaaacaaagctataatctctaaggcaaaaaatg

SEQ ID NO: 3564 - DNA, 3000 bp, Unknown; identical to SEQ ID NO: 3551
  misc_feature (1)..( 3000): cDNA_ID_3071414_gDNA_ID_1620651_Annot_ID_163461 3000 nt of

SEQ ID NO: 3565 - DNA, 3000 bp, Unknown; identical to SEQ ID NO: 3550
  misc_feature (1)..( 3000): cDNA_ID_1822829_gDNA_ID_1620651_Annot_ID_163459 3000 nt of promoter + ATG

SEQ ID NO: 3566 - DNA, 3000 bp, Unknown; identical to SEQ ID NO: 3549
  misc_feature (1)..( 3000): cDNA_ID_1822833_gDNA_ID_1620651_Annot_ID_163458 3000 nt of promoter + ATG

SEQ ID NO: 3567 - DNA, 1057 bp, Unknown
  misc_feature (1)..( 1057): cDNA_ID_1821121_gDNA_ID_1620651_Annot_ID_47750 3000 nt of promoter + ATG
ttcatatttcaaaattgggaacaggatagtggcacgggaaattggtggtttgtatttaaagaggagattattggatactggccagcatcattgttcaagtcctggatggaatctaacagcgcaaattatgcatcttggggagggcaagtgtatagccctatcagagagaagagtccacctatgggaagtggtcattggcctagtgagggctttcataaagctgcttttattagtggcctcaaactcttcgatggtcacgggaaagtttataatccaggacgcgggacagtgaaggtacatgagagcagaccaatctgttacaaagccagatatgttcatgatgttgataaaccttggttaaaatctgtttactttggaggtcctggagggtgcatagggtaattgatctacgagataaagagtaacaatatcataagattttaattttacacaggctataggaaaaatcaacagatttgaaatatatctaagcattacttgcgctctaataaataataataaagtattagaaattcacaactttcagcacaaatttctatagtttattgagcatagattgatagctaactcaccttaaagtacattaaaaataaaaatctcattctcaactgcaaaaaaatgttacaaagtcacatatgttcatgatgataaggatccttggttaagagctatttactgtggaggtcctgcaggatgcatttggacataatatatgatatgcagagttacaagataaatcttatatatgtttgtatgaataataaagtttccatgaatcctcccaacttttttgcaataagtttgatgtttatgcctaattgtaaaaatgtcacaatctaatcatcaatttacaatcctttctaatacagacataatgataaccaaaaatgtgggttctactgttactgcatttgtctgaaacatttctaaagcctcttttaatcatgtcttaaatatatatacccctatccatagcatagcttgcccctactcataacctctaaactctttagacaactaaatatataatataatg

SEQ ID NO: 3568 - DNA, 3000 bp, Unknown; identical to SEQ ID NO: 3486
  misc_feature (1)..( 3000): cDNA_ID_1820873_gDNA_ID_1620652_Annot_ID_47751 3000 nt of promoter + ATG

SEQ ID NO: 3569 - DNA, 3000 bp, Unknown
  misc_feature (1)..( 3000): cDNA_ID_1821247_gDNA_ID_1620652_Annot_ID_47753 3000 nt of promoter + ATG
ttcattctgcatcaatcatatattaattgacacatccattcatcatccaaaaatatttatatgtatttcttttgagaaatttccaatgccttaccaagtcttgccaatagtgatatatccctgtaatgttccgtttcctccactctttcaggtcaaacatattcatcccaaatgcccacccacaagcaccagcgtcaaaattctctgaaatctttggatttgagaagttgaggtacttgtcaaatctgtggaagctctccttgcacgtctccaccgcaccattcacttttccttgcatgtctatttcccatagtggtgccaggtccttctgcaccacaatgtcatcgtctagaaacagaatcttctccagcttcggataaacctcaggaaggtagaatctgagatgattcagcatcgatagatactttgggttgcggtactttagattatctgcgccagctgagattgatgaaggatgatttgctttgaaatagtattctttcagccttgcagattcaagctgccgtagaacagagcagtaagaggagttcagccacttgaaatcatttatgttttcaacttgaatcgtcgcatcagcaggagcattgatgcgaaaccacatcttcattgcaccaaaattcagtttgtcagttactatatggaacacatgcctctgcggttcctttgcattcaagacagtggagttcaccaccactgatgtagccagaacgttatccgaaaagatcgcatagtgatagagcgaaggatcttcaagcttcttttgactgacatcctctttcactgcatcctcttcattgaaacctagaataaaatagtctgccgctagctgcagactcaggcaatgcaatggcttgggaaatgttttggcagctagctgaattaagaaggttccctttttcttcagtccatctactttgcgttcagtggactgaaggatggcccggaacttttttgcaagttcatggcagtcatataactcgtcttttgcaagagagagtgcatggcccatggcttttgcttgatcaagagcgctagcaaagaaaatgggatggaaaaagtttcaacaaagattgttgtcccacaaagattgctgacaagaggaatgtaaaaaagtaccttgaaggaaggtcagcatcagaggttgctttacctataacacgtttattttctccacactgctgcatcaagaaaacgtacagattggttacattttttgatttggcaatatttgcatatgcttttgccattatgatctggtctctcataagcttcaagatagcatcagcatttgggctctcatagtctctcctccatatactgtatttccctatgactgagttttcaaagctcattgacttctgaatggctgcttcttgcatctgctcatcagtttccttttcttgtcggatcagctctaaagttcgttgacctctcctttcctgacgtaaaatctgaaagggtctacagttgttacaatctcagtcatatagtgttaaggcatccagagattagaaaagaaggctatttgacagatcacctgccgcttcagttttgctgggcttgcaaaatccacgtttggaaactgattttcgctttcatcagtctgattagttgtagaatggcttgcattatcttccattccagtatcattttgaaatgaatcccgtggtataactagctaattccatacaaaaaaatgtcagcaactagagaacaaagaatatgagcaagcttaaggataaattcaagaaacacaaggttagaacaaatgaagttcatgagaggtattttttgctcggtgagaagagtggtaagtaatcacttcacacactttaagttttctactatagaactccatatgcccataggatatacagttctattcttaaactgatgatcaaatctcattaaaactaaaaaccagaacatgaaatgtttggtacctgcgaaccttttgttttgcggctaacttgataggcaggattctccaaaacccaagaaggtgaaagatcccccattttcaccctaccaaggcgtatattgccgtaatggtcactgtatgtcgcaactatgttcacatcctgagataacagctttattagaagtaggaagcatacaaattgtattcactactcagagaaagaggactgcagccttactttcagatctggatcgtagtgcactgcagcagctgaggaagcatacacctcctaaaggcaaaagtggataacaaaaacttaatcacagcaaagtctgatatttgaaccaaataagttatctggagaacaagaggagaatgggacctgtagattattatcttgcagcggacgataagctttaagttctctgtggctgcataaggaaacatcatggcaaaaagaagaaaagagtataaaaataaaatagaaacagtgtagccaaaagacaagcttcaaggagatgtatcattacggtgcttgtgactctaaaatggctccaccgacatgaacagcatgtagcactactacctgcaaatcgtcgacatgtcaaaaaattaaggcacaatttgatcagatgatccattttaagagagtagtgcgaattccaggacgagctaagtaaatatagataatcatatcgaacggagagagaacaatcaagctaggtaccagcgataaaaaggcggcgcatgtagagaacgtcgtcatctggatctgactgatattaccacatcgccggcgagctttctttaaagcaaatcaatcaatcgagaggtttgttaaaacctgcacgtgctgccgtttcgtggtaagaaaaactacacgcagtttctttaagtagaagacggagaaaaaaaaaaaaaaaagagacgacgactttgattagagcagagagatggttggttcgttggttcgtcggaggagaagagaatgtgcatagcagtatttctgtggcaatcgcatccgctgtacccttttcttctatttctcaacagagatg

SEQ ID NO: 3570 - DNA, 3000 bp, Unknown
  misc_feature (1)..( 3000): cDNA_ID_1821243_gDNA_ID_1620652_Annot_ID_47754 3000 nt of promoter + ATG
gaggactcgcctcttctcggcaagggacctcccctctccagccagtttaagaccttcgccaacgtcttcatcgctgtcgtcggcgctggtgttcttggtcttccttacgccttcaagcgaaccggatggctcatgggtgtcctcctcctcgtctccgtctctgttttgacccatcactgtatgatgcttcttgtctatacccgccgcaagctcgactctttcaatgctggcatctccaagatcggctcttttggtgaccttggattcgccgtctgcggctccttggggaggatcgtcgttgacttatttatcattctgtctcaagctggtttttgtgtcggatatcttatcttcatcggcactactttagctaatctatccgatcctgaatcgcccaccagtctgaggcatcagtttacaaggctgggttctgaattcctgggcgtgtcttctaagagtctctacatatggggatgctttccctttcagctcggtttgaattcgatcaagacgctcactcacttggctcctctcagcatcttcgccgatattgttgatcttggcgctatggctgtggtcattgttgaggattccatgattatactcaagcaaaggcctgacgtggttgcctttggtggtatgtccctcttcttgtatggtatgggcgtcgctgtctattccttcgaaggcgttggaatggtcttgcctcttgaatcggagatgaaggacaaggacaagtttggcaaagtcttggctctcggcatgggattcatctctctcatatacatcgcatttggtatcttaggttacttggcttttggtgaggacaccatggacattatcactgctaacttgggggcaggacttgtcagcactgttgtccagcttggactgtgcatcaacctcttcttcaccttccccttgatgatgaatccagtgtttgagatagtggagaggcgtttctcacgcgggatgtactctgcgtggctcagatgggtactcgtcttagcagtgactctggtggctctttttgtgccaaactttgcagattttttgtcattggttggcagcagcacttgctgtgtgttaggctttgtgttacctgcattgtttcatttattggtgttcaaggaagagatggggtggctgcaatggagttcagacacagcgattgtggtactaggtgtggttcttgctgtgtcgggaacttggagttccctgagtgagatcttctctgtcaaagtgtgagcgtccgtgaagtcagagattggagaggtttttctctccttgtgtgcaattatgtatatggaattggttgtggttttaagagtaactgtgattgtatttgtattttgatggtttggaataaaagagatcagctctgtcttctgttttgtgtttacatgtacaacatatgtgagagttttgatttctcaatgttacaagcaagggaagctcgcgaaataagcctggctagctaatcaaatgctttggttttgtattattacaaactgttgagtgtgttccttccatgaatcgccttcttcaagatgcctctcgtagaagcaaatctcaccatcaccaccaccatctccatgggacttgacgatgatcgcagagatgcttctggtcccataacgcccctgtatctccatgagtgagactgaatatttatggaaagtgttaaacaaacaatcaatgtactctaaaaaaggaaggttacagttggtctctgcatgtcgacgaagatggagctgagatggtattccgtctctggtgtgaaaacgtgaggtagctcggtttcttcgtccttgacagtattggtcatcacctcctccaccatggtcttcaccgggaattcaccgctcccgttctcagccagaagctgttggaaaccctccctcagcctcagacactgcagagacaaaaacacgcaattgggggagtctgcaaaaggtaaataaagggagaaatggcccacatttacttaccttgggccaaggggagtcgaggttggcgttggaaaggacatggatcccgggagagacttgcgtcacgagcttgtcaccgtggggtggtcggttggtaatgtaaatcatggatttggacaagacatgagcgacaaccaggttaaagccattgtagagtgaaatttcgtcttggatctcctcggcaaactcggccggactcttttcgctctgttctcaccaaaacgttaaaagtactctcagtctctaacatgagagacaatctaaagcatattaggtggtggtgtagacctgcaagtaacgaagaggcagatctccacgggatttagcagcagggaaggaggaggcttccttgaaattggtgaggaaagccagacggccatgcctcgtgcagcccagccacgtcccgccgccaacaaggtctcttcctcccaccgtctctccgtcttcccaccaacgcagcgcctctgtcgcccttgacaatttacacaaaagattagtacaatctcatcaaaggaaacgattacagaggggattgaatcacctgttgtgatcttcatctctgttgagaaatagaagaaaagggtacagcggatgcgattgccacagaaatactgctatgcacattctcttctcctccgacgaaccaacgaaccaaccatctctctgctctaatcaaagtcgtcgtctcttttttttttttttttctccgtcttctacttaaagaaactgcgtgtagtttttcttaccacgaaacggcagcacgtgcaggttttaacaaacctctcgattgattgatttgctttaaagaaagctcgccggcgatgtggtaatatcagtcagatccagatgacgacgttctctacatgcgccgcctttttatcgctggtacctagcttgattgttctctctccgttcgatatgattatctatatttacttagctcgtcctggaattcgcactactctcttaaaatggatcatctgatcaaattgtgccttaattttttgac

SEQ ID NO: 3571 - DNA, 3000 bp, Unknown; identical to SEQ ID NO: 3485
  misc_feature (1)..( 3000): cDNA_ID_1821240_gDNA_ID_1620652_Annot_ID_47755 3000 nt of promoter + ATG

SEQ ID NO: 3572 - DNA, 3000 bp, Unknown
  misc_feature (1)..( 3000): cDNA_ID_1821237_gDNA_ID_1620652_Annot_ID_47756 3000 nt of promoter + ATG
taatggcaaaagcatatgcaaatattgccaaatcaaaaaatgtaaccaatctgtacgttttcttgatgcagcagtgtggagaaaataaacgtgttataggtaaagcaacctctgatgctgaccttccttcaaggtacttttttacattcctcttgtcagcaatctttgtgggacaacaatctttgttgaaactttttccatcccattttctttgctagcgctcttgatcaagcaaaagccatgggccatgcactctctcttgcaaaagacgagttatatgactgccatgaacttgcaaaaaagttccgggccatccttcagtccactgaacgcaaagtagatggactgaagaaaaagggaaccttcttaattcagctagctgccaaaacatttcccaagccattgcattgcctgagtctgcagctagcggcagactattttattctaggtttcaatgaagaggatgcagtgaaagaggatgtcagtcaaaagaagcttgaagatccttcgctctatcactatgcgatcttttcggataacgttctggctacatcagtggtggtgaactccactgtcttgaatgcaaaggaaccgcagaggcatgtgttccatatagtaactgacaaactgaattttggtgcaatgaagatgtggtttcgcatcaatgctcctgctgatgcgacgattcaagttgaaaacataaatgatttcaagtggctgaactcctcttactgctctgttctacggcagcttgaatctgcaaggctgaaagaatactatttcaaagcaaatcatccttcatcaatctcagctggcgcagataatctaaagtaccgcaacccaaagtatctatcgatgctgaatcatctcagattctaccttcctgaggtttatccgaagctggagaagattctgtttctagacgatgacattgtggtgcagaaggacctggcaccactatgggaaatagacatgcaaggaaaagtgaatggtgcggtggagacgtgcaaggagagcttccacagatttgacaagtacctcaacttctcaaatccaaagatttcagagaattttgacgctggtgcttgtgggtgggcatttgggatgaatatgtttgacctgaaagagtggaggaaacggaacattacagggatatatcactattggcaagacttggtaaggcattggaaatttctcaaaagaaatacatataaatatttttggatgatgaatggatgtgtcaattaatatatgattgatgcagaatgaagacagaacactgtggaagctgggatcgttgccaccggggctgataacattttacaacctgacgtatgcaatggataggagctggcacgtactagggctgggatatgacccagcgctaaaccaaacagcaatagagaatgcagcggtagtgcattacaatgggaactacaagccatggctgggtttagcattcgccaagtacaaaccgtactggtccaagtacgttgagtacgacaacccttatctccgacggtgcgacatcaatgaatgaatgaagagatggtggaggtagtatacatgatgaagcactcaaaggaaactaaataagtaaaaattgttttcagtttaccataatactaggaatcagcagacaatcacacatgacgattaattaaatagaatctcttgtttttctcaaactcagaaaaactcaccaaaggaaactgaacaatcttttcactcggagtgttgttcttcacttgtttttttggtatcaacgtgactgaaaagcatatgggccttagaatgcgatgctttgtctatatacagtgtgtacagtgagtaaaactgccccgtgaatgcacataatgggccttacactggcccatcattgctttactctcctctctagctagcgacgagatgagtaaaacgccatctctcggagcggaacggctctgctctgctcttatcctctgtctgatccgtctccatcaccatctccgttctacaggtaaattgttttgcttcgcgctcctccgattgattattcactgatcagattctaataattataatcctgagtcctcgtttggttgatgttgaagcaccgcagatcctctttgaacttgttatttgtaagcttcttcttagtttctccttaatcgcagtgaaatggagattccggaggggacatcaaaagattcagaaaaggccaacgaacaagattcagtgtcatcaattggggcaaagaaacctccactggaatctccagccactactaatgctgcaagcggtcgacttgtttatgtccggagaagagtggaggttgacacatccaaagcagctgctagcactactaatccgaacccgcctcctactaaggcaccacttcaaataccttcatcacccgcacaggaaccaacccctaccagccataagttagactgggaagagcgttaccttcatcttcaaatgcttcttaacaagcttaatcaatctgatcggaccgatcatgttcagagtaagctcctcccagtatcactctaattcctaaccttgatgcttctgtttttttatatatatatatgtttccactgttattagtgctttggtcactttcctccgccgagcttagcaagcatgctgttgacttggaaaagaggtctattcagttctctctcgaggaaggtactctactcctttacttacactctctcacttcctaccattgctgaatcatatctgtttggcacagttctagttgaccatccataagtggattattcatgctgctgcttaagccattttttccatatctgctgacaactatagaggttttagtcacatgcttttaggtttgtagctaggaaccatctggaatcaagttcatgctagaaataatgttgttgatcctctgttgcagcgagagagatgcagcgcgtagcagctttaaacatgttaggaaggtctgtgaatagtctaaaatctacatcaaatgagtgaagggaa

SEQ ID NO: 3573 - DNA, 3000 bp, Unknown
  misc_feature (1)..( 3000): cDNA_ID_1821233_gDNA_ID_1620652_Annot_ID_47757 3000 nt of promoter + ATG
attgcatgtttaaaccggaacattgaaccgattcgcagccgtgacgtaaaccggtgaaggtgaaagtgaaagaaggtgaaaagatagagaagtaagaccagacgagggtaagagacatgaaagctccggcgagaaagataacaccatctgataaacaaacggtggttctagtctttgacccgccgtgttttcccatcggagatgatgtcatgtgactgagaatctacaatgcagtgattagagatgatgagaaatttcagtaaaactctgagaacagttgggtgatgaagtaaaaatgtgagtcaactaaatgtatggtaagataaagggattattataattctgacacagatttaacatagtttttagtttttctcctaatataaaattgatattactatcgaaacatttatggcaagtgttaagactttgaactttgaagtcaggttattaatgcacacgatttatgtatagaatataatcgtttgagaatttccactaattaaagttctctctaactaattatttccatataaatctgagccataatgctcaaaaatattaaaaggataaatatcatttacatatattttttttacaatttatttgaattttttttccttctaaaagctttataagtatccagaaaccagaatcacaatcgttgtttacagcaaatatatatattttacagaaacaaatgaatttctaaattaattacttgaatgctaaatatacttttaatataatttgagttccgtcaaagcccatttatggcccacgtataaacgtcgccgtttcactccgactcttcacctccgaccaggaagtaatcccggaatttgtcactccggtgaaaatggaggcctctggcctctgctgtttatgcattctggcaatttttttttcttctcttttcgcctagaatctcgtgtttttgggatttagctaagattttaagctatactgtaagatttggctctcttattaatcgcattggtttagattatgatctctgtgtggaatcgaatcaaaattatcaatctggttcgttggaattggatagtgaaagtgaaacagcgatgggttttatgggtttacattggttttgaaattcaaattgatcttggttcggtttactttggtttagagaagaaaacaaaaaaaaataagacacgcgacgggtttttgagaatgaggtgcgtggatcgaaaaatgaatgatttttgtggattaaccccctttagaaatcgtagacacgcgctcaacgcgacatgggtgagagtgactgtgaaatggcacgatcggtaaaagtggggtatgaagtggagctctctcattggctaaaaaactaaaaatagtagacatatagctcctatcctcctcctctccttttgtcatttttatattagcccctgctgagaatgaaattcagattttattcaatctgaaagttgtgtgtgttttagatacaattgaaaaaaaacttgaatctggactttgtgatactaaaaaatttcctcatcattttgttctgcagccatttttacaggttgaagcttataactgaaaacttgattcaaagaatcgcagctgaagaaatcaaactaagtgagttgaatattttctaaacatgttaaatatattggtacaagtttgtccaatcattttgctgaaattggtacaagcttgtgaaattgtagactctctcttttgtagcaatttaaaaatctcatctcttcaaatctatatataaaacaggtggataacagaaaaattggtactagagcctttgtcttctttatgattctctgatactttgaaaaaccgttcacttgactaacctgcgagtgaatttcccttgagtagttacttatgtaatcttctcatgatgcagacagctaactcaaactccttagttactgtcttctaaatgcagtttaaatttcttgcatttgcttccttctagagcttcttttcagccactgccaccagcattgagatgtgtcgtttatcaaactagatacatgacactttcacattattgaagtgagtagccttgagacagttcatgcagcacttgcacttgtctcttccattttcttcttctaagaatcccactgaatcactccaataacctcttcttagcttactcagccctaaaaaacataataattcagaatcctgcaacttattctaggatctgcaacttagtttcgaaaacctgcaattctctagagatctgcaattcgtttctgaatatcttaaccaatcaacgaccttcaaacaaatccgtaagagtccttttacccacagatttataacctttgaacttgttcataaccagttattcttggctttcctttcttttggtaaactgaacttccatgaatctttatcaaacattttctgcagccttttgactcatccattgagctacatacctaagacaacctccatgaacatagcttcaccagaaactaaaaaaaaggatgtcactttgtctttgtaagctcagcttctcttctatgagttatgctgcatgctcttcactgtttctttgattcactcacacgttctaatgtatccgaatgagtttctgtgacataactcttaagaaagtgtgccaaaacgtgtgacacatctcctttcttcatgtagccactcaatctaattcttttattcccaaaagaaccaccaagaacttttctttaataactgcaaccttgtcctctctttacatggagcattcttcatgttttgatgatgatatagcttaagctgatgtatcacaaaacaatgccttaatctcagacaatctcttgtactctcttgtagctgaaatgcaactcatacttgtcttgtaccgctgttaagataaacaggacacgctgcctaactcttctagctaggaagactatcgacacaataatagtttaccatgttgcataatacacacactcatttctaacatcaaaatcgcaaactgtattctttatg

SEQ ID NO: 3574 - DNA, 3000 bp, Unknown
  misc_feature (1)..( 3000): cDNA_ID_1821205_gDNA_ID_1620652_Annot_ID_163497 3000 nt of promoter + ATG
ggtcacgagcacagaaagagtccttcccagaacaaatccccctataattcaagtcaagtttaaaacctagaaatatcaatacagtgcttacatccataagtcccataagggagaaaccagtgtctacatacctgattttaggtaatcgccgaactttagtgacccaatctttggaggaagcagtataactcttttgttcaagagtataagcatcaaaatggcaacagtgtacctatgaatcagaggaaaggggtttagcaccatcctacaaggttgaccaaaggaggaaaacaggaaaagaaaaaagatctatggatacatactgggagatgacactagagattgctgccccggctacacccatcctgaatttgtatataaacagagggaatagaaatacagccagaaaattaccaatacctgaattatggaaattagggaacgaaagaactgatgtaaaccgagaacaataaagataatctaatgttcttggatatgtaacaagatctcaaagaatgctaacctaaacagtagactggagtttttgtatccttgaatccacgaaaaatgccttgaagtgctaaggaaaccacataagcaggagcaccaagcgccctaaggacaagaaactgccgcgcagggatgaacatttctgacatctgggtttcaggtaaaaaaaaagacagaaaacatgcattcctcagcatagatttctcacgaaatttcgtaagacatagaagacaataagcactctctggaccgaacttacagattgtatacccattaaccttagaaagggtccagatgccaaagacaatgccagtgcctcgaagatgccaattccaatggctaacactagcgctgttgacactgaagataactgtttcctttctggtaaaccttgagaaggtatgtcactctgactatcttctgtaaatccattcaaagagatataaggctgggaaaaattgggaagagaaaaaagctattatcaacgtatacctgaggctaaatcttgagcggcaatctttgcaatatcttcagcgacgaaagaagtggcaacgctgaggagcggaatgttgaagagctttgatatggtattgaaaatggccatggaaacgccagctgaacccaactctacagatcctgcatattggaaagaaggggagtccttagaactctcaaaacaacatcttccatggtgaaataactctagagaagcaaaggaaaaataccgagccttccgatgtatgcagtctccattagcagcgtcaaaggatcaatagcttggccagcaatggctggaagagagagcatcacgagttctcgtttgatatcgacaggacgtgctacaccagtgtgaaccccattaacctccctagcaagaacggagaccaaagcattacataggcaagaaacgcaaagcaacatggccaaagagtaacaaagggataacgcaacacctcaatagccttacgggagtttgtccagtgaagagcaagagtcatcttcttcccccaacttgacgacaccgcaatcagggttagtctggctcttgcggcgagtaacaaaagggaacatggggtttggattggtgtgaagggagcatttttggggggcagagacattattgatccgagatagaggtagaaaagtcccttgttggattttgggtttggcaaagctagagttcctcctattcgccaagggcagcccaccacccactactactctactggactccatcacacacagacactgcaaaaacgaaactttactagttcgtctatatataattagaaccaaaagaaagaaagaaagcttcgaggatgataactgacctaaattccggttctttaggggaagaaaattggatgagcgtgggagagaaaagaaacgacggtgaaagaaactaaaacgatatagaaaaccgagaagaagacgatagtggcagaggagaagaaacgattcaaaaccgaaacttacggaatcgggaggatgattgagcggtgcgaaagagatcgtcgaagaaacagacagagagagagagggttcaatcaggggttaaccgttgcagggaggcggtttttgtttggggaagacgatggtaaatgggccttttgcttctctttagttaagcccattaaagcccactgacatcggcaccttattagaaacaagaaaaatatcttcttttctttttgtttctgcgtcccgttcggtcgtgtccaaaccgctctaagcatatctttttatttttgctgcgaaagtgcgagtgagtccctctcatgattataacaaacgatttttaataataaaagatttaatattgtaatgcatcatttttattcaaaaccaaattaaaaaaaaaaaaaaatgacttgttcttctctacgcttttatccttcttacatgtcatcacgtatgagatatgttctgctattgactcgaaacacatctttctaatattagctttttttgtttgacttcatttttttcaaaaagaaaaacctttttaaaactcattcaatgcttgacgttttaaatcccaatctttaataggataagtttgttttcagaattcaaaaaaacaaaattaagtcgatttcaattcatgataataatctaaacagctaattaacatttggcaaagtaacaataatataactacatttgaaagagagagcaagagattcgctgtggtttgcttatgcataagaataaagggaattaaaaaaaaccaaactcagtttttttcttcttttttaaaaaatttgtgtgtgtgtttgtttgtttgagattagtttggactttggagttttgttcatagtttctcggcaaccaacttctcctctgccttaacgtcatcgagaaatggcgtcttcttcctcttcctcctcctccttttgcactctctccttcccatttctcttgttttcttcctattctttgtagcctatcctccttgctttttttgtgtctgcgttatacaactcatta

SEQ ID NO: 3575 - DNA, 3000 bp, Unknown
  misc_feature (1)..( 3000): cDNA_ID_1821217_gDNA_ID_1620652_Annot_ID_163494 3000 nt of promoter + ATG
acgaagcaaaacatagaaactacctgctcgattctgtagaatggcgaaaggtgggtatcaaagaactttttctcttctgctgctttgctttcaggaccaacccacaactacaacatgtagaaattcacatgaacaatcataccagtatttgcagttgcttttctgctgaatgatttgtacaattatggtcctggcaaagttaatacataccttttctggtcgtgtttccaccttgaaattatagagacctgaacagagtgcaagaacaatagctactgacatgaagagaacaagagatggatttctagcaatccatgacccatatgatctgaggcaaacaattggaaacaattacgaatttcatctcatctaattgtagagataacttgcgagtaagatacagacaacgaaacaaaatcctggagattcacctgtaaaattttgccatatatctctgaacaggagagagttgagcatgtctttgcacctaagaattagaagtcaattgatcaattagttctttcctccaaacagattaaatcttcaaggatagtccagcatttatgtgggtatataaatgtattttatgttatatatacatacacataagaactacaatttctagccaatacattgatataccttgacaccaagtatgttttccttcatttcactattaattccatcttcttccacaggatgcaatagtggctttgagctatcaagaggctgtgtcgtatttcttcttcgatttaaaccagcccatccgaagaagcaagacaccagcaagacgtatacaagtgccattgataactcaatgcatctaacctgaaaatacaaatcaatataatcaaatccaagatcataccaactcaataatgttttcaagcaacaatgggataattcataactcacaccttaagaggaccgattctaattgagcaagaatcttcatcatggggcggcaggggttcgggacttgagcaagctggtgaggaagggcaatcaccacaagagcatccaagggatgtgtcaccacatgaataaacagatacattcattggtaccatcgcagatgactcagggatgcttgatttgaagttgatcgcatatggtgaaccaggaaagccagatggtgctttctgaccaataaacgtaaaccattctggaaaagcagaagtaaagatgaaacatggaacttttgaaacaagataaagcgtgtatggaacgccttagaacaaaactgcagagcacctctgaagtttttagcaccaccgccaacaaagttaattgcacgtgtgttcattgttccaaatttcacctctttacaggactcgtaaaggccttctccaaacgtatcagttatgtgatagtctataccatccactgtcaaatttccactcacctagaataaatcccaactagctagtgttgttaaccatataaatgggtgtcaagtaaccaacaaaagctgaaaaaaatggaagctaacctcagcaacagaagtgacgttgatgaaaagagactgatttggagaacaggagagctcgcagaacaaatttaagaagttccgtaagcatgcaggacaacccacaagaaaagggacagcctaaaagagattgcattgacaacgaattagtaaaaatggcctgctctgataatagcaaaaacaagagaataagaaaaaggtcatacctgttgaacttgagacctcaaagtgtcaaactgagtctctgtacaacagacattgccacttatggttgggcaaaggctttggattttggcagaaaacagttcatcaggctgcagaaaggaatgtcagattgactcagacatgcagaagtaattggaaaagtaatggtcttactccatgatctgaaaagttgtctacctgaatggaaggggaggcataaggacagttaaggacttttccatcgctgcggtgtccgcaaatgtcatacatagcgcaatactcttttgaatgtctattattactgagcagcagtacagattaccgaaagagagatgaataagagattgagaaaaaaggaaggccatatgtctcggtcactaaaatgcaaattaccttggttctgagtgggtcaggtttgcggtgagtaaaagtgagaaagtaaagagctgcaacatgacaatcattcccaattatacgataatagcatcgatagaagtcagaggcggaaatcgttcaataaaagcaaaggcctaataagaagaagcacacaaagtatatgcaatttgcataacgaaaaaacccagaaagaaaacataacaagtttttttttaaaaaggaaaatttggcaagaaacgctaggacaagacagaaaatgaagaggattgcctgtaagaggagaagcttggtaggaatcgccatgttttgtctgaagagcaattaagcaagcagttggggtttatttaatcttggcgtagtagttagttgcagagagattggattgttgactaaaattgaattggagagtaaagtaaggagagtcgggagacacgaggcaagaggaggacggtgatgatgagtcagtaccagtaacatctgcttgccgttttaaatgctaacaattgcaatgcatgccgtttttacgttttcttttaccatcaaagttagatgaaaaaaaaggcatctcttttgtcttgtttgttttttctcatcatcctctcatgggtcgtccattgcagacgtgagctcgtctgatcaaatcctccttggcttctcttcgttttctccaatccatttctttgtttataccaaacttcatgtcattaggtcctccgatcattcttcgaatcggtttttgtgtggcggatccagtttaatcatcatcaattcatcatcatcatcatcactggtcgcagctgaattcgattctttgattgggcttgtgggatgggaacttgttcctgatggatatattaaagtcttaccatctcctagctgctgcttactcggctcctgcgtgggcaagcttt

SEQ ID NO: 3576 - DNA, 3000 bp, Unknown
  misc_feature (1)..( 3000): cDNA_ID_3071442_gDNA_ID_1620652_Annot_ID_163493 3000 nt of promoter + ATG
ctttgaggagaaaaatgtggaacaaacttgtagatcaatattttgttaatctttggtgatccatctgcggcccctgacttcaaatccaccataagcttgatcactactgctctctcccccgctctctgcgctagtgtatcccgatttacgcctgtgctttttggttcttgtaactccactatcgctaaaactcccatttagaagcggatcatcaatccctcgaatcactctccgactgggtgatgatgacatgcaactatcgtccttcactcttctcttttccttgtcgtgtttcttaatgttctgggagatcttgtgcagtttctcattgaactttgtgatgctcttctccataggctccaccgcttgagtcactgtgaatctcacgtctttaacaatctacaacatttagcctctttgtgatcagaagctcttaatccaatgatcatttatttgtatgaaagaattagaagactcacgtattcaccaccaccaacgaaaacatctcgcatactttctttgatggtcataccacttctgatatcaacgtcaggatgtggtagacggacttttgttggtctctcactgtccctaatctcatctggatcaataggacagtcaacagatgcatagtcaccaagaactgaaacggatccagtaaagcggtctcccattagaccataaggctttgctgggaatacatacaggtgaacaacggaagcaatacccatctgcactggaccagcacaagtgttaagagctttaatttatttaaagaaaggaaaacagacgactccatagactgcttgttaataggaagcaatgaagaaaaagttttgcactcgtaaacaaagatcacacataatgtttaaccttttgcaggaattggtaacaacagaagacatttacctctatgcaaatgatgaaatcttgcacgctagtcttcaactgcaagctttgtgcaattgaacttttgaacaagccgagggaagagaggagagcaatggcaacaccttgccaccaagtgagaaacacaatcgacttaaatgttagaaatttagccagtggttggatgtgtgcaagctcatctttcgttgcaccatagaactgaaccagacagtataatgcccatgactgactaaaatttagaacaactgccaaataagggtacctacaaaaaagaaaacaatggtaagatgctgctatcttgatcacagtccatcatagatgaaactgattttcgtttcttaaggtcaatctgtatgttagcactgttcttgtcaaaattgtctcaacgtacccacatccccatttaaactctccttcacagtacacaccgaaggcttcaagaatcagagctgtgagggcagttaaagactttattatcatctgcaaaaggagagaaatagttaacttccacttcaaagaaaagagttttggagcaagagaaacaggaggcatttgtgagaaacatacatattgaacaataccaaacttaacaacttgataaaaccagggactgagcctccacggttttaagaataaattcataggaaaaggatgtttgatgattcccttttcatccttgtgatctaagagtggcgtcttaaagctcttacgcccttgtctttccataaactcgatagtcctttcttccccacctggtaaacaagtcaatttagaacaaagagcaagggaaagagaaagtaagtttgtgcgattatccttgtttcacaggtagaactacaagatgcggaacctaatcaatattagacataaaaaagagtgaaaatggtcataccaatgcaggcaacaaggtatctaccaaaacagtacatggcaaaggattcatagcagtctcgaagaatcccacagtcaacactgatggatggtttaacaagtgatgcaaactgttacaaacaaacacaattaggaacagatatcttagggaaacacattcagttgacgatccgttgacgagcacaatacaagtaaatattcgatgagattatcaacgctgaacatgactgtattattatgagtatgatacaggcttcttctacactttggcgataaaaaagtcaatttttttaggttcctaaaatcttcaacccaaaatacgtatcatcaaaacctcctgatttgcttaagaaaaaagtaactgaccgattcaatagaatagcaagggaccatgaggatgactccaatcaaaaacttttgctcctgagagagaagatagtagttaaggtaagcaaggatataaaagccaaagtagagggaatagaaagagagagagagagaaaacctcagggttcttgtaagtagaaaggtgatcgaagacaagaaacaaggaaagggagagggtgagaaccaaaaaagcaccggccataaagcttgcccacgcaggagccgagtaagcagcagctaggagatggtaagactttaatatatccatcaggaacaagttcccatcccacaagcccaatcaaagaatcgaattcagctgcgaccagtgatgatgatgatgatgaattgatgatgattaaactggatccgccacacaaaaaccgattcgaagaatgatcggaggacctaatgacatgaagtttggtataaacaaagaaatggattggagaaaacgaagagaagccaaggaggatttgatcagacgagctcacgtctgcaatggacgacccatgagaggatgatgagaaaaaacaaacaagacaaaagagatgccttttttttcatctaactttgatggtaaaagaaaacgtaaaaacggcatgcattgcaattgttagcatttaaaacggcaagcagatgttactggtactgactcatcatcaccgtcctcctcttgcctcgtgtctcccgactctccttactttactctccaattcaattttagtcaacaatccaatctctctgcaactaactactacgccaagattaaataaaccccaactgcttgcttaattgctcttcagacaaaacatg

SEQ ID NO: 3577 - DNA, 3000 bp, Unknown
  misc_feature (1)..( 3000): cDNA_ID_3071446_gDNA_ID_1620652_Annot_ID_163490 3000 nt of promoter + ATG
tttaccattcataatgagactttgaatgtttggacgtaagtgttgaatcatgtttcttgatgtatccttgtttaaagttcaagaaaccttgagtgtgtttgtgtgtgtgtgttctttgggatttgcaggcatttgattgggtttttcctgtttttggcactcactatatacactgcaacgaaagtaccgagtgtcgtggatcttcattcgcttcaacaccgtttacccgatttgttgaggaaaacagatctccacaaacttcattctgagctcatgtctcgccttccttctagtccatctagttggcatgtgatggaccttctttataactgtttgcctgaaagattttctcatggcaactacactgacatgtgtgttctggtaagaaaagactcaatctttctctctattcctgcagattactgtttcaaaatgtggccaagttcatgtctttgtaattgcattgcagcattctgtgagggaagatcttgcaaacttgatagctcctttgatcttcaggccaattactcgatggccgttttatgcatttctaggtggtgctatattctgtctattagcaagcagcacgtgccacctcctctcatgtcactccgagcgagtctcctacataatgcttaggcttgattacgccggcatcgcagctctaatagcgacttccttctaccctccggtttattactccttcatgtgtgatcctttcttctgcaacctctacttaggattcataaccatcttaggaatcgccactgtgcttgtttctctcctcccggttttccaaagcctggagtttcgggtggtgagggcgtctctgttctttggaatgggattctctggcttagctccgattcttcacaagctgatcatcttttgggaccaacctgaagcccttcacatgacaggttatgagattttgatgggtttgctttatgggttaggagctgtggtttatgcaactaggatcccagagagatggatgccgggtaaattcgatatagcaggacatagccatcagttgtttcatgttctggttgttgctggtgcgttaacgcactatagagctgggctatgagagatattgaaggatgttgaagatgaagattgaagattagatggaatctttgatgttttaaatcttgtttgtagtagcttcatataaaagttggattatgtaaagtcttatctgtaatcaaacgtttaattgtttcttttattcaacaaaggattcatattgttaatctgcatattactggttaaagaagctgaaggattcatatttttagatgattccagtcttgattgcagcattcaaagtatcataatctagtgtcaacctcatataagcctccttgtgaacctgacacaagcctaactggttccatcgcagaggatactttggttctgatcttcttcttgaagatttcccctgactagttggtatacatttcgaatgatccataagtgttgataaactacaagtacacaagtaactactcaagggaaattcacttgcaggttagtcaagtgaacgttttttcaaagtatcagagaatcataaagaagacaaaggctctagtttgagtctggaaattgttaatgatgatggtactaagttctggtggagtttgcatgtaagacaaagcattgcagactgaggttacagcaggaagtgcatctgggttcaatggttgatgtgtaagttgctgtaaggacgtgtctcaaggatatcacaacggtttgttgagatgagacagagttaaagataactagtagtggttaagaatacagtgttaattattgttttcaatatatgagaggaggagcttccctactatttttatttttttagccaatgagagagctccacttcataccccacttttaccaatcgctagatttcacagccactctcacccatgtcgcgttgagcgcgtgtccacaaaaatcattctttttttgatccacgcacctcattctcaaaaacccaccgcgtgtcttatttttttttgttttcttctctaaaccaaagtaaaccgaaccgagatcaatttgaatttcaaaaccaatgtaaacccatcgctgtgaaaacaaaaagctcggccactgtaacaacaaaaatggagacgacacaacttggaaaagaaatcaactcgaaatagccaagagaatgttcgaaaaccctctcaaatccgatgcttcctttgattccaacctccaaaagcccatctgctcaaatcttcatttcgaggacgaggactcgaggagtattacaaggtacctctatagaatcaatggcttccatggtttttgaaactttacttctaataaacaccattgtaatgtcttgttgtgaaattgtgtaaggaacaaaggatagtgaaagctgaagagtgggcagagtttttttttgactaagtggcctctgtttttgattcttcagtggtcaattttgtgatgggatttgattgaaattggagaatgatttcatgaaatctcttcgggctgaggttgattcatgactctttcatttttctagtgtctcattgatgatagacataagaagcactcagatgttggtttttgttttccatacttaaggccatagagagtggtgaattggaggcaatcaagcctttgccttggtaccctaagaatcttcacttttctagtgtctcattgatgatagacataagaagcaccattgctgaatcatatctgtttggcacagttctagttgaccatccataagtggattattcatgctgctgcttaagccattttttccatatctgctgacaactatagaggctttagtcacatgcttttaggtttgtagctaggaaccatctggaatcaagtacttgctagaaataatgttgttgatcctctgctgcagcgagagagatgcagcgcgtagcagctttaaacgtgttaggaaggtctgtgaatagtctaaaatctacatcaaatgagtgaagggaa

SEQ ID NO: 3578 - DNA, 3000 bp, Unknown; identical to SEQ ID NO: 3483
  misc_feature (1)..( 3000): cDNA_ID_2999395_gDNA_ID_1620652_Annot_ID_163488 3000 nt of promoter + ATG

SEQ ID NO: 3579 - DNA, 3000 bp, Unknown; identical to SEQ ID NO: 3573
  misc_feature (1)..( 3000): cDNA_ID_1821233_gDNA_ID_1620652_Annot_ID_163485 3000 nt of promoter + ATG

SEQ ID NO: 3580 - DNA, 3000 bp, Unknown; identical to SEQ ID NO: 3485
  misc_feature (1)..( 3000): cDNA_ID_3093739_gDNA_ID_1620652_Annot_ID_163483 3000 nt of promoter + ATG

SEQ ID NO: 3581 - DNA, 3000 bp, Unknown; identical to SEQ ID NO: 3486
  misc_feature (1)..( 3000): cDNA_ID_3071457_gDNA_ID_1620652_Annot_ID_163479 3000 nt of promoter + ATG

SEQ ID NO: 3582 - DNA, 3000 bp, Unknown; identical to SEQ ID NO: 3522
  misc_feature (1)..( 3000): cDNA_ID_1821026_gDNA_ID_1620652_Annot_ID_163513 3000 nt of promoter + ATG

SEQ ID NO: 3583 - DNA, 3000 bp, Unknown
  misc_feature (1)..( 3000): cDNA_ID_3071426_gDNA_ID_1620652_Annot_ID_163512 3000 nt of promoter + ATG
tcaattgttatgagtggcaatagaaatgaatctgtaggagattatagtgagactgattagtctagtgattgaacaatctaagaaacttgatgcaacattgaaaagttaacatctttaagtaaggaaaccatcggaagaaagcaaaattagtgatgcggcaagcaagaaaaaaaaacaaaaggatttatgcggcagattccaactggttcgtattcgctaccaaaaaaaaggaaactttaccttgcaagatgttggaagcaactcaagttgagcaagaaaatgaatgaagagaaggatctcaagaggacggaggagatgtgggcgtggaatttcagagcttgtagatctactacgactacggatggatcaaccaaacacaaaatttatacttttatataaaaatgaacaccgatttttattattattaaattaaatataagcgagcggatgaggaagaagaagaccaattgacaaaaaaaaaaactttttaagaagaaaaaaaaatggttatcccctcagaaactaatgatctttctttcaatgtctggaaacagtgaacaatgaaggtaaaagagagagagagagagaggtcaagtcgccgaacgagacatcctccttcgacgtttttatgtaaaaaaaagaaagaaagttggagttgttttttttatcttctctctttatctctctctatagtcttaagactaagagtgattcttaccagacaagacccataaaagaccaacgatggcgaggtcggagccagcacatcaaaggtcccagctttcgggctccacttccctctcgtccttttttgcctcattagatggacaacaccaaacagtggcaaagaataatattacagtttttttagggaagaaaataaaatagttgatattattgatataataattcattcaagtctcctctttattttaaaaatattcaactcttttactttagacattatcataaactggggtcaaacggaagatttttcttcaacgtttaataaaatctcttaacacaaatcaaagaagagtaaaaatatacggtttcgataaaatttggttatgtggcggtgttacatgactacgactgataaaactacacgagtacttttgtttttctgtcaccaagatttatttcttttacttactccatgtgtttttttctttcttcgttaaaactactcctcgtaaattataatcaagattttaagcagtgtgcatataaaataaaatacatgtacagtctagaaataatatatgtggattcatgaatctttcatttttaatttccccacacaatttgtatcaaacgtttaatgcccataaaagtggtggtccaggaccctgagattaaaattttaaaaaaatatatagagaagaggcttgggcttgaagaatgaaaaattgaataacaaatatttaaaaaaatttgggacccgaaagtgattgggataaagtgagatatgtcactttacctaacattatttaattttatattaatgtatgtaccactaaatttggcccttttctccccatcgactctttgtagttatttatacttttgtagtaccaataatagaagaatcaactataaaaatttcagctcaataaagaaaaacagaactatgaattaagtgagaaactcaaaagcctgcttctaaaacatgaatacgtccacgataattatcactaagttctagataatctaattttgcgggaccaaattgatgtatatgcgaactttttcatacttttttcaccaacaaatgtatatacttcccatcatgcatgctcccatggtatctcgccgagtgtcaatatatgtgaacttacataaccaaaaattgatttataaagataacaataataagggagacctaaaaatagagaaaagggtggtgtggactgtggagaaggtccctacttacagaacatagcttccatcaatcacacaaaaatccaaccactctgaacctttcacttcaggaccaacttcgttatccaatcatctcccaatatgccaatactttcacttatatatgaacgtgtatatataaacccttcacatttacttcacaaaaatatcttttaaaaaaagatcataatcacaactactaagctagaattttttagtaaatttactactacggtaattataaacaaattatataggtttcttaaatagtagaacttaaaatataatgcaaagttatgtacgaatactatcttttaattaaaaataacgataagaatgttaaaaaagaaaaaaaaaaaatcatgttgatgatatatatgttgaagtaaaatttagttattaggtttaggtatacgtcaatcattcatgatacatggatcccaaacccataatatatcatgcatcgatctctgaaaatcaccaaagcaaaaaaaacccatgtaacatgatatactatattatgcatcatttcgccaatgtaacttctctgatgccctgaacctatttcacatatgactcatgggaaagaccgacaaagggatcgtattacccaaatatggttacgataacatccactgaatatcactcaaaatgaattattgtctcttactagatatattacggctagttgatgatttgtttgaaaagtttaatcttacaaaattattaatagatttgatgctgctcaaagtggtctcttttatttgcaccgcaaaaagccagtatatatccccattagaaaagacgtgacaaagtgtttaatagatcctttatgttttcctcggacccatgcatatataagtgtatttaaatcttttataaggtttttatagccataaataaacaaatttagttcaaaataagaataattaagtaattggaatagcgagacacgttccttgagatgataacacgagcatatattcttcatcacttttgtttgcttcatatcatatacgctaacttatgtgtgtgtgtaatatatgatctcagaactaacaagtaagaagaagaaga

SEQ ID NO: 3584 - DNA, 3000 bp, Unknown; identical to SEQ ID NO: 3520
  misc_feature (1)..( 3000): cDNA_ID_2158392_gDNA_ID_1620652_Annot_ID_163509 3000 nt of promoter + ATG

SEQ ID NO: 3585 - DNA, 3000 bp, Unknown; identical to SEQ ID NO: 3538
  misc_feature (1)..( 3000): cDNA_ID_2158388_gDNA_ID_1620652_Annot_ID_163508 3000 nt of promoter + ATG

SEQ ID NO: 3586 - DNA, 3000 bp, Unknown
  misc_feature (1)..( 3000): cDNA_ID_2158384_gDNA_ID_1620652_Annot_ID_163505 3000 nt of promoter + ATG
ttatccaatatatctacatcatttgctatactatatacatatatccacgtttaatattttctttcaaacaagaaataaatatcttcagtctctttcattcggatttcggattataatcacacttaatttggctatcatacgaggattgaataatccgagtttgcgtacacaacatgtttattggactaaatgaattatatttgtgccaatccatatttgggttgcttactttttcatcatgatattatttctgaacttatctacctaatgtttgtataaactagctaatcccatattcccattctttatatcaacatgctgaataagtgaattatatcattgttttaagtgggactaatatatgcattatgcagagcacatctttgttactcttttgaacgaataagttgtttcaagtattttctgtacgtgttcaatcggatattttcgacaactaacatgttattttcgttcaccgcttcattaaatctaaagctttagttgaataagcagttgctagctgaattacatcaagtgatacctttatatgttttagaaattcaattaatgcagttgaaaatgtgtaggcttattacaactatattatcgggacaatatggacaccatcagaaattgatgtcccgattcaatgaattaacgtgtagacttacaactatatatcgggacaatggacaccatcgggaattgatgtcccgattcaatgaatctgttaaactcttttacacatttgtttaaattttcataatcaatcaatggatcgtgtaatcatactaattagtaaactacatatataattaagtctggctcatgcaagataatttataacaaacaaaaaacttatttaagtgtttctctaacattggccgtatccgttagcatgatccttgaccgacggtgtgtgtgtcattgggtcattagggtttatcatgtcaataataaaaccttgttaaaatatgggtattatttggtgataatattatcaaagtgatcatctgacattgcgtttagtggttgaatctttaatatatcttggtacttggaacggggaataaataaattaataaacacatgtaataacatagtatattgcttcatgatatgaatatgatacatataaataaacatggcacgcaaccatactatagaccagtacttgttaattgttgatgtaaataaactaggatgtattgaaatactgatttacgaaattagtgttttgtttttacgtggcattagtgatgtgaagaaatgaccgatgtgagaaagaagggagaaataaatataatgggagtgtcgatggatggattgcagcaaactttaacggcgacaactcgccgcttacctggccgtcccagtttgtgacctttggtgagagtaaaagggcaaaaatccacgtgggctaaaaaatggagccatgtgccgccacatcatcggtcaattgggaccaaatacctctctatactacttattagtaacttgactatatatcttatgtttttttttataatactaataaaattatgggcgaccgaatcaaagtggtttattcctttttctggctgccgcatctttactctccctctctggtcaactcctacccgagatctatatggagtaccattttattaaagaaagaaaaacaaaaacgaaagtcagttaatttatctctccaaaatatatatatatgaccaaattaaatcgcattgcattaggaatgactgcatgcttaacatatatcgtgatatgcatggggtgtgttaatcataaaaaaatgccatataatttacaatgtacgtgtatattgtgagattaatttacaatttgcgtgtatatctctagtttaagagtatgttacttggaatgattttaaatactaaggaatagagattgcgttagaacgcgcataagacatgtttattaataatatacacgagcagccatacctgcaccacgtgttaccccattatatatgttttaggtttatgataatctcttttctataattttggttgactagcgtgctataagtttagttaattatggtaatgtagtatacaaagttttgatatatatcacacacaacataagagtaaagaatcgtgaatcctccagagatgaggggagtgagatgcgagagagagagagagagacgtttctatagttgggccctaagtttgtttttccaatctttaatgtgtggggatactagtttttactaggtgccaagcaaagcagaacaaaattgaacaaaagggatagattagagggaaagtaagtagggggttggaaaaaggataagtaagaaaacaaagggaccagaatagtaaaacatacaggtggaacctgatccggataagtgagtggggtctttatgaaagggggccacttgtaagaaaacgttttaattttgatcaaaaagggcgtatctgttggagggacaaatggagaatgtgttggattttcttggggatttgatctctcttcattattactacggtttaatatttgattatagtaataataatcacgatttttaaagtggcattaattaaggattaatccagagaagcttcttttgtccacctgcaatgactttaatacccattttagacgttaaaggatcagtatcgccacggcggcatgactcatccgctccttccaatacgccgtcgttttatacccccacctcgaattgaaaaaaaaaaaaccccaacaacaaagataaaaacgtaaaacgaaaaaagcatatcaatctctgtgcctctctcaattctcaaattctgaattctgatcgtatcttcttctctttaagattatcatttgaatatcttcttcatcttcttctccaagcccctctctctctgtatcgatcaatcatcaataggaggagctagcgaggggattcaataaagagatcttcttcttcttcttcgattcactttcctttcttttccattttccctttcgtcgtcgtcgtca

SEQ ID NO: 3587 - DNA, 3000 bp, Unknown; identical to SEQ ID NO: 3517
  misc_feature (1)..( 3000): cDNA_ID_3439905_gDNA_ID_1620652_Annot_ID_163504 3000 nt of promoter + ATG

SEQ ID NO: 3588 - DNA, 3000 bp, Unknown
  misc_feature (1)..( 3000): cDNA_ID_1821197_gDNA_ID_1620652_Annot_ID_163500 3000 nt of promoter + ATG
tcacgtcatatatagaagcagctggcacaagggtaggcgtgttcattatttattgagttgagagttttgagtagtaggaatgtgtagtgtgtgtctagcctataaatcatcattccaagtaaaaaggaaaaaaggtagtgtgaaagctagagctaccaccacattacccaatagtctagggtgaatgacgtggcattgcaccgactctctgctctgcctcacagctgggcctggtactacatgttgatgtcggtcggtctcttgttttctcaagtgatttattaccacacactctatctagctaattgtgttcctattaatcattcatcggacatgttaaactgttgatttcagtcaatgatgagatcttcaatattcagcagattggtagctaagaaacatccatgtgagaacgactctgtcacatctacggcattcattactacatgtgatgatatcttcatacttctccctctcttgtttaagaccctatatcaactgctgatttctttcaagttctaatgatggataacagatttagagaaacacccatgtcttgttgggtttaggctcatgactagaacaggaagagtaaacctttggttcctcttctttttttagtggtggggctgtaaagaagtccaatgacgtgagcagcattaaccaaaaccatcaagtttaacccaatactggcccttttatgtttatgtaagcccatcttctgattcggcccaatcaagacacttcagttagcagtaagattttcaaacttatttttctaataatgtctaaacaatttaaacagtgcttttgctctctttattggataacgtggaccgtccacaccgacaatccattggtcgacgaaacgcagagtattcggacatgtactatgttttttattacactttccgaaaaaaacaaaccttgttccgatcaaagtcggtccttaaaatattgacttgttagtacaatttgccggcaacaccttggctaaacgcgaaccgagtgttaattactataaattaactgtaactaaaataaacaaactaaaagctagagctactataaatacagtgtcgcaggggtttgtgtaactcatcagtcctcacagctagcaaaggaaagtctcgttggtaaattaaaagtgagtcttgaataccttgtttgcgtttttcctaaaagatggcggatcatcctcgttctactgagcagcaagaagctgatgctgcagcttccaaaggctgtgggatgtttgactttctcaagaagaaacccgaagatgtacattcttccgagaatgcccgtgtaaccaaggagcccaaggaagaggagaagccttctctcgctgaaagattccacctttctgacagctctgtaagcttaattgtatactcttgttcttatgcatgagaaatgttaataacacttgttgatggaggatgtgatatatatgtatatgcagtcaagtgatgaggaagcgggtgaaaatggggaaaagaaggagaagaagaagaagaagaagaagaatgaagttgctgaagatcaatgtgaaacagaggagaagattcctgcgggtataggccatgaggatgggaaggagaaagggtttatggagaagataaaggataagcttcccggaggtcacaatggaaagcctgaagctgaacctcataatgacaaggccaaggagaaagggtttatggaaaagatcaaagagaagcttcctggtcataccaatgatgagaagaagaaggaaacctagttataagaagaccctttttttttttactttcgcttttaccacttgcgttttcatcttcttgtattgttgtccacctcgttatgtgtcagtgaaatgccaacttttcgaattgaacaactcttgaatcttaaataactcatactattataacattgaaatcctcaagtatttaaaacctgttgttttcatctgttagtgaaaaaaacctatgtatgtatgaaacgttaaaaccctaaattttaccacaaaaaaaaaacgttaaaaccctaaaaccggcatccaataacccattaaacatataagaagaaacccatgctttctgagcaagaaacggttctgcttagttaggtttgggctgactaaaaagggcccaaaaggcccatttgaaatcacggaaaataggaaaaagttcaaggggaaggagcagccagagacacggagagtctgtgtatgaaagtgaagggaaaaggagatcgacgtctcctctcagactctcacgggaagaagacagtctgtgactttttgtgtttccagctgttttcatatcatttctcaattctcactcgtatacctgacaatttgggttaccaagttgaccgttgaaatttgtgtttatataataagaattttgtggactattactaatttactagtattattttatacttccagcatatatacatacatacattgcttcttcatattctctacgcgttcaatcaatatttctcgtgtaggctggctatttgtgccaaaatacaactcaaattgtttcaccccaaaaaaaaaaaagcagatacaataaaataaaatttatataattatatgttaattctcatttgtgtaaaatattgaagcagcttaaaataaaataaacctcacagtaaaaatgaaataaaataccttgcaattaaatgagaatgcttatttttaacaaaataaaaaataaataaaaatcaatgcatcaccggattgggattttattttctttcaaaaaaataaaataacaatccccaacccaaaggacaaaataatgggtatttaattagtaggtggggtggccttataatatattacaggttgaaataaaaacacggaattagctgattggaaaagcttccccctccccattggactttaaatacgacaccagagtcatttgttccgttactacaaaacagagttgaagctttctcttccaactttatcttcttcttcttcttgtcaaagcgagt

SEQ ID NO: 3589 - DNA, 3000 bp, Unknown; identical to SEQ ID NO: 3483
  misc_feature (1)..( 3000): cDNA_ID_2999395_gDNA_ID_1620652_Annot_ID_47759 3000 nt of promoter + ATG

SEQ ID NO: 3590 - DNA, 3000 bp, Unknown; identical to SEQ ID NO: 3577
  misc_feature (1)..( 3000): cDNA_ID_1839226_gDNA_ID_1620652_Annot_ID_47760 3000 nt of promoter + ATG

SEQ ID NO: 3591 - DNA, 3000 bp, Unknown
  misc_feature (1)..( 3000): cDNA_ID_1821221_gDNA_ID_1620652_Annot_ID_47762 3000 nt of promoter + ATG
gctcttaatccaatgatcatttatttgtatgaaagaattagaagactcacgtattcaccaccaccaacgaaaacatctcgcatactttctttgatggtcataccacttctgatatcaacgtcaggatgtggtagacggacttttgttggtctctcactgtccctaatctcatctggatcaataggacagtcaacagatgcatagtcaccaagaactgaaacggatccagtaaagcggtctcccattagaccataaggctttgctgggaatacatacaggtgaacaacggaagcaatacccatctgcactggaccagcacaagtgttaagagctttaatttatttaaagaaaggaaaacagacgactccatagactgcttgttaataggaagcaatgaagaaaaagttttgcactcgtaaacaaagatcacacataatgtttaaccttttgcaggaattggtaacaacagaagacatttacctctatgcaaatgatgaaatcttgcacgctagtcttcaactgcaagctttgtgcaattgaacttttgaacaagccgagggaagagaggagagcaatggcaacaccttgccaccaagtgagaaacacaatcgacttaaatgttagaaatttagccagtggttggatgtgtgcaagctcatctttcgttgcaccatagaactgaaccagacagtataatgcccatgactgactaaaatttagaacaactgccaaataagggtacctacaaaaaagaaaacaatggtaagatgctgctatcttgatcacagtccatcatagatgaaactgattttcgtttcttaaggtcaatctgtatgttagcactgttcttgtcaaaattgtctcaacgtacccacatccccatttaaactctccttcacagtacacaccgaaggcttcaagaatcagagctgtgagggcagttaaagactttattatcatctgcaaaaggagagaaatagttaacttccacttcaaagaaaagagttttggagcaagagaaacaggaggcatttgtgagaaacatacatattgaacaataccaaacttaacaacttgataaaaccagggactgagcctccacggttttaagaataaattcataggaaaaggatgtttgatgattcccttttcatccttgtgatctaagagtggcgtcttaaagctcttacgcccttgtctttccataaactcgatagtcctttcttccccacctggtaaacaagtcaatttagaacaaagagcaagggaaagagaaagtaagtttgtgcgattatccttgtttcacaggtagaactacaagatgcggaacctaatcaatattagacataaaaaagagtgaaaatggtcataccaatgcaggcaacaaggtatctaccaaaacagtacatggcaaaggattcatagcagtctcgaagaatcccacagtcaacactgatggatggtttaacaagtgatgcaaactgttacaaacaaacacaattaggaacagatatcttagggaaacacattcagttgacgatccgttgacgagcacaatacaagtaaatattcgatgagattatcaacgctgaacatgactgtattattatgagtatgatacaggcttcttctacactttggcgataaaaaagtcaatttttttaggttcctaaaatcttcaacccaaaatacgtatcatcaaaacctcctgatttgcttaagaaaaaagtaactgaccgattcaatagaatagcaagggaccatgaggatgactccaatcaaaaacttttgctcctgagagagaagatagtagttaaggtaagcaaggatataaaagccaaagtagagggaatagaaagagagagagagagaaaacctcagggttcttgtaagtagaaaggtgatcgaagacaagaaacaaggaaagggagagggtgagaaccaaaaaagcaccggccataaagcttgcccacgcaggagccgagtaagcagcagctaggagatggtaagactttaatatatccatcaggaacaagttcccatcccacaagcccaatcaaagaatcgaattcagctgcgaccagtgatgatgatgatgatgaattgatgatgattaaactggatccgccacacaaaaaccgattcgaagaatgatcggaggacctaatgacatgaagtttggtataaacaaagaaatggattggagaaaacgaagagaagccaaggaggatttgatcagacgagctcacgtctgcaatggacgacccatgagaggatgatgagaaaaaacaaacaagacaaaagagatgccttttttttcatctaactttgatggtaaaagaaaacgtaaaaacggcatgcattgcaattgttagcatttaaaacggcaagcagatgttactggtactgactcatcatcaccgtcctcctcttgcctcgtgtctcccgactctccttactttactctccaattcaattttagtcaacaatccaatctctctgcaactaactactacgccaagattaaataaaccccaactgcttgcttaattgctcttcagacaaaacatggcgattcctaccaagcttctcctcttacaggcaatcctcttcattttctgtcttgtcctagcgtttcttgccaaattttcctttttaaaaaaaaacttgttatgttttctttctgggttttttcgttatgcaaattgcatatactttgtgtgcttcttcttattaggcctttgcttttattgaacgatttccgcctctgacttctatcgatgctattatcgtataattgggaatgattgtcatgttgcagctctttactttctcacttttactcaccgcaaacctgacccactcagaaccaaggtaatttgcattttagtgaccgagacatatggccttccttttttctcaatctcttattcatctctctttcggtaatctgtactgctgctcagtaataatagacattcaaaagagtattgcgctatg

SEQ ID NO: 3592 - DNA, 3000 bp, Unknown
  misc_feature (1)..( 3000): cDNA_ID_1821217_gDNA_ID_1620652_Annot_ID_47763 3000 nt of promoter + ATG
tgccacagaaggaaatcgtgaacaaagattatatatacggttaataataaactggaatatagacagacgaagcaaaacatagaaactacctgctcgattctgtagaatggcgaaaggtgggtatcaaagaactttttctcttctgctgctttgctttcaggaccaacccacaactacaacatgtagaaattcacatgaacaatcataccagtatttgcagttgcttttctgctgaatgatttgtacaattatggtcctggcaaagttaatacataccttttctggtcgtgtttccaccttgaaattatagagacctgaacagagtgcaagaacaatagctactgacatgaagagaacaagagatggatttctagcaatccatgacccatatgatctgaggcaaacaattggaaacaattacgaatttcatctcatctaattgtagagataacttgcgagtaagatacagacaacgaaacaaaatcctggagattcacctgtaaaattttgccatatatctctgaacaggagagagttgagcatgtctttgcacctaagaattagaagtcaattgatcaattagttctttcctccaaacagattaaatcttcaaggatagtccagcatttatgtgggtatataaatgtattttatgttatatatacatacacataagaactacaatttctagccaatacattgatataccttgacaccaagtatgttttccttcatttcactattaattccatcttcttccacaggatgcaatagtggctttgagctatcaagaggctgtgtcgtatttcttcttcgatttaaaccagcccatccgaagaagcaagacaccagcaagacgtatacaagtgccattgataactcaatgcatctaacctgaaaatacaaatcaatataatcaaatccaagatcataccaactcaataatgttttcaagcaacaatgggataattcataactcacaccttaagaggaccgattctaattgagcaagaatcttcatcatggggcggcaggggttcgggacttgagcaagctggtgaggaagggcaatcaccacaagagcatccaagggatgtgtcaccacatgaataaacagatacattcattggtaccatcgcagatgactcagggatgcttgatttgaagttgatcgcatatggtgaaccaggaaagccagatggtgctttctgaccaataaacgtaaaccattctggaaaagcagaagtaaagatgaaacatggaacttttgaaacaagataaagcgtgtatggaacgccttagaacaaaactgcagagcacctctgaagtttttagcaccaccgccaacaaagttaattgcacgtgtgttcattgttccaaatttcacctctttacaggactcgtaaaggccttctccaaacgtatcagttatgtgatagtctataccatccactgtcaaatttccactcacctagaataaatcccaactagctagtgttgttaaccatataaatgggtgtcaagtaaccaacaaaagctgaaaaaaatggaagctaacctcagcaacagaagtgacgttgatgaaaagagactgatttggagaacaggagagctcgcagaacaaatttaagaagttccgtaagcatgcaggacaacccacaagaaaagggacagcctaaaagagattgcattgacaacgaattagtaaaaatggcctgctctgataatagcaaaaacaagagaataagaaaaaggtcatacctgttgaacttgagacctcaaagtgtcaaactgagtctctgtacaacagacattgccacttatggttgggcaaaggctttggattttggcagaaaacagttcatcaggctgcagaaaggaatgtcagattgactcagacatgcagaagtaattggaaaagtaatggtcttactccatgatctgaaaagttgtctacctgaatggaaggggaggcataaggacagttaaggacttttccatcgctgcggtgtccgcaaatgtcatacatagcgcaatactcttttgaatgtctattattactgagcagcagtacagattaccgaaagagagatgaataagagattgagaaaaaaggaaggccatatgtctcggtcactaaaatgcaaattaccttggttctgagtgggtcaggtttgcggtgagtaaaagtgagaaagtaaagagctgcaacatgacaatcattcccaattatacgataatagcatcgatagaagtcagaggcggaaatcgttcaataaaagcaaaggcctaataagaagaagcacacaaagtatatgcaatttgcataacgaaaaaacccagaaagaaaacataacaagtttttttttaaaaaggaaaatttggcaagaaacgctaggacaagacagaaaatgaagaggattgcctgtaagaggagaagcttggtaggaatcgccatgttttgtctgaagagcaattaagcaagcagttggggtttatttaatcttggcgtagtagttagttgcagagagattggattgttgactaaaattgaattggagagtaaagtaaggagagtcgggagacacgaggcaagaggaggacggtgatgatgagtcagtaccagtaacatctgcttgccgttttaaatgctaacaattgcaatgcatgccgtttttacgttttcttttaccatcaaagttagatgaaaaaaaaggcatctcttttgtcttgtttgttttttctcatcatcctctcatgggtcgtccattgcagacgtgagctcgtctgatcaaatcctccttggcttctcttcgttttctccaatccatttctttgtttataccaaacttcatgtcattaggtcctccgatcattcttcgaatcggtttttgtgtggcggatccagtttaatcatcatcaattcatcatcatcatcatcactggtcgcagctgaattcgattctttgattgggcttgtgggatgggaacttgttcctg

SEQ ID NO: 3593 - DNA, 3000 bp, Unknown; identical to SEQ ID NO: 3574
  misc_feature (1)..( 3000): cDNA_ID_1821205_gDNA_ID_1620652_Annot_ID_47766 3000 nt of promoter + ATG

SEQ ID NO: 3594 - DNA, 3000 bp, Unknown
  misc_feature (1)..( 3000): cDNA_ID_1808704_gDNA_ID_1620652_Annot_ID_47767 3000 nt of promoter + ATG
ccccacctactaattaaatacccattattttgtcctttgggttggggattgttattttatttttttgaaagaaaataaaatcccaatccggtgatgcattgatttttatttattttttattttgttaaaaataagcattctcatttaattgcaaggtattttatttcatttttactgtgaggtttattttattttaagctgcttcaatattttacacaaatgagaattaacatataattatataaattttattttattgtatctgcttttttttttttggggtgaaacaatttgagttgtattttggcacaaatagccagcctacacgagaaatattgattgaacgcgtagagaatatgaagaagcaatgtatgtatgtatatatgctggaagtataaaataatactagtaaattagtaatagtccacaaaattcttattatataaacacaaatttcaacggtcaacttggtaacccaaattgtcaggtatacgagtgagaattgagaaatgatatgaaaacagctggaaacacaaaaagtcacagactgtcttcttcccgtgagagtctgagaggagacgtcgatctccttttcccttcactttcatacacagactctccgtgtctctggctgctccttccccttgaactttttcctattttccgtgatttcaaatgggccttttgggccctttttagtcagcccaaacctaactaagcagaaccgtttcttgctcagaaagcatgggtttcttcttatatgtttaatgggttattggatgccggttttagggttttaacgttttttttttgtggtaaaatttagggttttaacgtttcatacatacataggtttttttcactaacagatgaaaacaacaggttttaaatacttgaggatttcaatgttataatagtatgagttatttaagattcaagagttgttcaattcgaaaagttggcatttcactgacacataacgaggtggacaacaatacaagaagatgaaaacgcaagtggtaaaagcgaaagtaaaaaaaaaaagggtcttcttataactaggtttccttcttcttctcatcattggtatgaccaggaagcttctctttgatcttttccataaaccctttctccttggccttgtcattatgaggttcagcttcaggctttccattgtgacctccgggaagcttatcctttatcttctccataaaccctttctccttcccatcctcatggcctatacccgcaggaatcttctcctctgtttcacattgatcttcagcaacttcattcttcttcttcttcttcttcttctccttcttttccccattttcacccgcttcctcatcacttgactgcatatacatatatatcacatcctccatcaacaagtgttattaacatttctcatgcataagaacaagagtatacaattaagcttacagagctgtcagaaaggtggaatctttcagcgagagaaggcttctcctcttccttgggctccttggttacacgggcattctcggaagaatgtacatcttcgggtttcttcttgagaaagtcaaacatcccacagcctttggaagctgcagcatcagcttcttgctgctcagtagaacgaggatgatccgccatcttttaggaaaaacgcaaacaaggtattcaagactcacttttaatttaccaacgagactttcctttgctagctgtgaggactgatgagttacacaaacccctgcgacactgtatttatagtagctctagcttttagtttgtttattttagttacagttaatttatagtaattaacactcggttcgcgtttagccaaggtgttgccggcaaattgtactaacaagtcaatattttaaggaccgactttgatcggaacaaggtttgtttttttcggaaagtgtaataaaaaacatagtacatgtccgaatactctgcgtttcgtcgaccaatggattgtcggtgtggacggtccacgttatccaataaagagagcaaaagcactgtttaaattgtttagacattattagaaaaataagtttgaaaatcttactgctaactgaagtgtcttgattgggccgaatcagaagatgggcttacataaacataaaagggccagtattgggttaaacttgatggttttggttaatgctgctcacgtcattggacttctttacagccccaccactaaaaaaagaagaggaaccaaaggtttactcttcctgttctagtcatgagcctaaacccaacaagacatgggtgtttctctaaatctgttatccatcattagaacttgaaagaaatcagcagttgatatagggtcttaaacaagagagggagaagtatgaagatatcatcacatgtagtaatgaatgccgtagatgtgacagagtcgttctcacatggatgtttcttagctaccaatctgctgaatattgaagatctcatcattgactgaaatcaacagtttaacatgtccgatgaatgattaataggaacacaattagctagatagagtgtgtggtaataaatcacttgagaaaacaagagaccgaccgacatcaacatgtagtaccaggcccagctgtgaggcagagcagagagtcggtgcaatgccacgtcattcaccctagactattgggtaatgtggtggtagctctagctttcacactaccttttttcctttttacttggaatgatgatttataggctagacacacactacacattcctactactcaaaactctcaactcaataaataatgaacacgcctacccttgtgccagctgcttctatatatgacgtgacgtgtgctgtgatgctgagctggaacccattcccttcttcttcttcattcttttctgttcactatttatatatttgattcactctctccttcctctcctctctattcatcgcatcccccacacacctcattaacattataattgtttttttagttattcttcaatttcaagaaaatg

SEQ ID NO: 3595 - DNA, 3000 bp, Unknown; identical to SEQ ID NO: 3588
  misc_feature (1)..( 3000): cDNA_ID_1821197_gDNA_ID_1620652_Annot_ID_47769 3000 nt of promoter + ATG

SEQ ID NO: 3596 - DNA, 3000 bp, Unknown
  misc_feature (1)..( 3000): cDNA_ID_1821326_gDNA_ID_1620653_Annot_ID_47772 3000 nt of promoter + ATG
gtcaatatcttttgctttatcgataagaaacttcaaagcaaacaatcaagttcgacatagaactctgttcaaggaagataattactttactttgatctcggcggtcatatagtgtgttccatgaacggacaaattcttcctcttccccaaaattttccaaaggttatttttggctatttacgggttgtcacaaattaaaaaggaaatgtgcaaatatttattattattctttgacttgagggttaggatactcaatatttacaacaacccctattcaaaacacagataaataaatatgaaagtgaataacatttaattgatggagtagtaggaatcaatcaaggagagagctagggccgctcatatcaacaagtcttcaccttcactccactccaccaacaagatttgatctataagataaatgtgataacgacaacgaagatttgagtaattgtagcacatgcatcccaaaactgattattgttgatgatgaagggtaaagtaggcaactctatcatgcgacgtatcctttttcttttgtttattctttttcctgtccgtaaagttcgccgagaattcgaaaaataagtaatcttatgctatccaaccatatatcatacgtggcacatttcatgctatcctctctactcattgattgaatgaacgtaattttggtgacatggaacttagaaggattccaatgtcaataaaccctatatactctgaagcaaaacataaaaactttgtttacatctccttttgaaaggtgtttaaagatttcttgatgtcatttgaaatagaactttagttccaacagtttcgaaacggtgagaaaggggatgaattattagttctaatccgcgaaagaactttctaactagagaggaatcatccctaggcatccaataaacgtaactagtaattaacggggttgaatcttcttctcatgagtccaacacttttctgccatcttgatttatatacaagaatattgttttcatttaaggtattttgggtttaccagtgcgctttcgggttacattcaaatctttgtcaccacacggacacttctctctctaatagaagaataacctacacatggccgcatattatggtttagttaatagactcgaaaacgggtcagtaggttcagctcattataacacttggccctggtgctataaaagttctatttggacctaaaattagattattatttttttgtttgcgcaaaaatattactatagattttgttcatttgcaccttggacacttgtcaagaacaggatatgctagtaacaacctaaaactaaaacctactaatagttgataaattggacaaaacaattcatcaaaaaatttccttactccacccataaagtttgatttaagaattcttcagtgcaccagcccttaattggtgtagttggaatttatcaaaagcatccttaaaatcgtactccaactacaccaagcatccttaatattgacaaaggatcttcttccatgaatgaaaaccagccctttactatctctaaccacccaagccgcaccagctagattgtttctctttgaccacgaaaaccccacattacacttaagccactgataattggtgtagttggagtacgattttccataaatattatcgtaagactctttgaataggagttcaatttgcgttgcatactaatgtgattaaatgatcaaattggtattattgtcggttgtatactctcgtaagatttgatgcatgtagagccctggtttttgggtcgaaaataaattggctcacactctatcatgctttagttttattacttttttcttatgatttcctcatttctcttctcgtctcgatttgtatagtttcttaacaataaaaatgtatatttcaacaataaaataaaattagttttccttccaaaccaaaaccattagcgattcacacttctctaaatactttttgatgcttttgtaacgtccataccaatataacatggaaaaactaaaatttgactcgaaaaactaacatggttcaatagacacactagtctaatcacaatttgaaagaggatatcagacatgcaaattgaaggatttttttttgtgggggtctggtcaaggagatgagactcaataactcatgttgaattccaaacaacaaataattgttgcatctagaattccaaataagaaataattgagatagttgaatcagaatatgttggtagaatgaacgaacacgtgagtagagtccccaaacgtggcagagaagcggaccacacgaagtcctgtttttattatttgttgccataaagaaatccaaacttgaaactgaaaccgtcgaacgaatcttaaatgaagcgaagaaggaacaccaaatagtagtcttaactctttctctctctctctctctcttactggttgggctctctgtccaaagactccacctttctctgcaaaaatctctgccctcctactctaacatgtctccccttctcctctgtcccttatctctctctattcactcaaacaacaacgaccctttttctatttttacctctcaccataataacttcccttatttaccactttaccaactacttcttcttcttcttcttcttcttctttcgacaagggattttagggtttaggattctccgcattgtacgccactctgttcaatacaccttggtattccccaatctttgacgttttgtattttcagtttgtcgtttccttatcttaaaccttatttaaatcgttcccaagttttttttgttttgtccatagcttatctgggtctctgttttttgagctctgtgattgttaaatttaataacttttctctcatatgtctctgtgttaccacattttcattgtttatcactaattgcttacattcattattaggtaagtgatgatgagtgttgaatcttgaagttttaggagatagagagaaaggtttaggattgttttgatctgttttggaaaatg

SEQ ID NO: 3597 - DNA, 3000 bp, Unknown
  misc_feature (1)..( 3000): cDNA_ID_2999594_gDNA_ID_1620653_Annot_ID_163546 3000 nt of promoter + ATG
cttcgaattccgtcgctggttagcttaggactttctgattctgtcgctttaatcttcttctctccatgacacaacgggtattccaagtctggaaaggaagcaatgtaagtccttttttcatcgaatgattgagcctggaattttattggttttttgtgtgttttctctttgttgggagatgaatattctctgaattctgttctctggtatgaatatgatttggaattcgttttttctcgagtttcacctgtgtagcataatcttagttacgcaattggtttactttggtacgtgtaaactaatgttgttgagctgaatcgttgaagtatctcttgattcactctcaaagcatgaccatgcatttttgcataaccttgtatcaagttgaatgttccttgtaatttattaacaattggaagtatcttcaatgcttgactcttcacatgttttaaattcagtatggtgataccaataaatggtccctctctcttttgcagaaattcatcctgggtgggagattgatatttggaccagatgctaggtcactgcctcttaccttgctattgatcatagttccggttgttttgttctgtgtatttgtagcaaggcaccttcgccatgagttctctccctacaatgcgggatatgctatcatggtggtagcaattcttttcactatttatgtaagtcttctccgatacccaatctgatagtcctatatatctcattgttgtaaatatttgatttctgattttatgtttgtttcctgtttgcttactgcctaatcgggtaatcaacaacatttatcagctatttcattgtttgtttcttacccggcttagaagcttaaaccctgtcctcctgttctgtcacttgttgtgtggcattcaggcgttgttattttttgcttttctgaatcacgaatttgggtttgataggtattgatcctcctcttcttcacatctgcacgagatcctggtattgttcctcgaaattcgcatccaccagaggaagacctacgttatgagacaactgtatcagctgatggaagacaaacaccgagtgttcaaattcccaggacgaaagaagtcattgttaatggcgtttctgttagagtgaaatactgtgatacatgcatgctttacaggcctcctcgctgctctcattgctccatatgcaacaactgtgttgagcgctttgatcatcattgcccatgggtgggacaatgcattggactggtaagctcaatcaaaagcatattgactttgaaaaatataaagttcgtaaatttttatctcccaaaaaagtgtgaggtttctgtttctgttatctgaaaggccaagatctgttttatctgccgattggccaatctgttgtctgccattttgtcctgtgattctgactgggaaagttctgtccattggcagagaaactataggtatttctttatgtttgtttcttcgtcaacacttctctgcatctatattttctcgatgtcggcggtatacatcaagattctgatggatcatcaacaagcaactgtgtggagggcaatgaaagaatcaccttgggctgttgtgttgatgatatattgctttattgccctgtggtttgttggagggctcacagcgtttcacttgtacctcataagtacaaaccaggtcagttggtctctattgttttaaaattctgttttctacttgttatccctgttattaccttcccgtatatacatattaatattgtatgcaaattgtaagtcaactgatagcaacaccgtgcaagtttttcagacaacctatgagaaactccggtacaggtcatcacacagcaggagcattgtctataaccgtggctgtccaaacaatttcctggaagttttttgctcaaaggtgaagccctcgaggaacaactttagagccttcatcgaagaagaacccccaagagttattactctgcctagcaccaccagggaatcaggggaagcagaagacgaaaatgtgacccggcgacagaaagtggaagacgatctagacattggagacgatctaatgaatctctcacggcgttgtaatgcagaagatgccaacaacaatcagcctcatcacacattggacatagaccatgagagagcaggctcgataaggacagaagcaagacatgaaagctggggaagaagaagtgggagctgggatgtagcagcaacagatgtgagggaaagtcgaagctacgcaacagcaaaggatggaaggggataagggtttgtggggtttctcttttaggacagaagtcggtagatgtgaattggtttcagggatttggggatcagttaatgtaatcttgagtgtactataccaagagtagtagttcttctatcttcttttcgttttctacaatgtgtattgtgctattttattaatattatgtggatattccattctgtatttgcgtccatgacatctaccttaaacattgtcatgctgtcttttagctcggccaaaatccaatttataatcttctcttacatgcaattagcagcactgcgattaaaggaaatatcaaatctaacaaaatttgtattttatgactaaaataagtttttcgtactatttaaatctaaaaactaataaatagttattttttaaagtaatccctagggcatttacttgtctaattttgctcaacacttatgagttatgatcacgagtcacgacatccattttctaaacaaagtaagacgatactggacgttgtctttgactaaatttgtacaaaccacgaattatttacattggccaaatttagaaaacataagaaaaaagttactaaagtttaacgttatttgataccagttataatatagcacattctaaagttatccagccctagatgaaaccctaagcatacatatatatccgccttgaaccaaaagccaaacaacacaaaactgaataacaaccggaaacttgagcaacaaaacttccgacgctaagagaaatg

SEQ ID NO: 3598 - DNA, 3000 bp, Unknown
  misc_feature (1)..( 3000): cDNA_ID_2999597_gDNA_ID_1620653_Annot_ID_47773 3000 nt of promoter + ATG
acacatatgttggtttagaaaaacttcaagttgcatttcttcttttagccaatcgcactatcttccgtgaaaaggtaaataatatatagctttatgacaatttcacaaaaatggttcgttagttttgacttagcattaagatttttttccagaaatctaagtattggtaaaataattctatatctactactaggtcaaaatacaattctatattatttaaaaaattgtaactgaggtaattgatcaaattaccaaaatgatgaaagagctagttaagaatttaacaatgtacaagttttagtgaaatggtcaaaactaaatatccattcttttggcccgttagcatcattaaaccaaccactcaatggagacatggaagatcaaaattcgtcaaccctagcgctttgtttctctacaaggatcaagtatggaacaacaacaaccacaagaaatcgaaatgtgctaaggtcgcatgagttcgctaggaataagtctataacatttcgttttgtcaacaaaataagattttagtatatatattatttacaattttaccagacttccattgtcaacaaatgacattattgttgttgtcgaagaaaaaacaaaggtgacactatttgctgttttactttttatttcatgaggacggaggacccatttttttaatttagtttaaaagagcaaccgtatcagttgattacggagtccagcagagaaaagcatgctcaactgtcaaaaacaacctaacaattagggaatcccgtaaaaccggcaaatcacgagggcagcattacattacattacattacatgtcccacaaatcactttccctcccatgcttttccacttccacctatcattaccaacacctattacctaaaggactttaagccagagagttttcaaatcccgtaccgtgattggtgcactatgaagtggaaaggaatacgatgaaaaacaaactgttttctcaatacattttcaccgacaccaatcatgaagcaaatagctgcaattaattttttctacgttttaagacaagaatatatattaaactacttattttcttctacatcttaattaagtagttagtattcttacaaacacttctgattatcatttttgtgttcaatatataaactcctttctatttaaaaaattccctcaacactataatatcattcagtccctatctaaaagttaggtgtccatagagatatacggatattgaaatttaaatgatatatggcggagatcatgcaaggacaattatcttcaatagaatcattacgacttattaaatgtgtgttcccgacattttattacatgattctactgttttctttctcatcatctcattccattatttgtttttctatttgtgtttctagattacttgacatgtacgttaaatcatttatcttccttttcccttgatatcccactcgaatgacatgttgctgtagtactattactatggttggaaatcttatttctctgaataataaaagtttatattcagataactgctatgatacgtaaactttccaatggttatttaattttgttttgcaattaatatatgcaactataagtaaagcctagtgaattctttggatcggagttatatgctatgtgctaataatacaaggaaccccgcaatattgatataaaatttaccaaactgtatcccacactttaaaagttgtcatcatactttatgtgaatgcaataggatccaaatcgtttggggaagattttacattttaaattcttatattccgcaagtgcccaatggtgccgcacgaattatttagtgtatcaaactattggtaggagcaattagtaaagcatatacagtgcaacaatctatttaaaagtatagaaatatctaactaaaacatattttgaagattccctcgtcctccaatcgtcttccatcatcgaaatatccctttgaagagctaagaaacttggtgggaacaaatgatgctattcgataattttcttcgattctatggtatatttggaaagattggaacataattaatatatatatcccacttgatgcataaagaatgttgtttaagaaacggagttctgaggtaactgactgacaagtgcttcgactcaaccattactacttaccaaatccacggctcttggcataccccatacacgcttagtggatatggttgaatcgctagttcccaccaccagcttctttatcttgacttaaaagagggcacgtcgatgtcttcctcccctacacgacaatgtagaacatgcatgttcaaacaatttgcaaatggaagatatattggaaatttgtgaaaggccatgaggtagatacacaattaaattcatgagttcataggtcagaacaaagctgaagcatgttctacatgcccaatcaagaaaaagtcaaacttttctcaatgccgactttactgttctaaaatgtatgaaaatacacattaatatacaattataaatacatgcaaatatatattgttataaactatataatggttacttgatatggatccttatacttaactaacttaacaccaactccctggatctataatgtatatattgggctaaacaggtcatgtggaagttatttgaaaagtacaccatatcgacctaattagattggaggctttttatttagttttttgtcaacaattagatttgagtaacggatgtaaccatattatttgttcctacctcctaggcattattatagtataaggtttttttttaactaaagatgatttaaaaaaaaaaaagtgggacctaaaccttaaaaattccaataacaaatagtatagaggtcctttttctctttatataaacccccaaaatttcctcttctctgtattctccactcaatacttatttcctctgtcttccttcgcttccctcttctctcaccacaatccgagagagagacagtactgtaatccaagtgagagagagagagaaatgaaa

SEQ ID NO: 3599 - DNA, 3000 bp, Unknown
  misc_feature (1)..( 3000): cDNA_ID_1808608_gDNA_ID_1620653_Annot_ID_47774 3000 nt of promoter + ATG
cacacattgggagatgtatgcgattggtggaagtgctaatcctacaatcaatagtcaagggaacagatttttggcacccaatatcagatttagcaaagaagtgactaagcatgaggacgcgcctgagagcgagtggaagagatggaattggagatcttccggagatttgttgctaaacggtgcgttttttactccgtctggtggtgcagcctcgtctagctatgcaaaggcttcgagccttggggctaaaccgtcttctctagttggaccattgacgtctacttctggtgcactgaattgccgtaaaggttcccgttgctgattgtggcttagtggtcacacttaagtttttaccccattattatataggaaaaggcaattaaagccaccaattaagggggattaagtagtgtagtaagactttcttaatcccttgatttactcttttttttgtttgtttattcgggtaaaattgaaggagaatacaacctctggctagctgctctctaggacccttcttaaggattctctgttttaaggaatctttaaattaggttaaagtgtgggaacaagtgcagatgtgttgatcttgatattaatataaatatgattttgtgtctttatcttttactagtattattttcttatgagcattgcaatgcaaagacatagattagtcacaaaaattagtttgaagtataaatttgcgtacacacatgatggagaggttagttaaaagtgtgcccatttggcaagtcaataatggctctttgattttccaaataaaatgactttttattcggaagtttgtaatgttatgtaaaatggtaacttttgggtcaaagatgttggagccagtcaatgtttgaccaactgccgcgacttttttttcctctggccaatgcatcgattccggtaaattaaaagaaaaattacccttaaaaataggaaaagaaaatcctaggcatgacaatgagagaagagaaaagtgaagttgatagattttgaatagaaaaaagaaatactaaaattttcaaaagaaagataattggagcagtcaataccacagtagctctacttttgatgggtttgtctcatattcgtgttttgactactgtccactgattatgggatttatttaaaatttgaaagtaactaattaaacaactaaccaactttctttgtggccatgtgcacattttcttttgttaaagatggccatgtgcaacatgataatacatctaggaacgaaaggaagaagaaaactttgaaagtaacaagtggtcgcaactaatgatgtgatgtagttggtgtgattagtatgtggctggtttgatttggtcagtcagtgagtattaaatgttagtttgccaagaaagattttttttttttttggtcatactgtatatagcataaaactaggtagagaatttccttgttatgaaaaaaaaaatctttacatttgagttattggggaacgaaagaaattcctatggagcaagaaggtttaagtggccatgttatgagttgtgtgcggtcacgtgtactggtcagttaatttagttgtaacaatcgattatatttgttctattattctttatatttcagtgatgccgtaacagtaagaaattatagttaactgaaaccaacaaaaagattcagaattactggtgttattcaattatggagttaaagttaattctttaaactttagatttgttttctgatattgcttttaagaatatgtttgtatgaatttcaaaatctctgcaatatatcttggattttgattctaatgatttactcatgaaactccaaagaggtttcatttcaaatcaattaatatacaaagattttacaagacttttagttttgaacaacattggattttaatgaaatatttaaaatcttaattgaataacaccaaactttaaaatctattaagcatgatttacaaatatgagttccaataacactagattttaaagctggatttagaatcattagttgaataacattggattagtgttggatttcaattctattaaaattcattaacgaataacacccccttaaagttaactctttcaaaaccgatcataacgcacacaagcctccaccgaaatgtttgacaccataatattttactaccgagttcgcaaggctaatatgtatttccttttgtaatttttctctttattcgtattcgagaataagtggattgttcttccgaaagttagatagatcattatgaggttgttcttagagagctagaaaactcaaaacaagtttatcaagtcgatcaactctttgataaactcaacaaatagttatcattgctcattataagattgaaaatgagactttgtattgtggaaaataaaatgcttacctcaagtgaaattttaaagtttatgctatgatgtttgtgatttcgcaattatatgatttaatgatattaaataatcaaataaataataattcattaaaattcacatatggtttaaataggtctaaatgagtttatatgggtcaaaataattttgatggttctaaatgggcttcaaatttaagtgggtttatatttacatgagtgtgtgtgtttacatgtagaggggcttacccaaattaacatccaaattaacatagagtaatttccaaaatgaagtaagattaacattcaaattgtgactagaactttgatttgagttatatagactttgtgtattatttttttataatataaacttcgttttgataagtttatataaaccttgttttcgtaagagattgtgaaattttctttgcagagggacatggttattttttgtctttggttcttgtaatgagattttaactatggtaaatctaagagcccatttgaagatgatgtctcggccctccttatccttatctcgcccaccgttctaaaacccttcccttcctcttcttttctcttctccttccacttccacttcttctatctctcacaattcagca

SEQ ID NO: 3600 - DNA, 3000 bp, Unknown
  misc_feature (1)..( 3000): cDNA_ID_1450335_gDNA_ID_1620653_Annot_ID_47775 3000 nt of promoter + ATG
ggaatctaccatgggatgtggacaatggccgtctagaacagcttttcagtgagcatggtaaagttgtggaagctagggtggtttacgaccgtgagacaggtcgttcacgtggattcgggtttgtcacaatgtctgacgtggatgaactcaacgaagccatctctgccctcgatggacaggtaccctactcttcctcatatatggttatgctaatgcagtcaacatgattttgtgatgtatctcttaatcgacctttcattgtctcttgatttacagaacttggagggtagagcaatcagagtgaatgtagcggaagagcgtcctccaaggcgtggatattaaagctgagatctagctgtgccctctctctctccctatcttgcattttgtttagacgagattcttacactcttcaacgattgtttttggctgaactctgaatgtgaaagttaagctgcttctaaagtaatttgtatcgcttgtttttgatgatctcttattcatagtttaattcctaattgttggagtttcattccctcaatcgcatcgggggatacgacacatttctgggacatgccttgtcggtgacctttagatattagcaactacgaggtttaccccaaaatcggctgagaatgaaaggcttctatagcaaagcacaagttggtcgaggcctaagggaagaagactagaaaggtggtgtcatatggtgagttagtctctgccagtctagaggttcctaaagaagaggattgggatcttcattgtgttcgtaaagggatccactattttaatctcttgattggccactctctaatccaacacttaaacaaaccacacatgaaaaataagtctaaatttaaagcttattaatatggcttacttatttggcttaagaggcctaaactcatgtgatgtatcctagaaaaattatagatatacaaaattatgtatatcacctacgtctagctgaaatcttacccaccaatgccaataaaaagtttgccggagagaatacaagaaattcgtgtacaaatatacacgctccctctttatctttctttcccttgttagctaagaacaaatgataaaaagcttacaccttttatgaaatgctctctcactctcttaccctttcacccatgcccggttcttagtactgggagtgctatggcacatgacccactatgtttttttgtaaagaaaaaatcatttatattctagctccagcttacagtcctgaacttaattgatatgactcgttgaattcactaatctgaatgaaagactcttcttcgagttctgtttgtagcaagtatgtataactccaagccaaatatgaaatcatggtttcacattattagagggtacgtaatacaaactgagacaagcaaaacatgtaatgtaacaatcaaattctaaaacatatagaattagattcaactgatgatggcagagtgaaatatgcatttaaaagacaaaacaataagcaaaaagtctcgatcgtgctcgttgagtcgctttatcaaaatatggaaatgcaacatttgttgggatacacgagattaaatggtccatatattcatgcatgtgtagcaaacagcgtaagaaataatagacgcaatatataaaaccaattaaaaagagaggaaacaaagtgtatgagaatagagcgacactgatgattcattttctaggccagatcttgtcttggaactctcttatcgcccaaccttagccttagcttctcgaccagtcattccaataatttccacacttgtctctttgcttacctctattaattatttttggatccatcgttcaacgttttataaataaaataacattatttaattttcattattgtcactatcattctgcaaaaaagtgtaaaaatgtactaatatttttcttaaacaaaatgataagaatgaagtcgtccaaaatgtgttttaacctattttagtaaacctggacaaaactgacgaaaaaaaaaaaaagtaattggacaaaacaaaaatagtcatttaaaaaaattatatatcatgatatagagctacctaatgcagatacttagaaaactaagattcattattctctgataaagaaaataatcacccacgaaactactcaattataaaaaaactagtccattattaattggaatatacttaagtgtagtttttgttaacataaatggaggtgtatatatagttggtgccggcaagaaaagatggaggaaggattgtatcggtcccctaccccatgatcccgccagtaaattctttctagggcacccaaccatccacgtgtatccctcaaaccctacaacctgtaaatgtaaatccattacattacattgtatcttatttaatactgtacttacccaaaaagtttcttttaaattcaatcttaaatcatgttatagcaaacaaatctagctacacaccaacttgtggtttttagaatcttttaacttgtaatggacttttatgatgatatccatgtgaatcacacatgcatgctatgatttatcatgtgtagtaatatagtatgagaggccaatcacataaactcttaaatacaatgatattggacatgttatgttttgcatttcaaacaaaacaaagaaagaagaaatgtcgttttttgtttgtataaatccaggaataatggttttggtttttagacgcaatagagacagtatcaccattttcgttctggacaaacaaataaaattaaaattttgatacattaaaatatggttagaacttagaaaacaaatttatttaggttcataggccagtgagtctctctctctctatctctaaaagaaagagaagcaaaaaagtaaggaatgtttcctcgcaatcatcatcatcatcaccatcttcgtcttcttctttgaaacctccagcgacttcctcgtagttctctcacttatacacttactaatacagagtaacagagagagacagagtggactcttcttagagtaag

SEQ ID NO: 3601 - DNA, 3000 bp, Unknown
  misc_feature (1)..( 3000): cDNA_ID_1808145_gDNA_ID_1620653_Annot_ID_47776 3000 nt of promoter + ATG
ctctctctatctctaaaagaaagagaagcaaaaaagtaaggaatgtttcctcgcaatcatcatcatcatcaccatcttcgtcttcttctttgaaacctccagcgacttcctcgtagttctctcacttatacacttactaatacagagtaacagagagagacagagtggactcttcttagagtaagatgggaggtgtgacttcttcaatggcggcgaagttggcgttttttcctccgaatccgccgtcgtacaagctggtcagagatgaaacaacggagctttttctaatgagcccttttccccatcgagaaaatgtcgacattttgcggctgcccacgcgccgaggcaccgaaatcgtggccatgtacatcagatacccaatggccgtcaccacccttctctactctcatggaaatgctgccgacatcggtcagatgtatgagctcttcatcgagctcagtattcacctccgcgtcaatttgatggggttagtaaatctcccagatcagatttttctttctatatttagctcaggatcttgctcagaaagtcctcgccttttttggttttgctctgttttctggatttgtgcaagtagatttgaagcttctagatgcagaattttggtcttagtgttagagagaagtggactttattaagctgtggatttgtgattcacaaagcttttgaaagtttaagttgcagactcataaaatcttggatttttgctggaagagtttgtctttagggtttgtctgaatcaggatctctactgatcctttatcaaagagacaaaaagtagttttgaggttgagatgtttgagtttgattgttgacacttgacaacaagtggtcttgggcaaacattaccatttctagaaattcaagatctgttattgtttctgtttctaaaggcaagtactgaatacccaaaatgtagttctttgatgtaacaactttttggctcattcaggtataacttgggattctgggatagattggtttctcaaattagtacgctatttttttctgtcgtatcttcaagtgaacctgaaattagtagaatttacttctgtaaggttatgatttccatcttatgacattggaaaatcctctaaatatgttgtggtgtttataggtatgactattcagggtatggccaatcatcagggaaggtgagtaaccacagatcctaaagctctcttagttctgagattcaaatgttggtccatttacactgtgaacaactgaacataaatctccattttgttgcagcccacagaacaaaacacttatgctgatatcgaggctgcttacaaatgtctggaagagaattatggggctaagcaggagaacattattctctatggtcaatctgttggtagtggtccaaccgtggacctagctgctcgtttgcctcgactaagagcttccattcttcatagtccaattctttctgggcttagagttatgtatcccgttaagcgaacttattggtttgacatatacaaggtgaacataatacccttttgatttctctacatgatgttgctgataaacattcctccttcttgacaccgttttgtttgatcttcttcagaacattgacaaaattacgctggtgaggtgtcctgtcctcgtgattcatgtaagtttccgtgatcaaagattattgattggaagaattgaagttaataaagttgaacagatttgcaagatccgttcattcttgtatgaatccttgtctaataatcctcagtgttagcttaaaggtgaaagcttttcgatttgcagggaacagcggatgatgtggttgacttctctcatgggaagcagctttgggaactctgccaagagaaatatgaaccgctatggctcaaaggtggaaaccattgtgatcttgaactctttcccgaatacataggccatctcaagaagtttgtgagcgctgtggagaaatctgcatcgaaaagaaacagttctttctcaagaagaagcatggaagggtgtgaacaacctcctcgtcatagtgtagatgctccaaggaagagtaaggacggacgagaaaaaccgaggaaaagcatagacagactaaggttccagggatacaagttgagccacatagagaaaccggagaagctgaaggttccatttgaagaaatggagaggtcaaggagaagcgtggacatatacagagataagtctcagccgatggagagagcacgtaagagtgtggattggttggacagaagtcgagctaccgaatgaaaatggagggtttgatgtcaaaagattgtatttgagtgtcgttcaatttattggggtatgtgtttgtattgtagtttgtatgccaagttaaaatacaacaggaagatagatttaaacaaagtatgataacttgtctgactgtttcccacacgacacttttgactggtttttagtttatttgacaagattcgtgtgctgtcgtcttgctgttgttgttgttcatgtgcaaacttgaagtgtaatagcctgcaaacagaatctccgatctaggaaccaactaacaataatcaacaaaaactctcgatccaacctagcacagaagcttgcactcgatttgctatagtgggtggaagttgtattgtacttgtatttgtaagaactaagaaggatccatagttttttgatcaaaaagaaaaaggaaaaagaaggatcaataggcttgatgattactgattatgtagatgggtatttttattggctttcttaggcccaaacaagggatctttatgggcttttattacattggtactgtcagagtcggataagactccgaccgaattttctaaccaaagtgagtctggttcgaaaagactgcttcaatgaagccaaaactatccaataactcgaaattgactactcttttcttttgtctctgttgttgattcgcaaaggcgaagattatccatcttctcagttactcctactggaaccaaaagctcagaaccttaaaac

SEQ ID NO: 3602 - DNA, 3000 bp, Unknown
  misc_feature (1)..( 3000): cDNA_ID_1807910_gDNA_ID_1620653_Annot_ID_47777 3000 nt of promoter + ATG
tcttcacttaaatcccccattggaggcacatcgctctccactgttcgtcgctttgtaagttgattctctattttggttttatggccttatctcgttttctccattcgatttttttgattggaagcgaaagtaaaattttgacactctttgttgttgaatagggagtaggtgttgttaggatgcaagctgttgatgaagatattgatttgaagcaaatgagagacatagctgctgctaaaaagcgttgggatggtttggtaaccatcacttacatcttaaaattggaacattggagtgattatggttcatgtttttattttcattgttattcaactgttctcactattaacaaatttattgtttgcatagttaagggaaggaaaagtgaagcttcttacaccaagagaagcaggctatgctatttctctttcaaacaaacctctccttgatgttcgtccctctagcgagcgcaacaaggtacattcttgttttttaagttattaggctgcttgtttacttatccatagatgatgattgtcttgtctaaattcacccttgaacgttattgcatagaatttggttcatgtatctcacctttgcatgacatgttagtaagttagttcaaactcttggcgactgtaatgttattatgaaatcaaaactatagtgtgttactgatgtagtcttctccttcgatttttttcttttcttttctataaaggcatggattaaaggctccacttgggttcctatcttcgacaatgatgacaaccttgacgctggaactctttccaaaaaagtcactagttttgctatgggtacttctccaccattataagttataacctgttgactatagtgacattggatcaattcattattattccctactattatctatatttctattgtatatcattgactaatcccatctaggatagagactagaacacttgaatacacgcatttattaaattctttttggttcttgtaaaaaattttggttttgatttcaccatgtttccacttgtacagggggatggtggagtggagcacctacactatcttttaataggtatgtctgcgagagtaagctgaccttcttctttgccttttggcatacttacttgcttcttggttttctacttcgtttgcaggctcttcttgtcaaaggttgaggagaaattcccaaaagactcagagctgattgttgcttgccaaaaaggattgaggtacttgaaatatagatagataatgagtgactaaccatgcttgaaatatgtggttactttatattataatgagtaagtggctggttaggttctctgcctatatattatatattcatagaattgcatggtgatttatccaggttttgggttgaagaagtatcattatcaaatggtctcggttcttgtggaatgaaaattagtcttatattgaaagttagtatgttgatagtataactgtgaatcacagggttcatattgttggatgatcctcaaatttatgcttgactcgtaaatattgtcagatccttagctgcttgcgagctactatataatgcagggtatgagaatctgttctgggtacaaggtggtttagaatctgctcaagacgaggttatacgattgttttaaactttcggttttgtgctttatactttttcagtttcgtttctgaattgcaagattctacaacatcgataactaattcattcattatgtgatagcaggatctagtgacagaaggtgtccaacccttgaagcttgctggtattggaggtttttcagagttcctcgggtaattctctcttttgctactcagactttctcatagcttgaaaagtaaaagtctcaaaagacaatgaggagaataatggataggcctgtatttatttataatgactgtaagtcaatagcctagctctatcttgtacatcattagcagcatttggtattatgctcatacatctttttacttgcagttggacagaccagcaaagagctcaagctgcgaaagaaggttgggggtaccgtttggtatatactgctcgtctggtgagtttttttaatcaaaatctcttgtagcttctttcttttgtgaatcatgttcctcatgactgcttctctcatgtcatgtttgtagtttggagttgttctggctgctgatgctttgttcgttggggctcagcaactaggccattatattcaggagttaagaggccattaggatctctctttaaccacgctccaagtggctatatttctcttcaacaaaaaaaaattgaaaagttttggaaggtagagtagttgaaatagatcaaaaatacatctttgaatcctgaaattccaatggcaaacttaccctttgctttataccaagatccgtattatccaaagaataatttgcttatataaaaaagaaaattcgttgacgaaaaaaaaaagaaaaaaaaaagaaaaaaagaaaagaaaattcggcttaaacttctagtagacaaagttaaataatctaggacaaaaattgcgactattcgagtttggtccgaaatcgtaagtaagagagtttggtcgggacgaaaaaaagaagaagagagtttggtccgaaaaaaaagttaattagagagtggaatattcgacccgcggaaaaaaaaatctttatccaatttaaatgcgtgtcgttttactagaaatatgaagcacttcttgttgtttcatcgtctggaaagtggaagcatattctctctcccatcaattattgagccaacccaactatggttaaatccagcacagttccaactaacccaggttataccggttgattacacgtggacggtggagatttttctgactgcttctctatcgcaatttgctattcctctgcttaaaaactagggttaggctacgattctgtttacaccaaaaaagcttttcgtcatcgccgtttggctttctgaaacaaatcacaccgtttaagattttctctgattctgagatt

SEQ ID NO: 3603 - DNA, 3000 bp, Unknown
  misc_feature (1)..( 3000): cDNA_ID_1821310_gDNA_ID_1620653_Annot_ID_47782 3000 nt of promoter + ATG
agttggggtctgtttcagttccaagcctggatatcaaagtgtctggtgattcgtctgaacaaatcagttccttcactaatgaagagtctcaaaacagagctaaaaacaactggaaatctcaacatgtgcgtaggactcaaagaaactcactggtaaataagcctgcagagaaattttctggcaacaatgctgttatttgggctccagtacatccacagcaaaaagctgatgtttccactggtggagggagtcagactactgtccctgagtttggcacctcttcaaaaagtcagcatcaaggacagactagttctaaaagcaaaagagtggaaattgaaagatatgtaccgaagcctatagtaaaggaaatggctgagcaaatcgtcagtaaaaatctagtaacctctgctccagatatgtcggagaatgtaaaccagaaagaaaatcgtggaggtgagggtacaggaattctccaaccttctggttcaactgcagggaaatctgggtctccttcaaagtcaagacatgggaatggtaggcagggaaagcatggtagagaacatgcatcatggcaccagagaggttctggagcacctactaaagctttggaggatggacaatttgtaacctcaaatcagcccatccgaggaacagtgaactatcactctagtaagcaaaccgaacaaattgctgccaaggatcaaaccacatgtaataaggatggatggaacgatggctggtatatgactcctgaaacgcattactctgctgccgaagaaatggaatccagtgctgttggaaaagatcaaggaatgagcatgcacggcaggcagcatgcttcaagaagcaacaaggatggaggaagcaactatggtgaccctaaaaaaggcaataagagggatttcaataaagctcatacgcagcactctggccatgggtttagccaaccagatttgcctgctgcttcaaaagaaggtcgtgtccctggagatcatgtgtggcatacagctaataggacaggtaagtatggtggtcgtgaaagtacaagggacaaaccttatggatctcaggaaaaaaatgttgttggatacgagcatcaagggtttactacagaacaaaaaacgacatcagctgatacacaagcccagttgcaaaaccgatctaccaataaggaggtccaggttgagcaaaatccgaatagtatgttccaaaagaacacagggcagggtcgacggtttggaagagggcaggagtcacaaggaggttggggtttaccggcgcaagagaatatgcaccatcaccatcagaggccaccttcaaacagagatagacagaagcaaaatctgcattatgaatacaaacctgttgggtctcatacttatgatggagaacgtagtcgagaacaatcgaaagagagttctcagacagaaggtccaagatacagagagaagggacaggggcagcaaaggcagggtggataccaacagcaaaggggtactagtgggagaaacggtggtcatggattcactggtgatagaaactaagattggcctcttattgttatttaggtagtaagagctgccatgctgaggatacttgcattttgagatatggcgattgaggaagctaattcgtaggcacatagcttgggagattgctgagaggagacctatccgaggaggtattggcagattaaaaaaaaaaagtctttgtcttgagagtttattattatatgtttcagtcacttgtttgaatatgattataactactgtagtagccttttgtatacactagatgaatactcatgagtatttttgtttttaaagttgcttaaaaaaatatgattatgttttttggttgattttgatgttcattttgataaattcctatctatttaatataatttttttattttatgattagatttatctataactcgaaatatcaattctagtataatatatatatttatatctattattctaatattttattgtcatgatcacatataaaaacaatatatgatatattgatacaatgtatgcgttttgaaacttgtctaaattaattgtacaaacaattatttattccatatattctcttgtcatcaactacacaatcacatcatgatatgctagtaattcaagtcacactttaattcttttcacttgcatatagccatatagaatctcatatttttttttttgtatgtcgaatgtcgaatgtctcaaatgactattatattataaaattgtatatcaatgttactaagttattagaacgcaccaaaatgtacagaaaaagttcatatgataaattatattcacaaaacgtaataataagaaaatatctaattaaatttactaaatttatatgaggttaggtagcaaacataagagttttaagagtttggattttggaattggtggtgtttgtttctcaaacttcataaattagagtttaaaatgtttttttattttttgtggtcggcataagagttgaagttttaataaaataaaatagtatctgatcattttattggagaaaacataaaagatgtagtattttataagaactcgaattggtcaattttcaaaatgttagtatgaaaaataaaatatctagttatatgtactcgtatctcttgatatttttggctttaacttagggatgttagtttgatttgtctttctggataagccagtagtaaccaaaaaagtcaaaatcttgttggctaagtcagaaattaattaaataaacaaaagggcccattaaattaattattttaataaatattctgtgtaatgatatatagtataaaacgcgaccgtctaaattcttggttgtttacgagaaaagcggattacgggtacgcttcttctaagataaatctctccccgattctctctttttctcgctagatactctttttcttcaattagggtttcttctcgcttgccttttaattctctccagctgatctgatctccgttaccgatg

SEQ ID NO: 3604 - DNA, 3000 bp, Unknown
  misc_feature (1)..( 3000): cDNA_ID_1821306_gDNA_ID_1620653_Annot_ID_47783 3000 nt of promoter + ATG
agagtaagtagaaacttacaatttgagattgataattctatcatcgtcttcttcaatcttgctatagttgcaagatgctgaagacaacgaagaagattctgaagccgtggtggataccacgggccatatgctaacatacgctgttctgtcccatgaatctcctcgttctctatcacccttcaaaatctttagaatcaagctgaagttgatggccaacgagaggaccaacatattcctccaagaaagaaacctcggaatctgtcccattttctctcaaaactaaaacacaaaaccaagaaacaagaatgcaaaatgcttaaagaagaagagcagagtgggatagctggataaagacctcttttaaaaaaaacaaaggaaacaaacaagtggtgtccaacgagactgatcctttttttggctgatattcgaagttatgatttttgtaagagattaaaataacccttgaagaatctcaagagataaaggtatgtataacaatgtgtttatattggattacgaacctaactcatgtacttaactcataaatattaccaatcacgattttaagaaattgaatttttaatcctagtagacaaattctaaactgagactacctatcaaaatacctgtagaattgcaggcagaggatcaaaaggtcacagaacaaattggccacagtgaaaggatcgctagaaggctttttatatgtaaactgaaaaagaagaatgtgtaattaggtcgaagctctttgtttgtttctctccacgataaaagatatttcccattgggaaaaagttattgtattttggctttggcgtgaagagtttcagcttttcggtttgtcaatggcagaccttggaaacgacagtacatgaaccgagtgagacactgaatttattcaggatctctgtttactagtacaagactggtgaatgctttatgtgtaacaatattttctagatttacgtcacttctctgttttcacatctaattagattagcttaaggctcattatattgactatgtaatattttgccctatatatgtttagtgtaatttacacatttggacaaaacgatttagggtgaaattgttgtaataacatattttggggtgttgattgtgaaagtaacaaagagaagaaaataatctctgcaagggtaacattaaaatagataaatgatccatggaccaaaatctacatattgccacggcccaaattgttcaagagtttagcaaagatcatatgggctggatccaagaggtttattatatttggtcattgttcaagtatatttgtttttttgttttcttttcatacattactgtttattgaatatgattctatcaaaggtgaagttgtataaaatggggtgggatcatcatttgtaagcattcaagtgtctcgttctctaactttcttaagtttgttggctttctctctaactcttaagtatcaatttggagaaaagcacgaaaatttaaaatatgctaagactactcgtaataaattaataaaaatcaaactatgcattatctaaaatcttctgtatataaaatttacacaaaattttaaaatttgaaaaaaaataagctagcgttgagctcaaatccgctcaagatcatcctctagcaccatgtacacagtgcatgtacgaacacttccaaccctcgattacaaaacaccggattaatatatgatctttccttagaatgagtgtactccacaaagaaacatgagaggtttggaagataaacataagcattacccaaaaaaccttattcatttgatcatgcctgccatcgtcttacttccctaaacatgtccttaaaatgaagaagtgaacctaccacataattcaatttctcccccatttttaacattcgtaaaatgtaaaagaaaggaaactattttgttaagtattgtttttatggctatcctttttttttttttttttgtcaaactatggctatcttttaaaatgggtaggtaaatatataaatgatgttaatgaataatactactcttttaatttatatatatatttttgttttttggagataggtgatcctttattcgctctattttattttaatcggcattcattttacaattcacaggaaaaaaaaaaagagagagaggaaaagctgagtaaaaccgtgcagccctgaacttcgacgctttctcctctttcaaccaatccgttgaacgtcgtcgtaataagcttcatcttcatcaatcatcatcactttcttctttctcccacagatccttccttttctccttcatcttccccttcttccttttccctcatcgcccaggaacacatccgatctgcaccctcttcgttcgattctcacaattaatatctagggtttgcgaggaccccccctctctattcaaaaaaagagagcagattttctctataatcccctttggtcagtttcttctctacctttttttcccctttgtattccagaggaatcgagtgatgagtttatagaattatcgcattttgaagtaatttgggtccttttgtagagcttgattgacatttctggagacatttgtatgtttcagagctctttttttgttgctgttgttgttctagcaagttgattgcgaaattgtcaacattctgggaatacgtcaattgtttttttagtattgcggtcatttagtctggaacctcttttgattccgcagtttgacgatctttcatacttttaggtttctgtaccaatttgattgtcgaacattgtctttctgttatgatggtgaattttagaaagtatttcaattcatgttggagaatttgtataggcagtctgattctgcaacacatttcacggtagcagtgttatagcaatagttcttcagtgtcggtcttgtttgattctttgggatttgagcttcaaatttcatttgtgaatctgattctgtatgtgacttacaggtttcaagtggtgtaattggatcgtgtagctgcttttataatg

SEQ ID NO: 3605 - DNA, 3000 bp, Unknown; identical to SEQ ID NO: 3597
  misc_feature (1)..( 3000): cDNA_ID_2999594_gDNA_ID_1620653_Annot_ID_47787 3000 nt of promoter + ATG

SEQ ID NO: 3606 - DNA, 3000 bp, Unknown
  misc_feature (1)..( 3000): cDNA_ID_1821290_gDNA_ID_1620653_Annot_ID_47788 3000 nt of promoter + ATG
acaagattcaaaaaggtgagctaagtaagactctgcatacaactatctttccagcatcagaaatttccaaacaacactcaaaaggtgatctaagtaagacactctgcataaaactatcttttccattacgatcataatgccaaacaaggccggtgggatcaaaaactgacctttccagagattatgtcgtcggagaaagcgcaaatagaatcaagtgtgttctcgatcaaggtctttaaagtaggcttaggtgcgagcttagagttcctaagccagtaatgtccaaccattcttccttcatcaggattcgctatagaccctttttcaagatcctccatagccttaaacgcagcttgaaaccttggctccatttcagccacaaactcatcggtaaatccgacccgactaatatccagatacaacccaagctctttctgctgataaaaccaatcgaggtatcgcttccacaacgcatccggatccttaagaagctctttcttcgaatccgcatgagaaatgtcgcgtgccacagaacgagccgaggagagagtcaacggtagattggtgggtttggaggtatgtgggaaagagaaggaatctcgagattgcgccggcaatgctttaaaggaatggtttttggcaggtttgagagatggagaagaagagtataggcctgagagagaggccatctttagagacagcgatgtttacgagggaagagagacagtcaacaatggagagagagagatagaaagagaaagggtggagctttatattggaggattcgtatagtttattccgatttgattgatattttttgggaggaaccaatgaacagagatgagtgcgggagagagatttgtcctttggtgggagcgagcggccctgcttagattaggtaggcttcacaaagcttttatcactcttattacgactatgtatatatattattgtctcaattggcatcatattctattttatttcacgtggcccgccattttcagatgttttgttttctattcagaataactaccactcttttgagctgaagaacataaactagcacttccaaccgtatatgctataaaatgaatggtaatgtggttttaaacaatttgtatgtgttttggatgaaattatgcgtatgttaaaatgttgattgggagtagggttgttcttcaaagaacttcgagtttacaagctttcgaaaaaaagattcgacatctaaaggacaaacgagactaccattcttggtgatctaaagagtaatatccatggagtatgctgatttagtcgggttgctttatgtgttcaacatatgctagatgcgtggatgtcgattgttgagcgttgtcgcatagcttttgatgataaagataacttttgtgcttattgacatttctatagttctccctaatctacatgatagatctcaataaattgttaaaaaaaaaaaaaaaaagaattttgaaagaaatgtgatatatcatatagattagggagatctatagaaatgatacgatggtagcttttcgaatatttttatgtcgccgagacattttaagggtttgactggataacttagttaacgcaaacaaaaagataaaaatgtaattacgtcggatcctgttaaagtttctactaatcatgatgaaaaatagagattatattcctttcattttacgtgcaaaacctagaaaaataagtaaataattacgctaaaattaaaaacaattcagctgctttttgtttattgtttccacccatttacatataaactaggttttaactcgcggtttaccgcgggcaatcaatttatttggttcttatactaaatatttgaataaatttgatatcttaaacttataaatataaatttctagtgattagtgaagaatcgtaataaatggtttggatattattgattattgatttcgtgattgaatatactgtttttagagatgaaatgtgattatattttgatttcaaaaacgacatagattccttatttttgttgaacggtttagattgaaagaaattaattttattaaacggtttagattgaatcggatcatataaagtttaggagattgttaagaccaaattagccttaataattttgaatagcaaagaataaaatccaaaattgaaatcaaaattgaggccaaattagaaaaaaattcaatttgtacttcccttttaataataaagggatttatgtttgcaaggtatacatgtcatcatctttaaataatcgagaattcgtttgtaaaattttaacattaaatggaattttcctcatctctacaatttatttttaaattacaaactttcaaagttttattaagtgtctattcaaacatgtcaaattcttggctcattgagaaggaacaggttcaaacaattcaatagaattagtcaaaaccagttgatttgcgatcataatcaattgtaattgatagtcaattgaaagacaaaatggacaatgactcaaataaatggtatttggttgttttcctacaaaaaaataatgtatcccaaaaacaaaaaaatcaccaactgaaattgtatagtttgcacgaggaatgaaatctgacacaaaatgcgcagaaaaattgaggacactaattgtaatttgtggtttaggagataaacatgattacgtcataatttaaaacaagagaaaggcagacaaaaacgtttaaacataaaaaaataaaaataaaaaaaaaactcaggttattcgctcgttcgtcttcgtcgcccattgaaggaggtcagaccagaagtcgcacgcgagccttataattgtgtaatccttagggttttgctcgcgatttctggtactattaggtttccgtcgatttcttcgtcgggataaaaaccctcttcttcgccggagggagaacacggcgagaattacacagctatccttcgaattccgtcgctggttagcttaggactttctgattctgtcgctttaatcttcttctctccatg

SEQ ID NO: 3607 - DNA, 3000 bp, Unknown
  misc_feature (1)..( 3000): cDNA_ID_1821286_gDNA_ID_1620653_Annot_ID_47789 3000 nt of promoter + ATG
ataaaatcagaaatcaaatatttacaacaatgagatatataggactatcagattgggtatcggagaagacttacataaatagtgaaaagaattgctaccaccatgatagcatatcccgcattgtagggagagaactcatggcgaaggtgccttgctacaaatacacagaacaaaacaaccggaactatgatcaatagcaaggtaagaggcagtgacctagcatctggtccaaatatcaatctcccacccaggatgaatttctgcaaaagagagagggaccatttattggtatcaccatactgaatttaaaacatgtgaagagtcaagcattgaagatacttccaattgttaataaattacaaggaacattcaacttgatacaaggttatgcaaaaatgcatggtcatgctttgagagtgaatcaagagatacttcaacgattcagctcaacaacattagtttacacgtaccaaagtaaaccaattgcgtaactaagattatgctacacaggtgaaactcgagaaaaaacgaattccaaatcatattcataccagagaacagaattcagagaatattcatctcccaacaaagagaaaacacacaaaaaaccaataaaattccaggctcaatcattcgatgaaaaaaggacttacattgcttcctttccagacttggaatacccgttgtgtcatggagagaagaagattaaagcgacagaatcagaaagtcctaagctaaccagcgacggaattcgaaggatagctgtgtaattctcgccgtgttctccctccggcgaagaagagggtttttatcccgacgaagaaatcgacggaaacctaatagtaccagaaatcgcgagcaaaaccctaaggattacacaattataaggctcgcgtgcgacttctggtctgacctccttcaatgggcgacgaagacgaacgagcgaataacctgagttttttttttatttttatttttttatgtttaaacgtttttgtctgcctttctcttgttttaaattatgacgtaatcatgtttatctcctaaaccacaaattacaattagtgtcctcaatttttctgcgcattttgtgtcagatttcattcctcgtgcaaactatacaatttcagttggtgatttttttgtttttgggatacattatttttttgtaggaaaacaaccaaataccatttatttgagtcattgtccattttgtctttcaattgactatcaattacaattgattatgatcgcaaatcaactggttttgactaattctattgaattgtttgaacctgttccttctcaatgagccaagaatttgacatgtttgaatagacacttaataaaactttgaaagtttgtaatttaaaaataaattgtagagatgaggaaaattccatttaatgttaaaattttacaaacgaattctcgattatttaaagatgatgacatgtataccttgcaaacataaatccctttattattaaaagggaagtacaaattgaatttttttctaatttggcctcaattttgatttcaattttggattttattctttgctattcaaaattattaaggctaatttggtcttaacaatctcctaaactttatatgatccgattcaatctaaaccgtttaataaaattaatttctttcaatctaaaccgttcaacaaaaataaggaatctatgtcgtttttgaaatcaaaatataatcacatttcatctctaaaaacagtatattcaatcacgaaatcaataatcaataatatccaaaccatttattacgattcttcactaatcactagaaatttatatttataagtttaagatatcaaatttattcaaatatttagtataagaaccaaataaattgattgcccgcggtaaaccgcgagttaaaacctagtttatatgtaaatgggtggaaacaataaacaaaaagcagctgaattgtttttaattttagcgtaattatttacttatttttctaggttttgcacgtaaaatgaaaggaatataatctctatttttcatcatgattagtagaaactttaacaggatccgacgtaattacatttttatctttttgtttgcgttaactaagttatccagtcaaacccttaaaatgtctcggcgacataaaaatattcgaaaagctaccatcgtatcatttctatagatctccctaatctatatgatatatcacatttctttcaaaattctttttttttttttttttaacaatttattgagatctatcatgtagattagggagaactatagaaatgtcaataagcacaaaagttatctttatcatcaaaagctatgcgacaacgctcaacaatcgacatccacgcatctagcatatgttgaacacataaagcaacccgactaaatcagcatactccatggatattactctttagatcaccaagaatggtagtctcgtttgtcctttagatgtcgaatctttttttcgaaagcttgtaaactcgaagttctttgaagaacaaccctactcccaatcaacattttaacatacgcataatttcatccaaaacacatacaaattgtttaaaaccacattaccattcattttatagcatatacggttggaagtgctagtttatgttcttcagctcaaaagagtggtagttattctgaatagaaaacaaaacatctgaaaatggcgggccacgtgaaataaaatagaatatgatgccaattgagacaataatatatatacatagtcgtaataagagtgataaaagctttgtgaagcctacctaatctaagcagggccgctcgctcccaccaaaggacaaatctctctcccgcactcatctctgttcattggttcctcccaaaaaatatcaatcaaatcggaataaactatacgaatcctccaatataaagctccaccctttctctttctatctctctctctccattgttgactgtctctcttccctcgtaaacatcgctgtctctaaag

SEQ ID NO: 3608 - DNA, 3000 bp, Unknown
  misc_feature (1)..( 3000): cDNA_ID_1821282_gDNA_ID_1620653_Annot_ID_47790 3000 nt of promoter + ATG
tgcagttggtctgcttccagcagcactacaggtaatttgtacataagcgtaaactttctatgaccattctttgttatttacacgaaagcattgtcatcatataggggattaatgttagggagatgcttactggtgctgctttaatggatgaggctactaggacaacttcggtaagtagtacttattgcagcttgtgttgaagatgagtttacttaccaggttttagtagaatgtcatatcatacggttgggtttcctgactcatacactttagatagtctctaccatgactcactctagcctgtaaatttctttcttctttcagatcaagaataaccctgcagcgctcttagctatgtgttggtactgggcttccaatggcgttggttccaaggtgtttttcctcaacttttttgagagttctaaggctatcaaggagattgagttcttattgaccttattactctattcttgctttcttttacaggatatggttgtccttccttacaaggatagcttattgctatttagtcggtatctgcagcagctggtcatggaatcactaggaaaggagtttgatcttgacggtaacactgtaagcatactcttcaattttctctgcagtaccccaaatcaaagttcatgagcatttactgagaactgagaaggtgtaaattggtcttgcaattaatgcccactcttataaatcagaagaccttggttacttaattacttgtgcacatgattgagttcagtttgttaccactccttcatggaagaattgaaacttgtgtactgtttcctcgaccctgttattacgagtgtgatcccaaggaccggttctttgaatttgcaggttaatcaagggttaactgtgtatggaaataagggaagcacagatcagcacgcgtgagtttcatttattcatatagttttactattgagagagcatagcaaataaggagctttttaacagtatttaatttgtttatttcattagctacattcaacagctgagagatggtgtgcacaatttctttgcaaccttcatagaagtgttacgggacagaccccctggtcacgattgggagcttgagccaggtgtcacttgtggagactatctctttgggatgctacaggtctgatttatgaatctcgtttcgcacaaattagtcagagataatatacactctttagtaacactatatatggtgaatttgtccagggaactagatctgctttatatgcaaacggtagagaatccatcagtgttacaatccaggaagtgacaccaacatctgttggggctattatagctctttatgaaagagctgttggtttatatgcctcaattgtgaacataaatgcttaccaccaacccggtagagatattcctcccatatctagaaaccgatgttctgtaattgcctaattgatatttgtttactgaatctgaataaaaaacgatttcaggtgtggaagctgggaaaaaggcagcagcagaagttctcgccctgcaaaagcgggtattgtcagttcttaatgaagccacgtaagaatcagaccgagtccgcttctttgtcaaaaaatcttgtctcgactcatgagagaccacttatatacttctttctgtggctgcagttgtaaagatccggtagagccattgacactggaagagatagctgatcgttgtcatgctcctgaggaagtaacgtccaaatccttgaaacttgttttttcattggtaacttttcgaacgcacgtatcaagaagtttttatctttgaatatgcagatagaaatgatatacaagatcatagcgcacatgtctgcaaacgacagagttctgatagcagaaggaaactgtggatcgccacgaagtatcaaagtgtatttgggcgagtgcaatgtggatgacctgtacgcataacaaaacccaacactttctcaaactccaaactctcattctctccattccttatttctttctgccatgtctatgattttgaaaaagaaaaagattgcaataagagccaggaaacacttgtgtacttgttttgaaataaagataatttcagaatgttacaaatgttgattgtaatgataacattggagatagattcatcaatcaagcaggctcatgtgaaacaatgatctcaacactcttctgcttgttttttggttaggtgttcttttgttgcataaacaaacaaaagcttaagctaatcagcaggttagagatgctcaacaacttcctcccatgtggttagattgtatcaactatagtttcttcaattaaattcacttctgaattttcttagaaaaccccattcagatctaaccaagataactctaaatatttaattttccataataacttttcacttgccacttttgaaattcgaatggaatatgttgacaaaagaaaatggtagatccaccgtaagaaaacaagacataagtcgagtcgattgtccccaccaccacctatttagtagcctaccataacaacaaaaaaattataacgttacaatcccttttatcaattttcaaaaccaagatgttgaatcgctttcccatgtcatcactacccgttatgccatagctcctatcaagctggtgagcgtactaaacgacaccgctttggggaggtcttaccaactcgattgcttttcctctctaccctttcccaaatttgaattcccaattttttcaaaatcaaaagtaaatactaacaaaaagcaaaaatatcaaaaaaaacaaagaaaaatcattttgaagtgcacagatatcaatcgtctctctccctctctctctgtgagaaagctttctgattaagctttcgtcgtctcctccattgcaaaatctagctcgatctgtgaaggtttctctgagttcttcaaaaatctcttctagagaaagacttcattagctcaattttagcaacttcctccacctccttttactcacactgtgcttcgatttcaacttcgcatttcaca

SEQ ID NO: 3609 - DNA, 3000 bp, Unknown
  misc_feature (1)..( 3000): cDNA_ID_1821278_gDNA_ID_1620653_Annot_ID_47792 3000 nt of promoter + ATG
agcaagcataatggtttaacctgaaaaggtaaaactctcaagtcttaagtcaatgatgcaataattcaattccatatttccattaatcgatcggaatgagatttgctcgaaagaaaaccaggacatgcctaatgattacatgaatgctcatcatcgcgcaacaatgaccaatggagaagacagaaaatgcaggtaattgtagccaaaaacgagatcagaagtgggattgtgaacaagtaatttctcctgcttcgcgttccattacagaggcaattcgatcaaaaagcaaataaatatctcattaagaaattaccgtgttgccaccacgggaacgcgagtctgtgtttccagactgcgcaggaggaatactgcaggtgtcaccctgagatcagaacaaaaacaaacattgagcaacattggaagaagaagaagaacaacaatcgggtctggagcgagatgaatttccaaaaatagagagacgcacatgaggctcctgctcttgttcattggcaatcggtggctgctgctgctgttgttggtttggctgcacatgaggaggaggctgtgaagatgattctgcgtttttgttagccatgaccgcggttcacgccattgacgtgcggcactataaacccaggaaacaaaaagagaatgtccgatgatcaaattcgaggaggaaaacgcagtcgtatctaactgatctcagatcagagaagcatgaattcgatcgagaaacaaaccttgatctgggaatgatagtaaaaaaaaagtatcaattaaaaataaaaatagcgaaaatggtgttttagggagagaaatggtgagagagattttggttgtgaatggattgattgatgagttcaacggcgttagaggagaagaggtgaagcgaaaaaaatggccgaaaaaagaggaacctttgcttttattttggcagttgtacacgtcatcatcttccccccttccttggagggaaattttccctctttctccccctttgacctcttccctcttctctcaaccattatttctcttataccgaatttatattaacactcttataattactctctactctatagttttatggattatatgctacttaatatgtcttagagtcttggcaaaataaagtttaagacattaatttagagtaaataagaatctctctttctctttgtaataaaaaatggtaatggagatgacaaccttattacaccttgcattgatttgaccctctgacctcagtaatatactgaatcgtgctaagcacgaccatccaccactctctctgtttttgtttgtctgatttgttttgcttatgatatgttattggtttgaatagtttaataaatctacgtgatccatttgtttatctttgtttggataatgctgctgcgtgcatggggattcgttcattcgtctgcttttcgattaattttaatttttttttgtttgatggttgtttcaatattaattgactattcatccaacaatcttcttcttcgtttcaattactatgcaattcatataacttatgcaatctagatttggatatagcatcgatcttgtttgttggatgtccaagcgcaacactaatgcctcaaatggcaatgcgttttaggtgtacaagcgagcgacctaagtgtatataggactgtcatatcatgaaattactagtgttaagttaaattagtatagtcaccgctttccaacatatccaccaccccctactcgtgttcccttgcaagtaattaacaagtgtgatttgcgtagacgcaccaaaaccgaatcacattaatgtaatctgtagtgatcaaaaaacagattgggtgacacttacagtatgaattcacctgattccactaaaacttgagcatttatatggcacaaagtgttttgataagtctctttacttgttcttattggaaacacttaacaacgacattgagttcaaacatttttttttttgctaagagttcaaacattggtttctatgacatatctctaaaatggtcaaagactacgatgataaacataagtacataacataaccatctcgatacatgggaattaatgatagaatgtgaaaacaaaatccaatttgtaaggaaaaatggcgaagtagtaagaaagcttaaaataaggaatttcacataagagatgagttaatgcacatgtacaagacatgtttatgctaattagccgaagaagtacaacgatggtgagaataaatcttattatttaagtataattaattttcctcagagatcgtcttcaacaagttttaaaggactttatcaactgctactgatcaatcatctactcaaggagaaatggagaatagtacacactacacaaactattgtctatgactctatggtgtatagttcacatcagagacaaaaaaaaaaaaggaaaaaaaaaaaaagaaggtgaaaacaacaagagatcgttgtcataaaaaatagtaacaagttgttacttcttgcataaagttgtgatgtatgtaaaaaatttgacgtcttcgttgtgtttgtcaccgtcactgttacagctcccgtcaccgtgggaatattttatgtatgccaaatatgccatctgtattccataacacttatcgagattttaataagtactcaattgctttctgattaagtgttgatgattatggtttttattgtggttaagtatgctgatttcaaaattttaaaaatcaagaatacatttctaaaaattatatacaaaataataaaaatatttaaaatcaattaaaattctttaagatatatataaagcaatatttgtcccaaagattgaatagaatctaatttcagcaaatttagttgcttgttgtcttacgagtcacgactctccttttcccctttttccggtggaaataaaacaaacaaatattgtaggtcgcaattgtggaggagaaccatcaaattcatcttcttctctttcacaaatttcagcctaaaactttccgattccatg

SEQ ID NO: 3610 - DNA, 3000 bp, Unknown
  misc_feature (1)..( 3000): cDNA_ID_1821274_gDNA_ID_1620653_Annot_ID_47793 3000 nt of promoter + ATG
ttcactaactacatcccaagagctactatcttctgcaaattcaacagctagcttatatagttagttatctctacaaccaaattacacacacattggcaatcttattgagtagataaacaaagctgaaacatcttaccagcaagaacttggggaactgaaacttgagctaattctatcttttcacgaaagtcattacattcaactctagatttgatgagatcataaaactgcacataagaaaacagatcacagaatcatgaaattgagcttctatattctaagttgagctaacatcgatcaaaatcctacgaaacagagagattaaagtaataaaaaagcatactttatcagcttcaggatctcctggatcggaagcagacggttcttccctgtccgattcttcctcctcctcctcctccggtgattcactctgttcgccaccgttttcatcgccgggaagttctagaagctcaagagctctctggcaatccgcgagcagattctgtaacgtctttcgctttacacgaatactatccaaatcgatgcggtttcctttggtttcggcatcatgagtcgagcaagagacttcgatttccatggaatcggaaagttttaggctgaaatttgtgaaagagaagaagatgaatttgatggttctcctccacaattgcgacctacaatatttgtttgttttatttccaccggaaaaaggggaaaaggagagtcgtgactcgtaagacaacaagcaactaaatttgctgaaattagattctattcaatctttgggacaaatattgctttatatatatcttaaagaattttaattgattttaaatatttttattattttgtatataatttttagaaatgtattcttgatttttaaaattttgaaatcagcatacttaaccacaataaaaaccataatcatcaacacttaatcagaaagcaattgagtacttattaaaatctcgataagtgttatggaatacagatggcatatttggcatacataaaatattcccacggtgacgggagctgtaacagtgacggtgacaaacacaacgaagacgtcaaattttttacatacatcacaactttatgcaagaagtaacaacttgttactattttttatgacaacgatctcttgttgttttcaccttctttttttttttttccttttttttttttgtctctgatgtgaactatacaccatagagtcatagacaatagtttgtgtagtgtgtactattctccatttctccttgagtagatgattgatcagtagcagttgataaagtcctttaaaacttgttgaagacgatctctgaggaaaattaattatacttaaataataagatttattctcaccatcgttgtacttcttcggctaattagcataaacatgtcttgtacatgtgcattaactcatctcttatgtgaaattccttattttaagctttcttactacttcgccatttttccttacaaattggattttgttttcacattctatcattaattcccatgtatcgagatggttatgttatgtacttatgtttatcatcgtagtctttgaccattttagagatatgtcatagaaaccaatgtttgaactcttagcaaaaaaaaaaatgtttgaactcaatgtcgttgttaagtgtttccaataagaacaagtaaagagacttatcaaaacactttgtgccatataaatgctcaagttttagtggaatcaggtgaattcatactgtaagtgtcacccaatctgttttttgatcactacagattacattaatgtgattcggttttggtgcgtctacgcaaatcacacttgttaattacttgcaagggaacacgagtagggggtggtggatatgttggaaagcggtgactatactaatttaacttaacactagtaatttcatgatatgacagtcctatatacacttaggtcgctcgcttgtacacctaaaacgcattgccatttgaggcattagtgttgcgcttggacatccaacaaacaagatcgatgctatatccaaatctagattgcataagttatatgaattgcatagtaattgaaacgaagaagaagattgttggatgaatagtcaattaatattgaaacaaccatcaaacaaaaaaaaattaaaattaatcgaaaagcagacgaatgaacgaatccccatgcacgcagcagcattatccaaacaaagataaacaaatggatcacgtagatttattaaactattcaaaccaataacatatcataagcaaaacaaatcagacaaacaaaaacagagagagtggtggatggtcgtgcttagcacgattcagtatattactgaggtcagagggtcaaatcaatgcaaggtgtaataaggttgtcatctccattaccattttttattacaaagagaaagagagattcttatttactctaaattaatgtcttaaactttattttgccaagactctaagacatattaagtagcatataatccataaaactatagagtagagagtaattataagagtgttaatataaattcggtataagagaaataatggttgagagaagagggaagaggtcaaagggggagaaagagggaaaatttccctccaaggaaggggggaagatgatgacgtgtacaactgccaaaataaaagcaaaggttcctcttttttcggccatttttttcgcttcacctcttctcctctaacgccgttgaactcatcaatcaatccattcacaaccaaaatctctctcaccatttctctccctaaaacaccattttcgctatttttatttttaattgatactttttttttactatcattcccagatcaaggtttgtttctcgatcgaattcatgcttctctgatctgagatcagttagatacgactgcgttttcctcctcgaatttgatcatcggacattctctttttgtttcctgggtttatagtgccgcacgtcaatggcgtgaaccgcggtc

SEQ ID NO: 3611 - DNA, 3000 bp, Unknown
  misc_feature (1)..( 3000): cDNA_ID_1821270_gDNA_ID_1620653_Annot_ID_47795 3000 nt of promoter + ATG
tataaatagtcgccatcatcatcatcaataaaagaatggtatcaaaaatctcgaagcagcttcctaacttgctccaacgtaacgaagagaacaacagtgaaaggaccttgcctacaaactgtaggaacaaagcctttataaagagccatggctccttccgctttaaccgtcttcaccgcacaatcccacgcgccgtcgtacgctcccaccttcatattcatcactctcgtctttatcacatccaccggattagacgcaaccgaagcaacaaaccccgccgcaaaactcgctaccacgtgagtccctagcccatcattcatcacaccattctccaatatcccttccttgaactgatcgtaagacgctagctgagccgccgtcacaatcatcgctcggttaatcgtcaacgccgagcctcgccacaagctcgttacgccttctcccttaaccatgctcctgattgcgtctcctactccggcgtagttacgacgttgcgctaaaggtaacctcccgtcagcttgcatcctaaccatcgccacgtcagctggatttccaacggcggctccgattccaccagcgactagccctgcaccgatcttcctactcagattcaacttccctgactcaggatcagtccatttgttcttaagcacttcgtatagacccatcctggtggtggaatataacgtctgacggagaagtgtagcggagactcctgagaataacgcggcggcgccttccgatttgactatgttgattccgagtgagatcggtcctactttggggactgaagaagtcgtttccaggaaagctgcaggagaagaattggggaaagcgagagctggacggaggagagtgacggtggtggtggaaggtgcttcaccgtgaagctgaagacgaaccttgattagatcgagagggtgagtagagcaaccggcgattacagaggcaatcccaccttcaacgaaacttttgactcccattgttgtgaaattggagagagaagagagaatgaaattgagatgttgtgagtgaaggagaagaagagggaaacaaaggtatttatttgtagcgagttttgttttgtgacgcggttttgtctgtgttcaatgttgacgaaacgagtgagagagtgtctgattattaaagaaaaccctaattaagtcagacccgccggttataaaaatagtcaaaaagtaggaaaacgcgtgtgtgagtgagacagagacagcccattgtttgctttatgggcttataagcgagacgtgttaattgggctttttcctttatggccgaaaacaaaagaaacgtcgcctgagagattcgaactctcgcgggcagagcccatgtacttagcaggcacacgccttaaccactcggccaaagcgacttgttgctatgagttagacaaaatcattaaaattctctattatgatttctcatagtgtgtgtgtatattgtggatctactaaaaattctttgttattattactttattttgtgaattagtttgatataggtaagtacaaagttaactttattatttactcaaaatttatcagattaactgattttatattgtttcctttggtatatagacgtactatagtttttagaaaaaccataagattcctttatatttcatagagtgaagagatgagatgagatcttggctggagaagaaataagtttccacgaggaggactctttttttttggtgaagacgaggaggaggactcttggttgatccagtctttacgttagacatcgacccctacatttatttgcctttctctatcaacatggcaggtaaaaatcttcattcaaccgaaccaaccaaagtctcttcccaataatattcaagcaccatcctttgggaaactcatacatactacagtctacactctttcattttctttcaacgctcaacttaacaaatgatatagtctagttgtcaattatatgttttaattagtgttttcacatcaaattctggtttgatatttgatgactattttcggaaacatctcaatgtcccgcaaatacaatcgtctatcatatataatcccgtacgttgtattcttatagatagaataatatggcgtgatctttataatataacatatagaatcgtgtagatttattttattttatttttatatatcgcataaattgcaaaatacttatatatgtttgttatatatgatacccattttatagttacttaaaaaaagttaagcgataatatatatatatcaactttttataacaaaaaagtataacacatggtaaagaaaaataaaaatgaagacatggtgtgacacgaaaatggcactaaatatacatatataatagatagctacaatatcccatcatacacacttttttaattgactaatacataacttacacacttttttaattgactaattcataactttttatcattgtcaacatgcaaattcatatttccgttgaactattattcttattttgtttttaaaagaagggcttcctggtaataaaaatatgatttccaaatgacgttagagcaaaaaaaaaaaaaggttgtctggtctggtaaaatgaaaaagcaaagcgtcttggtatagaaaagtaatatactgcctcctaatttcttcgtccttctaccgaagaatctctccactcttgccctctttcgaaaccctaaaccagaagcaccagattttttcaactttttcccagagaacaatagaaaacccaacttgtgctctctagggttttctttattccttctcatctttggattttcttgggtcatcattttggaagcttacccaccagcgaaaaaattataacttccatcgattcctggcttctctctctcgctctctctgcatgtgctaaatcgccggactgatcctcactgtcacctctgttcccggcttattcgccggtgaaatctatggttggtgctcagatttatttccaattgtttgtgcatctggtggaggataa

SEQ ID NO: 3612 - DNA, 3000 bp, Unknown
  misc_feature (1)..( 3000): cDNA_ID_1807115_gDNA_ID_1620653_Annot_ID_47796 3000 nt of promoter + ATG
gccatcacgatacagacagatgactcgtttcccaattatggtaatgcttcccaagataaactaaacgagtggttaagaattaatccccaatcataccaagtgacagtgtcaaagacttttgtaatacacaaagtcaaatgaaaaaagggaaaagaaattcattctaattgtggtaagtactatgtatccatatatacatatgctttcctaattaacaaaaatcacactataatattctgctctcttatttcccagtacagaaatcttaaccatgagtctaaatgaaaatgattgaaaaattacacgttaaaaacccatattatgttaaacggaattaaatacatgatgtgttatacataaaagtaataaaacatcaatcctatactttaaagtataataatttaggtcatcaaattatgccgtacatgagatctccgagcctactgataattaactttagagagtaaacgagaaaataaaaatctcatttaaatacatatcttaatatatttatccaaccatattctcaaaaacacaaacatggattgaaaaaaataagacaactactaacaaaaagatagaatataccttgagctggagaactcgaagagctttccggtggcagagaagatgatgagagcaacatcagcatcgcaaagaactgaaagttcatcggctttcttgaagattcctcttcttctctttgagaaagtaacttgtctcgctgttatgttatcaatcttctttatccttatcttctctctcgccattttaccagatctctccttcactactgttcttgaatctgcctatacccataacaccatttagattttagaccaagaacaaagaaagaaaccaattggaacggtgttagctaaagagagtttatataatattcttaggaaaccctaatggctagagagagagagaaagagagatcagatccataaaccatgagaagcaaaagaatggacaggactagatgaattcatcaaacactttgcttaagaagaaagaacacagattcacagcttttacctttctgtgagttggaggatcttggattacgttattcaatctcagcacccactttattaaatttgtgagaagataaaaaaggtttttctggtagctgtttactccctaatgtgtgagtgagagagaaagagagagagagatggtgactgtgtttgtgttcaagattggaaaaaagagtctgctttttttagctaaacagtgatctatacttatcaatgggccatatgttttgtatcccttttgattatgtctttttcccaaactataatcattaaaaataacacataaacacactttgtgttttgtctgactgagctgccagacgaagagactgctacagttatgatttaataatttacctaaccttctaattcaattagtctgtcatggaataatgtggaattgtaactttattcagtagcgggtttcctagttttactgttttagtctagttttgaataacttcccatctaaaaacaaaataaaaataaatgacgtgaaatactactccgtataagttaatagatttatatatggctaggtcaaataaaatgatacaaaagttacccactatcaaaaatgtaacatgataaaataaaaaaacataattggaaaatgaaagaaatcacaatacacaaggaactacgtaccaattctaatggaaagaaagtttggttactttttttattcgtaattagaagatgctgttcatcagttcatctacctttttggttttggtttattacaaaagttgtgtctattaaatatttcatgtcttttttatagtctttcacctatatatgctagatgcgacacctgataagatcactcgtctcccaccgtcatcattatcttttatttttgggtttgatcagccatttatacccttttaagttttaaccctaattagaaatgatatatcaccggactccggtaactctagggtgatatcatggccgacaagtatcttgtaaattttttctcccaaagtacaactgaaaattaaactaaactgataaaattcgtgggaaacgtaccatctcataatgatacatgtgaaaagtaatatagatgactttaagacttcaatctgtataagattaagttctttatgactaaaacaaataagcactaagaatgtgagacagatttagtattgtaagcctttggttttgtttatgggaggaaaaaaagcgagtgcaaaatcagaaagtgagagtttttggtgtagatcaatgttattggtctttaggatcttatagtaatatgttgaaaatatatttgggacgagctagaagactcccaaggtcatataaatgtgaaactaaacagtaattgtaatagtgttcaagaagaatcatctaacacgtttaaaaagcttagacttgttgttgacccttgttaccctttcatatatcttgtgtttcttacttgagtttagaaaaagaaaaatcttaagcctttcatttggaatgcttggtcatcttgtcagccctctaggctcatgtatatctcccgattgctcgatcccgaaagtcttcactaaccttcgttgtcagcttaatcctcaaagttttgacttccaaaaataaattatgtgttgtaccctttatatcaactcacattttgcttcctcgtaaacaatgtttttttttttctcctccgagatcgaaccatcatttatagtacttactacttatttccttaaactcataacaagttcgaaatttgggccatattgatgtcttaaaaataggcccatataagaacaagaaatcataattcacaaaaacacagaaccctccgtctcatgaagaagcttcacgataacgacggcaaatggtaaaacgtgaaccacctcaccaccagacacacaaaaagacgagaccgatcggcgatcagtagacttaaccaaactcgcggtgaaacagtcggaatccaccgctataaggaacgatg

SEQ ID NO: 3613 - DNA, 3000 bp, Unknown; identical to SEQ ID NO: 3604
  misc_feature (1)..( 3000): cDNA_ID_2152761_gDNA_ID_1620653_Annot_ID_163540 3000 nt of promoter + ATG

SEQ ID NO: 3614 - DNA, 3000 bp, Unknown; identical to SEQ ID NO: 3603
  misc_feature (1)..( 3000): cDNA_ID_3071501_gDNA_ID_1620653_Annot_ID_163539 3000 nt of promoter + ATG

SEQ ID NO: 3615 - DNA, 3000 bp, Unknown
  misc_feature (1)..( 3000): cDNA_ID_1821310_gDNA_ID_1620653_Annot_ID_163538 3000 nt of promoter + ATG
gtagtaaccaaaaaagtcaaaatcttgttggctaagtcagaaattaattaaataaacaaaagggcccattaaattaattattttaataaatattctgtgtaatgatatatagtataaaacgcgaccgtctaaattcttggttgtttacgagaaaagcggattacgggtacgcttcttctaagataaatctctccccgattctctctttttctcgctagatactctttttcttcaattagggtttcttctcgcttgccttttaattctctccagctgatctgatctccgttaccgatggagtctactgctaacgcactcgtcgtcaaggttagagatacaaccttcctttctttatttgcgaatcgtcagttttctcacagtaattgtcggtgattctgggttttcgtggcgatcgtctcgtttctgttgattttgttgcttgtaatcggtcctttccttttgaatttcgctatggatcgactctctctctctctgtctctgtattataatcttaagtgtaattcgaaaattttccagacatacttagcagtatctgcttgaatcttatacccgaacaatgattaaaactataagttatcgtaattagaatcgtaatctatttcttcgacaattttttttcatttttttcattgaagtgatactaattttgtttgtgattatgtaggtgagctatggaggtgtgcttaggcgtttcagggtgcctgttaaagctaatggacagcttgatcttgaaatggctggtcttaaggaaaagatcgctgctctctttaacctctctgcggatgctgaattgagtctgacttactctgatgaggatggggatgtggttgcccttgttgatgacaacgatctctttgatgttactaatcagcgtcttaagttcttaaagatcaatgtgaacgctggcgtgtccactaactctgctgctccagagagtagtgggagttccacacctgcgggtatgcctaacccggtttccaaaatccagaagggtataaatgatgttctgatggctgtacctaacccgatgcgtgataccatatcaaaggtgtacatggaccttgcatccaaggcctcaacttctagtcctgtagttggtgagatgcttgattgcatttccaagctagggcagctctcaattcctcaggaaagtagtccttgctcacctgttaccaagcctggttcttcaggtgcttccctgagcagggatgttccttccgctggtggaaagaaggatatctctgagaggacccagaccggaaggaaacctgttaatctgaatgaacccactggcgctcattcaaagacttctggtcatgtaccaaactcgtctggactgggtgctaatttcaacgagtgtccctttagtggcagtaccatgaattactcctgtccaaatccagttaacctcaacaagcatcctcgtcgtgtttgtcattccaaaaagagcaccaatggtgattactggacttcattgggtgtattccataagggcatccgttgtgacggatgtggagttcttccaattactgggcctagatttaagtcgaaagtgtaaggatgccttctacttactactttagaaactataaacatgctagaacttattgtgcttatatgtttcgcttgtgaatattgtgcagtaaagaagactatgatctgtgcaccatctgctattcggtgatgggtaacgagggggattacacaagaatggataagcctgtatccgttcaacatctgcatccttttagaggaccgtttacccaagtattgctcttcttctaagtttataattacttttcttcttgtttattctatgtgtcttctctgatagctatgaggaattcttacccttttttttttggtatagtttcctaatccttggttgagccaccctgtgccacgagcaaccaatggaggtgcacctctcaggtgtactcgccctaaactagacagtcggtttgtccttgatgtgaatgtaattgatggaaccgttgttgctccatccgccccatttactaagatttggaaaatgaggaacagtggttcgctggtgtggccacagggcacacagattgtctggatcggtggggacaggttctgcaactccttgtcagttgatttacaggttagaaacaatttccttagttttcactcttttagctcgattcttaccactaacagagcaattatgttgtttgaatttacactcgatggcttgagttaggttgttttcttcacgaagtgactatagctgcttgattatataatactaactgtttttttctctctttacacatggcagattccaaaggagggtgtgcctatctatagtgaacttgacgtcaaagttgattttgttgcaccagagttacctggtcgatacatttcttattggaggatggctacctctgacggtgctaagtttgggcaacgtgtttgggtgttgatacatgtacttactagatttgtgcagcttctgtcctttaattctttgtctctttctatcatatgtgtttgatacattttttctttttgcatggttaggttgatgcatctctgaagaattctgttgtgaatgagtttcatggactgaaccttaatgcctccccctcccttgatgagaattttccaagcgaatttctagggattatgaattatgagtcagctcaacctggcagctccagtgtcaatcctgggaccgtgaaaggtactgatctagagggcgaagttggtgaaacacaggccgtggaaaaagaaaaccttttggttggtgaagctcatcctgctatccctcacggtcattctccttcatcttcatcttcttcatttaacatggtcgacttcccaagcatgcctgctgttgaggtcttgtctggtggttcttcatctactacaaaagacgtgccagttcctcttcaggaggatatagaaaagaatgacgtggagataaccatgctcaaggagctcgaggaaatg

SEQ ID NO: 3616 - DNA, 3000 bp, Unknown; identical to SEQ ID NO: 3602
  misc_feature (1)..( 3000): cDNA_ID_1807910_gDNA_ID_1620653_Annot_ID_163532 3000 nt of promoter + ATG

SEQ ID NO: 3617 - DNA, 3000 bp, Unknown; identical to SEQ ID NO: 3601
  misc_feature (1)..( 3000): cDNA_ID_2995209_gDNA_ID_1620653_Annot_ID_163531 3000 nt of promoter + ATG

SEQ ID NO: 3618 - DNA, 3000 bp, Unknown; identical to SEQ ID NO: 3600
  misc_feature (1)..( 3000): cDNA_ID_1450335_gDNA_ID_1620653_Annot_ID_163530 3000 nt of promoter + ATG

SEQ ID NO: 3619 - DNA, 3000 bp, Unknown; identical to SEQ ID NO: 3599
  misc_feature (1)..( 3000): cDNA_ID_1808608_gDNA_ID_1620653_Annot_ID_163528 3000 nt of promoter + ATG

SEQ ID NO: 3620 - DNA, 3000 bp, Unknown
  misc_feature (1)..( 3000): cDNA_ID_3071510_gDNA_ID_1620653_Annot_ID_163526 3000 nt of promoter + ATG
gacaaaacacatatgttggtttagaaaaacttcaagttgcatttcttcttttagccaatcgcactatcttccgtgaaaaggtaaataatatatagctttatgacaatttcacaaaaatggttcgttagttttgacttagcattaagatttttttccagaaatctaagtattggtaaaataattctatatctactactaggtcaaaatacaattctatattatttaaaaaattgtaactgaggtaattgatcaaattaccaaaatgatgaaagagctagttaagaatttaacaatgtacaagttttagtgaaatggtcaaaactaaatatccattcttttggcccgttagcatcattaaaccaaccactcaatggagacatggaagatcaaaattcgtcaaccctagcgctttgtttctctacaaggatcaagtatggaacaacaacaaccacaagaaatcgaaatgtgctaaggtcgcatgagttcgctaggaataagtctataacatttcgttttgtcaacaaaataagattttagtatatatattatttacaattttaccagacttccattgtcaacaaatgacattattgttgttgtcgaagaaaaaacaaaggtgacactatttgctgttttactttttatttcatgaggacggaggacccatttttttaatttagtttaaaagagcaaccgtatcagttgattacggagtccagcagagaaaagcatgctcaactgtcaaaaacaacctaacaattagggaatcccgtaaaaccggcaaatcacgagggcagcattacattacattacattacatgtcccacaaatcactttccctcccatgcttttccacttccacctatcattaccaacacctattacctaaaggactttaagccagagagttttcaaatcccgtaccgtgattggtgcactatgaagtggaaaggaatacgatgaaaaacaaactgttttctcaatacattttcaccgacaccaatcatgaagcaaatagctgcaattaattttttctacgttttaagacaagaatatatattaaactacttattttcttctacatcttaattaagtagttagtattcttacaaacacttctgattatcatttttgtgttcaatatataaactcctttctatttaaaaaattccctcaacactataatatcattcagtccctatctaaaagttaggtgtccatagagatatacggatattgaaatttaaatgatatatggcggagatcatgcaaggacaattatcttcaatagaatcattacgacttattaaatgtgtgttcccgacattttattacatgattctactgttttctttctcatcatctcattccattatttgtttttctatttgtgtttctagattacttgacatgtacgttaaatcatttatcttccttttcccttgatatcccactcgaatgacatgttgctgtagtactattactatggttggaaatcttatttctctgaataataaaagtttatattcagataactgctatgatacgtaaactttccaatggttatttaattttgttttgcaattaatatatgcaactataagtaaagcctagtgaattctttggatcggagttatatgctatgtgctaataatacaaggaaccccgcaatattgatataaaatttaccaaactgtatcccacactttaaaagttgtcatcatactttatgtgaatgcaataggatccaaatcgtttggggaagattttacattttaaattcttatattccgcaagtgcccaatggtgccgcacgaattatttagtgtatcaaactattggtaggagcaattagtaaagcatatacagtgcaacaatctatttaaaagtatagaaatatctaactaaaacatattttgaagattccctcgtcctccaatcgtcttccatcatcgaaatatccctttgaagagctaagaaacttggtgggaacaaatgatgctattcgataattttcttcgattctatggtatatttggaaagattggaacataattaatatatatatcccacttgatgcataaagaatgttgtttaagaaacggagttctgaggtaactgactgacaagtgcttcgactcaaccattactacttaccaaatccacggctcttggcataccccatacacgcttagtggatatggttgaatcgctagttcccaccaccagcttctttatcttgacttaaaagagggcacgtcgatgtcttcctcccctacacgacaatgtagaacatgcatgttcaaacaatttgcaaatggaagatatattggaaatttgtgaaaggccatgaggtagatacacaattaaattcatgagttcataggtcagaacaaagctgaagcatgttctacatgcccaatcaagaaaaagtcaaacttttctcaatgccgactttactgttctaaaatgtatgaaaatacacattaatatacaattataaatacatgcaaatatatattgttataaactatataatggttacttgatatggatccttatacttaactaacttaacaccaactccctggatctataatgtatatattgggctaaacaggtcatgtggaagttatttgaaaagtacaccatatcgacctaattagattggaggctttttatttagttttttgtcaacaattagatttgagtaacggatgtaaccatattatttgttcctacctcctaggcattattatagtataaggtttttttttaactaaagatgatttaaaaaaaaaaaagtgggacctaaaccttaaaaattccaataacaaatagtatagaggtcctttttctctttatataaacccccaaaatttcctcttctctgtattctccactcaatacttatttcctctgtcttccttcgcttccctcttctctcaccacaatccgagagagagacagtactgtaatccaagtgagagagagagagaa

SEQ ID NO: 3621 - DNA, 3000 bp, Unknown
  misc_feature (1)..( 3000): cDNA_ID_1821254_gDNA_ID_1620653_Annot_ID_163561 3000 nt of promoter + ATG
caccatttagtcacatttaccacacagatgcaacatctgaaatcgagaaacttaccttcagtggaatgaagctcattgtgactaaggtctaacatttggacaaacagcaacttctcaacagaggctatccgagatagtgataagttatttagccgtagacatacaagattgttcatatccctatatcgcaaaaggtgtcttgacaaagattcactgcttgaagtcacctgcatgaacattctctttatgagtagtaggcatgatgaaacagaattaaggaaaaaatctagaatcgaacaatcaactttatactgtagacgagaatcggggaaaatcataactccgatgaaaattttaatagcaaaagtttaacataagattcacagcaacaaggaagactaagtaccttgtggagaaaagctttgctgtgctcatccttgtagtactggtagtgtgaagaatccagcgccatcaaatcgttatacagctgaaggatttcttcatagtgaacacccttgacagcatcatccgataccatagcttcacgagccatcaaaagccttgcaagagtgagctttccaattttgctataaaggaaaaaataacacaacgtttaagactacaatttctctttccaatcaaagagagaaagtatataggatatatacctgtcaggcagtataccgaaacattcaacctcagaatctatagcttcctgacgccatttaaaatccatctcagcatttaaccgatccaaggtgacaagagaattcaaatcctttgacttcgcatcccaaatatcaaatccatccgtccatgaaacaatgccttcttgagaatcttcgacggtatcatgaacatgggctgtaaagacaaactcataaggtgcgttgaagttatatcctctggaagaaacgattcctggagagttcccaactctgatcttcactttgtattcgcaaggatctgaactgacatatttcagacgagcaacccatacacaggacacctgagaatttttgttcggaattggttcccaaacaaggccctcgtttccttttagttcagaatcaattgtaacagtagatgagcttactccaccaacagcttggtcaaagtagagaatcagtggaaaagaacccgactcagaacaaaaagtagtgaacatagatgaagagccactcaagcacccagctccagacagaatgatacttgaaccatgtgaaggccatgaggaagtgagaagaggagtctccacattaagagtttggtcaagaagccaaagatgataaaaccagccactttggtcatctggttccgtaaaaatagccgaatgtacaaagtcatattcctcaggaatctttatatttggcataaacccatcagcattttgtgccaacaaacttgatagaagtacactgcagaatgtgaacaaaaatatatagtaaagaatatgcatacctacgattatgctaaaaaactatttctgaacatgtaaatcagtaaagtataatatatactaaagaatatgcatacctacgattatgccatgcagaatagttgctgaaattgttattgatcatatcatctgtatactgcaactcatcctgttctgatctgttggttagctctacaacaaacctggaaaggaacaacacattaatatgcaagcttgattaacatacacaatgctcctttcaaaaagtgttgacattccctaattttcacctgcgatagttccaagcatgaaaatttctggaatccagcttctggaatttttccaaaagtctcaattcattccctacggatgaatgccctttactcaaaacccactttcgatgatgccaagcaccataggacttgaaattctgcctcaaagcactttctacctgaatttagaaccgacttcacagtaactaataagcaactactttcataaagagcaaattcgtttcttttaattgacaggataactcaccactctgagttcttcatcaagaattgcgctgaccaagtttggatcaggctcaattctggcaaggcgatcctccacagcaagcttccggtagttccatgcggtgtacgcctccggattgatttctagaagcttcgtgcttaactcaatagcttcattggtataactagaaaccaaaaaagcaacaaatgattagtaaataaacaaaggatccttcaaatcgtactaaaaatctgggaagtacactgatccgatggaaatgaaggagaagattgtacattttatcgtgatgattcgtcataaactgagactggagagagcgaagctgaacagctttagcagctgaagctgcttcctcttctggcttagaagcattccttggacgaccgtgcattcttctccgacgactgtgagagatgcgacagtgtgattcaacttttccggttaaatctgatcagaaattacgaaaacagttaaaacaaacactagatcgaggaaagaaaaaacgtgatccaaatctagaaacaacagagatgacgaaatggagaataagaagcagatcacctgaaaggagcacgttgcggcgtcgatcgagagagagagacttttgttttcgggcaattgagcgactgagagaaggttctatcggaaaatttaatgggccggtttaatgatttcaatcgcttaaaccagtaaaccgggtttaattgaaaaatacggtcgaacactaacccggttttggaagtcttcgtttatgtagtgaaaggcttcgtcatcatcgttgtttcacagttgaaggttttcacgagaaagtgaagatttttggagaaaccatacttttgtgaaggttcgtttcaccttcaatttcgtttttccaatttgggtatccgataattgtaagaatttggggttttaaggtcagattgattatgtatctaatgcttttacattgtagtagctcgtgttttggattttgaaggattgatttctaaatttccttttgatcttgtagttgaatcacaatg

SEQ ID NO: 3622 - DNA, 3000 bp, Unknown
  misc_feature (1)..( 3000): cDNA_ID_1821258_gDNA_ID_1620653_Annot_ID_163559 3000 nt of promoter + ATG
agaacctatgatctgtgaccatattacaagatttgaatctgaaaataaattttattcttcccaatatttgtttttgcgaaaaaaagagattatttggaattgctgacgtcacatctctctcaggagattcccacccggaagtatcaactgtcgtcgtgtatcggttgtttccgtagatctctgttaccactttccatccaatttcaacaaattggatttggcaaactttcggatcagaaacgtgctcgggatgaggaggtacaccgagaaagtttggtcttttattcgttcgtcgctgagtttagaataagggattgtcttcatcgtacgactctgtttttgttgaaaatcgaatgctccaaatgaagcagccattacagaaccttaatcagtcgcagaagacagctttagctggtgttttcgtgctccttttcccgattctctatccgaatctcttcagccctcttggtcgcgcctctccttctctcttctccgtcagtctctctctctctatctccgatgatttatttggaatttcacattttgggattgtgaagctgaagaattaagtttggcatttgcaggaatggaatgctccaaggcctagacatttgagcctactccaaggcgctcttgatcgacaaattgtaagtgggtttagctcagtttcttggatgtatctactacgttcctctaaatctttttcttcttcctcgaaccaatgtgtagtcgatcagacaacaagttgagttatggtctcccttggcagatcaaggttggaagccttgcactgaatcttatagaggcgcttgtaagtttccaaatataaagctttcttccttctttcatcgtttacattcatgtgccctgaaaagtttgtattttgattgatgggtttgtcactctttgcagccttgccagagaagtctgaagggtttcttcaggttttccttgacggcggactaaatcaacaaagaatgggagtgagtataagaatttcagtcaatttttatggtggtttcccttctgactcttcttgttccttttgcagatatgtgatgctgttgctgttgccaagataatgaacgttacactcgtgattccacgccttgaagtaaatactgtttggcaagattcaaggtaatctactttgaaacttgtaagttgtctggtgcctgatgaatttggtgatttatgatttggcatttctttacagttctttcacagatatatttgatttggatcactttataagtgtccttaaagacgaggtgcggattgttagggagcttccaatacagtatgcctggagcactcgtgattattacgctacaggtattcgagctactaggattaagactgcgcctgttcacgcttcagcagagtggtatttggaaaatgtcttacctattatccagaggtttgtgctttctaaacctggtgatctatcagatgaataactgcattttaaagtcctggaaaatacgatactacatatgatctggaatgctttatagacaatactaagggagtgttcaatgtagatgtttttctgtcaagtcacgttttttttttgtgtctatctgaggaactatatatgtctgtagttcaatgcattgttactcatatgaattatccacttcgttatgcagttatggcattgctgctgttgctccattctctcaccgtttggcatttgacaatttgcctgaaagtatacagcggttacgctgtaaagtaaattttgaagcattaaactttgttcctcatattcgtgagctaggggacgctcttgtgcatcgactcagaaatcctccttccagctctcaaacatcaggaactatggatccgacagacagaataaacaccattgtaaaagctggtgctggaaagtttgcagtgcttcatcttcgtttcgataaagtgtggtcttaattctcaacaaatgtgcccatttcctggcagtaacatctagttctgacattgcttcatctttttttttaggacatggctgctcattcaggctgtgactttgaaggtggcaaagcagaaaaactggcgctggcaaaatatcgccaggtgatctggcaaggaagggtcttaaattcacagttcacagatgaggagctaagaaacaaaggtcgctgcccgttgacaccagaagagattggtttactgctgtcagctttgggtttcagtaacaatacccgtctctatctagcgtcacaccaggtttacggaggagaagcaagaatctcaacgctgcgtaaactgttccccgggattgaaaacaagaaaagcctagcctctgctgaggaactagctgatgtacaagggaaagcttctctgatggctgcagtcgattactacgtgagtatgaagagcgacatcttcatctctgcatctcccgggaacatgcacaacgcattacaggcgcatagagcctacttgaatctcaaaaccataagacccaacatgatactgttaggacaagtctttgtgaacaagagcttagattggtcagagtttgaaggagcagtaatgaatgggcacaaaaacaggcaaggccagcttcgtctacgcaaacagaaacagtctatttacacttatccagctcctgattgcatgtgtaaagtagcttagcattccccttttactgtcccaatcttttgttgatttttttaaaattttaatatatggtttttatgtactcgatgattagtaaattaattgaggaactcatattatgtacactaaattcaagtttagtaaaaaattggattaatgtgatttacttattgacaaaggtaaaataaaagtcaaataagaaaaggagagaaggacccactcagattcaacgccccaccaccgataactcaattaactctcttctcttggcttctgcaacgctgagccaccatcgtcctcttctcttcctcttcgatctctcctgaatcctcaaaccctggagagagagagagagagtgacgggggaagaag

SEQ ID NO: 3623 - DNA, 3000 bp, Unknown
  misc_feature (1)..( 3000): cDNA_ID_2152804_gDNA_ID_1620653_Annot_ID_163558 3000 nt of promoter + ATG
agccgatgaactttcagttctttgcgatgctgatgttgctctcatcatcttctctgccaccggaaagctcttcgagttctccagctcaaggtatattctatctttttgttagtagttgtcttatttttttcaatccatgtttgtgtttttgagaatatggttggataaatatattaagatatgtatttaaatgagatttttattttctcgtttactctctaaagttaattatcagtaggctcggagatctcatgtacggcataatttgatgacctaaattattatactttaaagtataggattgatgttttattacttttatgtataacacatcatgtatttaattccgtttaacataatatgggtttttaacgtgtaatttttcaatcattttcatttagactcatggttaagatttctgtactgggaaataagagagcagaatattatagtgtgatttttgttaattaggaaagcatatgtatatatggatacatagtacttaccacaattagaatgaatttcttttcccttttttcatttgactttgtgtattacaaaagtctttgacactgtcacttggtatgattggggattaattcttaaccactcgtttagtttatcttgggaagcattaccataattgggaaacgagtcatctgtctgtatcgtgatggctacttctgattacttttcttttattataaccaaaaaggcttctaatgtacttaattaattttacaaatgtaatatggacgaaggaaatgtttataagaaagatggattgtttgttgaaacgtgtagaatgagagacatattgggaaggtatagtcttcatgcaagtaacatcaacaaattgatggatccaccttctactcatctccgggtattttcgatatcacttactcttttttttttttgtggattttaaactctctgctctttttaccaaacccttctctttttatcaaacccttctctctataatattatccgatgttcactttgttacacgtgtttgttataatttttagctgtaagtctaaatatagaaacattgagtggcatataatcattaatcttgaagcatctaattaattggttttacatattaatagcagaatcctgaaactgttgactttgcatctagcagcttgagaattgtaacctctccagactaagtaaggaagtcgaagacaaaaccaagcagctacggtatggctccattgatatgttatgcagataaacctattttcatataggctatagctgtaagagatcatctatttcatgtgtgtggtttttttttttatgttttttcaatgatgtgtgcatgctatttttaggttttagaatctatttcatggaaattgaagatatttcatttcacgtgtaagttcgtcaagttgtggcgtgtgtcttggaaattgatgttttgtttgtagattttaagagctacttctaaaatttacaagagttttgtaattttcaattatggcccattattctcattaattcattaaaaaaattatatacattactatctatatctagcataggtagttttttttttctttttctttggtagacctactgaacaaatatctgatatatcactgactggataaatatctatagagatatttttgatagaaatgagtgttaatttaacgtaaaacaggaaactgagaggagaggatcttgatggattgaacttagaagagttgcagcggctggagaaactacttgaatccggacttagccgtgtgtctgaaaagaaggtttactactatacataaactaatagcatgcatattttccttaacgtggcatataaataataagctgtacatatataaaagtttgactttgttgttgttattggtaaatagggcgagtgtgtgatgagccaaattttctcacttgagaaacgggttagtagttagtacatacaattcgtataactaatggatcataagcctatctatagctagtgactttcttaataagtgaaacagggatcggaattggtggatgagaataagagactgagggataaagtacggctctaaacccttatagatatcatggaataaccttaatctatttttttatgtataagaaaatatgatgagggaacgtatattatatatcggcagctagagacgttggaaagggcaaaactgacgacgcttaaagaggctttggagacagagtcggtgaccacaaatgtgtcaagctacgacagtggaactccccttgaggatgactccgacacttccctgaagcttgggtataatttgtttaactgaacatatttcaaactttttgttgacattttgtatgtggatgtttactaactgtttgttggttaggcttccatcttgggaatgaatctgagagagagaaagatccagcagagttgacttcgatggaagcccacaaatattaagtctaccttttccctttcttttctttgaataagtgttgaaaaagaattgagatgggaaggatgaattctcattgcattgcagagaagcaagtttcagatattgtacgtgttattggtctttataactattttgcaccaaagggattcttcacatcacggacaaataataattttaacactaatgaaacaagtaaatatagtgaaacgataggttttctatagtgattctttacattaacaacaatgaaacaataaatataatattggagaggggtgtgaaagaacaaatatgttaattaatttctacaaatgttttcacctcctttctcgattcatataaaacaaaggtaagtctttgttccttaccttcactctctagaaaagatttttttggccaaaaatatgtattcacgcaatcagcagaacaaaaacctcggaagatcacgtccaacgaaggacctttaggcttaggggtaacgtcatgtcttccacttttgagcaaccttgcaaaccatcaacgaagtctttcatgtgcattttattcaaca

SEQ ID NO: 3624 - DNA, 3000 bp, Unknown
  misc_feature (1)..( 3000): cDNA_ID_2152800_gDNA_ID_1620653_Annot_ID_163557 3000 nt of promoter + ATG
agacttacaataacttcatcaagcaactcatacacgagcacaaagtttttcctgaatgaatcttcattcagaacaccaagataatccttaataacacgagcaatcctttgtagaagctccaaaacaagagagggtgacacgttaactctcgttgtcgcaacaaaatatagaccaacaaccttgacatggaagtagttcacgccatcgacattctataagcacaaaaaataagttagatgaaatcattacagctcacaaccaaacagaaagtataatacctacaaagataggtggcgcctctgcattgccatcctccttccagaacttgactttacggaagaatgtctctgtacttcctttgggtacctcagcccggtctgtagcaataaaacgttacacatcttgaaacttgtattggatccaaccaaatcgtataatctcaaaacaaatagctttcttctactacattacatacagatactctgcccaaactaattgaatagttttgctatatttgtacaatctgatttggaaattcagctcaacataatttgtcatcggataagaaatgttggtagatcaaacagatcaatgagcttagagaagatttcaatggaaaattctcatgaaacagtgacataagactcgactctgaagagaaaaagcaaaacaggaagaagcagagaggatcagatcgagaaagagagcttacagtcacggaagacgatgttatctcctcgctgagataagacgaagaattgggagatcatcatcgttccttatagcggtggattccgactgtttcaccgcgagtttggttaagtctactgatcgccgatcggtctcgtctttttgtgtgtctggtggtgaggtggttcacgttttaccatttgccgtcgttatcgtgaagcttcttcatgagacggagggttctgtgtttttgtgaattatgatttcttgttcttatatgggcctatttttaagacatcaatatggcccaaatttcgaacttgttatgagtttaaggaaataagtagtaagtactataaatgatggttcgatctcggaggagaaaaaaaaaaacattgtttacgaggaagcaaaatgtgagttgatataaagggtacaacacataatttatttttggaagtcaaaactttgaggattaagctgacaacgaaggttagtgaagactttcgggatcgagcaatcgggagatatacatgagcctagagggctgacaagatgaccaagcattccaaatgaaaggcttaagatttttctttttctaaactcaagtaagaaacacaagatatatgaaagggtaacaagggtcaacaacaagtctaagctttttaaacgtgttagatgattcttcttgaacactattacaattactgtttagtttcacatttatatgaccttgggagtcttctagctcgtcccaaatatattttcaacatattactataagatcctaaagaccaataacattgatctacaccaaaaactctcactttctgattttgcactcgctttttttcctcccataaacaaaaccaaaggcttacaatactaaatctgtctcacattcttagtgcttatttgttttagtcataaagaacttaatcttatacagattgaagtcttaaagtcatctatattacttttcacatgtatcattatgagatggtacgtttcccacgaattttatcagtttagtttaattttcagttgtactttgggagaaaaaatttacaagatacttgtcggccatgatatcaccctagagttaccggagtccggtgatatatcatttctaattagggttaaaacttaaaagggtataaatggctgatcaaacccaaaaataaaagataatgatgacggtgggagacgagtgatcttatcaggtgtcgcatctagcatatataggtgaaagactataaaaaagacatgaaatatttaatagacacaacttttgtaataaaccaaaaccaaaaaggtagatgaactgatgaacagcatcttctaattacgaataaaaaaagtaaccaaactttctttccattagaattggtacgtagttccttgtgtattgtgatttctttcattttccaattatgtttttttattttatcatgttacatttttgatagtgggtaacttttgtatcattttatttgacctagccatatataaatctattaacttatacggagtagtatttcacgtcatttatttttattttgtttttagatgggaagttattcaaaactagactaaaacagtaaaactaggaaacccgctactgaataaagttacaattccacattattccatgacagactaattgaattagaaggttaggtaaattattaaatcataactgtagcagtctcttcgtctggcagctcagtcagacaaaacacaaagtgtgtttatgtgttatttttaatgattatagtttgggaaaaagacataatcaaaagggatacaaaacatatggcccattgataagtatagatcactgtttagctaaaaaaagcagactcttttttccaatcttgaacacaaacacagtcaccatctctctctctctttctctctcactcacacattagggagtaaacagctaccagaaaaaccttttttatcttctcacaaatttaataaagtgggtgctgagattgaataacgtaatccaagatcctccaactcacagaaaggtaaaagctgtgaatctgtgttctttcttcttaagcaaagtgtttgatgaattcatctagtcctgtccattcttttgcttctcatggtttatggatctgatctctctttctctctctctctagccattagggtttcctaagaatattatataaactctctttagctaacaccgttccaattggtttctttctttgttcttggtctaaaatctaaatggtgttatgggtataggcagattcaagaacagtagtgaaggagagatctggtaaa

SEQ ID NO: 3625 - DNA, 3000 bp, Unknown
  misc_feature (1)..( 3000): cDNA_ID_1807115_gDNA_ID_1620653_Annot_ID_163556 3000 nt of promoter + ATG
atcacgatacagacagatgactcgtttcccaattatggtaatgcttcccaagataaactaaacgagtggttaagaattaatccccaatcataccaagtgacagtgtcaaagacttttgtaatacacaaagtcaaatgaaaaaagggaaaagaaattcattctaattgtggtaagtactatgtatccatatatacatatgctttcctaattaacaaaaatcacactataatattctgctctcttatttcccagtacagaaatcttaaccatgagtctaaatgaaaatgattgaaaaattacacgttaaaaacccatattatgttaaacggaattaaatacatgatgtgttatacataaaagtaataaaacatcaatcctatactttaaagtataataatttaggtcatcaaattatgccgtacatgagatctccgagcctactgataattaactttagagagtaaacgagaaaataaaaatctcatttaaatacatatcttaatatatttatccaaccatattctcaaaaacacaaacatggattgaaaaaaataagacaactactaacaaaaagatagaatataccttgagctggagaactcgaagagctttccggtggcagagaagatgatgagagcaacatcagcatcgcaaagaactgaaagttcatcggctttcttgaagattcctcttcttctctttgagaaagtaacttgtctcgctgttatgttatcaatcttctttatccttatcttctctctcgccattttaccagatctctccttcactactgttcttgaatctgcctatacccataacaccatttagattttagaccaagaacaaagaaagaaaccaattggaacggtgttagctaaagagagtttatataatattcttaggaaaccctaatggctagagagagagagaaagagagatcagatccataaaccatgagaagcaaaagaatggacaggactagatgaattcatcaaacactttgcttaagaagaaagaacacagattcacagcttttacctttctgtgagttggaggatcttggattacgttattcaatctcagcacccactttattaaatttgtgagaagataaaaaaggtttttctggtagctgtttactccctaatgtgtgagtgagagagaaagagagagagagatggtgactgtgtttgtgttcaagattggaaaaaagagtctgctttttttagctaaacagtgatctatacttatcaatgggccatatgttttgtatcccttttgattatgtctttttcccaaactataatcattaaaaataacacataaacacactttgtgttttgtctgactgagctgccagacgaagagactgctacagttatgatttaataatttacctaaccttctaattcaattagtctgtcatggaataatgtggaattgtaactttattcagtagcgggtttcctagttttactgttttagtctagttttgaataacttcccatctaaaaacaaaataaaaataaatgacgtgaaatactactccgtataagttaatagatttatatatggctaggtcaaataaaatgatacaaaagttacccactatcaaaaatgtaacatgataaaataaaaaaacataattggaaaatgaaagaaatcacaatacacaaggaactacgtaccaattctaatggaaagaaagtttggttactttttttattcgtaattagaagatgctgttcatcagttcatctacctttttggttttggtttattacaaaagttgtgtctattaaatatttcatgtcttttttatagtctttcacctatatatgctagatgcgacacctgataagatcactcgtctcccaccgtcatcattatcttttatttttgggtttgatcagccatttatacccttttaagttttaaccctaattagaaatgatatatcaccggactccggtaactctagggtgatatcatggccgacaagtatcttgtaaattttttctcccaaagtacaactgaaaattaaactaaactgataaaattcgtgggaaacgtaccatctcataatgatacatgtgaaaagtaatatagatgactttaagacttcaatctgtataagattaagttctttatgactaaaacaaataagcactaagaatgtgagacagatttagtattgtaagcctttggttttgtttatgggaggaaaaaaagcgagtgcaaaatcagaaagtgagagtttttggtgtagatcaatgttattggtctttaggatcttatagtaatatgttgaaaatatatttgggacgagctagaagactcccaaggtcatataaatgtgaaactaaacagtaattgtaatagtgttcaagaagaatcatctaacacgtttaaaaagcttagacttgttgttgacccttgttaccctttcatatatcttgtgtttcttacttgagtttagaaaaagaaaaatcttaagcctttcatttggaatgcttggtcatcttgtcagccctctaggctcatgtatatctcccgattgctcgatcccgaaagtcttcactaaccttcgttgtcagcttaatcctcaaagttttgacttccaaaaataaattatgtgttgtaccctttatatcaactcacattttgcttcctcgtaaacaatgtttttttttttctcctccgagatcgaaccatcatttatagtacttactacttatttccttaaactcataacaagttcgaaatttgggccatattgatgtcttaaaaataggcccatataagaacaagaaatcataattcacaaaaacacagaaccctccgtctcatgaagaagcttcacgataacgacggcaaatggtaaaacgtgaaccacctcaccaccagacacacaaaaagacgagaccgatcggcgatcagtagacttaaccaaactcgcggtgaaacagtcggaatccaccgctataaggaacgatgatg

SEQ ID NO: 3626 - DNA, 3000 bp, Unknown; identical to SEQ ID NO: 3611
  misc_feature (1)..( 3000): cDNA_ID_1821270_gDNA_ID_1620653_Annot_ID_163555 3000 nt of promoter + ATG

SEQ ID NO: 3627 - DNA, 3000 bp, Unknown; identical to SEQ ID NO: 3610
  misc_feature (1)..( 3000): cDNA_ID_2152794_gDNA_ID_1620653_Annot_ID_163553 3000 nt of promoter + ATG

SEQ ID NO: 3628 - DNA, 3000 bp, Unknown; identical to SEQ ID NO: 3609
  misc_feature (1)..( 3000): cDNA_ID_2152792_gDNA_ID_1620653_Annot_ID_163552 3000 nt of promoter + ATG

SEQ ID NO: 3629 - DNA, 3000 bp, Unknown; identical to SEQ ID NO: 3596
  misc_feature (1)..( 3000): cDNA_ID_2164556_gDNA_ID_1620653_Annot_ID_163525 3000 nt of promoter + ATG

SEQ ID NO: 3630 - DNA, 3000 bp, Unknown; identical to SEQ ID NO: 3624
  misc_feature (1)..( 3000): cDNA_ID_2152800_gDNA_ID_1620653_Annot_ID_47797 3000 nt of promoter + ATG

SEQ ID NO: 3631 - DNA, 3000 bp, Unknown
  misc_feature (1)..( 3000): cDNA_ID_1821262_gDNA_ID_1620653_Annot_ID_47798 3000 nt of promoter + ATG
tatttcatttcacgtgtaagttcgtcaagttgtggcgtgtgtcttggaaattgatgttttgtttgtagattttaagagctacttctaaaatttacaagagttttgtaattttcaattatggcccattattctcattaattcattaaaaaaattatatacattactatctatatctagcataggtagttttttttttctttttctttggtagacctactgaacaaatatctgatatatcactgactggataaatatctatagagatatttttgatagaaatgagtgttaatttaacgtaaaacaggaaactgagaggagaggatcttgatggattgaacttagaagagttgcagcggctggagaaactacttgaatccggacttagccgtgtgtctgaaaagaaggtttactactatacataaactaatagcatgcatattttccttaacgtggcatataaataataagctgtacatatataaaagtttgactttgttgttgttattggtaaatagggcgagtgtgtgatgagccaaattttctcacttgagaaacgggttagtagttagtacatacaattcgtataactaatggatcataagcctatctatagctagtgactttcttaataagtgaaacagggatcggaattggtggatgagaataagagactgagggataaagtacggctctaaacccttatagatatcatggaataaccttaatctatttttttatgtataagaaaatatgatgagggaacgtatattatatatcggcagctagagacgttggaaagggcaaaactgacgacgcttaaagaggctttggagacagagtcggtgaccacaaatgtgtcaagctacgacagtggaactccccttgaggatgactccgacacttccctgaagcttgggtataatttgtttaactgaacatatttcaaactttttgttgacattttgtatgtggatgtttactaactgtttgttggttaggcttccatcttgggaatgaatctgagagagagaaagatccagcagagttgacttcgatggaagcccacaaatattaagtctaccttttccctttcttttctttgaataagtgttgaaaaagaattgagatgggaaggatgaattctcattgcattgcagagaagcaagtttcagatattgtacgtgttattggtctttataactattttgcaccaaagggattcttcacatcacggacaaataataattttaacactaatgaaacaagtaaatatagtgaaacgataggttttctatagtgattctttacattaacaacaatgaaacaataaatataatattggagaggggtgtgaaagaacaaatatgttaattaatttctacaaatgttttcacctcctttctcgattcatataaaacaaaggtaagtctttgttccttaccttcactctctagaaaagatttttttggccaaaaatatgtattcacgcaatcagcagaacaaaaacctcggaagatcacgtccaacgaaggacctttaggcttaggggtaacgtcatgtcttccacttttgagcaaccttgcaaaccatcaacgaagtctttcatgtgcattttattcaacaatggagttttgtaagaaggaactattgaaaaaactaatggaactaaggtgatctagatagtgaacttagcttttcccaaacttttctttatgcactacaaaatttcaataaattaagtttttagaaaaggttctcaagtgaagttagaattttataactcaaacaatattcatgtacgtgtccaccggttttcatggttagattttgagaaagagtgagtccaaactttttaataacgtttttgattccgtgtaagaatgtgtgattctccctcctcctgaaaccctaacccaagacaggagatctttctaacacattctatactaattcacaaaaatcttccaagttccgtccgatgtgggacaaacaattctaatatcccctctctagttaccgctacgagcctacgaccatcattctttgagtcgaagttatacatatgaaatgggaggcgtgattcacgggtgaatcctacatttgagaaattagaacctatgatctgtgaccatattacaagatttgaatctgaaaataaattttattcttcccaatatttgtttttgcgaaaaaaagagattatttggaattgctgacgtcacatctctctcaggagattcccacccggaagtatcaactgtcgtcgtgtatcggttgtttccgtagatctctgttaccactttccatccaatttcaacaaattggatttggcaaactttcggatcagaaacgtgctcgggatgaggaggtacaccgagaaagtttggtcttttattcgttcgtcgctgagtttagaataagggattgtcttcatcgtacgactctgtttttgttgaaaatcgaatgctccaaatgaagcagccattacagaaccttaatcagtcgcagaagacagctttagctggtgttttcgtgctccttttcccgattctctatccgaatctcttcagccctcttggtcgcgcctctccttctctcttctccgtcagtctctctctctctatctccgatgatttatttggaatttcacattttgggattgtgaagctgaagaattaagtttggcatttgcaggaatggaatgctccaaggcctagacatttgagcctactccaaggcgctcttgatcgacaaattgtaagtgggtttagctcagtttcttggatgtatctactacgttcctctaaatctttttcttcttcctcgaaccaatgtgtagtcgatcagacaacaagttgagttatggtctcccttggcagatcaaggttggaagccttgcactgaatcttatagaggcgcttgtaagtttccaaatataaagctttcttccttctttcatcgtttacattcatgtgccctgaaaagtttgtattttgattg

SEQ ID NO: 3632 - DNA, 3000 bp, Unknown; identical to SEQ ID NO: 3622
  misc_feature (1)..( 3000): cDNA_ID_1821258_gDNA_ID_1620653_Annot_ID_47799 3000 nt of promoter + ATG

SEQ ID NO: 3633 - DNA, 3000 bp, Unknown; identical to SEQ ID NO: 3621
  misc_feature (1)..( 3000): cDNA_ID_1821254_gDNA_ID_1620653_Annot_ID_47801 3000 nt of promoter + ATG

SEQ ID NO: 3634 - DNA, 3000 bp, Unknown
  misc_feature (1)..( 3000): cDNA_ID_1821250_gDNA_ID_1620653_Annot_ID_47802 3000 nt of promoter + ATG
tcttcacgtcggcgacagtgaagtcacgtgcacccttgaagaagtagacggctcggacgtagtggagcttcatggctaagtccatgggtgtgagctgtcgtggcttgttctcacctaccacagaagcaggcaccaccgaagagagcctgacactggtcactgggcttccctccattttatttttgtgagagagctgatatgtgtagcttataggcttaaatgggatgtgttatataaggattgagtttcgaaagagagttgagttcagaataggcatgggtatcactgatttaggacagttgggaaaactgtttccgtgacggcaacattaaatgtgggtgggatttgggtctttagcaacaacattagagttggacagttgagtcatcatattcagatccatccaacaacaagcacactttattacgtccaccttgtccttattggcttcaagcaataaacgcacatgtacgtgtcgtagccaactagtattatattacggtacctaacaagtcacattaatctataaaaaaccaagttcagtttcctggtaacattgtttccaccagcaaaaatgatcttaatacggatgcggttcatttccacctcaaacacaatcatgcaacaaatttcctgataatgattttacataattgtacgataactaaatcttgcgaaaaaacagtaaaatttttggtagagaacatccctattgccaaccaatctactcctaattgcgccctcagagatgttcatcattcgctgttgtgtcttgttaagaaaataaacacaagtcactgaacaatacctagttcgaaagagtcaacggtgatctttccaggtacctcagatgcttggacttggtgtattttcactaggccagttgtcctgattaattgcttgactcatcgcatgtagcaccatctagagaagcagcaaggtactcagcaaggctctgctgattactgctagttttgtgggtagcttctgaggtcacagatttttttggtgctatagacttgggaagccaggcttgacctgttgagctgctgctcgaagcatctgagcaattcttccataagactggcttaagatgcttccatggatcttcagccatagagttggagtaaaatcgttctgcccctggttccatgggtcttcttcctccatctctcccaaagcttgtgttcataccgcgtcctcgacttctgcctcttcctgagttaggatacgtgtttccaccccagtttgcattttgtcgtccataattggaaaactgtggaggagtattgttgtagctgcctcgaccaccaaatctattattccccatgttcggcatttcttgagagaatggaaaagggcgaggtacccattgaggtggacctgaatggttaactggtggaggcctaaagttgttattccaaccggcgggtggacctctgtgtgagggtgaaagatgtgccatccctcttggttcataatgagctgcatgaaagccaccatgattggtctgtgcctgatactcactacataatgatcctgttcaaagttataatgcaaggatcagaactggattactgttcattgcaaggcacaggacacaaacctaactgaattccataattgatgtgattttcatactgtcaattcctagaaagtgaaacttaaagagatatatcaaattaaagtagctaaagctaataagtttgaagcctgagactgagagacaaatttcttcctccattgatcttgatttgtagattataatcaagaacacatgactaaacccaaacaaagaacaaaaatttcatatagatttgtagaagagaatcatcacctaactctacgaaagcccaacaaccaaataccaaagtgaattcctgattctgttcaatcctatacctatactcaccaaggaccaactaacatactgtaagttaaactctcatgatattaggcaatcttctttatcagtggactactttctttggcctcacaagaatatagacaaaacaaaaattaagacagagtcattgactatcaaggcagaaacaagcacctggaggaactgatggtggaaactgaggtggtacaggagagcttccttgatgactaggagatgagatgtattgttgcttaggggtcttgtttttcttgaaactagaataagcagccatgggatcggtataataatcaaacctttgcgtttcaaatgaatcctgctggtgattggatgtctctgccaatggattggagaggtgacctgtgctcatagatgtttcagtacctgtagtagcatcatcatcattctgcgctgcagcttccattcgcattgcttttaacatctgttttcttttctctgaatcttccattgtgattcaactacaagatcaaaaggaaatttagaaatcaatccttcaaaatccaaaacacgagctactacaatgtaaaagcattagatacataatcaatctgaccttaaaaccccaaattcttacaattatcggatacccaaattggaaaaacgaaattgaaggtgaaacgaaccttcacaaaagtatggtttctccaaaaatcttcactttctcgtgaaaaccttcaactgtgaaacaacgatgatgacgaagcctttcactacataaacgaagacttccaaaaccgggttagtgttcgaccgtatttttcaattaaacccggtttactggtttaagcgattgaaatcattaaaccggcccattaaattttccgatagaaccttctctcagtcgctcaattgcccgaaaacaaaagtctctctctctcgatcgacgccgcaacgtgctcctttcaggtgatctgcttcttattctccatttcgtcatctctgttgtttctagatttggatcacgttttttctttcctcgatctagtgtttgttttaactgttttcgtaatttctgatcagatttaaccggaaaagttgaatcacactgtcgcatctctcacagtcgtcggagaaga

SEQ ID NO: 3635 - DNA, 3000 bp, Unknown
  misc_feature (1)..( 3000): cDNA_ID_1843191_gDNA_ID_1620654_Annot_ID_47803 3000 nt of promoter + ATG
aattaacaaaaatcatatataaataattgaattagtgagttaggaaaacatacggcttggcgtcagagcacatgagaaccttaggcttgttggatgcggcatctttgaagactctaaagaaaacaggagtgtattcttctaagtcagatgtagccaacgtgatcaaaccaaaaggaccaactccaccattcacattcgaacctttcaagttacataactctagtggtttagttgcgaagctttcgtcaaacttttcggccttctctagatttccaacgttgaatgtcacatccacatccacctgagcaggagtgattccttggacctcaaagcgttggcccatctccattttctggttggtcatttggacattctttcctctcaatgactcaatctcttcaataggccaaaacacgagttgcttaccgctagagtcaagcaagattgttcttgggataagctgaattccggcccaacccttcacggtatcatcttgaacggtgtcggattcattggcccacccccaaagaattcttctgttcgtcttgtcatcaaagaatgtctttgacgcatagtagttaccataatcaaatctcaaaccatcccaaccgtcaggagtgtaaccgtctggcctgtaacgatccttcttggtgtcatacgttccaagagtgtagtactcgtatctggtcaagtccaaactaaccttcaacacatgcttggcgtttggaccgtcgtagctgaagtccaaaccgtttttcttgtcggttacggataccgggaagaaatcgggacattcccacataccggttttctttcttgagtggataggacgtttgcttttgacccattttttgaagtcacggctcttgtacatataagcaattcctctgttctttctctttgagccaacaagcattctccaatacccatcttttttgttgaaccaagccgtggtcgggtcacggaaagcggatccgttctcgccattatcgggttttacgatggggttatcgtctggctttatccatgtcttgaggtatgggtcggaaagatcttgtggaatggcgtagttttgaatctgagtctggttctcggtgataccggtgtagaggataaccggtccttttcccggtacgtgggtagctgaaccggaccatgtaccgttgatgtcgaaccatttggatgggtaaatggctggttcaagggcttcccaattgatcaagtccttagaaaccgagtgagcccacacaatgttaccccaaaccgcacctttgggattgtattggtagaagagatggtaaactcccttgtagagcattggagctgttgcaatttttgaatattgttacatgcaatcatatatataatgtttttgtcattaacttataaaaagggaaaaatatttgtaatggacttaccattcggatctgttggagtcaagaatgccataacgaaggcaaaacaacaaacccaaggaatttatgttagaacaatgtattttggttgatataaacaaccctagtaatagaagttgaataaatatgaacttgaataagatgtcacatatgttgtaccgttgatccaatggcggggaggttgaaagtgataagcggttctgtgaagaggacttactgactccaatgatgtcgattttgattgcaatttcttgaaaactttgtgaaatgcatcgacgccattattgctaatattgattaatacaatcaatagtaatacataaccaaactttggagcactcattggtgcaagagaactctatgatcacaacaatttattttgattttatttttgatgtgtaaatagtttttgagaaagaactctctgatgaaaaagatatagttttcgtaaaagatatagaagaaaagaggagggaaaagtagagtactttgaagataatatggatccgtaaaataatcctaatctcacgctaaaataagaagtacacaatgtggtttgcaatcaatttacttttgttgtctttttaatccatttttaacaattcttttattggttttgtcgaagaaaagaaaaggtgtaaagtcaaatagtttggtcaattgttttaaggtaagtaatagtaatatcgaggaaaatagtagataaaactaattttggttttagatcagagttttgttttgtctattttttttccttcgtttgttgtttcacatttgtctggacttaggggtacgtcaattggagagcaggagaagagagttagtattacactaaactaattaagtccacccatgatctatctatcaaaacactaagcagaaccaatcgaaatacataacagcacaagaaaggtcgtacgtccttaattatatattgtagttttccattaggtactctacatactatataacccacgtcgccaggatggtgatggattcttctaaggaagattgactgatgctaatctatctcttgtcaaccaaaattctgccgcctgaatccgattctttgacaatagagtcgctgctaaagagctatctatagtgtaaaatccaaaccatctatatgaataagagatattacttgacagtactcttcaaggctatctatagaatcatatcgttcaaactgttgtttcttaaagagcatctcgtgtgttttatctttattaatctacattccatatatgttgcaagctgagtgagtatgcatgagtaaaacaaatagttccacttaaaccttttccaaaaaaccaaaaaaaaatccaattatttgaccttaaaatatagggagaggtttatatagtattgcctaaacgtgagcaacgtaaaattaaagacgctaaattcgtaaatgcaaaatcatttctatttggttgataaaccggaaaaattacacttaaccgagtaaaaggtacgtcactgtatcttccccatatttacccacctgacaatatatgatacaagtaaaatcttaaaatcccaaaaaagtgaaaacaatctctcttctttctcaaggataatg

SEQ ID NO: 3636 - DNA, 1976 bp, Unknown
  misc_feature (1)..( 1976): cDNA_ID_1821379_gDNA_ID_1620654_Annot_ID_47804 3000 nt of promoter + ATG
gaattctctgcgtccacgaaattcaaattcgaaaaccgaaacgcgtttaacgagtaaccaagcacgtcgatgccacgcgcccagaacggtttatcccctttcccactcggaatcagctcctctatcgccttacctaatcccaccgccgtctccgtcgccgccaccacgggaccgtttccgaaaccatcagccgccgtctctttcataaactctctcagaagcgtaaccgccgcagtacgatcgaccgccgccgtgttcagccgaaatgtgagtatccgttgctctccgtcgtcggttagatcgtagagactgacgataaacacgcgtgactcggatttgatccaacggtgtggattgatccacgtgtttttgttcatctcgtgttctaggatgattctgtgtggatcagcgcatggatcgtcgctgtctcggatgatctgagccgtagatacggaatcgaagggatggatttcgacgtgagaatcggcggcggacgtaacgacgaaggagaaggagttagcggatgcgtcgaaacggatgttggaacggagagtggggtggtaaatctggagtttgtcgagggtattttggagattttggagttttggtgttcgggaaagtaagagagctatgacggcgatacctgtgccgccgtcaatcgctctgcaccagctgtactcggttcctccgacgggtcgggtcatggatttgggtacccgatttggctcactcattatccttgagaaagaagagagattgttttcacttttttgggattttaagattttacttgtatcatatattgtcaggtgggtaaatatggggaagatacagtgacgtaccttttactcggttaagtgtaatttttccggtttatcaaccaaatagaaatgattttgcatttacgaatttagcgtctttaattttacgttgctcacgtttaggcaatactatataaacctctccctatattttaaggtcaaataattggatttttttttggttttttggaaaaggtttaagtggaactatttgttttactcatgcatactcactcagcttgcaacatatatggaatgtagattaataaagataaaacacacgagatgctctttaagaaacaacagtttgaacgatatgattctatagatagccttgaagagtactgtcaagtaatatctcttattcatatagatggtttggattttacactatagatagctctttagcagcgactctattgtcaaagaatcggattcaggcggcagaattttggttgacaagagatagattagcatcagtcaatcttccttagaagaatccatcaccatcctggcgacgtgggttatatagtatgtagagtacctaatggaaaactacaatatataattaaggacgtacgacctttcttgtgctgttatgtatttcgattggttctgcttagtgttttgatagatagatcatgggtggacttaattagtttagtgtaatactaactctcttctcctgctctccaattgacgtacccctaagtccagacaaatgtgaaacaacaaacgaaggaaaaaaaatagacaaaacaaaactctgatctaaaaccaaaattagttttatctactattttcctcgatattactattacttaccttaaaacaattgaccaaactatttgactttacaccttttcttttcttcgacaaaaccaataaaagaattgttaaaaatggattaaaaagacaacaaaagtaaattgattgcaaaccacattgtgtacttcttattttagcgtgagattaggattattttacggatccatattatcttcaaagtactctacttttccctcctcttttcttctatatcttttacgaaaactatatctttttcatcagagagttctttctcaaaaactatttacacatcaaaaataaaatcaaaataaattgttgtgatcatagagttctcttgcaccaatg

SEQ ID NO: 3637 - DNA, 3000 bp, Unknown
  misc_feature (1)..( 3000): cDNA_ID_2992655_gDNA_ID_1620654_Annot_ID_163598 3000 nt of promoter + ATG
ttcatcagttacatgaaatggattgaaatcagtaaatctctttaatctgataaaaccctaattttacaaaccctctttggatgtggttgcagtagcggcggtgtcgaagtcatcggggtctttggttgggtcagatttgtcgattgaggagcggaatttatcgaggaaaggcttgaaagcgatctctatggctaaccatcctaacgccatcgctgcgaccaccacagtcgcctgtttcgctcccgaagtttttcccatcgctgcgtcgtcgtcttgttcgcgtgtcggtggtatcaaccgatggtttaagatcgggagatgggttttactaggatgtttaaaatgggccggtttgggcttctcattggataaagatagtttgtttgttaaactatggcccaactttttatccgtctattggttaattaatacaaactttttatataattgtaaatataattgaaaggatccctattttattttcttgggaatatatatatggaaaaaaacaatcaatagaattagataaatagttcaatatatcaacaatttcttttttgttaggataaggaacttttaccttttttctaatatagttacaaattgtgtttttttttttcttaatttattatcaaatttcttttttacttatatataacctcctttttcatatagagttattaactttttcattttctcagtaaatgtattaacaaatttagacttaatacatgaagacatctaatatttttattgatatgtgtcgtgaactcgtgacatgttagttagtaatttttataaaaaaaatttagataggttaaaattatttgatatgtgtaggggtgtcaatgggtcaaaatttattggtcaactcaactcaacccataaaccctaatgagttgaaaattttgactcaaatgagttgatgggtcaaatgagttgatgagtcaattggtttgatgagtaaaatgagttgggttgtaatgattaatggtttcaatggtttacccaattaacccatcaagttttgtaaaattgaattaaaccaactaaaatttctaaatcaatgtcaatttaagtctaaccaacacatctaaaccaatttaataaaattaatatttttccaaatttcttaaatatacatgcgatgaaattgagaaaaagtaaactcgtaaattttccaccaaaaaacataaacccgtgattttcccgccaaaaacgtaaatccgtgattttctcgccaaaaacgtaaacccgtgatttttccgccaaaaacgtaaacccctgatttttccgccaaaaacgtaaaccagagattttcccgccaaaaacgtaaatccataatttcccgccaaaaacggaaacccgtaatttttccgccaaaaacgtaaacccataatttttttccaaaaacgtaaacccgtgattttcccaccaaaaacgtaaacccgtgattttcccgccaaaaacgtaaacccgagatttttccgccaaaaacataaacccgtggttttcccgccaaaaacgtaaactcgtaattttgacgctaaaaacgtaaactcgtaattttctcgccaaaaaacgtaaactcgtaatttttccaccaaaaacgtaaacccgtgattttcccaccaaaaacgtaaacccgtgattttcccaccaaaaacgtaaacccgtgattttcccaccaaaaacgtaaacccaagattttcccataaaaaacgtaaacccataaaaagtagaatccgtaaatatcctaagtttgatgataatgaattaataatgataattatttattattattttataatagtaattaagtaaattattaattaaatgggttaacccatttaacaactcaacccatcaaattaaatgagttatgagttgacccaacccatttaacaaaatgagttgagttaacacataactcatttaactctaaactcatttgattatgagttgggttgagttgggttacccattttgacacctctaaatatgtgtctctagcctctactatttttaaaaactaaattttatataataaatttttttatcttaataataaccaagttgaacatattttagttctaaaattaactactcggtttaatattaaactttagaccaggacatgccggataacatggtcttagtgttgtcgtacgtcaccattagagtttcaatttgcataatacaaggtggttgacccaataaaagaaatttgattcaatttcgatataaacaggtttgttttggttcagttttacctattactttttattttgtccaatcccaaaactattatttcaaagacaaattggagaagaaacaaaaaaaaactaatggttggacaaaagattattatatatcaatttcaccacaaaaaacttagcattaaaatattcgaaatggacagcgacgaattcaaaccttcgtgttaattgtctccggcgactatgaattctaaaatcttccactttgcctaaaatatcaatacatcacattcatcctagccttatccactctttcttggaaattctggtctggtttcccttcagcaattcaattaacttcatcaaaccgaccggttcaaacaatcatctagaaattctattttattgttagactagatcatgaaattttgaccgagtcagcacacataaaatctggtacttgacgtggtttagttaacccaacaaagttgttttggttaaacggatttattgacaaacgtgtttcggttcactcactaaaaaacccggttaggtagatactacttcattgacaacaaacgaagcatcctttaatttcaaaaccgcgttttaatcagacttttccttttttattttcagttctaatgtttaaaactttccttttctttttctccatatttgactcgtcaatataaatacaattgtaacaaacagattttgatcaaaagattttacttttctcaattcctttcaactttcaaaatcgaagatctcttaagcc

SEQ ID NO: 3638 - DNA, 3000 bp, Unknown
  misc_feature (1)..( 3000): cDNA_ID_1821346_gDNA_ID_1620654_Annot_ID_163595 3000 nt of promoter + ATG
ggcgggaaaatcacgggtttacgtttttggtgggaaaatcacgggtttacgtttttggaaaaaaattatgggtttacgtttttggcggaaaaattacgggtttccgtttttggcgggaaattatggatttacgtttttggcgggaaaatctctggtttacgtttttggcggaaaaatcaggggtttacgtttttggcggaaaaatcacgggtttacgtttttggcgagaaaatcacggatttacgtttttggcgggaaaatcacgggtttatgttttttggtggaaaatttacgagtttactttttctcaatttcatcgcatgtatatttaagaaatttggaaaaatattaattttattaaattggtttagatgtgttggttagacttaaattgacattgatttagaaattttagttggtttaattcaattttacaaaacttgatgggttaattgggtaaaccattgaaaccattaatcattacaacccaactcattttactcatcaaaccaattgactcatcaactcatttgacccatcaactcatttgagtcaaaattttcaactcattagggtttatgggttgagttgagttgaccaataaattttgacccattgacacccctacacatatcaaataattttaacctatctaaattttttttataaaaattactaactaacatgtcacgagttcacgacacatatcaataaaaatattagatgtcttcatgtattaagtctaaatttgttaatacatttactgagaaaatgaaaaagttaataactctatatgaaaaaggaggttatatataagtaaaaaagaaatttgataataaattaagaaaaaaaaaaacacaatttgtaactatattagaaaaaaggtaaaagttccttatcctaacaaaaaagaaattgttgatatattgaactatttatctaattctattgattgtttttttccatatatatattcccaagaaaataaaatagggatcctttcaattatatttacaattatataaaaagtttgtattaattaaccaatagacggataaaaagttgggccatagtttaacaaacaaactatctttatccaatgagaagcccaaaccggcccattttaaacatcctagtaaaacccatctcccgatcttaaaccatcggttgataccaccgacacgcgaacaagacgacgacgcagcgatgggaaaaacttcgggagcgaaacaggcgactgtggtggtcgcagcgatggcgttaggatggttagccatagagatcgctttcaagcctttcctcgataaattccgctcctcaatcgacaaatctgacccaaccaaagaccccgatgacttcgacaccgccgctactgcaaccacatccaaagagggtttgtaaaattagggttttatcagattaaagagatttactgatttcaatccatttcatgtaactgatgaatccatgtgttcttaatcataacagtttgagcaatttcttttgagtcatgatcgtttatttgtcatcaatttttggaaaagtctgctatattgaatctgttattgtagttcaatcgcataacagaatcattaatctaatcaatattcatacatgatttgttacaccgtttttcgtattttgtataaagtttcgagctgtattattaaggtggaagaagagattaggaatccgataagtacttaaattgttttaagttatgattcgattatacgtatctcttgaaaagaagcatgttagagcaaaatatcaaacttgacaattacaagattgctttatagataaagcagattagctaaataagtatagggagacgataacatgtggtgatacaaagatgtgtcagattgattgtttaacatcatttagttgagaaaactttggacgacgactgacttcatcatatgagaaaacaccaagaaaatgtactactagtctctaatggagagacttggttatagaagttcattgtttaatttgaatatttactccaattcaggaaaatatcaaaaccagaaaattacatgaaaattactatagatggtagctttgcaatgattattgtccggttggatagtttcattgacatttaggattcagattatctcttttatcattatcagtttgttaaggcaagagttttctaatacatgcttaagtcctaatcatcagatatttcttcttcaaaccttttttgttttgttttgataatttgccccattttgtactctaggtttttccacaaagatcccaaacagagattaaaagatgacaatggcatggacctttcaatgctttgtttttttgttaaattagatataaacctttccaaacagtaaattatcaaattcattaacaagtatctatatctctctagtagaggtagaccacaacttaaaaatctcctcaagtcatggtgggtctaacttgtaggacttatatgggccaaattgtataactatatcatgttaagctgaaactgaaagtaattggttccttttaaaagcttagccaaaaaaacttcaaaatgtctgagtcaaatgtaggttgatttctctgcaatttccatgaaagatagatagataaactcttaccaaagtttctgcatatcaaaagttgtcaatttatgctcaagtctaaaccattccgattacataggatcacatgctttgattcgcattttcttctactatatatttacatatttttttgtcctctacacacaatgattaaaaaatgagaatggacctacctttcacagcatttctttattattattttataaaaccagtacaattttactaaattatgatgttaaagtaagagactttgaagaagacgacttagcaaagaccaaaaccaagaaattacataggaacaagccaagaagatacatagataatttctttttgcttgtaatatatttacaacttcataaacatcatcgttctgcaactctctactcgatatccaatcatg

SEQ ID NO: 3639 - DNA, 3000 bp, Unknown
  misc_feature (1)..( 3000): cDNA_ID_3071530_gDNA_ID_1620654_Annot_ID_163588 3000 nt of promoter + ATG
gtaacaaggcaataacttatgacatccattccctattgttttacttttgtattaaatatgtaagggaaaaatgtcctaccttcaatttctataagttgtgaaaagcaatgttatgaggaatatattttgctggtagagagatataattcgattcttatgatataattatgaattaatataaattatatggccctgatatatgctcataaattcataatacctttttaataaagtagttcatttgtttaatgagaacatggtaggtaaaaactaatagtaaagaaaaaaaaaaatcgactactcaacgaatgtcatgaccgtaaaatagttaaaacagttgggccttagaagttcattttgggccgttaagttgaaatggtacaataaacctcacgaggcttttcaaacgcacaaaatggacacaagacattacggcagcgattagattagttctctccctttttgttgtctatagaacatacatctgagtctcttctgttggtttcaaattcaaactaaaaccgaacagagaaaaaaaaaatgaaagaacaaatcatgaaatcaacagaacctaatcccatatacaagttacaaatttacaacaaggtttccgtttgatttataatttggttagatcacggttaaataagaaaccaaacttgatagaaaataagaaaccaaacttgatagaaaattagaaactaatatataataacccattcctttgacaccgtatctttgaccgggtcaatatccccggctaatcggagaactaaacctatctcagccgtacacactctcctcacgtaccgtcttagagagatcatcacgaatcggagaaggagacggcgtgtaaaacggtggggaagcacatggagtagaaaacggcgtagtttgattatagtggctaaagtcaacctcgtcgtcgcttatatccgtcgcgactacctcctcttccacttcatcatcctttacatgatcctctgtaaagatgcttccacgtggatcaatctcacccgtccgatgatcggactcgctagtatagtcttcagcgatggtaaacaaagtctccgaaggtccgcaaagtaaattttctccgtttattgaccactttgatgccacgtcattaaccggcggtgcggctgcagggagcggcggagcggtggcagatcctattctgaactgtttgttttcgagacagaacaagaagaagtaaagaagctctttcgatggcggtggtgtagccgttaggtcaccaccgcgagaggaaaaagcgtcgcgttctgatccggcgatactccgacgacggaaccgacgtttccaccacaaaacgtaggcgaactgcgccgttacagcgacgaggcaaaacgcgaaaacagcgacgagtagggttgcagttggggtaagacccatttaggagacgagagtttgagagagagtaaccttaatactgcgtcgtttcgtttgtcgtaattatggatatgatgttttaagataagaacagaaactgaagtggggtagtctcgtaaattattactaattattgggtagttgaagtgtcataatcggaaaagagttgctgagtaggttccggttagaaagatcattaatagtcaaatcgggattgaaagcgaaggtacacgacacgacttactatttggagtcatggagtgtctaaaatttctttagttttagctgaccaaaaaaaacgagcatctacgttgaatgtgctatatgcgaatgcgaaattggtgacttttataacaatcagagatttgagtttatcgattatcaaaaaagcccaaataattattaacattttaacggcccattttagtctaacacgccactgttcagggtttatgattaggattctagtttttttgcctgatgcatctccatcatctagattttaatcatatatgaggtactaattacaaactgtttttgaaataaatttctaggaattgtaaaatagacatgcatatatatactcgtcagtcataacacgcctttgaagtatactaattcatcttgaagattcttgaaagtgagctcatagaagaaataagatatttaagcccttgaaatgaccccttcttgagatatagatttgggccagtaagctctcagtatatttaaatttgaacctatagtggattcatgtgttgcttacattagtttctaataaataactagtactatcttgttttaaaaaaaaaaattaataacctaaaaagtttacaagaggagaaaaagttagtgtgtttttatcgcttttttaaagataaaaagtgcattatgttgagatcaaagtttaggtctataatgactaaatgcccatcacaagactcttaaaagcttaaaacccccccaaaagcagagagatagaatttagcttttttaccctctctttttctcttctgctttaaaagggtcacccactttctgcaattcttgtaaataaattaattatttacttttctaaaatcatgcttaactttatcttccttcctgcttttgaggataaactttagattccatgcatgaattgatggacatctatacgcattcatattatatgcattcatcttattttgcaaatatattaatgtggatatcgttgtgtttacacatgggtgttttctttcaagtggtatgattcatataatcataaattgttgtcatttagaaattgaccaacaaatatttgttcttaagaatcgattatagatgtagtgagctaagtatatagaaaaactttgctgcatgcatatacatatatatagaaaagcttttttaagatcaactacatgtattaatattatcataaacaactcgttttggtacaagtcatatatgaatatttttcaaagtaaccgctctttttccatacgagaaaaagatatccaagcggaaaaagcttcatcttatttgaaaccaaagcaaagcatcacattgtgaaaggagaatcattcacaaaagtgatccatacatatg

SEQ ID NO: 3640 - DNA, 3000 bp, Unknown
  misc_feature (1)..( 3000): cDNA_ID_2169424_gDNA_ID_1620654_Annot_ID_163584 3000 nt of promoter + ATG
aagtcaaataaggactatattgtaaagcgtgttaatacaatattaatattgggaccttatttttcgcttttttagaatttaattatgttaaagaaacaaatttcttgaatgaaatgaatagagatgtagtagcaaatgctggatggttggcagctgacgctccaatctcgactactttatatttttcaaagcaaaacaacgaccatattttatttttacttttaaaaataagtgtgtctgcctttaagtataaattgaattattgtagtgaacttttttttgttttttgtttccactgtttattatgatatgtttaaaaatacatatataaccaccagcaaaggagtgtaaagtaactcattcactacaagaattatgtaaaaacattttcctaaaaataggttccattttgatttagtcttccttaacgacgacgattttgatgatacatattacatgtatcacggaaagggttgaataaagtcaaagcaaacatcacaagaaaagggtcaaatgaagcagctttggcccatttcacatgaataatgtttcattggtcactttttcctttcgttaccactttgtcaattgagtcaccctccgatttaaaggtctgtacgttcgttacaagttacatcaactcgagtatccctaacgagcactcgtacattttgccctacaatcaagaatcaataatatccaaacaacacttttatttcgtgactgagccaaaacaaacgagaacccggtcctatcaaatttatatgaccaggacatttcaagagagcatcactatatataacccatcgcaataaataagaaataaagtttcattaatccgagatatttagtgtcttcggttttctaaaacactcatttagagacaacggaatatgattctcacaaaaaaaaagaatatgattcttacaatacatcacaatcaaatgcatatgaatgtcaatgagaggagtgtttaagttaattgtgttaaaaatctcacatcgaaagtacaaaccttatcacaataggagaataagctataaaaaacctacgacaatagatatgttattatctcaaatacccgtaaattgaaactcaatgaattattaaatacatggaatcaaatttcagtataaattttgttaattaaatatagataatatacatttacattttttggtataaattataccgaatattacaaaaccaaactaaaacgtagattcaaattgaactgagtcgaaccgaccgactcaagatccccaaaaccaaaaaacttttgttgttgacaaagaaatcaaaaagggctaaaaaagaagatcgagaggttcgggaacaaatctctctatctaaaagaaatcataagtgaccataatttgtacaatgttcgattgttagagttgacgttaattttattgtcaattgcatatatgtaaaatatgtcttaatttaaaaactaatttgttcgaatatagtgaaaatcatgttttagtgatataaaaacaatttgattaaaataataacctacgcctgaacctcatcaactataaaggcaagttaatttttttcaataaaccaagtttgcttctaatgcgaatctaaattgttgtgttatggacaatgccgagaaggtgttctaagtggaacaaattattagacaataagatttttctccaagctagttgtagagattgttttacaataacaacattaaaattttaaaaaaatctagataatctatgattctaactcttcttaccacggacagacgatcgcggatccatagaaacttgttcatcgtaccagttgaagaaaccctctgtaaacaacgaaatcgaagtgagaaaaaatacctccacatcaaacccaaatcatcagcgttcattcgcgtggacctaaagtaatgtgggaataagaaaatttaaggcggttgtcaaaattataaaaaattaaattgaaaataggagaaattttttagttcgacacatcgttttttatttatttattatacttttatttatatttaaattctgagtcttccgaaagagttgatatatttgtgctggctacataatttttcattggttatttttgtgctatcttagtataatgataacatcttctcaatgcaaaaacttataaaggtttacttatatttttcctctcgcgagtactatttatttatctagacttacaaactgattttaatgtgtgtggatagagtctagtatcactattatatcagcaaagataacataaaatccgtagcaaatttcacagaggtcatgcgttttatagattaagagtagaattaagcttttgaacctccgtaaaatgtatcttgttttagctcacaaaagctttattataaatcaaccataggtctataatagagtaaagtccatcaagtctgaaatgaacatttttcatccctaataaagtttcaacctttttttttttttttttttttttttaagtttcaactttgttcttgctaaaaataaagaagcaactctgttcttattgactatatcaaatcatccctaaactctagggatttacttcaacgacaaagtaagagttgcagtcctccattttgaacctttctagaatctcacaagcatactccaagaaataactcatttctccagagtcggacttatcgaattctatcctcatggaagccttaaactcttcaaccatgcttgctttagtccttgtcaggaccaaatcatcaacctatgatacatgagcagtttacttctatgtcagtcttgacaaatagtgttacttttgttatgatttagtgatgatgattcttgatgctatttacaatgttagagcttgagcaattgagataggtgaataagaatttgtatctaggtgatgaaatagttgtttttgtcttgttagtagagttttcttgtaatctccatgcccttttggtgatgatcgtttatgtttagttacaatgttaagataggtgatgaaaagtgaaca

SEQ ID NO: 3641 - DNA, 3000 bp, Unknown
  misc_feature (1)..( 3000): cDNA_ID_3071544_gDNA_ID_1620654_Annot_ID_163575 3000 nt of promoter + ATG
tcaatttcaagaaatatggtatcttttgacttgtttaaatcttttcgctttgctactattgacataagtttttcttgagtatctcttgtgcacttaacagaaaaaatcattagaaatatcaacaatttattcactgttttcaataaatagactcattctcacatacgtttgattattatgagtttaaaacattcaattttgtttgttcatgaaaaatcacatactcttaacaaaaaaaataattagaatcaaacatttaccatcattgtgtcttaattattgttagtatatgttattgtattaaaatcatattcttagaagaccaaattctccattaccaattagtctacttagcattttttttctaagttgaaaaatataatgtgaatgtttaactaaaattaatatttacttatattaataacactcaattttaatatttacactcaattaatatatatgcataaaatctgtaactgaagtatgaaataaatactaataaaaataattaaatattgactataaattcaataatgtataataaaaaattagaggtaaatctataaaaaaaaaagtgaggtgaaagtaaatatctatttgaaattttgtgagaagtatagagctctctactcaaaagagttactttcttaaaattaaatcacttgatattactagagcagttaaacccataaattaaattaaatctgtgacacaaacatatttatgtaattatatctatgatttgattagataaatttttaatatttatttttgaatttaaaaaacaaaaaaaataatcaaaaattcaaaatgaaacaatagtaaattgagatgccaagtggaccaataggaaggtagtgaaactttacttttatatatacatgattttttcattttttctctctgtttattattcatttaacataaaaagacaatattaccctccatataactcacaatatttccacagtttttcacattatatttttctctacaatgtttatcctcgaattaggaaaactgaagaagagcagcttcgttttcagaaccttcccaggtatgttgttgcttttcagaaattatctagatatgggttcttctttcgattcttttttaatcatgagataatttttgatatatggtagttgttgaatcataagagaacttttgactagattcgtttttttcttcaaaatttgagtgttgttgattgcttttgtatgaaacttgtcaaaaaaaaaaacttgtcaaaaagattttgagtataggcagtaaaagattttagattcaaggttttcaactttgagatgattagttttcgacggatagaagagaaatccgatgaatgaatgaatctgcctttaggtaacatatgattcaacctattcataaattacttattcaaagcaagagatatctgaaaacagagaaagattcattacaaggaaagagtttcaaactttacacagagtagttgacttgatcaatttgttctttgtcctgttcggatgaagacgctttgaaaagttcttctatccccttaagctctttggcgacatcgatcattgtaagcacgtcttgtcctggccagaatctgatacatctcaaagcaagcccaaaaaacgtttccacttgcacagcagatgcttcactctcaccgttccatatgtttgaatctatgacatacatgaactgatccgctaattcttcaccacaaccaggaaatgggaatccaaactccccaatgatagcagataaccaggttaggccaagctctccgcctagaagaaacagcattgtaactccaaagctatagacatcaaacttttcggaaactaaacctgttccattatactccggatcaacggataccccataaactactttatcatcatacacagatgattctccctcagggatcgatattctcaaacagaaagaagagagcttcgcagtcccatcttcgtccaagaatatgttttgaggtcttacatccctgttgattatgactcgaggaaaagctgtgtgaagataagctaccgcatttgcaatatccttcccgatctttaaccttgcactccaaggtaacggagtaccgtccatgtcctcgagttttagaggtcctttctctgctaactcacaaaccagaaccggtttataaaactccacacagcaacccaacagcttcaaaacgttcttgtgactgctcatcatcgacaaaaccgctatatcgcggtaaacattttcaggagaagaaaaaaggacataatctccttcccatttcttgatgagtactctccgttcttctatagtacccttgtaccatataaatctatcttttgctatgatatgatctgcgtcgaagttgtttgttgctttaagaatttgatcagacgaaaacattcggattggattgtatttaccatctgaacacgcgattagctcctcgtgcaacaagctcccgttcttgtctgaatgtttccttgtctcactctccgttttgaaaaaacccttcatatctttaatcaggaaaactaataggagattttctaacttcttggtgctaatagaatcagggacgctataaagctgtatatctcaacgtgacaacaacctctgttttgctaaagaagaagcagcctgcaacttgcaacaaatggttaattattgggcttaaggaaaaaataattattgaaactatactttagagtataggcaatatatgattcaacctatgggtttacttactctatcggtacctgtttttgtctaccgttggtagaatgatattgcaaaattgatttggttcattagattgtattctacttttattttcctctttcatctatagtaattttgtcaatctgccttaacttttttgcttattcattggcttactcaactttcttcttctccttttaactatgcacttcggtcactgattgattcttgtgtgtatttttcatttcagttttaacttactggcacaagttaggaatg

SEQ ID NO: 3642 - DNA, 3000 bp, Unknown
  misc_feature (1)..( 3000): cDNA_ID_3071547_gDNA_ID_1620654_Annot_ID_163572 3000 nt of promoter + ATG
gctttaattgaaaaacggataatgcggtatgtcacttatcgttatgtaatttatttagatttaattttccgtataatgaggaataaaaagtccaaagagagtgtttggacagtgctacaagaaaacttcaaaccagaacaagacaattatagacatcgatcctcttccataatcaatgaaagcaatctataggtttttgatgcttttattcatttgtgcaaagggaagaagaaacctttcacatgattgatacaagctcatgcatatagaaacggtttacggttctgactacaaaaaccaaccaatcttgaaatgaataagttttggagaaagggcttgcattaaacaagatatacaacttaattggtttttatgctcaagcgtagcttcatctcacttggaatcaaattcgatcttcttagtatataacttaactcgattagtagcgattacttgaaaaatattagagaaacagattccagaagttatctccttcactcttcagattcgtaatgaatgtgattaagataacaaaagaaaagtaaacaaatggtagtatcaactaaaagctaccattaaattccattaaatagcttcacatgggatataactgatgctgaggtattagattttatggaaggtcaatggtagtatttgacattttgttatataattattttattttctgctaaaacaacatattcctagcttttttatattcttataatcttgtgaagcaaattcaaaaattaaagaggccactttcacaaatcatcccagtttaggctgttgtataattgccattaaagttttgaaaccctgttgcataactgtcgttaaattttttagtctataaatcattttaaatttgattgtcctcttaattgtgaaacatttaatacacgagagattcctaagttattaacagctatattatgtcctcgtgaggtctgtattttagttattggcctcttgtattaaattctagtaactgtttgtttcattttttttaatttgttactctttcgtttgctattcaaagttctaaaattcaaacgttatccctctagcttctcaaataatatatataggagattttatataattatgaaaattctacttcaaatgacggtttaaaacgcaagttacaaacgtctgtttaattgatcataataaacattttgagagtactaatcaataaatcatactcatatccagttactttccattgttcaaatgaaaatcaatggctatcttgatcgtaacaatttagaaaaatgaaagttatgcaaatatgtgaaacattaaaagtacagtaataaagtttattgtaccataacctttcgtccaaataatttcctgttttaaaataaaaagacaggaaattaaagtcaagtaatttaactaccatcattagattaatcaaaggaaatgttttttttaaaaacattaatggatatccttttattcttctaaattattgctaaacattttgtgataatttttacaatgactagtgaatctggtagttagaaacatcttaatggttttcacctttgaatatccaatttaactaccagcaagcactacttacatacatctatctacatctttcattcttttatattgtcaaaatttgtcaccaccaaaaacattgatttatattcaaaatttggaaagtaactcaaagtagttgagttttgtgggtaccttcagaatgtccatttgattatcaatcaaaaagaagtttttagctggcgcatgaaaccgtcgttggaaactttgaaacggatgcttcactgtataaacgtactattattatttaatttttaataacgaaaagtaaattgtagatgaattctttttatttgattcatttttagttagtgctagccattatttctatctttaactatattcaaaattgttttttcatactataaactattattagaccattttcttgaatgaaccatactttctagacactatttctaaaatgactataaatcacaccatgtagttctatatttgtattattgtagtttattgatttaacattgaaaatttaataaattatacaattaaaaaattaataggttttaatacgtgtaaaattataaaacaaaatttataatgaaacagagagaatagtaaaaacatttatgagaaaaatatgtattggtgtcactaaagttattttagacatattttcattcaagaaatcagttgaataatagtcttactgtgacaaacaatttaatagataaaacattgagtagtattaactaataaatgaatcaaacaaacaaagtctaattgataaaatacgccatataaataaactataagtttctttaaaatatacattaaatatacaaaacgacaaatttatgaaacaaaaaagtgaagtcataagattaaaactattgtgaaatggatgacaaattcagtttcttctttattctttaaaccctaagtttaaattctttcaaacacaaatcgtagtatttgtaaaactgttattttcttgaaatataatttaacgttacattaacaaatcaaatggatgacatattacttaaaatttagattaccaataaaaaatcataaattcttcttttaaattgtaagatttaagtcttcccctttacatttagcaataaatagtttgctgcactggtttaaatgcactaatgcattgtttactgaattgtcttttgtttcatatatttgtctctactatacttttactaactttcccacctccaattaaaaaaattattacgaaataaacaaagtcatatctctctccacaacataattactttattcaacaaatattaattcctagtcatattttagctcctcttcttccttatatattacatacatacattttctttagaagtcattaccatcaacccatcccctagaaaaacacagagaaaaacaaatacaagaatacaaaaaccctctcgacgaaaccgaagtatcgaa

SEQ ID NO: 3643 - DNA, 1976 bp, Unknown; identical to SEQ ID NO: 3636
  misc_feature (1)..( 1976): cDNA_ID_1821379_gDNA_ID_1620654_Annot_ID_163569 3000 nt of promoter + ATG

SEQ ID NO: 3644 - DNA, 3000 bp, Unknown; identical to SEQ ID NO: 3635
  misc_feature (1)..( 3000): cDNA_ID_1843191_gDNA_ID_1620654_Annot_ID_163568 3000 nt of promoter + ATG

SEQ ID NO: 3645 - DNA, 3000 bp, Unknown
  misc_feature (1)..( 3000): cDNA_ID_1030715_gDNA_ID_1620654_Annot_ID_163601 3000 nt of promoter + ATG
tggttcggttaagttcggtcatggtgatggttcggcttatttgttcgatcctgatatttataccgatggacggatttcggttcaagggattgacggtgttttgttcccggaggaaaaaactccggtcgagaagaaaaccggcgttccagttgtcaagaaagcacctaaaccaagaagaggtaatcaaattttgatcaatctttagtctattaatttttgtccttacctatttgatcgtgacattttaaccccaaattatagaaattaaaaaaatacataccactactacaaaaatacaaaagttttggtatagacaccattacaaagttataaagtcactcgcttagggaattttttatgttctatgattttgtcatattaaatggataactaaatcattgttatagaaagataatggtgattagtccatatacaattagtctttcaacgagagagtactaagtaaacaagtgagatttggaaaaagtacaaacgtgtgagaatggagacaaagtctctctaacaaactttgatataatatataaaatttcaacaatattatacaaaattttggagataattaggatttataactacttaatgatccaccgacgaaagtatcccatgttaaagtgaatgaaaatcacaaagtgttcctttttctttgttttttgttctaaagccaagtatgagtcatataatcatattgtaataaagagagaaaattttctttatttatttctaaatatattatttttgcattagttagaaacaatcattttaatagtccttcgttgttattgttaataaaacaaaaaccaaaccgtttgaaaaaattaataatttgtatgatttatattatattgcaggtaaattgatggaagtagcatgtacaatgctgggatcacaatttccaacatgtcaatgagatcaaattaaatccgggacatgagaattttataattctgtaaacatgtgataaaaatgtgaacagaaaaaagaaataatgtaaatgattatttttttgggctcgttgcaatatgattgttaaattgtaattttcagttgttttgagctgacgtaaccaaaccagattgggtgggtcttttcttttctgttggatgctactgtattggatcgaatctgtccatttagagatcttctaatggactactagattaagcagccctaggtggtaggttatgcattggaaatactgtaaactgtaaaggcaacaatgtccataactctaagaaaataatccatctaattcagaacatcaatatacccaaatccagttttagaaacaaagtaaaaacagtataaaaaaaaagccaaaatgtgatgagaagtcacatgtcatctcgagttgatattccaacaagttgctaacattaaacaacatgggatagcatatttgatattccaattcacaacatgagcatgcccggtccacaactcaagctacccaaacaatggctaagatcatcaaaagagatgagtaaaaatacaaaatattataggtatttgttattaattcattttttgttggtcttttttttaccatatcacatgagttttaagctttaaagttaataaatactaattaagcggattggtaatgaatttttagtaaaattttggttagaaaaaaaaaaacgaaaacaaattttttcttcttctttttgtatgaatataaaactatattcaaaaagacgtttgcacaaaattttaatttcgattgattccattgttatttatttttatgttggcttggattccattggtattaaggtaagtgattttagtgacaaaatggaagaagttgctttgaagaaaaataattgaaaacaaaaaaaaaaaattgactattgtttttattttcttacaaactatttatggatttaaaagttgttttatcaagttttagtatgattttttttatattatattattagtaaatttgcgagaaaaatataaagagcatggtttttttctttacgtaaacgttcaaaattatcagtccggctctaaacatgagatagtagattctaattctcgtcatgagatcgtagattctgattgacaacaagagataggagattcctgtttacagtatgagattgtagatttcattcacaacatgacatcatagatttcaattcacaacatgaagcaaatcattaattattttcaaatgtcataccaatctcgtcttctcgaatgtttggagcttcatgaccaacctttgagtaaagagcattacaaagtcgtaatcgttttaaaaacaagttaaagatttcgtttctttggatgattttatgaatagtataatacaaatttacacaactcaccacataatatcctttgtatgatccaaccaatttcagatggagaaaatatagttgcatgagtatctacaatctaagacacaaagacatagatggatctaagggagactgaactcttgtataatggattcacaatcacaagaaacaaggagagaaacacaaattgaacgttattatttccagcttaatggacttgaagaatgaccatcatgtttgtgcctaatctgattttctccaaattctttagaattctctctttgctaatcctgaccaatatgagaaattcaccatttttttgctcataggtgctatcaataacagtttcaagtttcaacaattcaccatttatataacattaccaacagtccaacactagtaacataatcaccaaaatatattagtaataaattttcatcacagctttatatttttgtgattagaaattaggatcttacagaaatctttcaaaaaaaaattcataacagttccattttttttggtaagattcataaaaaaattcaagttaaatgcattttataaaaatgtaggaaaaactttcatcaaaaatcgttgagaagaacatacagtatatcttatccactctcttcctcatccacgcggcaaaggcacaaacctctttagaaaaatg

SEQ ID NO: 3646 - DNA, 3000 bp, Unknown
  misc_feature (1)..( 3000): cDNA_ID_2169438_gDNA_ID_1620654_Annot_ID_163600 3000 nt of promoter + ATG
tttaacaactcaacccatcaaattaaatgagttatgagttgacccaacccatttaacaaaatgagttgagttaacacataactcatttaactctaaactcatttgattatgagttgggttgagttgggttacccattttgacacctctaaatatgtgtctctagcctctactatttttaaaaactaaattttatataataaatttttttatcttaataataaccaagttgaacatattttagttctaaaattaactactcggtttaatattaaactttagaccaggacatgccggataacatggtcttagtgttgtcgtacgtcaccattagagtttcaatttgcataatacaaggtggttgacccaataaaagaaatttgattcaatttcgatataaacaggtttgttttggttcagttttacctattactttttattttgtccaatcccaaaactattatttcaaagacaaattggagaagaaacaaaaaaaaactaatggttggacaaaagattattatatatcaatttcaccacaaaaaacttagcattaaaatattcgaaatggacagcgacgaattcaaaccttcgtgttaattgtctccggcgactatgaattctaaaatcttccactttgcctaaaatatcaatacatcacattcatcctagccttatccactctttcttggaaattctggtctggtttcccttcagcaattcaattaacttcatcaaaccgaccggttcaaacaatcatctagaaattctattttattgttagactagatcatgaaattttgaccgagtcagcacacataaaatctggtacttgacgtggtttagttaacccaacaaagttgttttggttaaacggatttattgacaaacgtgtttcggttcactcactaaaaaacccggttaggtagatactacttcattgacaacaaacgaagcatcctttaatttcaaaaccgcgttttaatcagacttttccttttttattttcagttctaatgtttaaaactttccttttctttttctccatatttgactcgtcaatataaatacaattgtaacaaacagattttgatcaaaagattttacttttctcaattcctttcaactttcaaaatcgaagatctcttaagccatgaacgatcttctctccggctcgtttaaaacctccgtcgcggacggttcatcgccgccgcactcacacaacatcgagatgtcaaaagcgaaagtctccggcggaagttgccacggtggtaacaacctagacacgttcttcctcgacgtggaggttgtaaacgaagaccttaaagagctagatcgtctctgtcacaacctccgatcgagcaacgaacagagcaagacgcttcataacgctaacgcggtgaaggagctgaagaagaagatggacgctgacgtcactgctgcgcttaagacggcgaggcgcttgaaaggaaacctcgaggctttagatcgggctaatgaagtcaaccgaagtttaccggaaagtggaccgggttcgtcgtcggaccggcaaagaacttcggtggttaacgggttgaggaagaagctgaaggatgagatggaaaaatttagtcgagtgagagaaacgatcacgaatgagtacaaagagacggttgggagaatgtgcttcaccgtcaccggcgaatatcccgacgaagctaccctcgagcgtctcatctccacaggtaataattttttccaattctttcttaacaatttttttggtcaatttcaaaattcaaattctaaacgttaaagagcaagaaaatagcgcaagttgttaaacctttttaagaaattgttagtttataatttggttaaatcatgatattgatataaattggaattatattgtaggtgaaagtgaaacatttttgcagaaagcgattcaagaacaaggtcgtggtaggattttggacactattaacgagatacaggagaggcacgacgcagtgaaagatattgagaagagtttgaatgagttgcaccaagtgtttcttgatatggctgtgttggttgagcatcagggtgcacagcttgatgacattgaaggcaacgtcaaacgagctaactcgcttgttcggtctggtgcggaccggcttgttaaggcacggttttatcagaagaacacacggaagtggacttgctttgccattttgctattgctcattattgtggttttaattgtggtgtttactgttaagccttgggagagtaatggtgggggaggtggaggtgcacctcgtcaagctactccggttcaagctcagccaccgccacctccggctgtgaatcggcggctactacgctaaataattttttttttgaggttccctctgtctatgcatgagcatatctatgttttgaagattgttttttattttacagtattttgtctttaatgtttttgtaatgttttggttggttaaactctgtgtatatataatgcgatcaccacatttctttgttttattatggaacgatttgcttattttttacaatcgacttaagttaatttgaccgtctatgatattattattcggagagatctatcaaaatcgatggtcaaaatgaatttccagagaatatggaaattaaaaaaattgaaatatatatcaaatattatcatacttaagtatagattatttacagttatctctatagtattatttacatttatatttattttaaattatgaaacttagattaatttgttctctatataaataatttagacaattattcttatgggagtctttttttttttttcactgaaatgttgcctttcattgataccaaattcttatgggagtctaacagtaattattcataaatacttttatcttcgtactcccataatttatcgaaccatattgggccgtgggaaaagccgattagtcatacaaagcgtaagaaaaaaaaaagtttcattgtgttgtgccattgtttcactttctctcgca

SEQ ID NO: 3647 - DNA, 3000 bp, Unknown
  misc_feature (1)..( 3000): cDNA_ID_2993217_gDNA_ID_1620654_Annot_ID_47805 3000 nt of promoter + ATG
agaatgtagccgaagggaaggttgcgactcatcttcttcgtaactctggccattgggtacacacagacaatccaaagggactcctagagattgtgagtcccaacttcttctccccacacgagtagacgatgcgctacgaaaatggcattagtctttgcttacaatttcactcctgttcagtatctatatgcagaaatagcaaatccaatcgcaactattttgacgatgcgcggtttttcccgtttgtgtttcctaattttgcattagcatatcctttcaacaatgtacaaacgtttaggaggatctaataacatcaataaacttatcacattcataactttatacacaagatttgaaagacaatgactgctacgttagtacgaggcacaacaccagtaagaagactagagacgattaaaaatccaagatgctcaaaaactagcacttttgctcacttttatgggccgtaatatgttgggtctgtatatatattgggtctcaattaaattatccataaaatcactactttaaccctaacaaaaattcagactattaaagcaaattctgatccgtctctttcgctagctaaaggtaaaaggcggaacaacaaaagaaaccctagcttccctttgtacctctctctgttccaaaccatggtaagtttgtctaaagcttataattaattttcatggatttagtgattaagaagatatataatctgtaaatccatttctggtattgtgtggtggtctgaagtgagaaaatgtttaataagcaatccttattcttcgaatttcgatctgagatcatatgaattttctgagacattggattttttttgtgtggctctagcgttgagttatcaaattgagaagtttttattagatattgcaaatgcataatgctagtttttgtttggttttgtagtcgaagagaaagaccaaagagccaaaggttgagaatgtgactcttggaccagctgttcgtgaaggagagcaagtctttggagttgttcacgtctttgcttcattcaacgacactttcattgtgagtggcttctttatttttcaagcaaagttagatttttatgtacatttctgaacttcttatatctgcaattgcagcacgtgactgatttgtctggacgggaaacacttgttcgcatcactggtaatcatctctttcaactctcactctctaatcctttggtgatgatccctttgttaacttgtatgcggtagtctctgttgagtgtgaaatgaagttcttgactgcctaaaggttctgcttagtatctgctcttttaagttttttcgaggaatccgttgatatctttatagaaattgctttgttcttgacggcatcaatgttcctgcttatagaactaagttagttaccattgttattagtattatggtcttctctatagggtgtgagctgaagtgtctttagtctttgttcgtttaacttttgaggaattccttttgtttatctgtttggaaattgcattgttcttaaataacaatgggttgctaaaattgctgtttcgatttcctacttctgtaggtggaatgaaggtgaaagccgacagagatgagtcctcaccttatgctgctatgcttgcggcacaagatgttgctcagcgatgcaaggtaaaggcaaagaaattgcattaccaagcagacaacttgataatcttttatgtttctatatttaatcgatttggtgaatatatttatgcaacacaggaacttggaatcactgccatacatgtgaaactccgtgccactggtggtaacaagaccaagacccctggacctggtgctcagtctgctctaagagcccttgcccgttctggcatgaaaattggtcgcattggtaaaacagcagcaatcttcaactgtaattgtttaattgcatctttgattgaataaatctctgacattgttcttgttttcctcagaggatgtgactccaatcccaaccgacagtacccgcagaaagggtggaagaagaggaaggaggctctgagttatttggcctctcgttggatctccttatgtagctttctcaatgtttcattttgttttttcttagtttgaaaagagttttggaattactatgctttgttatagtctcaactctgaacagctttggatctttttctgtatgaccataagatattcaaaaattggtagtcattttatctcacaaaaaaaccttgaatttgtgctgtatgattttgtaaagtcttaggtgccaaatctttgattggagttgataaaatatttttatttggttgtaattttgtaatatcccgggatatttcacaaattgaacatagactacagaattttagaaaacaaactttctctctcttatctcacctttatcttttagagagaaaaagttcgatttccggttgaccggaatgtatctttgttttttttgttttgtaacatatttcgttttccgatttagatcggatctccttttccgttttgtcggaccttcttccggtttatccggatctaataatatccatcttagacttagctaagtttggatctgttttttggttagctcttgtcaatcgcctcatcatcagcaagaaggtgaaatttttgacaaataaatcttagaatcatgtagtgtctttggaccttgggaatgatagaaacgatttgttatagctactctatgtatcagaccctgaccaagatccaacaatctcataggttttgtgcatatgaaaccttcgactaacgagaagtggtcttttaatgagagagatatctaaaatgttatcttaaaagcccactcaaatctcaaggcataaggtagaaatgcaaatttggaaagtgggctgggccttttgtggtaaaggcctgtaacctagcccaatattagcaaaaccctagacgcgtacattgacatatataaacccgcctcctccttgtttagggtttctacgtgagagaagacgaaacacaaaagatg

SEQ ID NO: 3648 - DNA, 3000 bp, Unknown
  misc_feature (1)..( 3000): cDNA_ID_1821375_gDNA_ID_1620654_Annot_ID_47807 3000 nt of promoter + ATG
ttatatggcgtattttatcaattagactttgtttgtttgattcatttattagttaatactactcaatgttttatctattaaattgtttgtcacagtaagactattattcaactgatttcttgaatgaaaatatgtctaaaataactttagtgacaccaatacatatttttctcataaatgtttttactattctctctgtttcattataaattttgttttataattttacacgtattaaaacctattaattttttaattgtataatttattaaattttcaatgttaaatcaataaactacaataatacaaatatagaactacatggtgtgatttatagtcattttagaaatagtgtctagaaagtatggttcattcaagaaaatggtctaataatagtttatagtatgaaaaaacaattttgaatatagttaaagatagaaataatggctagcactaactaaaaatgaatcaaataaaaagaattcatctacaatttacttttcgttattaaaaattaaataataatagtacgtttatacagtgaagcatccgtttcaaagtttccaacgacggtttcatgcgccagctaaaaacttctttttgattgataatcaaatggacattctgaaggtacccacaaaactcaactactttgagttactttccaaattttgaatataaatcaatgtttttggtggtgacaaattttgacaatataaaagaatgaaagatgtagatagatgtatgtaagtagtgcttgctggtagttaaattggatattcaaaggtgaaaaccattaagatgtttctaactaccagattcactagtcattgtaaaaattatcacaaaatgtttagcaataatttagaagaataaaaggatatccattaatgtttttaaaaaaaacatttcctttgattaatctaatgatggtagttaaattacttgactttaatttcctgtctttttattttaaaacaggaaattatttggacgaaaggttatggtacaataaactttattactgtacttttaatgtttcacatatttgcataactttcatttttctaaattgttacgatcaagatagccattgattttcatttgaacaatggaaagtaactggatatgagtatgatttattgattagtactctcaaaatgtttattatgatcaattaaacagacgtttgtaacttgcgttttaaaccgtcatttgaagtagaattttcataattatataaaatctcctatatatattatttgagaagctagagggataacgtttgaattttagaactttgaatagcaaacgaaagagtaacaaattaaaaaaaatgaaacaaacagttactagaatttaatacaagaggccaataactaaaatacagacctcacgaggacataatatagctgttaataacttaggaatctctcgtgtattaaatgtttcacaattaagaggacaatcaaatttaaaatgatttatagactaaaaaatttaacgacagttatgcaacagggtttcaaaactttaatggcaattatacaacagcctaaactgggatgatttgtgaaagtggcctctttaatttttgaatttgcttcacaagattataagaatataaaaaagctaggaatatgttgttttagcagaaaataaaataattatataacaaaatgtcaaatactaccattgaccttccataaaatctaatacctcagcatcagttatatcccatgtgaagctatttaatggaatttaatggtagcttttagttgatactaccatttgtttacttttcttttgttatcttaatcacattcattacgaatctgaagagtgaaggagataacttctggaatctgtttctctaatatttttcaagtaatcgctactaatcgagttaagttatatactaagaagatcgaatttgattccaagtgagatgaagctacgcttgagcataaaaaccaattaagttgtatatcttgtttaatgcaagccctttctccaaaacttattcatttcaagattggttggtttttgtagtcagaaccgtaaaccgtttctatatgcatgagcttgtatcaatcatgtgaaaggtttcttcttccctttgcacaaatgaataaaagcatcaaaaacctatagattgctttcattgattatggaagaggatcgatgtctataattgtcttgttctggtttgaagttttcttgtagcactgtccaaacactctctttggactttttattcctcattatacggaaaattaaatctaaataaattacataacgataagtgacataccgcattatccgtttttcaattaaagctctcgcttgttcaagatcatctcttcttcatcaacttgattcttcattcaataatttgttttagacttttggaacaataatgtttctttgtttttgctatgacatctacattaacaaatagacatgcaacgtcaactattgaactataataaaatcaatatacatctttagaaatcacaatattaataaaaatttgcagcttgtatcttggtgggctagacttttggatgatttttcagatgatttatatatgcaatgtattcgtatagtttcatggttcaattagtcttttttctcgggtcaatattcgcatagattaataatgtttacgtgggttcatcaattactatcaacttgtatgcatgctaaattacaccattgaaattaaaaatgataaatacaccattttaacaatttaaataatttttaattgtacaattttgaagtctgaatctgaattgtaagtactaaattaaacttaaagagtcatataaacatctgacagtttggccgagtggtctaaggcgccagatttaggctctggtccgaaagggcgtgggttcaaatcccacagctgtcaattccttttttttcttttgttccttcgttttatttacttcgccggagagattcgaagctaccaaagaagaagaatcaatg

SEQ ID NO: 3649 - DNA, 3000 bp, Unknown
  misc_feature (1)..( 3000): cDNA_ID_2993863_gDNA_ID_1620654_Annot_ID_47808 3000 nt of promoter + ATG
aaacatcttaatggttttcacctttgaatatccaatttaactaccagcaagcactacttacatacatctatctacatctttcattcttttatattgtcaaaatttgtcaccaccaaaaacattgatttatattcaaaatttggaaagtaactcaaagtagttgagttttgtgggtaccttcagaatgtccatttgattatcaatcaaaaagaagtttttagctggcgcatgaaaccgtcgttggaaactttgaaacggatgcttcactgtataaacgtactattattatttaatttttaataacgaaaagtaaattgtagatgaattctttttatttgattcatttttagttagtgctagccattatttctatctttaactatattcaaaattgttttttcatactataaactattattagaccattttcttgaatgaaccatactttctagacactatttctaaaatgactataaatcacaccatgtagttctatatttgtattattgtagtttattgatttaacattgaaaatttaataaattatacaattaaaaaattaataggttttaatacgtgtaaaattataaaacaaaatttataatgaaacagagagaatagtaaaaacatttatgagaaaaatatgtattggtgtcactaaagttattttagacatattttcattcaagaaatcagttgaataatagtcttactgtgacaaacaatttaatagataaaacattgagtagtattaactaataaatgaatcaaacaaacaaagtctaattgataaaatacgccatataaataaactataagtttctttaaaatatacattaaatatacaaaacgacaaatttatgaaacaaaaaagtgaagtcataagattaaaactattgtgaaatggatgacaaattcagtttcttctttattctttaaaccctaagtttaaattctttcaaacacaaatcgtagtatttgtaaaactgttattttcttgaaatataatttaacgttacattaacaaatcaaatggatgacatattacttaaaatttagattaccaataaaaaatcataaattcttcttttaaattgtaagatttaagtcttcccctttacatttagcaataaatagtttgctgcactggtttaaatgcactaatgcattgtttactgaattgtcttttgtttcatatatttgtctctactatacttttactaactttcccacctccaattaaaaaaattattacgaaataaacaaagtcatatctctctccacaacataattactttattcaacaaatattaattcctagtcatattttagctcctcttcttccttatatattacatacatacattttctttagaagtcattaccatcaacccatcccctagaaaaacacagagaaaaacaaatacaagaatacaaaaaccctctcgacgaaaccgaagtatcgaaatgagaaacaagaatggtaaaagaggtagcgttgagccctcggcgaggaccgtggcgtcggtggttgctaatgggaggtttgaaggaagatcaccatcgagcgacacatcatcatcacaaaactcgtgcctgacgaggacggaggaagtgaaggaggaggttgcatcgtcgtgggttgatgaagaagaggcgccggagatggtggtgatgggatgtcgaagttgtatgatgtatgttatggtcttacaagaacgtcaacgttgccccaagtgcaaatgcaccgacttgatcttcttttagagaatttgttttaagttattattcaatttggacttttgagtttgagatgatgaatttaattttctttgtaaagtcctctatataaatcatattgtttaaattataatctctattttaatatgttaaattgacagacagatcatttctgtttgtggccgtccctcttggttcattttgttaagttgtccattttcatgttttagtactatggaagccaatgacatgaacgaggatggattttcatcggagttgaattcgattgtttcaaacgctagttatggcgtttgcgtttatatttatttatttgtatactccagagaaacatagtttttcaatgtaaatgaaaaacgccaaaaaaaatagaaagtttatttttaaaaattacaaaatataaatttaaacacaagtaaaaaaatcgacacgtctcgaattagggtcttaagaatcaaattggtagtatgctaataatggtattgctttggtttcatcggcattcaatccgatgaaattttcaataattaaggttaaaagttgtatcttcatcaattaaaacgttatttattcaaaacaattcaccatcaaattcaataaaatttaagaacttttacaaacttcaaatattaaattatttaagaaaatatttttaaacctaaatttagtgaaaaagtagcaactaaaatttgttttaatgtattttatgacatttttctatttataagtactaaattttcaaaaatctaataaataattaatttctgtttttcatatatattaaggcacatgcgacgacatatatacgtgacaacattttatcctaaagttttaacatgatttttgaaaaagaaatttacattttacgataatttagttgcaaatcaagcgagttttaatatttcaataattttcatgtatatagaaattttgcattgctagttaaaataataacaaatagatgttgtcaaaactcgaaaataaaaggggtgtttctgtagttatcataatttaaggaattatatgatagaaaaacaaatttgggcggtaaatttgaaaaaaataactttttccagtctccccaaaagtacccgatttgccaaatttgaccctcccattttagctttctgtctattcaccagattctctctattcgattctccctttacttcttctcgtctctcttctctgctcgtcagatctcaaaatcaatcggatatcgaaaccacaacttcatcaatt

SEQ ID NO: 3650 - DNA, 3000 bp, Unknown
  misc_feature (1)..( 3000): cDNA_ID_1821355_gDNA_ID_1620654_Annot_ID_47815 3000 nt of promoter + ATG
gatgggttgatttcacattctgttcttctcgtaaacgcaagtgctttagaatcatctggggtctgacccttgttaaagcattcacattttgacgactgttctggtcatacactttctcgaaaggactggtttatgcaaatggatgttcttttgttagggcaaacaaagtttgctaatttttattaaaggagaaaagggttttagattgggtgagcctgaagtaaccatctatattcctttgctctcatcattcaaacacttttgcgttcaaatgatttttggtctccctttggatctcttttgggtctaagctaataaacaaagcccctttcctttctttttttctgtctcaaacgtagacagcgaggacgaaacagtttatgagtttgtgtttattctcataactttcttatttggtcccactagtcgtctgtaactaaggcattggtatgtattctgatatgaaaacgagtttaatacctagcattcatgataattaacttataaattcaagataattcggtgtccttttatacaccatatatacatacatatataatcatgtttcttttgaatcataactttggactgatctcacaaaattcatttgctttttcctcaataatgattgtaggatcatttctctttgttttatggtacattatttgtatgtttttccccattttgagttaatacataaatgcatgggtaaatgatactttagcttcttttgtagaagcattgggagagtgagtgagtgaaatagtacctgttgcagagaatagtggctttcaggtgaaggcttacataaaaacaagtaaaaagctgaaaaaagatgattggggaatgaaaggaagatttcttgtttcttgtgagaggatattgtaatttttattctctattcttcaaattcaccataagaaaagataacttctttacaaattttatttgtcttttaggacatacatatctctatagtgggaatctatagcttaatatgattctcttatcaaagtgtataaatcttattgaagattcctaggcaagttgaatggtggtgtatttttctcttctttctatgcagtggcatgcttcatgtgagagagagagatatgttttcatcaaagtagaagtataataggtaaagctccttgtaccaattactgcaatgatctcatgtttgaataatccatacgcggaatcatttctttttgttcattgattataatagcatattccttaatcactattcagattatggttttgtgtgtttttgtcaatggattcttcaaagatttaagtggcatctgcatctgtttagctttgtgtgtgtatatatatctactatctagtgttatcaggttaatatatataaacatggcttgatatgtttgttagtggtacgagaatcaaacttttcttatctcttacttatgttgcaattataaaataatccatatgcagttctgcttctatgataaaattaatacacagttctgtttcttgttcttgaattacttatttgcttttgttttggtttgtggtttcctgtcacttatctgaaactctgatttcattaggcacttgaaaatgattggtcgtgttgatagcaaatacaatcaaagactgtccccaccaagaaactgactgccttgttcgctttcttttattttttttcttgttcaaaacacattcgtttcttcttcttcttctctcgttttaaaattgaaattaatatatggtccaaaagctacacacttttatgaaagtatcaaagggaaagtgaatgatgcatatatatagtgtctgtgttgggtcagatggtttgatttgctttttagtgttttgatattttagggggttgagtttctaaataccatgcagaaattcaaaaacatacaaagaccaagctagtgatccttatatattctgtgtttcctgccccaaagagtttggttggcaaaaatgattatgaaactaattttaaggtcttattatcaatatcattactagttgtctgaggaaaactagtcgtcaacatttttgatttttgatgatcgatggaacctaattttgtatagagaatgggtcatacatttaatcataatcaaatacatgttaacacttatattaaactgttttcttgatcaaaaccaacaatattcttaggtttgctgagacatagtttggctataaatatacaccctttttccttccaaaatctgttcactcccatgtttttatggctactagattgttgcttacatgtggacttgagtttaagcttacttgactggatctagagtaaaagtctgttgtctgaaaaaagtgttgggagttggctagtagtatagcttcaaggtgctacaaagggagagtgattaaatccccaattttccataaaatgttcttggggctattatttatttatatattatataagtgaatgatgatttgcatctttaattaggttcttttctaaataagtgatacactttgcagaaaagagagagacccacttagctgcagtacccattacatcttaatttttgtgaaatttgagaaagaaaagaatatatgggcaaagctgagttacctttgccttttgatactgctttgtcatcacatgcattccactttgcactacaaaatccactttggaccctcaaaaaaccccccaaattttttgcctctctcacaagaaaagcatacacattttcctccttctccttcctcatatatttgaagaccaaagtccatttttctttctctctctctttctctctcgctctctctatatccttactcttttcttaggtttaagacttagccccaccttccatatagacgccgtgttattagacccttcttctttgggtgtttttgttgtccaagataaatggaatgaagccaagattcttgaagcttttaccatagagctctcacttctgagtattagtactatccccaccttgtgttattttagggtgttttgtcact

SEQ ID NO: 3651 - DNA, 3000 bp, Unknown; identical to SEQ ID NO: 3638
  misc_feature (1)..( 3000): cDNA_ID_1821346_gDNA_ID_1620654_Annot_ID_47821 3000 nt of promoter + ATG

SEQ ID NO: 3652 - DNA, 3000 bp, Unknown; identical to SEQ ID NO: 3637
  misc_feature (1)..( 3000): cDNA_ID_2992655_gDNA_ID_1620654_Annot_ID_47824 3000 nt of promoter + ATG

SEQ ID NO: 3653 - DNA, 3000 bp, Unknown; identical to SEQ ID NO: 3645
  misc_feature (1)..( 3000): cDNA_ID_1030715_gDNA_ID_1620654_Annot_ID_47826 3000 nt of promoter + ATG

SEQ ID NO: 3654 - DNA, 3000 bp, Unknown
  misc_feature (1)..( 3000): cDNA_ID_3043246_gDNA_ID_1620655_Annot_ID_47830 3000 nt of promoter + ATG
aaaccacagtttcttgtttttgttatcaatgtctagttatatgcaccctcttctagggcaagaactgcatctacagagacctgaagattccagaaccccacctgatcaaaataacatggaacttaacagatctgaagcagacgaagcaaaggccgagaccactcccaccggtggagccaccagctcagccacagcctctggctcttcctccggacgtcgtccacgtggtcgtcctgcaggttccaaaaacaaacccaaacctccgacgattataactagagatagtcctaacgtccttagatcacacgttcttgaagtcacctccggttcggacatatccgaggcagtctccacctacgccactcgtcgcggctgcggcgtttgcattataagcggcacgggtgcggtcactaacgtcacgatacggcaacctgcggctccggctggtggaggtgtgattaccctgcatggtcggtttgacattttgtctttgaccggtactgcgcttccaccgcctgcaccaccgggagcaggaggtttgacggtgtatctagccggaggtcaaggacaagttgtaggagggaatgtggctggttcgttaattgcttcgggaccggtagtgttgatggctgcttcttttgcaaacgcagtttatgataggttaccgattgaagaggaagaaaccccaccgccgagaaccaccggggtgcagcagcagcagccggaggcgtctcagtcgtcggaggttacggggagtggggcccaggcgtgtgagtcaaacctccaaggtggaaatggtggaggaggtgttgctttctacaatcttggaatgaatatgaacaattttcaattctccgggggagatatttacggtatgagcggcggtagcggaggaggtggtggcggtgcgactagacccgcgttttagagttttagcgttttggtgacaccttttgttgcgtttgcgtgtttgacctcaaactactaggctactagctatagcggttgcgaaatgcgaatattaggttttatttatttattttttgtttctcttaaaacttggtgtgtgaaaaaagaaaacgaacgcttaaatttcctttttctgtttgtttttatgaatagaattggtaagtttcataaaaaaaaaatagtattaatttgtgatttaatatctaaacttacagaaaaatgtcaaatcgaccatattaatcgtgaaaaatgttattattagggaaaaatgttatttaatacctaaacttacaaaaaatggccaaattaaccgtgaactcgtgaaatggccgttttatctctcaacaaaaagttgacttctattttaacttttaagtttgcgttgactcgggctaataaaccaccgttaaaaattcttctaacagcgtaattaacagccgttacagaacatccgttaaggtgatacgatgacgttttgtgctaaagagaaatcaaaatcgagaatagaaattcccaaaacaaaatcaattaccctaaacccaaatcgaaacctaatcctgcccccaaaatcaaaatcgaaaccctaattgcttcaattcgttttctgaaatgccattagttagaaagaatggcgtcgttatgaggattggatctccaatgcttcacgaatcagagaatttggtgggagatggagtcgaagcaccaccgcgaggagaaagagatgaaattggagaagaagttgggggtgaaacgaatgtggtatctgagtcttgtggcggagaagagggagcacaagatgcagctaaaacaacgccggaaggagaagcagatcgaatttgagagagaatgatttttaggatttgggttttgatttggagatttttcagaggtttcgtcgactttgaagtctgttgatagcacaaaacgtcatcgtatcaccttaacggatgttctgtaacggctgttaattacgctgttagaaggatttttaacggtggtttattaaaccgagtcaacgcaaacttaaaggttaaaatagaagtcaactttttgttgagagataaaacggccatttcacgaattcacggttaatttggccattttttgtaagttcaggtattaaataacatttcccccctaattattaggtgagtaatacggagaaaatggactttaattatattcgtaaattgatgttcacacattaaggctctaactaaatcttccgattattgtcatataaacatgttctaatttgtgataaaactgaacttccactgtctcgcagagaagggaaagaatattttgggagaacaactaaaaccctaatatctatgatgatgtcaacttcaaaacacattgaaacttgagaaaaacaaaaatcaaagaaaataaaaataaagcctgcatgcaagagaatatgccttccctccaaggttaaataaaaacaagcttatgtgagagattaagtatgttcataacttcacaattgtgtccattagtcgctgctcacgttagtcaggagttatttctgttgggtcttatcaaaactgttgtttatgtctattttgattatggacttacctttacatttgcattttatattttcattcttagttataaaaaaattgcttatacttttctgttgtttgacccagcaccaagtataagaacaattaaaaaatttgatacctaagaaactaattctataagattaattgaagaattattttcattcaaaatcttttgacataattgctacgtttaatgtgtaatgccctggtctattcgataagattaagaagataattgcaataatggaacaaaattagctgagaatgcaatccgtttgcatggatccgacccggaatgcaatccgtttttaattatgtaaatgacaattatacccctggcactcgacatgtttgacagtttgagcaaagagaatttttttcttgttgaggatcatcgattatcagtttctggatttcgctactacagatttgtcccgtcttgagttacgaaatcatg

SEQ ID NO: 3655 - DNA, 3000 bp, Unknown
  misc_feature (1)..( 3000): cDNA_ID_2049893_gDNA_ID_1620655_Annot_ID_163639 3000 nt of promoter + ATG
aatcttttcagattcaacccaaaattgaagacaaaaatgtctcgcagatcgctaactctcctcaagaatctagctagaaacgcgaatggatcaggtattcaaacccgatccgtgacttacatgcccagacccggtgacggagcaccacgcgcagtgacgctgatccccggagatggaatcggtcctctggtgacgaacgccgtggaacaggtgatggaagcgatgcacgctccgatcttcttcgagaagtacgatgttcacggagaaatgagccgtgtgccgccggaagtgatggagtcgataaggaagaataaggtttgtttgaaaggtgggcttaagactcctgttggtggtggtgttagttctcttaacgtccagcttaggaaagagcttgacctctttgcttctctggtcaactgttttaatttgcctggtttacctactcgccatgagaatgttgacatcgttgtcatcagagagaacactgaaggtgagtacgcggggcttgagcacgaggttgttcctggtgtcgttgagagtctgaaggtgagaattccgatttctgctcctcgttttggattcaatctgtatttgtggaatcatcttcgtttgcaagtggtctttgtatgttatgtgtgattgttctgatcctatttctatgcttaggtgatcacgaagttctgttcggagcgtattgcaaagtatgcttttgagtatgcctacctgaacaacaggaagaaagttacagcggtgcataaggctaacatcatgaaacttgcggatggtttgttcttggaatcttgtcgcgaggttgcgaaaaagtatcccagcatcacctacaatgaaatcattgttgataactgctgtatgcaacttgtagccaaaccagagcaattcgatgtcatggtatgtttcagagttatatacatatgaattttcatgacgttctttaagtcttcgatgttttactttgagaaaaagataccagtcatctctccctagtttggtatccctctagattgcctgttttagagtcatattatcttattggtatgagactgatgttgtgttgccatatactatagttaatcgccccatttgcatactatttaatctcgtcatttgcatatcatgctttcagggaatcttttaaattgtacttctgtgaccttgtctatgtatacttactactttgcatacactattgttcgttagagcagtaacttcactgttgctaagtattaacctttcattactgtatgtagtagcgtcttttggcttttccccccttttataacagcaatttatgaaatgttttgcaggtaacgccgaatctctatgggaatttagttgcaaacactgctgctggtattgctggaggcacaggagtcatgcctggaggtaaaaaaacatcctgtattgatattctctcgagctatacattagtggataaagaatagttctaaaatttatacatctgcgacattaaatacaaaaacaggaaatgttggggctgaccatgcggtattcgagcaaggtgcatcagcaggaaatgttgggaaagacaagatagtattggaaaacaaagcaaacccagtggcattgcttctctcatcagcgatgatgcttagacaccttcagtttccttcatttgctgaccggctcgaaacagcagtgaagaaagtcatcgctgaaggaaagtgccggacgaaagatcttggtggaacaagcacgactcaagaggtcgttgatgcggtcattgcaaaactagactgactttgacaaattacgtgttcccgctctgcataaatcatcaaattcctgatacagattttgtgttgccaaaatatggggtatgatccaagcacaacggttatctggttttgtacctcgagttttattatattctttagccgtggaatatttcgataagaaaaaaaaacatgttccaaataattcatgttgctacgtttgttggcgccttttgtcatgtcaaagtttcttaaacacttgttcgtggaatatgcaaacttttatggattcgtaatttcaagaatatgaatgaaaaattgatggtatctttgatcacctcgaatggtggtttcttaagagcatccacattggttaatttttgatggatgtttttaaatataaaactttattttaagaggtttttgagtagttaagaaactctaacgtgtcattgtgtgtgtggttgaacattgtgacaacatcatttatttatttttcttttcgcgtttttctctcttttttagtccatatgatttttaatatatatatcatatttgtttaaaattttaatatttgtattatttattaagttttataaaataaaatataaataatttttattttaataataatatatttttttaaaagacccacttaaacattagaccaaaaaaaattaatggtccaacaaaaacactttaattttttataatttaaaattttaaaaaacccttttaagggctcaaccattggggttgctcttactccaagtctttaatttaatttgtgaattaacattgactaattttaaaatcacttgaaattgtttcatcggatttgggatgtcacatttggtacccggcaagttcgaaaatgacttttaaactttgacacctcttgcctcttggtagagttttggatgaggcttgaaacttttgtattgcagcccataactgaaaatagtttattagtataatatatcttctcaacaaacattgcaaatattttgaaaatccagctaaaactatacccgatcagaattagaaaatttgagcccaagcccggcccgtaagtattattatagaaaccgatataaagtttcctttttcttaataatatttattccgtggcagcaaatgcaagccaatccaatgtcaaaacaccagctgacgtggccaaacgcacatcaactgtcgtctctctatctctctctccctcacttgtctctctctcttctcttcgacactg

SEQ ID NO: 3656 - DNA, 3000 bp, Unknown
  misc_feature (1)..( 3000): cDNA_ID_3071577_gDNA_ID_1620655_Annot_ID_163638 3000 nt of promoter + ATG
tttctttccaaaagcttgccttgacaccgaagcacaacaagatatgctcaagtctctgtctgcgacccttcagcaggatttcaggagcttaaatcttttcattgataaagagcttgagctagaagttgtatttcccgttagagaggaagttgtttttgcagagaacccacttatcaacgcaggaaccggagaggatatgaaaccattgcctttggaagaaatttctcaggaagattcttcatggatctcacacatgataaaggcaaatgagaaaggtaaaggcgtgtcactttcttgggagtaccaaaaagaagagccaaaagaagagtttatgcttacatctggatgggataacaatcagattggatcaggccacaataactttctttcagaagctgagcagtttcaaaaggtgacaaattcaggactcagaatcgacatggatccaagttttgaatcagcttcctttggtgttgggcagacattactaggcagtagaagaccaggtgagaagagaagaacaaaaacagaaaagacaattggtttagaagttcttcgacaatactttgcaggaagcctcaaagatgcagccaagagcattggtggtaagaaagaaaacttatagttattatgtctatcttatcaatctctcagaaagtgatgattcattcacgcagtttcattttcatgttgcagtttgtccaactaccttgaaaagaatatgcagacaacacgggataacacgatggccttcccggaagatcaagaaagtggggcattcattaaagaaactccaacttgttatagactctgttcaaggtgttcaaggttctattcaacttgattcattctatacaagtttcccagaattaagctccccacatatgtctggtactggcacttccttcaagaatccaaatgctcaaacggagaacggtgtttcagcacagggaactgctgcagctccaaagtcaccaccatcatcttcttgtagccacagctctggttcaagcacctgttgttcaactggagctaatcaaagtaccaatactgggactacctcaaatactgtaaccactctgatggctgaaaatgctagcgcgatcttgaagagagctcgtagcgaagtgagacttcataccatgaatcaggatgaaacaaagtccctctctagaaccctgagccacaaaacattcagtgagcatcctcttttcgaaaatccacctcggttaccggagaatagtagcaggaagttgaaagctggaggggcctcaaaagtgaaagccacatttggtgaagccaaagtacggtttactttgcttcctacttggggcttcagagagttgcagcatgagattgctaggcgttttaacatagataatattgcaccctttgatcttaagtacctggatgatgacaaggaatgggttcttctgacatgtgaagcggatctcgaggaatgtatcgacatttatagatcatcacagagccgcacgatcaagataagtgttcatgaagcttctcaagtcaagctgggaggttcttttggtagcatcggtcttggtccctcgttataagctatcaggtataaggttgttacctgcaagaaaagaaaagaaaagagcaggagattcgactaatttactagtgtgttagaaaaatattactcaccattttatagcaatgggcatcgtttgtaaacatattttcagtgcccccattttgcaagcagcagtagtggactggtttcctgcatcggcttagcagattttttgtataataaggcgatgcgtaccagagaaacatgcttatatgtatgtattattattgtctgtacatcatttgtcttctggattctactaagctctgcaagtatgttaaattgatatatcttctacatcgtcacttgtatttattttcttacttaactatgcatgaaattcttaagggtgctttttggggcatcaaagcttactgtgtacaaacattacagtcaataaggagttagtattcagaaagaaacaagaaaaaacattatgccagtttgaaagtaagaaaaggctagacgttttacttatataggcaatgatagtcatataaacacagaagctatttttggcagaaaaagtagagaagaaagtgtatacttggatggtgaggacacatgatatttatagagattctcttggtttttaagcaggaatatgtgttcaagagagagaaccacctagtggagtgatcttccaagttcctaaccagagtatctctgttaaatcctcaaatcagtatttgttaaagaaacaagtaagcctgcagacaaaaggttctcgttttggtttgtttttgtttctttctgattcagtgagtgacacaaaggaagatattgatcctgaacctatcattgccacctaaacttcagagacaggagaaaacaacatggaaaacaaaaaacctatgtcaagagaatcagaccaagtgtacctgattgtaccatttggtactaaaaatcaggatgacgaaggagttgattcacgtgactatgcttcgaatctcttaacattgccaatctccgtgtttctaagacttctttcaccaaagccttgatgaaattcgagggtgcaagttatgattttgcaaataatgtagtactctgcatgatcaatgattttgcggcaattttgtaaatatctgaagtgaaaaataagcaaatgtcaaactaaattaattactgagtaaatgttgatgaagttaaatgattggggggatttgtataaatatcttaattgacgattctgaaacaaagtggtctaatcggtgattatctattgttttatggaaatatcttaatgagatgaagattttggggcgaattgtgtaaataactaaattttaacaataaacgcttttcgtccgcctccagctcccaaaagccaaagggcgaatcttcttcttctctttcgatcaaatcttttcagattcaacccaaaattgaagacaaaa

SEQ ID NO: 3657 - DNA, 3000 bp, Unknown
  misc_feature (1)..( 3000): cDNA_ID_3071593_gDNA_ID_1620655_Annot_ID_163628 3000 nt of promoter + ATG
gaaggaatctgacttaaaaggagaaactaaatttaggggagacaaaagagaaaagtcgaacaacaaaggaaagctacaatattttatgtttatttatttcagagattgaagtaagaataaaaatagattttttaagagctttggtttggtcggatagattagattcgttggatgagaatgtgatggtgttttattttacggcggcgattgagcgaagaaaggtcttttattagtgctcaccagctactacttctacacctctctgactctgtctctctccgctgtttcctctcaccttctttcttctgcttttgcattattaaatttaaaccagtttctcttttgtttatcgtttaaattgtaattgaaaaaaaaaactaaaattagaatgttggtttgtacaaaatcaaaatgcatttctggttttactagttaccgttaattgtaaaaaaatttaagtattaagcacgatggttttattctcgtcgtatgagaagactaatttaaatacatgtgatctacttgtaaaagaagcaaccgttcattcaatctcctatcagaaagaatagtaatctcttgagattttttcttaagataaagatatgccaaatatttaaacagtattatggcgtcactgactattatgacgtaagagattgacttttccatatattgcaactttctggagccccgcacataatccctaataagttttacttttgggccttgtttattcactgatccagcccaatgttcaaatacaaaattcagacaccccaaaggccgtattattgtattgttttagactttagaccttacaataaggcctaaaatgataacatattacacatttcaattccagataaaaaaaagaaccgaaaattttaattataaacgctatcaaattgacattttcacaagactgaatcaaatttgacacctccacgtacacaagcaaaattatattttgggttttgtatcaatgtgctggctgattttttttagcaaaactgtcctgtaacatctctccaacttggtttgaattcgttttaacattagtttggtgacaaacataacgttattgaatttttcatttttccgtaataatcattctgatttttttcttttcaaaatgttgttactagatgtttctttcccaagaataatatcttaaatcagtaatcactactaccagtaaacataaatggtacgtttctcctcattctacggaatttttaagaagcaatgatgatgattaattgaggatgtggacaagaatctttatatattcgcattcacatgccataactttcaaagtctatgaaaaaagattctattgcgtgtttatattctgtggtgtgtactgtagttccaaacataacgcttgtactacgttcatttccggaaaatatctaagaaatatggagtcataaatatttattaaccaattagatgtttttcctatgttctaaatacatttatggtaatctttgcggtcaaatatacgaactttaacaacgacgtttaacaatatatcttttgttttatacatatcaagttttgatatacggacgatagatatttattttcagaaaaccagtagttgtcgtagtcacatggtttgtttttcgttgatcaaaatttgttaatgttattcatttagaattagagactgtatatcgaatttggtactcggttctaaaaaaaaaaaaaactcaatatgattttttatacattctttttcttcccttttaatctgtaagaagaatagtaaagtgaagaagaaaaaactattcattatattgtaacatacgaatacgactcacaattaactaaagttaaagtgtctcattgtatttggactttggacattattctccattattgcattgtttctttctttcttgattaattatgtaaagttgaaatgatttgaagatgctttccggatgtaaacaaactaaactttactttaccaataactttgttttcagaaaactcagatatttatctctagtttctcgtataagtcccaatgaatctaagatttcaaaaaccaatcctatatttgtttcatatttacaaaaaaacaccaaatatttttccccaattatgccgacattaaactcatctttttacatacaaaatcccaaattaatatccgtttttacctttacttcatgaaagcgaagatggtaaaaagcagaaacatttcgagatattaatttgattgtataggcccgtgaataaactcgtggacccaaatcgaaaagataacaaaatttaaagatgtacttaattctctgaaaaaattctgtacgcaaacacgagaaagagaagagagacatacacacacaatacacatacgtggtttgagaggacaggagcaaaacggcaggtgtcactaatcccataggcttctctctctgttcactgtccttccgcacaaaaaaaaaaagtattcatttttatattctcacggttacttcgaaatctagctttcgttttctttttttttgatttaaaccaaaagggtaaacaatgctttatgattgcttagtgacgccattgaagcagcggctcactgatagtggcttcttctgcctccaattccaagttgctaaccctagttttcatctctctctctgtatatcatattctctcgtactttcttactttctcttctacttggtagagataaaaagtagtcaaattttattcaaagttttgattttgacatctgaggtttcacctctgttttttttttctagaactcctttgggtatgtgtcttttacgtcactaaagggtttgttatagtcttaggtcatgctttttggtgttatctctctctgttttatcttttagctcaccaagtgattgtgtctgattttcgaattttcaggtggattttgtttcactcactcatcgtcgttgatcagtgactctgtttttgcgaaattctcttcagatttcttgataaaagatagaagacggaatt

SEQ ID NO: 3658 - DNA, 3000 bp, Unknown
  misc_feature (1)..( 3000): cDNA_ID_1821411_gDNA_ID_1620655_Annot_ID_163626 3000 nt of promoter + ATG
aaactagggttagcaacttggaattggaggcagaagaagccactatcagtgagccgctgcttcaatggcgtcactaagcaatcataaagcattgtttacccttttggtttaaatcaaaaaaaaagaaaacgaaagctagatttcgaagtaaccgtgagaatataaaaatgaatactttttttttttgtgcggaaggacagtgaacagagagagaagcctatgggattagtgacacctgccgttttgctcctgtcctctcaaaccacgtatgtgtattgtgtgtgtatgtctctcttctctttctcgtgtttgcgtacagaattttttcagagaattaagtacatctttaaattttgttatcttttcgatttgggtccacgagtttattcacgggcctatacaatcaaattaatatctcgaaatgtttctgctttttaccatcttcgctttcatgaagtaaaggtaaaaacggatattaatttgggattttgtatgtaaaaagatgagtttaatgtcggcataattggggaaaaatatttggtgtttttttgtaaatatgaaacaaatataggattggtttttgaaatcttagattcattgggacttatacgagaaactagagataaatatctgagttttctgaaaacaaagttattggtaaagtaaagtttagtttgtttacatccggaaagcatcttcaaatcatttcaactttacataattaatcaagaaagaaagaaacaatgcaataatggagaataatgtccaaagtccaaatacaatgagacactttaactttagttaattgtgagtcgtattcgtatgttacaatataatgaatagttttttcttcttcactttactattcttcttacagattaaaagggaagaaaaagaatgtataaaaaatcatattgagttttttttttttttagaaccgagtaccaaattcgatatacagtctctaattctaaatgaataacattaacaaattttgatcaacgaaaaacaaaccatgtgactacgacaactactggttttctgaaaataaatatctatcgtccgtatatcaaaacttgatatgtataaaacaaaagatatattgttaaacgtcgttgttaaagttcgtatatttgaccgcaaagattaccataaatgtatttagaacataggaaaaacatctaattggttaataaatatttatgactccatatttcttagatattttccggaaatgaacgtagtacaagcgttatgtttggaactacagtacacaccacagaatataaacacgcaatagaatcttttttcatagactttgaaagttatggcatgtgaatgcgaatatataaagattcttgtccacatcctcaattaatcatcatcattgcttcttaaaaattccgtagaatgaggagaaacgtaccatttatgtttactggtagtagtgattactgatttaagatattattcttgggaaagaaacatctagtaacaacattttgaaaagaaaaaaatcagaatgattattacggaaaaatgaaaaattcaataacgttatgtttgtcaccaaactaatgttaaaacgaattcaaaccaagttggagagatgttacaggacagttttgctaaaaaaaatcagccagcacattgatacaaaacccaaaatataattttgcttgtgtacgtggaggtgtcaaatttgattcagtcttgtgaaaatgtcaatttgatagcgtttataattaaaattttcggttcttttttttatctggaattgaaatgtgtaatatgttatcattttaggccttattgtaaggtctaaagtctaaaacaatacaataatacggcctttggggtgtctgaattttgtatttgaacattgggctggatcagtgaataaacaaggcccaaaagtaaaacttattagggattatgtgcggggctccagaaagttgcaatatatggaaaagtcaatctcttacgtcataatagtcagtgacgccataatactgtttaaatatttggcatatctttatcttaagaaaaaatctcaagagattactattctttctgataggagattgaatgaacggttgcttcttttacaagtagatcacatgtatttaaattagtcttctcatacgacgagaataaaaccatcgtgcttaatacttaaatttttttacaattaacggtaactagtaaaaccagaaatgcattttgattttgtacaaaccaacattctaattttagttttttttttcaattacaatttaaacgataaacaaaagagaaactggtttaaatttaataatgcaaaagcagaagaaagaaggtgagaggaaacagcggagagagacagagtcagagaggtgtagaagtagtagctggtgagcactaataaaagacctttcttcgctcaatcgccgccgtaaaataaaacaccatcacattctcatccaacgaatctaatctatccgaccaaaccaaagctcttaaaaaatctatttttattcttacttcaatctctgaaataaataaacataaaatattgtagctttcctttgttgttcgacttttctcttttgtctcccctaaatttagtttctccttttaagtcagattccttcctaatcccattctttcagtcttctctttcgcccttctgagttcaacaactggtaactagatcctctttttgctttacttcattctctgttttgttattcctttaaaagatccatcgaaacttcttagctctttgtcttttttttggttattttgactctttgatctgatgtgggttttgcgtctttctttacttgtggtattgttaaagttcgttactttgttctcgtttagcttcttgtatttggtctaatttaagtcttttgacttttgacagtgttatctctatgaacagttcctttgatgaagaacacaaagtgaaagttgctgtctttataaccaggatttggtaattcccattgtttcatg

SEQ ID NO: 3659 - DNA, 3000 bp, Unknown
  misc_feature (1)..( 3000): cDNA_ID_2025381_gDNA_ID_1620655_Annot_ID_163625 3000 nt of promoter + ATG
ctgatgtcgaataaacctacataccgattgataaagttaaaccctgtgtcaaaaagtgacaggggaatgaatgtgcatttttttgcaaatacactaccttcacgatattgtctgcatatttcatcaccatcgacacagcaatgccacttcaaaacaaacaataaaagagtgttttggtgttagcttcactaacttacatcagagttaagaaaaaagtctggcctcttaagcagcttttacctgagagcatggttaagaatcatgagtaatgtgatgaaggagtaaccatggaagaatcccctgaaaatggaaaaccatcccattcaataccagaacagaagagtcataacagcataatacgcagttagtataatataatggaactataggacaccgaggatatagaggtgtagtactagtatgttctggcattttatagcaagtatgaaagaggatggtttttggatttacttatttgcaacggcatcaaaatcttggatcactatagcaacagcattgaaagccatcccaaagacatatagccagaagttctgtacatttatattccttgaaggtcgctttttaataatggcctgccaaaatggaaagcaaaacctttataagctttatatatcataagttaatttatcaatggaaggaaccaattatactgtattagtgttgacacacacacagagaaaagaaaccaaatcagctttgagtatttacagtatacagtcctaatatcccacctctgtgtacactccggcgaaaccacttaaaagagccatgacctagaaacaacgagtgattatattaattgatgtggacatgaaagctgcttcacaactcttagttgatattagcttgcaaagggggctaacagcttacaattgccatagtccagccaggaagagatgtctgaagaacacgatcagaactgcaaaagcaatttcaaatatgagacatatattggaaaaatcagcagagacctgaaagttcacagagcaggaaccggatatgagcttttgtgtgttacgcatcatatgcaagaatcgttaaagctcaatttaatagaattcatatgaaaatcaagggtaaagttttactttgaattcaactgagcagtggtgcatccgcaacacaatagaatgaaacccgcccactgaatctcgctcaatctgttagagaagatagtaagcaaagcagttcacacttgcaagaattgaaggaaactgaaacagctcactgatggatttccagaacaactattcattggaagctgttaaatccatttggatgattaaaaaaacctactttctcttcagtataattctgtacaagacaccggtacttatgatgttcaagttcttcaatatctgatagcctggggcgtctacatatgcaaaaatataatactgccacgtaaaaggtgacacaacaagtagttagagacatattaacatgaaaaacataagttaagaaaaatcgaccaaagccacagaaaaaaataacaaactcaggacaccccacctgtaacaaattcttaaaaagatacaatgctgcgggaattggaaagactttaacttcatcaaatgttgtgcttaacctgttatagagacaggatttgggtatcagtaacgaaaaattcagtgagctatctacggtcatgttcaaagaggaattagatataaaactcatggaaatttctctaaaactgataacaacagattgagtaacaaaataattcgctacctgttgtcgtcagtaacaccttcatttttccatatccttgtcaaagcaagaagagataacgcacatttcagagttcaacctgatgtccaccaaagagtaaacaaaatcactatatcatcatgattcagagattaaaaaccacacaaaactggcctcgcttgcaacacatacagtacactcaatttaatgcatctatgaaactcaccaaaaagttggcggttgtaacactatactcatacttcccagctcgtttcgaccacacgataagtatcgcttgagaactcgtcagaatcgtcagtgcacatgttactacacccctaattcaacacaagctatttaaagaacttgaattttccaaaaaaaaaatgaacaaaggaaaaaaacttactttcgtttccagttgatccgttcactggatccaacacccagagtagccattgcaatgttactcgaagcaactgtcaaatcaaagcaccaatgagcacattaaagaacacgagaagtggaatttgagaaaagaatatctcaccggtatgagattttcctttcacactctcgatatcagaagcaacgtcatgatcgtcctgaagaagctcggaacaaaattgagcattaaagagagtccaaatcttaaattaaaagcagcagaaagacaaagtgaaatggaagtaacgaacctcatctttgattttccggtactccattgtttcaagctctcagatctctgtgatctcttctccgaacatacacactcgatagctattaaaaaaagaaagaataaagtgcttaatttcgattttgggcttgaaatttattgggccttagtctaatacctgattaggcccgtctgggatatcttttttcttttttggatttttgtatgtgattgttcttttttctgtcaacataaatttgcttggctatggacattggacagattctgctacatttttctgatttttattataaaaaaatcaaagccaatgcaatttcaacagatttctgtactgggaaaataacctttaaaataaaattacaaagaatttttttaattaaatttgtattgtgacttgtgatggaaccctacctgaaaacaatgtttatctatattcactaaaaataaaattgttatatttccaatattataggtgcattcattcatacacaaaacaactaactatacaaatcaacaaataaacataacaatacaaattatttaatacaaaaacaaacagcaacaacaaa

SEQ ID NO: 3660 - DNA, 3000 bp, Unknown
  misc_feature (1)..( 3000): cDNA_ID_1807806_gDNA_ID_1620655_Annot_ID_163623 3000 nt of promoter + ATG
ttgcttcgagtaacattgcaatggctactctgggtgttggatccagtgaacggatcaactggaaacgaaagtaagtttttttcctttgttcattttttttttggaaaattcaagttctttaaatagcttgtgttgaattaggggtgtagtaacatgtgcactgacgattctgacgagttctcaagcgatacttatcgtgtggtcgaaacgagctgggaagtatgagtatagtgttacaaccgccaactttttggtgagtttcatagatgcattaaattgagtgtactgtatgtgttgcaagcgaggccagttttgtgtggtttttaatctctgaatcatgatgatatagtgattttgtttactctttggtggacatcaggttgaactctgaaatgtgcgttatctcttcttgctttgacaaggatatggaaaaatgaaggtgttactgacgacaacaggtagcgaattattttgttactcaatctgttgttatcagttttagagaaatttccatgagttttatatctaattcctctttgaacatgaccgtagatagctcactgaatttttcgttactgatacccaaatcctgtctctataacaggttaagcacaacatttgatgaagttaaagtctttccaattcccgcagcattgtatctttttaagaatttgttacaggtggggtgtcctgagtttgttatttttttctgtggctttggtcgatttttcttaacttatgtttttcatgttaatatgtctctaactacttgttgtgtcaccttttacgtggcagtattatatttttgcatatgtagacgccccaggctatcagatattgaagaacttgaacatcataagtaccggtgtcttgtacagaattatactgaagagaaagtaggtttttttaatcatccaaatggatttaacagcttccaatgaatagttgttctggaaatccatcagtgagctgtttcagtttccttcaattcttgcaagtgtgaactgctttgcttactatcttctctaacagattgagcgagattcagtgggcgggtttcattctattgtgttgcggatgcaccactgctcagttgaattcaaagtaaaactttacccttgattttcatatgaattctattaaattgagctttaacgattcttgcatatgatgcgtaacacacaaaagctcatatccggttcctgctctgtgaactttcaggtctctgctgatttttccaatatatgtctcatatttgaaattgcttttgcagttctgatcgtgttcttcagacatctcttcctggctggactatggcaattgtaagctgttagccccctttgcaagctaatatcaactaagagttgtgaagcagctttcatgtccacatcaattaatataatcactcgttgtttctaggtcatggctcttttaagtggtttcgccggagtgtacacagaggtgggatattaggactgtatactgtaaatactcaaagctgatttggtttcttttctctgtgtgtgtgtcaacactaatacagtataattggttccttccattgataaattaacttatgatatataaagcttataaaggttttgctttccattttggcaggccattattaaaaagcgaccttcaaggaatataaatgtacagaacttctggctatatgtctttgggatggctttcaatgctgttgctatagtgatccaagattttgatgccgttgcaaataagtaaatccaaaaaccatcctctttcatacttgctataaaatgccagaacatactagtactacacctctatatcctcggtgtcctatagttccattatattatactaactgcgtattatgctgttatgactcttctgttctggtattgaatgggatggttttccattttcaggggattcttccatggttactccttcatcacattactcatgattcttaaccatgctctcaggtaaaagctgcttaagaggccagacttttttcttaactctgatgtaagttagtgaagctaacaccaaaacactcttttattgtttgttttgaagtggcattgctgtgtcgatggtgatgaaatatgcagacaatatcgtgaaggtagtgtatttgcaaaaaaatgcacattcattcccctgtcactttttgacacagggtttaactttatcaatcggtatgtaggtttattcgacatcagtggcgatgcttctcaccgcagttgtctctgtattcctcttcaattttcatctttccttagccttcttcttgggttcaacgtaagttaaccacatttgcttttgctaatacaatcatctcaacttttgatatcaaaagtagccaccaacatttatgcacataagagccactgactgcgtaaaaggtgtctcataaaatgcattactgtgtttgcactttgcagggtcgtctctgtttcagtatatttacattccgcagggaagctacgatagtaaagatcttcacacttacatctaccaagaaaacaccattattctagtacagagataaagcttttgaacgattacgattttgtttttcgtgtaggtatattcacatttgtgcttctgtattgatttttttttccgtctcatgaaaccttctattctcatttgtacgataccaaaacttatcaagaatagttacaatttcagaaattttaagcctctacgtaattttttttataaaacacccctccggatattttaataatcattaactgtctgaacgtgaagctgtatgttgaaaattgcacgcttagaacaaaaggcttaaccaaaaatgatccaaccgtgaagactcggagaccggcgtacttagtttttaaattaatcattgtctttgcttcaaagccaatcctatgagactttgtcttgtctccaacttgtatataagctctattcctctactctgtttcacaccatctcttcttcttcttcctcttctctcagtgaacaaatttggctatg

SEQ ID NO: 3661 - DNA, 3000 bp, Unknown
  misc_feature (1)..( 3000): cDNA_ID_2049939_gDNA_ID_1620655_Annot_ID_163620 3000 nt of promoter + ATG
aatcgttaacttttcttcttccatcttaggtgagtctcaaagatggaactgtgaagggctttgatacacgtgcttctgatttatcaccaagtttcattatccatgctcatgatagtgaagtctcctccatatcatacaacatacatgcccccaatgtacacacatatatctctctttctctcttgtctcctaccatattcatagtgtagtcgtttaatatccgagctgtgcagcttttggctacgggatctgcggatgaaagtgtgaaactttgggatctttcaaacaaccaaccatcatggattgctacaaacaagccaaatgctgtaagagccatgaataagaacttttgctgccatatgtttgtttctggtttctttgtttaccattccaaactttgatatatcaaacagggagaagttttctcggtctcattctcagcggactgccccttcttactcgctgttggtggctcagaggggctaaatgtaagtagggattttgatggtacaagaaataacaaattctgtttttgagataaccaacgtatatgtatacgcatgcttgtgcaggtgtgggataccttatcagacactgctgtgtcccgaagatatggtagcagccgaccatgaaccacatgggaagatactttgtttcttgaagctgacgcccacttttttatataattaagaacttgtttatgtcgacttccttcagatcctcgactcccatttgaaatgatccgtgttttttttatatctaaacgttgttgattgttgcatacaataatctcaaacatattttcattcaaaaaaataaagtttcaaaaatattttcttatttatgtctcagtatctgtctagttttgctaatttctctagttaattctattgttttaataataaaacaaaacaaacccaaagccagtttattattcaatcgggttttgtttggtacattgctaatttcaaggcccgttctgatcaaaggtttggatgttggataaacattttttcagagagagccaaaccaatcgaagcgacaaaccctaattcccaattttctgagcaaaagacaccgtcagcaagagatgatgcgtgcttccgtgtatgccaaggtacgcgaatatgaacagaacctgcagctgaattctctttgtttgatccgctggtttcattgattatatatgattccaaatgcatttcagtattgtgtatccctgatctcgcaatttttcaaccagagtaggggtaagcaagaataatgtgtatttttttttctcttggatatgaatacaaatttcatggaaccctaagatataagaggttcaaatttggattgagagaatcagaacaaagtttaagattaagcgaaaggagtttggagaagacttataaaaggctagtggaaaaggaacaacaactttgtgaccggctaaatcaggtaattaataagcataaccaataacgggcatttttagtttggatatgatcataccaattttatttgatcaaaacaaatttagagatcgaagaaagtaaaacaacgtttgaaagaaaccgagttgagtttggatgagatttctgcaaagcttgaggaaagacatcgacgactctttgataggcttgaggtaactaagaacgagttttttttgtgtctttcttttataaacactaattatattgaccctatgttatgtttggtagaaatcagtacaaaaattggaactaagtgaaacgaatttggaagagtgcttgaaaagctacgactatgccattacaaagttgaggaagtgtggatgaaggaatcgatgaggaagagtagtactgagagaatcatgaatcaaaacctttggaataataattaattagtaaaatgtttctagaagtcttgttacggttttaggttcctttgatcctattaggactaggtcttatttggatgattgatacaaggtaaaacgttacatcttccttccatcaccatttggtttatccaagcaaattcaattgcttcctttgaaaatgtcaatttatgtataaacccactactgcaaaatgaatgcaaccaatcaaatataattatattaatgtatgcatataatatatacttttgtagaaatgacgatatattcctatttcttagacagcatattgcgatgtccttacggtcgagaatattgcaagacaatcaatgtatatcatcaaaatgtcgtcgtgtttggcgtttggacaccagtatagttggattaaacccacaataatctatggcctagaaaccaaaataatcatttgacttgttacacttgtacttatacaagtcggattaattttagtcgtagtgaattgattgataagtcatacccaaattttggaatcatcttttttctctctctttggtcgtctatctatagtttcttaatccctaaatcaacatttcataaactatcttttattttacccatatacgatactaaatgttcgaagaataaccaatgcattaatatgactaatgactacattatcgtgggaattgaagaaaatcatagtcattacttactttactttactactgttacgttcaaaaaaagtcatacaagaaagctagaaaatgtataagtgcaattatgtttctactttctagattactacggttacgttcccatcaaagtcaatttgattaagacgcattactatactttttaataacgtgaccattagtatacatttgtatggtatcaatatttaaaaacatttgattggatcatagttgccatatgggacgtgggagatgagtgggtaataagacagtcacacgcgcctctctataacacatgatctccacgcgctcttcctcttcagcaggaaagcttttaccaattcagcaaatcaagaagctatataaatgccgcacttaacgtattgaaacttacgatcaaatatcaatctctctctctttcgaccaatggactaaatcaaaacttttgattttccggcgatg

SEQ ID NO: 3662 - DNA, 3000 bp, Unknown; identical to SEQ ID NO: 3654
  misc_feature (1)..( 3000): cDNA_ID_3043246_gDNA_ID_1620655_Annot_ID_163616 3000 nt of promoter + ATG

SEQ ID NO: 3663 - DNA, 3000 bp, Unknown
  misc_feature (1)..( 3000): cDNA_ID_2025191_gDNA_ID_1620655_Annot_ID_163615 3000 nt of promoter + ATG
aactcttgattgattcgttaagaggactttgttatatgttgttacagggttcaatgcagctgtggctggatgcttctttgcagttgaatccgttttgtggccttcttcatcaactgattcatcaacttcacttccaaacacaacttctatggttattcttagtgctgttactgcttctgtggtttccgaaatcggtctcggctctgaacctgcgtttaaggttcctgactatgacttccgctctcctggaggtaatatgcattgccattcttatgctttttacgcaagggaaccagaaaccaaacttatgagagctggtcactgattttcagaacttccactctatcttttattgggcgctctgtgtggcttggtctcgttggcattatctcgatgtacatcatccatgacatctgctgttgacagtcttaacaaggatgctgggataccaaaggctgtatttcctgtaatgggtggattaagtgttggtatcatagctttggtataccctgaagtattatactggggttttcagaatgtggatattttgttggagaaacgtccatttgtgaagggtctttcagctgatcttttgcttcagctggtagcggtcaagatagctgcaaccgcatggtgtcgggcttctggacttgtcggtggatactatgctccttctctctttattggcggggcagcaggaatggcctatggaaagtttattggacttgctttggctcagaaccctgatttcaatctctctatcttggaagtggcatctccacaagcttatggtctggtactgttcttatgtggtcaatgtttcaaaattgtcttaatttcagactttcttgattggttacctatcaatactttgaacagaatattttttcgggttaactgagaatggatgctagtttttttgtagcttcattgccaatgatcctgtttgtctcattgtttaacaggttggaatggctgctacacttgcgggggtttgtcaagttcctcttacagcagtactactgctatttgaacttacacaggattatcgtatagtgttacctctactgggagctgtaggcatgtcttcatggattacatctggacaatcaaagagacaagaaactagagaaacaaaagaaactaggaaaagaaagagccaagaagctgtacagtctctgacgtcatctgatgatgaatcatcaacgaataacctttgtgaagttgaaagttctctttgccttgatgattctctcaaccaatctgaggagctgccgaagagtatttttgtttcagaagccatgcgaacaagatttgcgacagttatgatgagcacttctttggaagaggcattaactcgtatgctgatagagaaacaatcctgcgccttgattgttgatcctgacaatatctttctcggtatacttacactttcagacattcaggaattcagcaaagcaagaaaagaaggaaataatagacccaaggtacgaaattgaatagtctgaaataactatttctttgatcattaattgaagcatttctttggcttaggatatttttgttaatgacatctgttcgaggagtggaggaaaatgtaaagtgccatggactgttacacctgatatggatcttctcgctgcccaaacaatcatgaacaagcatgaactttctcatgttgcagtcgtttcaggcagcattgatgctcccagaatacaccctgttggggtcctggatagagaatgtatcactctaacacgcaggtaaacctgcatctatttcccctcggtttaactgtttgtcccaagatcaccttttcatatggattgtttttaatgaacctaactgactaacctagtcttccatatgacaagagtgtgtagagagtctgtgtaactataacttgggctgccaggtttcccacattggatgtagtagaagttaaattagttaaaaaaaattacttgcaactttttgtttgctcatcagaggaaaggagtgagtcgcaaagtccagtttgctagatttttaattttagagctttcatctgtattagagttgataccgaaaatattgacccagcaaataaggttcctcaattcatttgaaacttttcggtgtagatgctgcattggagatgatactggtttttcttaaccttttctcttgcttgacctggcagggctctagcaaccagaatgtacctcctaaattcgctgtatctgtaaatggtcttgctttgtaactcttctgagctgaccagggtgatttcaatttgtttcttctgtgaggctccgggccaatttttgttctttgtattaagagatttggggagaatgagttggctggtgcagcgtggatgttttttgtctactccatctgttggtttaaatggtgaagcccccatttctcacttaaggtgctgagcaatccaaagggaatcgaaacatggagcgtggttctgagaaaatcttcagaaattttcctgaaaccaaagatatgtgctcaggtgattcgttaccatttacacttttttcttacagattgttactgtaccttacttagtattgtctattttgtaaagtgctttctgacttatatcatattgagaaagttttgactacttaaagactaacagtgtcaacaattgtaagggtttccttgtccactattttgtatattgaagaacattgaaatatattggaatgcccttatttctggtgtgtgtgtctctctcggtgagccgcaagggcatgttgacatctaattgtatggatatttttctctaagaaaattcctagagaaaacagtagtcaggccattgtgttggttaaacaaccctcctaaaaccttttaggtaaagaagaagcaaccccgcatgggttgaatgacctacctaacctatacttacctccatcatgatatagctagtaccctctgaacatgcatggatacacatgctatataatcattcgggtgtgattccatttataccggaaa

SEQ ID NO: 3664 - DNA, 3000 bp, Unknown; identical to SEQ ID NO: 3661
  misc_feature (1)..( 3000): cDNA_ID_1821423_gDNA_ID_1620655_Annot_ID_47833 3000 nt of promoter + ATG

SEQ ID NO: 3665 - DNA, 3000 bp, Unknown; identical to SEQ ID NO: 3660
  misc_feature (1)..( 3000): cDNA_ID_1807806_gDNA_ID_1620655_Annot_ID_47836 3000 nt of promoter + ATG

SEQ ID NO: 3666 - DNA, 3000 bp, Unknown
  misc_feature (1)..( 3000): cDNA_ID_1015955_gDNA_ID_1620655_Annot_ID_47837 3000 nt of promoter + ATG
agtttgaagaaaacgtgcattatacttcctctgttttgtgaaccaatcgatttagcttcgtctttgttaagctcaagatctctgatgaatataggttttcttgaaaggatccatgaccaaccccattcccaccattctttcacagagcttcctgcttgttctcccatggcggaaacagatttggatctcgggaatctagctgcgatcgctgctggttggtttgagaggttgagtgatagagaagagagacgacggcggatgagaccaggctcatcgtcggcggtggctgctgcattagggcgttgagaaacggggagggaagtgggtttacgaatctggagagtctccatcattgagctcataacttctttgttcttctttgtgttgagagagattgaagaagaagatgaatgtgaatgtgagagattgattagtgaacacagctctaacacaggctggggttttattccactttatttttgtggggtccatttacttttatgcccccagccaattacattcattttgttgttgctgtttgtttttgtattaaataatttgtattgttatgtttatttgttgatttgtatagttagttgttttgtgtatgaatgaatgcacctataatattggaaatataacaattttatttttagtgaatatagataaacattgttttcaggtagggttccatcacaagtcacaatacaaatttaattaaaaaaattctttgtaattttattttaaaggttattttcccagtacagaaatctgttgaaattgcattggctttgatttttttataataaaaatcagaaaaatgtagcagaatctgtccaatgtccatagccaagcaaatttatgttgacagaaaaaagaacaatcacatacaaaaatccaaaaaagaaaaaagatatcccagacgggcctaatcaggtattagactaaggcccaataaatttcaagcccaaaatcgaaattaagcactttattctttctttttttaatagctatcgagtgtgtatgttcggagaagagatcacagagatctgagagcttgaaacaatggagtaccggaaaatcaaagatgaggttcgttacttccatttcactttgtctttctgctgcttttaatttaagatttggactctctttaatgctcaattttgttccgagcttcttcaggacgatcatgacgttgcttctgatatcgagagtgtgaaaggaaaatctcataccggtgagatattcttttctcaaattccacttctcgtgttctttaatgtgctcattggtgctttgatttgacagttgcttcgagtaacattgcaatggctactctgggtgttggatccagtgaacggatcaactggaaacgaaagtaagtttttttcctttgttcattttttttttggaaaattcaagttctttaaatagcttgtgttgaattaggggtgtagtaacatgtgcactgacgattctgacgagttctcaagcgatacttatcgtgtggtcgaaacgagctgggaagtatgagtatagtgttacaaccgccaactttttggtgagtttcatagatgcattaaattgagtgtactgtatgtgttgcaagcgaggccagttttgtgtggtttttaatctctgaatcatgatgatatagtgattttgtttactctttggtggacatcaggttgaactctgaaatgtgcgttatctcttcttgctttgacaaggatatggaaaaatgaaggtgttactgacgacaacaggtagcgaattattttgttactcaatctgttgttatcagttttagagaaatttccatgagttttatatctaattcctctttgaacatgaccgtagatagctcactgaatttttcgttactgatacccaaatcctgtctctataacaggttaagcacaacatttgatgaagttaaagtctttccaattcccgcagcattgtatctttttaagaatttgttacaggtggggtgtcctgagtttgttatttttttctgtggctttggtcgatttttcttaacttatgtttttcatgttaatatgtctctaactacttgttgtgtcaccttttacgtggcagtattatatttttgcatatgtagacgccccaggctatcagatattgaagaacttgaacatcataagtaccggtgtcttgtacagaattatactgaagagaaagtaggtttttttaatcatccaaatggatttaacagcttccaatgaatagttgttctggaaatccatcagtgagctgtttcagtttccttcaattcttgcaagtgtgaactgctttgcttactatcttctctaacagattgagcgagattcagtgggcgggtttcattctattgtgttgcggatgcaccactgctcagttgaattcaaagtaaaactttacccttgattttcatatgaattctattaaattgagctttaacgattcttgcatatgatgcgtaacacacaaaagctcatatccggttcctgctctgtgaactttcaggtctctgctgatttttccaatatatgtctcatatttgaaattgcttttgcagttctgatcgtgttcttcagacatctcttcctggctggactatggcaattgtaagctgttagccccctttgcaagctaatatcaactaagagttgtgaagcagctttcatgtccacatcaattaatataatcactcgttgtttctaggtcatggctcttttaagtggtttcgccggagtgtacacagaggtgggatattaggactgtatactgtaaatactcaaagctgatttggtttcttttctctgtgtgtgtgtcaacactaatacagtataattggttccttccattgataaattaacttatgatatataaagcttataaaggttttgctttccattttggcaggccattattaaaaagcgaccttcaaggaatataaatgtacagaacttctggctatatgtctttgggatg

SEQ ID NO: 3667 - DNA, 3000 bp, Unknown; identical to SEQ ID NO: 3658
  misc_feature (1)..( 3000): cDNA_ID_1821411_gDNA_ID_1620655_Annot_ID_47840 3000 nt of promoter + ATG

SEQ ID NO: 3668 - DNA, 3000 bp, Unknown; identical to SEQ ID NO: 3657
  misc_feature (1)..( 3000): cDNA_ID_1821407_gDNA_ID_1620655_Annot_ID_47841 3000 nt of promoter + ATG

SEQ ID NO: 3669 - DNA, 3000 bp, Unknown
  misc_feature (1)..( 3000): cDNA_ID_1821403_gDNA_ID_1620655_Annot_ID_47842 3000 nt of promoter + ATG
ttgatttaatatttgtttaatagattcgagaagattaattgaaaactgtctcggattagggttcgtgcatgttgtaattagttccgcgtgtttacctataatgcatctgaatctttagactaataattttctttaagattcaatctttatttaagcattgtttatgttaaagctagctggtgaaaacaaggttatcttagatataagtaacactaagattctctagcggaataagatctaatctatatacgatagaatggtaagagttttaagaaaataattaaaaatagaatggttggagtcttggagatcgtggtgagtttgagatcaagtcaaacaacgaaatttggcaagaataatactaattaagcttccgtgaaattaaaatgttttcccttttcttagttggcttaaattttacaaaacggctcaatatctgcttatgaatttcatgttttaagagatcaattctgttctctagtatttggttggatatacgtttgaaactttcttttacattttggtacaacacaagttttgttttctttcttgattcaagtgtttttttcttttcttttctgatctgattcaaaattaattaatataccagaaaatcagtgcatttcgaaagcacaaaactaaatatttttctttattaagcatatatatagcagaatatcctacatacgttatacttatcatcaaatcacaacatgtacattgacctattaattagaaggaaacatccaatatacctacagacattatatatatatatagatactaattagagtcctaacctaagatctaaacaacaccctgatgtgtccgaagtagaaagatcctgtattgttggaggaacattcaaatccaaagcaccactgatcatcggctcctcctccttttcccaatgacatctcatgtgacctcctaaagcttgaccactcgagaacactctaaaacagatattacacttatgatgccctgaaaacgtaaggatttttccctgatgatcatgcccactagaagtagaaaccgtcataggatcatcggttacgtttgtgatagcgaaacagcctttaacgtttttatgactcgctctgtgtcctcctaaagcctgatgtgatccaaacactttcttacatcctccacactcgaaccgttcaatactcgatgatgatggtgtaccattagacagcattaagagacaagaagcgacttcatggtcttcctcggacataaatgagacccaatttggtaatatctggtttaactgttttgaagaagccgcggtgggcacacggtagttaggaggaggattaatgccacgccattgacgctcagggtgacatctcatgtgaccaaagagagccttccaagaccaaaactttctgccacattcagtacatggacgtgtgattttgggggcatttgggtctggttttttggtgtattttggttttgacgcggattttggtgaagaactagaggatgaagcaacggttttggtgcgtttcttcttaggactgtgatcgtagcttgaagataaagcaaactggagatttggattagggttgcttgtgttagaaggatgaagtggaatgtgaaaactgcgatcatcataggaatgattgttgttcattgtgagcacgtagaggaagtgatggaagaaaagtgggaaaaaaaagagtagaagttagagaaagggttgcttaagtagaagaagaaggagaggttacgtgggaaagaagttatggaggaacagggagacagttaacttcagttgaggaacagagcggtttactatgtaaggaagagacttatctctttgcagtttgaaaccaccacgttttttatgtatcagttttgctgcttattatttgttggcccaagtttatctttgatgggccttataatactagagttcattatttcttatgggccttataatactagagtccattatttctgataggccttataaatcttgcgtctattattaaattctaagcctatgcaagaatattgaagcaacaaaattccaaagccaacaaaattccaaagccaattggaagatttggaaaaagtaaagattttagtggagtttgagcttccattactcaatttcggtggaggttccacacttccacagaaataaaatcgccactctcccatcccatgattcacactattgaaattggacatttgattacgatttgtttcctagattattatttttgtttctatatccgttagattttctttatcgtgcgttttcttatcttcctgaaacatttaaataataacaagaattgtttttggtataagtaaacttgtctctcttttttggtaagaaggtttaaggttgcctatataggacaacaaaatcagaaaatgccataagcatctgtaatttttattggtttggggtaaaaaaaggttacaaataaaagaatggtccaacaacatacattcatttttggagttatgtcatatgtggaacatgggaagatgttttaaatacctgaaccaaataatattcgaaatatccagactttctcattgtcgcatgaaagaccacaaaatataatactattacttttcaaaaaagaaaatgaaacaataaaataaatttaaaacagtcattggatcaaggtataacggaatccaaatacaagtataatatataattataaaatactgattcaataatcaaaagtataatcatacaactccatgacgcaaacgattaatggtcccaaagatgatttggttaattatctctttttttgggttaatgatttcactagccaataaaagattatagactaccattatagattatagtaaggaataatatgtttctcatcatcatcttctttactttggctgggaaccaaaagggtcacttcgtcacttgcaaacaaaacaaaaagttttcatttttcactggaaacaaaacttacaagttaagaagttcacatttttcaatcgataatg

SEQ ID NO: 3670 - DNA, 3000 bp, Unknown
  misc_feature (1)..( 3000): cDNA_ID_1821395_gDNA_ID_1620655_Annot_ID_47844 3000 nt of promoter + ATG
ttaattattgaacacagtttatagagtttaatgagcagctcctttttactcttcgtcatcaacgacctacatttgcaatttttttttattaatattcgtgtttctttcactatgaacactctctcttcttttcaacaaaaaaaatctcttttcaatcaagtttttgaataaaatgctttcttcaccagtcaccacacgttattctagcacaatagctctctaaaagatgcttcattcttagctacttcacactcttttcatatttgtttcaacatgatatcttctccaattttatctgtatgtgtgtttgcaacaaatgcctttcttcttctttctagtagaagaatccaatgcacaaacaaagatatatatatctaatatttttaacttttcaaaaattaagaaaaataatatttcatatcaagcatatatgtatatccgaaagttaatatatcatatatacaatcagatatatatcacatatcgttttaaaccgttcatatatacataattttttataaattaacctactgtctgtagtgttggaactatggaaagtgatattttgaaaattaacctgtatacagtattgttgaaactatggaaaatgatattttaaactgttattaattgaaattactgtttctttttttttggacaaaaaaattactgcttctttgtttcattttcctttaattgtacacactttgagaaaaaaaatcatatgttcaaaaattaagaagtttaagaagatttctaaatgattcaagtacttctgggatccatatataacacacataaattccttttaaaaaatctaaatttatgtaaaaatgtggttattttcatatctgttttggtcaaatatcccaacatttgttattgaacttcaataattcaagtaatttctaaatgatgacactttatagccatcatggaaaatggaaagtacgacgtctatcattatagtttttaaaaagtttgctatgataaattagtgtgaacttttataaaaaaaaataaaaaaaattcaattaggcaattagctagtgaacgaatcattgtataattcggaaaaaaactatttcagcctcttcttccatgaatcagactcacatggatgccatttgaaagcatgtaattaactttcagaaaagcattaaagttaacaatttcaatgaatatatataacatagtttaaaacctcttttgtactgaaatcaatacaaaactcaatcttatagaagaagagtaactattggctaattattttaatttgtatccttgtatcaatctatgtgcatacacacacacacacacacatacacatgtatatatacttattagttattacgtacagagagatggaaaaataaacaccatggcaaattctgaaaccaaaagaaagatgaataaaaagcaataatttattcaaagggcgtttaagaaaatttcaaactttgtaaacaaaaatcaatcaaacaaattaaataaaaaaactagggctgaggtcagaaagggattattgtttttgagaggagtaaattaaagaaagaatcttgaaggtcaaaataattaatgaaacctgttcaatgacagacattgtcttctgcaaagaatctttctccctcttctttccattgatacatttacagatcgagtttaaccaatcaaatgtacatatttgcttacgtaatcaataattaattatacctaattaatatattaaaatttggaagaatctcaaacaaataggccaaaagacatcaccaactacatcattaagaagaacaatcatctcagctcttaaaaaaaccataacttctcaaaactctctttttttctatttctcaatatcttcgcagaacaaaacagagaagcatggtgagattattttttgctaaactaatgtaagtgtgaattttaattagaagaaacagtagagagatctaattggatggtaataaaaagggtccactttgttcttggggaaagattctgcacgcccacatggtgagattaaaatagactaatattacccttcatcacctacttgtgtccagagagagagaaaaaaaaagaacttgtggtgatgatactatcatctatttgagagctaaagaatttttccttaagctttttttttttggttcagaatcttttcatcatttatgtgtctgtgtaccaataaacatagaccaaacaaacaaaacctcttaataactgaaaaacagagcaaaacttttgtttttctgtcagttaacttacttcttctgtgtgtttgaaacccaaagtcaattcttttttttcttcctgaaattctctctacttgctcaaggaatcttgataaagtaagtaacttttttctctttcaagatagtaactatttctgggttttttttggatacttgttgtgttatggagcatcagaagatttttttgttctttggaaactgatgtcatgaagcgcatcatattcttaattttataattccattatctttttttttcttcttttcttgtgtgtggcatttattgtctgctggaatttttttgtatgaattgtctttgaagggctcaataattggccctcttggagtttccatgtccattggggaatattgtacttgagaagctgatgttagtacttgatgaatccttctttcaagtcaactctctctagcttttatatactctctctatatatgatctcacatctcttaaaatctattatatacatgttgaaacacacttttgatcttccagttgacaaagactgagttttttttggctcttatcttgtttcttgtttggttcttgatcatgtttctgcaacctttgcagatcggttatgtagacaacgacgaaaggaaccttaaggggacctcaaagacgcttggtcttgctggttcttgaattactacaacatcaaagaacaagtctttgaataatttgattggtaggcttttggttgatacaagagaaagagattgttttgat

SEQ ID NO: 3671 - DNA, 3000 bp, Unknown; identical to SEQ ID NO: 3656
  misc_feature (1)..( 3000): cDNA_ID_2999324_gDNA_ID_1620655_Annot_ID_47845 3000 nt of promoter + ATG

SEQ ID NO: 3672 - DNA, 3000 bp, Unknown; identical to SEQ ID NO: 3655
  misc_feature (1)..( 3000): cDNA_ID_3014067_gDNA_ID_1620655_Annot_ID_47846 3000 nt of promoter + ATG

SEQ ID NO: 3673 - DNA, 3000 bp, Unknown
  misc_feature (1)..( 3000): cDNA_ID_1821387_gDNA_ID_1620655_Annot_ID_47848 3000 nt of promoter + ATG
tgtattatttctctgtccaaatatgctttgttcttgagcaaatggactgacttttagtgtggagtaaagttcggtttatattctaagacaaaacagaaaaaccaattcgaatcttattagatttggaaaatttcatactattcaaaagaatcgcaatcacaatggacaagttccaaaatacaatgtggcagaacaaggatcatccataagaatcttgttctcatcgattactttagtaaatccaaacgaacttacttttcttcccttgcctttgttgttcatttggatagtattgatacattccgcacaaaactgcaacatgagatttttacaattaactctgaaactccaaaaataaaactcacaaaacttctgttctttcacgtctcggagtgatcacatcacacgtctctttccaacttttcgtaaacgataattttgtaccattgcaaagtaaataaatcacatccatgattttcaaatcatactggtcgccttctgtttttactttttaccgaactatttgcagaaactatataacgtacgcagcattataaactaatctaattagttatcaaataaatactgatatttaacatgcgaagttttatgttttgcctcatcgttctcgtgttggctcttaaaaaaccatgttatgtagatcggagataaaagtagtgaacgatttacgtgaaagagatattcgttaaaagttagtgtttcatgatatccaattatgcatggccaacaagatactaggcttagctagataactatagtacgataaaatagagaagtactatttccaatcattagcctggccactgaccacttcaaacattaatgattctcgtgaaactataataatatttaaacccaatcgtctcaagagtaatctcgactatacctgcgccaatagttctcggttcttgaagctgccgtgcctaacatgattagcgaactatttccaatcattagcctggcctctggccagcttcaaacatcaatgattcgtgtgaaactataacaatatttaaacccagtggtctcaagagtaatctcgactagtccatgcgccaatagttctcgtcttgaagctgccgtgcctaacatgaatagcgtgaacttgacgtctcatgtgtcaatcttttttttttgtttctctttattagtaataataaaatgaaataaagttaataacatgcagagaataagtgccagaagttattattgcgatccaaccaaaggttaaataatcagtacttatttagtattaaaatataagtagagatagtgcttgagcatctaatcatataagaaaagccaattactctggagaatcatcggatcacttcactctttgccttttctacacaaagagacagctcttgtgttcttgaaagcttaaagctctgttttccccaaagctatatgtgatgggtattacaaatagcaagcatacttttcatttccatacatctaaattgagaatataccaattattgtccttttgggtggtcattggagtttattcattaagattttgcagttttttttttccaaacctttgatcattttttaaatgatactattatattattttctcaatcaaattattttaagataaatatcaacttatcgtttaatagtaatgtgtatataatgtaataattgattttaatgttgaaaaatagtatttctaggtttccaaactaaattaaaatgaaagtacaaatgtttgataattttacggtgtattttctgtaggattttggtgttatatccacataatctatctataattaataaaatatatacaagtaaaccgttgaaagtttggaagcttaatccatattttgaccatgttttgtagtactaggctagccgtctttattaaaaaaagtaccgcgtaactacatctagttcaaatttggtaatctctaatatgaggttctaaattagcaaaatcatattttaaagaatttataacatttagccatatttgtcttaggttccaaataatacatagttccaaaggcaaataaactgtcttttatggtttagaaagatttctgccttgagagtaaacttcttaaaataaggttaattccaagagatttgattccagtttatttctaggaataacacaaagaaataatcatttttggtaaacaagataatcagaactcaaacggaaagaaatatgtcagtctgtcaaatccattaagaaaattgatattcacttctactctatttagaaggcacgtcaataattcagaaaaataaaccaagtgcatgcgataatgcaaaagaacacataaatccaaaatatcacaaggttacaaagtcaacttctaaaacttcatattttcttcacacgcttctctttacatttatacacaaagtacgaattaccttttgaaataagttgctaggtacttaatatttataagaaaaacaaaacaaaaaactttgggttgaaatgggaatgttcgttgaataaataagaaaaaaatcgagaaagcaaaagtaggaatggttgatgataagtcactccattcacaaacaatttgagctgtcaataatgtgattttccaaaatctcttttggtaccacaatgttttaaatcattggacatcggaatcaatttattgtattatagtatcgtagtatacaaaagaagttggcttcttctgtttttttttggctctgcagttttcaaatccattgttttaaaataaaacataattcgacttcataattataatcaaagtgttaatctttgaattttaataatctaatattagtggtaccatattgacaagaaggagacaatgtcacagaaacttacctcaggagtcaaaacagaagaattgaaaagaaaaaagaagaaataaaaattggatttttatatttgtttcgaccactatcaactctttctctctcttacaaggagcgaaagagaaacactttccgacttgggtaaggaaaaagagtttg

SEQ ID NO: 3674 - DNA, 2202 bp, Unknown
  misc_feature (1)..( 2202): cDNA_ID_2687174_gDNA_ID_1620656_Annot_ID_47851 3000 nt of promoter + ATG
gaattcatgccctaagccttcaacttctagcttcatttgagccatagcagcaggaccaggaagctttttccgcagaagtcctctaagcctatgacactctgcttcaagttttgcaatctttttcacaccttccagatgctgcttatttgcgatatccgccgacttcaaactcatgtttttctcttcattgcggatctcaacttctttggaagcaacgtgaagatcgtacttcagataactaatctccttctcagccaactgaagattagtcttcaacttttccacatcagcttcagctttagacctctcctcactaatccttactatcatctcagatcgttcttgcaacgatctagtgagtgctgcattgtcagaagctgcccggtgtagtccttcactcaattcatcgatctttccttcaagctcggctttgatcttatcccattgactggtcttagcaagaatcacatcctgcagcttcttatcactctcttctttcacaatccttatctgccttgtacactctttcaacgcatcatccaaatgcgatgctcgatcctctgcagtgagctttaagagtgtaacagattcgagttgacgtttaagtgccaaagtttctgcatcagccttctcccatcctaaaaaaagaacaaaagactataatcagcaacaaaaaaaacatctcaaaacaaacaaaaatgctgaaataacattttacctgaaacagcttcttcagcgactttggcatgttgaagaatcaaagattctttagtgttgatctcagagtgagcaagagtgagtttttctttaagatctttaacttgaacttcaaacaatttgacctgatcctccattctactcatatgtgtgtatgaatccatagttatctgaacatagtttgtgtttttacacttctcctgacacacaaatcaaacacacaaaaaaagacttcaaatgaaaatttctatctcacagaaactgacagattatcacaaaactatataaaacagaggtttggtgtaaaattaaagcacctgattctcaagagaagccaagtaggacaaagaacaaacaggagttgactcgattccaacaactggtttctcagtcgtggctttgtccgaagactttctcttccatggccaacctctaccctccattttttttgctccaaaataatagtactctgcagaatccgtagaagaaggaagaaaataagctttaataaaaaaacagacaaagaactgatagaagttttgaaatttgaactaacgtacaaaaaaaggaaacaaaatcttccgtaaatgttactttcaatttcatccgacaaaatcccgctatatatttattatactgtatcacctcaacaatgaccgttttgttgtttctttctttttttccgcagtgattcacatttaatgatttctttccaaaactatgtaaccaaatttattgaaaagtctactaaaaaaataattcaaatcccatcgcaatgggcgcgagcgagtccttcacattaaacctgatcataatcatcatcagctaccacagtatcgcacttagaacacacacaatcaaattcaaacaaactttcgcttgacaatttcaatcgaaaccatatcttttcaagtttagctaactatcggaaagaaattacataccgagactaatgattccacagacttgagagagcgcaaagatcgaagaacattcgtcgagagaaagaagaagaaagtgggaggagcgtgtatgtgccagagaagaaggagcagtggatgatttatgcgcttgggctgtcgctttttttcaactttgacgctccacaaagacacaacaacgacatctctctatttcaaaaaagttttatttttttattcattttaaatacattttaaaaaaattaacaaataaatcgccatttgttgttcttttttcaaaaacggaatacgagggtgcagttatcctctacgagcaggtgcatgtaataccatctgatggatttgacttatcgtttatccacaaaagattcaaaatcttcccggtttttaagtttgggcttcataaggcccaattagtggcaaatccatcacagtccactagggtttttgagagactggatataaaatttgattttgttcattgttgtcattcgccgtaatctgaagaagacgaagcaaatcctcccacaaagaatcatccatg

SEQ ID NO: 3675 - DNA, 3000 bp, Unknown
  misc_feature (1)..( 3000): cDNA_ID_1821498_gDNA_ID_1620656_Annot_ID_47852 3000 nt of promoter + ATG
agcaccagttcttgcagagctttcagcttccctaggaattctggaactgcacctaacattttgcagtctttcaagttcaatacaatcagtttctggagcttcaccatgtcggtaggaagtttgccaattgcagttccatctaagtgtagagtttctaggttatctgaaatcacctggaatttctgaatgcttgagcaattggtgaggatgagagttttcaaagagatcagattcatacgcggaagaacccggagactcgtgcatcctctcatgttgaggaaaataaggcttttcatgcgtttcatctcacgaggcaactcctccaaactcgtgcacccttcaagatttagtctttggagactctcagcatttagcaaccctgacagattgcataactttcttgagtggctaagatcaacccactttaacttctgtgtatcctgcaatgaacagtaagaaaaattaagcaacactaatcaagtaagctaaaaatcataacggtgaaattataaaacaaagacacacgtaccttagccccctcccagagctcttcaatctcgctgtaaggcaggttaaagtcggtaagattcttggggttgaagtcttttggaagtttcatcaacgggaattttagccaatagaggtaacgtatctcatccaacggaaactcaagtccctccggaaagtttagtttgctatcagcttcacattctcgatcacaacgagaactatagaatttgaggtatctaagattgcgcatcttgatgaaggtacttctgtccaaaggaagtttcttcttcagttcagacatgtcaagaaaaatacctctcacggctccctggttaaccaattaaagacaagaaatcagcaagtagaagtcgagtgctgagtgagcttctaattatcatgaaaagagaacttcaaattttgctacagtcgctatcaaacagttctacggtttatcttaccactctattcttcagcgcacctacaacggctttatggttccacagcctacgcgacccttgtgaaccaagttccttaccaaatgtatacagtaaatcatgcatctccactcgtccgccagaaatgtttatcaagaatttgctggcaagatcctttatttcactcacagtatcaatggcttcagtgtcacaagattccactaaacacctcacgtaatactcatcccctgatctaaagaaacatgcgacatcaagaaagacatctttgtgagacaaacctagttcatcatagcttacccgcaagacatcttgtattgtcttattgggactttgcatcagcttgctaagtttctcttcccagtgagtcttgtcttttccatttagctccttacccaatatcttgagagctaatgggttgcctttagcataatccgcaaacaatctagacagattcatgaaagttctcactggaggacaaagcttaccactaaaggcaaaatagctaaagtactcaaagctgtctctaccagtcaatctcaggacctcatatgtatcatcaaccatcccctcgatcaccgacctgtcgctagttgtgataaagattctactacctctcttaatccagtctgattccccgagaagaacctctatctgtttcttgtcgctcacattatcaagaacaacaagagatttcttactcagtaggagtgccttcaaggattcaggtgaaaagtcagcgacttcttggttcacgttatcatccttcaacaactcttcaatgaaaatgctccgatccatcatgcagtctttccacatcttacggacatcatgaagaaaaacacagcgtaggaaatcgtgttgccacttttcataaagcatactagtcagagtggtcttaccaataccaggcatcccaacaacaccaatggtaagagtatccttgcactcaaaatccaacttctcttccaattgcttaagtcgtgtttcaatgccaaacagaggaggaggcgagtcaggagcagcttcaggtacttgttctcctgttggaaaaggatcatcaatggggatttccctttctagatcaggcataacatcagatgatagcacctttatgacttcccctacaatttgattgatggattcgccttcatcgctacaagacaagtgaaaagaatcaatcacataaaccataagatccctaataggcaaacaaagtaatgtcctttgacaattcaaggataaagttacctcatttcgctcaacgtaaagccaagctttttaggaacatcctttaaagcttgtttccacttatcgagcttttcaccattacaagtcttagccaatttccagaacgtgtaaccaaaagcgccctttaggtttttgacatcgtctgtgtccaccatgtagaagatgggaataacgacaagtgtgcctaagtcaacacaatccttaatcttcacaagctcgtccaagcaccaatacgactccgtatacatgctagagaaaatggcgagcgcgatcctcgactcctggattctcgagaaaaggttactgagatctctacctttggtttcgtttctgtcgataaagacgttgattccatccctcctcaaggctttctccagatggctgacgaaaccgttccgcagttgtttccctcggaaattgaggaagacttgatgctgcggcggagataattgaacggatgaagaagaagaagaagaataatccaccatgatcgatgatgtctcgcgttgaaatcgaaagcatggaactaggactctggtttttcaagaggcaagtgtggaagagagaagaagaccattgactaaaacactaaagcaaacagcgacttggattgatagtttaatgacttctcgtgaccgttacctaataaaaaaatatattaaattcccaatacgaaaaatacatatattttatttgtaaccaatggtgctaatggagtcaataatggtggtcttcttctttgtgcagacgaaggtcttttttctcttttgcaatcgtactctaaatg

SEQ ID NO: 3676 - DNA, 3000 bp, Unknown
  misc_feature (1)..( 3000): cDNA_ID_1821494_gDNA_ID_1620656_Annot_ID_47853 3000 nt of promoter + ATG
cactgagagaacagctgcagagcctcattctcattaaagctctgaacctcatacacatgattgatctgacaaaggcggaacacttgtttatctctggacgttatgatgattaggcttcccgggccgaaccaatgaaacccttcgagaaaagactcggcaaccaaaggattgtgcacatcatcaagaacaacaagagttctcttcttgcttaatttgtccctggggaggctaggtctcgtaatgctactgcatacacgaggcaattccttcaaaattttcccaaaatgttcctccagcaaacggtgaagccccttcccactaaaagccttgtcaaagtgtttgatgaaacaagaagcttcatagccaccagagatttggtcaaaaaatgctttagcaagtgtagttttgcctatgccgggcataccccaaattcctatgcgacggacaccccatggttgcttgcaaagcaaatgttccatctccagcagcctcgagttgattccgatttgttccgtgggaaagagtttctcatgcacatctttgacaatctcttccacaagttcgctctcactgcattcctccctgtttgcattgatttaaaaatcacagagtgaattgttgcggaaaacactaatgaatattgaagaacaaaaaatgttttggataaactgcctcacattttgtcaatctatcataataacattattagttccatataaaacctttgatttgtataatatttctttgtggtgttagatttgtataatatttctttgtggtgttagatttgataggtggaaaacattttgaagtagagacttttaatcttctcaaagtgcaaacgacatattaatcaatccacagttacctattgtggtggcctggtaattctctcagttcttggagtgcgctactccattctcttatccggtccactgacttgtgctcctgcaccaccacatctgatgaactaatgccataatacacaggaaccaccagctggccggttttcctccgacactgaaagaccctcacgagcatgtccaggcatgaggtggaggagacgcagctctttgagaaaaccagcacggaagcgctaactctctcaatcacatccagagtctcactgtaatttacaaatgcagaaattcctttccggcgaaaatccatggagaggtggctggcgaaggagtattgtagtgtatcttcgcagtatatgtagacagtgggaagtaatccattaggtggcggaaaatccacgttgtatatatattggatcccttgttcctctaaaagtctttgatcttgtgttgtgatgataatccgacttccaggaccaaaccaccgagcttcgtttgccaaggcatctaattgtcctatgctgtccacatcatcaagaacaagtaccactttcttgtctttcaacatttcatgtgcagcttccaattgaagaatctcaccagtaaacttgtgatttaatagttgagacagtaaatggctttgtaactgcagtttcctgtcgtcctcattgtagcaagttcttggatagcatcctttgatatcaataatgatagtactcaattcgaattgaggaaggagttgttggtataaacgtttagcgatggtggttttaccactcccaggaagaccacatatacctatcaatctgactttatttgagtccagacctagcagctctttcatcttttccatatgagcttccatcccaactaagccttgggaagcacttgattgagtggaattattcattatactagaaatatcattagctatttttttgaccatagccttttcatcatccctaaacatatagtaaataaatagtcatgaataacttaaaaacaaaaaattgtttgatgcattaagaagaggcaagtggtaatgaaaaactgaccagtcgcgtgaacggtaaccatcgattgtggccacttgctccaaagctttaatccatctatcaatgtcctctttgttttttctctcacattcttctctgtgcttgttcatagccgtatcatcaatctttatggacctaaacatagtcatcaaacacatattaaaaaactgtgaattactttcatgtgttaagaaagattaagaagactaacaagcggctggtaagtttatagactctaggcaattccgccaaagctctagtgcatttccaaatgtcttcatctgttttaccctttcgtgtttttctgaaattatccccaaaatctccagtctgcttcaatacatcaattggatccaaattatagaaaatagtcaccactctttgacccaactcttctttgcacttcattatctccaccaactcgtcgagacaccacggagagagagcgtagttccttgagagcacgacaatcacgattctcgagacactaatcgcgtttctgagctcaggtccgatcgacacgcacctctcggtttcattatcgattagtggctcgaaaccctttcttcttaactctttcctaatcctactgagaaaggatttgggtacatctacagagctgaagctcgagaacacattgtgttcccaattgcgagacgaagccgttatcttcttcttcttctgcggattggatctgatgaatttttcataaatcagaaatgaaaccgtacccaaaatcgtgattgcagccgcacagatcctaaggagggaagcagaggaataatccatttagagtacgattgcaaaagagaaaaaagaccttcgtctgcacaaagaagaagaccaccattattgactccattagcaccattggttacaaataaaatatatgtatttttcgtattgggaatttaatatatttttttattaggtaacggtcacgagaagtcattaaactatcaatccaagtcgctgtttgctttagtgttttagtcaatggtcttcttctctcttccacacttgcctcttgaaaaaccagagtcctagttccatgctttcgatttcaacgcgagacatcatcgatc

SEQ ID NO: 3677 - DNA, 3000 bp, Unknown
  misc_feature (1)..( 3000): cDNA_ID_1821490_gDNA_ID_1620656_Annot_ID_47854 3000 nt of promoter + ATG
acaaaaaaaaaaaaagttcctattaaacccaattaatattatttttaatttatcctctaccaattaatattatttagtagaaatactttatttctttaacatataattttaagaattatatgtatgaaaatttaatttagaaaatcataaactttttgttaataatcaagagtcaacgacgaaacaacggcaataagtgcaattttgaagcccaacaagttatgtccaaacacgtttgttgaaattagctataatggcacaggtccaaagcatgcaggaccagattagttcactttgctatgtttttttttctttctttctaattctgtatcttgttgttggcaagtcatttacaacttcttcagtaatcaatgtctataacgacatatatatttctgaagaacatgtgaatatatgacaaaaattgggactaccatatttctaaatgttacaaggacgctcccaaaatagatcaaatcattttggtaccaaaataagattataactttattcttgtttcgcatgatatgtgtatatattagtactagctttatttgtcttctacgtaaagataatagttctacaaccaaccagtggctgacacgtggtggctggtgttcgatttcactcccttctcgttggttcttgtcgctaaatgattggagaagagaaggctgtcaccggagatgctgtttaaactacgaatatacccttagaaaagtcgaagtggtgaggatacttttggtaaatcgacggatgatgtgaagttcacaggcatgtgaagcgggcggttttgtttaatctctaccacgtggcagagggaaattctctgttgtgccagcgtggcacgttccagaatgtcagaatgtttgcaacattaaaacccgtgatcttattggtctgacggaattttttatataatcttttaaattttcctttatttttctttgctgaaatactatagagcagttgcaactcgctagttttgaactacttaaacctagtccttgtatatgaattaaaaaaaatgtaaatggtacatatcattcctatatgtacaaactaagttaggtcccaaagctgaaagaatgtcagagttatttggcagttttggtagagatgcaatgtacatataaacccaaaatataaattttggtagtttatttactctttttttttgcatgacacaaaattaaagatgtttatattgattttacaccaaaagaaatatatatactggtaaaaaggcgtacaatgaattgaattttgatttcgacaaaaaaaagtggaaagaattgaataccatatttgactaaaagaaatggatcattccttaattgtgcgtgtgataacttcgatttatattaacgtccaatatccctgtagtatgcaaaaatcttgcaaacctagaactgatgacaataaaaaaaacatgattaatttgagtttttcttcaaatatgtatgcaattatgcaaatattcataatacatcaatctgaaaaatcagaactcagaagtaataagtttgatatcttaaagtctttaactccgttttactcctaataaaaaatatattatagctaaaatatatatttttttaaaaagtgaagaagaatgtgaaaagaagcgggaggagggtgacgtacgcaaatggggacatggagaaagccacgcgcaattgagcggtccacactctctataccttttatatgtcatcgaatcatcaatttctcactctctctctctctttctcttcacattcaccgaaacttataaccaagatcaatatcagttctctctctcgatgaacatcatcttctacacagccatctttctttgacttcttcttcttcttcttaatataacggctcgtttcttttgtttccaaacgagtaaatagtgtcctatacacatatctataattccacaggttgaagaaaaggtaaaacctaatttacacgggctttcaagctcagaagagtccatttgcatcgtctcatcaacttacatgtgcatttttattttgcaccaaattaaagcatcgatctctcgtcgtccttttttctatattttccttggttctttagcttgtcgtgttgaccgatctgcataatgttttgtatatccattataatatctctcaggtatttttatttatcatgattcaaggctcgttaatttgtataaacctaatacctatatttttcttttttttcggataccctagtaatttgtatctgcatataattcgaatttgtacgtatatatttatatgtgtgtatagtatatttagtacagtcttgagctttctttaaaatgaagataaaacagacatagactttgaaaccattataactgtttgctaagacttgatgatttcttttgcttttgttatgtagaaaaagctgtttttgtttgtattctataaggctgtatatatataatgtagctaggtttgggtcgctataaagtatagtaatatatgtctacaaaagaataattccggttctcgatatgatcattgccaccattcataaaccacgttacaacaggaacgcatgatacaacaaaactctcttttccgttttcttttagcgtcaatgcgtcatatatgaacagaagccctcatgcatgtcctctttgatttcttcaacttttaaacctaacttgcatgatcttgttccattttcttaattctttgtaagaaatcaaaaacaatacctgagtacatgtgtttaataagtgcatcaacatgaaaagtaagtagtggaaactaaccaccaaatgagctgatgattaaactcaattacaaataagttcttctttttttttctccctgtttccatgaaaccaattatctaacttttctctacctctctctaatatataaccccatctctttgtgatgtagcatgcatacacatgtacatatcattatatatacgtatatataacatatagtgatctcattgtggtattggtgttatgcagaaataatg

SEQ ID NO: 3678 - DNA, 3000 bp, Unknown
  misc_feature (1)..( 3000): cDNA_ID_3071629_gDNA_ID_1620656_Annot_ID_47856 3000 nt of promoter + ATG
gttcgtgtgactctgcatggaactcctaatctctgcacgacctaacctatccacgacactcagagagccacaagtcgatgtgttttatcatatgttgcctcactttgttcactgcatctggtgaactgcaattctgggcatcacctgcaaatgggaggaaaaaaacaggaaaagaatgggacatcatattttcttaacagttgttctgatgcttgtcattgacttcaggcatcggaaacagagaagaagccggtaatataccttcaatgaccattgcagattgggggcatcctcgaagatcacttccatgcccacagttgtgacaagtcatgatgtacgaaggcactgtgtcatcaaacattatctttttagtgtcccagacaaaggatttgtctgaatactgctacataacgacataggctatgcctgagttattgctatgcgattttgatcaaactaaatgaagacttacggtcaggagatgaggtttgtttggatgcatgacgccatggatcctgtgacccatttgtgaagataatcttggtcgctacaaaattgagaataagaagatgcgaagaaactgttggaatgtgcacaagtctaaaaggatcgtcgagaagttttccgatattacataccagcaattttatcgcttccatagtacaagtttgttgcatcgacttcagggtagacacctttcccaaagaggctcttgcatagatccaaatgatacctatgaaatgaaaagaagtgtaaatgggacaataaatagaaacgacaaaatcagaattctgaatatgatatataagcttgggtctgtgcatactctgtattgatctgatgagaccggatgctatcgtttgcaggtgccacctggaaataagccacttcagtacaaacttggaaccaccaaagcctatctgcactctctagggtgaccgcagtgtctagtagatgtttccggctatatgttttagagctttgcccgaaaactcccatgcaaaactctctaacatatttagcatatgcttcctgcattaacacatccaatgttatgtatcaccaaatacaattcttctgtttgcaaaccatatgatgaatgtcaatatatatacaccaagcataagtaaagagcgatctaaaaaaacaaagaacttaccactaaatcaccaccattcttttgagcttccacgagtggtacacatagtttatctgggtttccgtattgaatctgccagataaacatctaaaactagaaagaaaatgaaaattttataaatatgaaatgaacctgcttaccgccataactcctgcatccgctattaagtataagaaatcagcatcaacatcaagctacagatttcagaaacttaatcagattggagatagacttcttacttccttaagattcaaacaaaagaaaacagaaacagtaaagctagacctccgtggcattgaagagagctttaacagccctgttattcactttaagccctagttccaagagtttattagtctcttgtagcgcagtttcacattccggtccagccgactcagctatctattcaataaggtataaaaatctcgattctgtcagcaactaaactctatatgaagaaacacaacatttcttcacttaaagttgaatattgtaacgaatacctgttgatcaaattcggggaattcgtagacagcacgaacaactgctgaactagcgaggcttccacaggtcaaatgagggaacttaagccggaaccaagcacttaaagctccagaataagatactccaaagaaaaaccacggattctcaacattgctgcttctattaaacttaacattcaaagagtcctgcatccacaaacaaatcccaaaacatgctaataaacgcagcttcttaaacatttgatcctagagaaagtaataaccataagagtataagactactacttgcctggtaatattggcggaaagtagctaaatcggaaagggcctgtttggaagaaagatacttgagattcttagtggctaacgacttaaatggtgagctctttccatagtaacgatgctcgagtgaaacaatgcctgcatcaaacttctttgccaacacctgaagaacatgtttaacaaacaaaaccaatgcaaatttcagagattatgagaataaattaatcaatcaaatggatatgtttcacggaaaaatatcttacactaatatagttattggtgattccattgcaaggtccttcgccgcaaatcatgagaaagataggtccgtcaggaactcgtaaatggtcaagatattcatagtatctctgtctgaatttgcgatgatcctgaaataaaattagaaacagctggaactggtaactaggattttgcagcgaattttgaatttcaataacgaaagagaaacagaaactaaaatcgaagaagaaacgaaattgggaagattgattacagatggagagtagtgatctaaggtttgagtgaaccagagctcatccctcgtcaagtacttgctacttttggacaatccatgagaaatcctacgaggttgcagtaacccattagaaaagcttaaatacgacaagagcaccgtgaaggtggtaagtaaagcaaagccaagctccgacgacatttctcgccgtgaaaatcgatcgccgtagtttaaaacgagtggaccagaaaacaaaacaaaataatgtgattttctctgtttgtatttgtttttaaaaaaaaaaacttgcaaggacaatataatgattagaataatgttttttcccctccaacaaatagtatcatttttttagtaaatgcatggattatagtgcggacttcaaattatctacagaaccagatttttgtatttcttttactttaactttactctttttctgctcattctctctcccagaaaaaaaccacactcatggcgacacttctctcaccttcttcaagctaagttttcattttgttcactgccacagatctatggccatg

SEQ ID NO: 3679 - DNA, 3000 bp, Unknown
  misc_feature (1)..( 3000): cDNA_ID_3071613_gDNA_ID_1620656_Annot_ID_163680 3000 nt of promoter + ATG
tacgagacacgtgcaccgaagctttttcccacgtgccaaagagtttcgtcttcgttcacacagaaccaagatgggtggtaacgaaggtaggaccctaaagcaccagcctacaacacatagatgaaatagtatatgcgtttacatggatttgatgaattgttgtgtttagtatataagtatattgtttagaattatcaaaaagtatactttataaaaagagtggtggtaacatatttagtttctgcaccaatataaaaagaaatatggtgatgtctaaagaaaaaagagagaaaacttagccaccaacaaaatattagaagaagatttcaccatgtgaatggaagggtaatgttttttttctttctttattttgaaatgaagggaaggaagttgttataaacaaattttcgaaaaggttaatgatttaaatctactataacctttttgatcctttagtttggaacaaaagaaagtttcagagttagcgatattttagtggaaactagttgttgattctccaactaaaattcaaccaccattagcataaaacatggttattttggcgaagtagtttactttgcaacatctatctgtattttactatataaaataatacttaacatatacaaataaatagaaattaacattagaaccaatagttatatagtttagctgtttaggtaaagcttagtaagagtggatgcaatcctttcccgttttctctccgcatttcacgccgtcgaagccttattagggtttaatacaaatccataatctctcgtttccttattattaaaacatcccatgtggacaccaggactaaaaatcttgacaatcagctttatttgatgactgaagtatcaaatttaaataaattaactagttaactagttatataatgagacttattttgaccacttaggtccactaatagacaaattaaattatcttatattggttattgtcccatcgtatgaaaatcaaggatggtgttttctaccagggaaatagttacatatatagtacatgatcaaacttgaataaactacacgataatgatcattatttgttgaaatcaaataactttaacaaacaaacaaaaaaactaaaatcaaataagaatattagtagcatagtactttcattataacctttatgaaattttagtaaatagtataagaatttctcaatatgcatcgattttgatttaataatgagtaaatgaaacgaatagaaacaacattttgatttgattaaacaaatagataaaaacaagactcataaattaaaatttggaagtttccgacaattagaaaagctgattgatatcgcatctgattgcaaatctgaccagaactcgaaaatattgaaaacatattttaggaataataaaagagatgatagcttaagtggaagttgaatgtcggaccgtacgtaccgggatagttctaatagacacttctcatttattctttttccttcaattatcccaactgttacacagttatattccataaatacccctagtcaaaatgtgaattcacgagtcaaacccataaatgcagactactgtcggtgtcggtgggtgaaactagcgtaaaatgatttagggtaaaactggaatttcactatatgcaacaaaagagcattcattcacatgtttatgtcttttgtgtgatttatatcttctttcttttgacagttacaaacttacagctaatcctttgattaaggaagcatctcttaattaatctcaagtgggctgataaatttgaactttcatcagatccaagaacccaaaattatatccaaccgatcttcaaagaaacttaccaaataaattgtaaaatagtagtatatgacatatccaccaaatctacaaagttcaaaggctactaaaaccaaattccaccgaagaagaccatataataactataggccaaacaaaactacaaaatcaatttctggaacaatgtgaatttaataagtatggtaaagtctgtacacatatctaaatgacaggtacactgtgattttggaagtggaagacacttgtacaatgtgaatccattttgacgactgtccacaagactcctcactaataaaccaaagtacttcacgtactctatctttttatatcagtttaaatgaccaaatcaaatttcaacatctactaatcactaactcaaacccataacaatattcagccataaacacataatatgttttaagttagtgactagactgacgcactaaatcaatcaaccaaacaaaaaaaagaaaacgaaactgaaataaaatatagcgtgattagctgctttaattcaatcaacgtgccacttttttcaccctaatatcataatcaactcttactttattttatttctttacatcttcccgtttttttatatttccgttatatgatataaaaacaataaataaaaatgcgtaaaaattggtgggaaagcgtcggtagctcacggccacgcagtgatgatgcgagtaagagacacttgtgaagtgcaataaaacccccttcttcttcctctctttctccttcgtcttcttcttcttcttcttccttccttctctctccttattaagaaagaccaacacagacacggaagaagtagcttggttcttctctttgtgaaggtgaatgcgggagatggggactggagattctgcttcgagactgattctctggttctgcttagggtttttgattctaggtgttggatttgtgcaatgtggagttacttatgaccggaaagcacttctcattaatggacagagacgaatcctcttctctggctccatacattaccctcgaagcactcctgatgtaagatttaacaaaagccctaaacttttctcttttttcttcttttgggtttaacaaaaagaccctatgtttctttcctttatgttctgttttatacaatttatcaaaaaggttttagctttattaattttaactgttgttcttgttgttagatg

SEQ ID NO: 3680 - DNA, 3000 bp, Unknown
  misc_feature (1)..( 3000): cDNA_ID_1821441_gDNA_ID_1620656_Annot_ID_163679 3000 nt of promoter + ATG
agagttttgtttaacaacgttcattataacttacctccttggtcaatcagtattcttccagactgtagaaatgcagtcttcaatactgcaaaggtaagtgtatatggttgaaactcagaattatggttcctcaaattctctgtgttttttctgattcttgtggatttctcttgtttaatttaaggttggagttcaaacatcccagatggaaatgttgcctacagacacaaagaatttccagtgggagagttatttggaagatctttcttctctagatgacagctccacattcaccactcacggactcttggagcagataaatgtcacgcgtgacacaagcgattatctttggtacatgacgaggtaaaagaaaaacccgtctgctaccttatacaatgtaaactttccctagcttcaaagtgattctcgacacgtgctaacaaacatgtggaattggtatgtagtgttgatatcggtgacagtgaatcattcttgcatggaggagagctaccaactctcattattcaatctacaggccatgccgtgcatatatttgtcaatggacagctttcaggtatgatacttccactagtttggcctgttaatttgttctattagagaatttctgatgcaaacttataatatatgaattgcaggttctgcctttggaacaaggcaaaacaggagatttacttatcagggaaagatcaatctgcattctggaactaacagaattgcgttgctgagtgttgctgttggattaccagttagtagtcttttctctcttccgtgtaaacgatgtttttcgtttttctcttatcctgacccctttcctctttttcgtttttgaagaatgtgggtggacactttgagtcatggaatactggaatcttgggtccggtggcattgcatgggttgagtcaagggaaaatggatttgtcatggcagaaatggacataccaggtgttttatctatcctattttctcgtgatttctctcttttgatcccttttttctgtattaagttgtttaactctgttttcatcaggtgggactgaaaggtgaagctatgaatcttgcatttccaaccaacactccctctattggatggatggatgcgtccttaactgtacaaaagcctcagcctttgacatggcacaaggtttgattgaatccaacacaactcaacaaagctttttttctaattaagaatctgaactaacgagtatattttgttttatttcagacttattttgatgcgcccgaaggaaatgagccgcttgctttggacatggaaggaatgggaaaaggtcagatttgggtgaacggtgagagcatcggaagatactggacagcatttgcgactggtgactgcagtcattgtagctacactggaacatataaaccgaacaaatgccaaaccggctgtggtcaacctacacaaaggtggtaccatgtgccgagagcttggttaaagccgagccaaaatctgttggtcatattcgaggagcttggtggaaacccatcaactgtctctttggtcaaaagatcagtatcaggagtttgtgctgaagtttctgaataccacccgaatatcaagaactggcaaatcgaaagctacggaaagggacagacatttcatagacccaaggttcatttgaaatgtagtccaggtcaagcaattgcatccatcaaatttgcaagctttggaactcctttaggaacctgcgggagttaccaacaaggagagtgtcacgcagctacctcatacgctatcttagagagggtaaaagatataatctttacacagctaaaactggaatcagactcttcttctttttttttctaaccacggtgtgttttgatatatgcagaagtgtgtagggaaagcgagatgcgcagtgacgatatccaacagcaatttcgggaaagacccgtgtccaaatgtgctgaaacggttgactgttgaagcagtttgtgccccagagacatctgtaagcacttggagaccttaaagacaaccattgagccctttgtctacaaaatgtataaccaaacaatacagagagagttgaagaaaagaaattgtaagctgtgtttaaaatatgtgtgtgtgtgtgttagtttgaacagagacatttgtgggttagagtagtttcagatagataagagagaagagtctgtagagttgtgatgagtctcgggcaattccgtggctcattaaaaacgttcaggccaccggtcaccaccgaccattttaaccggttatggagaccgggattggtgggtctgaatgaagtcagtttaaggtttggttttgatttgtctttgtaatcaactaaagagggttcaggtttaggagaaaggagatcctatggtgacccatttctttcaaacctattgtcgtttcactttctaatttagttctattttccctttttctttttatctaacaaaatatttatgtttcataaactattttttcttcgtaaattataaaagctttttctccgaagttaaattggagaaaatctttaatattaaaaaaatcgagagaaataccctagaatagctattttttttttgtcggcagaatagctatttttccaatatatattttacaataaagtaaaaaataactgaattattccccttaaactaaattatgaaacctttatgacttgaaaccaaattttgacttttaagaagcgataaaattatgctatacgaggttaattatgcaacattatcccaaaaagtttgtttcgaaaatacgaccatgataatctcaataaccgtttaatatctataactaggctataagaatcctatttctattcgaatattctttaaaatccaactttatctcttcttttgcaaaaaaaaaaaaaacttcaatttaagttctatataaaacgttgtcacccatacgtttaatcagaaaacagaaagaaacatactcaaaactttttaagcagcgacgatcatagatcaaatatg

SEQ ID NO: 3681 - DNA, 3000 bp, Unknown
  misc_feature (1)..( 3000): cDNA_ID_2049971_gDNA_ID_1620656_Annot_ID_163677 3000 nt of promoter + ATG
ctttctagtttgctacaaaaggcaggtctgtaactatagttccacctttgtgtgtagatggaaatggtttcaagacaagtacaatgagacttggagctgatgccatggtttttagtcgctcaactcgtggagggtattgatatatctggaacatttactgtctggatttggcggatgctcttgtttttaacttaaacatacttttatcttctctgttttagcaaatctacacagagcattggtcttctgtcctatacattccttaggaaaactggtcaggatgatgtgatcgttcctatggtaaaatcctcagcttatgtagctttttgtttggaaactcatgaatctgcaacgattattttgtcttgatgttatcatatctgcaatgcagattgatttcgatatatccagtgatagcccccaaccaattatttatgggtctcccggagattggtctaccaaccttaacattcttctcaaatggtccccgttttcaacaatggtcgaacttttgcagcaggttgtttcctttaaaaaactctggttccgagtgttatattaacgtggcttgtttattcattcatttatttccattcttcatctaccagttcgaggatattggaacacatggaacaaaagtaattatatacaacttgtggcttaatgatgaaggaatctatgagctgagttttgacgacgatgatgtggtacttacacttccttaaagggtttatgatgaagttttttgcaaaagttgggttttaaagtatttcaattattttccttaatattggtataggatatacggctccgagatgaaaatgcccaggacgggaaacggttgcacgctaaaacattggaagtaagatctcatatttcgtaccgctatcgacattctctaagggtaatccttctgaatatcttctttctaattagttttttttactgttgcaaggatgtgcaaaggctgacatagtttctttatccttaggcttacatttccatgttatatctcaaaaagttcaaaaacttcaaaattattcttcggggagtctctgtggcgcaattcaacattgctgatgaattcagacatcctgagacaataatgtacaaaccccaagcagctgcagtggattatgtaatacaaactaagacttcctctttttctttcgttttactcgctggttttattttaatgttttagactgcgagtgcaaaaccactaagctttcttatttattacaggctgccactggaattaaagttggattcatcaaggaggcccctaaacttccaatttgtggtttcaatgtctatcacaaaaaccgtctcatccgggtacgttttgatgttgcagttatatttatatgctcttaatctcaagaagcaactttcgtaagtttgttagtatattttcacttaagcttccatttgtatatggcttgattaagttgagatctctcttgcaccattacagccattctggaaggtcgttctggaagggtcaacgagaggcaatggtgttatgggtatagtgattcattctccttataatttctatatgtcaattgaatatgttttgtttgggctaaaaccctggaggggagactcattaccaaaatctgttccccaggagttcttgaggcaaacttcatagaaccagcccacgacaagcaagattttgagaggtcttctctatttctgcggctggaggcgaggctgaaaaggataacctctgattactggtctcttcttcctctccaaaacctttttcagtcatctctcaatattttgtcaatatgattttggttccaaactgcaatacctttgtttgactattccactgcttgctatggggaagaacaggcaaaatcactgtcacattttcggataccaaactgctcaaatccctgcagataagtcgaaaaggacagtaatacctgatcaaccgcctactgtcaatacatacaatccttcgcctttgccttctgatagaatcagtcatggtggtcctataatacgtgaaatcaatcttagtaacgccacttcaagccgaacagctgctgttgccgcgccacatttgagaaattacacaggtttaagaaataacttccaacccgtgcagctcaacccacaaccacctgcagctggcgtaagtgaattcagtcaatgatatagttttattcacaagtttgatctaaagtcgatgattttttttttccgcaggatactggaaacaacctcgttggcaagttagcggctgagatacgcgaagagaacttacaactcttcatgaggtatatttacaacaagagaaaaacacatttcagtatcatatctctcttggggatctgaattaaatattattcttcaacaggtgcgaggaatatgtaaagaaagagaatgaagtagaacagacggtaagtttgattccgcagtacaaaacatccgtttattacatggactctaacaccggtatacattggatgataaaacaggtaaagagcttagaaaaagaactggaagaaattaaaagtaaatgtgcacaacttgctctgcttgtggatgctaagaagaaggagatgcaacaagtttagtaaaagcgttacgagttaaaactctctggaacctaaaaaaccctagtttgattcagatttttttggtgttcttgatttttgtttttcaactttcatggtgttcttgtatttgcttaatagcctgtcatgtgcatatatgtaacggtatgtacataagcgtattactcatataaacatttttgagaaatgggcctataagtatttgagatatggagcccaattagactgttgacccaaaaaaagaaacgcaaggcaatgaataatgatgacgaagaagacgtttgcgtttcttcacgctgtagttgaaaagtctgtctagactaatcggagaagacgtttgtttcacaaaattcgaattcgttttctcgattcactttcaccgtcgacggtaatgcctcctatg

SEQ ID NO: 3682 - DNA, 3000 bp, Unknown
  misc_feature (1)..( 3000): cDNA_ID_2049991_gDNA_ID_1620656_Annot_ID_163672 3000 nt of promoter + ATG
agataagagatcctctggcggtgaaagacgggtactttggtcagaaaagctcttaaatttctcacgttcttgttcgtcttcttttctttgtgacgaagacgactctaaagaagtgtcggcgttagagaggtcgagaagatcgtcgacggaaaaatcaccgagaaatgcttctacacactccatttttgtctctagccgtatgaaagcactacaagtattttaaataaaggaggagcgaagcgaatccatatttgaaaaagtttgttcgtgttccaatatattttacacaaatttcattctttctttttcaaaattttaaattctttacgtgtctatcgagtgagagagacagtggagagtggacagcactgattggggtttgtaagcaagagtgggttttaggtttttgtgattttggaagacttgtttggtatttgtctcgttacaaatctcgtaacaaatcatgcattgccatgtcagcatttcacattgaaaaggaaaccaaaaatacgtttccttcgtaagtaaaatgttttttttttttttttttaaatgttatctgaacttatccgtagaattttatttaaagataaccgctctttgtagtcaattcaatttattagagttcttaatgccaaattttaagttcataatattaaaagacagcaaagatttcttcataatttagaactatcatttttgacttaaccatcggcgcagagtttgcaagtctttttaagttcttttactatcaaaataactgaataaagtcattcagaactagtggtattctaacgatctaatggctcaacctaattaatcatgaccgttgaaagtgttgttgggccaaaaatatcgtcggttaatacaactttccctctatataaagctagtttcttgcaaaatatggtttttttttgttaacataaaaaagaaactagtagcacatatatatatatatatatatatatatatttttttttttttttgttgtatcagtatttcgaaggttttacagaaaagaagaaaaaaattaacaataattcatacgtcgagagtaatgattggactatcaggcttctcgggcccactcgaccgtcggtggaaggcccaattttaccaaaacaaacaaaaacgttattagtaagggcctattatttatttcttctttaatttcaaggaaagagtgaccatcatatgttgagcgcgtgaaaatatcgctcatggttatatatttgttttttctttgagataataatttccattagaaaaagtcggtttcaaagttagaaaaaaaacatctaaacattcacgtaaagtttaccaggagcaatggagcataaacatattcaaattacacacatacctaaatagtaaataataataaaatacatagacttgtatttttattataaatataatgaactacattccaaacaattgggtgtttggtctagtggtatgattctcgcttcgggtgcgagaggtcccgagttcgattctcggaacacccctctttaaattctctactgctacatcaatttttttcccctcggattaaattaacgcaagaaagtcgtagactgatgacatacaatatggtggtggctcactaaactgactatatgcctaattagcccgatgggccacatgggctcaatgcaagtcggtaaaaggtggaatgttattgaatgcgatgtatgttggcagaggagtaaccgtacaaattagactattttatacccatgaaatcattatcgttcgataacataagatagtaaactttcatgatctcgttctctatgcatccatctctcatctgtgtagtgtagctttttttttcttttttccccacagtatttatctcgtaaactatactttcatatagtcatatatgtgatatgaacattgacactgtacgtaacttatatgatgattaagtttacatgaaaaccattcaagtttttttaaaagcgtaaatacaaaattacttcatgaaatttacgtttataatttaaaatgaacttcgatttaagttatttgcattcagagaaaatagaaattaattaaatgtagcaacgatgtaagtgatagccataaaaatatcacattctttgtatatcggaaatttggttgagcttttaagtcttgaaccctcggataaaaaaaaatgtacacttgaaaccaatatagcattgctccataaatatcaatatcttagacccaaaaaacgatattgttattccatatcggattttagtcatttcgactattttcccaactatttttcctactgaaagattaattacagatctactattggccccaacatttggttcactagacaacctgtaataatatagttcaagtagtactattcacgtttcaacacactaacttttattgagcttcccaactacatttacaatattaatcgtatcactccacataatatcatctatactctagtttattcgacataaaagcatatttaaaaattgtagatgtgaatttgatagttgacaaaccaaatattttactgtacatatgaatttgatattagttgcccggaagcatttaatgaccggtgccagtaaccagacgtttcggactatgttaggtgagacaatgaatagagacacatcaataaatgtcaccgatacatatacttcatataatctaaagtatttcttgaaaaaatctaacatgtgaactaatgaaaatctatcaattacaacattaaattcaacgatatggacttccatcttcttgataacgatcttcaaaagtaagtaagacagcaaacctatttaatatttttaccttattattccccaactagttccttttccacttttaaccatcaccctataagtggttataactagtaacttgaaatagaaacactctatctctaaaagaggcaaccaaacaaacaaggtctagctttttataaccaaactctgcttctgaacagagttagtcaaagagagagaagcc

SEQ ID NO: 3683 - DNA, 3000 bp, Unknown
  misc_feature (1)..( 3000): cDNA_ID_1808602_gDNA_ID_1620656_Annot_ID_163670 3000 nt of promoter + ATG
actgtgtttgcccaaatcttgaaacagagcattgcagatcttgtcttcgttgtctttaaccatctcgtatatagctccgatctgtgccttcctccacttcagactcctcgtcctcccactcgcaaacgtctctctcatctctctcaagctctcctccacagtctccttcatagcttccatggcttctctctctttgactaactctgttcagaagcagagtttggttataaaaagctagaccttgtttgtttggttgcctcttttagagatagagtgtttctatttcaagttactagttataaccacttatagggtgatggttaaaagtggaaaaggaactagttggggaataataaggtaaaaatattaaataggtttgctgtcttacttacttttgaagatcgttatcaagaagatggaagtccatatcgttgaatttaatgttgtaattgatagattttcattagttcacatgttagattttttcaagaaatactttagattatatgaagtatatgtatcggtgacatttattgatgtgtctctattcattgtctcacctaacatagtccgaaacgtctggttactggcaccggtcattaaatgcttccgggcaactaatatcaaattcatatgtacagtaaaatatttggtttgtcaactatcaaattcacatctacaatttttaaatatgcttttatgtcgaataaactagagtatagatgatattatgtggagtgatacgattaatattgtaaatgtagttgggaagctcaataaaagttagtgtgttgaaacgtgaatagtactacttgaactatattattacaggttgtctagtgaaccaaatgttggggccaatagtagatctgtaattaatctttcagtaggaaaaatagttgggaaaatagtcgaaatgactaaaatccgatatggaataacaatatcgttttttgggtctaagatattgatatttatggagcaatgctatattggtttcaagtgtacatttttttttatccgagggttcaagacttaaaagctcaaccaaatttccgatatacaaagaatgtgatatttttatggctatcacttacatcgttgctacatttaattaatttctattttctctgaatgcaaataacttaaatcgaagttcattttaaattataaacgtaaatttcatgaagtaattttgtatttacgcttttaaaaaaacttgaatggttttcatgtaaacttaatcatcatataagttacgtacagtgtcaatgttcatatcacatatatgactatatgaaagtatagtttacgagataaatactgtggggaaaaaagaaaaaaaaagctacactacacagatgagagatggatgcatagagaacgagatcatgaaagtttactatcttatgttatcgaacgataatgatttcatgggtataaaatagtctaatttgtacggttactcctctgccaacatacatcgcattcaataacattccaccttttaccgacttgcattgagcccatgtggcccatcgggctaattaggcatatagtcagtttagtgagccaccaccatattgtatgtcatcagtctacgactttcttgcgttaatttaatccgaggggaaaaaaattgatgtagcagtagagaatttaaagaggggtgttccgagaatcgaactcgggacctctcgcacccgaagcgagaatcataccactagaccaaacacccaattgtttggaatgtagttcattatatttataataaaaatacaagtctatgtattttattattatttactatttaggtatgtgtgtaatttgaatatgtttatgctccattgctcctggtaaactttacgtgaatgtttagatgttttttttctaactttgaaaccgactttttctaatggaaattattatctcaaagaaaaaacaaatatataaccatgagcgatattttcacgcgctcaacatatgatggtcactctttccttgaaattaaagaagaaataaataataggcccttactaataacgtttttgtttgttttggtaaaattgggccttccaccgacggtcgagtgggcccgagaagcctgatagtccaatcattactctcgacgtatgaattattgttaatttttttcttcttttctgtaaaaccttcgaaatactgatacaacaaaaaaaaaaaaaaatatatatatatatatatatatatatatgtgctactagtttcttttttatgttaacaaaaaaaaaccatattttgcaagaaactagctttatatagagggaaagttgtattaaccgacgatatttttggcccaacaacactttcaacggtcatgattaattaggttgagccattagatcgttagaataccactagttctgaatgactttattcagttattttgatagtaaaagaacttaaaaagacttgcaaactctgcgccgatggttaagtcaaaaatgatagttctaaattatgaagaaatctttgctgtcttttaatattatgaacttaaaatttggcattaagaactctaataaattgaattgactacaaagagcggttatctttaaataaaattctacggataagttcagataacatttaaaaaaaaaaaaaaaaaacattttacttacgaaggaaacgtatttttggtttccttttcaatgtgaaatgctgacatggcaatgcatgatttgttacgagatttgtaacgagacaaataccaaacaagtcttccaaaatcacaaaaacctaaaacccactcttgcttacaaaccccaatcagtgctgtccactctccactgtctctctcactcgatagacacgtaaagaatttaaaattttgaaaaagaaagaatgaaatttgtgtaaaatatattggaacacgaacaaactttttcaaatatggattcgcttcgctcctcctttatttaaaatacttgtagtgctttcatacggctagagacaaaaatg

SEQ ID NO: 3684 - DNA, 3000 bp, Unknown
  misc_feature (1)..( 3000): cDNA_ID_1821468_gDNA_ID_1620656_Annot_ID_163666 3000 nt of promoter + ATG
aatgtgttcttactttatcttacaaaatacctgaagaataatcaatcttatgaattgctactttaaaaaaaggttttttttcctgaatacatttttttttaatgtgtatgctattttaatattgagcaaatatcagctaagcatatatttgtatattaaataaaaaaccaatatcttcatttgtttcggaaaaatatccaaatataataattataatattcaattgtgcaaatgtgacaaatcaaacatattttcaaaccacttttaagtgttaatcatattgaataaatagctaaataagggtcttgataaataaggataaatatcgcagtgtgtgtttaaagacttttgatagtttgatttttccttattatactaatcaaaggtgaaaaggaaatgtgtgtctttttgcgagtagttgttggcttcagacagttcatagcggagttactctatacgcgaagtacttgtctcatactgataattttgatggcaattaaggctttaaaagcttatgtattttcttataaccattttattctgtatatagggggacagaaacataataagtaacaaatagtggttttatttttttaaatatacaaaaactgtttaaccattttatttcttggttagcaaaattttgatatattcttaagaaactaatattttaggttgatatattgcagtcactaaatagttttaaaagacacgaagttggtaagaacaggcatatattattcgatttaattaggaatgcttatgttaatctgattcgactaattagaaacgacgatactatgagctcatagatggtcccacgacccactctcccatttgatcaatattcaactgagcaatgaaactaattaaaaacgtggttagattaaaaaaataaattgtgcaggtagcggatatataatactagtaggggttaaaaataaaataaaacaccacagtattaaatttttgtttcaaaagtattatcaatagtttttttgcttcaaaaatatcacaaatttttgtatgaaatatttctttaacgaaaataaattaaataaaatttaaaatttatatttggagttctatttttaatttagagtttttattgttaccacattttttgaattattctaatattaatttgtgatattattacaaaaagtaaaaatatgatattttagaatactattatcgatatttgatattattgaccttagctttgtttgggtggagacatgtgattatcttattacctttttattccatgaaactacagagttcgccaggtaccatacatgcacacaccctcgtgaaacgagcgtgacttaatatgatctagaacttaaatagtactactaattgtgtcatttgaactttctcctatgtcggtttcacttcatgtatcgcagaacaggtggaatacagtgtccttgagtttcacccaaatcggtccaattttgtgatatatattgcgatacagacatacagcctacagagttttgtcttagcccactggttggcaaacgaaattgtctttatttttttatgttttgttgtcaatgtgtctttgtttttaactagattgaggtttaattttaatacatttgttagtttacagattatgcagtgtaatctgataatgtaagttgaactgcgttggtcaaagtcttgtgtaacgcactgtatctaaattgtgagtaacgacaaaataattaaaattaaagggaccttcaagtattattagtatctctgtctaagatgcacaggtattcagtaatagtaataaataattacttgtataattaatatctaattagtaaaccttgtgtctaaacctaaatgagcataaatccaaaagcaaaaatctaaacctaactgaaaaagtcattacgaaaaaaagaaaaaaaaaagagaaaaaactacctgaaaagtcatgcacaacgttcatcttggctaaatttatttagtttattaaatacaaaaatggcgagtttctggagtttgttgaaaatatatttgtttagccactttagaatttcttgttttaatttgttattaagatatatcgagataatgcgtttatatcaccaatatttttgccaaactagtcctatacagtcatttttcaacagctatgttcactaatttaaaacccactgaaagtcaatcatgattcgtcatatttatatgctcgaattcagtaaaatccgtttggtatactatttatttcgtataagtatgtaattccactagatttccttaaactaaattatatatttacataattgttttctttaaaagtctacaacagttattaagttataggaaattatttcttttatttttttttttttttaggaaattatttcttttgcaacacatttgtcgtttgcaaacttttaaaagaaaataaatgattgttataattgattacatttcagtttatgacagattttttttatctaacctttaatgtttgtttcctgtttttaggaaaatcataccaaaatatatttgtgatcacagtaaatcacggaatagttatgaccaagattttcaaagtaatacttagaatcctattaaataaacgaaattttaggaagaaataatcaagattttaggaaacgatttgagcaaggatttagaagatttgaatctttaattaaatattttcattcctaaataattaatgctagtggcataatattgtaaataagttcaagtacatgattaatttgttaaaatggttgaaaaatatatatatgtagattttttcaaaaggtatactaattattttcatattttcaagaaaatataagaaatggtgtgtacatatatggatgaagaaatttaagtagataatacaaaaatgtcaaaaaaagggaccacacaatttgattataaaacctacctctctaatcacatcccaaaatggagaactttgcctcctgacaacatttcagaaaataatcgaatccaaaaaaaacactcaatatg

SEQ ID NO: 3685 - DNA, 3000 bp, Unknown
  misc_feature (1)..( 3000): cDNA_ID_3071625_gDNA_ID_1620656_Annot_ID_163664 3000 nt of promoter + ATG
actcaaaccttagatcactactctccatctgtaatcaatcttcccaatttcgtttcttcttcgattttagtttctgtttctctttcgttattgaaattcaaaattcgctgcaaaatcctagttaccagttccagctgtttctaattttatttcaggatcatcgcaaattcagacagagatactatgaatatcttgaccatttacgagttcctgacggacctatctttctcatgatttgcggcgaaggaccttgcaatggaatcaccaataactatattagtgtaagatatttttccgtgaaacatatccatttgattgattaatttattctcataatctctgaaatttgcattggttttgtttgttaaacatgttcttcaggtgttggcaaagaagtttgatgcaggcattgtttcactcgagcatcgttactatggaaagagctcaccatttaagtcgttagccactaagaatctcaagtatctttcttccaaacaggccctttccgatttagctactttccgccaatattaccaggcaagtagtagtcttatactcttatggttattactttctctaggatcaaatgtttaagaagctgcgtttattagcatgttttgggatttgtttgtggatgcaggactctttgaatgttaagtttaatagaagcagcaatgttgagaatccgtggtttttctttggagtatcttattctggagctttaagtgcttggttccggcttaagttccctcatttgacctgtggaagcctcgctagttcagcagttgttcgtgctgtctacgaattccccgaatttgatcaacaggtattcgttacaatattcaactttaagtgaagaaatgttgtgtttcttcatatagagtttagttgctgacagaatcgagatttttataccttattgaatagatagctgagtcggctggaccggaatgtgaaactgcgctacaagagactaataaactcttggaactagggcttaaagtgaataacagggctgttaaagctctcttcaatgccacggaggtctagctttactgtttctgttttcttttgtttgaatcttaaggaagtaagaagtctatctccaatctgattaagtttctgaaatctgtagcttgatgttgatgctgatttcttatacttaatagcggatgcaggagttatggcggtaagcaggttcatttcatatttataaaattttcattttctttctagttttagatgtttatctggcagattcaatacggaaacccagataaactatgtgtaccactcgtggaagctcaaaagaatggtggtgatttagtggtaagttctttgtttttttagatcgctctttacttatgcttggtgtatatatattgacattcatcatatggtttgcaaacagaagaattgtatttggtgatacataacattggatgtgttaatgcaggaagcatatgctaaatatgttagagagttttgcatgggagttttcgggcaaagctctaaaacatatagccggaaacatctactagacactgcggtcaccctagagagtgcagataggctttggtggttccaagtttgtactgaagtggcttatttccaggtggcacctgcaaacgatagcatccggtctcatcagatcaatacagagtatgcacagacccaagcttatatatcatattcagaattctgattttgtcgtttctatttattgtcccatttacacttcttttcatttcataggtatcatttggatctatgcaagagcctctttgggaaaggtgtctaccctgaagtcgatgcaacaaacttgtactatggaagcgataaaattgctggtatgtaatatcggaaaacttctcgacgatccttttagacttgtgcacattccaacagtttcttcgcatcttcttattctcaattttgtagcgaccaagattatcttcacaaatgggtcacaggatccatggcgtcatgcatccaaacaaacctcatctcctgaccgtaagtcttcatttagtttgatcaaaatcgcatagcaataactcaggcatagcctatgtcgttatgtagcagtattcagacaaatcctttgtctgggacactaaaaagataatgtttgatgacacagtgccttcgtacatcatgacttgtcacaactgtgggcatggaagtgatcttcgaggatgcccccaatctgcaatggtcattgaaggtatattaccggcttcttctctgtttccgatgcctgaagtcaatgacaagcatcagaacaactgttaagaaaatatgatgtcccattcttttcctgtttttttcctcccatttgcaggtgatgcccagaattgcagttcaccagatgcagtgaacaaagtgaggcaacatatgataaaacacatcgacttgtggctctctgagtgtcgtggataggttaggtcgtgcagagattaggagttccatgcagagtcacacgaactgcgttctgcaaataaataaaacatcagatgtacgctccaaacttatatctgtgtaactgtaacctctgaaactgagtcacgtagcaagtccactcggtatctcgattttaagctttcatccactaaggcgaatacagtagcacgagatatggccactcgggaatggaggttcagattctatctcttaatcggtggtccatcttggcttctgcctctcattgttgaagacaatcgaccttgtgtcaagttttatctgttttgccctgttttaattgtttggttgttctgttactctgtttccatctttggttttaatttctacgacgacaaaaaaaaaaaaaaaaaaaaatttaaagtccgcgttataaaaaaaaaaatgatttttgttacaaattactaattagggaaacattattctaatcattatattgtccttgcaatttataagtaaaaacatttcttttctggtccactcgttttaacttccggcgatcgattttcacggcgagaa

SEQ ID NO: 3686 - DNA, 3000 bp, Unknown
  misc_feature (1)..( 3000): cDNA_ID_3071629_gDNA_ID_1620656_Annot_ID_163662 3000 nt of promoter + ATG
aacgcagttcgtgtgactctgcatggaactcctaatctctgcacgacctaacctatccacgacactcagagagccacaagtcgatgtgttttatcatatgttgcctcactttgttcactgcatctggtgaactgcaattctgggcatcacctgcaaatgggaggaaaaaaacaggaaaagaatgggacatcatattttcttaacagttgttctgatgcttgtcattgacttcaggcatcggaaacagagaagaagccggtaatataccttcaatgaccattgcagattgggggcatcctcgaagatcacttccatgcccacagttgtgacaagtcatgatgtacgaaggcactgtgtcatcaaacattatctttttagtgtcccagacaaaggatttgtctgaatactgctacataacgacataggctatgcctgagttattgctatgcgattttgatcaaactaaatgaagacttacggtcaggagatgaggtttgtttggatgcatgacgccatggatcctgtgacccatttgtgaagataatcttggtcgctacaaaattgagaataagaagatgcgaagaaactgttggaatgtgcacaagtctaaaaggatcgtcgagaagttttccgatattacataccagcaattttatcgcttccatagtacaagtttgttgcatcgacttcagggtagacacctttcccaaagaggctcttgcatagatccaaatgatacctatgaaatgaaaagaagtgtaaatgggacaataaatagaaacgacaaaatcagaattctgaatatgatatataagcttgggtctgtgcatactctgtattgatctgatgagaccggatgctatcgtttgcaggtgccacctggaaataagccacttcagtacaaacttggaaccaccaaagcctatctgcactctctagggtgaccgcagtgtctagtagatgtttccggctatatgttttagagctttgcccgaaaactcccatgcaaaactctctaacatatttagcatatgcttcctgcattaacacatccaatgttatgtatcaccaaatacaattcttctgtttgcaaaccatatgatgaatgtcaatatatatacaccaagcataagtaaagagcgatctaaaaaaacaaagaacttaccactaaatcaccaccattcttttgagcttccacgagtggtacacatagtttatctgggtttccgtattgaatctgccagataaacatctaaaactagaaagaaaatgaaaattttataaatatgaaatgaacctgcttaccgccataactcctgcatccgctattaagtataagaaatcagcatcaacatcaagctacagatttcagaaacttaatcagattggagatagacttcttacttccttaagattcaaacaaaagaaaacagaaacagtaaagctagacctccgtggcattgaagagagctttaacagccctgttattcactttaagccctagttccaagagtttattagtctcttgtagcgcagtttcacattccggtccagccgactcagctatctattcaataaggtataaaaatctcgattctgtcagcaactaaactctatatgaagaaacacaacatttcttcacttaaagttgaatattgtaacgaatacctgttgatcaaattcggggaattcgtagacagcacgaacaactgctgaactagcgaggcttccacaggtcaaatgagggaacttaagccggaaccaagcacttaaagctccagaataagatactccaaagaaaaaccacggattctcaacattgctgcttctattaaacttaacattcaaagagtcctgcatccacaaacaaatcccaaaacatgctaataaacgcagcttcttaaacatttgatcctagagaaagtaataaccataagagtataagactactacttgcctggtaatattggcggaaagtagctaaatcggaaagggcctgtttggaagaaagatacttgagattcttagtggctaacgacttaaatggtgagctctttccatagtaacgatgctcgagtgaaacaatgcctgcatcaaacttctttgccaacacctgaagaacatgtttaacaaacaaaaccaatgcaaatttcagagattatgagaataaattaatcaatcaaatggatatgtttcacggaaaaatatcttacactaatatagttattggtgattccattgcaaggtccttcgccgcaaatcatgagaaagataggtccgtcaggaactcgtaaatggtcaagatattcatagtatctctgtctgaatttgcgatgatcctgaaataaaattagaaacagctggaactggtaactaggattttgcagcgaattttgaatttcaataacgaaagagaaacagaaactaaaatcgaagaagaaacgaaattgggaagattgattacagatggagagtagtgatctaaggtttgagtgaaccagagctcatccctcgtcaagtacttgctacttttggacaatccatgagaaatcctacgaggttgcagtaacccattagaaaagcttaaatacgacaagagcaccgtgaaggtggtaagtaaagcaaagccaagctccgacgacatttctcgccgtgaaaatcgatcgccgtagtttaaaacgagtggaccagaaaacaaaacaaaataatgtgattttctctgtttgtatttgtttttaaaaaaaaaaacttgcaaggacaatataatgattagaataatgttttttcccctccaacaaatagtatcatttttttagtaaatgcatggattatagtgcggacttcaaattatctacagaaccagatttttgtatttcttttactttaactttactctttttctgctcattctctctcccagaaaaaaaccacactcatggcgacacttctctcaccttcttcaagctaagttttcattttgttcactgccacagatctatg

SEQ ID NO: 3687 - DNA, 3000 bp, Unknown; identical to SEQ ID NO: 3677
  misc_feature (1)..( 3000): cDNA_ID_1821490_gDNA_ID_1620656_Annot_ID_163660 3000 nt of promoter + ATG

SEQ ID NO: 3688 - DNA, 3000 bp, Unknown; identical to SEQ ID NO: 3676
  misc_feature (1)..( 3000): cDNA_ID_1821494_gDNA_ID_1620656_Annot_ID_163659 3000 nt of promoter + ATG

SEQ ID NO: 3689 - DNA, 2202 bp, Unknown; identical to SEQ ID NO: 3674
  misc_feature (1)..( 2202): cDNA_ID_2687174_gDNA_ID_1620656_Annot_ID_163657 3000 nt of promoter + ATG

SEQ ID NO: 3690 - DNA, 3000 bp, Unknown
  misc_feature (1)..( 3000): cDNA_ID_1821472_gDNA_ID_1620656_Annot_ID_47859 3000 nt of promoter + ATG
atgcaggactctttgaatgttaagtttaatagaagtggcgatgttgagaatccgtggtttttcttcggagcttcttattctggagctttaagtgcttggttccggcttaagttccctcatttgacctgtggaagccttgctagttctgcagttgttcgtgcagtctacgaattccctgaatttgatcaacaggtatttgtttcaagattaaactttaaatgaagacatggtgtgtttcttcatatagagtttagttgctgacagaatcgaaatttttgtgccttattgagtagataggtgagtcggctggaccggaatgtaaagctgcactacaagagactaataagctcttggaactagggcttaaagtgaataacagggctgtgaaagctctcttcaatgccaccgaggtctagctttgttgtttttctttctattcgttggatatttaaaaaattatggaagtcaaaagtctgtctctaatatgtatatgtttctgaaatctgcagcttgacgttgatgctgatttcttatacttgatagcagatgcagaagttatggcggtaagcttgttcatttcgtactcttatgattttcattttctttctagttttagatgtttatcttcaaaaattttggcagatccaatacggaaacccagataaactatgtgtaccactcgtggaagctcagaagaatcgtgatgatttagtggtaagttcttttctttttagatccctctttgcttatgcttggtgtatatatgatcaatgattgatcatatatgctagaagaactcgttttgcaaactaaatatttgtatttgctgatacattagatgtggtgtattaatgcaggaagcatatgctaaatatgttagagagttttgtgtgggggttttcgggctaagctctaaaacatatagccggaaacatctgctagacactgcggtcaccccagaaagtgcagataggctttggtggttccaagtttgcactgaagtggcatatttccaagtggcacctgcaaacgatagcatccggtctcatcaaatcaatacagagtacacacagtcccaagcttttatccataacttttttcatggtttatatttattgtcctgcttacgtttcttttaatttgataggtatcatttggatctatgcaagagtctgtttgggaaaggtgtttaccctgaagtcgatgcaacaaacctgtattatggaagtgacagaattgctggtatgtaataacggaaaacatctcgatgctactcatatattttcgcacattccaacagtttcttcttattcgtaatttgcagcgaccaagattatcttcacaaatgggtcacaggatccatggcgtcatgcatccaaacagacctcatctcctgaacgtaagtctccatttagtatgatcaaatccttataacattatctcaggcttagtctatgtcgtacagtagcactcagacaaatactttctatgcgacactaacaagttaatacttgacgacacagtgccttcttacattgtgacttgccacaactgtggccatggaagtgatctccgtggatgccctcaatctcccatggtcattggaggtatattactggcctcttctctctttccgatccctgaagtcaaagacagactagtattggaacaactgttaaaaaaatattatttttccctgcttttttcattctcatattcaggtgattccaagaattgcagttcacctgatgcagtgaacaaagtgaggcaacatatagtagatcatatggacttgtggctctctgagtgtcgtggagggattaggagttccatgtaaagagtcacacgaagtcagaaactgcggttatgcaaataaataaaacatcagatgtatgtttcaaacctgtatctgtgtaactgtaacctctgatgtatgtttcgaacttgtctctacggacctaatacagtagtttacacgatgagacgatagaattaccgtcaagccatgaattgagaaagctgtctaaaattattttagtaacatatcagtctctttcgtaattactgtctaaatatattataaattgttacctatcacaaatccgttgtagtctagctggtcaggatactcggctctcacccgagagacccgggttcgagtcccggcaacggagatttttttatttctcgggattgactttgtttgtgaaacgagtcaacagagtgaaggacagatgtctcctgctattggaccggaaggaaaatataacggatgactcatatagtcacggattcatctttctcgggatttcgaaatttgacggtgatctgatttccaacgattttttctcttccatggctttttttcgctgatcggtaaatcaaacgtttgtttcggtttcgatggtggaagctacgtcgaatttgacgccgactcagagatatgcggccggcgcattgtttgcgatcgctttgaaccaagcgcaaatcaaccagactcagccgctgggaaccccggcggcggaagacgacgacggaggcgatgaagagcgaagaagcaattgcagtagcggagattctgtctccgatgaccccagcctttgggtacacgagacgtctggccttcttcgccccgttttcaggtgctttcccaaaatctcttgtcgatctcatcgattttgaaattcctttcgagtcttggttgtctatgaccgttgaaatcatctggttgattagtagttcgctttagctctgtttgtaattcgtttctatccacagatgtcttgagattgattcaccggcttggcttggtctcgagcaaacagcttgctcttctccggctaagcaccacatcggggcggtatggctatttccggagttcaaattttgctgttatggatccgatactcactgttgagttattgttcattaacttctattttgtttttattgtagttcacgaggttactctcagaagaagcgaatgatgcttctgccgag

SEQ ID NO: 3691 - DNA, 3000 bp, Unknown; identical to SEQ ID NO: 3684
  misc_feature (1)..( 3000): cDNA_ID_1821468_gDNA_ID_1620656_Annot_ID_47860 3000 nt of promoter + ATG

SEQ ID NO: 3692 - DNA, 3000 bp, Unknown; identical to SEQ ID NO: 3683
  misc_feature (1)..( 3000): cDNA_ID_1808602_gDNA_ID_1620656_Annot_ID_47862 3000 nt of promoter + ATG

SEQ ID NO: 3693 - DNA, 3000 bp, Unknown; identical to SEQ ID NO: 3682
  misc_feature (1)..( 3000): cDNA_ID_1821461_gDNA_ID_1620656_Annot_ID_47863 3000 nt of promoter + ATG

SEQ ID NO: 3694 - DNA, 3000 bp, Unknown
  misc_feature (1)..( 3000): cDNA_ID_1821457_gDNA_ID_1620656_Annot_ID_47864 3000 nt of promoter + ATG
gattagactctttctctaaaagactcaaatatgccatgttattatcaacaaaaagccacatttaaaggctgagaaaatgacagccattacagtataatataatttcgtttttttctccattattgtctcgttcttgttgttcccatttgctccgatgtactcctgtcatgaagcaaccatccgataattaagaccttctagagaatagacttacaaacgatgtactcctttcatgaagcaaacacctttcaatttcccttattcacataaattgtaaattcatttaatgtattaaagttgactatatagttagagtttcgtggttttcctttgtttgttttctagtttcgtagtttgatcaattacaatcaatatatatttcattatctcatctgcaacgacaatctcagcttttatatggcttacgtccattcaaccccaaccctaaccccaagggacactatttgttatttattcatgaaactaaaaaacaaaataagatatttaatcaaactatatgaagagaaggagagagtttggttgcacacacagaaaaaaaaaaaaaaaaaaaaagaagaagaaagagagagtcaacgcaaaggagaggcaaacacgaacacacacagggctcgagagacctctcgacatgtttaagggacagacagcgagcgacactgaacgtctttttctcgggcctctcccacttatcattcccttccctgtctcttttttttttgtttttcttatttgtataataatcattagattttacaattttaaatagctttttctttccaaaacctttggactggactaacctggatcggtccgatcttgataacgccggttttataaaaatcttaatattttttagggtttaaacttaatttgtacgatcatggatggatcatcatgtggtacgagtccactattaattcttctaaacacctaaacaaaaacgatatacttacatgattgtttctggttggattcgtaggtggcattgtgactacactcgttcatcaatatgggccgatttaaaaatgactagattttttttttctggatcttgaaaatccagactaatccaacaggtttttggtctaccacaacatttcaaacaaagactatttattagaaaccataaacccggaaaaactacgaataccaaatattattacaatagtttgcttcgtcgtttacgtggaaatttatataattcacagtaaaaagaaaggaatacaaaaaagtacacgtaggtggcgcagtgttcccttgtatagccacatagagtccaaagagtaacatgcttttttttttcatctttccttagttttttttttgtaaatatttctttaattattcaaatcactcgataacgatataaatatgatcatttgctacaatcaataaaaagagagcctctttttcactgccccgaatctctctgttttcataactactccatggtgaatgatttgatacactattgactataactctaattcttaatgattttatacacatggatttaagttatgatttatagagggtaacaagcagaatatttgaatgtttttattgcggatatttaaatatataacttaccggaaaaagtggcagtctaaattagaagagcttgttaattatgcatgtaaaattaaatttaaatatggtttagtcatccctttgtggacactattgacgtttttccaaaaattttcttttcacttgtaagtttttttattttaagaatggcttgttttttttaactatttttaaaacaatctattgtctactcaaatagcataagcatcgataaatatatatatatttacatgtatgataatgatatatggaatattttatgaaggaaaaaaagagttgttctgattgatcacaagattacttacctcagaaaaaatctaaatatggctttacttaattagggtaaatgtttgaatacgtaacattagactttcgaaacatattaaccaaacaaatcgttaagaacgctctaataaatttgatcaagatataaccctgaggcagctagatgagcaattactattgtttgagattaaacaaaaaaaagcttaaggacaaagaaaaagaaaaaaagaagaatttaattttctaatcgcgtaggatttcaaattaacctaaattaaatacggttcattaatacgtacggacacatgagctagctttttttttttgataaccacgaaaaaaatatgtatgctaactttcaaagaaaagaattgaattcatccgttttaagataaaacaagcttaagcacattcgccacttggcaaactctggtccatgggatgagaacaagaaagctaggaccggtggatcattccccgtgggtgtgaaactctgagtcggtagagagagaaagaagagatagcagagagagaaagtctttgtttaatcctttttttactttcatacggacagaactagaagcgttttgttcagacaaagccgaagtgagaagaggaaagaaaagcttttcactttgggtttcatagaatctgcaaaaaccaaatcagagtagtggagagagagagagacttaaattctagggatgagcagagcagaggagagagaaatctaaaaacgcccatggcggcgttgcagaaatttatagagaaaaataaagattcataaataagtagacagcttaaattcttctttctttcttctcttctgtttctttttcttcttcttactttctctcacttcaactactcactaccaagaaacacactttgttccaagagagagagagaaagagagatcttgtagaacattcgaatttagattcggagagcagcaacaacacccacaagctaagggagtataaggctgaatttgagtgagaagaagaaggagaaaaaaggataaggatttcatggtaattagggtttctgaattatggatatagttgggtcaagattagggtttgaagttttaggtcttaaaaaatg

SEQ ID NO: 3695 - DNA, 3000 bp, Unknown
  misc_feature (1)..( 3000): cDNA_ID_1821445_gDNA_ID_1620656_Annot_ID_47867 3000 nt of promoter + ATG
acctttatgacttgaaaccaaattttgacttttaagaagcgataaaattatgctatacgaggttaattatgcaacattatcccaaaaagtttgtttcgaaaatacgaccatgataatctcaataaccgtttaatatctataactaggctataagaatcctatttctattcgaatattctttaaaatccaactttatctcttcttttgcaaaaaaaaaaaaaacttcaatttaagttctatataaaacgttgtcacccatacgtttaatcagaaaacagaaagaaacatactcaaaactttttaagcagcgacgatcatagatcaaatatgaggatgaacaaaattttacttgtttttgtgtttctaagcattgccactgtaatcaatagtggaacaacaagcaactttgtccgcacagctcaaccatcaactgagatgtctctcgaaacttttccatctccggctggtcataatgctccggaacaggttttgatttcttagttctactttttgattttctggttcttagatcataaatttgtgtttggtaatttagggtttaagtttctgaatttaaaagtatcaatatcagtaaggtctgcacatgggaataattagtaacgattaattatgttttacgtacagaggccacacgttgttttttctattattatttttgtcttttttgttgaagtccctgattgtatattttgtatcttaacaaaacaattaatccatcttgatttcttgtatctttggctaggttcatatcgtccaaggagattacaatggacgtggtataatcatatcgtgggtgacccccttaaacctagctggttcaaacgtggttacttattggaaggcagttgatggtgatgtgaaaccgaaaaagaagagaggtcatgcctctacctcgtcttaccgattttatgactatacttctggttttcttcatcacgccacaattaaaggactcgaggtttgtaatttgtataatttaacttgttatataagtaacaacatcactttcttgtttcaaaagtttttataaaagtttctttcttatatcttttcggcagtatgataccaaatacatctatgaggttggaactgatggatccgttagacaattttccttcactagtcctccaaaggttggacctgacgttccatacactttcggcattattggtaattaaattttcttttacctatcttttgaaactagatataactaatacttccaactcgatctaataattacattgtgttttgtaggtgatcttggacaaactttagcttctaacgagacattatatcattacatgtcaaaccctaaaggccaagctgttctcttccctggagacttatcttacgcagatgaccatccaaaccatgatcagagaaagtgggattcgtggggaagattcgtggagccttgtgctgcttaccaaaccttcatctatgctgccgggaatcacgaaattgattttgtcccaaacattgtaagttcacattataattctctcaatttattgctttttttctgatcagtagtttcaactttaataaccatatgaatcttaattagggggagcctcatgccttcaagccctacattcaccgttatcataacgcctacaaggcctcgaagagcatatctcctctttggtactctattagacgtgcatctgctcacatcatcgtcctctcctcttattctgcctacggtaattagtaaacacgtaacatctttaagattattgtttcttgttttttttttgaataacgtgttattcatatttcaggaaaatacacacctcaatacgtgtggctcgagcaagagttgaagaaggtgaacagagaagagactccatggcttattgtcatggttcactcgccgtggtacaacagtaataactaccattacatggaaggtgagagcatgagagcaatgtttgagtcgtggttcgttaacagcaaggttgatttggttttgtctggtcacgtccattcctatgagagatccgaacgtgtctccaatattaaatacaacatcaccaatggcttgagctatcctgtgaaagacccttctgctccaatctacatcactatcggagatggaggaaacattgaaggaatcgcaaataggtaaaaaagaaaaacattttatttgattgctttgttgtcatattgttgatatgatactaagatcttgttgtggctttgatctaattttgcagttttactgatccgcaaccgagctattcggcgtatagagaagctagttttggtcatgcagttttggagatttacaatagaactcacgcatactacacatggcataggaaccaagacaatgaacctgttgccgctgattcaattatgttgcataacagatatttctttccagtagaggaattagaatctggcaacactagggcctaaacttctttagtcgttggtttcatttagaactttatttttttttgttttctttttagattacgtattttgttttctgcttggatttttgctgttcttttatttatttacttttagactttaataaagtttgtgtttgatttttccaactctcaaaatatctcggatcagcttaaacaatttttgtgaagtactatcatactatcattaacacttttggattcagtaattaatttatgttcgatacataatctccagacattatatatctaatgggttatagccttataggcttttagcatagttgggcttgggcttttgacccaactaggatttagtgatctgcaccgtaagagcaaagcctttttttttttttttttttcgccataagagcaaagctatatacagtatcggagattaaaattttcttactattagttaaactgactcttaaagcaaaagctctagtgatctgcacacaacgcgttgttttagtttcaaatagggaaacatcacgctgttttgttcgaattcgttttgtcgccgtcggtaatg

SEQ ID NO: 3696 - DNA, 3000 bp, Unknown; identical to SEQ ID NO: 3680
  misc_feature (1)..( 3000): cDNA_ID_1821441_gDNA_ID_1620656_Annot_ID_47868 3000 nt of promoter + ATG

SEQ ID NO: 3697 - DNA, 3000 bp, Unknown
  misc_feature (1)..( 3000): cDNA_ID_1821437_gDNA_ID_1620656_Annot_ID_47869 3000 nt of promoter + ATG
tttagatctagcgttacacataggtcgatatagctagcacaagaatgaaaactaactttatttgtcttgggaacaagcgaaagatcgaaactccgacagacgtaatcttaattcgctgagaggcgtgtgagaattgcctttttccttgaatataaaatgcactcccataatgtaatcaaacaaaagatataaatagaataagaaaaataacaactcagcgtaacggagtccgattaacggagtgagaaatcatctggtttctcgagagttctaagccaatgataatcgaaggaaacgaacggtgttgtgtgtgtgtggttaagaaaagaacaaactcatacgagacacgtgcaccgaagctttttcccacgtgccaaagagtttcgtcttcgttcacacagaaccaagatgggtggtaacgaaggtaggaccctaaagcaccagcctacaacacatagatgaaatagtatatgcgtttacatggatttgatgaattgttgtgtttagtatataagtatattgtttagaattatcaaaaagtatactttataaaaagagtggtggtaacatatttagtttctgcaccaatataaaaagaaatatggtgatgtctaaagaaaaaagagagaaaacttagccaccaacaaaatattagaagaagatttcaccatgtgaatggaagggtaatgttttttttctttctttattttgaaatgaagggaaggaagttgttataaacaaattttcgaaaaggttaatgatttaaatctactataacctttttgatcctttagtttggaacaaaagaaagtttcagagttagcgatattttagtggaaactagttgttgattctccaactaaaattcaaccaccattagcataaaacatggttattttggcgaagtagtttactttgcaacatctatctgtattttactatataaaataatacttaacatatacaaataaatagaaattaacattagaaccaatagttatatagtttagctgtttaggtaaagcttagtaagagtggatgcaatcctttcccgttttctctccgcatttcacgccgtcgaagccttattagggtttaatacaaatccataatctctcgtttccttattattaaaacatcccatgtggacaccaggactaaaaatcttgacaatcagctttatttgatgactgaagtatcaaatttaaataaattaactagttaactagttatataatgagacttattttgaccacttaggtccactaatagacaaattaaattatcttatattggttattgtcccatcgtatgaaaatcaaggatggtgttttctaccagggaaatagttacatatatagtacatgatcaaacttgaataaactacacgataatgatcattatttgttgaaatcaaataactttaacaaacaaacaaaaaaactaaaatcaaataagaatattagtagcatagtactttcattataacctttatgaaattttagtaaatagtataagaatttctcaatatgcatcgattttgatttaataatgagtaaatgaaacgaatagaaacaacattttgatttgattaaacaaatagataaaaacaagactcataaattaaaatttggaagtttccgacaattagaaaagctgattgatatcgcatctgattgcaaatctgaccagaactcgaaaatattgaaaacatattttaggaataataaaagagatgatagcttaagtggaagttgaatgtcggaccgtacgtaccgggatagttctaatagacacttctcatttattctttttccttcaattatcccaactgttacacagttatattccataaatacccctagtcaaaatgtgaattcacgagtcaaacccataaatgcagactactgtcggtgtcggtgggtgaaactagcgtaaaatgatttagggtaaaactggaatttcactatatgcaacaaaagagcattcattcacatgtttatgtcttttgtgtgatttatatcttctttcttttgacagttacaaacttacagctaatcctttgattaaggaagcatctcttaattaatctcaagtgggctgataaatttgaactttcatcagatccaagaacccaaaattatatccaaccgatcttcaaagaaacttaccaaataaattgtaaaatagtagtatatgacatatccaccaaatctacaaagttcaaaggctactaaaaccaaattccaccgaagaagaccatataataactataggccaaacaaaactacaaaatcaatttctggaacaatgtgaatttaataagtatggtaaagtctgtacacatatctaaatgacaggtacactgtgattttggaagtggaagacacttgtacaatgtgaatccattttgacgactgtccacaagactcctcactaataaaccaaagtacttcacgtactctatctttttatatcagtttaaatgaccaaatcaaatttcaacatctactaatcactaactcaaacccataacaatattcagccataaacacataatatgttttaagttagtgactagactgacgcactaaatcaatcaaccaaacaaaaaaaagaaaacgaaactgaaataaaatatagcgtgattagctgctttaattcaatcaacgtgccacttttttcaccctaatatcataatcaactcttactttattttatttctttacatcttcccgtttttttatatttccgttatatgatataaaaacaataaataaaaatgcgtaaaaattggtgggaaagcgtcggtagctcacggccacgcagtgatgatgcgagtaagagacacttgtgaagtgcaataaaacccccttcttcttcctctctttctccttcgtcttcttcttcttcttcttccttccttctctctccttattaagaaagaccaacacagacacggaagaagtagcttggttcttctctttgtgaaggtgaatg

SEQ ID NO: 3698 - DNA, 183 bp, Unknown
  misc_feature (1)..( 183): cDNA_ID_3093431_gDNA_ID_1620656_Annot_ID_47871 3000 nt of promoter + ATG
ttcatcaaaggtttgatttgtatcccaatcaaattccctggcactagactctacaaatccttaaaggtaaaatatttccttataatacatgagcatatcaatatctgatttcattttgttagtgtgtaaatactagggtttaatacttcaatcatgcaggcgaaagagaggttaataaagatg

SEQ ID NO: 3699 - DNA, 3000 bp, Unknown
  misc_feature (1)..( 3000): cDNA_ID_1014414_gDNA_ID_1620658_Annot_ID_47897 3000 nt of promoter + ATG
taaagtagagataacatgaaagaaagggaaagctaaaactctccagtcagtgggaatcaacagacagtaattatatttgaactcacatagctgaatgttgaatatcaactcatcaaaccgaaaaggcaaataataataagtattgacagaatctaacggaggtataccgatcatgagatactcttaatagcgttgaaagtcaaatgtctcagagtctaatttggacgaccaaaaggatcgtaaagcaacaacactcaacgaccatcgaagctaacaaatagctagcttcttataaagataaaaaaaaaaactcaaactttccaataaaaatgtcaactttgagcacaatgcaattgcagagaattcgaaaggttatgaaacattgatcaagtcaatcaaagggaccatcttcagggcatagagttaaacaagaaaaccagaaattgaacctacctggtaaataaaggatgcgactttagtcaaacccaatacaaaaattgagagaagaaatggtggaagcttccatttcacagagcaatcaatttcagaaaataaagagagcagcagaagaagaagatgaagacccacgttggtgctgctaatctcagatacaaacaatgggttcttataaccagagaatctaaaaaagatttgaaaagaagcatcaaaaataataagaaaatgagacaagttggtcatgttaatggtcaaaggaggatcagtcctgggtatatactcttttgttctctcgcctgaattttcttcattatcagagtgacagaaggagagtgtgttctaaaagaaagaagttttctccaaccttaggccttgactattagtttaatcatagtttatctcttaattccctaattatttggtatttaactacattcctcaacgccattattatatcgagtttggccatagttgcacgcatgatctatgtcttcctcacgtctttttgtctcctcccctttatgcatagtggagtggtacaagactttggtagagttcacctacaacattggttcgcatttgaaccgtgatttggccggttcaatttaaacgccggtttacgagttttaacctctggctgattaagtaaccaattttggcaaaatccaaagacgaaggcaaaactctctggctgatcaagaggattcgattaggctctttgaccttgtcaacaaagaccttttagaataaaagcattcaaagtatctatagaagctaaaaacattaaaagttacttatggaaaacgaattggcatgtcattgttccttgatgattgatgataaaaggtggaaaaaactcgaattttaaacttgtcttgtctcgacgctaaaatcttcatcccctgtagtcattcatcatgaaatattcgatcaggacacattattttcaaatttcaattatctaatatctctataaacttaaaatctattattattttcttatgttgattctccttttttccgtacgaaatgtcttcccactttcaaattggttttggagttttcatgctcttgagtctagtattcgtattactattgtgtattctgaatgtaaacgactagtgttcaggtcaatatatcaatgattattttctccattctcgttttgtttgatgcaaaaactaaagaacaaattctgtcaaaaatataagaatatatatcaatattgtgttgcactacataatattctttttactatgaatggccatctttttttaagaaaaaaatggacgaaaaaggcagagtttgtccaatgaaaactggataaatgacattagtaaatagcaaatgacatataatttatttataacttattaataggaaatttgcaaatgggtattttcttacaatttgtttcttttgttgtgtgtgtggtcaagatcttcttttaatacatgatcgagtgtagaaactctaattatatggcgatgatgaaatttgatagtggaagaacttttaaatatgataatttacaatgttgaattagatacaaatatcttaatttattaatggctgaaatgacttgatttattaattacataaaggtttaaatgcaaaagtaacctttgtgtacacatttgttttgaatagtttacaaagttactctaaaataatctgctttgtaatatgaaaatatcattttttggtaaagaatgatattgaaaacatgtttgcaaaacaacagacttacctgtcagatacatacacacatcaacttaaacatagtttgaccacactaaaaatgcctatgttcgttgacattcacgaacaaaagaaaaactatttacccataaattccgtgaaatttttgtctaactatgataaaaatccattattttggattaaaattcaaataaaatccaattgaaaacgctaccgaaactcaaaatgaaaaagacctacaaatatgttttggtttatataaacccatacatatgttacacggaaaaaaagaaaactactattacgtactggttttagacttttaggtttttaaccacatccaaattatccaaattgaatatgaaattttatgatttgatctatgtacacctttagttataataaagcatagtctcttttttttttattatgtttttatttcgtttttggaaactcatatgctgacgtaccaaataaatttgggatatataatccagtattgaaacaattattattataacaacagtggagtagtattttaatgcatttaatggaaaaaaagaaaacagagtaaacggataagcgtgtcgtggagaagaaggaccaaagcaaagtaaagaaagtcatatattcctgaaaatctataaaagacatttcgcatttatccacttcctcgattcaatcaaaactgcttcaagtaaaaagcctacgaaatagcatcggaccaaaagacaaactcaccgagtaaacatacgcaacctgtcgtgtaagtaaaaacaatttgatagtgatctctctatgtttggtggaggaagagggcct

SEQ ID NO: 3700 - DNA, 3000 bp, Unknown
  misc_feature (1)..( 3000): cDNA_ID_1821626_gDNA_ID_1620658_Annot_ID_47898 3000 nt of promoter + ATG
agtcgagaaacgaaaccgaatataagtcttgtatgatatagtcatatagttaaccgtcgtcatatattaaagaagaaaatggcaaccaccggtcggagactccgtcctccatcgcccaataataaccggagccggactataagctcttcaatctctctcccagtgtccttaaacgcctcgttatcgtcttctacttcttcatcttcttcctcttcgccttccaattcaagcaaacgagtgatgataaccagatcacagtccacaacaagatcctccagacccatcggatcatccgactctaaatccggcgagaacataatcccggcgagaaacagcgcatcaagatctcaagagataaacaacggtagaagcagagagtcgtttgctcggtacttggagcaacgtacgcgtggtagtcctcgtagtaacgcttcatcgagaggggtaaagccgggagccagctcaccatcggcgtgggcgttgtctcctggaagactttcgactatgaagacgcctctgtccagctcagctccgacgacttcaatgtgcatgacgccgcctgagtcacccgtaagcaaggccaagataagaagcggtggcggtggagcggtggcaggagttttgaagtacttcatggcgcagaagaaagtatctccggtacaagaggaggattatcaccggtttaggatttttcaaaacagattacttcaatggaggtttgttaacgcaagaactgaagccactatggcaaaccttaagatcaacgttgaggtacaaaaactatatgaaaaatatttaaatttgtatcttataaatatctattaatttgtttctgtgaatggtttcaggatcagttgttttgggtttggcttaggatatacaaaatgaggaactacgttgtagaaaatttgattgaaattcaaaggctccgtcaagatatcaaagtacgtgaagttctcagcctccaaatgcctttacttaatgagtggtcaaaaatagacgcaaaaaactccgaagcgttgagcaagctaactcgaaaactccatgctttgtctgtccgattacccctcgtacatggtgccacggttagaatttctctctttgggaaaccaatttgtttataaacattttgtgtatttgtcaagaaagcagaaactaataatttggaagttacagatagatatggtgtcgatacatgaagaaatggtcatagctatagaagtcatggacgagatcgaagacgtcatcatcaagtttctcccacgagtaagtccactttatctatacagatcattttcctaactttttttgtatagatacatgtaaaagaaattaatttaagaatgtcttgggtgattaaatatcagcaggttgaaataatcctctatgagctgacagaattgatcggcatgttcaatcaagaattgttatattttgaagaaatggacgagagccttttatccattcctctcttcacggtaattcattatctcctaatttcattatatatatgtgaccggtccggtagttttatctataacttgaatggtttgttttttattggttcaatttggatgtggaagctccataggctaaaatggtgagataattttcttttaacaggcaaaggagagtagcttgagggtccatattctccaaaagactgaagaacagagataatgtttctctaataactcaaacgttaggacatgtaattaaaatgttaatcacattgcacattttgcaaactggattgttgttgatgccagaactcgctatctaattcaagacgcagtcttctacttctagatatatacgattgaagccatgtgttaatgtgtattacaaatttcgttatgcaatttctacatacaccttaatgaaaatatacttatacaaaaaattagacatgaaatctaaaaatgtctatccaatcacatatacacacgtagaagtgtttacttctcacaaagaatgtataaaaataataattgtaatttccaaagctataaatataaagattgacttaacttactaaaagcgctattaagtcatttggttatccagctattcagtactacagaggtctcgggttcgaagccatctttttcctaaatccccaattttttttttttccctcgtttccgaatcttttaccggcgagactctgccatggattcaggcgaacaaaagtctaaggtaaacctctactgattctatcttcttgttctccttcctaatttcatctcaaatctcgaaaaatttgccgcgaaaattgcgtttcactgaccttactccgttccatttctcgtcagcggaggttccaaccaaatcctccgaggccttctcgccgtcttccgatcgctccaacctcaaacacgtaattcgttcttcctcgatcatttcttgtttatgcttgtagaaatctttaactgcttatacatgtaaaagctttaaattttctctaaacacagcgaagctgaggaggatgaagagaatataaaagcatctcgccaatttgacagacgtatcgtcggcgtatgtagagaagcttctcagttctcaaatcttgctctctagtttctttccttatttaattttgtcgaaaattcgttaacagtttaatcgtaacttccctaatttcacttaaaataatcaaaatcttatacattagattatgatatatgcgaaataccaaaacggtgtgctttcttcatcgtagctaacaaggaattttctttttggttctgacctttactagttttgaatctgcctcatctcctttgctagcttttgttgatcgcatcaatttaactgccttgttaagtgactatgaaatgagttggtccaggacccctaacatgttcattgtagcttatactggcttagttcttatctctattacttaatccaaatgctcaatgttgaaaactaaacttttttgtgttgttgttattgctgactggccagaggagacccaaaaccgaaacgaaaggtatg

SEQ ID NO: 3701 - DNA, 3000 bp, Unknown
  misc_feature (1)..( 3000): cDNA_ID_1808441_gDNA_ID_1620658_Annot_ID_47900 3000 nt of promoter + ATG
ttattatttttatacattctttgtgagaagtaaacacttctacgtgtgtatatgtgattggatagacatttttagatttcatgtctaattttttgtataagtatattttcattaaggtgtatgtagaaattgcataacgaaatttgtaatacacattaacacatggcttcaatcgtatatatctagaagtagaagactgcgtcttgaattagatagcgagttctggcatcaacaacaatccagtttgcaaaatgtgcaatgtgattaacattttaattacatgtcctaacgtttgagttattagagaaacattatctctgttcttcagtcttttggagaatatggaccctcaagctactctcctttgcctgttaaaagaaaattatctcaccattttagcctatggagcttccacatccaaattgaaccaataaaaaacaaaccattcaagttatagataaaactaccggaccggtcacatatatataatgaaattaggagataatgaattaccgtgaagagaggaatggataaaaggctctcgtccatttcttcaaaatataacaattcttgattgaacatgccgatcaattctgtcagctcatagaggattatttcaacctgctgatatttaatcacccaagacattcttaaattaatttcttttacatgtatctatacaaaaaaagttaggaaaatgatctgtatagataaagtggacttactcgtgggagaaacttgatgatgacgtcttcgatctcgtccatgacttctatagctatgaccatttcttcatgtatcgacaccatatctatctgtaacttccaaattattagtttctgctttcttgacaaatacacaaaatgtttataaacaaattggtttcccaaagagagaaattctaaccgtggcaccatgtacgaggggtaatcggacagacaaagcatggagttttcgagttagcttgctcaacgcttcggagttttttgcgtctatttttgaccactcattaagtaaaggcatttggaggctgagaacttcacgtactttgatatcttgacggagcctttgaatttcaatcaaattttctacaacgtagttcctcattttgtatatcctaagccaaacccaaaacaactgatcctgaaaccattcacagaaacaaattaatagatatttataagatacaaatttaaatatttttcatatagtttttgtacctcaacgttgatcttaaggtttgccatagtggcttcagttcttgcgttaacaaacctccattgaagtaatctgttttgaaaaatcctaaaccggtgataatcctcctcttgtaccggagatactttcttctgcgccatgaagtacttcaaaactcctgccaccgctccaccgccaccgcttcttatcttggccttgcttacgggtgactcaggcggcgtcatgcacattgaagtcgtcggagctgagctggacagaggcgtcttcatagtcgaaagtcttccaggagacaacgcccacgccgatggtgagctggctcccggctttacccctctcgatgaagcgttactacgaggactaccacgcgtacgttgctccaagtaccgagcaaacgactctctgcttctaccgttgtttatctcttgagatcttgatgcgctgtttctcgccgggattatgttctcgccggatttagagtcggatgatccgatgggtctggaggatcttgttgtggactgtgatctggttatcatcactcgtttgcttgaattggaaggcgaagaggaagaagatgaagaagtagaagacgataacgaggcgtttaaggacactgggagagagattgaagagcttatagtccggctccggttattattgggcgatggaggacggagtctccgaccggtggttgccattttcttctttaatatatgacgacggttaactatatgactatatcatacaagacttatattcggtttcgtttctcgactcacttgcccctgtccttaagactcttatagtaaagctggaattatatggttcaaggaatcgtctagtctatatacactggtttgaacaattgtgatatataatatagttaggggtatattatatttaatctgttagataacggttggggtacttgaagatctgtaggagttgacagcacgtagaggcagaggtaagaacacttctgcatgtagtgtgtctacataataaaatatagagtgtattttttacacacaccaaaaagagagattataattaatgtattatgtcaaagcatatatgaaggtcagcttagctagagacacgtcttttgtttatctctcgactaaacaacatggcgttttaataaaatcaaaacttaaaaggtccaattcagaacggccccatagtatatagtctacgttgaataaataaacctcaagatagcgtcaaactctttagtctttacccaaaaatatttttttttaaataacgtcaaaactctaagtcttgacctcaacaccaatatatatttgccttctccaatatctgatttttttaattgtttatccgagtcttcttggtcttttcgaatgtttgcccgaaccagaccttcccacgttcggtggttggtggccgcctcggcctttggttgatttctgtccacattttggtccttttcattcatgtaccatgttctagggtcatttgacttgttgaccataaatctactaaaacaggcctaataccgatgggccgtagcccgttaataaacaagacaatttatatttgtttcacttagcttgggagccacggatctctagaaacatccagagaaatatcaatctccccacttctccagaacattcactcactgacaatatcccaccttcaacacttaactcctgtatatagtcctcccctgtctccagtttcgtcgcacacagttctcagataaatactaaactcactgttaaaactttctcaacaaagcttcctgtttctctacaa

SEQ ID NO: 3702 - DNA, 3000 bp, Unknown
  misc_feature (1)..( 3000): cDNA_ID_1821611_gDNA_ID_1620658_Annot_ID_47903 3000 nt of promoter + ATG
gtctatgcggttgggatgtttgtggcaggtcacttgggcgatcgtttggatctcaggacgtttctgaccatcggtatgatcgggaccggccttttcacagctctcttcggggtcgcattctgggcgaatttccacagcttctactatttcttggcggttcaggttatggcggggttgtttcagtcgataggttggccttgtatcgtggctgtgctcgggaattggttcgacaagaagagaagaggaatgattatgggtgtttggagcgctcacacttccctcggtaacattgcagggtctctgatcgcgtctgggctgcttagatatgggtggggttggtcatttcttggcccggcttttctcatgacttttcttgggatcgttgtttaccttttcttgccggtgaatcctccaaccgttgaggcagagagagatggaactgaaattgactctaccatgaggctcggtgacaccattacagagagcttattggaatctagaatgagtactggattcgatagaaaggcagtcgggttcatggccgcttggaaaatccccggtgttgctcctttcgccttctgcctcttcttcacaaagttggtctcatacactttcctctactggcttcctttctacgtcagccacaacagtaatgtttctcatcatctctccttccttttacctctagtgttgtagcctgactatatatgcattgtctgaattatatgtgatgcagtgatcggaggagagtacctgtcagaggagacatcaggaaacttgtcgacaatcttcgatgttggaggcgttgttggtggagtcttagccggatacatatctgatcaactcaacggcagagccatcacagcagcaggattcatgtacttggccatcccagctcttttcctctacagagtctttggacacatctcattgaccatcaatgtcatcctcatgttcacatcaggagtcttcatcattggaccatttgctctcatcacaacagctgtctcagctgatctcggaacccacaaatctctcaaaggcaatgcaagggctttggctacagtctcagctatcatagacggcacaggatccgtcggtgctgcgattggaccagtcctcactggttacatctctgccataagctgggacgcagtgttttacatgttgatgactgcagcattgatctctggattgttgctcactaaactaatcatagcagaagtcaaagcgttattgtttggatcagaagatgaagtagctgcatcatcatcatcaccaccagcatccagacctcccattgatgtcctcgtttgagttttttccttcattatttatcagtttctttgacaatttcacactttttttatccttttaaagttcgttcctttttccccagttgtcttcatttcttaagtttgaatgagaataagattacctaatttggttgtcgaatgatatttaaaccaatcaaaacagctgaaaattgcagcaatcggaataaagaatcatcatttggttctatatgatcatcaaatttcactgaatttacacataaaccttaagaagtagcaaaattcatttttaaaaaaggtacaagagacggtgaattcaccggagaagctgctaagtggaatctgtcaaacgtcgtctctgcttttgggcttgcgatatttctcctcaacttgcttggccattgaaacggcgcagtgaccgagctttttgatgttagggacgttgtaggtctgagcgatgtagatcccgcacactgttcccatgatgaaagagaagctgctccttattatccccatcttcttctccgtagatcggatttttttttttgggtttattgaattggagatattttgatcggagagattgacggaattaaaagcgaaatccgccaagatcatgagaattctggaaattaaaagtcgaagaattgaagatccattactgggcctgtaaggcccaaatatattaaaaatttacatgggctttttgcgttaaatccatatgaatttagcttttgtttgtttttatatgggaaaattcaaactagtcaccaacttaagaaatctttaatgagttaaaggtgtttttggttaaaggggtcatattcaaatttgttggtgtgtcaaaatcaaactattgctcttaaagaaaaaaaatgtttactgagatgtatataacattttgttgttgttaaaaatggttagaaaatattataactagagtttttggtttcaccaaaaccatatataacaaatgaattaaataaattttttgatgttatatagattttttcagtaggcatacatatgttgaaaataaactcaacaaaaaaaacatgtgttgaccgtatcagtttattttctaattaataagaaaagtattctattgttttccaggaaggaagaagatatcgaattttgctctttctacttttcgattctctctcgatcgagaggagaaaaagacagagaggcacggtgacacgctgctttcacagaatttccccaaccgacagacaagcttcgcggattcaggtttttctatgattcgatccatttcttaagaactctgcattttattccttgtaaaatcttcctcctagctcctttcttcaattttcgatttttgatttatattgtttcaattttggatcatatctttttatttcttgtgaatcgggtctttgtacttggtacctctatgtagcatttttggcttctgtacaaatctgatttcacctgtatgcatacgactcaatctaaaagaacccaagttttggattttcctctgctttggagctcaattttctttacattctgaaaaaaaaatcatctttttatggaaatgttcaatttttgtagttgtttgtatcgtccgagtcttaatacttatgagagatcatgtctttgcagatggcgtcatgctaatatgactaaatgagattctggggattaagtttaagtgggaaggctgtaatagttccta

SEQ ID NO: 3703 - DNA, 3000 bp, Unknown
  misc_feature (1)..( 3000): cDNA_ID_1821607_gDNA_ID_1620658_Annot_ID_47904 3000 nt of promoter + ATG
cgttggtagaactgaaaatgaggtgaaccctcgcacagtggaagtctcaagtgatgagcagttagcccgtcagcttgaaagacaaaacaatcctgtacatgcactagccactggattatttcctgctgaggtgccagattctgtcgaaaatgatacttcgaggttcagttcattcttcgttcttgattttcttattaactacaccaaagtaacaatttatttagaacttcatgattcttttcctgcgactcccttgatcttggtactgagatactaaatttgcactgccttaaagtaacgttattttaaaatgttttgaatagcaagttatatttggtttctgacgaccactatttgtgcatatttcttggatttattttactggattgtataagttctcatccctttctttcacaaaataggaatttaggattggatccaagttggctgcagacatggtcaagtcagggttctgatgtcgctggtccttctaccacttccaggacagttggacttgggcgggttcagatgatgatgaggcatcttgcatctgttggcgaaagctatgctcaaactgcacttgacgatgctgcttggagtctatggccgatgaacccttcacaagcatccacttcttctacaactgtacctcctggtaatggtggaaggacaggtggtctgcatctgagaactgtatcaaacacgacaaatgaaagcttaacaaatatactagctatggccgagacagtgagggaagtcatgccacacgtgcccgatgaaattattttccaggtaaattttaagtgcatattggattatctgtaagctttgatgggatgtgcatacatggttgagttgagttggtggctcatttagattgtcttctgcattgactggaaggaactattttttgcatatattcatacctgaagccgaattttatcagtttatgtatgtggtcaatttgcctgaactggtctctatattcactagactggtccttaagctatggatagttcagttttaagattcacgtgacttgatacttgaacctgttatgtttcaatttcttgcaggacctgcagagaacaaactctgttgctgttaccgtgaacaatcttctccagatgtgatgatagtttgtgtaaaatatactaagcacttccatttcaaccttaggtatagattaatgattggggacatatccttatccgtaagttttacacaccacccaacattccaagcttcacccgctgtagatataaggcactgtgtatcactttttgctatagagaagaagaggctctagtgtatagcttctgttcattgctctcttgcgaaaataagttcggatatttacataaggtgatgatgccctggtggtctggagatatcttgttgcagtctgaccttggctccaatctcgagggagagtaaccactctttgcagctgctcttttggctgctgccacctctcctgtataagaatgtgtaatttacaataaagaaaaaagaagtaaatgaaagagtctactgttattgatccaatagcctgtaatgtagtatcatcaaatgtgtgaactcaatttttttttcttctgaagaattatcttcctacattaactctatacccgttttgacgaacggataaacagtgaagagacaaattaacatataaaatataatttgtcataaccatttcgagtagatataatcaatagaaaagtatcatgttggtacttttaacgcaacttcaagccgaaaaagattgtgaagagattgtttctttcgaaggaagcaactttgattttgtccatgccgtgtgtaaattagcaatagcagaagagaaccacttaaacttattttaatacgcttctagatagctctacttggttcgataaatttttatgcacgttaagtaagtttaatctgtttctaataactaaaatatatgatgtagttggcataaaaaaaaccataaaatctattcccaacaaatgaggaatattcacatctaagatattctttttaaaaccaaaggaacaagattaacatgagaccttagacaaagggaatggccatgaaccattccataattccatttagagatagcaagtggcagatatatatgtgtaattcgaaaatatataagtatatttgatccattctagtcttcattaaaagatacacaatattatcatttatcaattaagtggagggactgactctacatcaaagatagaaatagggtaatttagttaagcaagactcaagtatcaggaagtgagatcactactttgcaacaatctcttgatagccatctgaaatcttcttcagatgctaatctcaactcatggaaacatccatggcacggtgtattgacataatgtagcaagttacaaacttacaatgcaacatatggggaaaatctgaggaaaaacataagaaacgatgaacaacataaacttaactaataagaataatgtggtattatatattatgaaaaaattcaataatctgtttttaatgtaagttaaatcccgaccaagaaatgataaaaaagatatttgttcccacattcttctggtacatgtttccaggtcttctcctcaatctttgcattttaacgctcttcctttaatacatttttttttacactgtattaattatgagataaaccccaaaaaaagtacattggtacacaagcataaatacaaaaatatgcatgcttttttcagaactgtttaaaggtaaagcctttttctgcaaattttcttttcgtgtatgaccaaaaaaaaaaaaaaaaaaaactttattctaaaaaataatagaaaagtagtgtgtcttcatattgcagtgtcttgtaagaagaaattcaaaaacccacactgacactttaacacattgcttcgtcttctctaccgtttcgatttcactcttaattatgtcaaatccgtaagcttttgtgatcatcaacaccaaaaaaaaaaacctaacttt

SEQ ID NO: 3704 - DNA, 3000 bp, Unknown
  misc_feature (1)..( 3000): cDNA_ID_1821595_gDNA_ID_1620658_Annot_ID_47908 3000 nt of promoter + ATG
tgttgatggaagtttagggaagaaggttgataactctgtttttgtcacaagtaaaagagatactgttggaggtggaaatgaggttgtactgaatgctctagcaggatacttgaggtacttggagggtacaagtcgagatgactggcaagagtacgtggttattcttaattctggcgttattgtgcttcccagatgcttccatatgaaagtggttattatggaatgaatctggtatattttatatcttgttgaagagtgatgggcgttggttttgatgttgaccagggtccatgcgagacttcgtgatgccgagactaggcccggagcttcatttttcaaactttttggacctgtcctctgtcttggtatcgtatccagaagaagtgtccactatgaagcaatcgagtatgaaaaagaaaggaatgctggatttatttctccttttggatattcagctgccacagtgtctgctgcaactgatgctgtatgctctatggaggtacaataactcatagacatgatatatctatgctcctactttcttttcgaaaatatttgaagatgttggatttgttttggcagtggtattatctcctggctctaagtagagagaggattgatgaaaaaaggcacgctataaggatttggagatggaagggatatcttattcaggtttctgttattactcatatttctccaagtccaatggcctacattggccatttttgtaatcccactgcttgatctttttatatttgctatggaattttaatagaagtcacttccttgtttcagtacacagtggttggtaatgaagggcctgccgttcttcttgtgcatggctttggtgcttttctagagcattaccgcgataatgtagacaacatcgtaaatagcaaaaatcgagtatggaccatcacagtcttgggttttggaaaatcagagaagccaaatatcatttacaccgagcttttgtgggctgaattactgcgggatttcatggctgaagtagttggggaaccagcacattgcgtagggaattcaatcggtggtatgcaccctaagttattgagatgtaatatatgcgttaaaatggcacaaatgattaagatactcctctaattgtatatatattttttcctctatcagggtatttcgttgcattaatggcctttctttggccggcgttggttaagtccgttgtccttgttaacagtgccggcaatgtggtacctggatactctcctctcccaatctctagagtatgtttcatgggaatgcatgaatatctgaattttcacttttcaaaaaaaaaaaaagaatagtgtgggctcaggaattaagttattctaattatcacatcctactgtctttctttttttaggaaaggcgagttccatttggtgcacaatttggttctcgacttcttctctttttcctacaactcaatgtcaaaaagctattaaaggattgttatccagttgtaagtaataggaagatttcaacatcagtatgagaaagtgtaaatgctcatcattgtgtcggatttctaacccaactgcttgtttatgatgcagaaacctgagagagctgatgactttcttgtcactgaaatgctaagagcagtatcctttttttgcattaactgattcatgatctacaagtaaaatattgaagatagtgagattaccttaatacacataatagtctcgagaccctggtgtggttatggtcctggaaagtatctttggctttgatctttcgcttcctttgaattacctactcaaagggtttgaggaaaaaactctagtaatacaggtatcaaaatttcaaacattgtttgcatcctcattctaacttctattaggagattacacaggatcaatattcatcggtttcattcatgtattagggaatggaagatcccatatcggatccgcagaagaaagtagccttactgaaggagctttgtccagcgatggtgataaagaaagttaaagcaggtaaaacataaaactaactgctaaagctctatacacctccgatccactagtctatataccattcttcttgactctggtctcatttgcaagtaaaggtcactgtccccacgatgaaatctcagaagaggtaaatccgattatctgcgaatggatagtgaaggtcactaatgatgatcgagaactaaaagcctcatcatcccagcaactttaccacagtaataaacaaaactaaggatttggtcatcagaaagcagtttttgaaatggtatagtttggttgtgtcaacaagacatcgtcatagatgtcatcaatccaaattgaagaaacatgaccatgttataactcatttaaaaggaaccgtcatttttctttctgactagtatatatattgtttatttatcttttgaagatatgtacaagttttcgtaagcctgaatccgtaatgtcactatttaattatttggacgttatgtcacattttacgtatgtagctttttagcttgtgcccagtgttgtcccctccgaaatttgctcatctctgccccatgtggtagtgcactgcgtttaagcaacatccagaatttcagattatggaagtagggacaagaagctgtggtggaacacgtgctgttttaggaggctaaaaacgacacagcgttcgcgtctttaaatggtaaactttcacgttcgcttttacttgtgtcattttcagttttttgacctattgctaataaatattctcgcaggtcgctttgtgaaatataaacacaaatcccaccaaaacggtgtcgcgagaacgttgaagaaattaatttggcgcactgcttcatcattattttattcttcgtgatctgtttttttccgacgatatttcttgctcgattctgaaaaatctaaaaatccaaaatcgaaacctgaaataaaggaaatcgcagacaagtggaggtagaagacgacgaagaagatgtggagacgcgtggctttactttctccgatg

SEQ ID NO: 3705 - DNA, 3000 bp, Unknown
  misc_feature (1)..( 3000): cDNA_ID_1821583_gDNA_ID_1620658_Annot_ID_163719 3000 nt of promoter + ATG
gagattgaggtataacttaagtttgctcaaaatgttcatggtaagcgatgacaaaaagctttctctatccggcagaataatctgcagatctctagcagacctcgagtttcttggaagtaaaaatctccgtcaagaatgcagcagagaatccaaagcgtgaaactgtaccttctaagaatttggatcttccaaatgcccaaaagtctcattccaatggcttacagcttcttcctgtgttcgcataatccagatatgtttttccgcagcagctttctcttgctcttccagaattctctgcaattgtcaaagcttaaattttcttggacaaaacagacacattcatacacaaacagtagaaactgcaccaatgttatgtgcataaaggacatggtgcagaaggacattgtcccatgttcagaaacaaaatgtatgctaaacataaaagctgcaccaggtaacaccgaattcgaattataattggaaaaagtgtgattcacataactccaaatcatggttatatgagattaagctagtctatgtgatatccaatagatgatgctaaaagacaaaagtaatgaagaatgaatcatttgtaagaacaaagaagctacaaacctcggcttcagaagctctttttgtcttcaaggaaagacaatcaaagaggtcagagaacttcttagtacaatcatcaagttttccaacccggtaatactgctgcatttgataaaatggtgctgcaaaaagagattgtctgagttaaatctatgaaaatcatgtcaaaggaatcaaaaaggtcaatgaagccaagagaacattatagatgaagtgaatgcacataaatcttaaaaattcatttacaaagtgatacaacttgctaaatagtgtctaagaactatgtcattttatacccaaatcgtttcctgtgtcatcgccattgctggttatgttggaccatctagacatcccttcatcaaaacatacattgaggaaatggtttcagagatcctttaattggtgtaaagctaatccatttctaaactctcaccaaggctttttattagtctataacaagctcgttaacaattccaaaaggcaaatgacaaagcaaagattggtatatgactgattgatcaaatctcaatcaagttcaaattttgtgagctcaggatatataattttgcagtttagagatggtgagaggagatggaatagaagatgtagaatcagagaatgcgatcagatgaggagaaacgaagacttacaatagcagaaccagagagcgtcgaagcatttagtgcaggacacgcgccgtcgcacagatgaagagtcttcgttctccgagctcatcgtgtctgcttagtgccggaagaagaaacgggtcaggtgttgttgtattcgggtttagatttagggtttttgccaccaatcatgtttattttttcctttctctctttttttttttttcctttaacaccaaaataaaataaaataaatacatcaactataaaatcaaaataactcaaacaaagaaatatattcaaaggataatttttaacaaaaatataatttaaaagactttaattggtaagattgcataatagcataataacataatgatataagttgcataataaaaattcgtaaaatgaaaacttgcagaatgaaaaatcgtagaataaaattatttttaaaatatgttggttgattttatttggaagagaatattatacgagtttcatttcattttgcatatcaatttatttatttttacgattgtacaatttttatatgttaggacttttgacatctcatatatgtatgtaacatacatataaaatacaaaagtacttgtctactacagaaaatcaaagaataattttttggcagatacatgcgaatacaatttagatttcaagaacaaaactcttactagcaaaggattcttgacaaaatgtgatagctagtcccatggaacaacaatggaggatagaccggtttatatcatcaaaatcttatcataagtcaaacgtgtgagatgatgattcatggacaagtgaaaatgaactctgacacgtaaaagaaccagagtttgtgaaagtttgggaggaatatttcttcaaagggtacttcatctttagtcgtcaaccagattaccacactaaagtgatatattatgtctctatttttaataatgttaatattgtagacaacgaaaaaaaagaagcaaattggcatggctcaaacgttacgttagctccttctttacagcttttttttttcctattttaatatccccaaaaagatttacttactaatacagaaaaacattagttgaccaacaaaataagtacatatttatcccaattgtttggttcgtaaccaaattacaaaaactaatttcacctaacgctataatatcaaccaaaccggaacaaattttctcccttaaccaagtaattaattattcgaattaagtcaaaatttttcattttattttattcaaacctacagttacattttttcctttatttctctctctttctttttctacataacaaaaattataatatcccatctgttttattccatagttttatttttgttttctctttccatttcttgccaaaaccctaatttcaccttcacttaagaaatttctcccccaacttaaaccacccccttagaaaaaataaacaaaaaaaattagatctttcttgtttgcttataatatgtatgttttaggtcgaattttctgaaattaagattcattcctccatggaagaagctctgtttttattctctttagcttagcttagcttctactgatctgtttttgctacaaaatcccatctttttctttaaaactctttatctctgaatcttgagtttcttgtagaagaagaagcaattttgaatctttcgtaatcataaagattcgtggaggatctctactgatttgtcggaatctctcactacagaatcacttgatcttatgtccgg

SEQ ID NO: 3706 - DNA, 3000 bp, Unknown
  misc_feature (1)..( 3000): cDNA_ID_1821587_gDNA_ID_1620658_Annot_ID_163717 3000 nt of promoter + ATG
gcaaatagccaacatctctctctctctctctttcactttttctcatctgtttttttgatagatcaagaaacctgactataatatgagtgataacagaaacctgaagaagagtgcccttccatctccaaatccctatagagggccttttattcataagtcctctctctatttagagccacgagagagattaccactgccaaaacaaatcaaacagcttcacatattttgagatatcatgtcaacggattagtagcttccatgaactggaagcagtgagactagagaagactcgttcaagtgttgtggtccgcagagaaacaccaacgacgtcgtacttcacttattgctccagtctttgagcaaaacgctaaaaccttttggtacaaaaggacttaccaattattatttttcatttcttagatccgactagtaaaagagaggaattcaaagcaaaagttgagaagaaaagaaaacaactcttagaggagaaattgtcaaacaaaattttttagtgagaaagttctcctatatatgtcgacagaggaattgggcaaatacattttagtgagaaagtttctccaatgagtcgacagaggaattgggcaaatacattctaatggctgtgggtattagagtaacttttttctggaaagtttaatattatttccagtcatcgaatcattgatgtaagcaactaagcattagagatgaatagtatacgagttgttctcattttcacgttttcagaacgtgattccgccaggagcggacccatatgggggagttgccactgtcaaatattttgaaactagtgttattttataaaagatttttattgtgcccctattaaatacactatttattgtccccattattttttatttttttacagccaccttttaatacaaaattggcgcaagttttgacttttgtattatattgtattaaaatttaaaaatttattttattatataaagtttcgttgaaaaagttactatgataccgacatatatcaagtcaactgatcagattttgatacgtataaaacaaatagtacaataaattataaatcctaaagtaaaaggattgcaatttttaaaggtatataaaaataaaataatattttataattgctaattctgaaaagaaaaaactacaattattattctttgaaaatatatattgaatagaaattatatatacaaaaaaataaaatcatataatcttattatataacaattgatgtttcaaagttattaaatgatttctatatgtgttgcttaattgatgagattttgatttgtaagaacatttctcccaattatattttgacacatgctattatgctaatataaaaataaaactcacatatctttaacataaaataaaataatataaatatatattaaagtatataacttaaaaggatatatttcaattaaaataatatttataaaaataaaaaaacttacgaaaaagggaaagtgtaaaaaagcttacaattacaaaaaaatatattaaaatgaaattatacggaacaaaaaaataagtaatatatcttataatataatgtttgatgtttcaagcttagtaattaatgattgtgtcatttttatttataactatgtgataggagtatgtaaactttttcttttttaggtaggagtatgtaagatcaatataagtttatttttatttttatctcagctttgaattatctaagcatcatatatcattgtgcttaaaaaaaaaaaaattaatgatgtcaaattatttttcttttaatttcgcaacatttattggtatgtaaacattcatcgtaattgagtagcttttctttattttagttttcttaaaaacatcattaattattgttgtgtgatatatttttcaattgattttttatgtcggaaattttaatgatttaaaaaactatacaagattgaaagtaagagatatattgttggacgtaaaaatagaagacgtgttgttggtttaatgtgtatataaacattttataagtagtggcaaagaacatatttcaacagtaaaatatgattgagatgtaaaagcactagtggtaaatgatataagaggacagttggatctgtggtttgcatgtaatacattttctaaaagaatttgtagaataatatacagtaaaacctctataaattaataatgttgggaccgcaaaattctattaatttatcgataaattaataaatattaatttatagagagatttttctaatttggtaagttttttaaaatttttttatgaaaatataaacttccattcattatttgaaatatctttctagaactaattacaaataaaaataattatcatgttttgaaaacaacacgaacagtttttaatatagtaaaaattattaaaattaaattaaaaataactaatgtgagtttaagcaaaaagaaacaactaaaattatatttcattaaagttgttatatataattataatatatatatatatatagttgatatttttatataattattaatttatgatattaataagaccatatgtttctataggattttcaaaaaaattattaatcttattaatttatcgagttgtgtcactttttacactggtcccaactcgagaccggaagaatttattaatttatagaggttattaatttatcgaatattaatttatagaggtttaactgtataaggggaggccggaaaattacgttttttgagatacggtaataatagtaaacaaaattttggcaaaagttgtggtgatcgataattttaaccttactatatattattataataaaatgttccaactagatataaaatatagaaacgtaaattagtatagtaaaacaaaaacgaattaataaaatactaactcttgtttctagactttgtcatccatcaaaagctctataaaaccaataatcttcattggatgtaaaattatctatttacatttttctctttcaagaagaagcagcc

SEQ ID NO: 3707 - DNA, 3000 bp, Unknown
  misc_feature (1)..( 3000): cDNA_ID_2155902_gDNA_ID_1620658_Annot_ID_163715 3000 nt of promoter + ATG
ttgttatataataagattatatgattttatttttttgtatatataatttctattcaatatatattttcaaagaataataattgtagttttttcttttcagaattagcaattataaaatattattttatttttatatacctttaaaaattgcaatccttttactttaggatttataatttattgtactatttgttttatacgtatcaaaatctgatcagttgacttgatatatgtcggtatcatagtaactttttcaacgaaactttatataataaaataaatttttaaattttaatacaatataatacaaaagtcaaaacttgcgccaattttgtattaaaaggtggctgtaaaaaaataaaaaataatggggacaataaatagtgtatttaataggggcacaataaaaatcttttataaaataacactagtttcaaaatatttgacagtggcaactcccccatatgggtccgctcctggcggaatcacgttctgaaaacgtgaaaatgagaacaactcgtatactattcatctctaatgcttagttgcttacatcaatgattcgatgactggaaataatattaaactttccagaaaaaagttactctaatacccacagccattagaatgtatttgcccaattcctctgtcgactcattggagaaactttctcactaaaatgtatttgcccaattcctctgtcgacatatataggagaactttctcactaaaaaattttgtttgacaatttctcctctaagagttgttttcttttcttctcaacttttgctttgaattcctctcttttactagtcggatctaagaaatgaaaaataataattggtaagtccttttgtaccaaaaggttttagcgttttgctcaaagactggagcaataagtgaagtacgacgtcgttggtgtttctctgcggaccacaacacttgaacgagtcttctctagtctcactgcttccagttcatggaagctactaatccgttgacatgatatctcaaaatatgtgaagctgtttgatttgttttggcagtggtaatctctctcgtggctctaaatagagagaggacttatgaataaaaggccctctatagggatttggagatggaagggcactcttcttcaggtttctgttatcactcatattatagtcaggtttcttgatctatcaaaaaaacagatgagaaaaagtgaaagagagagagagagagatgttggctatttgcaaaagcatgaaacagaggagaaacagagtatatacactacaataggaagggtcagaaaatgtgattggtttcttggggcacaagccaatatttttatgaattgtttccttttagagtctcataacatcaaggtaagcttttccatcgagctcacgggaaaacaagccattgaaatactcttcagtagtcacgcttttgaaaaatgcagccttgtgcctttccacgagacttctcataggaccaatttctttacccaatcctatattgtggaatgccgccaccgaaagtctctctttctctgagttcacaactccacgatgctctatacttcggtatgtcccattcgttattatctacattaattaccattcatcagagccatttacaaatgataccaagaatagactctctcgtccttataacttacctctaagatgtctccgacattgacaaccaaagcatttgggagaggtttgacagaaacccacttggcatttttcttgatttggagaccttcaacttcattagcctgcaacagtatggtgagtcctgtagaatcagaatgcggagttagaccaataaccttatcgggctctggacaacgcgggtagtaattcagcctaattctctgccctaactcatcatcaaacaacttatccatttcctcgggtttgatcttcagagctaccgctattttcccaagtaagatcttagcaatgcttttcacttcagccgaatacatgtctagtgtatctctgaagaaacataaaccaagttttaaacagagaaaatttgtgtatttattaagaatgattttatacatttgaggcaaacctaaagggcagaggtaacttggggaacaagtgaggcttgcgtaatcgaacaggttgcattgtaaggaagaacatatctgcccaatcgagtttctgctcttctgaaaccacaaatacttgtccaaacccttcgatctcatcgggttgttgccacaaattcttcttctcttccatgggaaggttgaagaagtcttgaacctctgactttactttgttcaagaaacttgactccattccatggtttacaagctgttgaatattcataaacacatgccacaaggataaatttgaattccatatgaatttgctaacacaaaagaagatggggtagttttgtaaagagttgagtattttcagggcagtttggttaaataagaaaatagtgtagctttagttgagacttgcctgaaaaaatccccactctttgcaagcagagtcaagcttgtcaatctcagaatccatggaggttgaagaacacagaagactcatgtctatgattgggatctggtttcttagaccagaatcaacggctatctcagctacgtcttgatcagaccgtacatacctcggaggaaccgtcgtgatcatcttctccttcaccatctcttgaacagaaggaactatgatagagctccgggttgctcctttgacttccatggccgcttcttcttaagaaataatcagaatgtaaatagatagtctcaaatctaatgaagacagtcacagttgaacacaaaaaacgaaagaaagaaaaaagtgaagtacgacgtcgttttgaatgttaggtgtttctctgtgggactgagtattgaccacacacttggaaagagtcttctccaccacaatccctctctctctctctgcttcgacttcatggatactactagtactaacccactgattctggttttcttccaccgtcctcatg

SEQ ID NO: 3708 - DNA, 3000 bp, Unknown; identical to SEQ ID NO: 3704
  misc_feature (1)..( 3000): cDNA_ID_3071649_gDNA_ID_1620658_Annot_ID_163714 3000 nt of promoter + ATG

SEQ ID NO: 3709 - DNA, 3000 bp, Unknown; identical to SEQ ID NO: 3702
  misc_feature (1)..( 3000): cDNA_ID_3071661_gDNA_ID_1620658_Annot_ID_163709 3000 nt of promoter + ATG

SEQ ID NO: 3710 - DNA, 3000 bp, Unknown; identical to SEQ ID NO: 3701
  misc_feature (1)..( 3000): cDNA_ID_1808441_gDNA_ID_1620658_Annot_ID_163705 3000 nt of promoter + ATG

SEQ ID NO: 3711 - DNA, 3000 bp, Unknown
  misc_feature (1)..( 3000): cDNA_ID_3071668_gDNA_ID_1620658_Annot_ID_163703 3000 nt of promoter + ATG
tttctagagatccgtggctcccaagctaagtgaaacaaatataaattgtcttgtttattaacgggctacggcccatcggtattaggcctgttttagtagatttatggtcaacaagtcaaatgaccctagaacatggtacatgaatgaaaaggaccaaaatgtggacagaaatcaaccaaaggccgaggcggccaccaaccaccgaacgtgggaaggtctggttcgggcaaacattcgaaaagaccaagaagactcggataaacaattaaaaaaatcagatattggagaaggcaaatatatattggtgttgaggtcaagacttagagttttgacgttatttaaaaaaaaatatttttgggtaaagactaaagagtttgacgctatcttgaggtttatttattcaacgtagactatatactatggggccgttctgaattggaccttttaagttttgattttattaaaacgccatgttgtttagtcgagagataaacaaaagacgtgtctctagctaagctgaccttcatatatgctttgacataatacattaattataatctctctttttggtgtgtgtaaaaaatacactctatattttattatgtagacacactacatgcagaagtgttcttacctctgcctctacgtgctgtcaactcctacagatcttcaagtaccccaaccgttatctaacagattaaatataatatacccctaactatattatatatcacaattgttcaaaccagtgtatatagactagacgattccttgaaccatataattccagctttactataagagtcttaaggacaggggcaagtgagtcgagaaacgaaaccgaatataagtcttgtatgatatagtcatatagttaaccgtcgtcatatattaaagaagaaaatggcaaccaccggtcggagactccgtcctccatcgcccaataataaccggagccggactataagctcttcaatctctctcccagtgtccttaaacgcctcgttatcgtcttctacttcttcatcttcttcctcttcgccttccaattcaagcaaacgagtgatgataaccagatcacagtccacaacaagatcctccagacccatcggatcatccgactctaaatccggcgagaacataatcccggcgagaaacagcgcatcaagatctcaagagataaacaacggtagaagcagagagtcgtttgctcggtacttggagcaacgtacgcgtggtagtcctcgtagtaacgcttcatcgagaggggtaaagccgggagccagctcaccatcggcgtgggcgttgtctcctggaagactttcgactatgaagacgcctctgtccagctcagctccgacgacttcaatgtgcatgacgccgcctgagtcacccgtaagcaaggccaagataagaagcggtggcggtggagcggtggcaggagttttgaagtacttcatggcgcagaagaaagtatctccggtacaagaggaggattatcaccggtttaggatttttcaaaacagattacttcaatggaggtttgttaacgcaagaactgaagccactatggcaaaccttaagatcaacgttgaggtacaaaaactatatgaaaaatatttaaatttgtatcttataaatatctattaatttgtttctgtgaatggtttcaggatcagttgttttgggtttggcttaggatatacaaaatgaggaactacgttgtagaaaatttgattgaaattcaaaggctccgtcaagatatcaaagtacgtgaagttctcagcctccaaatgcctttacttaatgagtggtcaaaaatagacgcaaaaaactccgaagcgttgagcaagctaactcgaaaactccatgctttgtctgtccgattacccctcgtacatggtgccacggttagaatttctctctttgggaaaccaatttgtttataaacattttgtgtatttgtcaagaaagcagaaactaataatttggaagttacagatagatatggtgtcgatacatgaagaaatggtcatagctatagaagtcatggacgagatcgaagacgtcatcatcaagtttctcccacgagtaagtccactttatctatacagatcattttcctaactttttttgtatagatacatgtaaaagaaattaatttaagaatgtcttgggtgattaaatatcagcaggttgaaataatcctctatgagctgacagaattgatcggcatgttcaatcaagaattgttatattttgaagaaatggacgagagccttttatccattcctctcttcacggtaattcattatctcctaatttcattatatatatgtgaccggtccggtagttttatctataacttgaatggtttgttttttattggttcaatttggatgtggaagctccataggctaaaatggtgagataattttcttttaacaggcaaaggagagtagcttgagggtccatattctccaaaagactgaagaacagagataatgtttctctaataactcaaacgttaggacatgtaattaaaatgttaatcacattgcacattttgcaaactggattgttgttgatgccagaactcgctatctaattcaagacgcagtcttctacttctagatatatacgattgaagccatgtgttaatgtgtattacaaatttcgttatgcaatttctacatacaccttaatgaaaatatacttatacaaaaaattagacatgaaatctaaaaatgtctatccaatcacatatacacacgtagaagtgtttacttctcacaaagaatgtataaaaataataattgtaatttccaaagctataaatataaagattgacttaacttactaaaagcgctattaagtcatttggttatccagctattcagtactacagaggtctcgggttcgaagccatctttttcctaaatccccaattttttttttttccctcgtttccgaatcttttaccggcgagactctgccatg

SEQ ID NO: 3712 - DNA, 3000 bp, Unknown
  misc_feature (1)..( 3000): cDNA_ID_1014414_gDNA_ID_1620658_Annot_ID_163702 3000 nt of promoter + ATG
gttctaaaaagagtgttttgttcctaaagtagagataacatgaaagaaagggaaagctaaaactctccagtcagtgggaatcaacagacagtaattatatttgaactcacatagctgaatgttgaatatcaactcatcaaaccgaaaaggcaaataataataagtattgacagaatctaacggaggtataccgatcatgagatactcttaatagcgttgaaagtcaaatgtctcagagtctaatttggacgaccaaaaggatcgtaaagcaacaacactcaacgaccatcgaagctaacaaatagctagcttcttataaagataaaaaaaaaaactcaaactttccaataaaaatgtcaactttgagcacaatgcaattgcagagaattcgaaaggttatgaaacattgatcaagtcaatcaaagggaccatcttcagggcatagagttaaacaagaaaaccagaaattgaacctacctggtaaataaaggatgcgactttagtcaaacccaatacaaaaattgagagaagaaatggtggaagcttccatttcacagagcaatcaatttcagaaaataaagagagcagcagaagaagaagatgaagacccacgttggtgctgctaatctcagatacaaacaatgggttcttataaccagagaatctaaaaaagatttgaaaagaagcatcaaaaataataagaaaatgagacaagttggtcatgttaatggtcaaaggaggatcagtcctgggtatatactcttttgttctctcgcctgaattttcttcattatcagagtgacagaaggagagtgtgttctaaaagaaagaagttttctccaaccttaggccttgactattagtttaatcatagtttatctcttaattccctaattatttggtatttaactacattcctcaacgccattattatatcgagtttggccatagttgcacgcatgatctatgtcttcctcacgtctttttgtctcctcccctttatgcatagtggagtggtacaagactttggtagagttcacctacaacattggttcgcatttgaaccgtgatttggccggttcaatttaaacgccggtttacgagttttaacctctggctgattaagtaaccaattttggcaaaatccaaagacgaaggcaaaactctctggctgatcaagaggattcgattaggctctttgaccttgtcaacaaagaccttttagaataaaagcattcaaagtatctatagaagctaaaaacattaaaagttacttatggaaaacgaattggcatgtcattgttccttgatgattgatgataaaaggtggaaaaaactcgaattttaaacttgtcttgtctcgacgctaaaatcttcatcccctgtagtcattcatcatgaaatattcgatcaggacacattattttcaaatttcaattatctaatatctctataaacttaaaatctattattattttcttatgttgattctccttttttccgtacgaaatgtcttcccactttcaaattggttttggagttttcatgctcttgagtctagtattcgtattactattgtgtattctgaatgtaaacgactagtgttcaggtcaatatatcaatgattattttctccattctcgttttgtttgatgcaaaaactaaagaacaaattctgtcaaaaatataagaatatatatcaatattgtgttgcactacataatattctttttactatgaatggccatctttttttaagaaaaaaatggacgaaaaaggcagagtttgtccaatgaaaactggataaatgacattagtaaatagcaaatgacatataatttatttataacttattaataggaaatttgcaaatgggtattttcttacaatttgtttcttttgttgtgtgtgtggtcaagatcttcttttaatacatgatcgagtgtagaaactctaattatatggcgatgatgaaatttgatagtggaagaacttttaaatatgataatttacaatgttgaattagatacaaatatcttaatttattaatggctgaaatgacttgatttattaattacataaaggtttaaatgcaaaagtaacctttgtgtacacatttgttttgaatagtttacaaagttactctaaaataatctgctttgtaatatgaaaatatcattttttggtaaagaatgatattgaaaacatgtttgcaaaacaacagacttacctgtcagatacatacacacatcaacttaaacatagtttgaccacactaaaaatgcctatgttcgttgacattcacgaacaaaagaaaaactatttacccataaattccgtgaaatttttgtctaactatgataaaaatccattattttggattaaaattcaaataaaatccaattgaaaacgctaccgaaactcaaaatgaaaaagacctacaaatatgttttggtttatataaacccatacatatgttacacggaaaaaaagaaaactactattacgtactggttttagacttttaggtttttaaccacatccaaattatccaaattgaatatgaaattttatgatttgatctatgtacacctttagttataataaagcatagtctcttttttttttattatgtttttatttcgtttttggaaactcatatgctgacgtaccaaataaatttgggatatataatccagtattgaaacaattattattataacaacagtggagtagtattttaatgcatttaatggaaaaaaagaaaacagagtaaacggataagcgtgtcgtggagaagaaggaccaaagcaaagtaaagaaagtcatatattcctgaaaatctataaaagacatttcgcatttatccacttcctcgattcaatcaaaactgcttcaagtaaaaagcctacgaaatagcatcggaccaaaagacaaactcaccgagtaaacatacgcaacctgtcgtgtaagtaaaaacaatttgatagtgatctctct

SEQ ID NO: 3713 - DNA, 3000 bp, Unknown; identical to SEQ ID NO: 3129
  misc_feature (1)..( 3000): cDNA_ID_2107558_gDNA_ID_1620658_Annot_ID_163698 3000 nt of promoter + ATG

SEQ ID NO: 3714 - DNA, 3000 bp, Unknown; identical to SEQ ID NO: 3130
  misc_feature (1)..( 3000): cDNA_ID_3071670_gDNA_ID_1620658_Annot_ID_163697 3000 nt of promoter + ATG

SEQ ID NO: 3715 - DNA, 3000 bp, Unknown; identical to SEQ ID NO: 3132
  misc_feature (1)..( 3000): cDNA_ID_2999601_gDNA_ID_1620658_Annot_ID_163693 3000 nt of promoter + ATG

SEQ ID NO: 3716 - DNA, 2606 bp, Unknown
  misc_feature (1)..( 2606): cDNA_ID_1441291_gDNA_ID_1620658_Annot_ID_163691 3000 nt of promoter + ATG
gaattcacaacatatataaaaaaatgataagaagagagcttaattttgagcgagtgttacaaattaattaaaaactgtgtctagtttaacacttaaaaaaattgcaatttaaatgataactacccctggattattttcataacaattttgtacatgaaagaatttaagataatatattattttaccaaattagaaaagctaaaaaaataagtactataatttgttgtatttagtgaaagaataaatgttgctgggaaaaaaagtgaaagaataaatgctttgggtatataccttatattaaaaacaaaacgaaaaaaaattaatgatatttgttaccatatatattatatacaatctataaacagaaattaagataatttatctgaaaagtgttttcaatgaggaaaataacaataaacagaaaaaatgaggtgtatgtacaaagatttgttaccaaatttaaagtattcaaacagaaagtacccatctgtttaggcaaaggattcgatcatcaaacgtcctacaatatcttgttttgcgatctcacccacaaatttatttcctataaattctcttcctctgtctgatctcttctattcaagcccacttcttttctctttctcttgtcttcgtggagttttcggatcttacacaacaatatctttgtcttactgtatttcttgtcctttttcttcttacctttctaacaattattaagaagagtaaagcttgaatttaaataaaaatgatgggagacaatgaaggaagaagaactccgttattgaatcttggggttcaagtatcgatgagagtgttaaccatcggagctgcaatggcctcgatgtgggtcatgatcactaaccgtgaagtcgcatctgtttatggcatcgcttttgaggctaaatacagctactcctctgcctttaggtatatatttttttaaatttattctccttttctatcatcatctacttcttattttatgaaggtgcaatgatctagttattgaaataattcatatatgatacaacgaagcatccatctgcatgaaatgtcatcattcacgttgaaaatatgaagaaaacagatcacacattcggtagaaaagattgaaaagatgaacacatttttctaaaaaaaaacatccctcacgtatgatgtaggaagaacaacatgtgggacaaatcataatttggcatttttcattcatcgatatgatcatctttattgaaagtaagagatcgagtgattaaagtgtatgatttgatgtttgacaggtatttggtgtacgcacagatagctgtctgcgccgcgacattgtttacgcttgtatgggcttgtttggcagtccgcagaagaggacttgtttttgcactcttcttctttgatttggtaactatattacatgtttttgatctaaacattttcatttctatacgtgaatactctttatcttttaatttgaattagcatgttcacaaattatataaataaacgttttgagatgggtttgatattttgatgtacagcttacgactttgacggcgatatcagctttctctgctgccttcgcggaaggttacgtagggaagtacggtaacaaacaggccggttggcttccgatctgcggttatgtgcatggttattgcagtcgtgtcactatctccctcgctatgtccttcgcctcttttatcctcttgttcatccttacggtcttaactgcctccgctgctcgtcattactgattttcttacattttatatcatacaattcaattccttctactccaagataattcagtctttgttatatataattggatttcatgagatgcaaaattgatttgatataatgaaatgaaattgtatgattacttgcatgtatttatctttgagatcacttcttctgttctttgctgtgcttaattagtctcctatttgtttttcttggagaaaatctaagaaacaacaaagtattgacaagaaagaaaacgaaattaagatcttggtaatcggaagagcatttttctaaaacgtataattgtacaataatccttctgccaccaaaagagtgataacatgtttcaaacatgcatagataaaacataatcttattaatgttacatatctcttcacaaaatctattcttccacatatttctcctaaatagggttttagcagagccaacagaaaataaaatgcatacgatctcatcatcactgtatgatggatttccaaaagagaatgttacatatatacatcatcataattcataacatttgcatcagaccaggctcaactagatgcaaaagaaccaagatgggcccgttgaagtaacttatattttggactgggcctgtcacttggcaactgtgggacccacatgaacatgtgccgaagataggcctgaatctccgagaacaaacctccgccacaaaaacagaagacttgttgcttgcgtatcataatacgacgccgtatctctacttgctcgaacaaacccaaaaagatacatatcaagagattaaaccttatccaactaagagaagccatttttattttttttgggtctctgagttgtgtattgagcttcatctccttcaaatg

SEQ ID NO: 3717 - DNA, 3000 bp, Unknown; identical to SEQ ID NO: 3707
  misc_feature (1)..( 3000): cDNA_ID_1821591_gDNA_ID_1620658_Annot_ID_47909 3000 nt of promoter + ATG

SEQ ID NO: 3718 - DNA, 3000 bp, Unknown; identical to SEQ ID NO: 3706
  misc_feature (1)..( 3000): cDNA_ID_1821587_gDNA_ID_1620658_Annot_ID_47911 3000 nt of promoter + ATG

SEQ ID NO: 3719 - DNA, 3000 bp, Unknown; identical to SEQ ID NO: 3705
  misc_feature (1)..( 3000): cDNA_ID_1821583_gDNA_ID_1620658_Annot_ID_47912 3000 nt of promoter + ATG

SEQ ID NO: 3720 - DNA, 3000 bp, Unknown
  misc_feature (1)..( 3000): cDNA_ID_1821580_gDNA_ID_1620658_Annot_ID_47913 3000 nt of promoter + ATG
tgacgtcggagtttcctccaaggaaacgaggaagaggacgtggcaagtctaatcgatggctcaagaagtctcaaatgttccaattcgatagaagtcctggtaaatatctttttagaaccttcctttgatgtctgttaaaagttagtagtgtaactgacatggatctatatgtggggttgacttgtacgatgttggaataagaagagaactttttgtgtcagaagtcataagctagtgaagagaaaggctacgactttaggggaagtagattagaatatgcacatcacaacatttcccaaaagctcagggattaggagagaacagctttaattaagtacagtcttggtcttgtgtttgtcttatagatcagttacatcttgttttagtttgatatttgtctgtcttgtgtatatcttagtgttttgttgtctcaactttgatttttgacttgtctggattcagttgataccaatttggcaggtgtaggaactgctgattttgttggtgccaactttacacctcatgtactgatcgtcaacgccggagaggtatgtttttttctgaatgatcatatagtcttcaaatcgcttactatgatcagttattaagctaagctgttgacctgtggatttgtgtaggatgtgacgatgaagataatgacattctctcaacaaggatctcgtgctatctgcatcctttcagctaatggtcccatctccaatgttacgcttcgtcaatctatgacatccggtggtactctaacttatgaggtccacatgctctcttctatcatccatcttctccattttcatatatatatataaagaatgcattctctgtatttggtttccttctaatgttttttgtcttattgtgagcagggtcgttttgagattctctctttgacgggttcgtttatgcaaaatgactctggaggaactcgaagtagagctggtggtatgagtgtttgccttgcaggaccagatggtcgtgtctttggtggaggactcgctggtctctttcttgctgctggtcctgtccaggttcgtttaagtttccagatagtatgtggtctcagaacatgagttatattttgtgtctgacatggatttattacaggtaatggtagggacttttatagctggtcaagagcagtcacagctggagctagcaaaagaaagacggctaagatttggggctcaaccatcttctatctcctttaacatatccgcagaagaacggaaggcgagattcgagaggcttaacaagtctgttgctattcctgcaccaaccacttcatacacgcatgtaaacacaacaaatgcggttcacagttactatacaaactcggttaaccatgtcaaggatcccttctcgtctatcccagtaggaggaggaggaggtggagaggtaggagaagaagagggtgaagaagatgatgatgaattagaaggtgaagacgaagaattcggaggcgatagccaatctgacaacgagattccgagctgatgatgatcatacggtttcttttcgcggatttgttaggtttgatggatttcagattttggttgattgtttttattaacacagaatgtttagaagctgctatctttaggttcccatcctcttgtgattgttgtagtatccttgttagaaacaaacttactgttgcaaaactctccttcaagaaagttttcactttgctttaccaatttacattgtcactatttcaaatagatatgtatttctctcaaatgatgcatcaaaatcggtgattagtgagtggtttagtggtaggaacttcccactaactctcatgtaactttttttgtcacccactaactctcatgttagttagttttttggtttcattctctatatatattgcagaatgttagatatgtgtgacatttataataacttgagagaagtttctagaaagaaaaggttttgaaaaaaagttaaccgaaagggcattttcatggtgttaagtgagtgatgtttgtttttgttttatttctcaaattctacctcagattttcgatgacttcttgacaagttatatcactaaaccaagataaggtataaattattttgattttattgcgtttgtatttaatagcttacattggtatacttgactttgaatttggttctggcatgtttgtgtcactagtcatcgtggttgaagaaaatgttaagtttcttttttttcaacttaaaatctatcaaaaatatttcatttttatgattttagtagcatagatctatatggtaattgttggaaaaaaatatactttgaaaacatatgataattttagtatatgttaacctttcaaaaatataatattttatttaacacgtctcgagctaacaactttgaaaaccaatatttatatagtaagttaagttttcagcctcttacttctctagaatatgagactttttaaattcttcccacaattaaatatattataccaaatgtataattatttttgttgacacgtctaacaatcatgtggtttagtaactttaaaaactaaattttatatgataagataagtttttttttttcttataatatgaaaattgacttttcaaattctttccatatgttaatatgttatacttgtaaatatggttaatctcattgaacattttatttggttagtaactttcaatatcaaagtttatatagtaagagaagttttcacctttttttatttatacagaaaatgtgaaatgacttttcaaattccttccacatttcagtatgttatactaaaagtatagttaatacgccagttaaagtttcaattaatgaaaatatcaatatgatctaattagaaaagggccaaaactgtaatttttgtatgttttgactggtagagctaacagagaaaattacttttacagagagtttttggtctataaagagagcttgcatggcttcttcactacacttcaatcgttatcacttctaaacaaaacccaaagaag

SEQ ID NO: 3721 - DNA, 2782 bp, Unknown
  misc_feature (1)..( 2782): cDNA_ID_2992357_gDNA_ID_1620659_Annot_ID_47914 3000 nt of promoter + ATG
gaattctttggaatcattcagcggatttactgcttgttttcatcatctacaacaaggtggaaactttttaaagagatggttggaggtctcacactaaagccattatctgagactcgttgggaaagtcgcgttgaaagtgttcgggccattcgatttcaggcctaaaaataagagatgcattggactacttggctgaaaattgtgatgacccgaaagctcgcagcgatgcagactgccttgctacaagtgagacacacagaattggtggatttgagttcttgtttggtatggttatttggtacaatcttctttttaccatgaacacagtaagtaaggcgctacagtcagagaatattgatattgaacttgctcttgttcaactgaaagggttagtctcttatctacaaaattacagagaaactggttttcaagaagctaaagcagaagctacattaattgctgaatctatggatatcgaaccaaaatttcctgtgaaaagaaagcgcatcattaaaaggaaaaggcattttgatgaagagatggagaatgatgttgaaactgaattgcttagcgaggaagagaattttaaagtcgatttttttccttagaatcctagatcaagctatagtatctgcaggtgaggtttgagcaatttgaagagtatggaagaatttttagatttttgtttgatctaaggaagctcaaatctgcaagtgatgatggcttaaaggcagcatgtataaaccttgaaacttctcttaaacatggagatagttcagacgttgatgggaatcatttattcttagagctgaaagttttaaaagaacttttaccgaccgagatcacgaaagctattgaagtgttaaactttttgaaaaagtttgaaggttgttatccaaatacatggattgcgtttagagtgatgctaacagttccagtttcagtcgcctcagccgaaagaagtttttccaagctaaagttgataaagtcatactcacgatcaacaatgtcagaagagagattgaatgccttggcgatattgtcaattgaaagagatttagttggagagctcgactatataagtttgatgaacgactttgcggcaaaaactgcaagaagatctattttcgaaatccgagatgatgatgagtagcaagtgtagtttcagtttttagaaaaacttgtgtttcatttacggtttatcattggttttgtactttttgtttagtatggtaatgaaaatttttggccctcattttggattttgctctagcccttctaatctcagggccggccctgatctttggtacgattacaatctacatccaaaagatggaatattctgattaaatttgagagatttgctaagaagcactttactaatgcaccaagacactttctgattatcatgtcgatttagatgttataaaataaaataaaaataaaaatcacttataatggacttcataacctttattatcgttgcacacaaaaatcgaacatcttttaggaactggattcgctagaaagactttgttcgccaaaagaacatgattcactaagagaacttggtttgctagagtatgacataaaagtatcatgataatagggatatgcatagacatgtaattatgaacaaacaaatatctctaaccaaaaatacgatttaaccacataaccaatacactatatgtattgatatgaaattacttatcacctcaacatcgacaaaactttccactactccctcaacggaccatgaatgtaagaaataaaaaggttaacattttcagtgtttgtttcgtttttacggaaagtcacagttttacctgataaaaatagtaactgtcaatctaagtttctaatttaatttctatagttaaaataattgacacaaatattagttttcctttttttttattttattatatcactacaaaattttgagtgtctaaagctctcatataatgattattattattattattatttctttttattctatttcatttttcattatgaataatcacacaattagtttatacaaacattaataatgtcgcatcattttattataaaactttttttgttttaatatattgataaatatattttatacaataggattataaatgcaagagaaatttttagtatcttcaatttacacatatattttttattacaaatacttaagtaatattatcatttttagatttcttttttttctaaatgtacaaataatatgtcaagctcgtgtaaaaaagttagtttcaaagatgtgaataaatttcataaatatatcaatggaaattacttaaattaagaagaaattatgtttgaattgtgtataggccacaaataattatgtcatccttcacttgttagtgtcaaagagaacattaaatctcttaaatgtattgatggaaattacttgttttatgaatttgttttgtttgacttgtatatggttcaaagaaatatttactattctactaaagtattcaggtttgaagggatttaaggaaacataattactatctataatttattatttgcttaacccctagctgggtgtacaactatatatatgtgtatactctactctaatgaatcattgagacatattatatatgtagggagaaggtgattatcccaaatgatttcttaaaaaaattcttcaactactatatctcaataataattgtattcatataacaaaaactaatgattgattaaaaaaaaaataactaatgatttcatttctctattttgtaggttgatg

SEQ ID NO: 3722 - DNA, 3000 bp, Unknown
  misc_feature (1)..( 3000): cDNA_ID_1821667_gDNA_ID_1620659_Annot_ID_47919 3000 nt of promoter + ATG
ctgcttctttgctttaatggcgcagatacagaactagggcttagggttttcctcaatggctttacttgttagtgttgatccaacctgaggatttgtatcatcaattttacagaatctcaccactgttagctcaggacatttcctgctgcaagaatctgtttacatatacttgtgtctgagactctgaaacagacaagttcacttgtgtctgaatcatgtaatttttgtgttagtctctctacaaatgattgattcttaaattagacgaataaaccagagaaaaatgttatacattgcatttatggactgagttgtgatgtacattgagtaggtgggaaggtgctccaagcaagtttccatgggagtttaagaagacagagacaatatatttcatggaagggaaagtgaaagtgaatgtagacggatacgacgaagaagaagaaacctttgagatagggaaaggagatgttgttgttttccctaaagatatgaaagttgtttgggagataactgaagctgtgaagaagcaatatagcttagaggagtagtgactttgtagagagaatttgagtcacattgatgtttgtttgttgtacttggttactactttgaactaataatatctatggaattgcaatgttgattaggattctgattatagaagtaagaaaactatatattatatacaatttaattaggaccccaacagctcaagtacatgactgttctaagagattcttcagccttcttagccttctcgctctcaccagaggaggtaacggctgcggagacagaagacgaagagaaccttttcccttgagaaacagatctaacgttgttccggagatgttgattaaccgaccggagtatgtagttccaccgacaaagacctagttggtcttttaatgcctctacggctccgatgctcactgccactgtccatgctttgcttgtagaactcatctttcttcagagaattaaacttctttgtgttttgtgttttgtgtattgagaattgtttttgttgatgatgtttagaaagtgaagtgaattggtgtgtttatgtaagagagaagaagccaacaatattgccgtgtagttggagttaaaactagaagctgtggccgttggttttggttgtttactactgtctggatagtaaaatgacgttgttagccttttaagaacgaattggataaggggtaatattgggattctggtagttcctggattaacgagtgccgctatcatgtgcacctggttttgagattgttcacttgtttgggtttcgtgttgtgtccaagttttgaaatatagtaaatgttttctttatctccttgtagaataatgcatgttggagatgaataataatataatatcaaaaatcatttgccgaccaaaaaagtaaaaaatatattaaacacaaaatgtaaataaataaataaaaattcaatcaaaagaaaaatggttttgcgatgacttactttttttttttttctttctttcatacagaagatgaataccatttaacatgagtattcaaaaaatcaaaagtaaaactagtatcatcaaatatttccgctaaattagtaaacatatttccgctcataacaattagaatgagaattttagaatgttggttctgtgacaaccacacaaatttccgagtttagtagatttggaattggtgtttttctttgcgatttactggtatgcgctcttgagcaatcgtatacaattagagtagtaatattattttacttttctgtaaattgctttaatccgttctcagttctctttataacttctgtcaaaaatttaaaatgatataaaatttaacattttactaaaaaaaagagattgtaaaaaagaatatagagatttgttttattttatcctttaatcagtcattttataaataataaatttcgtttcaagtagtacattaatttttaaaatttttatagatttaatatacagatcattctagtatacacaaaaattaggatctatattattatttaaaaaaaaaaaaagcagctcaagtcgatgaactaaacatgggcaaaatcgtcattgaactaaacattcatagtttcagcagaaaccaagaaaaccagcagctacaaaacccactttttgtctgcactttcaaactccaaaggcacggcactttttgtctgctttctcttcttttataaacaaaacccactttgattcacttctcattcatcatcaacaaacacaaaatcgaaaccaaatcacttaaacaagaaagaaacaaagagaaatgagctctgcaagcaaaacgtggatggttgctgcaagcatcggagccgttgaggcattgaaagaccaactaggcgtgtgtcgttggaactacgtgatccgatctgcgaatcagtatctacgcaacaacttaagatccgtgtcgcaagctaagaagctctcttcctcatcaatcgattataccaacaagaccaagcaagctgaagaatcgctgaggacagtcatgtacttgagctgttggggtcctagttaatggacaatggagggatttgaaaaccctaatcatagagttttgataatgtctcttttagggtttaaaacccttaaaaaggttaaaaatgtatagaatttgctctgtaaagtgactcttgagtcttgaactaatgattaatctcttttcataagatttgttcaaatcggatttttcagttactgcaactaagtaagaaagacttaaactttgaatataaatacagagaatttggtacgttgtgtgtgacaaagatttatttctgttgatataattaggaccctaaattggaggtttgttacagtcaaaagtttgtactgagtttttactacaagttagggattttgttaaatgcttatcccatttttcatgcagttctgttgctaattctccagcttaataaagagaggttaattttgtttggtttatgtgtgtgaacatttcttgtctgagtaaagatg

SEQ ID NO: 3723 - DNA, 3000 bp, Unknown
  misc_feature (1)..( 3000): cDNA_ID_1821656_gDNA_ID_1620659_Annot_ID_47925 3000 nt of promoter + ATG
acagtactacggtagaatcgaaagagctataatgaatttatgccctttggccctagagctgagctcactgtgccactatacgcactattctacctccttaaactgagagaaaatctcaaactcaacctccatattgatccaagttgagccataaagaacaactcatagcaccaaaaatcagcactcaaaccatacacattaccagaatgataaatcagccacctaaattatgcgaatccatctttataccatacgtaaaattgtacaaaaagaaaggagattatcactagccccaaatctacattattgatctaagaacaaaccaaacactaccatttacttggaagctgcaacaaatcctaaaagttcatcattttaaccacttgtcgatttcatttgtagtagctttcacaagcttcttcgtgctaacaacaagttcatcaatcagtgaatcaacttcattcctgtcaacaaatcaccaaagtcaaaatcatcatcttcttcttcaaatccttaatcactaaaaatctaattgcagacaaatactcacagagatggttttccaacgttgtaataagaacgagagtgatcataagcagctcctcttccaacaccatagccaaaacctacaccaattccacaaccagctccaaatccaagaccaaattgtaatccaggaactcctggtccgaatcctacacctgttttcatcaaaccaatctctactctcttaaaccaaaactatctataaatagcttcgagcgattcgcgagtctgcgatcaaaattgggagaaattagaaatttacctccgataagaccggcgccgaaaccaaatccgcaaccgacaccgagtccaaaagctggaccaacttttccaatgtctctgatcctaacttggggaagtttccagagcaatcctttgtcatcgtctccggttcttcttctgttgctcatcgtccctttcgctctctctttcggcgtggattcgccaatacatactttaaatgggcctatattataaggcgcactcttatttctcaaggcccaacttcagcccaatagtcatatagatctcatttcacaagcgatatttgttatgtttattttattttaatcttttgttttatatcataatgaattttatagaagatatctgttatgtttatattcataatgaatttgttttatatcataataatatggattttcattaacaacattttttttaatacataaaactaaaaaacccacaattattctcaaattttcactttgttttcagttactttatatatatttgccaaacatattatataatatatgaagatttgttcttacatatatttaatggattgatgcctcattagttttattctcaatttcaaaactaaaattaataacaaatctttcgtaaaactattaaattttagattcaactagattaaactccatccaatatgcatgtttaatttttaaaactaaaataaatttaacaaaaagatatattaaaatcttattgtaagtagaaaataaatatataatattttattttgagaattgtttatttatatattcgttttttccttattcgaaaaatattatacatggaaattactagtcaaatcatcatctaatttacatctatttacaaatctatcgtctactttaccactaaaaatgtgtttactcacaatcatattttcttgttgaagtattctcattcccaccacgtataaaatgattatatgaatgcataaagccaactacatgtgtttttattttcactttcacatagttttttaaccactaaaattattgattcataaaatattttgaaagaaaatatatcacatagcaataattaatgatttatttataagaaaaactagaataagtaaaaattactcgatcgcaatgagtctataataaaccaataaaggttgagaaatttgattggacaaaattataagcacaatgataaaagattaaggcttatagattctatcgcaagtaataattcttttcattttatataaaactattttgcatttaaaaatatgtttatcattatttgttgcatattttgtacgagaaaattatttgaaaaaattctatgcatgttttaatgttaaaaaaaactctgttgagtgtattcacgagccactcaatgtaatttttatctgatgtgaacataatatatgcctaaagaaaagtttgaaactcacccttatattcagattgatgttgtggactaatgttgaaatatattctagtataagttctagaccacatgatttcatataaacttaggtccaactttcaccaattattatgaaacatttgtattgggtcttaaatttttgcgacccatttgcagatatttttgttttgtttaagcctcgaaattagcaaaactaccccaaaattaacaaaaatgccccataattaacaaaaataccttataattagtaaaaagttccataattgacaaaaaatgtccaaaaattaataaataaaaattatcaatgtctcataattaggaaaaataaatcagtttttattttagaaaagcgtcaatttgttttgtatttggccttggattttagattttagtacatttcttattatattaaagtatgtatattaatcaatattaaactactatcttattgatcatcatttaacagtttattcatctaatattttcatcattattcatctaattcatctggttcagtatatcaaccaccatttgacagtttcataatagtcaaaatattttccttcttccttaaatcgattttttaataccaataagtggaagtttgacccaaaaagaaaacaaacaagttaatgggcttactacggcccattaataaacaaaaacgcaccaaaacttcatcttcaacgccggggactttgatatcatctgcgccgaacaaaaactctgcagaaaccctaattttcgtcagtgattgattcttccgtttccaccatg

SEQ ID NO: 3724 - DNA, 85 bp, Unknown
  misc_feature (1)..( 85): cDNA_ID_3071685_gDNA_ID_1620659_Annot_ID_163766 3000 nt of promoter + ATG
tctgtcattacatagagctccggttatagaaagcttctgtcataagctaagtaattcggttttgaaacctgaagatatcagaatg

SEQ ID NO: 3725 - DNA, 3000 bp, Unknown
  misc_feature (1)..( 3000): cDNA_ID_2050676_gDNA_ID_1620659_Annot_ID_163760 3000 nt of promoter + ATG
taagcttcttcgaacatttgcagtttccatatcatgcgttccatcggttggataagcacaaaaccatcataatccaacgaaaaagttattttctttccaaaaaccatcaatataacactgatatccgaaatcattttatcttatcggtttaatactcggatgataatgtatatcaacagccattgaggctagatttgcttctaagaactatatcggagctaactgccaaacttgtccttcatgtacagtttttttaaataaaaaaattatagaccataatttatgaacacaactataaaagtattattttatttgttttataatcgaggttctattcgaatgttccacttgcatgtactacatgcgaaaggaatcaaacaagcaaaaaaaaaaatgaactctacgaaggatgattcctctctctctggcaatagcaagcatttaatgaacaataattaaggaaaaaattacatcaatcaagattcaagacgaggaaaggtgaattcgaaagcaagcattccctgccactaaattacttttccaattgtctgaaatttaccctaaaataggctaatttagacggtctgaggaatctctttttgtatgtctagttaaagtaactaaagtaattaaaccctttttgataaaaaaaattaaacccttaattaataatttgatttaattccaataatcacaatcaatggaacaagtatagttgctttgctttatgttgaatagaactaaacaataatcactttgagttttgacaaatctcctttttgtttattatcataatacaactcacgaagctcctccccacgtttcggaataatcattcactttgatattatacggtataattgtacacacaaaaagaaaaagaaaagaacctacgaggaaagagggggaggtcataggaataaattaaagagatatatcttcatcttttattttgttcaaaaaaacagagtgcattgtacaaattgcattttttttggggtacctaatgtaagagaataataagcaaagtgacacaatgtcatttgtgtgtatatggtataccacaatattgtatgtattcttttgtcatcatagatttagttaagtatgttaacttattagagaaaggggtgtaattaatgttttttgtatgatatctcattttgcaagtagtgttaatcaattatatttataaaatgtgatatcatgtcacaatatattttgaattaaacttcttttattcgaattaaacttcatattctacagcattaaatacctttttaacacagaaaatccattattttttgccatcaactatgtcaaatctaaaaaatcaagccactaacacgttttcatttggccaactaagaaaatcttaatcgtgagaaatagcacaagagatttactcatgtcatcgaatgccagttttgcaaaatattgcggacctaagttatgttggacctgttttacattgtagaatcatcgcgacgaaaatcccattgaaaagaatttagataaagcgaacttatgtctaaagcaattgctttaggtcaattatttgatagtaatattgtcaattttcaatgcttcttcactagacttacacaaagggccaacttatgtctaaggtgattgctttaggtcatttaagttaatctcttattttcttttctttttttggacaaaaaagtcatttaagttagtctaaactagttatatcttgtattataaaatttagttaagataattcttttttaactcaaacacctatttcctatcctatgttttaatataagtgatgtttaagattttggcacaaaattaaaagtcatttccttttttatttaatacaaaaattatttttaactaaatattatcgcatcaataataaaacaaattgtacagataaaaaaatattactttaaaataataaaaaattgaaaatatcaaataaaatgaaaaaaaatcagtgtgaagaatattaaataaataaatatatatatatatatatatatatttgatatacacttaaatttaagttaattttatatatgaaaaaaaaaatgaaattggttctatttaaatattgttacacgaatcaaacgctcttccctagacttaagagaaattttatattcaattattggagggtcgtggggtggcgaatgagtgatgccctcaccgcgcatgtgcaattcctaaccgtcacacacggagagaattacttagatccaacggtaacgaatctgcctgtgacaaaagcaccggtgactttagcagttcaacaaaatctcaaaaagagagtcagtagatgaatgaagctgttatataaaagcaataagatattggagttgacttttttttcttataattcatttttttgggttcaatgcataataatctcttttctatataaaacacaaacacatataaatataacataagctcaaagactaaccaaacccatcatcttcattccaacttcttttctctttttattcacaaccttagctttgagaatcagtctttgttcagtgttaacgtaggcatatctctctatgtgtgtgttgtctttgctttttataagattcggtttctgagtttggtttttatttcttaaggtggctatctttcttgttcttcttcttaaaacgtagtaacagctttataaaaatctttcaaagcatgtaaatttaagtcctagctccattttcgttttcttcttctcaaaaaaaaaaacaaaaaaaaagtttttgatcgattgatgagttttctcatttattgatctctctagttttaacttgtgtttggtgaaaccggtactggcgaagtttaaaacacaagtgtaaacacaaatttataaaaatttcaaatcatgtaaatttcgtctctatcaatttatttcccctcaccaaaaaaaaacaaaaaaaaattagaatttagtacttttattttaaacaaaaaccaaaaaaaaaaccaaaaaaaaaaacgttggaaatg

SEQ ID NO: 3726 - DNA, 3000 bp, Unknown
  misc_feature (1)..( 3000): cDNA_ID_3089400_gDNA_ID_1620659_Annot_ID_163757 3000 nt of promoter + ATG
tagttatattataagaagagtacatttggaacattgtcaatcatttatttacttcaattacgtgtagaaagtgtttaattgcatttagaaatggtagttttggaattaaagtaattgaaatcaaaatcaattataatttaatttagaatttttttaaaattttgctttaattattttagaggtacttcgaagattttttttttttttttctaaactccccactcctcttatcaatgaaattgggtttagatttttttttttttttttatgtactatgtattaattcagatgtcttaaaaatatgatcaaacctttacatcattatcatggagccttttgaatcttcttagaacttcagctttaacactttccatgcatcttttgaagtcttggaatcggaaatgtgcgctagtactgaaaatttctccagaaacaaaacactgaacaacagttgaagagcaatttcatctttcatttctagttttccccactccaacaatattttctttgcatcatgtgcatgtatgactaacttgtgactcggtgatacctccttcaatcactactttgtgcaactccttacacttaagcagccttcatctttatgatccacatactataattttcccatcacacaccacatttctacttagcttcatgtatgatcttatgtttacctgtttgatttctttgtgtttgttattattgctcgatcactcgactcactttctgcctttgatttcttttcagtattgtaggtcaccgagaacaattagctttgataccaatgaaggattttgttcaccctcttagcttaaccttttttttcttaattttaccttgattcgttacattcatatttatactacttttacctttaaacctacttattcctcgattattgtacttaggattacatattaaactaaacaaaagattcccaattagacaattgggccttcaataacacaacatgactggccttttttttcctcttccttatctaattaatattggaaattttcaaatttttaatagtaatttttttttctaaaccggaaaccgtggttaaaattatataaattgtgctatcatcattttttcttagtatgagaaaaataaaataaaataaaatttgtatctattttgaacaaaacttgggttcaagggtgaacccttttattcacctccttttgcattaaccaataaaaacatgttatgtcaaatcctacttaaattacataataaattaaagctataattataaatccaaaccgatatataatctcgtttaattacaaaatctaaaccctaattcttctttgtaaacccaaacctcatttaaactcatttaatcgtaaaaaactaaaccctaatcgtattttctaaatccaagccgatatttaacctcgtttaattgtaaaatctaaatctgtttataaatctaaaccaatatttaatccgtttaattataaaatctaaaccgtaattgtactttataaacctaaaccgatatttaacctcatttaatcataaaatctaaaccctaaccttttataataaactcaaaccgatacctaatttcgttttagtggcaaattagattttataattaaattacatattattatttttattattatgtatcagattttaattgactaaaataaaggaggtgaatataagggttcacccctaaaaatgaacccaagtattttttatttatttttagtgaataccattcttactaataatcgtgatattgagcacatattgtcatatactaacttagtatatgcaagcatgcaatatatttcgtttatatagtttaactattcatttttaaacttagaatatatgatcatcatatattggatattatgttatatgtcatgtagttggctatcttcttcccttatgattatgcatccaaagataattttgaggtaaatgtcgtaaaccttttttttattttattagaaagtacttttttctaaaattcagtaggaaactaatgttatacttaagttaagaaaaatatttaaatatgattttatagagtttgagatattaatatatcggcgagcatataaatttaatatgtataaattctttttaattaaaggtagaatttgttcatatataattattttctcataaatgagaataacaaccaaaacgaacaatattaaaaccatcaacaaccaaaacgtgacactaaatcaacaaacttcagcttagttgtataaattgtttgtttaacttcaatttcattggttgacgaattttatacacaaatgtaacaagttgatttcatcaaacaaacatctacatctactcactctacctcacataattcataaacctacctacacacgcaaaacttcttcaaaggcaacaataaaaatttagagaatcttttgaatcagttggtcagtcaacatcaaacactatttccatttgtacattttcttacttttagaatggtcaatttttttttctcttaataaatagcacttatacatttatgtcccaaaaaaaaaaaaaaatctactttttatttatgtccaattcaaccaaaccaagtccttttagccacgtctgtatttaaccaaaacaatctacagtacttatttttggtacacaataaatgcttcttttcaaaaatcaacctttttttttaatttccatataagaaaacagagagagataataaaaaaaagcttgaaactttgacaaattaacaatctgagattgtaattgagcgggaccagtagtatcgaacgacccagaaaagagatttgattcctttcctcatctttgttcctcaggtttactcctttgaccccaattctaggttttcgaatttgggtaacgaaaaagttttcatctttccgattctttgtgactcatatataagtttctgattctgggttttgttctctgtttccaattagctctgtttgacccatttatcatatcaaaggaagaaactttaaa

SEQ ID NO: 3727 - DNA, 3000 bp, Unknown
  misc_feature (1)..( 3000): cDNA_ID_2997358_gDNA_ID_1620659_Annot_ID_163753 3000 nt of promoter + ATG
tttatatgaaatcatgtggtctagaacttatactagaatatatttcaacattagtccacaacatcaatctgaatataagggtgagtttcaaacttttctttaggcatatattatgttcacatcagataaaaattacattgagtggctcgtgaatacactcaacagagttttttttaacattaaaacatgcatagaattttttcaaataattttctcgtacaaaatatgcaacaaataatgataaacatatttttaaatgcaaaatagttttatataaaatgaaaagaattattacttgcgatagaatctataagccttaatcttttatcattgtgcttataattttgtccaatcaaatttctcaacctttattggtttattatagactcattgcgatcgagtaatttttacttattctagtttttcttataaataaatcattaattattgctatgtgatatattttctttcaaaatattttatgaatcaataattttagtggttaaaaaactatgtgaaagtgaaaataaaaacacatgtagttggctttatgcattcatataatcattttatacgtggtgggaatgagaatacttcaacaagaaaatatgattgtgagtaaacacatttttagtggtaaagtagacgatagatttgtaaatagatgtaaattagatgatgatttgactagtaatttccatgtataatatttttcgaataaggaaaaaacgaatatataaataaacaattctcaaaataaaatattatatatttattttctacttacaataagattttaatatatctttttgttaaatttattttagttttaaaaattaaacatgcatattggatggagtttaatctagttgaatctaaaatttaatagttttacgaaagatttgttattaattttagttttgaaattgagaataaaactaatgaggcatcaatccattaaatatatgtaagaacaaatcttcatatattatataatatgtttggcaaatatatataaagtaactgaaaacaaagtgaaaatttgagaataattgtgggttttttagttttatgtattaaaaaaaatgttgttaatgaaaatccatattattatgatataaaacaaattcattatgaatataaacataacagatatcttctataaaattcattatgatataaaacaaaagattaaaataaaataaacataacaaatatcgcttgtgaaatgagatctatatgactattgggctgaagttgggccttgagaaataagagtgcgccttataatataggcccatttaaagtatgtattggcgaatccacgccgaaagagagagcgaaagggacgatgagcaacagaagaagaaccggagacgatgacaaaggattgctctggaaacttccccaagttaggatcagagacattggaaaagttggtccagcttttggactcggtgtcggttgcggatttggtttcggcgccggtcttatcggaggtaaatttctaatttctcccaattttgatcgcagactcgcgaatcgctcgaagctatttatagatagttttggtttaagagagtagagattggtttgatgaaaacaggtgtaggattcggaccaggagttcctggattacaatttggtcttggatttggagctggttgtggaattggtgtaggttttggctatggtgttggaagaggagctgcttatgatcactctcgttcttattacaacgttggaaaaccatctctgtgagtatttgtctgcaattagatttttagtgattaaggatttgaagaagaagatgatgattttgactttggtgatttgttgacaggaatgaagttgattcactgattgatgaacttgttgttagcacgaagaagcttgtgaaagctactacaaatgaaatcgacaagtggttaaaatgatgaacttttaggatttgttgcagcttccaagtaaatggtagtgtttggtttgttcttagatcaataatgtagatttggggctagtgataatctcctttctttttgtacaattttacgtatggtataaagatggattcgcataatttaggtggctgatttatcattctggtaatgtgtatggtttgagtgctgatttttggtgctatgagttgttctttatggctcaacttggatcaatatggaggttgagtttgagattttctctcagtttaaggaggtagaatagtgcgtatagtggcacagtgagctcagctctagggccaaagggcataaattcattatagctctttcgattctaccgtagtactgtgtgtgaaccggcactgtgaaccaagatgattaaattttcgtattctctatgtacatgatcctgcggctcaatcgcttcagtttcgatccacatgatgtatatgttatagaattgtgggaaactccttgtagaaagagtatgttcacgtctaggactagtcggatgattcgtttctctttttggtgtaatgagtatgttcataactgttgatacaatgtgaaaatctaaccgttgagcttgggagttttacgtctatatgaaaattccggttgtcgtctacattacggtagtaaacaggaccacagtgattccaaatgtcccaaggaatttactgaaaaccccaactaggactgtgaaaggcttgtggatgacatttaacagttgagattttcatgtgtttgagattcttgtaacacattttgctgtataggtgaaagcttagccacacaaaaggagaaacagaggatatggataaaataaattatccaacaaaaaccaatctaaaagccacatcagcatccacaaccaatcagaggacagaatcatatttcacattttcaatccagaccaatcaaaatcctgaacgaatcctactctccaccttataggagcagtttcgtctcttcctccttctttcacttagctcttcctagtgttaaaccagagtaaagcttgaaactttggactaaaaga

SEQ ID NO: 3728 - DNA, 3000 bp, Unknown; identical to SEQ ID NO: 3723
  misc_feature (1)..( 3000): cDNA_ID_3089404_gDNA_ID_1620659_Annot_ID_163751 3000 nt of promoter + ATG

SEQ ID NO: 3729 - DNA, 3000 bp, Unknown
  misc_feature (1)..( 3000): cDNA_ID_3071695_gDNA_ID_1620659_Annot_ID_163742 3000 nt of promoter + ATG
actctccctttgaatttctgcgcttttcgacagtcgaaaaactttgtttagataactccaaaacacacacaatcatgtcgaatttgatcccttacctttgtgtagtatctgcaacctttctctccatcagtaacaataagcagcttaagcttatcatgcataagagacaaaacaacatcatccttctccgcatctccacgcgttagaaacgttacctcatcatcgcttacctacacatcacgaaactcgaacactaagatcatcgaaaacacgagtccggttgttacaacaaaaacaaacataccttgataatatcagcctcattccaaatacttttgatgccttctatagcagcttcagtagaaggccaaagaggcaaccgaacgttcgggtcataagagagtaagactcccgcatctttagcggttttcatcgcagccatgtgagctgttctacatggctcagagatcaagctaatggaaccatagtggaaaatcttagctttcttgataagatccttgttgagttcagattctttcaagagcatgtccgcactagggttcctgtaaaacataaactctctctcaccatctttcttcaaagtcacaaaggccaacgcggttcttgcattggtatcaaagcaaacaccttcactgttcacaccgttcttcttcaatatgttaaccaacatgtgtccaaactcatcatcaccaaactataaaagacattacacaatcacatatcacttttcaccatcagttaatagattctaacataaattatacaaaccttgccgatgaaagctgatttgccaccgagtttggtgatggcacaagcaacattagcaggagcaccaccaggggctttgagaaaaccggtggactcagctaaagaaacaccagaagtgtcagggacaaagtcgataagcatttcaccaaaggaaactatcaatggagtattagccatctttactcagacaagaaatgttcacacacataaaccaaacaaaattaacctctctttattaagctggagaattagcaacagaactgcatgaaaaatgggataagcatttaacaaaatccctaacttgtagtaaaaactcagtacaaacttttgactgtaacaaacctccaatttagggtcctaattatatcaacagaaataaatctttgtcacacacaacgtaccaaattctctgtatttatattcaaagtttaagtctttcttacttagttgcagtaactgaaaaatccgatttgaacaaatcttatgaaaagagattaatcattagttcaagactcaagagtcactttacagagcaaattctatacatttttaacctttttaagggttttaaaccctaaaagagacattatcaaaactctatgattagggttttcaaatccctccattgtccattaactaggaccccaacagctcaagtacatgactgtcctcagcgattcttcagcttgcttggtcttgttggtataatcgattgatgaggaagagagcttcttagcttgcgacacggatcttaagttgttgcgtagatactgattcgcagatcggatcacgtagttccaacgacacacgcctagttggtctttcaatgcctcaacggctccgatgcttgcagcaaccatccacgttttgcttgcagagctcatttctctttgtttctttcttgtttaagtgatttggtttcgattttgtgtttgttgatgatgaatgagaagtgaatcaaagtgggttttgtttataaaagaagagaaagcagacaaaaagtgccgtgcctttggagtttgaaagtgcagacaaaaagtgggttttgtagctgctggttttcttggtttctgctgaaactatgaatgtttagttcaatgacgattttgcccatgtttagttcatcgacttgagctgctttttttttttttaaataataatatagatcctaatttttgtgtatactagaatgatctgtatattaaatctataaaaattttaaaaattaatgtactacttgaaacgaaatttattatttataaaatgactgattaaaggataaaataaaacaaatctctatattcttttttacaatctcttttttttagtaaaatgttaaattttatatcattttaaatttttgacagaagttataaagagaactgagaacggattaaagcaatttacagaaaagtaaaataatattactactctaattgtatacgattgctcaagagcgcataccagtaaatcgcaaagaaaaacaccaattccaaatctactaaactcggaaatttgtgtggttgtcacagaaccaacattctaaaattctcattctaattgttatgagcggaaatatgtttactaatttagcggaaatatttgatgatactagttttacttttgattttttgaatactcatgttaaatggtattcatcttctgtatgaaagaaagaaaaaaaaaaaaagtaagtcatcgcaaaaccatttttcttttgattgaatttttatttatttatttacattttgtgtttaatatattttttacttttttggtcggcaaatgatttttgatattatattattattcatctccaacatgcattattctacaaggagataaagaaaacatttactatatttcaaaacttggacacaacacgaaacccaaacaagtgaacaatctcaaaaccaggtgcacatgatagcggcactcgttaatccaggaactaccagaatcccaatattaccccttatccaattcgttcttaaaaggctaacaacgtcattttactatccagacagtagtaaacaaccaaaaccaacggccacagcttctagttttaactccaactacacggcaatattgttggcttcttctctcttacataaacacaccaattcacttcactttctaaacatcatcaacaaaaacaattctcaatacacaaaacacaaaacacaaagaagtttaattctctgaagaaag

SEQ ID NO: 3730 - DNA, 3000 bp, Unknown; identical to SEQ ID NO: 3722
  misc_feature (1)..( 3000): cDNA_ID_1821667_gDNA_ID_1620659_Annot_ID_163740 3000 nt of promoter + ATG

SEQ ID NO: 3731 - DNA, 3000 bp, Unknown; identical to SEQ ID NO: 3727
  misc_feature (1)..( 3000): cDNA_ID_2997358_gDNA_ID_1620659_Annot_ID_47927 3000 nt of promoter + ATG

SEQ ID NO: 3732 - DNA, 3000 bp, Unknown; identical to SEQ ID NO: 3726
  misc_feature (1)..( 3000): cDNA_ID_1821648_gDNA_ID_1620659_Annot_ID_47929 3000 nt of promoter + ATG

SEQ ID NO: 3733 - DNA, 3000 bp, Unknown; identical to SEQ ID NO: 3725
  misc_feature (1)..( 3000): cDNA_ID_2050676_gDNA_ID_1620659_Annot_ID_47931 3000 nt of promoter + ATG

SEQ ID NO: 3734 - DNA, 85 bp, Unknown; identical to SEQ ID NO: 3724
  misc_feature (1)..( 85): cDNA_ID_1821629_gDNA_ID_1620659_Annot_ID_47935 3000 nt of promoter + ATG

SEQ ID NO: 3735 - DNA, 3000 bp, Unknown
  misc_feature (1)..( 3000): cDNA_ID_1821740_gDNA_ID_1620660_Annot_ID_47937 3000 nt of promoter + ATG
tgcttccacaatatcacttgatgaagccccaagtgaagaggacaatcctagcggattcaagtgctgtgtctcggaagccatggaagatatgttcttgtgtgttgataccaacatcggatgatcaaagatacaagtgggaccggagctgcagtttccactgtaaaaatataaggtacacacgggttctccatgtcgaaagattggagcaaaaattgagcaagcgataaacacagatgatagtaatgagattagaaaaacagagttcagtttgaagtcgaacaagcttttggtgttggttagttcaaaagaatgaggtttgaagcaaagaaaactaacgtctgctagattgctactgctagtttaagaaatggctcaccgtccgtgaagggaggcctttggagcttaaggaggtctcaaggacatgggtttctctctcactcggatgatggaatttacacatactgtaataccaaagttgcagtctcctgtctgcatgtaacatgggcatctggtaaaacatggaatccccaaacaaacatgggaagcttagagattctgctaatggatgatacatccatcaaacaaactcccagaacaatgtgtatgagtaatctcaagctgttttcgtttggtggatctaaagtccaagatttcagaggtttggagttgctgcctttctcaggttgctctcagttatcagacatgtatctcacagattgtaatctgtacaaattcccggacaattttagctgcttatcctcgctgcagtctttatgcttgagccgaaacagtatcgagaatctaccaggaagcatcaagaaacttcatcatctcaaatctctttacttaaagaattgcaaaaatctcatttctcttccagtgcttccatcaaatcagtacttggatgttcatggctgtatctcactcgaaacagtttcaaaacccatgacgcttctagtgatagctgaaaagacccattctactttcgtattcacggattgctacaagctaaaccgagatgcacaagaaaaaattgtggctcatactcagctcaagagtcaaatactggcgaatagatcttttcaacttaatcataaggtccaatctctggttattctgttattattccagtgacattgctatccttaatggtttttccaggaactagttttggaacctttatctgctgtaagttttccagggaatgatttgccactatggttccgccatcagagaattggatcttcaatggaaaccaacctgccttcacactggtgcgacgataaattcattggtctttctctctgcacggttgtctctttcaaggactatgaagatagaaccagccggttctccgtgatatgcaagtgcaagttcagaaacgaagacggtgattacatcagctttacatgtaatcttgggggatggaaagagcagtgtggatcgtctagccatgaagaatcaagaagacttagctctgatcatgtgttcatcagttatagcaactgttaccatgccaagaaaaacgatgatctcaatagatgttgcaacaccacagcctcgttcaaattttttgttactgatggcagagccaaaagaaaactagattgctgtgaggtggtgaaatgcgggatgagcttgttatatgcaccagatgagaatgattgtaggttgcatgggttacacgagaataatcttgagaaagagatatctggaaaagatacagaactaaacgaaaccgccttggataaagttgttgtgtccaagagaggccgtttatgtgtacaagaagaagagctactgaacaggaaaagaataaaggaagacgtctcttttggtaattacgattgttctgtaacttctattcttagttacatggagccagcaaagcctcatctctggaaataactaatttcagaaagctgatttcagtcaaggtttgtttcaaacagaggtcgaatcatgtttttaatctatcttattcttggttccatctcttaagtgaattgcagaatcagtttcaagtgaattggctactctgaaacaattttcaagaagaagtaattggatgtttgttgtgtaagttctctttcctaaacacaaacagatgtctacaaagatcgaaacagtttcctcagcacaaaaaactcagaatcagatctattttttcgtattcttaaatgtaagcttaagtttgacttgtaataagattcattgagacttgaagtaaggttccaatgcaaacttattgcgatatctgtatgcacaataattgataagattctttgagacttaagtaaagttccaatacaaatgcacattacaaattcattagccacctcgcatatgttaactttatccacaagcttcaatattatacaacaaagtatcctatcccatgcctttgagtgatttggtttacgtcttctaatattaagaatgaagtgtagcctaaaaagttaagaaagtcaaatgcttaagttgtaaaataccaaaaaatccgcactcaaaaaaagaatgaatatcatcacagaatcaaaagtcaaaagcggacgccaaacacactaaacaacatactattttgcttcaaacattaccaatgttttagaccattgacctaaatttactattttttaaaaaatatcatgagaattacgagtgttcacaacttcacatactgtgttgaaaagtcacgcaacaagtcacatgaataatttcccatatatgcaaccaaaataaccccacaagattaattgaagcctcacgtttctttcttggtcattttttgacgttaccaaacccactgaataaaaatttataaaatactgaaaacaactttattagatcgtctccactttatcatttttacttatattgtaagcttataattaaaatcccaaaagatgaaaaacgatactctacttttttatgaatcctttaattgaacaaacggaaccaacacaacaacagattgtgaagaagaaagaaaaaacaacaatg

SEQ ID NO: 3736 - DNA, 3000 bp, Unknown
  misc_feature (1)..( 3000): cDNA_ID_1821728_gDNA_ID_1620660_Annot_ID_47940 3000 nt of promoter + ATG
tggctccatgtaactaagaatagaagttacagaacaatcgtaattaccaaaagagacgtcttcctttattcttttcctgttcagtagctcttcttcttgtacacataaacggcctctcttggacacaacaactttatccaaggcggtttcgtttagttctgtatcttttccagatatctctttctcaagattattctcgtgtaacccatgcaacctacaatcattctcatctggtgcatataacaagctcatcccgcatttcaccacctcacagcaatctagttttcttttggctctgccatcagtaacaaaaaatttgaacgaggctgtggtgttgcaacatctattgagatcatcgtttttcttggcatggtaacagttgctataactgatgaacacatgatcagagctaagtcttcttgattcttcatggctagacgatccacactgctctttccatcccccaagattacatgtaaagctgatgtaatcaccgtcttcgtttctgaacttgcacttgcatatcacggagaaccggctggttctatcttcatagtccttgaaagagacaaccgtgcagagagaaagaccaatgaatttatcgtcgcaccagtgtgaaggcaggttggtttccattgaagatccaattctctgatggcggaaccatagtggcaaatcattccctggaaaacttacagcagataaaggttccaaaactagttcctggaaaaaccattaaggatagcaatgtcactggaataataacagaataaccagagattggaccttatgattaagttgaaaagatctattcgccagtatttgactcttgagctgagtatgagccacaattttttcttgtgcatctcggtttagcttgtagcaatccgtgaatacgaaagtagaatgggtcttttcagctatcactagaagcgtcatgggttttgaaactgtttcgagtgagatacagccatgaacatccaagtactgatttgatggaagcactggaagagaaatgagatttttgcaattctttaagtaaagagatttgagatgatgaagtttcttgatgcttcctggtagattctcgatactgtttcggctcaagcataaagactgcagcgaggataagcagctaaaattgtccgggaatttgtacagattacaatctgtgagatacatgtctgataactgagagcaacctgagaaaggcagcaactccaaacctctgaaatcttggactttagatccaccaaacgaaaacagcttgagattactcatacacattgttctgggagtttgtttgatggatgtatcatccattagcagaatctctaagcttcccatgtttgtttggggattccatgttttaccagatgcccatgttacatgcagacaggagactgcaactttggtattacagtatgtgtaaattccatcatccgagtgagagagaaacccatgtccttgagacctccttaagctccaaaggcctcccttcacggacggtgagccatttcttaaactagcagtagcaatctagcagacgttagttttctttgcttcaaacctcattcttttgaactaaccaacaccaaaagcttgttcgacttcaaactgaactctgtttttctaatctcattactatcatctgtgtttatcgcttgctcaatttttgctccaatctttcgacatggagaacccgtgtgtaccttatatttttacagtggaaactgcagctccggtcccacttgtatctttgatcatccgatgttggtatcaacacacaagaacatatcttccatggcttccgagacacagcacttgaatccgctaggattgtcctcttcacttggggcttcatcaagtgatattgtggaagcatcagccaagaaacccagaatatacaagaacacttcttccgtagcgtctgatacaccacactcgaatccattaagattttcttctccaattggagattcatcaagtgagcttgtggaaagatcaactaaagaaactgtaatcaacaagaacacaccttccatggcttctgagactctgcatgctaatccactaagattttattcttccattagagagtcatcaagtgattgaagtgaacttgtggaaacatcagattagaaacccatagtgcataagaacacaccttccatggcttctgagacaccgcacttgaagtcggtaggactttcttcttcgcttggacctttatcaagtgagcttgtggaagcatcaactgtgtctgaagtcacacaagaaaccgttagtagaggtgtcattgaagtgaagacttaaaatttttgtggttaaacaaaatgttgtattttaaaatattgttcttctaatatatattttctaatattaacatatgcttgatccaaaaatttccatgagtaatatatgaaaacaacataattaagtaaaaaaaatacaaggcatttttccaaattaactcaaacaaaaatccataggatatttttcaaaagtataaacaaaacaaggcatttttccaaattaactaattagaatattacaaattttgttagagaactatttgatttattgaattgaaaagatatttgtaatatagtaatattaattttactagtaatgaaaatcagttattcataattacagaatcaaactgacatttatccttttctgtagatgacgtggatacctaatgcaccgtcgattaaatctgcgtagtgaaaccccgcactgctcacagcaccacctctctcgaaccatcgagtctcgaacccagagaggactttcctcagtgagtcctccgttccttagcttctcttccagatccaaactctcaccaaactttctcacaacacacacacaattcgattcgatccacactcttaaaatcccaaagatctctctgattttgaaattcgattcttccccagatcaacttgtgaatttttccacaattttggttcatgattttgatttcgtgaaggactt

SEQ ID NO: 3737 - DNA, 3000 bp, Unknown
  misc_feature (1)..( 3000): cDNA_ID_1821724_gDNA_ID_1620660_Annot_ID_47941 3000 nt of promoter + ATG
gctgaagcttcatgtcgagctaatcctcaaatgcatccggtcgttaccatccgacaatgccaatcaatcagacatcccaaactggggacaactagatgaattctttgcagagcactttagagaagaagaagcaggcgaagctgagtgatgaagtcgtcattgtacagcaatttgtttcttctcacatcctttataaagtcaaaaattcagagtttgggtttgaggatggactattcgcctgtagatttaacttacaggtaacaaattcattccctctgcctccattaccaaaaaaccactctgctaccaaaagtgtttaacaaatcaaatagaaaatgtgatctgtaatatctcatcggtttacatcaagatttgtggaagtgaaccaaattagtatcctgaaaatcaggcctttcttttgttgagatactgcatagaaacttaaagagaactctgatgggttggacccttaaaatgcaggcatactacagttcttggctcggatgaatattataaagccaacagtatctctataaagtaacaatctctcttcttgtttgaattttctcatttgcctcaattgttgcttttttattatcctttttgtttttgagttgtatgagatacgactgattgaactgaagtttttgaaagaggtaagcagtagattcttagacgtatataatgtattttcagagcgaggaaatatttagtcatttggtgtgtccactgcataagcatttcaagtctttattatgaacttgcacctccagaaaactaatggaaagattggctaacaaatggttccaaaacctccgtatcaaaaaatcctggagtaattaactaaggaatttgtaatgctaatgagtagacacaatttttcaatttcttaaacatttataaatataaaaaaatattttcaacaaaacaaaataataaaaagatgtaacattttaaagataatgcggtcctcatattttttaaataacaaataacaaaaaaagtgatagttttagcaaaataataatataaataacaaaatatatacatgaatagtagatagcgaaagaatgaaactttatatacaaagtgcaaacaataagtaattattaatatatacatttttacaataattcaattaaatgattataatttcatttacatacattttagtaatttaaaatttaaaataaatatatgaaagttacactaagagacgctcttgtaaataattaaatgttataaagatttataaaataaagtaaaagttgtaattgttcgtgaaataaactaaatattgcaatagttcaactcatcgattaaaactatttatgaagagtgactacaaaaggatgcaacggtagaatactacatttattcgggttgcaattttctaaaaaacataaccataaaatatttatttttaacttttaaaataaataacaaaaagttgtgataaaattacacactgtttccaactgcaaaacacatttatgggtgttatctttcaaatagattatgttagttgaaggtgatacatgtaagtgagtgaatggtgattagtcgagttatgtgtttttggagacaactatcttcttcctttcatcaatatacatatgttgtaagtagttgaatatcataatatggctagatttataattattaattttgttgatgaattagtatttaagaaattaacaaaatttgatggttccgacattattaattcgtagagattttgctgtacaaactattcaactagtgggacatatccactttggatattcattaagagacaaagctagagttatttatttcatttctaacattatagtgctacaattctaaataaatgatcgaaactatatactctctcttccttttcaatttattttatagaaaaaacgcacatattaaaaaatatatattaaaactgattataaatgtattaataatgtgatttcaaattttctatagttctaaaccattgatatttaattatttgtcttgaagtttaaaattcatcaataataactactcattctgttcttttttaattaattttctagaaaaacacacatattaataaaacatataaaactgattataaatgtattaatttttgtgatttacaattttttataattttaaaccaatgatattcaattatttgtcttgaaatttaaaattcatcaataataactaataaatagtgcataaaaaacttaaaaaattaaacaatattgttttctaaaagatcaagtaataaggaaccgaaggagtactaaatagtgcatagaaacctaaaaaatcaacttttttgaaacaaatttttttcctaaaaaatcaaataataaggagcaaaaggagtataatctaatctctaaccgatatataatctcatttaactataaaatttaaatcttaatcttctttgattaacccaaaccgatatataatctcatttaattacaaaatctaaaccttaatcttctaattagaaactcaatccgatattaaacccgtttaattgtaaaatttaaattttaacaatactttttaaatttaaactgatatttagttttgtttaattgtaaaatttaaatccgtttataattcagatcgatatttaattataaatctaaaccgatatttaactttgtttaatcatataatctaatcctaaaaaattcttatataaactcaaccaatatatcatttcgttttgatagtggagtatattttataattaaatgaattttagttttattagctagctgattatgattggctaaaatagaaagagtaaagagtgaataagaaggttcatttttggttttcaaattatccatctttattttttgtcctggatactggataggcctttatctttcattcttggggtttcgcatctcttccactaatttatttgagatggaattccattgagaatattcgtctcttctttctttcgttctcaattcccatcccatattcccc

SEQ ID NO: 3738 - DNA, 3000 bp, Unknown
  misc_feature (1)..( 3000): cDNA_ID_1821716_gDNA_ID_1620660_Annot_ID_47943 3000 nt of promoter + ATG
aaaaatcacaaatatcaaatttagttatcaacatacaaatatctgaacgaatattgataatataggaattagctgaaccagagccggccctaagcagaggctggtgaagcatattacttgctttatctctaattattaaaaaaacaaaaatatatgtaccaccctaaattcaggagttacttgctctatcttcttgtctacgtggaagtttttcaccacgttgaaatattttataggtgagaaaaaaaattatataaaatatttgcaaattaaatttggatataatagaaacaattattaaattatttgttttatacaaacagatcttggatcccatctaataatgttacctataatggctttatctgaatagtttcatcccgcgtgcatgcggatcgttgtctagtatttatgggtaatcaatagccattcaatggccattcaagtgtttgtttccagtgaaattcagttgccgacgaaaaacaaattaaactaaattgattgaaaaatgttttaaaaatcttcccaaattaggaccactttttatgtggccatgttttatacagcaatatgttttcgttatctatatgcatatatatttttttggcctttccatttattagatgagaccaagacgaggaagggcataaaatggttcgggagttaaaataagtgtagattaatttattgcaaataaaaccctgcaatttcttaatagttttttaaagaaaaaatctacaacaatcgaaaacttctttcaactcatacgtactatagtctatttgaattgtttataatattcgtaccatttcacttttatattttatctcttctttctcgacattcgtgcgctttaaccacacatcattattttcttgaaaacaaaacgaaacggtttcgtctctctctcagtttctctgacaatctgtacagattctctacatataactttcaatcgattttgtcccttagttttattcatcataattacttattagtcctcatctaatttgatataatcgttttgtacccaaaattctaggctttttgtccttctgcattttttgggtttttgtcccccacttgttgtgaaattttttgaacttcatttccaaggcattagccacgagagcataactgaggaagtcgtgaaaaatctcaggatgagatttgctgtcgacatctatgaagagtttgttcagcctctccgtggttgatgcccctttcaatatttttgtttaagaacttatgtttttttgtaatttttatttattctactttgttttctacttggatgctactttcttgatagttctataactcttgtctttctttgtaatcttaattaacattctagatctctaaataagattaacataagaaatatgtatcggcaaaactaatgataaatcgcgggagacaacgtaatatagaatgcattaggggacatgtttacttgttcgcggggaacaacgtagtaaggattacattcaaatgatcaagtaattcgaatgcattctatattacgtcgtccttcgctaaccggtaatcatgtcccctaatgtattatatattacgttgtcccccgctaacaggtaatcatgtcctctaatgcattctatattacgttgtccctcgcagaattttcgatagccaaattatttaaacaagtcaacttttaaatatccaataacaacagtaaaagtcagctgctctccactatctttcccctaatttcttatgtttcttccatgatttttttgttctgtgtcatcatatcaaccaaaagatatctctgtctatgacatagactctgtcccacacttgggcatttttgtccataattccacgcgagtaattgcaatgtagtagattttaaaataattgaccaaatgtagcagattttgaatgttacattctgaaatgtgggagattttgaaaaattcccctttttttcaaaccatgatgttcttataaaggaaataaacaattgaaggcttttacatcttggtcggattgatcaaattgtttttttttcttatttgcgagggttactaactttatcaatttgtaactgaaaactagtcaacaatgaataagtgtaaggacacattatgtcacattttcttattaatattatattcctaacatggcatcttaaaatgattaatattttcattcatattagagataaacttatactttggatagtttatatgtgtttgaatttacttcagctccgaaaccatgtaaaacaatataaaactcaataatcttcttgaaaggataagtttgtgtttgtcttttaaactctttagaattaaactgtttacaataatatatcaatatttaatagaatttttggtataaaaatagggttgtttttgcaaacaagaaagaactttctcaaaatttcacttactttttttttgtcgtcttagatttattatttattgcaaattataaaagctgttatataaacgattctactacggacaattctttctgacccttattagatttacgacatatgatacctcattcttcttttcaatgctcttgatggagagcttcaatgatattctctgcgtagaatcctggcgaacggttataattgtacatcgttggaaatttcatgcacatttgctttcattaatctgcaaatctgctaataaaccgcagtatctgggattcgaatctcagtatagaagcgttaataaatccttggtcaaccaatatgtatgtcaagggagcttccaccattgactttgtttgtttgttttttttttttttttaatactttaaaacttccaagaaacatcgaggaaaacgaaaggaaatgtttgggaaaagaactttgtacacgttagttgaaagataaaattattgttaacacgtatttacattttcaacgaacggcctgtatataattttctgtatagaatccataaaacgggaaatcatttttgaaagtcttcaagcagacgctctagaataatg

SEQ ID NO: 3739 - DNA, 2933 bp, Unknown
  misc_feature (1)..( 2933): cDNA_ID_3071717_gDNA_ID_1620660_Annot_ID_163801 3000 nt of promoter + ATG
ttctgcgccagctatatgttttccggtcagacaagtaccgcccaagccaatcacatcctacttgtaaccctttcaacttatcaactacagaagaaaactcagcatcaatcccaccaaccagtagcaaagggcaactagtaactaacttaataactgtagccttactaagacccaaattctcataaccccttagcttcatcgccaacatcccagattcatatctaaaaatctctctcgcttctttatacatacggccaatcttaccacgcgggatcccatagttgcaaagagcatgaaagttctcaaacatgataccatcatcactcaaaaacattagcttccgtggaagaaacgtttcaaactcataaggacacaaacccaaactctcgaaaaacggttcaaactcgtttatcggattgtacctaaggaacttagtcaatcccttggatacatctttctgattatcatcaatcttagacaacaaagtcgacataaaacaaggagaattcttacttatatgctctgcatcagtaaaagtaaagcttctagtataatgcaagtaatcaaaaagagcttcttgagcttgattcctactagcccttgataccggattaacgaaaaacctagttggtaagtgagacgagtgttgttgtaacttagatttatcctgacgaacacagctttcaatctgaaaactccgaaatggaactgaaacacgagaaaggtcgaacctttgaactgggttttgacgaggaatagatgagaaagttatacagtagttgagatttgaaatcatattcaacagtttatgaactcttctctgatttctggataataacatcgcaacctaacaacaaagagaaacaggtgaaagtcacaatcaaatagagagctatgaagaattctcaatgcttactctttcaagtaagaaatttacctgaaattagggcttattaagcatttgaatcaaccattttcccaagattcttagggttcatagccaaatctcagttactttgcttaaaccttgttctggcttcaaattaaggtggaaatttcagagaagcccctaaacgtttataatatatccgaaacgaccataatcttatttttctatacttcaatatgtgcctaagagtttccgaaatatcataaaggtaccaattagtgcatcatcaacacttggccttaaaagacttgacgtgagatattattattcctcttttgataccgaattaatagacttgtcaagtttagacttgtcaaaagtgataaacatatcacacgaaatcgtgttattatcacgagcgttacaaattcttcaagtatatcactataaaacgacttcaaaacccaaccaagtggtgatttctttgagctgactatatgtatgcaagataaaggcagcaagaaacggtgagttttcttcacgagcataaatggtttgttcgtctttctgatttttgattttatagatatgtaacttttttattaggtcaatttcaagtggtccatggtagattcaattcatgttaggtcatcatcttcaagctaaaacgcctaccaaacatataataacaagtattcttttaatcactagttttagtttcaaaatatttctgactatcttaagtgcatttagattttagttcaacatgatggaaaaagataacttgactcttgtttaacttgcatatgttttgtttgactatttgttatgtttgagaggaatgatttttctttgtaaaacagctttatataaaacttgtggcttactcggatgaattttatatttgttttgattatttttcaaatgttgtttttttcaaaaccttttgacagtaaattacaatataaattattttcaaagatcttaatatgtcttatttaagtgaatttttaattataattataagtaaattattaaatatagattataacaatgaagttaaatcttattcactatatctttaaatatttttttctcttatttttttaatattttattcactatttgtaacaaaattataaaagccaaaattaccaaatttctgcaagaaaaaacaaaaaacaaatccttggctcctcctaaaatccacctaccttacccttttatatataagatacaaccaaaaacaagatgatttggtgctttcaatataaaagatataatatttcataattaacatattctcccttaggttttcctgcacactcgatttaaatcgtctaacaaggtcagaatccataatttatacaaccattttctgcttcctttgtttcctccctaattacatgttattaactattaagcatatccttaaaacaaaacccaaactgaattatctttgtcaatagttgtcttctctctcgattattcttaagataactactttggtagttttgtttttttaattactactgcaccctcttgcgcttcaagttacttggtaaaaaactctcttaactttggataatttctcgaagtctctgaagaaagaaccctttttttcttctctcataatcgtctctgtaacgtccttctccttcttcatcttctttgcgtttcttctgcagccttttgcggttcacgtgttgattgcttctgtctctactttttgtccgttttaaagtttaaacttattgttacaaaattggattttctctgatcaaacgataaaaacagagtcttttagtatcttcttcttgggtataacgaagatttttgtggtttcttctgatgtaattcacaaaaccatttgtataatccttgaaaagactttttgttcagaaatgaagtttcttactttgctctttcttttctatatttcagtaatgatgatgataaagcttgagagaagtgattagtctgtagaagaagaagagttaaaaccattcaccaaagaagaaattgagaactagagacagtcatg

SEQ ID NO: 3740 - DNA, 3000 bp, Unknown
  misc_feature (1)..( 3000): cDNA_ID_3091045_gDNA_ID_1620660_Annot_ID_163794 3000 nt of promoter + ATG
aatgcatctagttctttgtccatatttatccttctagaaactagcgcagaacagtattaagattattactgagtcctttttccatgttgtcctccctcctcacccagacgattgctacagtctgcatgttccttgcgggaaaagtggaagaaactcctaggccgttaaaagatgttattgttgtctcctatgagataatacacaagaaggatcctactactgcacagaaaatcaagcaaaaggtctgaatattctaaactttctctaatccggtttcctgtttagtaataagcgaatttgcactgtttctcgcatattctattttactatgacataagttttctactaaacccaggattgcacttgtttgtgaacaatcctcctatgatcattgtccttgtcgttggatctctcatctgtgctggtcaccgtctctattatttctcttctttgtactgaacgtatttcacttttgcaggaagtatatgagcaacaaaaagagcttatactaaatggagaaaagattgtactttctacgctgggatttgacttcaatgtttatcatccttataagcctcttgtagaagcgataaagaaatttaaggtcgcacagaatgctctggcccaagttgcatggaattttgttaacgatgggtacgttaaaagtctgtttccttgaaagcttcagatagatctatctgtcttgtattttcttcttcatacaatgaaaagatgcttgcagtctgcggacgtcactctgcctgcaatttaagcctcaccacattgcggcgggagcaatttttcttgctgcgaagttccttaaagtgaaattaccatcagatggagagaaggtctggtggcaagaatttgatgtcacacctcgacaactagagggtgagagaactatctttatctttgaattaattttatgaaactgtttccactttttctgtttgacttgtatgccttattttgcatctgatgctaagagctactcccttatgtatactgcagatgttagcaaccaaatgcttgagctctatgagcaaaaccgtgttcctgcatctcaagtaagcgaagtcgaaagtagtgtaggtggaggatcagctcatcatgttgggtctaggccatcagcacgtctaactcatgaacattcaaattctgataatctcgggggctcgacaaaagctacacaaaaccggagcaatgataatgggagtggtgaggcaggtagtgtcatcaccgagcagaagggggaaagagatacagaaacgaaagatagcatgcatactgaaagtcatccagcccataagtctagatcgggagttgaggcacctggggaggataaaatagagaaagcaggtgcacattttccagaagatgataaatctagaattgttggtacagctgatgtcacggtcagccaatccccaaaagacataaaaatgtttagagataaggtgaaggccaaactagaggcgaagaaggtccaaggtgaaaagacgagaaagaaggatttggtggatgaggatgatttgatagaaagagaactggaagacgtggaattagctgttgaggatgacaaagatatacaaaacaaaagctccatgggtacagaacatggcgagattcttgatggaaacaacttggtggtcaataccgaggaaggtgaaatgatagatgatgtttcttcaacaatgcctagccggaagagaaaaatggaaagtccttgtgaaaaacagttaggagaaggaaagagacgacacgacaacagtgagaatgtggaagaaggtcagaagacaaacccaggaggaagtagtcatagttatggtgacagagagccaagaagacactcccaagagaggtagatgatcaaaaccttctcatggtctattagagacatttcccaaccatgatgcgaaatgagtccactgtatttacaatgttggttatcttttcattttccttggcacttgtattcaacagttgagaaactaaatcaggtttccatccatcccataggatttagggtctctataattttgatctttgttagcattcccttttgtatatcgggggaataaaaaagaattttgacgaatttatttagagccaagacaatattagtgttttgtcattcattgccgaaggatgttttgataataacaatatgaaacagagtggtcaattgatttgtcaatgtgtagttgtttttgtaaggtttgttttatgttaagtccactcgtaaccttgttcccattgtcattatactgcttttcgtatgtatcggttagcttggtgaccaatccggttaaccacaaaatcaggcggaatagttgtcaaattaaagagcaaaaaagactcatgaaaaagagctgtaggggttttcattttttcaattcgttttcaaaattttcaggtttaaaaataaatacaggtctgaattaattcgctcggtttgaattttcgggtttagtccagtgtgatttagtcggttaagttgctcaaaattttggatttggttcggtttattcattatcaaacacaaaaacacaaaaaaagccaacctaaagaaggaacaacaaaagacctaaaaaccctctcgtcttctcttcttcttcttcttcttctccttgctctctcttgtcgtcggcggcagattatccaatcgttaggctatcgttccgacactctacagtcattacaaacatttcaatacaacaaaaactcatccttttcttctcttattaaccataatttcggattccctttctaagtatacagctttcccagaacgagctcttgcaaagccaaagaatgtaagtatttgtttctttagggttttagcgaattcaatcttagtaagtcatcttcttcttttttcgacctttgtataattgcaggtcgaggatttgtgttaagaatttgccaaaacatgtgaaagaggatcaacttcgagatcacttttcacagaaaggagaaatcactgacgccaaattg

SEQ ID NO: 3741 - DNA, 3000 bp, Unknown
  misc_feature (1)..( 3000): cDNA_ID_3071742_gDNA_ID_1620660_Annot_ID_163786 3000 nt of promoter + ATG
aagttcaaaaaatttcacaacaagtgggggacaaaaacccaaaaaatgcagaaggacaaaaagcctagaattttgggtacaaaacgattatatcaaattagatgaggactaataagtaattatgatgaataaaactaagggacaaaatcgattgaaagttatatgtagagaatctgtacagattgtcagagaaactgagagagagacgaaaccgtttcgttttgttttcaagaaaataatgatgtgtggttaaagcgcacgaatgtcgagaaagaagagataaaatataaaagtgaaatggtacgaatattataaacaattcaaatagactatagtacgtatgagttgaaagaagttttcgattgttgtagattttttctttaaaaaactattaagaaattgcagggttttatttgcaataaattaatctacacttattttaactcccgaaccattttatgcccttcctcgtcttggtctcatctaataaatggaaaggccaaaaaaatatatatgcatatagataacgaaaacatattgctgtataaaacatggccacataaaaagtggtcctaatttgggaagatttttaaaacatttttcaatcaatttagtttaatttgtttttcgtcggcaactgaatttcactggaaacaaacacttgaatggccattgaatggctattgattacccataaatactagacaacgatccgcatgcacgcgggatgaaactattcagataaagccattataggtaacattattagatgggatccaagatctgtttgtataaaacaaataatttaataattgtttctattatatccaaatttaatttgcaaatattttatataattttttttctcacctataaaatatttcaacgtggtgaaaaacttccacgtagacaagaagatagagcaagtaactcctgaatttagggtggtacatatatttttgtttttttaataattagagataaagcaagtaatatgcttcaccagcctctgcttagggccggctctggttcagctaattcctatattatcaatattcgttcagatatttgtatgttgataactaaatttgatatttgtgatttttctaaaaaaataatactaaaactaagtgcctgcattggcaggggccataatgctagttatcttctatattagagcgtaagtcaacgatcctattctgtaaggtctaccatctagaattgtaacaatttcgcaatcatccagcttttgctgacccgcccgccactcatctactagtcgtttgtatcacaattccaggtcagctacaatttggccaagttacttctagataagaatcctctggtctaaagtcctctcatattgtacgtaacttacaaaattttattgcaaaaaagaaaaccctctcataattaaataacgacacatggatcattttcaactagcaatggcccattgctagttgtttttggtagtatggcccattaacagtttgatttaagacctgtttttaggaaatttttccaagaaaactcttcaattatctttttataaggaagtttaatacctaatatttctgggttggaagaataatacatatatttataaaaatatgtaatttaacactcaaacaattaaatgttttatacttacaatctcataacaaaaaataaaattctaattaccgttaccatctcaattaattattaatttttagatgatttgacattaatttataattttgaatataattttattttatgttatctcaaaaatataaaatttcatttttatcataattaatttattttaaaattcaacataaaaaattatgagaaaatctaaatactttaaaatagtcatttttacaatcttatttcatcgtctcaatatcaaaaagatgttttttcttgagattcaatcttcgattctagatttcctcaattaatcgctacgagaatcgctgataaacaatttttgtcgccctcttttgccaacatcaaattcgataaccgttcacaatctccttttaatcgccactaaaattaatttgatttcattcgtcgtaatgaatatgatatcaacgaccattgatatgaacttcttcttcgtcgtgagaaactctctattcgaatttaaatccttgacaaataaacaattttcgacaaaatctcaatttgaatctcattgtatttctcatgatttttcaattcataaaaatggctaattttatttttacctttttcaaagttttttttgcttttttcttgaatttaaaaaagataatatttttttataaaaacttttgggataatatagaaactaaatgttaataaaataacttttaaaaattaaataaaattaatgcttcatcacctaaacattagtagttaattgagctagaaatggtaaaattggaattgtatttttgttctgagattaaattgtttgagtattaaactttacagttttattagtactgtatgtgtatttttcttcgaaccggaaagtaatgggtagtaaacatccaaataaaaaaataattgagttttttttgagaattttcctttcttttattaacatattttactttttttgattaaatttttttaaaatatatttaaaatctttgtagaagcacactaatccatttgctaactaatttaaatatgtttctaacatgttcacatatattaaaaggcacgttttgagcatacatatattttggttctcagttcttgatcatctagtgcattatctctcaaaaaccctaatcatttggcctcttcttttccccctaggctaatttacatataatatccttagaacgaccaaaacaatgtgccacagggactaattaaattaaacagcttgtaaaaattgtaattatcttggaattgttggagttggttaaaacactttttagaggcctttttattcccatctccgaccattccaccaaaacccaaaccatttttgtttcgcaaaatcattctacc

SEQ ID NO: 3742 - DNA, 3000 bp, Unknown
  misc_feature (1)..( 3000): cDNA_ID_3071750_gDNA_ID_1620660_Annot_ID_163782 3000 nt of promoter + ATG
tttaattaattttctagaaaaacacacatattaataaaacatataaaactgattataaatgtattaatttttgtgatttacaattttttataattttaaaccaatgatattcaattatttgtcttgaaatttaaaattcatcaataataactaataaatagtgcataaaaaacttaaaaaattaaacaatattgttttctaaaagatcaagtaataaggaaccgaaggagtactaaatagtgcatagaaacctaaaaaatcaacttttttgaaacaaatttttttcctaaaaaatcaaataataaggagcaaaaggagtataatctaatctctaaccgatatataatctcatttaactataaaatttaaatcttaatcttctttgattaacccaaaccgatatataatctcatttaattacaaaatctaaaccttaatcttctaattagaaactcaatccgatattaaacccgtttaattgtaaaatttaaattttaacaatactttttaaatttaaactgatatttagttttgtttaattgtaaaatttaaatccgtttataattcagatcgatatttaattataaatctaaaccgatatttaactttgtttaatcatataatctaatcctaaaaaattcttatataaactcaaccaatatatcatttcgttttgatagtggagtatattttataattaaatgaattttagttttattagctagctgattatgattggctaaaatagaaagagtaaagagtgaataagaaggttcatttttggttttcaaattatccatctttattttttgtcctggatactggataggcctttatctttcattcttggggtttcgcatctcttccactaatttatttgagatggaattccattgagaatattcgtctcttctttctttcgttctcaattcccatcccatattccccatggcagcttctttttgcggcagccggagatacgatgttttcccgagcttcagtaaggtagatgtccgcaggtcattcctcgcgcatcttctcaaggagctcgaccgcagattaatcaatacgttcacagatcatggtatggagagaaacctcccaatcgacgctgaacttttatcggcgatagcagaatcgaggatctcaatagtcatcttctctaaaaactatgcttcttccacgtggtgcttagatgaattggttgagatccacacgtgttataaggaattggctcaaatagtggttccggttttctttaacgtacatccttcgcaagttaaaaaacagaccggagaatttggtaaggtttttggaaagacatgcaaaggtaaaccagagaatcggaaactaagatggatgcaagctctagcagcggtagcaaatattgctggatatgatcttcagaactggtattttcttttccattccaaccctaatatatatatgtgcctgtgttcaattttggggtgcctctttaatgacaaaattgactattgttattaggcctgatgaagctgtcatgattgagatggtagctgacgatgtttcgaaaaaactttttaaatcatcgaatgatttcagtgatatcgtcgggattgaagctcatttagaggcaatgagttcaatattgcgcttgaaatctgagaaagctagaatggtcgggatttcggggccttcagggattggtaagactaccatcgcaaaagctcttttcagtaaactctctccccaattccaccttcgtgctttcgttacttataaaagaaccaaccaggacgactatgacatgaagttgtgttggatagaaaaatttctgtcagaaattcttggtcaaaaggacttgaaggttttggatttaggtgcggtggaacaaagtctaatgcacaagaaagttcttatcattcttgacgatgtagatgatcttgagctattaaagaccttggtgggacaaactggatggttcgggtttggaagcagaattgttgtgatcactcaggataggcagcttctcaaggctcatgatattaacctcatatatgaggtggccttcccatctgcccatcttgctcttgagattttctgccaatctgcttttgggaaaatatatccaccatctgattttagagaactctctgttgaatttgcatatcttgccggcaatcttcctttggatcttagggtcttggtttggccatgaaaggaaagcacagggaggagtggatagagatgctgcctaggctccgaaatgatttggacgggaaatttaagaaaacattgagaaattacctgcctgtgatacggaagcgcgtttccaatgaagaagggggccgtgagaaattgaaaaagggaaataaaaagttggatttggatgaggagtttcctggtggagaaatttacagtgatgagataccttcgccaacatctaactggaaagatacagatgactttgattcaggggacatcattccaatcattgcagacaaatctactactataattcccaacaggaggcactcgaacgatgactggtgttctttctgtgagttcctcagaaaccgtatacccccgttgaatccctttaaatgtagtgccaatgatgtcattgattttcttcgcacacggcaggttttaggcagcactgaggctctcgttgaccgcctcattttcagtagtgaggcatttggcataaaacctgaggaaaacccttttcgcagccaagctgtaacatcgtacttgaaggcggccagggatatgacacgagaaaaagaatgcatacttgtgttttcgtgccacgacaaccttgatgtagatgaaacatctttcattgaagccatctcaaaagaattgcacaagcaggggttcatccctttgacatataatcttttgggcagagagaacctcgatgaggagatgttatacggatctagagtcggtatcatgatactttcaagtagttatgtttcttctagacagtccctggatcacctggttgcagtt

SEQ ID NO: 3743 - DNA, 3000 bp, Unknown; identical to SEQ ID NO: 3736
  misc_feature (1)..( 3000): cDNA_ID_2132580_gDNA_ID_1620660_Annot_ID_163780 3000 nt of promoter + ATG

SEQ ID NO: 3744 - DNA, 3000 bp, Unknown; identical to SEQ ID NO: 3741
  misc_feature (1)..( 3000): cDNA_ID_1821712_gDNA_ID_1620660_Annot_ID_47944 3000 nt of promoter + ATG

SEQ ID NO: 3745 - DNA, 3000 bp, Unknown
  misc_feature (1)..( 3000): cDNA_ID_1821704_gDNA_ID_1620660_Annot_ID_47947 3000 nt of promoter + ATG
tggaaatgtcgataagagaaggttctgatgaaggtgttcctgtagttgtttcttcaccgggttctatagtgtcaaaagcttatcaagatctagctcaaaacgtggtgaaaggactcaaggagctaagagagaatccagataatgagattcagatgaagctaaatgttcctcattctagccactcatcatagaacaaacacttatatatgaccaaagttttgtcttgctgcctcactttctcatatttttgtaccaaagagaatgtttgcaaagagaagaatgtaatttgctgatgataaaagcaatagagccagtcactgtttatgaaccatgtgaaacagcagatcaatgtggttactttcatatattagataggaagatgatgaattttaaaccagacatgtagagatcactatatagtaatgtcaaaattttgaagaagaaacaaatacattcgtttttctgagtaaaataaaacatgttgagatcacttcacaatgtaagatgtgatcaccaaattaccccttcatcatcttcttcatcgtcatctagatcttcaaattcaagattctcattgccgtagcattcttcgtttcctctatacgcatcttcattactgtaatcctcattccagtctggttcttctgcttcttcttcttcttcttcagaatactgagatttcaaaaggctttcttcactgttttgctttgaatattctatttggtcaccaacaacaactggtttatctagctttgccctcttgggagagttctcctacaaagatgtgaatacacataataaacataagagactaagcagagaaataagaggtccattctatcaccaaaaagcagatatctctgacactttgtattcttgcataaaagataatttacaaattggaaagaggggaaaacttacaggatcaaatagcttatccaagacattgtaattgatttccaaactcggtctctgcatgaattaagacaagtaagagaatttttcagataaataaatttaactacagatgaaaaataaggaagatccaaataaatccgaaaggaaagaaatgcaatagtctagacattgtttcagagagtgagctgaagtaatggtatcactgacctttttattttcagtttctgcattgctttcggttttggttgcagaagttttcttactaggagcaatcttattagcaggatccttctttttcctagtggtgactttcctatattttccctgataaacaatcgttaacaagaacgtcaatgaaagcatgcgaggaacaacatgaagttcacttaaacagaaattaagaagattgaagaagacaggttaagagtaaaaaccttctggtattcagggttcatcaattcccatgctctcttcttcagaatgaattccttattattacttagattctcagcaacctgatgagcagcaataataaccatcaaaatcagaacaagtatacataaattgtttttgttcagaagctaaacaagaagacatagacaagaaaggcaaagcacaagaaaatagttttgactaggttatatggtcggagttcagtgaaaccaaacgcgtgatggacttacatgttaagaaaaatgctggttcgccacaatccaggaacaattgttgtggtttatagagactaaaaaccatagatgggattcaaattagataaacatccacaagaacaaaattataccatccttaagaaaggccgagagatgctagctacgataagcatcagttaatcattatttattttacctcagcatcactgatatcagataagtcctctgcaagatcacctttagactgtcgagaaggaaaaactcctgaaaaatcaaatcacatcaccatttaagtatttaccggaaaataaaagatatcatctgcataatctttaacaatataacactcatggagaggggtctttgcattacctttgttgccatatacttttaggtttctagccaataactttactgatttctccacctgaaattgatacaccaacgatcaaaaacattcaaaacatagcttctcaacaaaaaagagcagattgataccatcaaacaaagttcctcataagtaatggaatctatagttttgtcatcgagccaatatcaataccacaaagagaccacatatggtaaactaagtttcttattacattaccatgatcacaaagctctaaaatttaatctagaatcagatcaaaatccgaataaggagggagaaaattttaccattgttcacgaacccaatgcggcaaagatagatcgccggtgagaatctgggttttaaaataaaaaaatatcagaaacctagaacgcctgggtttgaattaacacgtgtcctagtcaaattggttataggctttgccacgtaagcacagacccttttgataataagatatttatatttgtaccctctttaatatcaaaatcttcgattttcccccaaaaagaaaatttccagaaaacgagcgtagtggtggtgaatcactgactcttctctctttcgctcgtcgctgcgaaagagcatttgttttcgtttacgcgtttctttttctcgttgagtgcatttgttctaggtaaagtaacaatcttttcttctgctatatccgaattgatgatttttttttttgggtcggtgaatttttgctacgcaaattttgttttcttttcctttccgagtcatggcatatgcattgtttcatgaatttttcaccattcgttcatcgaaatttacaatctttaccttttgtttgatgaaaattttcattgctcagacttattctttttttctctgttttgtttgaaaccatttccccttgtaatgcgtctgtttcaatgttgatgtctgttcttcagtatcttgttaaggtttacaacaatctaacagcattacaatttactctgttttttttttccagaatttgtgtattagtctaagaagatcattactgtttacataccacca

SEQ ID NO: 3746 - DNA, 3000 bp, Unknown
  misc_feature (1)..( 3000): cDNA_ID_1821700_gDNA_ID_1620660_Annot_ID_47948 3000 nt of promoter + ATG
actgctatatttttctgtcaccgattcttccttcgtcaatcacatgcgaaaaatgacagacaggtgagtttggttggatgtgaaaaaatggtcactaaggaagtatatgtcttttttcctctgttgttttgagtgaaactatgagtctattagctgtctggtgatttaaaccatcctggcttcttgagattcatctattgatatccatctatgtgtcatcttctttactagttctagtcaaagcgtattagttgattgatcagatgagtctacctgattttattcacgataaaactgtctgtgatagagatcaagctctctgtttcttcccgtttggatcgatgtgtatggttagtaaatttttgtgcttgttttgcgatgattgtattcttcttgaaaagtaagaacaactagactagtacttatgcctttgcctgttacatttgctctccagacgattgcaacagtctgcatgctcctagctgggaaggttgaggaaactccagtgacattagaagacgttattattgcctcatatgagagaatacacaagaaggatcttgctggtgctcagagaaaggttttttcttcttttcatactaccgatcctacaactctccttgtccatttctttgttgactagtttagtaggtcttgaaaagatctattgtttactttcttttgcatattaatgttatttcacttttgcaggaagtatatgaccaacagaaagagcttgtattaatcggagaggagcttgttctttctacattgaactttgatctctgtattagccacccttataaacctcttgtagaagcaattaagaaatatatggttgaagatgctaagacccaacttgcccaatttgcatggaattttgtcaacgattggtatgcttgattatgttacttgaaagctttttgaattatgatggttctctatacgccttgtgttttccttcttcatacaatcacaagtctattgcagtctgcgaacgacactctgcctgcagtatcagcctcatcacatagcggcaggtgctattctccttgctgctgagctgccaacagtggacttacaatcttacagagaggtcttgtgtcaagagtttgatatcacaccttgtcaattagaaggtatgtgttagcttttttcttttcttaaaaattattgactttgatgactgtagaccttgttgatgtggttaatttatcatttgcgttttcagatatccgaggccaaatacttgagctttatgagagaattcctacatctcaagaaagcaaagttgaaagtagtggtggtgtggccgtagtgcatcaacctatatctagagatatggcttccacagagaagtgtccaagttctgatattgaaggaggctcatcgcaagtcaatctaagccagagcgatgatcattcagtccacgatgggtctaggtctgaaggaattggagaggtgaactcagaaagtgaagctcaaaagaatctacaggaccattctgttggtaatataatggttgagaaaagtgatgatgttggggtcgtccaattgaagaaagacttgcaactgcatcaagaggaggttgagtctaaacaagagaaagataagaagtcatttgaaaaagatataacgaaaatagatttgatggatgagaaggatttgactgaaagtgaagtagaagatgagattaacaaaacaatgcagacaggaagacaaatctttatgaaagttgaggaccctgatgacaacatgactgtcgaacacagtgagattcgaaatgcaaacaactcaggtgttgatgatgaattggtggctgatacttgtctgataaatgacagtgatttgtaggaaatggtcgttgaagatggtgaaatagtggtttagatgtttagctcagaagctttcgaagagaaccagttttggtcctgagaagagctttttaactaggtgagttttggagagacaactattatatgttttctccaaaagacgaaggtttagtttcaagatttgtggtagatcatgactttgaatcttttctcactcttaagacttttaactacagtggaacgagagcaagttctccttgcatcgtcaatgtgttgtgtaatgtcctaaagttctcttaaacattgtggtatagtttcaagatttgtggtagatccttttcattcaagtaaattgggtttcatgacttcgaatccttgcttttctctgttttgaacaactgtttaactccaactaccaatggaattagattgaacttggatagagacataagataagtcccttgcaagatcaccatcaaacaaagatgctcatggcagtatccataccacaaaagacaccaaatttgttgaacatgcttaaatctttactgcacagattctgatgactatcttctctaatcacagccacacaattcaagaaaattcaaacgtttgttgtatacaatttgtttaggcctgaagtaattggagaggagaagtcagaaagtgaagctggagatataattgtagaggcaagaggagaagtcactgcactaataaatttttccttttttttccactaactaataaaaattccttttttcccgccataagcgtgacgtctattacacgcgtcactcgtctagtggtttatagaaatgtaaaaaaggaaatcaaatcttcgtttagtaaaaaaggaaaatcaacctataaattactgaattgtatttgtaaatcaataaagtaaattcaattttaccgtcttttaatttcttcctcttctctcgtctctctcacgcgacgtttctagggttcttctgcttatctggagattttgcataaactttctttaatgggtattgttttatccaccgaatcgttgctaatctgtttctgatttcgtgtgattattcgttctgtgaattcctgtttagattctgtaaacaaatccactgaacgcttttttttttgtcgtttccttctctgaagaaactctatcaacgac

SEQ ID NO: 3747 - DNA, 3000 bp, Unknown
  misc_feature (1)..( 3000): cDNA_ID_1821696_gDNA_ID_1620660_Annot_ID_47949 3000 nt of promoter + ATG
gtttctgatttcgtgtgattattcgttctgtgaattcctgtttagattctgtaaacaaatccactgaacgcttttttttttgtcgtttccttctctgaagaaactctatcaacgacatggaatctaacaaggaagaagcgaaaagagcattggatattgctgagaagaaactatcaaagaatgattacaacagagcgaaaagatatgctaagaaggctcatcgtatgtatccaaatctcgttggtttggaacaagtgttgataatgatcgatgtttatatctctgcaacaaacaagatcaacggagaagctgattggtacagagttctcggtgttgatcctttagctgatgatgaagctgtgaagaaacgttacaggaagttagctcttttgcttcatcctgacaaaaacaggtttactggtgctgaaggtgcgtttaagttgattctagaagcttgggatctattgtctgataaatctcagagaagttcttatgatcagaagaggaaatcgaatcaagttaaacagagaacgagtggaatgcagaagcctaagagaagttctacgcctaaaccaacagagtcagacaagccagcttcttcttatggacctacgcctccacctgagcctaggcctaagcgtaggcctagacctaatatacctgagcctgatattcctatgcctatgcctactaggcataaacctaagtctaagcctgatatttcattgacaacggtgaaagttggaaccttttggacggtttgcaatagatgcaagacgtattgtgagtttatgagggctagttgtcttaataagactgtaccttgtccaaactgcggtaagtatttcattgcaaccgtgataccttcagagttagtcaatgggaggctagtcatcagattgagtccttgtaatcagtcaacatggaaaaaagcaagtgatgatacttcttcaacttcagcaatggcaaagactgtacccgaaagagttaaaagatggtttgaccctatgcctgagatggattcttcaacgcaaaaaattggtacgttttggacagtgtgcagtagatgcaagacacattgtaagttggtgagggctaatcatcttaacaagaccttcccttgtcctaactgcagtcaggaatttgttgcggccgagatgattatagaggtaatcaatgggggtccagtcataaaattgagtccctctgtgcagtcaaatagcaaaaggacacgtgatgcttcttccacaacctcagcatctgataaggcacagaggactgcatatcaaaaagaagaagttttgaaaagagaaaagattgatcctgatgttgcgtctgctgctactggagaaaatgtaaaagtagcagagacccttttcaaggagccgatgacaacaggaaacgaaaactctactactgaagaaggaattgtaaaagaatcagagaccctttgcaaggagccgatgacaacaggaaatgaaaactctactactgaagaaggaaatgtaaaagaagcagagacctttttcgaggagccgatgacaacaggcaatgtaaaagaagtagagacccttttcgaggagccgatgacaacagacaatgaaaactctactcctgaagcagagaggcttttcaagaagccgatgtctacaggagacgaaaactctactcatgaagctcaaaggcttttcaagaagccgatgacaacaggaaatgcaaactctaatcttgaagcgcagagatgctttttgaggatatggcaacgggaaatgcaatctctactcttaaagtagagagaacacatgatagatgtgatataagaagtaagacatttggatgtagaagttaatatatatctgcttttgttttttggtatgcatcagtaatagttttttatttgatttttgaaacatgaatttacgacttaaccttttgattgaaatctatttctttttcattgaaatcattcatctcaatctgctgctaccgaatgcttctctgctcattctccacttatcataaaggctctttcttcttatgttcactctcataattcatataatgaactacacagaattgggattataacattttgttgaagttgaattccttgactgaatctgcacaaagaaaattaagcttgggtgagaagagatgaagaaaagataagaagtagttaaagctagaatattaagtgtgtgaatgtgtatcaagtggtgaaagacaaactatatgtatgtgcgtgaggacttgtaacaatctatatctatccttgtgatccaatattatcatttatcaatgtagaagattaaagtaaagtggttatcttgttttctatctccattaaacgaacaaaacaaagtgttagagatagagagaaacagagaactaacctctaaagagtaaaacagaggttaggatgtgagaatgtcaacacattttacttgagattttatagttagagaatgaagtggcttaattaccatattttagttgtgattgcatgtcttcacttgaaatagtaagttttaatactgaatgattacatacatattcaccgagctgataaagtttccttttttccatccatcaagaaaataagcgttacgtgtcagacacgccctagtggttataaaaaatctacattcaataaaaatcaaatcttctttcagtaaaagcaaaatcaacctataaataaattacttaatagttaataccaaaccattattttacgtctttcaatatcttcctcttctctcgtctgtctctcgcggcggctctagggttcttccgcttaactcgagattttgcaaacactttctttatgggtattgttatattcaccgaattgttgcatatctgtttctgattttgtgtaatatttcctggattttttttttgaaactctgttattttgtctgttgcttctttgattgtttatgtagaggaagaaactctttcaacgacatggactgtaataaggaagaagccaaaaaagca

SEQ ID NO: 3748 - DNA, 3000 bp, Unknown
  misc_feature (1)..( 3000): cDNA_ID_1821688_gDNA_ID_1620660_Annot_ID_47951 3000 nt of promoter + ATG
atgttgcttggttaagaagtgggtctccatcaaaaactgggcttttacacttattggtaagatgattttgctttgcacaagaatcccaaaagtttcttccttctatgggttttgtgtagtgtcggaatcttcaaatctattttgtaattcgtacgattactttgttgctttatatacagtaacttgagaaatctagggcttgttcttttgacttggtgatttgcatgtatggttttgcctataattaagatgttacttactagtttacacgagattcttctttttatgaattgtttttatccattcttcgattgttgtttgtgaaattgtgattgattatgtgtaattatgtagtggctttggatagagtaacttcagattcagagatctgtggctaaggacttgtttttctaacttagtgattttcatttacggttttgcttctgtttttcatccttcttaatcctttttcttttggctcctccaattggttttccatagagacaaggtgcaaaatcgtttgaaggattctttgttcaacaaagatatggaatgcaacaaggaggaagctataagagcaatggatattgctaagaggaaagttgcagagaatgattacaacggggctaagctttttgctaacaaggctcaggatttgtatccgaaacttgatggtttaagacaagtgatgatgttgatcgatgtgtatatctcagcaggaaatacaattagtggaggagaatctgattggtatggaattcttggtgttgatcctttggctgatgaggaagtagtgaagaaacagtataagaggctagctcttttgcttcatcctgacaagaacaattgtgaaggcgcagagggtgcgtttaagcttgtgttagctgcttggtgtttgttatctgataaggttaagagaattgcttatgatcagaagaggaagttgaacgaagttaaaccgaaaaggagtcgaaagcagaaacaacctccaaagaaaccaccaaatcagccgaaacaacaaccaaatcagcagaaacaaccaccagatcagcagaagcagccaccaaatcagcctagacagccaccaaaccagcagaagcaaccacaaaacgagccgaaacaaccaccaaaccagcctaaacaaccaccaaatcaagcaagtactaatggtagagctagaagcaaaaagcccacttccaaagtttctatcttttggacaatgtgcaacaaatgcgagacacaatatgagtatgtgagggtttattatcttaacaagaccgtactttgccgaaattgccgtgggaattttaaggcaactgagatagagaaaacaccaactgagaaggaaaaaacaccaactgagaaagaggaaacaccacaagcaacaaacaagaacacaaatggtgcttcgtcttcttgtgatagagattcttcactaaatgttaattttgattctagttttcgacgggattcttctttatcaagaatgagttactttaacagtggaaatgtggcaaatcaagcagaagaaagagggaaaagagaggtaagggagtcagaagaagaagctggtagaggaattgcaaactctgatttgaaagtagaagagagagtttttaagaagctgaggacagataactatgcagagtcaagtagtgaaatcaaggtgtgaagtaagctgaggacagataattagaagtttaacagtgaagtaggaactatgacatttagaagtttaacaatcaatgattttatgattatgatatttgaatattttgcatctagactaggatcttgtacagtggaaccaggttagttcttcttcctgtcatcttcaatgttgaatctgaaatgtcaaagctttattttatttttgttaacaatgtgtgctttaacaacgtgagtcaaattaatcaaagtgggttcacttaaattgttggaagaaattttacttccactaactaaatatttccttcttcggtcccttcattctcaaaagtttttacttttgtccccaaatattttaacggagaagatttagtctcctacttcgggtcatcatatatcacttgaaaatcgggatattcgttaaaaatcccccttttttttttttcttttcttgcttcctccctttttttttttttttgttctttcctttctcgcgtttcttctcctagggttagggttcgacgaacgcagctgttccacgcgtttagtttcaattctccatcgaagaagccataatccggtgcgtaatcatcgtttttgttatatgtttccgattaggtgtattattttccgtttgttttctcgggtttggtagtttcacgaacttttgcatctctcagatctattgtacgttttttccttcgtttgtgacggatttttctgtgaaaagagtttaaatttccatggagaattactcgattatctctaatttaactctttggcaatcaaatttttcgattttattgtttttttctggatgcgtgagcttagttatgaacaaggagggtcaactcgtttacatgattctctattcacagtattttcgtgggaaaggagcaattatgtttttgttttcatgattcatgtctttatgttgcatattttggccccttttactctcatttagactatgtggtgtttgttttgatgccattgttttgattttccatcaattagtaattttttcagtccgaatttcaattcttcgtcattgaccttgttgatgattcctgtgctttcagattcctaaagagcttacatttgttactcaactttaaagttttgacgctagagattactatcctcttgctgggaactcaacgtgaccaggtataaatctcagctcatagataagcaaagtagtttttttctacatctcttagatttgtaccctttttagctcacagtatcagttcaataaccaagctgatccctcttatgaacttacattcattggttctgtttttgctagactgtgtttgaaagatagca

SEQ ID NO: 3749 - DNA, 3000 bp, Unknown
  misc_feature (1)..( 3000): cDNA_ID_1808411_gDNA_ID_1620660_Annot_ID_47955 3000 nt of promoter + ATG
gaattttatatttgttttgattatttttcaaatgttgtttttttcaaaaccttttgacagtaaattacaatataaattattttcaaagatcttaatatgtcttatttaagtgaatttttaattataattataagtaaattattaaatatagattataacaatgaagttaaatcttattcactatatctttaaatatttttttctcttatttttttaatattttattcactatttgtaacaaaattataaaagccaaaattaccaaatttctgcaagaaaaaacaaaaaacaaatccttggctcctcctaaaatccacctaccttacccttttatatataagatacaaccaaaaacaagatgatttggtgctttcaatataaaagatataatatttcataattaacatattctcccttaggttttcctgcacactcgatttaaatcgtctaacaaggtcagaatccataatttatacaaccattttctgcttcctttgtttcctccctaattacatgttattaactattaagcatatccttaaaacaaaacccaaactgaattatctttgtcaatagttgtcttctctctcgattattcttaagataactactttggtagttttgtttttttaattactactgcaccctcttgcgcttcaagttacttggtaaaaaactctcttaactttggataatttctcgaagtctctgaagaaagaaccctttttttcttctctcataatcgtctctgtaacgtccttctccttcttcatcttctttgcgtttcttctgcagccttttgcggttcacgtgttgattgcttctgtctctactttttgtccgttttaaagtttaaacttattgttacaaaattggattttctctgatcaaacgataaaaacagagtcttttagtatcttcttcttgggtataacgaagatttttgtggtttcttctgatgtaattcacaaaaccatttgtataatccttgaaaagactttttgttcagaaatgaagtttcttactttgctctttcttttctatatttcagtaatgatgatgataaagcttgagagaagtgattagtctgtagaagaagaagagttaaaaccattcaccaaagaagaaattgagaactagagacagtcatggagatcaaatcttaccaaaatcaagcagagtattttgttgaacactatttattagcagatccatttcttccatatacttctgttcttgttggaatctgtctttgcaaattggtaagttttgcttctcttcacttacaattgcagaaacttcacttttttctgcattctgtttttaaacagtgtagcttatgttcttaggtatatgatcttacggagttattcagctcaattcatgtcaaatcatactcagctctcacaaaaataaagagaattgaatggaacaacaggtatgtataggttccttgtttcagcctttatatgttatgctctagtctcttatcactttggcttgacaggggaatttctacagtccatgcgatctttatctcattcatggcattatactttgcgttcttctctgatttgttttctgaccaaagaagccttgaaacccttacggtgtttcgtaactcgcctctgtctacctttggtttaggagtaagttttgatctttcttcattttatctcacaagtcctactcatgagcattgatcaacttatatggtactttgttgtgatgtgttttttgcataggtatcagttggttactttcttgcggatcttggaatgatcttttggttatacccttctttaggaggatcagaatatgtaagttagacacatgaaagcttatgtggtcttcaattacttgacaatcttgtgttttttgtttcagatattacatcactgcttatctggaacagcagtagcgtattctttgttctctggagaggctcagctttacacatacatggttttaatctctgaagtgactacaccagagatcaatcttagatggtaccttgacattgctggtttgaaacgatctaaagcttatcttgttaatggagttgctatattctttgcttggttggtgagtttcttaaaacctttgtttttcgttgtaaatgtctgaaaacttgatctccttttttatagcaatgatgttttgtttgcagacagcaagaattcttctgttcatctacatgttttaccatgtctacacacattatgatcaggtaatcaagatttcggtttgattatctctaaaccaaacggtctagcctttaggaaaaataggaattactctgttttttttttttttttgctgttgtattggttaggtttagagataatgaattgatgatcaatggatttttcggcaggtgatagagatgcatacattcggttatctactggtatttgttgtaccgatttcattgagtgtcatgaacttgatctggtttggtaagatagtgaagggattgaagaaaactcttgagaaaagacagtgaagaaagagttgtgtttttttttttatgtaaatataaaactcttatgaagaatcttacaagtttataagcaacaaagatatggtttgtttctaacttttagcttatacactaattatgttcaaaatctcattcccattattcccacaacagtccctatgcatgctgaatacttaaatccatgtacgaaatcaatagaggacttaacccaaaaagacttgggcctaaatctacattgggccaacgattatattcgtagttttttcgtgtcatattaacttgccgtgtaatatttgtttacttgtattttttgttagttctagaaagaaagcaacattaattgaggaggaggagattggttgttgttgacgacgcgtttccgctcactaattttttttaacctttttgtgtctccgtcgtcttttgatcttcaatctcagttttgagctgaagattatcgtatcgacctgcgattctcttcagatcgataatccatg

SEQ ID NO: 3750 - DNA, 3000 bp, Unknown
  misc_feature (1)..( 3000): cDNA_ID_1027071_gDNA_ID_1620662_Annot_ID_47989 3000 nt of promoter + ATG
gttatattatattattcacaaatatcaatttaatatatattttaaaaataatgtacttatagaaaaacttgtacttatagccaaaatagttaaaaattatattttttaggctgtgagaaaaaataagaaaagtacaacatgattgtagttttttagtgtctttataaatttcctacaccccaaccaatcaatcatactcggtgtcttgaagaaaacataaaaaatatttataggaagacatgtaactgaagatgcgtgttttaagtcataattttttttttttttgaaagacacccaacaattcactaatggaggttgtctaaaaagaataaccaagaaaatggtctctgaacccatctctaaaactattttataatgtgtatatgtaacagtaagaagtgaaaaaaaaaatccatatatcaattaaggtgttaaaaaaaaaagtccatatatcaatcacttttctaacatcgtcgatcattgtgacgaaaatcgcttacgtctgtaccgtattaacgtaatgccatcaaacgaaaaagtttgctcactcactccggtttagatctttgttaacataagcaaacttttcagagagtgaactaatagattcacgaaacgacaccgtaattagtatcgaaaacttgactgacatcagcctaagaaaaatatcgcaaattgttataaaatattaaacttaagaagaaaaatgaaaatataatagagtttacttaaaaaaaaataatgggttagctgattttatacccataaactaattgcattctcagctttttcccccacactttttggctcttaaatttctaccataaactttgataattctttaaattacaacatgtactttcggattcatccttaaacatacatttccaattgaaccggtcattaaaccaggattaaccacaaatccgcgtttactgtaccacgatgcgatttacccgattaatcacctctatccgttaagaaaagggttggctgattttatagccataaactaattgcattctctgctttccccctcacactttttgctcctgaaatttccaccataaacttcgataattcttaaaattgcaacatatactttcagattcatccttaaaaatatgtttccaattgatttagattgtcattggaacaatcttcaacctcttttgtctattttggatgatgtattttcggaagttgattctctttaagatgatattatttaggttgactaattgatttggagtcttatctatccttatgattaggagttttatctagttcgatttgtcattttccttaccaattaacacaacacataacatatatagatagattcacattataaaacaaagagaaaacgatgtcgttttcttaacgggtgtgggattagtcgggtaaatcacaatagcggtacactaaacgcggatttatggttaatctcggtttaacaatctaaatcaattggaaacatatttttaaggatgaatctgaaagtacatgttgcaattttaagaattatcgaagtttatggtggaaatttcaggagcaaaaagtatgggtgaaaagcagagaatgcaattagtttatggctataaaatcagccaacctttttcttaacggatatggtgattaatcgggtaaatcgcaatcgtggtacagtaaacgcggatttgtggttaattccggtttaaagaccggttcaattggaaatgtatgtttaaggatgaatccgaaagtacatgttgtaatttaaagaattatcaaagtttatggtgaaaaattaagagccaaaaagtgtggggaaaaagctgagaatgcaattagtttatgggtataaaatcagccaacccaaaaataatagaattaacaagaaagtaagagacttaaggaaagagtaatagataaaaataagcattatccatattttatagatagaaatgagcgatggattaccaccacgcttatacgattgcgataattacatctatacttatccagttttacagaaaaaataatagataaaaataagcattatccatattttatagatagaaatgagcgatggattaccagcacgcgtatacgattgcgataatcacatccatacttatcgagttttaaggaaaaagtaatagataaaaataagcattatccatattttatagatagaaatgagcgatggattaccaccacgcttatacgattgcgataatcacatccatacttatctagttttaaggaaaaaataatagataaagataagcattatccatatttaatagatagaaatgagcgatggattaccaccacgcttatacgattgcgataatcacatccatacttatctagttataaggaaaaaataatagataaagataagcattatccatattcaatagatagaaatgagcgatgaattaccaccacgtttatacgattgcgataatcacatccatatttatctagttttaaggaaaaaataatagataaagataaacattatccatattttatagatagaaatgagcgatggattaccaccacgcttatacgattgcgataattacatctatacttatccagttttacagaaaatataatagataaaaataagcattatccatattttatagatagaaatgagcgatgaattaccaccacgtttatacgattgcgataatcacatccatacttatcgaattttaaggagaaaataatagataaaaataaacattatccatattttatagataaaaatgagcgatggattaccaccacgcttatacgattgcgataattacatccatatttattcaattttaaagaaaatataatagataaacataagcattatccatttttataaatagaaatgagcgatggattaccaccacgcttatacgattgcgataatttcatctatacttatcgggtttataacaccgataatccgatttggtcaaaatccggcggagaaaaaccctaaaaatg

SEQ ID NO: 3751 - DNA, 3000 bp, Unknown
  misc_feature (1)..( 3000): cDNA_ID_3071783_gDNA_ID_1620662_Annot_ID_163843 3000 nt of promoter + ATG
aattaagcacgataacatattgcaccaattggctaaatctgataattaaaactgacttcaagcaaactccaaaaccaatgaccagaaaagtctctcctcaatctgaatgagcttaaactccttcctttatgtcaaacctaccaccccattaaagtttaactcctcctccaaatatcctccttaaactcaactagatggttttgactcgctattttgagccagggttatacagtcatcaatctgatgagcatccatcatccaggaagggaattactatgtttgaaacacgggtttgaaacacaagtatacaaacccgtgtttccttccatagacacaccctatgataagcagcttagaagcttctcctagtagcagaaataatcgaagaccataaaaagagcccatgttaacaaacagatcagagaattatctgtagcaatctagaccttgattgattcgtattagtcatccttccaccattataaggtctaccacgcggagtagcagaagcggctttacgagcaacggttgttgttacaggaaactggtttccttggaaattagacctcttcttagcaaaagcaccctgaaaatatgatataaatcacaacaccacaaaagaaaaaatcttctaagtgacaggaaaatgaagcttagacaacaaattcaccgagaacacaacaacactaacctgtctaacatcagaccgagagtccatataacgctgtgctttcaccgcactattcttcgcagcaccactaaatttctcctttttattctgctcaaacacaatatgccaaatgttcaataaagaatcaaagagagacataaaaatgtaagctttaacaaaccaagttactaaccaatactctctgtttcttgcccttattcacattggtattgctcttttccatcttgataatctcatctatacccacatacaaatgatcatgaagctataaactaaacaaaggatacatctttatatgagtaaataaattaaacataaacacacctaaagacatgtccattttcttctcagtgagagcaacagtctccgtagtaatcggtttctcagtcgccatctacatagaagtggacacaatttaaaccaaagatttcacaaaatcaaatacataaaccctaaaaatcattagttaaggttcaacgaattttgagtttattgaacttatgagaagcaaggagatacaaaagagataaagcaaaccctagtttttgaagattgatctgattcaagaatcgatcaaacaaaaccctcaattaaattgactcgtgtgaagaatggaggagaagctttaagagatgaaatcgtttaccgattttagaaagtcgattgtctcactgagacaaaaaaagagaggctttttatttttaatccgataacgagttaaaccaaagtgaactgagtcaaaacgtttccgatcatgtatacgtggcacattttcattggaagagatgattggttgttttgcatttttttttttcttgttctctcccttgaagttgaagagtttaacttcgctaagaggaacagagatggacttgagtttaatatgttctctgtttctaacaaatgtttttttttttgagttttcacatacaataaaaaatattaaaagttaattataatttataaatgcattattatttgtaatttacgatttaccattttctataaccttaattaatatagtatacaattatttttcttgaaatttataattcatcaataataactaataactattgcattggaaccaatttttttcctaaatatattatttaggaatagaggagtagttgtttttggcaaaatggtagattattataaatctaaagtggtagcagttaaatttgaaaaagatggatggcatagtaactaaaaattatttaccacaataccttaaaaaactatgaagaattgattaattaactaacagactaattaaaacccatatttgtcctttgaaattataattttaaataattttacgaaacctatttaagattacataatattttttttataaacaataacaccttttaaaattattaaaacttattcactatccagtttcctagtttttatatattttgaagcaataatgttgtgcttaaaatatatgacatcatagtgacaaaagagtttatttgtgaaatctcaatcactcattttgaaatgccattaatccgtttagtttccatattattaccaaagcctttcatgtaattggaaacttttgtgtttaagacttaatcttgtgttgcaggagccaaaagaaaaagaaaaaaacaaaaacaaagaaattgtaaagaagtgtaactagaaaaatcgatcactcatcttcaaatgtcattatccatcaagttgtcatattattgctagacagaagtggtcgtctagacttagttgacctgaaaaaagaatagtcaaagtcttttatatgtggacctgaaattagactttgtagtttgtacgtaagtttgtgttgctagagcctatatgagaaaaaaaaaacagtggatattggtgattggtttaatctggttaactccggttatctagatactggtttaatatcatttatcttgtgtatatataaactaaactttagtttattttgttgatgaacgttgtaacaaacacttaattctgttaataaagattcagtttaatctccgatcttttctcttcttttccgttttaccggaacttcgccggtgttaatatggtatcagagcatatcatttgagcttccgcatatcatcggagatgagtctttcattgaatcatctttctcttatgagagtttttcgattcctacaatcgtttgttgcaatttgcaatttcttcgtcagctatctaattttggttctgattcttcttctttccttcgattgaccttttgtggtgacgaatctcactttcttttcatttcgtctcactttctttgatttttctttaacaatttgttaaga

SEQ ID NO: 3752 - DNA, 3000 bp, Unknown
  misc_feature (1)..( 3000): cDNA_ID_3071787_gDNA_ID_1620662_Annot_ID_163837 3000 nt of promoter + ATG
gacaagagccggtacatctgattccatcttcggttttgacggtgaacttaagctcctcgagagatttcaaacaagctcatgggattcatcagtggtggagggaagataacaagtttgagactaaagtttaccagtacaaatgatttgtatcagtttttttttaaatggatttaaccggtattaggcttttactttccggtttagacggttcaatgtatcgcaatcataaataagtgtctctctatagtcggtatatataaaccggaaataggcgtctacgttctaatttagccggttcaatgtgttgtaatcttatatatagtctcttgatcaataagacgacgacgtttcactttatctctgtaaaacctcgcagagcatctgcacattttcccgcgcactttctcaatgtcgatcaagcttctcgttcttgttttctctcttctgataatcttcacgagacccaaattgatcgccgatcatcacttaactacaagaatctcgccgatttatccttcgatttctacgtttcagccttcgattccgccgtttttacctccatcgccgtcgcgcagagcacaatctccgacggtgaagccgtctttgccatttgtaccggcgttgttcgttttcggagattcctcagtcgatagcggaaccaataactttcttggaaccttagcgagagcagatcggcttccctacggtcgcgatttcgatacgcatcaaccaacgggaaggttttgcaatggaagaatcccagttgattatctaggttacaattcttccccagtttctggatattgattatagtcccagttgattcttagaagtgtaagcgaaaatgttgacttcttgtgttcgattctttatacaattgagaggaacaaattcattgaggaaatgttgaatcattcgttttttgttgtccattgaaaatcttgtgaacagctgatcgtttaggcttaccattcgttcctagctatcttggacaaactgggactgttgaagacatgtttcaaggagtaaactatgcatcagctggtgctggaatcatcttatcaagtggatctgaattggtaatactcagtttttcagagtcttttgagttcattttctgtataccatctttcagctttttcaatcctgtgggggaatttttgttgttgcagggccagcgggtttcatttgcgatgcaagttgagcagtttgttgatacgtttcagcagatgatactgagtattggggagaaagcttcggaacgtttagtgtcaaactcggttttctacatatcgattggagtgaatgattacatacatttctacatcagaaacatctccaatgtgcagaatctctatactccatggaattttaatcagttcttggcttctaatatgagacaggagctcaaggttagacctctaatcaatctttatacgttttctcttggtaaagagtttataggggacagacaagtatgattctgagttagtatagttagtataagtgagacatcttgattagtacacaaaacgttgcctttatgaagatcaaatcacaacccttttttctgttttggatctctggtttgtatagttgtagagagcataaagctcattaagctgcatattgatagcctaaacatgattgagttatagtagttgcctcttcatttagctgcatattgatggcctaataagagaagtattatgtttgtttcacagaccttgtacaatgtcaaggtgaggaggatggtggtgatgggactgccacctattggctgtgcaccatactacatgtggaaatacagaagccagaacggagaatgtgcagaagaagtgaacagcatgatcatggaatccaactttgtcatgagatacactgtagataaactcaaccgtgagcttccaggggcatccattatctactgtgacgtgttccaaagcgctatggacattctcaggaaccaccaacactacggtaagcaccacttctatgtcaattctcaattcacaaaaagactgtgactggtaacaagtaacaacatagcattataatcccatagcagtatcttggaactcaaacatagtcttctgagagtgatatatagagttttctgatcatcttcaagtgtgaaagtaacttgtcaagagtcttgttgaatcttagttgtgtgtgtattgtggtgtggacaggttttaatgagacgacagatgcgtgttgtgggctagggaggtacaaaggatggcttccatgcatctcgccggagatggcttgctctgacgcctccggtcacctctggtgggaccagtttcatcctacagacgccgttaacgccattctagccgacaatgtatggaatggtcgccacgtggacatgtgttaccctactaacctagaaactatgcttcattcttaaatcagctgagaggataaaaatgtacataaaaaacatagtaaattgtaaatgaactttgcaattttgatgtttggtccatggtacataaaggaaaactataggtcttttatgctaaagaaagaaagtacggggttagagaagaaaaaggataaatgttttacaaagttgggctcaatgtatttacgtaaatggcccacatgaaacagaaagttaagagattcgacccataaaaagcacgtgtggtttataaatggaaaatttcatcttcagggagacgaagacataatttcaattcttttctcatcaaagtttctaaaacaaaaatcttggcctaaagaggtgacgtcatctccaccctctcgtaatttttccaattttgcccttggaagctgcttcgccttttttttcaatttcatcaagggttctgagatttttttctctcagcttcttcgtaggtttttgatccgaggtaggtaggctttgggtttacaaaaatttcgcctcgattttttgttctcacgcgtcgttcttgttacaggaaatcgatttcatctctgatcatctttgtgacgaaggaaatg

SEQ ID NO: 3753 - DNA, 3000 bp, Unknown
  misc_feature (1)..( 3000): cDNA_ID_3071787_gDNA_ID_1620662_Annot_ID_163836 3000 nt of promoter + ATG
cccaagaaatgataatctcaagcctcttttggcaccgaaagaaatgggaaactcacaaaacaatggaaaacccacagaagccagcaagaccttaccaaaaattagtgctgccaaggggagcagtgtaaaagctgctggatcaaaactgaactcaggaaacaaacagtcggatgggcaacccaatcttacatcaagtaactctaaggaaatggttgaaaatcctgacgatctcaagaaagacaaaaggaaatgggcattgcaggttcttgcaagaaagaaagctttagctggcaacaactcaacccaagacaaagaaggctctcccgagcttaaagggaattatccattgttggtgtgtaattctcatcacttactttgtttcttttaaaaattctggttttttgagatgtcattcgtttgtttctaccatttctatcaggctcaacttccagctgatatgagaccaagccttgcaactagtcgccataataaagttcctgtggcagttaggcaggtacgtggatagctgataatcaagagaaagactattacgtagaattaactcctttaggtagaaatccccaagccgtgcttttattacatttacatacgttaaactgataatacagaaaattgaggctaatctgttattgattttcctgcaaaaacattattaacatcacaacttgtgcaatagctttacttgtttttgttcctaagcaaattgctgtttctgcagacacaattatatcgcctgacagaacatttattaaagaaagaaaaccttctgactattcgaagaagtgcagcgacagaactagccgttgctgatgctataaatatcgagaaggcgattgctgacaaatcaagtagcaaagttgtgtatctgaatctatgctcacaagaaatactgcatcattcagagagcaaaacgatggataatgctgtagaaccaaattcgtcatcaccaatggctgatagtgagtcagaacgtataagtagtaaagattcagataatccagccgtccttgaagcgctcagagcagcaggtcttgctgattcaccaccaaacagcccgacccgttcagtagaagttcttccagagaaaggagacagttccttggacaagaccagggagacaggcccatataatgtatttgacatggattctgttcctgatacagacatctttggggattttgaatatgaattggatgaagaagactatttcggtgctacaatggctaaaaaagcttcagtaatgcagccggatgaaagcttgactaaggtgaaggtagttttatccactgttcaacctggaaagtctttgaatccatccgaagtcgtagaggatgaagagacaacaactgaaaacctgaacgagaccacaaatggaaaagaagatggaaagagctttgttcctatggagcttgtacctgaggctgagggagaaggagaaggagaaggagaaggagaaggagaaggagaagggggaggtgagatcctttctgtagctgaatgtgaagaactatacggacctggtacagagaaactagttgaaagacctctcatcgaaggatttgctgagaatggtgttaaagctaaagcccctgattcagagtgcgagagcaacacacagagagagttcatcgcttcaaactttgaaatcacttgcattcaagagaaaaaacttcccagaagcattcaaaagtgcaaaccaagcgaaaagccgtctaaagaggaaaaaggcaaagctgatggctttggtaactccatcaccaagaaggtactaaaaactgtaaaagtctctgtcatgtcaaaattctcattccctttgtcttcactcttcaatggttttattgttttcgtcaggtggaagcatacatcaaagaacatattagaccactgtgcaagagcggagtgataaacgtggaacaatacagatgggcagtgactaaaaccacagaaaaagtgatgaagtatcatagcaaagccaagagtgctaacttcttgatcaaagaaggagacaagatcaagaaacttgccgagcaatacgtcgaaaccgcttcctctggagctcaccacaaggataagtgcaagtgagaaaatcagatggcgtaaataagaagatgaagtaacaagtagttcagtacaaaaacgtaaatagattttaactagtatctctcttttgtcttctccacgggttttggaaactgagtcttcttctcttagggcgagagaagcaattcttgttgtaccccgaaccagatagacctaaactgtgtctgaaactgagatttacttggtcgctgacaggtttttgaaaaaatatttagagatgaaaatgatatatttattattagttacatactttttcgtcactgtgattattaaactgaactagtaaacttaaaagctaaatgtaaaagaagatgatgatagtttgtttgggtcaaaggctcaaagcaatgaaattcttaaaatgcctattgggcctaacctgacgcatttctttatatttttgaaaattgttaaacgacgacggatctgttttctatagtgactctgacgcacttggataaacatacatgtgcaatgactataatacccttgaaacttgaggctatttcctacagtgacacattttgataaacatttgcgatggtcagttacggagttggagacaaaagagcttctgaatctctctctcttctgcgtctcgccaaatttatttcccgattcaatttgtagggtttctgcagaagaaggaaaccaccattaaaccctaagtacgtcacctttcaagctccttcttctgtaggttttttctgttcttctgattcatgtttacaaagttttttttatgtctcttctaacttcttctccttctcgccgcgtaatcagtccttattgttcttcataatcgcagtaccaatcgcaatcgttttcttcctctctcgatctgttcctcggacgagaaaactggacaacaaacctatg

SEQ ID NO: 3754 - DNA, 3000 bp, Unknown; identical to SEQ ID NO: 3750
  misc_feature (1)..( 3000): cDNA_ID_1027071_gDNA_ID_1620662_Annot_ID_163834 3000 nt of promoter + ATG

SEQ ID NO: 3755 - DNA, 3000 bp, Unknown
  misc_feature (1)..( 3000): cDNA_ID_2144115_gDNA_ID_1620662_Annot_ID_163825 3000 nt of promoter + ATG
ttttccagcacatcaataaaaattaagccaatcaaaacaaaacaaataatacacctcattttctttttttctttttttttttcgtttttaatacacctattttcaattcgttcatattattgtatgttactagatatttgtcgacgtcttgttaaatttcgtcaattttctacctaagtaacgaaattttttcacttttttaataatgtgatatattatcttcttcaaaaattatatgatccattttaagctgaaagcttttaattttcacatcatttaaatcatttgcggcaaaagcaaacaacttgaaatcattttatcccaacttaacatgacgagcaacaaaatttaaaaatattaagaaaaagaataaaaaatgaggaagcacacaatattgtaaagtatggttattggaatacacaaatctttgagtctagcaaattctccatctttctttatatgaaacgttaaatttattaactaaaataaagatgattatgtacgagtgattaagaatattgtaaaatgaacagtagtcatcgagttcttcatgctagaaaccattttcggagaaactttcttaacttggagaaatcttgatactgaaaaaaatctattcgttgacgaatcacacaagtacggagttgtttctagaaatagatgaaaaataaattgtaaatgacaattttaggattactcgaacatggattagacccatgtttttgtttgtttctctcctgccatataaaataaattgttgtttaaaaaactaaacgaagtaaaatttgatcatgtgtatatgattggatatgacaactttttttttgtgtgaatataactaatttacggtatcatataaattagtttaaatggttaagaaagaggatcttgagatagtaataccatagaaaaaacaggtaaaagaaattagaattgagttgttataattaccaaataaataagctttctagagatgattaaattttaccaaatagatgttaaaattatttcggcaaaatataatatagaatgcatagactaattaaatttactagaatattttttggttaataattcataaatataatataaaataatgttaaaataatcaaacaatagtaattttttagtatttgtggaaaactcaaaacgttaacaaataagtatataagaaaaaattagtttggccttttcgagagagaagcgttagggttgttagacttccggatgaagtattattgacatagacttttggaaggaactattattaacatagactttgtggagaaaataatattaacatagactttgtggaggaagtattattttatgactaaaaatcattctgttggatagttctttgactaattattctcttaataatttgaatcttaaccgtaggatgtaattgcattttacacgctaagtgtctaaagtcttttggacaaaggcgatatcccaaatgtgagaaatctatttaagaagaagaagacttccttcattatttctcacatcaaacaaaatctttgaaacatttcaatcttatatatatggctccattgttgcatcaggtttctaattatggttatggtaagtgtgtaaccgtacgcttctgtgatggcaagacgtatgatgccaaggatggagagtctagggcaattaatagagatcttaatgttggtgctgttaagatttatagagactctaaagatgaagatcaagcgtatgtgctgaattacttcccttataatctcgagcttaatgataatcgtggtaagaataaaggtcttcaaggttatcgtgttcttatatggaagcagtacggcactattaatctagatgtattttacgatgaaatgaagatttggtgcaaaactaatgatttagggatatatacttccgatggagaactgaaatattataagtctgttattgcacgtcatcgtgaggaaggaggtatcagcgttataggttttgaaacagccgaaggagcgactactgcagctgctaaaaaggaagaagatgaaaatgaagaagcatcggcgaaggtgaaagaagcaaatgaagaagaatcgactaatgcataagacggcccaacccaaaataccatcaagactaagtcacatttgactaagtatctcgtttttccttttaataaagctttgcaaataacattgtggatttgtgtttttctctttgaggacagaaaccatgtttcctttctattgctttgtgcttccaagtttgtaggagttgatactccaatattatacattgtgaacaaaacaaaaaaaatgaataagtatgtgtttgctttttgaaagcgttgttcttgtgttcgtattgcatcacttttggttttaatccaaaatttattattaaattacgtacatttgattctttgtttttttttgtctcaatatatagttttgatacgtgttaccaaataaattgcttatctcaaaacatttcttcttcaacccgatccaacaaaccctatttgcgaagtattcatacatagctagaatacactagcgtgaattgtcattgtgagttgatttttaaatctatgcctcttgagttttgaatctgtcatgaggcccactggtagggccggtcggggtgttacaagttgttaatagagagaagacatgaggcccactggtagggccagtcggggtgttacaagtggtatcagagccaaacccaaatgagtgtggagtcaagaaggttcgcaccattgggggttacggtcttggtgtgcaacgaggacgttgcgatctgttagtggaggtgaattgtaacaccccgatttcaggaatatggtggtgcatgcagagaggtttaaaagaaatgatttgaccacctacgtgtgcacttatcttttcggtcaaacgtcctaagagaactccacagttaaacatgcttgggctggagtagtttcaggatggatgatattcccagaagtcattgtcggaaccatgcgagtgacaaagcatg

SEQ ID NO: 3756 - DNA, 3000 bp, Unknown
  misc_feature (1)..( 3000): cDNA_ID_1821821_gDNA_ID_1620662_Annot_ID_47990 3000 nt of promoter + ATG
actcaaacatagtcttctgagagtgatatatagagttttctgatcatcttcaagtgtgaaagtaacttgtcaagagtcttgttgaatcttagttgtgtgtgtattgtggtgtggacaggttttaatgagacgacagatgcgtgttgtgggctagggaggtacaaaggatggcttccatgcatctcgccggagatggcttgctctgacgcctccggtcacctctggtgggaccagtttcatcctacagacgccgttaacgccattctagccgacaatgtatggaatggtcgccacgtggacatgtgttaccctactaacctagaaactatgcttcattcttaaatcagctgagaggataaaaatgtacataaaaaacatagtaaattgtaaatgaactttgcaattttgatgtttggtccatggtacataaaggaaaactataggtcttttatgctaaagaaagaaagtacggggttagagaagaaaaaggataaatgttttacaaagttgggctcaatgtatttacgtaaatggcccacatgaaacagaaagttaagagattcgacccataaaaagcacgtgtggtttataaatggaaaatttcatcttcagggagacgaagacataatttcaattcttttctcatcaaagtttctaaaacaaaaatcttggcctaaagaggtgacgtcatctccaccctctcgtaatttttccaattttgcccttggaagctgcttcgccttttttttcaatttcatcaagggttctgagatttttttctctcagcttcttcgtaggtttttgatccgaggtaggtaggctttgggtttacaaaaatttcgcctcgattttttgttctcacgcgtcgttcttgttacaggaaatcgatttcatctctgatcatctttgtgacgaaggaaatggagctcgattttgacgctagtaacttggttgaagatgaagctgttgaagttgaacataatgttagtgtaaaattgtactttctgggctatttttcttttggttgaactaatcatgggtttacctttttcatttcgagcctggagctttaaaacttgtaatttccggtgaaaatggttgtttatgtagctttatagttagaatcatgaacataagttgctatgtcaaccatttcatttagtttgtgtcacgtttcctggaacatatgtggtttttaatctcaaggatgagattttaataaactgtgtttgtgcattattgcttctcagtgttgattttaatttctttgaacagggtatgactgaaattgaaggggaaagatgtggaatttgcatggatataattattgatagaggcgttcttgattgctgtcagcactggtaaaagcttgttttcgcttttcattgtctttaaatattgcaaagttgctatgggtgtttgttaaggagcagtctggtaatttgtgtctatgtctgttaaatttcaggttctgctttgaatgcattgataattggtctacgattatgaacctctgccctctatgtcagagagagtttcagttgattacatgtgtccctgtaagatgtctcatatttgttttttgttttgttttatctgaacatttgtcatgatttttgtaagtagaacttttgagtttaggaataatgagtttttgttttgattatgaaggtgtttgattcaggtgaaagcagcaaggtcgatgaggatttggtatcagggtactatttttttccttgtgtttgttgttgtgataaagtttgcttgcctgaactatctgagcggtctctttgtcctcaattatttgtggcctataatgataaatttatattaagtggcatagtataatcaagtgatttaaaatgtgatagatgtcatgtgtaccatatgtttctgtatttgctaaaaactgttgtgatctgctgacgttaaactaagcaatacatgcagagatgaagattgctgcattgaggaggagactgatgtcgtctcttctccgtcacactatattgacgatacacactatattgatgaaaatgtaagtatatcatatatgggttttcctagttactacaaagtacattaagctttcctaatcattttgtaggcagttgtctgtttagatggagatctttgcaagattcgtaacactttcagttacattgaaggggattcaaaccttgatacatcaattgcttgtgattcgtgtgatatgtggtaactattattacctgttgactttatctatggtttttttttttgtacattgtcgtgattgttgtttttacctcttttttctatcactaattcattgctggtgaacttctggagcttgccttgttgttacagtgccataatgtttgtgtctaccatgcttttagatggattttgtgtctaaagcttagttgtgctaccggtttctaaatgctatcactatcagtctatcacatgaaggaattttgtaatatgaaatgtaaatggcaaagatactagccttttcaatcttttatatgtacttgcttttgtgtacttcgtattgttttagattgttcatcattacagcattctttcaaattagcttctgactgttgctttcaactgtgctaacaggtatcatgctatttgtgtgggttttgacgtggaaaatgcatctgaggatacatgggtatgtccgaggtaggtttcgttggcgtattgactacctatgattgcttaatccatggtttgatcaacttcagcaccgttgtttcattatattgtttctttaattattagcctattaggcaaaaatatttttatattagagtttccataaaattattttaatctttatctagtaaagacactttgtaccaattctaagtgaaacctaatgcctatacatattattcttcctttctctatcttatttagccatcttgtcatagtttccctccttggttttgtgtccacagatgtctctctaatgaaaaaccacatgaacccgatacctcgccaatg

SEQ ID NO: 3757 - DNA, 3000 bp, Unknown
  misc_feature (1)..( 3000): cDNA_ID_1807522_gDNA_ID_1620662_Annot_ID_47992 3000 nt of promoter + ATG
atctcgataattcctccgccgtctctcttcaacgtgtgaagaaactcgcggctgaacacggagaacgcctctccttccaccaggttcggtgaaatttcgctttcttagggctaggaaacgtgtgattgaaggatttgtgtttgtgtagttgatgatttcaacgaatttgggattatgatttgacttgttaatcattgatttgactacgaggctcttttttttgtgtttatttatttatttaattttgggcataaattctcgtaataaaatatcagtttttctaaaagattgtttgattccaaaatcatgggtatctttctttggtattattgctttgattggtaactactacaatggtactgggtatttaccgttttaacaatcataaaaacgataccaaaagcgttatttaccgttattttgtaccattttaactattcgcattttcggcttaaaaacttgtatagcgttgtgtcaatgtaattttatatgttaatgttaattattacaatttctttttctctaagttttataacccaaaaataattatttatgtattaaatattagtttaggcctaatgagtaccatgtgaaagagtaattgttctactttctatttttgtatttcatataaagtttaatcttgttcttctgaattagtttgtattatgtttacttacggtcaaaagaatctgttagttactgtcaaaagttaaaacttgattgttctgtcttaatttgcaggtggatcttcgagacaggtctgctcttgagaagatattctcagaaacaaagtatgattgagaaaaaaacaaacattcttttagcttcttcactttatcactaacaatgagtgataatgcatattattgggtttattctttattgattgatgaacgtggaattattattattttacaggtttgatgcagtgatacattttgctggacttaaagcagttggtgagagtgtagagaagcctttgctttattataataataatcttgttggtactattactcttttggaagttatggctcaacatggctgcaaaaatgtatgtataatttgccactacacaacaagttcgaatccatttttactttgcttgatcaattctcatgattagctacttttactctgtttccagcttgtgttttcatcatcagcaactgtgtatggctctccaaaagaagttccttgtacagaggagtttccaatttctgctttgaacccatatggacgaacaaaggttgttttcttgacaaaacccacttgagtattgtggttaattatgaagtgtgaatctgacttattatggatgtttttgtagctattcattgaggaaatctgccgcgatgtatacggttctgacccggaatggaagattatattgcttaggtatttcaatcctgttggtgcacatcctagtggtgacattggtgaagaccctcgtggtattccaaacaatctcatgccctttgtacaacaagtggctgttggtaggagacctcatctcactgtctttggaaatgattacaatacaaaagatggaacaggggtatgtacttgtcttttatgttttcataaaacaagaagaggttttcaacattttgatctcatgttttgttttaggttcgagattacattcatgttattgatttagctgatggacacatagcggctctacgtaagctagaagattgcaagatcggtatattatgatttccattcgtttctcttatctactacaatcattctcaagtctcttaactttgtttgtgtgttgtttatattcaggttgtgaagtgtacaatctcggaacaggaaatggaacatcagttcttgaaatggttgatgcttttgaaaaagcatccggaaaggtaaaaagtgacactttctttcatctttagatacttggattctaagtcatgttttgttaaacctttgaactcttttgtggatcagaaaatccctctggtgatcgcgggacgtcgaccgggagatgctgaagttgtatacgcctcgacggaaagagcagaaagtgaattgaattggaagtaagttcatacatacataaagctataactttgaagatattacttgcacaaaattgtatgttagacactaaaaagttgggaatatgtaaatgagataagtctaaatttgggttggtaacaaatgcagggccaaatatgggattgaggagatgtgtagagatttgtggaactgggctagtaataatccttatggatatgattcctcttctgaagacaactctcattaacttttcttaatcgttttcttcttttgctaaaacatatttctccacactaaattattatagtatccgcaagaaaaaacaacaacaataaagagtcagattttagggaaatatagggacattatgtattattattacaatcaatacttagtctgtaattgatttggatatgttcttgtataatcaaaaaagatttgttatgaatagctacaacgcaaatgtttagctctatacggcaaaaagtaccttgaggttgacacgacgtcgttttcagctcggtgatagttgaaatgtatctttctgaagcttttaagttcaagagcccacacacttcttctcattctttataaacataacactggacagtaaccaaacttcagatctgaatcaacctcttaaggttcgtttatactcattctgtttttcactgatagtttatgcacaatccgaatctttcttctatgtgattgttttggatttgattataaatttgacattatcattaatttagaatgattttgtgtgtgttgggttgtttacaaaatcatttctttgaatgagtttgttttaattttgtgttagggttataacgcgattgggaatttagttgaatttagaactaaatttgtgctagcttgtgatttattgtctctaattttgaactactaatatttgattaccatatgtttagtggtacagaagaagagaaaggaatg

SEQ ID NO: 3758 - DNA, 3000 bp, Unknown
  misc_feature (1)..( 3000): cDNA_ID_1821810_gDNA_ID_1620662_Annot_ID_47996 3000 nt of promoter + ATG
aacttatgagaagcaaggagatacaaaagagataaagcaaaccctagtttttgaagattgatctgattcaagaatcgatcaaacaaaaccctcaattaaattgactcgtgtgaagaatggaggagaagctttaagagatgaaatcgtttaccgattttagaaagtcgattgtctcactgagacaaaaaaagagaggctttttatttttaatccgataacgagttaaaccaaagtgaactgagtcaaaacgtttccgatcatgtatacgtggcacattttcattggaagagatgattggttgttttgcatttttttttttcttgttctctcccttgaagttgaagagtttaacttcgctaagaggaacagagatggacttgagtttaatatgttctctgtttctaacaaatgtttttttttttgagttttcacatacaataaaaaatattaaaagttaattataatttataaatgcattattatttgtaatttacgatttaccattttctataaccttaattaatatagtatacaattatttttcttgaaatttataattcatcaataataactaataactattgcattggaaccaatttttttcctaaatatattatttaggaatagaggagtagttgtttttggcaaaatggtagattattataaatctaaagtggtagcagttaaatttgaaaaagatggatggcatagtaactaaaaattatttaccacaataccttaaaaaactatgaagaattgattaattaactaacagactaattaaaacccatatttgtcctttgaaattataattttaaataattttacgaaacctatttaagattacataatattttttttataaacaataacaccttttaaaattattaaaacttattcactatccagtttcctagtttttatatattttgaagcaataatgttgtgcttaaaatatatgacatcatagtgacaaaagagtttatttgtgaaatctcaatcactcattttgaaatgccattaatccgtttagtttccatattattaccaaagcctttcatgtaattggaaacttttgtgtttaagacttaatcttgtgttgcaggagccaaaagaaaaagaaaaaaacaaaaacaaagaaattgtaaagaagtgtaactagaaaaatcgatcactcatcttcaaatgtcattatccatcaagttgtcatattattgctagacagaagtggtcgtctagacttagttgacctgaaaaaagaatagtcaaagtcttttatatgtggacctgaaattagactttgtagtttgtacgtaagtttgtgttgctagagcctatatgagaaaaaaaaaacagtggatattggtgattggtttaatctggttaactccggttatctagatactggtttaatatcatttatcttgtgtatatataaactaaactttagtttattttgttgatgaacgttgtaacaaacacttaattctgttaataaagattcagtttaatctccgatcttttctcttcttttccgttttaccggaacttcgccggtgttaatatggtatcagagcatatcatttgagcttccgcatatcatcggagatgagtctttcattgaatcatctttctcttatgagagtttttcgattcctacaatcgtttgttgcaatttgcaatttcttcgtcagctatctaattttggttctgattcttcttctttccttcgattgaccttttgtggtgacgaatctcactttcttttcatttcgtctcactttctttgatttttctttaacaatttgttaagaatgggttctatgaacaatccgttgaattcttcaagtcttcgtccacctccagctagtgttcctgaacaatcgcgatatcaagctgatcaatatgagaatccgcatcatttgcatacgagtgaccacgcaggtttggttctagtctcagaacgccttaatacagcttcagatttccattcttggcgaagatctatttggatggcattgaatgttaggaataagcttggattcatagatggaacgattgtgaaaccaccattagatcatcgtgattatggtgcttggtctcgttgtaatgatactgtgtctacttggttgatgaactctgtgtcaaagaaaataggccagagtctccttttcattccaactgctgaaggaatttggaagaatatgttgtctaggtttaagcaggatgatgctcctagagtgtatgatatagaacagagacttagcaagattgagcaaggttctatggatattagtgcttactatactgaattgcagacactttgggaagaacataagaattatgtggatcttccagtgtgcacttgtggtcgttgtgagtgtgatgctgcagttaaatgggaaagattacagcagcgaagtcatgttactaagttcttgatgggtttgaatgagagttatgaacaaactcgtaggcatattttgatgctaaaaccgatacgtacaattgaagaagctttcaatattgttactcaagatgagagacagaaagccatacgtcctactcctaaagttgataatgtggcgtttcagactgtttcttataacagtggtgatccttatatggagaatatggaaaatggattcattgcggcttataatacagcaagaccagctcaaattacctctgtgtactaactgtggaaaggttggtcatactgtgcagaagtgttacaaaatcattggctatcctcctggctataaggcagctacatcatacaggcaacctcaaatacaaactcagcctagaatgcagatgccacaacaatctcaaccaaggatgcaacaacctgtagcagcacaaatgcagacaaacatgccaaatacaggaccaatgcagatgatcccttatgcaaatcaaatgcagatggttccatactcgaattcaatgcagatggcgaatgctgcttatgctgaataaggttcttttgttccaatg

SEQ ID NO: 3759 - DNA, 3000 bp, Unknown
  misc_feature (1)..( 3000): cDNA_ID_1821927_gDNA_ID_1620664_Annot_ID_48012 3000 nt of promoter + ATG
gaaagaaatttgcctattacaaatagagtagaaaataaatgatatgacgatttatttaagcttttttaaagattaatattaacgaccaaaataatatatataccacgattatgatttttattaaccttttattttgtaaaaaaaatacactgttaaaattttaacttattcaagtttttgtggaagtctactattgactgccgagggatcaatatagcccagtgctatcggttagaccgatcaatcttggcactcatgtatatgagaatgtttcctttattagttaaaatattgttattttaactatgaaattctggttgttactttggttttggaagccaataccctatactacagcggtaaaaacttgaaagtgtcagaatgtaatcgaaatttacatgaattcaactccaaaaaaccggtggaagaactactacaagcaaattaaccaacaacaaatctaacatgtaccttgaataatcattacacaacaacattgccttgcctgaattaaccttaatcctggagaaatcaaaatcccagaggaactacgccaagaaaaagctcctgaatcagagtaaagccagcctaccagttatggaatcaaccaactcctttggtcctgcacaagaaaagtaatgaacatgttgaggaacaacatcttagctaaaaccgaatttcaaaaaattattgtctctaccaggtccaactgcaagaactgttcttgatccagccgcaacctgttaaaggaagagttttagtttccagagaaacttgttagcgtactactaccacagaaaattcacaaataattttcattcaagagcagtcttttcgtgtttcaataggtcggatggtgtttatgtcttctatagttctaactatttgattagtagaaacttttagattttcttttgaataggaggagctctgattatactttcagcctcaataattgatcaagcacgacaaacctcagttcttccagcatcagctacaacaaaagtcgggaggccaacgctctcagcagcctctgtgatcttattcctgtgagcagaaaagataaatgtagctttcaaatttattgaagacaacttattaacatttgtagtaaagtaataatatgtcttgaagtgcgttttgtttgtatcccccaagattttcacctgcttacatttcttgctgtttttgcaagtgacgactatctttggctgcccattttcctcccatcgccgcagaaggtatcggtcactgaaagaattaagatgaaaacaaaaaaaaacataaaccccggactgatgcatcatacaaagcaaacaactcatttcagacgaaattacctctgcatcaactctgcatacatgccggtggcagcatctgcgaatattaaaaagaaagtcattttacttccagtgttcaaatttcaaacacatttcataagacacttacgtgcacactgtgacgcaattttgcccgttctcatcttcaagtcttgcctaactaccagtacctgtgatcagaacaagctcaaattagttacacaaatgttctgattttaacttgtaatctaaaaatctgacatcattgaaaactcatcaccatccttgtatagattatgcaagtctcttttatgaagctaaaatttcaatcatttgatgggtttggaacataaatcagcttgcattatcactaggttttgttataaggatttaagttataatattttactccaaaccaataaaatctaggggcagagacaagagactatcgttacactagatgatagacaaaccattttaagctcttggtccttgccattgcctggtacagaactctgcttctggaccttgctggataaaagtctgctccttttcactggggaggtcacttgctgtgataaatccaatatcatacctatgatgaatcctatcacaacccctggtatgagattctctgctctaaaactcacagatatcgacttcttttcttgtctctgatcatattcaccggaaaaaaaaaaacaatgatacatttttaactgtccaacaagaatgctggtttagtaagctacaagaaaatttcagaacatgaccgaaacaaccgagtaaataagctcgtttgttgcagtctcagtaagattttagagacaaaaacatgataaattctcgtttgggtggtgagaactgagaggcaaacattcaaatttacaccacaaatctctcaattttatttgccaaatcaaccatagacatacatataagaaacttgtgcactataaagccaaacacttacacttaaagcaaagtacactattaagaaagaatcagactttgactctttgagcttaactgatcttacatcaataaccaaaagaagaaagagctcagaatttgtaatttgtttagtttcaagttttccaattcactagccaactgatgccattcggaagttttgatcaaactagactcaattcctcagcccgagataaattttgacaaaaaagaagcaacaaaactaagaacaaattatcaacagaaaagacggaaaataagtcgaaatcaataccatagcttgaggctgcgaagagtttcgagacgaaggccacatgatacgcttctggagattctccaaggcgacagaggaacaaagctaagcctttaaaatcgaatgcccatgagtatgatgaagaagggagataagagcagccttagtaaccgtaaacgtcagggtgttcatatctctgattacaaaacgacgcgttgtttggggcttaatgtacattctggaaaaatacatggtccaattagaaaagttttaacagtatatagctactaatgtaattactatagaatatctctcgaacacacggtgcgttttactgtcgtcgctcctttttgttggtctgtttccacttcagttcttctccctccggaaaagctacaaccccaatctaaaaccctaacggccatttctaccatcggagctccgaaaatgccgggt

SEQ ID NO: 3760 - DNA, 3000 bp, Unknown
  misc_feature (1)..( 3000): cDNA_ID_1821923_gDNA_ID_1620664_Annot_ID_48013 3000 nt of promoter + ATG
cgaaaagggagggtaacgggtaaccttgaagaggtaagggaagttggaatcgtcgcagccaccggaaggctggagattagtgagattctcgagatcagcggtgattttgagcacatagttcaccattttttttctcctttgctctatgaagcactaaagctttgcagacgcgattcttcttcttcttattatttatcagaatggccccccaaaaaactcatatttcgttataaaccaaatatttggtctcagcccgtttaatttttttgacctatgagtcttttagtccaaaagcacacatatgaaaaagcccaatttgaaagcaattgagcccaagttatttacatctagttgttttatgtcctgtaagttttctatttggtatcatttgatatttcttaggttttttaataatcttaaggattttgagtggttaaaataaaacaccttaggatttaaacttaatttctcaaagcaaaatcatagcactagactcaacatttttttttaaaaaaaacaccattagcaaactacaagcctagtaagtcacaatcaagaattcaaaccatgattaaccaatatttgctcttaagtccaactaccaagataggcaaaaaaatgcaaaaaccaacggaaaaagatcaacttctttaacgatagaagaaaacacatgttaaagaaaactattatttatagaaaaaggtttctccaatgctacgctttgttcgctattgttgacacaaaatggcacaaaaccaaaaaaagaacataaagaaaaaatgtaaaagctcgtgtgggtgtagtgggaacgcaccaacacgcaacctctggattagaggaatcctcatcaacagccaaacacgttgtacaaaagtcaatctagtgtcttgccatttggcttcatgtcggtttcgcgacactgagagaaagccacacgtacatctacgtagcttcatccccaatcaatccccaatttatttcttttgaattccgtcatttcttctgcattattgtcgccattatccttttttgttttgtaatcagtattttatcattaaacgtgacaagtactgtcttcattctccaacacataaaatagtcagaactcaataaataatcataaaattgagtactctttggcccctgtatgattagccgttaaactatcactttcgcaaaaaacttcatgtgattactttgatatttatatgtactaaaatagttttttttcttcgtcttatgttcgcatataacttaaaagataaataactcctacgaagtatatgatacgtgactccaatcaaaatctttgacttgtgagttgtgaatatgaatttaagtgaaactgtcgcccagtattttttacggtcaacagcatgtggatacttttaaatatttttgtttaacaaattaaagtgaagaattttcgttgtctcgtgaaggttttagtggtatatatatcagatttccaaattttgcaagatttattttgatacatatatgaagttacaaaacatacaattacattccaacgttaacattgttttactgtgataactgataatgtaatcctgcatgattttgggtgaacttaaaaacgaaactactgaaagttgcatgtcgttttgcaatcataatgtgggcaacacgaaaacgagctcgaacgttggaaatattggagaaactcttaaagtccgtgagaggtttacatttgggagatgtgatgattggaaactgaatgtgggacaaaggtttaggatcttcaaaatcgcgattgagttaattggggacgtgaagctcgtataagtattcttgataaactcatctttaacagaaaaataataatgaaaaactcttctgttttggatctgtctcacatattggagagatgctcacgttagcaaaaaatcacatgtcgagaagattaatctcaaattagtttcaccacaatgaagttgaggagatgctataaaaatatatcgaaaccgttaagtgaatatggatttatggaaaatggccagatacatcaagatcaaaccatccttctctaagagaccacttaggacctctaaagaaaacaaaattgataaggaaaggacaaaaaaaaaaaatccataaaagacaatctagatgataagtaactataaaaacaaaagttaatgtctctgtaaattaccaaaaacttaaactcataaacaaaaaccaatttagaattgaaacatgttaaccaagattgaactaaaaaaaaaaatcataataaaatagaatttcataagataagtcctacatttccaaaacctgatctcttcctctagttccaaaaccctaaatatcctttttgaatccctaaattaatttgtcaaaatgagttaattaaaatatagctaatttttaattaaagaaagagttgtgatgacagttcttacaaaaatagagattcatttggtaaaaattggatagaagatattttattagcatttccccttttgtttttcgttcaagtgaaggtttcaacaaaattaaagagaagatctcttaatcacaacaattaaagtaaagtttaaagactaaaaacaaagcctaaataaatatcagtttggtggtattaaactagcacgtgtcaaaaactaattggtagacaaaaaaaaaaagtctcacgtgtaacgcgaaagcctttctaaaaaaatttcttcagcatttaccaaactaaagcgcgcctctcgcttccttccttcaacctcttctttgctcatctctctctctctacaagaccaaacttatctttttttttctcttctctctgtctttttacacacagagctctgttttcaaagctctgttctgtttcttcgtgtaatctctgtttcttcaatctgttttttttcttctaattttgaattctcgtacagacgcaacggttatattgttgtttagcctctttgttcttcgaatccaatgtcttcgttgttttgtgtaaccatggattctcatctctagatg

SEQ ID NO: 3761 - DNA, 3000 bp, Unknown
  misc_feature (1)..( 3000): cDNA_ID_1821921_gDNA_ID_1620664_Annot_ID_48014 3000 nt of promoter + ATG
aggtgacagtggttcgaatctaatcgcagtctcatcccacgaattgattaatttcggatttgcagatacgaggatgacgaacgcgaaacagagacagaatctcaccattggaatcgaaatcgaaatcatctagagatgagaatccatggttacacaaaacaacgaagacattggattcgaagaacaaagaggctaaacaacaatataaccgttgcgtctgtacgagaattcaaaattagaagaaaaaaaacagattgaagaaacagagattacacgaagaaacagaacagagctttgaaaacagagctctgtgtgtaaaaagacagagagaagagaaaaaaaaagataagtttggtcttgtagagagagagagatgagcaaagaagaggttgaaggaaggaagcgagaggcgcgctttagtttggtaaatgctgaagaaatttttttagaaaggctttcgcgttacacgtgagactttttttttttgtctaccaattagtttttgacacgtgctagtttaataccaccaaactgatatttatttaggctttgtttttagtctttaaactttactttaattgttgtgattaagagatcttctctttaattttgttgaaaccttcacttgaacgaaaaacaaaaggggaaatgctaataaaatatcttctatccaatttttaccaaatgaatctctatttttgtaagaactgtcatcacaactctttctttaattaaaaattagctatattttaattaactcattttgacaaattaatttagggattcaaaaaggatatttagggttttggaactagaggaagagatcaggttttggaaatgtaggacttatcttatgaaattctattttattatgatttttttttttagttcaatcttggttaacatgtttcaattctaaattggtttttgtttatgagtttaagtttttggtaatttacagagacattaacttttgtttttatagttacttatcatctagattgtcttttatggattttttttttttgtcctttccttatcaattttgttttctttagaggtcctaagtggtctcttagagaaggatggtttgatcttgatgtatctggccattttccataaatccatattcacttaacggtttcgatatatttttatagcatctcctcaacttcattgtggtgaaactaatttgagattaatcttctcgacatgtgattttttgctaacgtgagcatctctccaatatgtgagacagatccaaaacagaagagtttttcattattatttttctgttaaagatgagtttatcaagaatacttatacgagcttcacgtccccaattaactcaatcgcgattttgaagatcctaaacctttgtcccacattcagtttccaatcatcacatctcccaaatgtaaacctctcacggactttaagagtttctccaatatttccaacgttcgagctcgttttcgtgttgcccacattatgattgcaaaacgacatgcaactttcagtagtttcgtttttaagttcacccaaaatcatgcaggattacattatcagttatcacagtaaaacaatgttaacgttggaatgtaattgtatgttttgtaacttcatatatgtatcaaaataaatcttgcaaaatttggaaatctgatatatataccactaaaaccttcacgagacaacgaaaattcttcactttaatttgttaaacaaaaatatttaaaagtatccacatgctgttgaccgtaaaaaatactgggcgacagtttcacttaaattcatattcacaactcacaagtcaaagattttgattggagtcacgtatcatatacttcgtaggagttatttatcttttaagttatatgcgaacataagacgaagaaaaaaaactattttagtacatataaatatcaaagtaatcacatgaagttttttgcgaaagtgatagtttaacggctaatcatacaggggccaaagagtactcaattttatgattatttattgagttctgactattttatgtgttggagaatgaagacagtacttgtcacgtttaatgataaaatactgattacaaaacaaaaaaggataatggcgacaataatgcagaagaaatgacggaattcaaaagaaataaattggggattgattggggatgaagctacgtagatgtacgtgtggctttctctcagtgtcgcgaaaccgacatgaagccaaatggcaagacactagattgacttttgtacaacgtgtttggctgttgatgaggattcctctaatccagaggttgcgtgttggtgcgttcccactacacccacacgagcttttacattttttctttatgttctttttttggttttgtgccattttgtgtcaacaatagcgaacaaagcgtagcattggagaaacctttttctataaataatagttttctttaacatgtgttttcttctatcgttaaagaagttgatctttttccgttggtttttgcatttttttgcctatcttggtagttggacttaagagcaaatattggttaatcatggtttgaattcttgattgtgacttactaggcttgtagtttgctaatggtgttttttttaaaaaaaaatgttgagtctagtgctatgattttgctttgagaaattaagtttaaatcctaaggtgttttattttaaccactcaaaatccttaagattattaaaaaacctaagaaatatcaaatgataccaaatagaaaacttacaggacataaaacaactagatgtaaataacttgggctcaattgctttcaaattgggctttttcatatgtgtgcttttggactaaaagactcataggtcaaaaaaattaaacgggctgagaccaaatatttggtttataacgaaatatgagttttttggggggccattctgataaataataagaagaagaagaatcgcgtctgcaaagctttagtgcttcatagagcaaaggagaaaaaaa

SEQ ID NO: 3762 - DNA, 3000 bp, Unknown
  misc_feature (1)..( 3000): cDNA_ID_1821917_gDNA_ID_1620664_Annot_ID_48015 3000 nt of promoter + ATG
aagggctatataactggtatatgcaataagtaaagtcgtgtatcaaactttttcatttgttgtatcatctccctcttacatatacagaaaacagcaaaccaaaaaaaaaaaaaaaaaaaggcaaaacacaaaagaagaaaagaaaattatgggattttgtttttgtttatcctcaggaggatcaacagataaaagtcagatttatgagataactgattatggacaagaaaatgcagttttatactctgaccaccatgttgttcctcaaaacttgggctctgtctcttctttagccggaggcaagggcttgaaccaagatgctgccattctccacctggtactttatacttttgaaaatatatatatgtttgtcttcaaaacaattaatttgtttttaacggaatgaaatgataaatttgtagggatatggaacagaagaaggagcgttatgtggagtgtttgatgggcatggaccgagaggtgcgtttgtgagcaagaacgtaaggaaccaattgccatctatactcttaggccacatgaataatcattcagtgactcgagactggaaactcatatgcgaaacatcgtgtttggagatggacaaaaggattcttaaagttaaaaagattcatgattgctctgcttctggaactactgctgttctcgccgttaaacatgtaagttattcatatctttaatgttttataccgctttatatattaggggatctattatttttcattgcaaaaatattgttcattttacgaaattgtgtattattaacaacaatattaatttgaacagggaaatcaagtgatggtggcaaatcttggggattcaagggctgtcatgattggaacaagtgaggatggagaaaccaaggtggctcagttgaccaatgacctgaagccaagtgtcccaagtaagtttttgaagttaattggataaagtgatgttgtaaacaatgatacgtaccggtttcattatggttaagcatttttgggttaattaattttgtaggcgaagcggagagaataaggaaaagaaacggaagggtgttagctttggagtcggaacctcacattctgagagtttggcttccaaccgaaaaccgaccaggcctagccatgtcgcgggcttttggtgatttcctccttaaaagctacggtgtcattgcgactccgcaagtctctacgcatcaaatcacttccagcgaccaatttctactccttgcttcagacggggtacgtaaatctaaacctattaagtataaactaaaaacctgccacaccacactttaattttatatgagagactatgtttttgtattttggttactattgatttaaaaccgaaccaaaatccatgttcaattgtggcccacccatttaaggctttttattaatcaacctgggcccaaataatacgaccaaatccaaagtaaagcccacatttaaaataattcgttttagttgaatgacccacttaaataatgattttcttttgtttcttgtataaaggtgtgggatgtacttagtaacgaggaagtggcaacggtggtgatgaagtcagcaagtgaggcaggagcggccaacgaggtggcagaggcggcgactaatgcgtggatccagaaatttccaacggttaagattgacgatatctctgtcgtgtgtctctctctcaacaagaagcataatccacagccacaaatatgaacaaaacccacttgctctaatcaaagaatcatgacacgacagctcacacaagacttttgtgttttgcctataagtgattgtgactgtatatatataatctatatataccgttgtatcttaattcttaagtcgtgtgattatttagaaagaaaaaaaaagaaaaagaagaacaatagattataattaggaatggtgtgtgtcgttgaataaaagcaacaatgaattatgacattttggacacacgtcgtgtggactggtttggactagttcaaattgattatgtaattgctatagaaatttgataataacattttttttttgttaaacaatagtaacatataacgaaataatatcgattttgatcaatatgtttttttgttgttgttaaaagatataattttgatcaatagtttataaccaaattatttaatgacgcatctatttgagtttgattgcttatcagagttaagatggtggaagaaaacaagaggcagaaaaagaaacaaaaatagatatttgccgaaatatccaaaacaaataattatttttgtaagtttgctatagagtgaaagaaaaagattctatattgttgcccccacaaattttggcattccatctctgactaagagagtatattcagttttcggatttatctaaaatttggaataaattaggctcctatattttttatttttagtagtgaatttagtccgaaaacaaattgatcccatctaaaccaaacagaaatagtcaatccaaaaacttcattatagattaatttagtttcaaaactaaatcatctttttattgttcaaagttcaaacttaaacacacttgacatgatcacaagaaatagtgcttatttttctcctttggcatgattctctcatgttctttcttttttttcttttcaaagactcgtcttttttactcatgggatttgtgaaacaaatgaaagaattcaataatgtgtccatttttttgacaaattcctttataatactccataactcacgaaccaatgtttaagaaggaagcaacatcacgcaactgaattttcaaaatatgtccttttcggtttcttttgtccaaatttccaaagaaatgtctaaatgtgcaaatatatccatttataaaactaaacaagtaaatatccaattctagcttttgcgtgttcattatataaacaacgtgtctgttctctccaatcagataaaaagattcaattttatttgatagcccggcgattaaaaagattcctatcatcatcactcgccggctaatg

SEQ ID NO: 3763 - DNA, 3000 bp, Unknown
  misc_feature (1)..( 3000): cDNA_ID_1821913_gDNA_ID_1620664_Annot_ID_48016 3000 nt of promoter + ATG
agtagaacatgtttcagagtatgaaggttacatatttgagagcggtcaagggcttgcacggtctgttttcaagccaatgtcaatgctgttaactcatcctcaacaaagatgtgctcaagatgatcttgacatccccatgtctcttgcaaagaaagtgcctgtgactgaggcggcaagtgctgtagatcctcacaatgggaacaatattcagatcataaactaatgaaacacttttttttttttcttgtatcttttggtcatgacatggttgtgagtttcgcatgtgaaaaaaatactcaaaacctgtagtgacaacttgttctagatccatcaagtaagaaactcaaatgtccagatgaatataaatgattttcttattttaagagaaaatacctcatcaagtcctcaagggctctctaataaaaggtatttgcaatattgtttcagctattaatgatgaattaaatgtctaatatgagctaaataaattgaattatgtaactagtcttatcttttatcccgataaccatatcagcaaacttttcatatgaatgaatacatagataatgcacaaattaaagtacgtcattgtgtacatggatatcttagtttatggaaatgtgtggctttgagaacgagaagctaagaaatattacaaattgctttgaatgttgcaaagtcaatacatcgatcaagttgatattcaatgttttaatatattgggtagatattcatattggcgagatcgtgattgcatgatcttcaatgtttctttgggaagaaattcatcaaaaatccattggcttatccaaaagaaaaatcttcacgatttcatgaaaatatatgcatgtaatttagtttcgctttcccttaagtttatccttatagctaaagcaacagtctagttcgtaaattatgcctctcggataggtaatagctaatggacgatgtcaccacgactttaggaaaacctaaaatatatctcaaaacaaaataaaaataacaaaatgttgccatgcatttgggtttaggagatgacgatgccagcaacatgtacggcatccgttctctatatatatattagatcccattcgtacggcctaacttctctcttttctctttttctttttattattattacggcctaactttgatagaagaatatgaaaaacgaatttaataacgtttgactaaattattaaattatgaatccatagattggaatcctacaagatgacacatcatgtgcctttctaatttagtagcggggtagtctataagaataaaactaattttaaaattaatgtcgaattgctatgtgtattgacattttacgtacataaaatttttagtcaactagtttaatttttggagccgatattgattaatcttagaatcttaccaatgattagtagtcttaactaaaaaattccaaaactacataataaagagtaggtaaattaattcacacctaatctaagaaaactaaaactaaaatatgtcttttcaaaataacgtatagtacaataaatgtataatatagttctgtacttctgaataaaagaccaactagatcatcaatattttaaaagaagtacagaaaactattgataaaaaggatgtgatgtgagagttgaccctgttgtatcgtttgatatgtccaaaaggtcaggaaaagctggcttaattagtaattagtaattacaaagtacttacgtcacatttgtttattattactcttttcttttcgtttacaaaaatttagaaaaaataatatttatttaataattgtaaaagtatactcctcttgcattaatatgcaacataacaataactgttacatagcattttgcaacataagaataagtgttacataaacatttttggtaaaactatattaatgcaagaggagtattttctgtaaattttatgtaagtgttagttaacatagaaaaaaaaaggttattggaggaaattaactatggttttgtgctatgtatgtaccttggtgtcccaacataatctattgtcagattaaaaaccgaatcaaacgttattagattgatcaaaaataaactctattaacgataaaaccactacacgaaatcaaaaataaaagaagtttttttttattttttggtttaaggtactcaaactttcaagatcaaacgcataccctgactactagtctgctagattaatctccatttcatcagttctctttctttttctattttaaaattacatacttagttagcaagcggatggatgaatttttctttaaataattaaatatttggtgagtctaaacttgttggcaatgacaaagaacaagaatcccgttggtaaaatctattgataacttccaaattctcatttatattttggaataaatcaattagtagtttaagcaagatactaatcacaccacgtcatgtgccctttcaaatgaatattgggatgggatggtccagatcatatttttaactaattaactgtaaattgttatacgttgtcactgccaccaggagccacataattgccttacattacagcataagctatattaatttcttaatttactggagtatgtcaaataattcggtttctcactagtcgacacattttacatattctttatttctaatataattggcggaaacgactcatttataatcaagtattctaattatcaaaaggattcaattttttaaaaaaatgttatgaaaaacaaaaatattgatcgaccgcctcggaattaaaaatcattctttttaaatgcctaaagatacaagtcatcgagatgaaaataaaagtatgtattaatatattcctaaataagattcacaaagggctatataactggtatatgcaataagtaaagtcgtgtatcaaactttttcatttgttgtatcatctccctcttacatatacagaaaacagcaaaccaaaaaaaaaaaaaaaaaaaggcaaaacacaaaagaagaaaagaaaattatg

SEQ ID NO: 3764 - DNA, 3000 bp, Unknown
  misc_feature (1)..( 3000): cDNA_ID_3071828_gDNA_ID_1620664_Annot_ID_163877 3000 nt of promoter + ATG
acatcatctctttcataatctctccttatgtgtaatattggtctgcactttatgtggtcatggacttagtcttgacgccaatcttcttccaggaaacactaggcatgatttgtttcgtgtccacacgatctttaaactgaacagcaaagttgagcaacgaatcaagaagtgagtcagatagatagtgaggctcaagtccaagttccatcagcttagtgtgctttgcgttgtagtaatgttcttctgcctccactctcgggttaggcaccgtcatctttttcacgtctagcccaagctttgaacccgctttagtgacgagtgaagccagttcattgactgaaaactgttctgtaaattggttgaagacccggaactcaccagcttttgccgggtttgctatagcgatctcaacacattgaaccgtgtctcttatatcgaggtagcctctcgtctgcaaagggaaaaacttcaatcaaaacctcaaatttttcgattgaaatttcatgtgaaaacagatcaagaaagtcatttacctgaccacctttaccataaactgtaagtgggtgaccaacagcagcttgcacacagaaccggttaagtgctgtaccaaacacagcatcgtaatccagtcggttacggagttcctcatgcatctctgtctcatcagtcttcactccataaacaactccttggttgagatcagtggctctaataccccaagccttgcaagtaaaagcaatgttgtgcgaatcatgaactttgctaagatgataaaaggagctagcttgcttggggtatggcaaagtgtcagttctaccgttgtgggttatggttatataaccttcctcgatgtcaatatttggagttccatactcacccatcgtcccaagttttacaagatgacactcctctccaaactcttttatagcaaagagaacgttgagagtcccaatcacattgttgtgctgtgtataaactgctctggaccggtcaatcatcgagtaaggagcggatctctgttccccaaagtggacaactgaatccggctcaaaagacttgaaagactcagctaagaattcgaaatcacagatatcaccaacgtacaactcaattgatttccctgtcaaagccttccatcggctgattcggtcatgaatggaggcaataggagtcaatgactcaagtccaagctggtggtcgaaaagacgtcttacaaggttgtcaacaatgcaaacttcgtaattcttcttggacaagtggagagcagtagcccaaccgcaataaccatctccaccaatgaccataacacgctttggtttagaggatgagttattggtagatgtttcgggtggtgcttgttgggttataggtacagcagttgctctgaaaacgcagctttttctcggtttcttctcttggaagagaagtcctttgagagaagatcttgaaagaagctgagcattgaagaaggtctgccctgaaacaaacggcttaactgaattcttgctgctgctgctgctaagtgagataactgaagggcatgaagctgaaagtagatgcgccattttaaaggtttgttcttgattctatcaaacaaattcacctgcaaaaacaaaagcagctaagatttcaagacataatttggttcagcagaacaagacatatcaagtagatgtttcataccatataacaagtaaggattcagctgattttctctagtttaacttcaaattcaaatcaaaatccaaaaagacatgaatagaaatcgaaactttatcttcacacccccccccctaaatcagctacgtccataacaagagaagaatcaaaacacacgaaatttgaagtcttttatcgaatctgaaaatcagctattgtcaaagactggatatttatttgatcaactaaagtaaatgtaagaaagaagtacattgatgaaattcagagaaaacccaactgaatgaaaactctgtgaattttgatttcctatcatattcagagtttcttcaaaacgaaatcactcaacttacaaaaccggagaaatgaaattcattagaagaaacgattgcttacctttgaaaatttggaatcttgtttagagagagttggagaagatccttcgagactttgaactttgaagtgagggatgggtctctcttctcttctcccggaacgatgagagatgagatgagacagatataaatcatcagatatgcccaaagcatattcttacttattcccttcccaacaaattatggcccaaagtgtcgcttttttaagaacgttggtttattagttttaaagttttccggttgtgaatgatacaggtccggcctttgtgggccagtttctcagtcgctcatttaggcaacttaaggaacattcttcccttactgggccggttggcccaaatatatactttttgaatatgtttgtggctattttctaaattttaacttttaattattaaaacagagaatcatgagataggagaaaaacaaaatcaactgtaaaatgcaaacctaacttacataatcttttgaatgaaattttattaagacgcaaaacattactagtatttcgcattgtaatagtcatttttctgcaagttgaccaaacaagagtcatacttctgatgcaagatacgaacaaagacttcaattataacaaaacattctcatacatctcatctctaattctatatttgttttctcgtagttattatcttccaaactttaatattcttgtcaatgagggtactagatgaaaatgacgacattctatggtcatttgattcccgtgaacctcatgtgaccttgttaacgtacgtgcacgcacacacaaaccctcgcactgattgacattctcccaatctttctttataaaacacacagacaactccataatattaataacccatatatacttagcttgctggtttccttggcaataatttatataattctacaagtttaatcgcctaatcggatttagtaaatg

SEQ ID NO: 3765 - DNA, 3000 bp, Unknown
  misc_feature (1)..( 3000): cDNA_ID_1821891_gDNA_ID_1620664_Annot_ID_163875 3000 nt of promoter + ATG
tcacatagcccatgcaccatacgtcctctccttctcgctctttccttccaccaattcttcgaaggttttgccctcggtggctgcgtcgcagaggccagactaaccccgcgtggatctgccatgatggctttcttcttcgccatcactactccgatcggtgtagcggtgggaacggccattgcctcatcttacaactcttatagcgttgcagcattggtggctgaaggagtgctcgattctctctctgcggggatacttgtgtacatggcgcttgtggatttgatcgctgcggatttcttgagcaagaagatgagtgttgatttcagagttcaagttgtttcttattgctttttgtttcttggagctgggatgatgtctgctcttgcaatttgggcttgatcacttttcattattactatttgtttatgaaagtaataaatttaggcatgcctttttcttttttcttttggacagaattattataggtatgcctatcactctatttgtttcaaaataatgtttgtaatcaattctattagatattcactctttatcaatcatgttatatatttttgtagctggtaaacaaataattaatttttgaacaaaaaacaaaaacaaatacaattagtttttacaagcaagtatgcaactgaaatccaaagattttcttgacgccttttcgagcatattctaatccttcattttgatttagctcaagaaacgccataatagaaccatatatatgaactaagtgtttttaaaaagagtaggtcatgactcatgagtaatcttttccacgatctttaagatatattattcttggaaggtcgaaaactataatatttcattttctgtcgaatatatatatatatggatgacgatggttcccatgcatgatgaagaaaaagacgaaccctatatttatctgtttaattaaaattttctttgtggagataaactctctgtgaaacgcattccgccacctaatttatcatatattttcatgtgaaccaaaataattaaaatttgtttgccatatatatatttatttgttgttatctttctgagtgataaaggtgacaaacatttttgtccactgatacccaatctcttccacttcagttcccttcctttcaaattttatctcgtgcttttacagcatatcccacaattcctgtaaattatctcaaggatttggtgcataaattctattttttcgtacttttttgttggatatgtaaatcagaaccaaaaaaacttaacattgattaaactttacaatttacgtatgtcccattagaggggaactacagtttttgtaggaaaataagaaatttgcgaactaaagacactaaataatcctacttttaaaatcacaatagttagtactcaataaaaaatattgtatattgttgtgaaaaaatgtaaatagtttggagaaactgctactaataaacaaataattaagagatgtcggagatccaatttaatcataaaaataaaatgattagcacaatattgcactactgatttagatgcgatacacgtggaatctgcaacttttcaccaaccacatccgagcctacaccacgaaatttgaggatttttatttatttcccaaaaatttctctgtatttataaactaactatttcttgggacgtgaatatacacattttatattcaacggtccgtgagtgtatattgtatatactctctctcagattccctccttgtagctagcttctacctcctcctttcattcatggcgaaaaactaaaaaagacatccatctttctcaaaacatctctcttactctcttcgttttctgactgcaaccttttttcccaatggagcgcgcaaggagacttgcttacagaggaatcgtcaaacgtctcgttaacgacacaaaacgacaccgtaacgctgaaacacctcaccttgttcctcacgctccggcgaggtatgtctcttccctttcccctttcatctccacccctcgatctgtcaaccacacggcggctttcgggaggcaccagcagacgcgttccatctccgtcgatgctgttaaacccagcgatactttccctcgtcgtcacaactctgcaacaccagacgaacaaacccacatggctaaattctgtggctttgaccatatcgattcactcatcgatgctacggtgcccaaatcgattcgattagattccatgaagttctccaaattcgacgctggtttaaccgagagccaaatgattcaacacatggttgatttagcttccaagaacaaggttttcaaatccttcatcgggatgggttactacaacactcatgtccctactgtcattctccgtaacatcatggagaatccagcttggtacactcaatacactccttatcaagctgagatctctcaaggtcgtctcgaatcgctcctcaatttccagaccgtgatcacagatctcacgggtcttcctatgtccaatgcgtcgcttctggatgaaggcactgctgctgcggaggcaatggccatgtgtaacaacattcttaagggtaaaaagaagacctttgtcattgctagtaactgtcaccctcagactattgatgtttgtaagactagagctgatgggtttgatttgaaagttgtcacctctgatcttaaggatatagattacagctctggtgatgtttgtggggttcttgttcagtatcctggtactgaaggtgaagtcttggattatgctgagtttgttaagaatgctcatgctaatggtgttaaggttgtgatggctacggatttgctggctttgactgtgttgaaacctcctggagaatttggggcggatattgttgttggctctgctcaaaggtttggtgttccgatgggttatggtggtcctcatgctgcgttcttggctacttcacaagagtataagagaatgatgcctgggaggattattggtattagtgttgattcttcaggaaagcaagctctgcgtatg

SEQ ID NO: 3766 - DNA, 3000 bp, Unknown
  misc_feature (1)..( 3000): cDNA_ID_3071835_gDNA_ID_1620664_Annot_ID_163874 3000 nt of promoter + ATG
acctttgggaagatttcagacaacacaacgttccaaagagaatttttacatcaaaatttccaaaatgtgtgttaaaaactgaagaagaagataatgcttatttatcttctttctccgtgaaagaacagtgtactttcattccgcagcttctctatgttcctaaagagaaccaaaaagcagaaatcaacaataaagttagtattcataaattaaagagaacaaaataatgcaacaaaactgaaaaagagaaaagtgggtctgattaatctcttttgcatgaacgcaaacacttacaaaaaaaattacttactttttcttacaataatttcatgaagaaattcataatcttcatcatctgcctcactaaaagattcagagcactagatcaacaaatagcaacattttataactaaataaacaaaccaaaagttgtattatcgaggggaaaaatacaactttaatattcaagaaagaagaagttgaaaagaaggagggccaaatcacgtacggagctgcctctgtttatgacacgaatccattttcatatctttaagatcttccgaccaaaaaaaaagataaatcagaatcaagaaaatcttatatataatcactttcttaaaatgtcatttatttaaaatgttgttcatagagaaagagatgaatctagtaaaattatctaaagaaaatatatggttgaaacagaatcgaaatccaaaaaagaaatccaaagacatgaagaagaccgatgtgttactgtttactacagagaagtgcactcatttctgttgcaggctttaaattagggaagagaccctacattttactatttacatgtctctatatatatatatatgtatgtgtctctatttataaaattttataaagttataagaaaatggtgttgtcttcttgtgctggtttcaattatcacaaatcagaaagagggaaaaaagtaaagaagggtgagatcttttttagccatttaaggagaattgatgagatgtgtgatccatttgggttcttgctttttcttctttcttttctcaccactcgtgtctttgtattgtgccatcaaatcttatatccatttacgtatttttttcatataagttttttacgtaagctttacaaaaatatcaatcaatttgcttggccttttctttgattgttcctttcttatcatttttatttatttatttatttattttaagttcaatgtgtcgttatgtgttacgtctttattatcatggctaatgatgatggaattgaactctattactcgtagactatatagattgcaacatctgaaattatgctcttctttattacaaccaaaagaagaagaaaatctaatggtacttgatttgatctgtattagcgtgacttgatctgtattttaaataatgttaatggtacttgcctaaacaatgactttctaagctggtatgagacaaagaaaagggtcaaggacaagtatcttgcatggccactccaagcaaaattggatattgatttggtgaaacagttattgttgttcgtataggacaaaattattttcaatagaaatcgataattattgatatcatatccttattattgtttgcttacaagtctatattatttaatagtttgaaattttgatttagtaaagcagaatagtatcaataacactaggaactatagtaccgactattaactgaagctggaatgcatctttaatcatgcctacgatcttaatcaataacacttattaatgttagactattagacccgtgctcataacttttgggtcctaggcgaattataaaagttacttttttttgttgtctgatagtccaaacaagaacttgtaatgctttttctaaaatgaaacaaaatgtacgttggctatggagcctatcgactccagcaccagcagatgcttaatctactccatagactagagcgctttttatctgaagtcgtataatttcccaagtcatttggcttaattattgtgtatcaacttatactatatgctactgatgtcttgcttagaatattatacaagttcattgacttagaattatatataggcagactaagcaaaatgggaataaatgatcacagagggcattaactagttcactgaggttcaacaatctacttgatcttaactcctttcgaattaatatagaagtcgagcacttgaggatcagaaaacacacattcattctcagtgtctgaagcacttgagggtcagaaaacacacattcattctcagagcggcgtataattttaagatgtcaatcgctcttacgtaaagatcgatagccatccacctaaacatatgcaatactccttctgtgaacaagaaatttattgataaaaccaagtgtgttagcaagttaatctttacatagaaatcaaggactcactcttaatgaccagcaaagtgtgttagcaagttgagtgaccagcaaaattctaaccctaaaaaagtaatgtagaaagcaagccctcattatcacctttaccgtgacatttggatttccatctctatcaccacccatccaggaaccaaactttagtggattcattgatgcaatgcagatagaagaagaatagaagatgatgcaatgcaagaaagacatcccttgagagagcccaaaccattcaccttattccaatacattaaaaggtgtggtttttcccaaaaaaaaattaaagtaaatttttacttttagaaaattggaaagaaaatttacaaatcagataaatgagaatttacagctcaatatttccatatcttccaaatattttccatagattttattttattggaaaaagtatcttcttaaaataccttgagaggttgtttagactttctaaaatttattggaaattaatcttaaccatatgctttaacttttgttatttacctcgacgggccgatattatatatatagcaaaatttgattttcgtggaacttataggcttctctgctgatccagaaggag

SEQ ID NO: 3767 - DNA, 3000 bp, Unknown
  misc_feature (1)..( 3000): cDNA_ID_2994851_gDNA_ID_1620664_Annot_ID_163872 3000 nt of promoter + ATG
acattttggaaattttgatgtaaaaattctctttggaacgttgtgttgtctgaaatcttcccaaaggttctatcagaagaagaaggataaaggcaagtttcaacatttttaatgttctatggacatttgtagtaatctaaagctttcttttttacttattagttcactgtttatcacagatagctttgagatattattggtctgtgtatcattgagcctagttacggcttcattaactcatgtttcggttctttatatattttaatgaaatatttaatgacatagtgagcgatgttctctgtctcttgcagcattttacatttagtactattctccaaagatttggtttcttagattttctgaaatcttttgtctaagtcttaaatacttgtcttctttggtaatgcagtttcatagaaacccaatggacaacaacaacaacaacaacacttttagttctctggataatgtcatgactaaccaaaatcctcttctcatggattttataccttcaagagaagattcaacttcattctcaacaatgcttccatggaataccatcagatcagatcctctacaaatgggtggctttgatattttcaattctatgctgactaacaaatacttatcatcttctccacggtctatcgatgttcaagataaccgcaatgttgagttcatggctcctcctcctcatcctcctccacttcatcctttggatcatttaagacactatgatgattcctcaaacaacatgtggggttttgaagcaaatagtgagtttcaggcattttcaggtgtagttggtccaagtgaaccaatgatgtctacattcggtgaagaagatttcccgtttctaatttcgaataaaagaaacaatgagctttcattgagtcttgcatcagatgtttctgatgaatgctcggagataagtctttgtgcagctacaagattagcctcagagcaagcttcttgcagcagcaaagacatttctaataacgttgttactcaaggtttctctcaacttatatttggctcaaaataccttcactctgttcaagaaatactatctcatttcgccgcatactcgctcgattattcatctcgaggaaccgagtcaggagctgctagttcagcctttacttcacgttttgagaatataactgagtttcttgatggtgattctaataactcggaggcgggtttcggatctacatttcaaaggagagcattagaagcaaagaaaacccatctcttggatcttcttcaaatggtatgtaatatattcattcactttttttgcataagttaaaaaaatggtttgatatatatgatgaagttttatgagttgatatttctcttcaggtggatgatcgatatagtcattgcgtagatgagattcatacggttatatcagcgttccatgctgcaaccgagttagatccacagttacacacccggtttgccctccaaaccgtttccttcttatacaagaacctgagagagagaatctgcaagaagataatctctatgggatctgtattggagagaggcaaagacaagactcaagaaacctctatgttccaccagcattgccttcttcagcagctgaaacgaaagaaccatcagatttggagacctcaacgaggtttgcctgagaaatctgtttcggttctacggaattggatgttccaaaacttccttcacccgtaacaatccttactcttcttaactatctactttatgatgatgacattgttaactcgattttataagcaaagttatgttttatttaatgcagttacccgaaagattcggagaaacatcttctagctatacgaagtggcttgacaagaagtcaggtaatgtctcatgtttgttttcttatgcaatgactcattgataacaagctttgttttcttatgcaatgactcattgataagatctttgttttcttatgcaatgacttattgataacatctttgctcacaatgatagcaaatatggtattcaaatgagtaatatatatcttgacatactagtcatgtctgaaaaaccggtattggttattttaagatgagattagggctaggaaaaaatcaagcttttctcttgaactacaaatgagactagattatgtattcttgaattcacaataatgttactcaagtcctaggattgtagtcgcacatatgttttgttactgaagtaagttaaagcgggcaaatgatatagagtgtgtctctttgttgtgtgtgattaaaggtatcaaactggtttataaatgcgcgggttaggctatggaagccgatgatagaagagatgtatgcggaaatgaacaagaggaagctcaataacagtcacattcaacccaacggaccaactcttcgaatgccaaaatctgttatgatgagccaagcaatgcataaataagacaacaattgtgtttaccaactttgtgataattaggcaattgctactctatgattgcccaaaacctaaaccatgtacgactatcattacgtatgttataattgtatatacaactcctttatctttgactatttcattttattatcctgtattcttatatcataattatcatcatcctcattaaacttcatgatcaccatttttacgtaaaaataaaattaagttcatgaaaatatataaaaagtatgtaaccactgaagatttattttcatatttattcaaacaaactacaaaatacaaacctaaagttttatttcaccgtttgcatttaactttttttctcttacaagtgagttttattattccaaaaactgaaatgaataatgacgaaaatctcctagcaagcgacgtcgtattttggtttgacttgagaatcttcggtcaactaataaaaacgcagcgttttcatctggtacggacacaattagaaatagaaagtaggaaaaggaagacactttgctaaaactgaggaagaaagtgtaaagacggagccttttacggcgaatg

SEQ ID NO: 3768 - DNA, 3000 bp, Unknown
  misc_feature (1)..( 3000): cDNA_ID_1821909_gDNA_ID_1620664_Annot_ID_163871 3000 nt of promoter + ATG
aagagaatacacagcctaggcaaagagaaagtatgtttttgttcttttcacgtttaataactgttgctcatatcaaagactctgggaagaaccttaccaattgcgaattgtagtaataactattcatggtttcagcttcttattctcttcatgttggagatattattttcttgaacatccattgttttatcttttgtatatactagtttcatttgctaagaacaatgtaaaataaaaagaaaaatttgtatactcatgctgaatcaattccttgacagacatctgatttcaaaaagtatgatgaaaagatagttgggtcgagggttaaaatctggtggccgttggatcgcgcgtaagcattttgtagtttgtgctttaatatactacttcaatttatttattctttctgtgctatgtattttcctttaatagctgaatctggactagcacctcggatggttgctggttgcatttctgtcgaccatgcctgtaaatgagtattggatttttaccacaggtattatgaagctgtggtcatttcatattgttctgctaaagagagacatcgggtaaagctaaatatatcagtcttctacatagctattttcgttggtttttggtgaatcattagtctattctcctaagtgatacatatttttaatttgatccaggtcattgataatatgctatatttgtttatgctgctgctgctatgtcgttttcaggttcgctatattgatggagatgaagaaatcttgaatatgagaaaggaaaagtggtctttttctgaatgaatcaaagtcatcaaaggtggggaattatatctctcatctctggttttttgttttgtttcatcccccggattttgtttcatgcttccacattttctgttagcaggataaagaagctaatcaaacgggatgtgatgaagaagcctccacaatgtaagcattacttctccagttctggtgtttttgtggtgctggaatagctcgatgtgaatttttgtttatgagatcaactcgatgtcttgggatgagactggaatagctactgtttcttcatgcaggccccagaagaagaaagctaagacacgcaaggaacagtcaactaataagcaatcaaagatgctttcaccatttccacctaatgttaaaaaggatgatgaggtcatatatagagaggttcttaccattttgttttcagcaaccaatctcttttgttaaattctttccatttattttcctcaggttccccaaatatcaaggaggcaggcagaacaagttctcagtaactgtgctagccagattaaaaagtatctgacagaagcagggaaattgtcgagcgtctccttagctaatcccagtgatgtagtggattcaatatgtggaagggcatttgatgctttaaagcaggaagatgttgttgctaatgaaaaagaagtaagctctctcacatatactagtgcactgtatcaaactacctttattgtttgtagataatatacttgcatcatgtgtctcatacagatgaaggtggtttttgagtaccaatggttatgcaagtcgtctagtttcatttgttctcttacggttctaaaaatttgtgtattctgcaggaccgtcaaggcccaagagaagcggcagtaaaggcatgcttctttcttcctgaaaccagcattgaaacactgaaatctttcatttgtaaaaagaagatgaatgtcatcctcgcttatgttggaagtagatagttaattgcaatcttattttccaatcagcaggaacaacagagagcagcagaagtttctacccctgagctaacttgtgtacctgagaggggactgaacctggagcagtcactaagtgtttgtcctcatgattcatctgtcaaatcagctatttcttctatgaatgagaatggacacaaaatccttgagatggttcaacaaccagtggctgaagaagaggatcttgcagaaactaagactaagacatacaagcgagctcgagtcgaaagctccagcgttcataaagctgatggcgagatggagaaggaagctgcagaaggagaaccctcttgccggtcccacaaatcgagtgctgagcccggagacttgcagcctaagaacctccctgaaccttgctctgtcacacaacagctggctaaggtcaaacagagcattttagacactgtagccagtgtaagacagtttcgctgtgagctggaaagaaaggaacagagcattgcagacactttaagcattgtacgacagttccgatctgagatcgaggaaaaggaagatatgctagaagcttcactcctggaaatcgatgtgttaggtatgtgatatgaatgctgatgaacacttaagagtctatttttctttttggttataggtctctctgataatgtgatgtttggaacaaacaggggagaagatatcgggaatcaacaaaatcctcaactgaagatcatcaagtggattgcaaactcaactggtatcctgaaactagttggacgattgagtaacgtagttgacaaccagagagaagtcatttttttgtatagcgttatcactcgctcaagtctaaagacagttgattttcttaatgtcaagtcaaaaaccaatagtggttcttataggcaccacttttttgatgatttaacaaagttcgaagttaccgcaattgctaatactgatcgattcaatcaaaagaaagcaccaagaaactgcatagcctcaataacagaagtaaaagaatctctcttgtgtcctagtggaactactcaatgaaacgatttttgctcattcccattcgtcaaaaaagtcaaaagaatcaaaacgctgaaactttttctctgtacaaagaaaaaaaaagaaaacattaaacgacgacgtcgtgttttagtttcaccaaaacgcatcgttttatttatatcggacgaaccagtagaattgtagaaagtagaagagagaattcactacatcggcggcgaatg

SEQ ID NO: 3769 - DNA, 3000 bp, Unknown; identical to SEQ ID NO: 3762
  misc_feature (1)..( 3000): cDNA_ID_1821917_gDNA_ID_1620664_Annot_ID_163869 3000 nt of promoter + ATG

SEQ ID NO: 3770 - DNA, 3000 bp, Unknown; identical to SEQ ID NO: 3761
  misc_feature (1)..( 3000): cDNA_ID_2144907_gDNA_ID_1620664_Annot_ID_163868 3000 nt of promoter + ATG

SEQ ID NO: 3771 - DNA, 3000 bp, Unknown
  misc_feature (1)..( 3000): cDNA_ID_2144903_gDNA_ID_1620664_Annot_ID_163867 3000 nt of promoter + ATG
aaccttgaagaggtaagggaagttggaatcgtcgcagccaccggaaggctggagattagtgagattctcgagatcagcggtgattttgagcacatagttcaccattttttttctcctttgctctatgaagcactaaagctttgcagacgcgattcttcttcttcttattatttatcagaatggccccccaaaaaactcatatttcgttataaaccaaatatttggtctcagcccgtttaatttttttgacctatgagtcttttagtccaaaagcacacatatgaaaaagcccaatttgaaagcaattgagcccaagttatttacatctagttgttttatgtcctgtaagttttctatttggtatcatttgatatttcttaggttttttaataatcttaaggattttgagtggttaaaataaaacaccttaggatttaaacttaatttctcaaagcaaaatcatagcactagactcaacatttttttttaaaaaaaacaccattagcaaactacaagcctagtaagtcacaatcaagaattcaaaccatgattaaccaatatttgctcttaagtccaactaccaagataggcaaaaaaatgcaaaaaccaacggaaaaagatcaacttctttaacgatagaagaaaacacatgttaaagaaaactattatttatagaaaaaggtttctccaatgctacgctttgttcgctattgttgacacaaaatggcacaaaaccaaaaaaagaacataaagaaaaaatgtaaaagctcgtgtgggtgtagtgggaacgcaccaacacgcaacctctggattagaggaatcctcatcaacagccaaacacgttgtacaaaagtcaatctagtgtcttgccatttggcttcatgtcggtttcgcgacactgagagaaagccacacgtacatctacgtagcttcatccccaatcaatccccaatttatttcttttgaattccgtcatttcttctgcattattgtcgccattatccttttttgttttgtaatcagtattttatcattaaacgtgacaagtactgtcttcattctccaacacataaaatagtcagaactcaataaataatcataaaattgagtactctttggcccctgtatgattagccgttaaactatcactttcgcaaaaaacttcatgtgattactttgatatttatatgtactaaaatagttttttttcttcgtcttatgttcgcatataacttaaaagataaataactcctacgaagtatatgatacgtgactccaatcaaaatctttgacttgtgagttgtgaatatgaatttaagtgaaactgtcgcccagtattttttacggtcaacagcatgtggatacttttaaatatttttgtttaacaaattaaagtgaagaattttcgttgtctcgtgaaggttttagtggtatatatatcagatttccaaattttgcaagatttattttgatacatatatgaagttacaaaacatacaattacattccaacgttaacattgttttactgtgataactgataatgtaatcctgcatgattttgggtgaacttaaaaacgaaactactgaaagttgcatgtcgttttgcaatcataatgtgggcaacacgaaaacgagctcgaacgttggaaatattggagaaactcttaaagtccgtgagaggtttacatttgggagatgtgatgattggaaactgaatgtgggacaaaggtttaggatcttcaaaatcgcgattgagttaattggggacgtgaagctcgtataagtattcttgataaactcatctttaacagaaaaataataatgaaaaactcttctgttttggatctgtctcacatattggagagatgctcacgttagcaaaaaatcacatgtcgagaagattaatctcaaattagtttcaccacaatgaagttgaggagatgctataaaaatatatcgaaaccgttaagtgaatatggatttatggaaaatggccagatacatcaagatcaaaccatccttctctaagagaccacttaggacctctaaagaaaacaaaattgataaggaaaggacaaaaaaaaaaaatccataaaagacaatctagatgataagtaactataaaaacaaaagttaatgtctctgtaaattaccaaaaacttaaactcataaacaaaaaccaatttagaattgaaacatgttaaccaagattgaactaaaaaaaaaaatcataataaaatagaatttcataagataagtcctacatttccaaaacctgatctcttcctctagttccaaaaccctaaatatcctttttgaatccctaaattaatttgtcaaaatgagttaattaaaatatagctaatttttaattaaagaaagagttgtgatgacagttcttacaaaaatagagattcatttggtaaaaattggatagaagatattttattagcatttccccttttgtttttcgttcaagtgaaggtttcaacaaaattaaagagaagatctcttaatcacaacaattaaagtaaagtttaaagactaaaaacaaagcctaaataaatatcagtttggtggtattaaactagcacgtgtcaaaaactaattggtagacaaaaaaaaaaagtctcacgtgtaacgcgaaagcctttctaaaaaaatttcttcagcatttaccaaactaaagcgcgcctctcgcttccttccttcaacctcttctttgctcatctctctctctctacaagaccaaacttatctttttttttctcttctctctgtctttttacacacagagctctgttttcaaagctctgttctgtttcttcgtgtaatctctgtttcttcaatctgttttttttcttctaattttgaattctcgtacagacgcaacggttatattgttgtttagcctctttgttcttcgaatccaatgtcttcgttgttttgtgtaaccatggattctcatctctagatgatttcgatttcgattccaatg

SEQ ID NO: 3772 - DNA, 3000 bp, Unknown
  misc_feature (1)..( 3000): cDNA_ID_1821876_gDNA_ID_1620664_Annot_ID_163883 3000 nt of promoter + ATG
gtttattagcaaagagccattgacgacaccagcggtgaagtatgaaacatcaattttaatagcaaggcatgccatccttttctatcacatattttatcataaaaaatcgtgggaattgaaccgttacatatagacatagatttgacagcccaatcacatatcacagacacgaatacatataactagctaggttccctcaactattcatttgacttctgaaaaatggtcatctctcgagttctagttaatacaagcctatgatcataattagggcatatggactataatccatcagttgtattctgtctatggtagtcaaattgtaaggcctgatctttgggttttgcaaactatttactagaattgtctagcattttttcctatgatgtaggataaatcacccttataaagggattaaaacgtttcagaaacgtttggaaactaaactacaaagggattcagtaatttattcaatgcttatttcgaacaatgatgatagcattaagatcttacagccgattaaatttgcccaaacaatgatgatagcattaagtttttaatcgatatgtcttcgatttacattgtctattgtatacttacaaacttttatgccatatgaactgttttcttatattaaagattgaaaatgttttatggggaagaagattacatgattggataggaatcttgaatatctctacaaaaacggccttgtttctaatcaatctatgccaaagtcaatccgttttttataacccaaattagctataaaacctactgctatataaactggatgcaacgggacaaccaaatgcattatgtagttttccacttatcgaagaaatgaaattgataatgtgagacttctgtagcagaaagctcatcatgatcaagccttataaaacatttcaaaatctaattcataatgaaaatttgcctagccatttaactagctagggccattaggcccaatgtccaaatagcctgaacgctgggaaaaagtggggctttcggaacagaacaaataaaatttgacgcactttattgtgttgcaagctacttcttgaagtatatattttgattctcgaaacgtcttcagttctgtacaaatttaaatattctattgaaaaagaaatcttggtcgtcgtcgtcgaatcggatacgttaacgttacgacatacgagtcaccattagggccgtagacgaaatactaggagacgcatgaaggtcacgtgtatcaccgttgcagcacataagttttcacctctcagtattgaacatgcgccgtatttcaatttcaagcttataagaatattattttctgttttgtctcgtcacgtagaagaacactcaacacaacgggtcatataaaaacaatcaattgaccaattgaaacacttaccattagctttactaaaacaaaaagtgctacagctcaattatttcgacgtactttttttttttttttttttggtcttttgtggcctatttcgacgttctttaaaaccacgatcatagtggtttgggatatagtaattaatttcatgtgtttaaccaaaaggtaggaaaagtaattaattattagttgttgagaaatcaagttgcaaaggagattaccggcgactccgttggtttatgaaacaaacaatgagacggtttagaatgacggtggccccaatattttaggtctgctcatattattttgaatgatttaattttttttatttaaataaggtacccttatatacataaatgatttaatttagtaaaagcttttgtttatattgcttttatacaagtttttgggtatgactattttaacctcaatcctcaaaactataaaatctattattgcacgcttggattttatatatatatattcaatctataagaactaaaaaataaaagtgatcatagtcaaataatttttgcataaatacttaatattgctacccaaaaaaaagaaaattgcataaatttatgtataattacattatgaaaaattattgatatgttgatatacagttttctaggaaatatcaatatgaaaagaaaaaaagaaaaaaaaacattgtaagctatttcccttgaattacactatatgtatgtgtgacagtatatatgtgtgagcttaatcatataattaccgtaacatcactattgatcttgaaagttacgacgacaaaaacaagattccatcatagatctacgtgtatcttttgtgtgattagtatataaccaaagcgattaagtgaatttaaaatttgtagatatttcttacttaactgattatactataagaagcaaaccccaaaaccatctgcatctcaacgacgataatcgtccgaatatgtttttctaatagagtttgctgaccaaatgcaaatggcatcacgtctcttgccgtttgacgctagcaattacacttcttcattgaaactttaaaagtgaacccaaagaattaactcaataataactgatgagtatacaaattattgtttccggctaaaaacctgaaattaactcaaatttggaatggggatattataactttgttcccacgtataacaaattagttcataattaagaggagaatcacaaaaataactgatgtattgatgttcaattttggaaaattaagatatttccaatggtaataatctgttacagccttactgggagtagtatgatactaaaacagtaaatgcattttagaccgacataaacaataattaagaagaagaatgtttgggtcaaatctcaaagttagatattatttttttgctttttgcacaagaaaacagaaaccaaaaaccactagtcaaaaaaccacccatgtattcctcctagtctctaatccaacaactatataaaaacctctcccattctcattttgttactcatcccaaaaataaaaagagtatatctctcacacacatacacaaacttgacagttttttaatttctctgttagtgaactcaaaccttcccatttccatg

SEQ ID NO: 3773 - DNA, 3000 bp, Unknown
  misc_feature (1)..( 3000): cDNA_ID_2105056_gDNA_ID_1620664_Annot_ID_163882 3000 nt of promoter + ATG
aattagtatagtcgagtcgaatcagataaaaaatcacaccggtcctaagtatctgatgcattgtttttgcagaacacttctagggtgtttctcaagatttacatctttgccgtctcctatatccaacctttagtttcaaatcagtgaaaacagagttttagaacacattcaaagacaggaagatcttaagatggattctggatttaagtccttaccagtaaaagaatggttgtgtgctcttgctcgctgaccagacatcataatagaagtgcaagttgtggccgtaacgatgacgtgggtcaatctgtaatttcaagagatggatcattagagtatattcaatgatagctttggatgtcaagtagggtacttgtctttgatatgaagttacaaagatatttaggttatggggacttacagcttcaagccaatgctgaagagctaatttctgagccttttcatctttagataagcctttcccaacctaagaaagtgagacccacgttggtttttcatatgaaagagagatattgagttctactaataacaccttgacttataagtaaacagagataaattgatgtcagaccttagcagctcgttttctagctcgtgcccatttcgaaacagcggtctcatgtttttcttctccaaagaaagacacagagctcaaatccaaagctgcaccttccaaagtcctccacctacaacatttcaagcaatacaaagggttagtgtaaacatctttaaaagacattaaaaaaaaagacgaagatgaatcaagtaactcaccagagctcctcaacaacgaccgcacaatctgctaagttccttctggtcctgtaactcttgtacaccttttgtaacgtagttgcagctgcatcaagctcggtgacaggtctaggagagaagaacacaaatggctctggtggagtaactgtaggtttcttgatttggattctctcacagtttcttccattcaaagtgttaggcgttgacttctttgtctccaagacctcaaaatctgaatcagtcttggtctctttaggaacctcccagctgttgaaactcaacgaccgctccatagtactcttaggagaattctggtgcctattagtatcgtctctcttgaaactgttggttcttgatgtcaagcctccgtctttaagtttgaagcataaggacccaacttcaagacccatgaccactaatataacgaaaggataattccaaagtatatttaatatagaaaatcccctgcacacattaattaaacaaacagtagtcgcattaaaattagctataccaaaccaattatttgtctcattcaaacattttaacaaataaaagtaccttgtgtgggtatcaaacacaaaacaaacgttccttggtgtttgtttagacaagaaacagagaagcttgaaagaataaagaataaaagaatgatttttgttctttggagataaaactgaactagggatatgaatataatgatgactaagagatcttaacataaatataagtaagggtaggcagttgaagactattgagagagtaagaagtcttcgtttttgcaaaattgttgaatatggaaaaaatattacggaatattcaaagttggcgtgtttgaattgttgaatattaccaaaagagacaaaatagtgagaggaggctaactaggagacagagtatgtggggagccataagagatggaggctaacgaaggtaagttcatggaagttattgagataaggacaattcacataatctttttccaacattaattttgtcgttcttatttaattatataaataactacatatttagtacacaataattttaaagggtttacgtattaattatctaacggtgaagtttaggtcacacaatggttcatgtagaattattacacacgatgacacgaatgtcaaaatttgcgaggagcataaacgttttacatttgaaaactttgtatgcacttgtgttgacaaattaaatcttcggcatgtagacatgtatggttgctataaaattatctgctatttcagagttactcaacgggtttacttttacatttgaaaacaaaattctctcaaatccttacacaaggtctatatccaagaagaggattatgaaagaattgaactagggtttaattcatcaaaaagtcaaacggttcaaagaaatacgtcaagttgtcaatttgcgaattgtccaatataaacatgtattttctatcttagaaatactaaaaatcaaatcgtgttatttcttttgtcaaaaacctgtctatcattaacgttcagacgcagttttatttgttccaaagtatagtttatgagactattgaatacattatcctacaaatggtcaaacataacatatacatttaaaattgtaaaagaatttctatttctactgaaattttatatctttaaagtttcaattgataattcaagtcatacaagttcacacgatagacaaaattttattttgttaaggagtgataagggttacttttgggttttatatgtcttcatcgatatgaacatgttcaactcgttttatttacatggaatatgtcgtacgtacgtccaaaatttatagaattgtagaaaataaacttccaaaattttaccattgactttcctcgaagctatagtagttctgaaattggagactttgaaagataaaagtacaaagattggagtaccactcaactctagctcgaagactttctttaatttctgatcttccacgtagtgatagagatgcatgggatgtttccaggaaatacttctacggttctattctaccaaatctggaaaaaaataaaatgaaaaacaaatcatcggaaatacttacagattttaagttaatgggctgggcttagattgttgaattgggcctcgtgctttatctataattaggctatttacgaaacccagccaatgaacctgagctgagactgagagacatctcggtgaagaagtagcagag

SEQ ID NO: 3774 - DNA, 3000 bp, Unknown
  misc_feature (1)..( 3000): cDNA_ID_1821880_gDNA_ID_1620664_Annot_ID_163881 3000 nt of promoter + ATG
tctttatctgaagcttctgccttcaaaagtcgaggatcattcaatacgtcatgactgctcttaatcttttgctttacaacagccagttccttttcctcttcttcagcttcttctccgaatgacagtaaattcaatttcctaattatcacaaagacaacaacaaaaaagtctcaaaagaacagccaaagcaaaattatagctaaagctatcaatcgaccatggataacatcttacttcacgggctttgttgggggttccttgatttcagcagcagattcttctgatgtctttgctaacactctaggaacaatatcttcaaaagggttccacaaaacctgtcacagaaatatacagagtatcaaaaaatatcaagtaaatcacaagaatgacacaccaaagaatcagtatcaatcagagaatgtcctcaatatgaagacatggaacactataatagatcaagcattaacaatccttcacctcgacagataatattttcggagcaggatccagaggtcgatcatccttactcgtgtcaacctctcctagtcttaaaagattgtagattgaatcgcccgttacctaaaagaattaaaaacaagttgcagctaaatatgatcaagaactagaaaagaataattgcacgaagcagaaaaacaaaacaaaagaagtaattttgctttaccttgccaaagatagtgtgcttcttatcaagccaatcacacttatccaaagtgaaaaagaactgacttccattagaattaggtgagctcgcattagccatggcaacaatcccacggtggctaaatctcagccttgaatggaactcatcggcaaagacacctccatatatactatctccacctgttacatatatcacacataaaactcaattgacctaatccagcgagcaatcagaagaaaatttgatacaaatgagaggtcttaaaccctaagaataatcagaaagcgtagaagttaccggttccggagccggtgggatcgccgccttgaacgagaaaaccgggaatgacacgatggaagatggtgttgtcaaagtaaccctcgaggcatagttgaacgaagttccgtacggatttgggcgcttccttaggccaaagctcgacgtcgattggaccatgagtagtatttacaatgacctttccctttgtcggcggctctagcacgtacaccgtcgacatctctgctacttcttcaccgagatgtctctcagtctcagctcaggttcattggctgggtttcgtaaatagcctaattatagataaagcacgaggcccaattcaacaatctaagcccagcccattaacttaaaatctgtaagtatttccgatgatttgtttttcattttatttttttccagatttggtagaatagaaccgtagaagtatttcctggaaacatcccatgcatctctatcactacgtggaagatcagaaattaaagaaagtcttcgagctagagttgagtggtactccaatctttgtacttttatctttcaaagtctccaatttcagaactactatagcttcgaggaaagtcaatggtaaaattttggaagtttattttctacaattctataaattttggacgtacgtacgacatattccatgtaaataaaacgagttgaacatgttcatatcgatgaagacatataaaacccaaaagtaacccttatcactccttaacaaaataaaattttgtctatcgtgtgaacttgtatgacttgaattatcaattgaaactttaaagatataaaatttcagtagaaatagaaattcttttacaattttaaatgtatatgttatgtttgaccatttgtaggataatgtattcaatagtctcataaactatactttggaacaaataaaactgcgtctgaacgttaatgatagacaggtttttgacaaaagaaataacacgatttgatttttagtatttctaagatagaaaatacatgtttatattggacaattcgcaaattgacaacttgacgtatttctttgaaccgtttgactttttgatgaattaaaccctagttcaattctttcataatcctcttcttggatatagaccttgtgtaaggatttgagagaattttgttttcaaatgtaaaagtaaacccgttgagtaactctgaaatagcagataattttatagcaaccatacatgtctacatgccgaagatttaatttgtcaacacaagtgcatacaaagttttcaaatgtaaaacgtttatgctcctcgcaaattttgacattcgtgtcatcgtgtgtaataattctacatgaaccattgtgtgacctaaacttcaccgttagataattaatacgtaaaccctttaaaattattgtgtactaaatatgtagttatttatataattaaataagaacgacaaaattaatgttggaaaaagattatgtgaattgtccttatctcaataacttccatgaacttaccttcgttagcctccatctcttatggctccccacatactctgtctcctagttagcctcctctcactattttgtctcttttggtaatattcaacaattcaaacacgccaactttgaatattccgtaatattttttccatattcaacaattttgcaaaaacgaagacttcttactctctcaatagtcttcaactgcctacccttacttatatttatgttaagatctcttagtcatcattatattcatatccctagttcagttttatctccaaagaacaaaaatcattcttttattctttattctttcaagcttctctgtttcttgtctaaacaaacaccaaggaacgtttgttttgtgtttgatacccacacaaggtacttttatttgttaaaatgtttgaatgagacaaataattggtttggtatagctaattttaatgcgactactgtttgtttaattaatgtgtgcaggggattttctatattaaatatactttggaattatcctttcgttatattagtggtcatg

SEQ ID NO: 3775 - DNA, 3000 bp, Unknown
  misc_feature (1)..( 3000): cDNA_ID_1821883_gDNA_ID_1620664_Annot_ID_163878 3000 nt of promoter + ATG
tcaagtatctgaatacaaaaatataagggtatcatcaattgattttgtgcatcgacactatacaaggaaattatataaacggattggtttgactaagtcacataacgtcaaaatatattaacacacacacacacaccaaaaaaaaaaaatgtttccacaatgcgtttaagtcgtcatttgtatctttggaagaaaacttaaataatagtatgatattttagaattatcttattttttcgttttcatattaataatgttttggtagaatgaacatgaagtagtactatatataatagttacgaagataacattaaataattacttaaacaagcaataaaataaattttattatttttttcaataacaaaatctatatagtgattagcaactaactaaacttggcattgtaaaactttatagttgattactataacaactctaaaacagcttatgcaagtcatgtacagttattagaattcatccaattgacttggctacattgtatatgaatgaagtcaactgcatttgaaataaataaatcttattagcattaaagaactcaaaacttaaaagtcagagcttacgaaaaacaaagtcaaagtcaaaaaacatatgaagaaaagaaaaaggtcgtttacctgagaaacaacaacgtgcctcacaccactgtccaagcctacgtccccgtggccgtggctgtggccgtgtccatgaccggaaacaccacttctcttagagagagcctcaaaaccttcggcacccatggagaggctatgacggtgatgctccgcgtgagcccgcatccccacgatatgcaacgcccctccatcttcttgatctctcagaaaacccgattcaagacctgggtcagacataaccgaaacttgcgtaccaagcgactcgacggactggttcatcatcttctcctgtttcctctcgtagtatcccgtgatcatgaaatccgcgagcagagtaagaagcgccgcgaccatggcgaagaattctggaaaagggaacattttccatggaaactccggcagacatgggtcggacaaagctttggatccgcccgagagcatgtgaacgaaccctgttgcgaggataactcctgctgcgaacgctttggctcccctcattaagccaccgtttaacggaagtagggttccaactagaggaatcgagactccggcagctccggagataaggatcgacgccatagctgcgaacttgagggtaagagcagctgcgtcatctcggcacgggtctgagtcgcccgagtcacagctagttgtgaacgactctgttttgttacatgcaaaaataaattgagttaactttgctaagaaaatctcaaaatttgcatttaagtgtgtttaagagcgaaatgaagtaattgctttgagatttgaagtgacaatacctgtcaaaccagatgataatggtcgaagaaactgccaaaaatcctgaaaacattatgaggcaaaattatgtgaggaaacaggattgaagaagcaaaataacattaaatagatgaagtggaagaagtttcagacctgtaagagagacatttactaaatccgattaggcgattaaacttgtagaattatataaattattgccaaggaaaccagcaagctaagtatatatgggttattaatattatggagttgtctgtgtgttttataaagaaagattgggagaatgtcaatcagtgcgagggtttgtgtgtgcgtgcacgtacgttaacaaggtcacatgaggttcacgggaatcaaatgaccatagaatgtcgtcattttcatctagtaccctcattgacaagaatattaaagtttggaagataataactacgagaaaacaaatatagaattagagatgagatgtatgagaatgttttgttataattgaagtctttgttcgtatcttgcatcagaagtatgactcttgtttggtcaacttgcagaaaaatgactattacaatgcgaaatactagtaatgttttgcgtcttaataaaatttcattcaaaagattatgtaagttaggtttgcattttacagttgattttgtttttctcctatctcatgattctctgttttaataattaaaagttaaaatttagaaaatagccacaaacatattcaaaaagtatatatttgggccaaccggcccagtaagggaagaatgttccttaagttgcctaaatgagcgactgagaaactggcccacaaaggccggacctgtatcattcacaaccggaaaactttaaaactaataaaccaacgttcttaaaaaagcgacactttgggccataatttgttgggaagggaataagtaagaatatgctttgggcatatctgatgatttatatctgtctcatctcatctctcatcgttccgggagaagagaagagagacccatccctcacttcaaagttcaaagtctcgaaggatcttctccaactctctctaaacaagattccaaattttcaaaggtaagcaatcgtttcttctaatgaatttcatttctccggttttgtaagttgagtgatttcgttttgaagaaactctgaatatgataggaaatcaaaattcacagagttttcattcagttgggttttctctgaatttcatcaatgtacttctttcttacatttactttagttgatcaaataaatatccagtctttgacaatagctgattttcagattcgataaaagacttcaaatttcgtgtgttttgattcttctcttgttatggacgtagctgatttaggggggggggtgtgaagataaagtttcgatttctattcatgtctttttggattttgatttgaatttgaagttaaactagagaaaatcagctgaatccttacttgttatatggtatgaaacatctacttgatatgtcttgttctgctgaaccaaattatgtcttgaaatcttagctgcttttgtttttgcaggtgaatttgtttgatagaatcaagaacaaacctttaaa

SEQ ID NO: 3776 - DNA, 3000 bp, Unknown
  misc_feature (1)..( 3000): cDNA_ID_2144897_gDNA_ID_1620664_Annot_ID_163864 3000 nt of promoter + ATG
tctttgatcgaaagaaatttgcctattacaaatagagtagaaaataaatgatatgacgatttatttaagcttttttaaagattaatattaacgaccaaaataatatatataccacgattatgatttttattaaccttttattttgtaaaaaaaatacactgttaaaattttaacttattcaagtttttgtggaagtctactattgactgccgagggatcaatatagcccagtgctatcggttagaccgatcaatcttggcactcatgtatatgagaatgtttcctttattagttaaaatattgttattttaactatgaaattctggttgttactttggttttggaagccaataccctatactacagcggtaaaaacttgaaagtgtcagaatgtaatcgaaatttacatgaattcaactccaaaaaaccggtggaagaactactacaagcaaattaaccaacaacaaatctaacatgtaccttgaataatcattacacaacaacattgccttgcctgaattaaccttaatcctggagaaatcaaaatcccagaggaactacgccaagaaaaagctcctgaatcagagtaaagccagcctaccagttatggaatcaaccaactcctttggtcctgcacaagaaaagtaatgaacatgttgaggaacaacatcttagctaaaaccgaatttcaaaaaattattgtctctaccaggtccaactgcaagaactgttcttgatccagccgcaacctgttaaaggaagagttttagtttccagagaaacttgttagcgtactactaccacagaaaattcacaaataattttcattcaagagcagtcttttcgtgtttcaataggtcggatggtgtttatgtcttctatagttctaactatttgattagtagaaacttttagattttcttttgaataggaggagctctgattatactttcagcctcaataattgatcaagcacgacaaacctcagttcttccagcatcagctacaacaaaagtcgggaggccaacgctctcagcagcctctgtgatcttattcctgtgagcagaaaagataaatgtagctttcaaatttattgaagacaacttattaacatttgtagtaaagtaataatatgtcttgaagtgcgttttgtttgtatcccccaagattttcacctgcttacatttcttgctgtttttgcaagtgacgactatctttggctgcccattttcctcccatcgccgcagaaggtatcggtcactgaaagaattaagatgaaaacaaaaaaaaacataaaccccggactgatgcatcatacaaagcaaacaactcatttcagacgaaattacctctgcatcaactctgcatacatgccggtggcagcatctgcgaatattaaaaagaaagtcattttacttccagtgttcaaatttcaaacacatttcataagacacttacgtgcacactgtgacgcaattttgcccgttctcatcttcaagtcttgcctaactaccagtacctgtgatcagaacaagctcaaattagttacacaaatgttctgattttaacttgtaatctaaaaatctgacatcattgaaaactcatcaccatccttgtatagattatgcaagtctcttttatgaagctaaaatttcaatcatttgatgggtttggaacataaatcagcttgcattatcactaggttttgttataaggatttaagttataatattttactccaaaccaataaaatctaggggcagagacaagagactatcgttacactagatgatagacaaaccattttaagctcttggtccttgccattgcctggtacagaactctgcttctggaccttgctggataaaagtctgctccttttcactggggaggtcacttgctgtgataaatccaatatcatacctatgatgaatcctatcacaacccctggtatgagattctctgctctaaaactcacagatatcgacttcttttcttgtctctgatcatattcaccggaaaaaaaaaaacaatgatacatttttaactgtccaacaagaatgctggtttagtaagctacaagaaaatttcagaacatgaccgaaacaaccgagtaaataagctcgtttgttgcagtctcagtaagattttagagacaaaaacatgataaattctcgtttgggtggtgagaactgagaggcaaacattcaaatttacaccacaaatctctcaattttatttgccaaatcaaccatagacatacatataagaaacttgtgcactataaagccaaacacttacacttaaagcaaagtacactattaagaaagaatcagactttgactctttgagcttaactgatcttacatcaataaccaaaagaagaaagagctcagaatttgtaatttgtttagtttcaagttttccaattcactagccaactgatgccattcggaagttttgatcaaactagactcaattcctcagcccgagataaattttgacaaaaaagaagcaacaaaactaagaacaaattatcaacagaaaagacggaaaataagtcgaaatcaataccatagcttgaggctgcgaagagtttcgagacgaaggccacatgatacgcttctggagattctccaaggcgacagaggaacaaagctaagcctttaaaatcgaatgcccatgagtatgatgaagaagggagataagagcagccttagtaaccgtaaacgtcagggtgttcatatctctgattacaaaacgacgcgttgtttggggcttaatgtacattctggaaaaatacatggtccaattagaaaagttttaacagtatatagctactaatgtaattactatagaatatctctcgaacacacggtgcgttttactgtcgtcgctcctttttgttggtctgtttccacttcagttcttctccctccggaaaagctacaaccccaatctaaaaccctaacggccatttctaccatcggagctccgaaa

SEQ ID NO: 3777 - DNA, 3000 bp, Unknown; identical to SEQ ID NO: 3768
  misc_feature (1)..( 3000): cDNA_ID_1821909_gDNA_ID_1620664_Annot_ID_48017 3000 nt of promoter + ATG

SEQ ID NO: 3778 - DNA, 3000 bp, Unknown
  misc_feature (1)..( 3000): cDNA_ID_2686789_gDNA_ID_1620664_Annot_ID_48018 3000 nt of promoter + ATG
aaaaattctctttggaacgttgtgttgtctgaaatcttcccaaaggttctatcagaagaagaaggataaaggcaagtttcaacatttttaatgttctatggacatttgtagtaatctaaagctttcttttttacttattagttcactgtttatcacagatagctttgagatattattggtctgtgtatcattgagcctagttacggcttcattaactcatgtttcggttctttatatattttaatgaaatatttaatgacatagtgagcgatgttctctgtctcttgcagcattttacatttagtactattctccaaagatttggtttcttagattttctgaaatcttttgtctaagtcttaaatacttgtcttctttggtaatgcagtttcatagaaacccaatggacaacaacaacaacaacaacacttttagttctctggataatgtcatgactaaccaaaatcctcttctcatggattttataccttcaagagaagattcaacttcattctcaacaatgcttccatggaataccatcagatcagatcctctacaaatgggtggctttgatattttcaattctatgctgactaacaaatacttatcatcttctccacggtctatcgatgttcaagataaccgcaatgttgagttcatggctcctcctcctcatcctcctccacttcatcctttggatcatttaagacactatgatgattcctcaaacaacatgtggggttttgaagcaaatagtgagtttcaggcattttcaggtgtagttggtccaagtgaaccaatgatgtctacattcggtgaagaagatttcccgtttctaatttcgaataaaagaaacaatgagctttcattgagtcttgcatcagatgtttctgatgaatgctcggagataagtctttgtgcagctacaagattagcctcagagcaagcttcttgcagcagcaaagacatttctaataacgttgttactcaaggtttctctcaacttatatttggctcaaaataccttcactctgttcaagaaatactatctcatttcgccgcatactcgctcgattattcatctcgaggaaccgagtcaggagctgctagttcagcctttacttcacgttttgagaatataactgagtttcttgatggtgattctaataactcggaggcgggtttcggatctacatttcaaaggagagcattagaagcaaagaaaacccatctcttggatcttcttcaaatggtatgtaatatattcattcactttttttgcataagttaaaaaaatggtttgatatatatgatgaagttttatgagttgatatttctcttcaggtggatgatcgatatagtcattgcgtagatgagattcatacggttatatcagcgttccatgctgcaaccgagttagatccacagttacacacccggtttgccctccaaaccgtttccttcttatacaagaacctgagagagagaatctgcaagaagataatctctatgggatctgtattggagagaggcaaagacaagactcaagaaacctctatgttccaccagcattgccttcttcagcagctgaaacgaaagaaccatcagatttggagacctcaacgaggtttgcctgagaaatctgtttcggttctacggaattggatgttccaaaacttccttcacccgtaacaatccttactcttcttaactatctactttatgatgatgacattgttaactcgattttataagcaaagttatgttttatttaatgcagttacccgaaagattcggagaaacatcttctagctatacgaagtggcttgacaagaagtcaggtaatgtctcatgtttgttttcttatgcaatgactcattgataacaagctttgttttcttatgcaatgactcattgataagatctttgttttcttatgcaatgacttattgataacatctttgctcacaatgatagcaaatatggtattcaaatgagtaatatatatcttgacatactagtcatgtctgaaaaaccggtattggttattttaagatgagattagggctaggaaaaaatcaagcttttctcttgaactacaaatgagactagattatgtattcttgaattcacaataatgttactcaagtcctaggattgtagtcgcacatatgttttgttactgaagtaagttaaagcgggcaaatgatatagagtgtgtctctttgttgtgtgtgattaaaggtatcaaactggtttataaatgcgcgggttaggctatggaagccgatgatagaagagatgtatgcggaaatgaacaagaggaagctcaataacagtcacattcaacccaacggaccaactcttcgaatgccaaaatctgttatgatgagccaagcaatgcataaataagacaacaattgtgtttaccaactttgtgataattaggcaattgctactctatgattgcccaaaacctaaaccatgtacgactatcattacgtatgttataattgtatatacaactcctttatctttgactatttcattttattatcctgtattcttatatcataattatcatcatcctcattaaacttcatgatcaccatttttacgtaaaaataaaattaagttcatgaaaatatataaaaagtatgtaaccactgaagatttattttcatatttattcaaacaaactacaaaatacaaacctaaagttttatttcaccgtttgcatttaactttttttctcttacaagtgagttttattattccaaaaactgaaatgaataatgacgaaaatctcctagcaagcgacgtcgtattttggtttgacttgagaatcttcggtcaactaataaaaacgcagcgttttcatctggtacggacacaattagaaatagaaagtaggaaaaggaagacactttgctaaaactgaggaagaaagtgtaaagacggagccttttacggcgaatggaggaagacagagccaccatg

SEQ ID NO: 3779 - DNA, 3000 bp, Unknown
  misc_feature (1)..( 3000): cDNA_ID_1821891_gDNA_ID_1620664_Annot_ID_48022 3000 nt of promoter + ATG
gcaacagggttcgttcacatgctctcgggcggatccaaagctttgtccgacccatgtctgccggagtttccatggaaaatgttcccttttccagaattcttcgccatggtcgcggcgcttcttactctgctcgcggatttcatgatcacgggatactacgagaggaaacaggagaagatgatgaaccagtccgtcgagtcgcttggtacgcaagtttcggttatgtctgacccaggtcttgaatcgggttttctgagagatcaagaagatggaggggcgttgcatatcgtggggatgcgggctcacgcggagcatcaccgtcatagcctctccatgggtgccgaaggttttgaggctctctctaagagaagtggtgtttccggtcatggacacggccacagccacggccacggggacgtaggcttggacagtggtgtgaggcacgttgttgtttctcaggtaaacgacctttttcttttcttcatatgttttttgactttgactttgtttttcgtaagctctgacttttaagttttgagttctttaatgctaataagatttatttatttcaaatgcagttgacttcattcatatacaatgtagccaagtcaattggatgaattctaataactgtacatgacttgcataagctgttttagagttgttatagtaatcaactataaagttttacaatgccaagtttagttagttgctaatcactatatagattttgttattgaaaaaaataataaaatttattttattgcttgtttaagtaattatttaatgttatcttcgtaactattatatatagtactacttcatgttcattctaccaaaacattattaatatgaaaacgaaaaaataagataattctaaaatatcatactattatttaagttttcttccaaagatacaaatgacgacttaaacgcattgtggaaacattttttttttttggtgtgtgtgtgtgtgttaatatattttgacgttatgtgacttagtcaaaccaatccgtttatataatttccttgtatagtgtcgatgcacaaaatcaattgatgatacccttatatttttgtattcagatacttgaaatgggaatagtgtcacattcaataatcataggaatatcgcttggagtatcacatagcccatgcaccatacgtcctctccttctcgctctttccttccaccaattcttcgaaggttttgccctcggtggctgcgtcgcagaggccagactaaccccgcgtggatctgccatgatggctttcttcttcgccatcactactccgatcggtgtagcggtgggaacggccattgcctcatcttacaactcttatagcgttgcagcattggtggctgaaggagtgctcgattctctctctgcggggatacttgtgtacatggcgcttgtggatttgatcgctgcggatttcttgagcaagaagatgagtgttgatttcagagttcaagttgtttcttattgctttttgtttcttggagctgggatgatgtctgctcttgcaatttgggcttgatcacttttcattattactatttgtttatgaaagtaataaatttaggcatgcctttttcttttttcttttggacagaattattataggtatgcctatcactctatttgtttcaaaataatgtttgtaatcaattctattagatattcactctttatcaatcatgttatatatttttgtagctggtaaacaaataattaatttttgaacaaaaaacaaaaacaaatacaattagtttttacaagcaagtatgcaactgaaatccaaagattttcttgacgccttttcgagcatattctaatccttcattttgatttagctcaagaaacgccataatagaaccatatatatgaactaagtgtttttaaaaagagtaggtcatgactcatgagtaatcttttccacgatctttaagatatattattcttggaaggtcgaaaactataatatttcattttctgtcgaatatatatatatatggatgacgatggttcccatgcatgatgaagaaaaagacgaaccctatatttatctgtttaattaaaattttctttgtggagataaactctctgtgaaacgcattccgccacctaatttatcatatattttcatgtgaaccaaaataattaaaatttgtttgccatatatatatttatttgttgttatctttctgagtgataaaggtgacaaacatttttgtccactgatacccaatctcttccacttcagttcccttcctttcaaattttatctcgtgcttttacagcatatcccacaattcctgtaaattatctcaaggatttggtgcataaattctattttttcgtacttttttgttggatatgtaaatcagaaccaaaaaaacttaacattgattaaactttacaatttacgtatgtcccattagaggggaactacagtttttgtaggaaaataagaaatttgcgaactaaagacactaaataatcctacttttaaaatcacaatagttagtactcaataaaaaatattgtatattgttgtgaaaaaatgtaaatagtttggagaaactgctactaataaacaaataattaagagatgtcggagatccaatttaatcataaaaataaaatgattagcacaatattgcactactgatttagatgcgatacacgtggaatctgcaacttttcaccaaccacatccgagcctacaccacgaaatttgaggatttttatttatttcccaaaaatttctctgtatttataaactaactatttcttgggacgtgaatatacacattttatattcaacggtccgtgagtgtatattgtatatactctctctcagattccctccttgtagctagcttctacctcctcctttcattcatggcgaaaaactaaaaaagacatccatctttctcaaaacatctctcttactctcttcgttttctgactgcaaccttttttcccaatg

SEQ ID NO: 3780 - DNA, 3000 bp, Unknown
  misc_feature (1)..( 3000): cDNA_ID_3071828_gDNA_ID_1620664_Annot_ID_48023 3000 nt of promoter + ATG
taaattggttgaagacccggaactcaccagcttttgccgggtttgctatagcgatctcaacacattgaaccgtgtctcttatatcgaggtagcctctcgtctgcaaagggaaaaacttcaatcaaaacctcaaatttttcgattgaaatttcatgtgaaaacagatcaagaaagtcatttacctgaccacctttaccataaactgtaagtgggtgaccaacagcagcttgcacacagaaccggttaagtgctgtaccaaacacagcatcgtaatccagtcggttacggagttcctcatgcatctctgtctcatcagtcttcactccataaacaactccttggttgagatcagtggctctaataccccaagccttgcaagtaaaagcaatgttgtgcgaatcatgaactttgctaagatgataaaaggagctagcttgcttggggtatggcaaagtgtcagttctaccgttgtgggttatggttatataaccttcctcgatgtcaatatttggagttccatactcacccatcgtcccaagttttacaagatgacactcctctccaaactcttttatagcaaagagaacgttgagagtcccaatcacattgttgtgctgtgtataaactgctctggaccggtcaatcatcgagtaaggagcggatctctgttccccaaagtggacaactgaatccggctcaaaagacttgaaagactcagctaagaattcgaaatcacagatatcaccaacgtacaactcaattgatttccctgtcaaagccttccatcggctgattcggtcatgaatggaggcaataggagtcaatgactcaagtccaagctggtggtcgaaaagacgtcttacaaggttgtcaacaatgcaaacttcgtaattcttcttggacaagtggagagcagtagcccaaccgcaataaccatctccaccaatgaccataacacgctttggtttagaggatgagttattggtagatgtttcgggtggtgcttgttgggttataggtacagcagttgctctgaaaacgcagctttttctcggtttcttctcttggaagagaagtcctttgagagaagatcttgaaagaagctgagcattgaagaaggtctgccctgaaacaaacggcttaactgaattcttgctgctgctgctgctaagtgagataactgaagggcatgaagctgaaagtagatgcgccattttaaaggtttgttcttgattctatcaaacaaattcacctgcaaaaacaaaagcagctaagatttcaagacataatttggttcagcagaacaagacatatcaagtagatgtttcataccatataacaagtaaggattcagctgattttctctagtttaacttcaaattcaaatcaaaatccaaaaagacatgaatagaaatcgaaactttatcttcacacccccccccctaaatcagctacgtccataacaagagaagaatcaaaacacacgaaatttgaagtcttttatcgaatctgaaaatcagctattgtcaaagactggatatttatttgatcaactaaagtaaatgtaagaaagaagtacattgatgaaattcagagaaaacccaactgaatgaaaactctgtgaattttgatttcctatcatattcagagtttcttcaaaacgaaatcactcaacttacaaaaccggagaaatgaaattcattagaagaaacgattgcttacctttgaaaatttggaatcttgtttagagagagttggagaagatccttcgagactttgaactttgaagtgagggatgggtctctcttctcttctcccggaacgatgagagatgagatgagacagatataaatcatcagatatgcccaaagcatattcttacttattcccttcccaacaaattatggcccaaagtgtcgcttttttaagaacgttggtttattagttttaaagttttccggttgtgaatgatacaggtccggcctttgtgggccagtttctcagtcgctcatttaggcaacttaaggaacattcttcccttactgggccggttggcccaaatatatactttttgaatatgtttgtggctattttctaaattttaacttttaattattaaaacagagaatcatgagataggagaaaaacaaaatcaactgtaaaatgcaaacctaacttacataatcttttgaatgaaattttattaagacgcaaaacattactagtatttcgcattgtaatagtcatttttctgcaagttgaccaaacaagagtcatacttctgatgcaagatacgaacaaagacttcaattataacaaaacattctcatacatctcatctctaattctatatttgttttctcgtagttattatcttccaaactttaatattcttgtcaatgagggtactagatgaaaatgacgacattctatggtcatttgattcccgtgaacctcatgtgaccttgttaacgtacgtgcacgcacacacaaaccctcgcactgattgacattctcccaatctttctttataaaacacacagacaactccataatattaataacccatatatacttagcttgctggtttccttggcaataatttatataattctacaagtttaatcgcctaatcggatttagtaaatgtctctcttacaggtctgaaacttcttccacttcatctatttaatgttattttgcttcttcaatcctgtttcctcacataattttgcctcataatgttttcaggatttttggcagtttcttcgaccattatcatctggtttgacaggtattgtcacttcaaatctcaaagcaattacttcatttcgctcttaaacacacttaaatgcaaattttgagattttcttagcaaagttaactcaatttatttttgcatgtaacaaaacagagtcgttcacaactagctgtgactcgggcgactcagacccgtgccgagatgacgcagctgctcttaccctcaagttcgcagctatg

SEQ ID NO: 3781 - DNA, 3000 bp, Unknown; identical to SEQ ID NO: 3775
  misc_feature (1)..( 3000): cDNA_ID_1821883_gDNA_ID_1620664_Annot_ID_48024 3000 nt of promoter + ATG

SEQ ID NO: 3782 - DNA, 3000 bp, Unknown; identical to SEQ ID NO: 3774
  misc_feature (1)..( 3000): cDNA_ID_1821880_gDNA_ID_1620664_Annot_ID_48026 3000 nt of promoter + ATG

SEQ ID NO: 3783 - DNA, 3000 bp, Unknown; identical to SEQ ID NO: 3772
  misc_feature (1)..( 3000): cDNA_ID_1821876_gDNA_ID_1620664_Annot_ID_48028 3000 nt of promoter + ATG

SEQ ID NO: 3784 - DNA, 774 bp, Unknown
  misc_feature (1)..( 774): cDNA_ID_1821991_gDNA_ID_1620665_Annot_ID_48030 3000 nt of promoter + ATG
gaattcataattggatttgctcatagtttagtgagttcttctatatagattacacaataatgattgtattatccgtgtttaccaatataattttagtgaaaaatgcaatgtaaagttttactgagaaatgagaagaattgagtcaccaagctgatggtacatactacataagatagactactaagaattttacattgaccagtagaaatcttcaaatctctataaagtggcccaaaataaaaacgatttaaaattgcataaacgatgttgttgtttaagccttcaacattggcaaatgatggcaatctcagaaaaaggagtcatggcaatctcagaaaaaggagtcatggcaacgaaaattgacaaaaacggcgtcgtattgagggttaaaagttgaagtccctaaaccgtcatcgtattggaactacgctgagggggaaataagctttcgcgaagcttcgagagttaaggcgacatttcactgagttttctctacgcgacgtagatctgtgtctccggtaactttctcttcattttttctttctctgttggattattttacttttttttttggctttgttacggaacctgctcatgatttgacctagtgaactcttagtaacgttttagggttttaactttttttcttggatgaatgatgctgggtccttctttatgttagagttgttctttgtttaaagaagttatcaacgtcagtttgctttagtttataaagcttctcgttcgacgatttttcctctgcaactagaaatg

SEQ ID NO: 3785 - DNA, 3000 bp, Unknown
  misc_feature (1)..( 3000): cDNA_ID_1821987_gDNA_ID_1620665_Annot_ID_48032 3000 nt of promoter + ATG
gacggtgggcttgtttgcagaaacggacggaggtgaagcttcaggatctgccgtacgtgcttggagcttgttgtgtgttgcataacatttgtgagatgaggaaggaggagatgttgccggagttgaagtttgaggtttttgatgatgtggcggtgccggagaataatatccgatctgctagtgcggttaatacgagggatcatatctctcacaatctcttgcatcgtggacttgccgggacaagaactctataggctctgtttttcaccttttcttattttgaaactgattttttattgcaaattctttttccaaattaggaataaaaacattttagggattggttggatacagaaagaatagttgaattgagagtagaagtggctgatgatattgtttgtgttacttattagcattgtgtaatctttagttcatgtattttctatacaaattgaatctgaaacctcttaagtataagcttcttctctttcgatttttcacaaaattggtcgactagaaaaagaagaagcaattccacttttattacaagctcaggctcagacagaagtacaagtgtacaaccatgaataaatggaagttgtacttaatctgtttcgtttgcaggatcttccttatctattgatgtgttgagctctttgagaaggaatgcaaatttggaagcatgttttcctttgtcattcattatttgtgggctaaatgatacaaagaggaaagccatatgaacatgttatttactgtcacatggcgcacacagaggaaaagccatatgaaatacaacatttgaatatgaaacttgttggaacttttttgacaaaacttttccggtgactttccggccaaattccggccaaacggctgaacggaattgtagggtcattagtgcattggaaagttagtaaagagtactacaaaatggtatacacatacgtcaaaaatgaagttgtattgaatgagaaataaaggtgtaaagtgggacacttgggccaaaccggaccgaaccgaaccaggctgcgggttgtcgggacgtcccgtcgtcggctcaagggctttcagacttgcgaaccgtcatacttgtgagttattgagtttgctgagttgaatcttatggaaatattctcaggatggtctcaaaatattctcaagatagtttcaaaatatgtcatgtttatcctgagaatgttctgcaaaatcttatctacttctactatataaagagattcaacctctcattatttctaaaactctcaaacacaaaacagtctaaattctaaaatctctcctctctcttgctttttaaaagtaatttcttagtttactttcacataaacatagtcatgattccattgatttaaaacttaaaagtttctaatcatgtttttttttacaaacgtgaatgtggattaaatgagatttcaatggaaagaaaacaaagaattggagatgcaaatttccttaaaagccattaagcttactttgtgattgtgattatccaagtatataatttaattcataaacagtaacaataatcttcattcatcaatcgtcgcagcttatttccttaaaaagccaatataagctacttttcaagccggcttgactcatacatattaccagattaccccaacagtcaccatgaggggacgaatctcctctggggttaaccaatgggtactatcgtaatttcacaatcaccaataccattgccgatcaaaaacagcaagcaacgaacgcgcggttcgtctcgatcccgtcctctcatggctgttgtcgttgcagagacgtcgttgattttcgatttcgatttcaagcttttcacgtactcattggaacgatccaatctcaaaagtctctgattttgggagagagcttcgttaaactcagcgcgaattgtaatttcccttttgccgcgattttggattacaaggtacgaggtttttgatttctcatcttcaatgattgaagtttgatctgggttctagaattctaattctgtgtgttgccctttgttttattcggcttattgaagatgcttgacttcgttttatgaagttcgtatcttttttgattcagttctcttctagggttttcttgtgttagagctctgaattttggtaatttttttggtaatgaagtttgattatggtggaaacacgaattttcaggagaagggttagttcaattttatacttttgcttggaaaagtaatatgtttgaagttggacatttagtttcataattagtcggcaatgcagataagctgtgaagaagacatttaaaggaattatctttcgttcttttcgaattgaatatggtgttggggttggtttaggtattttgtttggattggtgattcttcaacacatttcacctggatcttagttagagaaagaaaggacagttccatgttagacttgtttgtgtagttcagttgccacttgactagaacttctccttttttttgtacattagctaaatgggtagattcattttgtttccttatttgttgaagctcttttattgggttggttagttgcttcgttttagatgaaaattatatgcggtgttatatggctctgagcatgtttccggaagttgctggcttaatgaagcaaatacatgcgaagattatgtgaagaacctaaagtactctgaaaccaaatttatacttatattctagtgtttctatttatgtatagattttaaaatttttatgtttttttttggttttaagacttggttagtgcaaatggaatggttcattatcttggttgtttttatgtatactcttgtttctattgcaatgtcattctcgtggtcaatgtttgttgctaaggttttgattccatttgtcacttttgcaggtgaaataatttgacagctgaggatttaagcatttatgtgctgcaactctgcaagcttgtcatgtaccactgtttgtatattgtttataaataaaacagtggacttaaagttaaggga

SEQ ID NO: 3786 - DNA, 3000 bp, Unknown
  misc_feature (1)..( 3000): cDNA_ID_1821983_gDNA_ID_1620665_Annot_ID_48033 3000 nt of promoter + ATG
aaagaacgaagaatcactgaattaaccggtttgtttccggttaaaatgtggattaaaacttttcggtcaaagaaaaccgggaaaaagaagtagtaaatgggaaagtctctaagtcgttggtcaacgtcgtgaacatgtgcttgactaatattaattaatggctgttttatttccaaattccaatttctggctgaaaagtacatgaattatgcttaaaactgtgttttacttaatatataatgacgaggaaacaacaaaaaggaagaagcgaagaacgaagtagacgaagacgatgaagaaaggtggattcagcaataatctcaagctcgcaattcctgttgctggcgagcaatccatcaccaaattcctgtatgtttctcgatctctctttctccatggatctgtggatagatagatgtatttgtgtgtggaaatgtctctggttttgtttttgaaggaggaaaggttttggttctctctgtaggactcaaagcggtacgtttaaggatggagatctacgtgttaacaaggatggagttcgaatcatttctcaattggagcctgaagtcgtaagtctttcctcttcctcgttcggtgctgattttactgaatttcgcgagtgttaggtttgattgtttatttgtactgcatatgaagattttgttgagtttgaatgcattaactgtaatgtggttggtggatctgatcataattagaaccttcttaagatcatttctgtagttctggatagagaaactcagggattaagctcatatcttctagattactgtttgtaatctgtttcgtttgcgactgtgtttcagctgtctccaattaagccagctgatgatcagctgagcttgtcggatttggatatggttaaagtcattggcaaaggaagtagtggtgttgttcagctggttcaacacaaatggactggccaatttttcgccttgaaggtactcattggttaaccttcagattcttttatgtatatgatgagctaaattcctcatcttttctctgtgtttgaagatttacaaatctttttcttccttgccttgtcactcactgtgcataactctgatgctatatgattaggtcattcaactaaatattgatgaagcaattcgcaaggcaattgcacaagagctcaaaataaatcaatcgtcacagtgtccaaatcttgttacctcgtaccagtcattttatgacaatggcgcaatctcactaatcttggagtacatggacggaggatctctagcagactttctcaagtcagttaaagccatccctgactcctatctttctgccatctttagacaagtaagaaacacaggatacacaggaaactatacgcttcactgttaattggttgattgatgtgatttattggttctgttattgcaggtgcttcaaggattaatctatcttcatcacgataggcatatcatccatcgtgacttgaaaccatccaatctgttgatcaaccacagaggagaagtcaaaataactgactttggtgtgagtaccgttatgacaaacaccgcaggtttagcaaacacatttgtggggacttacaattatatgtctgtaagtatcttatttgtctcttgagcattgactagtttgaaacccctttcgagtgttataaaaattgagaatcttaatttttcctttttacagccagagagaatcgttggaaacaagtacggaaataaaagtgatatatggagcttgggtttagtagtactcgaatgtgcaacaggaaagttcccttatgcacctccgaatcaagaggaaacatggaccagtgttttcgagttgatggaagccattgttgaccaaccgccacccgctcttccttcaggaaatttctcccctgagttatcttcattcatctccacatggtaatctctcaaaaaattcctgctccctcttttactgagattactttactaagttaacatattccactctacactctcatccagtttgcagaaggatccaaacagtcgaagctctgcaaaggaactgatggtttgttttatataatcccttttgcatgtttttcatccattgaaatgttgaatcatactctgtgtcaaacaatttcaggaacatcctttcttgaacaaatacgactactcggggatcaatctcgcgtcctacttcacagatgcaggatcgccacttgcaacacttgggaacctgtctggtacgttctccgtgtaaactacaagggagacataatatcaccatctggttcctgttatcatctgaagatttcttgttttaccttccagtgataaaatgatctttataatacatatagatatattaaattgctgtattttaagattatagatatataaggtacatgagagtgtttatttaaaaaaattcacttggaattcatgttttgtgatacgttagattggaatccatttgggaaaagaagaatcatctgttcttatgtctcaaattttgacttcattcacttttcttcttgtcttttaagaaagcttccacaatctaactgttcgatgtgaaaactgagattcgagtaagaaaatgtgaactgtgttatactgttttttaattagataatttagattgcactcagataaattaataacattcctcgaatacttttatgtgattggatatattaggtatatctgccaaccaaccaataaactgctatgtttaaacaaattaaataaattagtatatgtttactcaagaataaagaagatagaaaagaaaattctatatgagctaaatttgctggaggaggcatcggacgtgggtaccagacctttccaagcacacgagtagtgcttagccatgtcatgctaacatacaccatttggttcatacaaaatccaaatcaaaatctatttttaaaatcttttgcacacgtctttgaaaaacacctctcatactatagctacggaagcttcaatttcaaggtttgtctaaaagctaacgattatg

SEQ ID NO: 3787 - DNA, 3000 bp, Unknown
  misc_feature (1)..( 3000): cDNA_ID_1807640_gDNA_ID_1620665_Annot_ID_48034 3000 nt of promoter + ATG
aacgatactcagcaattccatatagtacccaagcattgttatatagatcaggagaagcattactcgcaactaagaagtgaaattcaatgaagcaatcgaattctttcaccacaaaacaacccaaaatccttcaaaaccctaaaattggaggcaatctcattgagtcaattaccttaggttcaaattgcattccccaaacctcagaaggaggagcttccaaaacagcaatcgtagcattagtatcaacatcaaacacacggacaaagctatcaatcgaagaagatgctgcaataatcccagaaggatgcgcagccaaagctgctactcccaaagagtgtccagtattagtccgcacaagatccagctcgtccggtcgccataacttcaccgtctcgtcaagagatccagtcagaagcaacgccggtcgatcttccgtcgccggaacccacgtcgctgcccaaacggaatcttcgtgagcgttctcgatcgatttcagacctgcgagtttcattctctttttaggtttttactgtgtttcctcaagtgagcaagaagaagcaaaagacccaaatttgaaacagagactttgattctcgttttttagttataaaatagaaactcgcgtcgtttttagtagttggaaacaatagagtgtttaacatcgttccgtattcttgtttactactaaaggcccattaatatcgtaacaggcccattaatatcttcttcctcactctcccgccgtcgtcagctaattgcggagaagtactctctggagccgccacgtctcagtgatccgactacgacacctttcttcactcttcttcttgcgtcttctctgctctcgtggtctctctgttatttaattttaatcgattgagatcgcttttagctctcgtctttgaattttacgggcagaaaatgggtgaagaagctcgagcgttagatatggaggagatcagtgacaacacgacgagacgaaacgatgtcgttcatgacttgatggttgatttatacccgcttagcagctactacttcggttcaaaagaagctcttcgcgtcaaggacgagattatctctgatcgagtcatcagattgaaatccaagtaaatcgagttttgatgtgatttagatcatctggtttttttcttattgttttaatctatagctaaagtttcttttttgtttcttttgaagttatgctgctcatggattgagaacttgcgttgaagctgttcttctggtaattttatagttggtagccaaattagggattttgaaaagttttacagggaaaattggtttgaaaggattgattaaaatctaatgttgggacacatcaggttgagttgttcaagcatcctcatgttttgcttcttcaatatagaaactccattttcaagcttcctggtggtcgtttgagacctggagaatcaggtttagtatgctgtttccttgcatctttatgcataaatatcgctgtctcaattctaaacgctaaagtcatgtttctccttaatcttctagatattgaaggtctaaaacggaaactagcatcaaagctatcggttaacgaaaatgtgggtgtttcgggttatgaggtaggaactatggcttcttgttaaagtgcttttgtatctgattgtttctggcttaagaatggtctctctaattacaacattgttgtaggtaggagaatgtattgggatgtggtggagacccaactttgagacattgatgtatcctttcttgccacctaatattaaacacccaaaggttggttagttagtttcactttcattgtaagaaaaagttgagacttttgaagatttgcgcttatactaaaagctctgctctatcctcatcttttgtgtaggaatgcacaaagctttttcttgtgagattaccggtacatcaacagtttgttgtgcctaagaacttcaaactcctcgctgttccattgtgtcaactccatgaaaatgaaaaggtatgtactatcttacttgcattgcccttaactcatcgtgaacttttaatcgatgttcctggtaaaactaacagggtcagtcaatcaagctgtatttaattatgtgttgtgatgtttcatttatgcgttgcagacttatgggccgatcatgtcgcaaattcctaagcttctttcgaaattctccttcaacatgatggagatatgaacgaacctcatgatcattgcctctagtagctcttgccccccgcaatttgtgataggattatgtttggggaaatcgtttgtggagcctctctgagtctgtgactatataatgtatatagggcttataatatatagacaatgttgaagaatagcatgttcttgttggttatagagactagacatgaagtatactgatagatagattaatcaattcgaaacaatttttctttgtgtgataatttcgatgtgtaattgaatgtatacatgagtaaaacaaatataggggtgtatgcttatttgtatattccttgttgaagaaaaccttgttatcttcaaacatgaaaccgagaaacataagtaaagattttactgtttgttatatgtgtttattgtatttgatcaaacaatatttgaaatattgaaaactttctataaatatcaaacgttagtttggcattctgcgttagcgttttgttgtagtggtgattttgggagtgtttaaaaaccaaaagctaaagaacgaagaatcactgaattaaccggtttgtttccggttaaaatgtggattaaaacttttcggtcaaagaaaaccgggaaaaagaagtagtaaatgggaaagtctctaagtcgttggtcaacgtcgtgaacatgtgcttgactaatattaattaatggctgttttatttccaaattccaatttctggctgaaaagtacatgaattatgcttaaaactgtgttttacttaatatataatgacgaggaaacaacaaaaaggaagaagcgaagaacgaagtagacgaagacgatg

SEQ ID NO: 3788 - DNA, 3000 bp, Unknown
  misc_feature (1)..( 3000): cDNA_ID_3092376_gDNA_ID_1620665_Annot_ID_48036 3000 nt of promoter + ATG
cgaaacagattacaaacagtaatctagaagatatgagcttaatccctgagtttctctatccagaactacagaaatgatcttaagaaggttctaattatgatcagatccaccaaccacattacagttaatgcattcaaactcaacaaaatcttcatatgcagtacaaataaacaatcaaacctaacactcgcgaaattcagtaaaatcagcaccgaacgaggaagaggaaagacttacgacttcaggctccaattgagaaatgattcgaactccatccttgttaacacgtagatctccatccttaaacgtaccgctttgagtcctacagagagaaccaaaacctttcctccttcaaaaacaaaaccagagacatttccacacacaaatacatctatctatccacagatccatggagaaagagagatcgagaaacatacaggaatttggtgatggattgctcgccagcaacaggaattgcgagcttgagattattgctgaatccacctttcttcatcgtcttcgtctacttcgttcttcgcttcttcctttttgttgtttcctcgtcattatatattaagtaaaacacagttttaagcataattcatgtacttttcagccagaaattggaatttggaaataaaacagccattaattaatattagtcaagcacatgttcacgacgttgaccaacgacttagagactttcccatttactacttctttttcccggttttctttgaccgaaaagttttaatccacattttaaccggaaacaaaccggttaattcagtgattcttcgttctttagcttttggtttttaaacactcccaaaatcaccactacaacaaaacgctaacgcagaatgccaaactaacgtttgatatttatagaaagttttcaatatttcaaatattgtttgatcaaatacaataaacacatataacaaacagtaaaatctttacttatgtttctcggtttcatgtttgaagataacaaggttttcttcaacaaggaatatacaaataagcatacacccctatatttgttttactcatgtatacattcaattacacatcgaaattatcacacaaagaaaaattgtttcgaattgattaatctatctatcagtatacttcatgtctagtctctataaccaacaagaacatgctattcttcaacattgtctatatattataagccctatatacattatatagtcacagactcagagaggctccacaaacgatttccccaaacataatcctatcacaaattgcggggggcaagagctactagaggcaatgatcatgaggttcgttcatatctccatcatgttgaaggagaatttcgaaagaagcttaggaatttgcgacatgatcggcccataagtctgcaacgcataaatgaaacatcacaacacataattaaatacagcttgattgactgaccctgttagttttaccaggaacatcgattaaaagttcacgatgagttaagggcaatgcaagtaagatagtacataccttttcattttcatggagttgacacaatggaacagcgaggagtttgaagttcttaggcacaacaaactgttgatgtaccggtaatctcacaagaaaaagctttgtgcattcctacacaaaagatgaggatagagcagagcttttagtataagcgcaaatcttcaaaagtctcaactttttcttacaatgaaagtgaaactaactaaccaacctttgggtgtttaatattaggtggcaagaaaggatacatcaatgtctcaaagttgggtctccaccacatcccaatacattctcctacctacaacaatgttgtaattagagagaccattcttaagccagaaacaatcagatacaaaagcactttaacaagaagccatagttcctacctcataacccgaaacacccacattttcgttaaccgatagctttgatgctagtttccgttttagaccttcaatatctagaagattaaggagaaacatgactttagcgtttagaattgagacagcgatatttatgcataaagatgcaaggaaacagcatactaaacctgattctccaggtctcaaacgaccaccaggaagcttgaaaatggagtttctatattgaagaagcaaaacatgaggatgcttgaacaactcaacctgatgtgtcccaacattagattttaatcaatcctttcaaaccaattttccctgtaaaacttttcaaaatccctaatttggctaccaactataaaattaccagaagaacagcttcaacgcaagttctcaatccatgagcagcataacttcaaaagaaacaaaaaagaaactttagctatagattaaaacaataagaaaaaaaccagatgatctaaatcacatcaaaactcgatttacttggatttcaatctgatgactcgatcagagataatctcgtccttgacgcgaagagcttcttttgaaccgaagtagtagctgctaagcgggtataaatcaaccatcaagtcatgaacgacatcgtttcgtctcgtcgtgttgtcactgatctcctccatatctaacgctcgagcttcttcacccattttctgcccgtaaaattcaaagacgagagctaaaagcgatctcaatcgattaaaattaaataacagagagaccacgagagcagagaagacgcaagaagaagagtgaagaaaggtgtcgtagtcggatcactgagacgtggcggctccagagagtacttctccgcaattagctgacgacggcgggagagtgaggaagaagatattaatgggcctgttacgatattaatgggcctttagtagtaaacaagaatacggaacgatgttaaacactctattgtttccaactactaaaaacgacgcgagtttctattttataactaaaaaacgagaatcaaagtctctgtttcaaatttgggtcttttgcttcttcttgctcacttgaggaaacacagtaaaaacctaaaaagaga

SEQ ID NO: 3789 - DNA, 3000 bp, Unknown
  misc_feature (1)..( 3000): cDNA_ID_1821963_gDNA_ID_1620665_Annot_ID_48042 3000 nt of promoter + ATG
taacttttttctaaaacggcacaatgtgcaaatgtattcatatagcggataacaatatccaagtttccaaacaaaccaactctgaaactgtttcactcacataataagagaacgaagagctaattgctgaagaatccgacgaaaatggctccgagatcagattcacaaaccctagccaccggctccgacgaaaatgaatcctcaatcgatccgatcttccacattctccgtatcatccctttctccttcctccgaccaccacgtcttcgtctcaagctcccttccttcactctcccatctccaatgactgtcttctcactgattctcctcacttacttcctcgtcgtctccggtttcgtctacgacgtgattgtcgagcctccaggtatcggatcgacacaggatccaatcaccgggtcagtaagacccgtcgtgtttatgtcgggtcgggtcaatggtcaatacatcattgaaggtctttcttccggattcatgttcgtactcggtgggattggaatcataatgttggatctggcattggataagaatcgagctaagagtgttaaagcatcttatgcaacagctggagtctcctccattgtgattgcttatgttatgagtatgctcttcattcgcattaagatccctggttatctccgttagagggttagatcacttttggcttcaattctgtaattggatctttagtataagatcgatcattagaaaaaatgtgactttttgttttgtttgtttgctaaagcttatgtgtttcttgtttgataatgagaatttagctttgaatgttagtatctgcacttgcattattgttgaattttgcgttgaagaagataatgggaaattttctgtaacagttatatgacaacacaaacaataaagtagagatttttgaagtttggtttgttggatcgctttgttgcttcaggtgttgttgactaaggcttggaagttgaggtctgcaataatattgcagatgcagatttctaatttcacaaagaagttccaacacagaaatgctatatgtaaaagaaatatcggtcaaaattgttatttatgattttaattacatgatttacaataagaagtaatgaaatctgaatgctgtgtatttacatactttatacatttagtgatgaatttaagtaaatgattgatagattcaaaattgtgtttgctgtgtgcattgttcttatctgctgaaataggttcttggggagaagagacgtcgaggtgagcacgtcacaggaaacttggtggaagttaggatatcaatgggacggtactcaggcatgatgagcccttctcgctcttccctggtccaaacccttgatctgccattgaatgtcccgtacttgactagtttacggaaaccccatgtcttcttctttgctgcggtgttcaccagtttaccattcatcttttggctcagatactctcgcaccgcatgcaagctctgttccacaacctcaatgggtggggagacgagtgggtttccttccgcgctcagttttcgtaggcgcctcatgcatccaatagactcaggcaacactgttatcttgttgtagctaatatccagttcgaggaggttcaggagaagaccgatagaagatggaagagcagaaagatactggaagttctgactgacattgaggatttcgaggttgatgaggttctcgaggtcctcagggaggatcataaggcaattgagacgagcatcgaggacacgcagggaagtgaggcaggtgatggtggctggtaggctaatgagcttgtttgagttgacacagagctttttcagattggttagttctaagcctatgttgtctggtaatctaatcagctcgttgaagttggcgtttagttcttcgagtgacctggaaaatccaaaacaaaagaaaacagaggaatttatcagcattatcatcatatatgattggtttggtccagatttggttgaggtgtgaaacctgcaattttgaatagtttgggggagggaaacgagaaagttgccggagacattaaggatcttgagcttagaaagacaaccaatggagtttggaagagctttgatctggtttgagtgaatatccaatgctatcaagttgagtaatcttgctgttagagattctggtattttctgttacaattcatagacaaacccccaaaaagaacattagaaacgtatattctgactgtgtatgagtgtatgcatagagatatgaaccttgatatgattgttggagagatcaagcttgcaaatatttgccaaattgagggaaggatttgggagagattgtaatgccatgccactcaaattcacaacctctagtctctcttcctcgttgttattgtatgatggtgactttggcgataaggatggtgaaagtggtgatgatggtggtgatgtactcaagtccatcatcatcattgtcatcatgtgatccttttgtccatgtaattgctgatactgatatgcatcttcgcatatcatcgttttatgtgtgtttgtatggaggaaaaagatgataatggtgaaatgatgtggaatgagtgattcttgatctgcttataatggcaacacagagagattaaggaggttatgtatggacgatcaaactttagtgggaaattgaaggaaatgaatactcttcggaaattaatgatttgtaattaaggaaattataaaaggtgattagctgatgaaggagagatactcatgcgtcgccaagtttttctaaacacctgatcgaaaaatgttagagctacccgcaaatcactcataagtaaaaaaataaaataaaaaagttcccataaatttcatttcaactttgagactaattttataatcagagtctgaaatgtaacaaatcaaaatttgtggggttaaaacagaaataattaaaaatatgccacttgtaataattccaaagcaagctctggtgacacgatcatcggaacaaaatagagtacccggtgacg

SEQ ID NO: 3790 - DNA, 3000 bp, Unknown
  misc_feature (1)..( 3000): cDNA_ID_1821959_gDNA_ID_1620665_Annot_ID_48043 3000 nt of promoter + ATG
aatctttgctttgtagctattttctcgatatatttcaacataaaatcataaaaggaaaaatgacggcgtttggaatcaccgtcctcgccgttttattgaaaatgtaagcgtgcatggtgcctaatcgcaccgacgatgccgacggtatttgattttgactcattcagcgttggccctttcttaaaactttattagtagttaattaatttgcagattcttttgaccttttagctctattttatttctatgaggaatatggtctctcatggaaaattggaaattgtaaatattccttgttgttgctgatcatcaacagttgatgtaaggtgaatctagaagtataatagtatgaaccaatgtaagaatcgtatactgtataattaactttaaaatactcacatggatactggatagggtctgttctacgttgctccacatgaaataatacactattattgtgaaaaatagatatccaaacaaaagttttgttgaatagatgactacgttaaaatttacagtttgttgttccactattaacaaatgaaaaatatatatgctttgttgctcaaagttcaatatatatcaaattttattactagataatactataatccgcgaataacagttcaaactttagactatagacgtctagacctaacaattgtcgtacactcgtattatttagttgaagaaataaaaaacgtattacttttaaacgaattaaaaaaatcatgattaagtcataaactattgaacataatatagtctccattaatctatattatctaatactcccgtgatcggtcaatgatgtatgcagaattcagaacattagtacgtcacaaagtataaaatgacggtctttaatttacttgttcaagcttttcctccattgtttattttcaacatgattacatgaaagtgttgtttacttctcttaataaccaacttattcaaactgcattttaatctataaatatgactatatgagtgtgttaaaacacctcagaatatcagcaaaacgcttatcagctgaccttgatttattagttttttttttatgtttcacgaaatattagttaatcataattccaagaatgcttgaatgtctatataacctaacctaccattatgttcttaccatgatttaaattatcttctcaagttccattttcgtgaagaatatatgaaagtcaaatattatttgctgaaccttttttttttccttgtagcgtgcaggatagggattttggaaactatggtctaaagctagagtctacaatgtcaaggtaaaatattataaatttaacattccatcatgtcatactaaaaaggaaaaacaaaaaagtccagtatgtgtcattttagccacacaaacaacagcaagtgcgtcgaataaccatcaaataaatgatctacacataagaaaagatagaacaaaataaataacggagaatgaaaactgaatattttttgatattttattttcataactgaaagtatttatcttgaaatttttaaaacgactttacaaaagctcaagcaacaataatccgaacagaatttttgtttgtaaaatgctataatcatgcttttctttctattcaactttttatcagttaaaaggcagtagaccaatatattcaagtcttaaataattttagaaacagcgtgtttcatacatttgtatttttggtactttttagctaacatattgacttttatacaaatcttttttatactgaagatatttatttgaatattttatttagttacttattttagagagcgtattgactactgactatttagacaattttgacgttcgcatacggaacatttttgaaacgtaaatagctatcctcaatgtcacttgaagatgtgatagtggttaatttagccgatattaatgtagcatcacataattttgagttgcaagagtctggtgaaccaaatttttgtaaagagattactgtttgaagacatgttaacttacctaaaatttatattctttctacttttaaccctgaaaccgaaatcggacaataaacttcataatttcatagttctggaaaattatttaatagtaagcatttagtttgattgatgtagtaatttgtcattttttaaagtactaaatcttttatttgttttgaaaaagtttttaaattttaaatagtatcacgaggaagcccccgagtgacgactgacgagtcaaagctccttcgaggaagtttcctatagagctctctctctatctcctctcgttcctcctctattttctcgagaaagtgacggaaaataattcagcagccagagagtatcaaagggaaagagctgagaaaatcctctgttccgccgataattgaggtagatgattatattatatttcttttttttcgattcaacagtaactatagaaaatttgttgtttctggaatcgccagagattttttttttctctttttttttcctctttgtttacctttttgcttctgctactttgtgtttgtttattcgaatctctcctgcgctttcgcacgatttacgatgttaccctacacgattgttgttggaccacttcctacacctaaaactaatatttcactgagctagattcttcttcttcttcttcttcttcttcttcgttttgaattttgaaatttccgggaaatttttcggtatctattcgtttcagtgtatctatcggaaaacggattttcgaaggttgtttggttttaggtggcataatttggcgaggagtggtaattactgcttcgtaacagtgaaatgtgagacttgttcataagagatttgtctcgaatcgtatttggatttatttggtagtgacttttgaattggactgagattggttttagagaggaagaagagaatgctcaaggctatgtactgtttctgattgggatgcgttttttgttctcttttgtatgtgtttagcttaaagaagagcgtgttgctatctctcctgcgacagtcatg

SEQ ID NO: 3791 - DNA, 3000 bp, Unknown
  misc_feature (1)..( 3000): cDNA_ID_1821951_gDNA_ID_1620665_Annot_ID_48045 3000 nt of promoter + ATG
tacaacgaatatgcaactatatgtcgagaaccactcatgtgtttatataatctcatgtacacaggtattaccgtattgtattgtgtattgaaaattcaaaatactttaaaacatgattagataatttggtacgtgaggtacagccttttgcatgggagatggagcagacataatgattatgagatacgtagacatgttgtgttaaaatgaattgattactgatataaaaaaagttggcaataattcgagtaccatgaatgatcaaaagtctgtggaaacttaactgcgtcacacaataaagcttaaaattctacataacatgcaatgttttttttcatcctgacactaatcgcgcgccagtgaggaccaccaatcttttctattagcattagatattggattattgtatgccttaaataatatttacgataaaatagcatatatatttgttaaaaaagtctcttccaaatccaaaattagatgaatcattagggttttaaatctgtgaactcaatgtatggaaccgagaataacattacttagggttccaattttagggtattatcagtaattcgacacaatgattttgcaattttataggttttcaatcacggattcacagaatcgcaatgtccaactcaatcaacctccgacgtcgtgaataaaattgtaaaagtacaagtcccatatttccgataaaagtacacttcttgattcacgagctataactttgagtctttgaccgagaaaatcttaagcgaaaattctcaaagtggccatactcaaacgtttcaactatataaaaccaaactgaatgttgtaagattctattatggatgaatatttgtttgtatttttgtattcttttccgtcaattatgtattattttataagatctaaatataatcacaccaaaagaaaaaaaaagataagaatatattaaaactcttgttactaaaatgcaataacttcgttaattattatttttatttttttgaaaagaggacgggcgttctaaatattttgttaaatgtacagtttcctccaatttgtaattgatgataatttttgctcaactcatatatataccacatatgtatcttacgtgtctagggcgagagagataatagtgctttgaaaattgaaagacgggagacaggttgttgcttttttagaagacttgaagaatgaaattctgtctctcttcaaaaatcagtctcaaagacagtgacaccacctcaatttttatataatttctgttattatatatattgtaaatataatttcacgtttctttattagtaacttttgctttcctttgtggttacgctctttgagttctgtagttctaggaagatcgagatttgagagagactaaacaaaaagattaaatatgactctttcctttatatgatactattccctacataaaagaaaatttcgtataattaagagataatgtcgttggatagctcatttaatttggttgagcataatattagtggaaaattttgatagttctctttctcaaatttaactttgtgatgactccttatattactaaactttaattaaaatattaaaaagaataaagacggattcaactgccgaatctcctcattatgagaaagcactatttccgttcctaatatttcatgtggtcacatagattgattgaacacatacaattatcaaatatatatatagatggtgtaaatcggcccgcatgtttttagtacacctaaatatctctactcatacatatatctattagtggtagatttgaaagttgtattttaggagcggaaatacagtgctttctcataatgaggaagatctggcaattgaatctttggtccatattttttattttattttatttttttgtattttaaactaaaacatctctaacacaaatatatcaagttaatgatatggacatgtttgattgatctacaacacatatatatgactacagatgtataggaccagtcatgtcctagatcaattaaacatgccctcatttgtattcaattggttaaccgcaagtttatctgttgcatcacaagaccttcgtatttaaacatgccctcattccaatctatgtgtagagtgagattgacaagagctgagtttgaagcagacgcaaagatgctaatggttattatttacacactggtttaatgccttcatatacattataatcctatgatcactacacatgatcaaactaataactgatggaaaaaatttaagagatatgagtcaccaacttcctcaagaaagcaaatatagatgtgtggatattgttgaagtttacctttccatgtaatgctaagtatcttactgttttatggtaaagccaaaaataaatttattttcaattaacggaggcaaaaaactttgccctaaattctatcatattttagtgtagtgtctatggtatttgtataaataaaaaagcataaccaaacattagaaaagaattcactgggcctcagctattattaagccggacctcaaaatttcatatgtatatgtataaagatgaaatataatatagttcgagacatttttaacttgaacctgtggagggaaacgaagcttgaaggaagtgggaaattcaaaaaagcttcagaaagctgccttactattcaaaagacgaaagcaaaaggagaatataatttattaaaaaacaaaaaccataaagaaattgatgtttaattaataaaagaaaaaacaacatcgaaagtatgaaaccaacccaacaatataaattcataacttgctctgtcctcatctcttcgatacttctctcagactaaacatatctttataaacactaagtttacttccaccattactttttcttcctttaagcttcaagaacttcaaagtcttacttaaaccttttgtttgtgggtagagaggaaatagcaaaaagagatcgatagattcttgcgaggggtttagggatttaaggtgggtggttttgtgatg

SEQ ID NO: 3792 - DNA, 3000 bp, Unknown
  misc_feature (1)..( 3000): cDNA_ID_1822736_gDNA_ID_1620665_Annot_ID_163919 3000 nt of promoter + ATG
catctatctctatctctctctactttctatttcccaagatggctcctttgctgtcacaaaccttaatacacaccggcagattccttctccgtcgcttcttagaaccacctccggcagtaatctctgctgtggctgcgagtcgcgtctgcttccatcgatactattcgtcgaagtctctttctctcgtgtctccacttggcttgcactgttcctctttattcagtcctccaggtatctgcaattgacaaattcagcttcctcttcacttcattgtacatgacttgatttagaaataaaagtctcagctagttcttgaatgtggaagcttgtgaacgattcaattctttgagagttgctagatgatttgattccactgcagatttgattttgccaattagaaaagttcttaaaggtgtgtgatttgtgacttgttgttgcagcattatgtaactcagctttctcatcttcggcaacaagtacaactatcgaagtacaatctacagagcatgaagttgtgattgctttaggaagtaacattggaaaccggatgaataatttcagagaggctttgcgattgatgaagcgtggtggcatttgtgtaaccaggcacagttgtttgtacgaaacggctccggttcatgtgactgaccaacccaggtttctcaatgctgcagtgagaggtgtcactaagcttggacctcatgagctattaagtgttctcaagactattgagagagacatgggacgtaaggatggtattaggtatggaccaagaccgcttgacttggacatattgttctatgggaagatgagaattagttctgataagctgatcataccacatgagagactctgggaaaggtcatttgtgttagcacctttggttgatttgcttggatcagctgttgataatgatacagttgctcattggcattcgctcgcgatacatcctggtggaattttccaagcgtgggagagactgggtggcgagtcactgattggacaagatggtatacaaagggttttaccaataggagataagctgtgggatttttctaacaaaactcatgtgatgggtatacttaatcttacacctgacagctttagtgatggagggaaatttcaatcaatagattctgcagtttctcgggttcgctcaatgatctctgagggtgcagatataattgatattggagcacagtccacacgcccaatggcctcaagaatttctagtcaagaagagttagatagactactaccagttttagaggctgttcgtggtatgccagagatggaggaaaagctcatatctgtggacactttcaactctgaggttgcttcagaagcaataagcaatggagctgacattctaaatgatgtatctgcgggaaccttagacccgaatatgcataaggttgttgcagaatctggggttccttatatggccatgcacatgagaggagatccatgtacaatgcagaacaaagagaatttgcagtatgatgatgtctgcaaggatgttgcttctgaactctacttgagagtaagagatgcagaactctctgggattccagcttggagggttatgatcgatccagggattgggttttccaagagcgtagatcataatctagatattattatggatcttccaaaaatccgagaagagatggctaagagaagtatagcagtttctcatgcgcctatactcgtaggaccttcaaggaaaagatttctgggagatatttgtgggcgacctgaggccactgacagagatgctgcaactgttgcttctgtcactgcaggcattctaggaggtgccaatatcatcagagttcataatgttagacataacgccgacgcagcaaaagtatgcgacgcaatgctgagaagaagaaggtcaaaaggatgattggcggatacaatcataagcctaactttaaggatctacttcagatcgatacagcagtttcgctatgtaagaacaacatgccgagggaggcaacgtttctgctttgatcttgtgtggctggtgtagaatatagcaagttcttggttatgatgggtgattgatgaaacaagctagcaaaatcgcatacacgcatgggctccaatgtattatctcttttcaaaacacagacaactgtagatgagcaatagcaatttttctttctttctcttttataaattttcctgggttaataatgttgtaaacaaaagtttttgtctttggtgatatatttttgtcatttgtttctgaatgatagatgattccacatctacaaaagagttagaagttaacatggaggtcgacatcatgcagaacaggaacgacactggaagtcaacctaaatctccttagacttatggtggcaaagaagatttattttagtattcggacaggtaaaaactctctttctatcagaaagaaatgacatttttaatattacatgcctatacagttacaagaatacggttcatcctatagattgtcatgtaatctgcttatgaatgtttcatggtgaaatcattgggaaacctgcaggcgatctgatggacacatttcgttttggatgatcatagtttctgagataggagaccaatacaggcctgattatggcaaattcctttagaaacgattttatattcgttttctgtagcggctgccccttgcaactattaaaggttttttttgcaaaattataaacaaaaggtttcctgtagaaaagaagattgtatttcttttgtttactagtcgtcaactttgcaagtataattttcaagggaccaaaccaaatcaaggattttatttgacttttgtttatatatgtattgtaactgtaattgtaattgtatatcaacccaacatgctaatactataacttagatggagttgaagcgggtacgtgtagtagctgtccttttgatcttgcctcgtctatatattgcatgagagaacattttccataagaaagtaatcaaacacatttggtgataatg

SEQ ID NO: 3793 - DNA, 3000 bp, Unknown
  misc_feature (1)..( 3000): cDNA_ID_1821939_gDNA_ID_1620665_Annot_ID_163915 3000 nt of promoter + ATG
gtcttctaatgaaataatttttcaaagctataatgatttcgattattatgttttaagactatgtgttacttacagatgttgtgacatgttcgatgggctagtttgatctaattctaccacgattagttttagttttacatgaatcggttttaaagaattttgattttgtttgccttgtcgaaaacatagcctcgttgttcactcacagatgagtttattgtgaatgacggatcaaagctattgtgattatacaaaattgtaagctttttcttatggtcatttttatatgttatatatggtgcatatacttatatacataacatagacgtattagttaattaatatgtgattggtaatggattaagtttgtaattgcttccaattagctacaaccaaaacttagattataaacaaacatgagtattgagtacacgaggagataagggatttgtggtttcataagttgcttactcctaaatgtcggatattgttatataataacttagtgtattaattccagctgtcatatataaatttgtaataaaataagtcatatgattgcgattgtaagttgtaactatagtttttcttttcttttctcgacaggtatagagttataaatattaaaatgtattttgaaatcatttaccttatcttaaacttaaaactttggactaattccttttgaaaaattaaaaaaaacttgaaaataaaaggttttaggggttttggatttgatctataatctagagtaacattttattggaggtgaaagactgaaagtgatttgtattatactgttctttttgtctatcgggaaaatggaggtgatgtagagggatccacgtgtaagatttcatgtggcgtagaagattaggatcgacgttgaaaaaaataaaatatcatacttatacgataatatagaataccaaactagtataattttcaaatgggaaaatcaatttgaggaccgactcttaccaacaactattttggctttttttagatgcatctaatttaccaatcattcacgcattgcctcaaagataatatgacttttcgtgtccacgaaaatatataattcctctaaaagaaaattatagtaagtattaatttggtcgtggtcgtcgtcttttatcgtttttacaagtaaacgtagtatattgataaagactactatttaaaggtccacacatagattcagtaattgggtcgagttttgtagactcgtgtaggatcgagtttaatagttctaaaaccagattaaggtaaactgcgattcatatggaactaatccagagaatgataagccatgttagattcatgaaacatgaattgttttgttcgtagcagttacatgcaaattgatccgcataagtcataaccacctacgacaaaaaaaaaaaaaaaaaagtcataaccacctaaaactcttaaaactcattgtctaatattaaaatagttcttatcgaataaatttttcattttagaactaaacaattaatgtaaactagactcgtcgttctgtcattactctcatcatcagtttctttttttttttgattcatattctcaatcattattgatagcaaaaaaaaaaatatataacaagaagtacgtacaatccattgttgtataattaggtcacataaaatttacaaaaagtttgtttgtctttctgtacactacacataatctcggaacgcataattctatctatattgacacgtcatgaagacgtgtcgtaaagacttacttggatatgacttctttgtaagttgcaatgaaactcgtggttaatgccgccaaatctgaaattcttggaaaattcttcgaatatacctttttaatactcatacatatatacattttctcacataacttaatccatatttgaggtttccaccgaatcgaaatgttacaaaattaacgtatccatgcaaatcaatcttttttttccctctccgtcgtcaatggaaatcaatccatcaaagaaactttaaagcatgcgacttttctctgcatgtatagattagtaaaaaaaaaattactttatgggaacgtaaaattgtcatggtcttttgaccaaaattgttttagattctatagttgcctagttggtataatatcttgagccacaaattagaaaatttactaggtagattttaagaataaaatcacaactgcttaggtaacgtaaaatcacaactgatttgtttactgatatatcaactatggttcttataaaaaaaaaactatcaactatggtaacaatgctattcttaccttggactaactaaagttattgaccaacataaaaagtgattaacgaactgatcattgagcatagtcaatatcaaatacaaacagaatgaatatgttccaaataaatatttaaagagtcgttaattaacgataattgacaaagcttgttccatggtaaatcaaacggtaataatatatagtcttcaacagtcatttttattgtataatgaaaatagtaattttattattattattaagatgtaaaaaaagaataaaaaaaagagagtatttgagctggtgatgcttcatcatcatcgtcgtcttcacactttgctccgacaggtcaccacttaagttttgcttttctcacgaaacaaacaaacttgctattttcttctctttttccagaccatgagaaagcaaaataattgagctcattctctgcaaaaaaaaccatctttaatctcttccatttggattcggagagagaataaaaacgaatagacaatttgattctctgtttctctctcacctatttttattgtgttccgatctgatcggatttaattatcaggttcattttcgatttaaatttcgattcttttttttgctggtctcaacggagaaattttccggtgacagcttaaagttttgatttttaattcttttttcacgaagaagaatttcaattttgtgaaaccgttagaagaagaagaagaaaaagattataagctt

SEQ ID NO: 3794 - DNA, 3000 bp, Unknown
  misc_feature (1)..( 3000): cDNA_ID_1821943_gDNA_ID_1620665_Annot_ID_163912 3000 nt of promoter + ATG
aactcgatcctacacgagtctacaaaactcgacccaattactgaatctatgtgtggacctttaaatagtagtctttatcaatatactacgtttacttgtaaaaacgataaaagacgacgaccacgaccaaattaatacttactataattttcttttagaggaattatatattttcgtggacacgaaaagtcatattatctttgaggcaatgcgtgaatgattggtaaattagatgcatctaaaaaaagccaaaatagttgttggtaagagtcggtcctcaaattgattttcccatttgaaaattatactagtttggtattctatattatcgtataagtatgatattttatttttttcaacgtcgatcctaatcttctacgccacatgaaatcttacacgtggatccctctacatcacctccattttcccgatagacaaaaagaacagtataatacaaatcactttcagtctttcacctccaataaaatgttactctagattatagatcaaatccaaaacccctaaaaccttttattttcaagttttttttaatttttcaaaaggaattagtccaaagttttaagtttaagataaggtaaatgatttcaaaatacattttaatatttataactctatacctgtcgagaaaagaaaagaaaaactatagttacaacttacaatcgcaatcatatgacttattttattacaaatttatatatgacagctggaattaatacactaagttattatataacaatatccgacatttaggagtaagcaacttatgaaaccacaaatcccttatctcctcgtgtactcaatactcatgtttgtttataatctaagttttggttgtagctaattggaagcaattacaaacttaatccattaccaatcacatattaattaactaatacgtctatgttatgtatataagtatatgcaccatatataacatataaaaatgaccataagaaaaagcttacaattttgtataatcacaatagctttgatccgtcattcacaataaactcatctgtgagtgaacaacgaggctatgttttcgacaaggcaaacaaaatcaaaattctttaaaaccgattcatgtaaaactaaaactaatcgtggtagaattagatcaaactagcccatcgaacatgtcacaacatctgtaagtaacacatagtcttaaaacataataatcgaaatcattatagctttgaaaaattatttcattagaagacaatcttttggcggtttgtctctatatcccatcattttgattttaagatataaaatagataacaataattttacaaagctacatgactttcatatattcttaggaccctcccatgtcaatatatttggacccttttatttttgatatggccatatcaaaaatagaataatgaacttaaccccacatgtcaatatataagatggcatttccgagtaatgcatcccattatatatatagacataaattataattttgttttcttgcaatcaacaagttcgacaccacagaatttatagtcggtgattatttcaaatttaatgtgaataacatgtgaaaaatatttatgggctagcttttgttcttatctcacttcacccatgtggtgcatgattcattgccatatcttgatctcttccttaatcatgtgaaagctattaaacattcctattttatgaatagtgacaaacaaaattagataggcaagtcgcatacaaaaaaaaaaaatgtaagaacaaaaacaattttcaactttaggttatagaatatatttaccgaccatttttacttgacgagttcggcaatcccggccgacgacagactcatttacatatggaccaaaccgacctaaatcgattctttaacaagttaaaatatccaagaaacctactcactaatcactatagctttttgccgaccacaaatactcgacccacctcttaaatttcattcatctctctggacccaacttaaatcacttttcttcaaattttatttttaataatgggcttaagttggttattcggcccaataactatattaactgggctgagtaaacaatatatacaagaagtctaattatatttcaaaaagactcgtctctattcataaagattagattcatgaatttcaattcgcgatcgaaatggaaacttatttttggctaagaatgtaaaaggaaaacttagatacaatatggaaaaatatgtctaaatacagggacttaaaatgaaaataagtaagagttgctggagcattaccattgccaaagtaaagtacctaaaacgatgaacggagagtgacgtaaacccgaccgttgaaagcactctttcaagtcgccgccggtaactctaaacccgccgtaccaatatttcagtaccctccattaaccctcatcggaaagatcttcactttgccttcatctttctcaattcctcaatccttactctcttccaggttttgctttattctgttaaaaacttaagctttctcaatttcctgttgttggcttcttccgttgaatcaaaattacgattcttgtgctcagattagttacataatctaccttaccattaatttgtttatgttttgggtcacggagcatgattgagatgtgaagagattagtgttgtgtttgtttagtgtaatgttcgatctgtttccttgttttgtctgatagtgtcgtcttcaatcacaaatctgtaatcttttgaattaaaagtcaaaacatgtctgaatttggcagtgcctttaatgtgtgtgttgtttcttaaattgtgcaagactagactcagtccttttctccgtgggatatcatttaatggggaattaagaatcattagttccagtttgttggtttggttgtgtaaatgtgaggaaactgatttaggggagggttcttgaatatttcagggtaagatcttatatgaaatgatttgctaagaggactataagtctcggtgatcggggaattcgatatg

SEQ ID NO: 3795 - DNA, 3000 bp, Unknown
  misc_feature (1)..( 3000): cDNA_ID_2050088_gDNA_ID_1620665_Annot_ID_163911 3000 nt of promoter + ATG
cacttttatatttgtcttttgttgggtactgttgaacgaatgtttctttacttccatcacaagacaaataaataactcaatacgtcgcaagtgattctttatattcctaactgtcgactagaaagaaaataaatatcatagttctttgacaaaaaaaaaagaaaatatcatagttactttactccaaaattatagcctatgactagacttgattggccatagaaaatacttacatattatgttatgatggaatttcttcagtagctattcaattcttgttaggatacgacgctatattatgatggagtttcttcattatttacatgttatattatgatagatagaacaagaaacaaaaataaaaagcttctatgtaattaattatggaaactttctttggtaatttttgtttggacgttgtaaattactttgctgttttttattttatttttttttgtatatgttgcgttttcgtttattgttgatttatatattcatctaaacgtgcttccagttttaaataaatttattttgtatttgtaaacttaaaaggccacatggaaaattttcaaaactttacataaatgactgaaattacaatttacaccatttttcttcacacacttaagaagagtcaagactaaattttggaacattcaaacgggctaaaccattaagcatctttgtctgggccgaactcaaaatatatctctgttcaatccgtgccttcagcccaacatgtgttttttcagcccaataagtttcttgcatgttttgaaataaataatgaattttagtcgaattactttctctcatatcggcatattttgttcattttgtttgatgaatgggtttaagtcgtcgaagttggttaaccgatatcgtaacgtaagattgaaccggagtttcaatactcgttacattttttcgtattctagctaacgtgaacggatgttgtttatacagctttctactacaaaagtagatttcaaaattgaactgcgattttcttcttactcttctagaaacacttcctcatatttaataagaaacgaaagaattagactccgacaatattgggaatgtttagttgtcatttggacccaatataatcaattccatacatttgcaattgcaaggtgggtgagtcatcaaaatttatgaatcttccaaagattatagatagaacagcttttaattagcctaataaacaaaaggaaatacgattatgcatacaaaataaattaaatattaagacttttaatgaattcttaaccaaaaccatatcaagtcatatcatacactatcctccatacacgtggtagcatacataagtacgttaaataattttatttagcaaataattttattataatcatctttgatcaccaagatcatgttgggccatccaagccacgactttagtaatgtgaaaacaatatcataaggaacgaaacactgttcatttcatacaattaaaatacaactttttcctacacattttctcaagagtttagtaagtgagagacgaatgatttgagaaaacagtttttacttttttcgatttgtttctcaaactcagtattttcggatttctaatccagattaaaagttctgaataaaatcacggggtatggagcaaagccgatataagtaaaaacctttccatattgatagacactagatttttttttagttcataagatagatactagatttagtttgagtataatggattaatgtggaactagttgtattgtttagtatgtgtatgttgtatgatttagtgaccgtcttcagttttcttgatgtctttccacgttttacaaattcttgaaagaactgagaactcaaatgtatgatacataaccattgaaaaaaatatttccaccatcataaatagagttttacgaatcgtttcacaacttttaattcagttgacaccattaaataatcaatatttctttagttacaattcagtagaataaaattgcatatgctatattatctaattctatgaatattttctgtctatgatatttgatttttatatactttagattttggatcacccccacattatttcgcttttcagtcacattttgtgtttaatattgctagataagtccgtggttatagcttactttgttaaaatcatatatctcaacttatttcataacagtatctaaagaagatggaattttataaatatatagacactcaaaaatcagaagaaaatatatatccacaaataatagaagaaaacatagatttactgcattcaaatcaagggacatgaaagaatatcctggacccaagtgggttatattttcaataaaatttagcaaaaaaagttgacaatcaactaatcatcaccattattggccataatcattacgtacgcatacacatagccacgatgtctacctatgtttaaatctttgaattctgaaactacgtatcttttatttttgtttaaaaaaaacctagtacgtatcttctttccttacttagacatcatcttctaactttaaggatcgaaattagaagaaaaacaaatgattaatatctacaagaacagaattttgcatttatactcagatactcttctagtacctcacaaaaataaaatgaaattggaattgaacacgccctaaattcaagtactatacggtctatacccatttgagtatatgaataatgcatattgtgagtgaaagagatagatacgatacactcttttctttgtttttcaattggacaaaaggaaacagattttgatctctgaattgaacggtcaagatcgtatataattatttcaggagattaagatcccacgtgcttaaaaactctctgtcagactctttatgtataaaatcctcggcccactcttgttttgatagtacactcaatagaaagacacaaagaaagaaagaaaggacaaacagaaataacaaaaccttccatttcaagaaagcatcatctttgtgtgtccgaaaa

SEQ ID NO: 3796 - DNA, 3000 bp, Unknown; identical to SEQ ID NO: 3790
  misc_feature (1)..( 3000): cDNA_ID_3071879_gDNA_ID_1620665_Annot_ID_163904 3000 nt of promoter + ATG

SEQ ID NO: 3797 - DNA, 3000 bp, Unknown; identical to SEQ ID NO: 3789
  misc_feature (1)..( 3000): cDNA_ID_1821963_gDNA_ID_1620665_Annot_ID_163903 3000 nt of promoter + ATG

SEQ ID NO: 3798 - DNA, 3000 bp, Unknown; identical to SEQ ID NO: 3788
  misc_feature (1)..( 3000): cDNA_ID_3092376_gDNA_ID_1620665_Annot_ID_163897 3000 nt of promoter + ATG

SEQ ID NO: 3799 - DNA, 3000 bp, Unknown
  misc_feature (1)..( 3000): cDNA_ID_1026502_gDNA_ID_1620665_Annot_ID_163896 3000 nt of promoter + ATG
atacttctgctgctctatctgcttactgcgcctccgctggaatcccatcgattgtgtttttaccggcgaacaagatctctatggctcagctggttcagccgatagctaatggtgcgtttgttttgagtattgacactgattttgatgggtgtatgaagctgattagagagataactgcggaattgccgatttatttggcgaattcgttgaatagtttgaggttagaagggcagaaaactgcagctattgagattttgcagcagtttgattggcaagttcctgattgggtgattgttcctggaggtaacctaggaaacatctatgccttttacaaagggtttaagatgtgtcaagaactgggacttgtcgataggatcccgaggatggtctgtgcacaagcagctaatgctaatcctctttacttgcactacaagtctggttggaaggacttcaagcccatgactgcaagtaccactttcgcctctgcgattcagatcggtgaccctgtctccatcgatagagctgtgtacgctctcaagaagtgcaatggtattgtagaagaagccacagaggaggagctgatggatgcgatggctcaagcggattcgacaggaatgtttatctgtcctcatacaggtgttgctctaactgctctgttcaagctgaggaatcaaggagtgattgcaccgactgatcgaactgtggtagtgagtactgctcatgggttgaagtttactcagtctaagatagattatcactccaatgccatccctgacatggcttgcagattctccaatcctcctgttgatgtgaaagcagatttcggagctgtcatggatgttctcaagagttacttaggaagtaatacacttacgtcataagagacaagaccataatctttagctgttttgttttttgaaaacttttagacgtttgtttgcgttactcttcaactcatctctctgtgatctttatctgtttctcagttttccaataaagttctatcgcaaagtttgaatcattttatcttctttgttttttgtgtaagcgataaatctaaagactccggtcaaaatcaacctgttgcagattatattgttacaactagatgcgtcttggagaatgcataaaagaaaaaagtcaaaaaaccgaattgttcatgagtaatcatagagcgatacactcttgtcatcagagacactagcaagtcgaccagcccggacaccggttccacctggtggtctaaaggccacagaccaaacctggtcattgtggttgctcattgtctgaatcgcagctctcattttaagatcccatagcctcacagttctatcgcttgagccggttgctatggctccaccgtctgggctagcatcaacgctcagcacccaactcgtgtgccctgacatggaccccaacagcgttttcccttctgcatcgtgcatgttcacatgcccatcatctgatccagagaagaggactctcgggtctacaggggagaacacaagggaccttacaggcatattgtgaccttctagctggtgaagtagctttgagcggtcaacatcaaaaacacagatcgtaccatccattgaaccacaagcaagtcgtttcccattaggagaccaagccaccgagagaacgaatttcttgctgctggttttatcggaaggttttggtgcatctgggcgtgggattgatagagttgagattaatctccagcttgcagtgtcccaaagcttgactgaggcactacttccacctgcaacagcaaggatcgtacccttggaacatgtaaaatactatgttagcagagcaccattctaaagagtaatgttgaaattataagctcagaagcaaataaaaactccactgcaaactaaaagagagatcattgcactgatacttgatagtcaccaggtcaaaattctatcataccaaatcaagatttatcatcaaagcaccaataaattgttcttaatctactatataagactcaatgaaaaatcagaagatgatctagatctattttccgagcagagtagatgaccctatctgatcagagctacagattcaaacgatactcagcaattccatatagtacccaagcattgttatatagatcaggagaagcattactcgcaactaagaagtgaaattcaatgaagcaatcgaattctttcaccacaaaacaacccaaaatccttcaaaaccctaaaattggaggcaatctcattgagtcaattaccttaggttcaaattgcattccccaaacctcagaaggaggagcttccaaaacagcaatcgtagcattagtatcaacatcaaacacacggacaaagctatcaatcgaagaagatgctgcaataatcccagaaggatgcgcagccaaagctgctactcccaaagagtgtccagtattagtccgcacaagatccagctcgtccggtcgccataacttcaccgtctcgtcaagagatccagtcagaagcaacgccggtcgatcttccgtcgccggaacccacgtcgctgcccaaacggaatcttcgtgagcgttctcgatcgatttcagacctgcgagtttcattctctttttaggtttttactgtgtttcctcaagtgagcaagaagaagcaaaagacccaaatttgaaacagagactttgattctcgttttttagttataaaatagaaactcgcgtcgtttttagtagttggaaacaatagagtgtttaacatcgttccgtattcttgtttactactaaaggcccattaatatcgtaacaggcccattaatatcttcttcctcactctcccgccgtcgtcagctaattgcggagaagtactctctggagccgccacgtctcagtgatccgactacgacacctttcttcactcttcttcttgcgtcttctctgctctcgtggtctctctgttatttaattttaatcgattgagatcgcttttagctctcgtctttgaattttacgggcagaaaatg

SEQ ID NO: 3800 - DNA, 3000 bp, Unknown; identical to SEQ ID NO: 3787
  misc_feature (1)..( 3000): cDNA_ID_1807640_gDNA_ID_1620665_Annot_ID_163895 3000 nt of promoter + ATG

SEQ ID NO: 3801 - DNA, 3000 bp, Unknown; identical to SEQ ID NO: 3786
  misc_feature (1)..( 3000): cDNA_ID_1821983_gDNA_ID_1620665_Annot_ID_163894 3000 nt of promoter + ATG

SEQ ID NO: 3802 - DNA, 3000 bp, Unknown; identical to SEQ ID NO: 3785
  misc_feature (1)..( 3000): cDNA_ID_1821987_gDNA_ID_1620665_Annot_ID_163893 3000 nt of promoter + ATG

SEQ ID NO: 3803 - DNA, 3000 bp, Unknown; identical to SEQ ID NO: 3795
  misc_feature (1)..( 3000): cDNA_ID_1821947_gDNA_ID_1620665_Annot_ID_48046 3000 nt of promoter + ATG

SEQ ID NO: 3804 - DNA, 3000 bp, Unknown; identical to SEQ ID NO: 3794
  misc_feature (1)..( 3000): cDNA_ID_1821943_gDNA_ID_1620665_Annot_ID_48047 3000 nt of promoter + ATG

SEQ ID NO: 3805 - DNA, 3000 bp, Unknown; identical to SEQ ID NO: 3793
  misc_feature (1)..( 3000): cDNA_ID_1821939_gDNA_ID_1620665_Annot_ID_48048 3000 nt of promoter + ATG

SEQ ID NO: 3806 - DNA, 3000 bp, Unknown
  misc_feature (1)..( 3000): cDNA_ID_1822019_gDNA_ID_1620666_Annot_ID_48053 3000 nt of promoter + ATG
taggagattatggttcgagtcttcccatcacaatttcaatcattaattgttggttaactagtaagaatattcagtttttccacacattttggagattataagttaggattctataatttgatccgagtactcatgttatcaaaaaagaattgttttataaaaaaaggtgcaatcaaatatagttgcattttacatatagaacgaagaagtctactttgaggggaatatggttgcattcagtaacattttttagtgaaagtttaatcgtcagtgcttagaccttttccactgaacgaaaaggccttaacctgcattttctccactctcatatgagattcaatttgtatggaaactaaaaatgtaggtactttactcttacaattattaaagtttaattggattaaaacatattatgtagtaatctcctttcaagttaaggattaagtttcaaaaaaagaaagtccaagcgaatcctctggatgagacagagagttatgaaattacatctttaaagaccgttagctgagtcaacttccggtggttgcaacccccacacataaaataagaaaattggtccaaatattgtattgtcactctcgtctacagttcaacgtacccctcacaaaaagctttagccataactagtctcaagtatcgagtttattatcgaagacattagtgagattgcaaaggaaaagaagtggaagatatgatagctgaaacgggaatggtgatggtaggtgttttgggattatgggcacgctttgtccgaaaaccgctccttcaattcaccggagaaatgatgcaagtaatctccgaagtcgtgtcgaggatgtgtcaaccagatacaacatcttatgctactctttcttcaactgctaattaataaccctcctcccaatatcgtcggaaggtgataacatatttaaatttagagttacatataactttttttaaccttgttatttgtaggttctcgattctataatatatacgtttttcgttttcttttgaatgttaaaattatggatcaacaaaagaaaagttatatacctggttttgtgttcctctctcgacatatgatatatatgtttacatgaaagcttaaccgcaatagagtactagtgaggcatcatagaggcttagtagatctattttaggcgaagctgcacgacatcagtaaattgattgataatcaaaggtttagaaatcgcaaaaaccatatgtgattagaataacgacatcggaagaagatgtgttctcgggttcatgaagctgatccacataaattagagcacgtgtataaatgagtctcgttataataacgacatatatatgatttattcggtttgtttgattcgggtacactaaaattaggttcggttcagatttggttttgattttctattttggtgttaccgtttctgctaagatcgttgattgtctgcttcatttgcttttacttcgtccacaaagttttacgagaaaggttggcacgggacttacgggtccccattgacctggttcatatgtggttcctagttcaagtcgtttgatcttaatttcggctactttttataattaattatttgggtttgggctgggccatgtaagcccaatataaaaacaaaaaaacacacagtttcactaacgacgtagaaccatggaaaattttactcatgggcctatttgcttcaatcatctttcttttttgtcacttcttgatgccttgtctcttatttggaccacaaaatatctgttgcagcaacaaaggaaaaaaagttgtaaacgtttaatttgttttctgtttataatgtaaatgtaacaaaatctcaagaaaagtaataatgaaacattcgtttctcaatatcctttgacaagaagtataagaagaaaagtagctacaattgatcaatcacgtgacccacattagtattaatcacaatacttaataattgcttataattattacaaacacaacttcactgtgactattcttgagttggttcttcctacaagtggttatatatcttttgacgataatcttgtgatatgaattaatgaagcatatgttctaactaacaatggaaaactttctggtgactacccactttaccatcattaatgattataatttccaaccttacactatataacgtatcaaacagatagcaaatttacattttgcaattattaagaacttcaagcacttatcttgtgcaataaggtcgtcgccccattctcaacctcacatggttagttatgaaatcatttgtgtatttcgattgtctcccctccaagctaagataaatcataattactaaacatcataaaacctcacactgctatctttgcagtatattctactattatctttatcttgagtaactgttactatcatttgtctctcttcgtacccaagttttgacatgtgacatgtcaactaacactttcacttccaacaaaacacttgtttattcaaattcatactatacacttctcatataatttacgaacattttctgttgtcgtataaaatatttctatacaatttatgctgttttcttattctcagtttctcaccatacaatactaacagtaatagaatatgtgtctatcggtgaagtgggtgtgtcggcgtacataacgaagggaccaaattgatcatttattaaatatttaatcaaaagaagaaaaacaaaaagaatcaaaaacctccatgaaataaaataaaatcctctctcttcttcttcatgtgaatgtctgagtttcaatgcatgtgctcgctcttggatctcaatcgttcttctacagctttttcttcactctcttctctatcccttagctgtcacgaaacattctctttcactcttcccttctctctccccaaaataaatcagaaacctatcaacattcttcaacagccacaagtaaaatttatagacatttctgtctgaagaagaaaaagattgaatttttttgcttgttgtgggttcttta

SEQ ID NO: 3807 - DNA, 3000 bp, Unknown
  misc_feature (1)..( 3000): cDNA_ID_2999634_gDNA_ID_1620666_Annot_ID_48054 3000 nt of promoter + ATG
cgaggaagaaatggaacagtgaagagacgtctcccaaggcaacggctaaagtcttcaggaagcttcttatgttcggaaggaaaaagtaaaaccgacgttggaattcttcttctccggcatcatcgaacctttgttttgagacgacgtcatgttgagttcagttaaaaagcctctcttattctttaaatttttccttgtgtgatattaaatactgtttttcattttattgttgttatcagtttgatttgtctgtttatattacatttgttgatgtgttgtttatagcattgaaagtgggcatttgagtgtgtataaaaaattggtttggtgagttgaataatgtaagaatcttttgtatttttctaattaaactgtttatgatcattaggagaacaatatatggggatgtgttggaatcatgaatcgtaggttaaatcctacaagaggaaaagcttcaggagacagagaagatgaagagaagagaagaaaggaagaagaagaagaagtcgtgacaaagaaagtcagctaatagacatatctccgctatttaaagtcgagtctaagcctttatacacttaaaggttgagggttcgaacccttgttatgtctttttgccctaaaagaaaaaaactttctcatgaaattccgtgagatgattcttccattctaagcatttggttctgttagattgataaagaagtctcctacagtaccaaggcaatgtgccatccatctacaatttgtataactatatcttttggtaacatgttcccatcaagtgggaatctaattcccctgttattcttttcacgttctaagcatttttcaagctgtttaccattttgaaacttagtaacgatcaaaaagaataagggatttcgtcacgtaaattaaatagaatctgtatacaggtcatttaaaaaaatattttagtaagatacacaggcacagctcaacgtctgatcttggtttgtcataaacagcagagaattctaccacaaggaagctctggtactatctttctcattaagcatccgcgactacaatattccccaatttattaaataaacttttccatgatgcaaaagtaccttttattaaacactacgaataaataaataaaggtgaaacacccatttcaaagaaatggtaacgtgtctttttcattaggcgagactagccaatctaagcaaacagagtcgtctttatatctaaacgaacattttgtgaaagaaagagagactaaggtgaatccatggcgtccaagattgtctcagccatagtatttgtgtttaacctcattgcctttggtttagccgttgctgctgaacaaagaagaagcactgtgagtcacatctccacagcgatatctaatttgaacaagatgataattatgtgatctatcttaatattttggagttaaatattttttggtggggcaggcaagggttgtgcaggacactgaggtgcaatataactactgtgtgtatgactcggacagagctacagggtatggagttggagcctttttgttctcagtggctagtcaaatccttatcatgctcgttagccgttgcttctgttgtggaaagcctctcaagcctggcggttcacgcgctcttgccctcattctcttcattgttagctggtttgttattataactcaattagtacatcacatatatatccctagcttaagctagcttagacatatctggcgtttttatttcgttcaaagatgattcaaaactcacaatcaaacatttacaatagatcttagtttatagaactagaattatcattaatctatcatggtatcaaaatcgcagtaaatcttattatcagcttacacattttcattctcttttcaatgcacagttaataattcaaatctaacatgcgtctcttaatccgttatgaagctaaacgtgcttattaaacaaccgacattgtgctaatatttttacaacttgaatgttgttttgttggcgaaaaaaaggatgttcttcttgatagcggagatatgtctattagctggatcggtagagaatgcataccacacaaagtacaggacaatgttcatggacaatcctcctgattgtcaaactctacgtaaaggcgtctttgcagcaggcgcctcattcgtcttcttcaacgccattgtctctcagttctactatttcttctatttctctgctgctgaggcctctctttcaccttactagaggttcttaaccaacaaataagttttattttttttctctctaaatgtgctatttgatatgctaatatcatattttgaggtgggttttctatgtacaactatgatgaaatgttacaactatgacaaaattatttgaaagtgatggtacacatgagatttgtagatttatttgtatggttattagatcgagttgaaatgttgttttaaaaagagtggatgtaatttgacgattttgtgacatatgacataatgctcttattcattgaataaggtttgagctattctcgtgaatgcgtaaattcaaattcgtataatgcatacttttgacagagtaacaattgtttattactggagaaacttatccaaacatgagaacgtccataacaactagtagcaagcaactagctctatctatctccttctcccatgccaaagggtatggaatcccatcaacaccaatcagcaatcaccatccctttattgcaactgttccatttgttaacccaaaaaaatagtttaaagacattaaaataaaatatctaaggagaaggaaatctaattctcaaattctcattggatattaaacgacgacgtggcagatacttagttcaagataatgctatccacacatcttcggtgacctctgtggggaccaatcttcctttgtccgaatatctcatttgctagtacataaacgcacatactctctttcgcaaaatatccactacgatagttttcttcagcaatcacactctctctttgttcgagtaccaaca

SEQ ID NO: 3808 - DNA, 3000 bp, Unknown
  misc_feature (1)..( 3000): cDNA_ID_1822015_gDNA_ID_1620666_Annot_ID_48055 3000 nt of promoter + ATG
tgttttatctttaaacttttaaaattccacagtggacaacaggacaagatatgcgatttacaataatatatagaggatatgaaccaagccactgatttttaagtggttttaaattggaactcatatcacttaacattaagaaaaggaagtaaagtaaaacgattagtcatcatatgcaaatgaaactaattggtcactataataaaacctaacagaagtataggggaagtacaccaattagcttaatctatgaaacgttggataatctagttaaaaatttatgttcacatgcccattaagtacgtaattcagtaaacaagctacaaattgacaggtccagcccaaaaggaacatagatgaaggtggtacatcaacaaatctgaccagtgtgactttgcacagtgacgtcactggtagatcgagtatattttaagtaaaggataataatctaagacactgatcagaaccgtacgaatataataattaatattcactgataattgtacgttttcactaaataacaaattgtcgatcaatgttatttataaaacctcagtgaccttgcatgttggctttatgtttccaagcctttgtttttttttctatgatgctttcattaagttattcggaccaactaatcattgcgtttaccagttaaacagtataattaattttaggaaaacggatactatttttagtctttacatttgcatgtgtagtatgtgcatatatataactactaatctaccatcagtttggttataaggatggtggaaacaaacaattaaacaaatgaagcatcatcatatatataacatagtctacaatactaaccactttgttaacttagattttatttatgaatttgaatttgaaaatgaaaacagtatatatgatataaaagtgaacatggcatctaaatgaaatgatatatgaatcggcgttggcgtgaacaatattagattcaacgaaagtaggcgatacgaacgtgacgggcctccagcattttgtacagtcgctgacgtaagcaacgtgatctgtggttgtccttatatggaacgtgcagtacagataagcagaccttgattttcatttacaaaaataatattgcatacaataattaacccaaaaaaggcgaaaaagaaccttcaaatagagtctttaacgtatattttaattaaggctagtagttcaggaactttaaaagagatgagacatgaaaacacaaatagggctgagagtgagacgtgtgtttgcttatctttcgtaactatttaattggttactagttgtaaatttgcattagatgatattggacgtgacttatcttgaattattatatggtaatttggattcaaaatcctcgtccatgcatctacggtgatgtgtccaacgtaaaacaagttatatgcaatgtaacttttggatgcatactagaaacacaaaagaagtcatgcaatgtaacttttgaaatttggttatgtcaaagattgatttccactgattacacttagtacattgtttagatagtcgaaaatttatttgactgcagtatgtgaaaaactcttaactttgacttcacgagatctattaaacaatttgaagcaggcttatttttgttgttgttatgttagtaagtcaaatgctgaaaacataaaccattttgtataataaaaagtttatgaaaaaataaaaaaagtttatgaaactactattaggaggtctcattaccccgagattagtcaaccatttcaagaatctctggtgctagttttgtttgttctgttttttgcaaaactgaaagtcgcaataatttgacgtctatctatgcagtagtaatttagtactatcctagagcaaagcaggatggaatcaatttactaaataagattataggaccattaggcccaaaagtgaaatatggatataattattgggccgatcatggtgctgtcatggaaaattcaagataagcttttttaacaaatgtgccagtgacaatgatgaggatgaagcaacaatataatgcaacactgtttagtcatgggaacccatcaaagtatcgggaatcacatcacacataaaagtcatttatctctataaaacttaaaaaacagaaaaaggaattattagttctactaaaggttctcatatgaaaagtaagtaaatttcatatagagtttaagtggctatatgacaatgtaaattttttaattaggccgctaagacaaaactttaattgttcaagaagtaaaagatgatcatggcataaaaaaaaagttaccaaggaaaatcaattatgatgaaatggataaggggtttatccggaaaaaaatgcagaaaaacaaaagtgggaagataagaacacatgaaagtacgagaatgcttatcccgtgacactgacatctctctttcacggccccaccaattcccattcttcccccgctaaataatacgccagagattcgatatccaaaaacctattaaaataccaacatttttgttaatctaaaacattagttcgaatcgaggaaaaaaaaaaacattaaattgaaataaattttatttaaaaaattccatactttttatgatactattctgttggtttttaaaatttaaaagttacgttccgacaaaaaaaagaaaaaaatatatttaaaagttacatttatagctttattatgtcatatcatctttatccaaatttagaattcagatgatgaataagataatagacaaattggaataatatgtccattaataaatactaaagaagaaatagtctcatgatcgcatccaaaacgtttttccttcccacaggaaaagaagaaaaacagacagcggaggactaaaacaactagccacaacacaacgcttcaaatatatattactctgccactttcttcaatcttccttcaaagattcttattacagcgacacacaactcttttccatttagatttttgattttttttggttctctaaaggaggagagaaatg

SEQ ID NO: 3809 - DNA, 3000 bp, Unknown
  misc_feature (1)..( 3000): cDNA_ID_1822011_gDNA_ID_1620666_Annot_ID_48056 3000 nt of promoter + ATG
ctaatctcggggtaatgagacctcctaatagtagtttcataaactttttttattttttcataaactttttattatacaaaatggtttatgttttcagcatttgacttactaacataacaacaacaaaaataagcctgcttcaaattgtttaatagatctcgtgaagtcaaagttaagagtttttcacatactgcagtcaaataaattttcgactatctaaacaatgtactaagtgtaatcagtggaaatcaatctttgacataaccaaatttcaaaagttacattgcatgacttcttttgtgtttctagtatgcatccaaaagttacattgcatataacttgttttacgttggacacatcaccgtagatgcatggacgaggattttgaatccaaattaccatataataattcaagataagtcacgtccaatatcatctaatgcaaatttacaactagtaaccaattaaatagttacgaaagataagcaaacacacgtctcactctcagccctatttgtgttttcatgtctcatctcttttaaagttcctgaactactagccttaattaaaatatacgttaaagactctatttgaaggttctttttcgccttttttgggttaattattgtatgcaatattatttttgtaaatgaaaatcaaggtctgcttatctgtactgcacgttccatataaggacaaccacagatcacgttgcttacgtcagcgactgtacaaaatgctggaggcccgtcacgttcgtatcgcctactttcgttgaatctaatattgttcacgccaacgccgattcatatatcatttcatttagatgccatgttcacttttatatcatatatactgttttcattttcaaattcaaattcataaataaaatctaagttaacaaagtggttagtattgtagactatgttatatatatgatgatgcttcatttgtttaattgtttgtttccaccatccttataaccaaactgatggtagattagtagttatatatatgcacatactacacatgcaaatgtaaagactaaaaatagtatccgttttcctaaaattaattatactgtttaactggtaaacgcaatgattagttggtccgaataacttaatgaaagcatcatagaaaaaaaaacaaaggcttggaaacataaagccaacatgcaaggtcactgaggttttataaataacattgatcgacaatttgttatttagtgaaaacgtacaattatcagtgaatattaattattatattcgtacggttctgatcagtgtcttagattattatcctttacttaaaatatactcgatctaccagtgacgtcactgtgcaaagtcacactggtcagatttgttgatgtaccaccttcatctatgttccttttgggctggacctgtcaatttgtagcttgtttactgaattacgtacttaatgggcatgtgaacataaatttttaactagattatccaacgtttcatagattaagctaattggtgtacttcccctatacttctgttaggttttattatagtgaccaattagtttcatttgcatatgatgactaatcgttttactttacttccttttcttaatgttaagtgatatgagttccaatttaaaaccacttaaaaatcagtggcttggttcatatcctctatatattattgtaaatcgcatatcttgtcctgttgtccactgtggaattttaaaagtttaaagataaaacaattatgtcagttcgtgacatatagagagctattcagataatcacattcagcatatatatactgaaattccgagtaaaaaatgctgtaggcaaatgaggttcacatgatcacttacgtacatagaatcgaataatttacagagaaaacacaacacattgcgaaaacaagaaggtcgagaaaacatattttgtattaaagtaagtacttggaaaacacttggccaggaaaaaaaaaaaacaacagtcaaacacttggccaagttgttacattgcgtgcaagtacgatttgtttatatgtaagaattggaaagcgtattttaatggggcgtttagttagggtcgaaatatgaaaacaccatctatgaccaaaacaaatcagggtcaagctagttttaaatctgcattttttttataagaaattgtttgtaagaaatcaatagtatataaggaaaatagacttggtgtaacagaaaaagttatttaatcaacagaggtgagaaaaagtgtttgatagaagatatgatgcagaccaggtgccattgccagcatgttgcattgttggacttgaagtaaccgagtaagtagataattgaaacgtgtcttataattgtcattaagggtcacaccacaaaaaggtttttgtgattattaaggtcataattcccctcacaaaagttggaaatataaaaattgaaaaactttggtcatatctaatctaatctttatctttggtttggttttatacgatcatcccgaagaaacatcatataaacctctcccatatcatacctacaaagaacatgcatgattttaacttattttcagttgtttcttctagtgggtttgagaactcatcatcaattgtcgtcatctgtttgctttgtgctcttgcatgcttacttgaatgagttataacaatagagaactttttagttttattttagcaacaacacttgaaagtataacttgttctactcgatttcataataagtgtgtgtgagatcttttgattactactagagactagagttgcttttaaaagtgtaatttttatttttattttgactcgatatacttttcaacaaaaaccaacttatatttttcttatcttttaataaaaaaagaggtatgatatgcattatcaaaggatctcctaaacttgtctataaaagatctcacgaggcggtctctgatcaaaacatcgtacaacccatctctttttttttttttaacttgtcttctctctttccttaactttg

SEQ ID NO: 3810 - DNA, 3000 bp, Unknown; identical to SEQ ID NO: 3808
  misc_feature (1)..( 3000): cDNA_ID_3092039_gDNA_ID_1620666_Annot_ID_163947 3000 nt of promoter + ATG

SEQ ID NO: 3811 - DNA, 3000 bp, Unknown; identical to SEQ ID NO: 3807
  misc_feature (1)..( 3000): cDNA_ID_2999634_gDNA_ID_1620666_Annot_ID_163946 3000 nt of promoter + ATG

SEQ ID NO: 3812 - DNA, 3000 bp, Unknown
  misc_feature (1)..( 3000): cDNA_ID_2106516_gDNA_ID_1620666_Annot_ID_163945 3000 nt of promoter + ATG
gaaagacaatgattcagagccagaagaattactacgtatatcatcaactgcgttaaatatggcgtctgaagttgtgagaaagagagaaccgccttctgatgattcattcttggttgcaattggaaatgaggattggggaagagaaaccagcattgagaaattcaatgcaggtgagaatgttcggataataaggaaagggaacaactatgacgaggagatgttgaatccgggtagaagcgatgaatcaagaagctattcgcaggcagagatgtcggttcatgatgggaagctcagaaccagaaatgaggcggaagaagactggttcatacgtaaccaagctggtccagaaacagatccaagtcttgtcaaaacatttgtaggagaccatttccacttaaataagagcagtgagagagatgtcctgaccgatgactctttcatgatccattctcgtgttgagaaccaagtagaagattctcggttaaggacagaaatcatggacttagacgtttacggaaccacccaacaagaaaacagtgccccggagaacactccgcatgaaccagatgacctatacatggttcttggacgggaacaagatgttaaacctacattgttaccatggacccctgaaattgactttgagactaacactttggctcaaagaacaagcagaatcgatttgataactgccacaaaggcctctgcaggtgaacaaaccttagatggtaaagaaaagaagagtcgtggtatctccaaggggaaggatgcaaagtcaagagcatcaagtagacctgacccggcgtcaaaagccaagagacctgcttggggaagtagagctgctgtctccaagtccaaatccgagatggtaagttccgtaaccgcttttcgtctttcttgattagtttccttctctcatctggatttggttttttgataggaggaagagagaaagaagagaatggaggaacttttaattcagaggcaaaagagaattgcggagaagagttccggtggtagtgtatcaagttctttagcgtccaagaaaactcctactgtgaccaagtcagtgaagagctcgataaagaatgagaagactcctgaagccgcgcagtcaaaggctaagccagtactgagaagttccaccattgagcgccttgctgttgctcggaccgctccaaaggagccacagcaaaaaccagtaatcaaaagaacatcaaaaccttcaggatacaagacagagaaagctcaggaaaagaaatcgagtaaaataggtcaatcagatgcgaaaagtgtggaactttctcgtgacccgagtctcgaaatcaaggaaacggtggtggaagattcacattcttacttgtcagagaagcaagttgatgcacttcctgctgttgcttctgttgatgatttcaaagacattaaagaattgcatagcttgccatcagaagaaacggccagagtaaagaacagaccgaatgaaatcatagcagagaaagtacaagatcagacgaagatcgatgatcaggaaacagtgaagaatacatctgtttctgaagataagcaaatcaccacgaagcattactcagaggatgttggagaagtccaggcttcacaggaaaaaccggtgtctccaaagaagtcggtgactttttcagagacaaacatggaggagaagtattatttctcaccagcggtctcagagattgacatctcaacgccacctgctactgaagcagatcattcgaggaagaaatggaacagtgaagagacgtctcccaaggcaacggctaaagtcttcaggaagcttcttatgttcggaaggaaaaagtaaaaccgacgttggaattcttcttctccggcatcatcgaacctttgttttgagacgacgtcatgttgagttcagttaaaaagcctctcttattctttaaatttttccttgtgtgatattaaatactgtttttcattttattgttgttatcagtttgatttgtctgtttatattacatttgttgatgtgttgtttatagcattgaaagtgggcatttgagtgtgtataaaaaattggtttggtgagttgaataatgtaagaatcttttgtatttttctaattaaactgtttatgatcattaggagaacaatatatggggatgtgttggaatcatgaatcgtaggttaaatcctacaagaggaaaagcttcaggagacagagaagatgaagagaagagaagaaaggaagaagaagaagaagtcgtgacaaagaaagtcagctaatagacatatctccgctatttaaagtcgagtctaagcctttatacacttaaaggttgagggttcgaacccttgttatgtctttttgccctaaaagaaaaaaactttctcatgaaattccgtgagatgattcttccattctaagcatttggttctgttagattgataaagaagtctcctacagtaccaaggcaatgtgccatccatctacaatttgtataactatatcttttggtaacatgttcccatcaagtgggaatctaattcccctgttattcttttcacgttctaagcatttttcaagctgtttaccattttgaaacttagtaacgatcaaaaagaataagggatttcgtcacgtaaattaaatagaatctgtatacaggtcatttaaaaaaatattttagtaagatacacaggcacagctcaacgtctgatcttggtttgtcataaacagcagagaattctaccacaaggaagctctggtactatctttctcattaagcatccgcgactacaatattccccaatttattaaataaacttttccatgatgcaaaagtaccttttattaaacactacgaataaataaataaaggtgaaacacccatttcaaagaaatggtaacgtgtctttttcattaggcgagactagccaatctaagcaaacagagtcgtctttatatctaaacgaacattttgtgaaagaaagagagactaaggtgaatcc

SEQ ID NO: 3813 - DNA, 3000 bp, Unknown
  misc_feature (1)..( 3000): cDNA_ID_2050942_gDNA_ID_1620666_Annot_ID_163940 3000 nt of promoter + ATG
agaccggctttagctttgtaatattgatttctcgttagccattcgattagtagttttggccagttatggactcatggttctcacgggaaaatttgtcaactagctaggtttacattatttaagtctcaggttcgttagaaatttccattgggaattgctctgttctggtcctttgaggttggacctggagtcatgtagtttgctactgtcataacacttagaaaacatatgcaagctggtgcatgagagaatcttggataagttttgcttgtaaactagtttatcgttttgttacgttcctcaagtggaatgtaccaagacatgatgattatattggatagttttagaacatatgtataccattttgttcggagaacaagctgcattctggcttatctttatgttttctttggacctctttaccctttgctgtcctctaatcgtgatgatatttcttgatttctataggacaaacatgaagagaacaaagaatgcaaggaagatgaaagccgtggctaaagctatagcgttgagcgagaagtatgaagcgaaagctacaaaggacaaaaccaaaaccctcagaactctttcggccaagaaattgtacgagtgattttggttaaaaggctacaaaagaaggaaaacagttataaatttttgatagttcgatttgtctattttggtcttgttaacgtttatgttttcttctagaaagagcttttgcaattttgtaatctccttaagttatcgacctatagaagttacgagtgcttatggattttgaccagatggtaaaatatattctttagcaagactggttttcttaacaaatttccaatcttcataaagtcatatctcaagtaacaaagaaacaggcgtacatgcgagactactacttttaacattaaacaatcattcaaagatcaaagtgtgataacaatgtcaaagacatatacatatgggcgtgtattctatactacttttatatccaacaatgagctctttacacaagatttgttgtctctaccaaatcaccttggctcggtctactgaaatatatgcgctatttcgcattgtcagtctgcatctgttacttctgcttctatgtctacgactgctgttgaggaaccctttcctgcacattcaaacacttaatctcaccatttgatatacaagagatatggttacttgatttgcgcagaagtaaaacaaaaatttgggtaagtaacctttcttaggtttagaagaaaacccatttaagtcttgtccaaaagcagtagtttggttggagaatttcactggttccttaacaaacttatcatccacgactgcattttccacgataagaaaacacaatgctaaatgctttgaaaagagatatacttagataaattggaaaaaatggaagaatcatcttattacctgagaatggttgagtacagaaagggcaaagctgaacttcatcatccatcgctgacctgcagacattttgatattcaatcaagctcgatttggcgaaacaacaaaaacaactgagagggatttgattcttgttatatccttacttgaatatctgaaactcatttccacaattaggacactgcacaagcgtaaacagagagatgaaaaaccgcaaaaactagctaagtggaacatactcttgacggatttactcaaaacacaagtgctagctagctaacttatagtcacgaaactgaaattcttgaaatgcttttttaagctaaagagacaagtagacttacattgctctggacaatatctcgttgtgcccaccaaaaaaaggctcccaaacccaaaattggaacaatcaccacaatcagctgcaaaattgtaagaacttcagttcaccagcacaattagataaccagagacattaaatgattaagactttagagagatagagagagtaatacccagacagagacaatagcatccaaaatccaaccaagctgaccagtcatagagagataagtcaagccaatggccaaagcaaggtttccgagaatcctcccatttccgttgttatctccaccattaaacttcaaacccctaaccctaaccacccgtcttttacggttaagagatttctcactagctagcatcccaatatctcccagacccatcactcgctgtctctgtctatgctcaatcaagcaagctctcaaccccaacttggtttggagcatagaaggagccaagctccgtcttttagcgtgtaatctgttactgggttccttgttgaaaccgtcgtgtatggagaagttacaaaggataatctgcggaatcgaagccatcgtctgaattttgatttcccaaacacaaagctcgagttgagaaggatccacttcaacgacaaatgatatttcacgacaatgctgtgttttaaggttatattgaacattaacagaaactagagcatcgcggggatagctcagttgggagagcgtcagactgaagatctgaaggtcgcgtgttcgatccacgctcaccgcatttttgttatttgtccctactttaattgaaacgcgtcgtttaggaacaacaagtcttattttattttatttttaattcacttacttgaaacgcatcgtttttgacgcgtaatgaattaaactgtttacctttgacttgagagatgtagtagaaaaactttaagatcttcgagaacagacttaaattcatgttgcattagagtttgatgaaaaccgattgattttattttattttatatacatgtattaagatcgagtgtaatagtatatttgtcccatgttcattttttggatgtatatacgacttttagaaatttatgcgttctcaacaaaaagaaaccatcaaaggtagccctcttccgaagaaaaatatttgacttttatcaaccttataaactaacaatcgaaaactcatcccaacacaatcttctaccttcttctctaatccatatagattccacacttcagccaaaaaaaaaaaacgagg

SEQ ID NO: 3814 - DNA, 3000 bp, Unknown
  misc_feature (1)..( 3000): cDNA_ID_2170409_gDNA_ID_1620666_Annot_ID_163939 3000 nt of promoter + ATG
cggagagtgggcatgtgaatcggcagcagaactcgagcgggttgactcagagtttcgggtacagctcgagtgggtttggtgtttcgggtcaaacattcgagtttaggcaatgagagagatgtgaagttactgatgggtgaaaaaagtaaaaaaaaaacttggagatagtagagtggcaattgatgtaaataatagggatttatatggggcttttaccgattcggtgaggcttaggattccacaaaggaaaaaggctcgactggggactagtttgatccaacttgacggcccacaaatgtgtaatgtttctcaacggagagaaaaataaatggttaccaatatttttacaccggttatgtgttgataccatttgcacaaaacggtttaagttctgaattgaataacttaacacccaaaatttggtaaaaagcttaatacaaaaagttcaaaggcattttcgcttactgcgacactcggagttgcagagtactctacgtaacagactctgttcatagagtttgcggcaccggtggtgggacattcttgcggacacagtatgtacttttggaagcatcgttcctaagggttgctgcagtaaactccttgtgacttggctcgcaagaaacataacatggccgcaagaaaaaacagcattaacgaagaggtgtttgagatcttcatgtctagtttattcttcctgttttattatgtgtcgactggtgtcaaaagaaacgtgttgattgtgaatttgtagacgccactctgtaaatttatttaaaataaactattttacttcacgttgagatcgggagttgccgggtttgtgtgccttatctgggcatcacccacacatgcattaagttgaaatgtatatgactttaaaaacttgaaacttcaaaaataaagaaaaagtctttagaagttacgtccacacgagcgtgatccacacttatcggtccttatattaggagcattgtaacttgctgcaataagctgctcattttattaatttgacttttggaaatcttaaaacaacaaaagtacattgtatatattaatagccggatccaagagtgtgatgcttaacatcttttgatgtcttaattaagttgggttttgaagtcagtgttcaaatagaagataacctttttatcaatttacgctaggctctaaatgattactgcgtatttggagcacaacaaaaatataatggttttcttaaggattagataatctggtacatgtaaataactgagttacaattactttctttagaatttggttcttaattaccttattcctctgttttattttgacaaacatataaattttatacgtacacaaaacataacaatatacttttaatatctgtaattcttagcaaactgagtttgtattggtaactactttctgcagacgagtccatagccggaagacgcaccacggctgcaatctaacaatgcgtatgtacttttgggcttgacagagccactcgcaacggcgggatcttcagagaacaaacaagttttgcaaacatgagagagcagagaagatgtcctaaagctatcttcacctcccaccactggcattacgactcctggtttagccggattcttaaaatcgggtctataagtgcgtcccaagattccatcgacttttggggacagattaataaacttgaactggacctcaaaatgggcaaaacagtcatctacaggtaatttgtagttgtggattctatcatcttctttggtcactggaaccacgttgaccatgatctcagctttgtctttgatagtcacgatcacactgttcttctctgtcaacctttcaatcttgatgtctttgtcggatgagtacctgataatatgcattaaaataatgagtgtttacatgaaaatctaaacgaatagacaaagatgacgtttaaaagttgaaacaatcgcaacctacaaaaatgatagggtaaaatttgagtttctatgattaccaagtggataaagtttcttgagggataattaaatcttggccgtcgatagtgaacttgaggtgatcaaggttgctgtcccaagtggcgactttggtggtctcaagggagaatttgtgggagttaaagaggaagccgagagcttggatccatgtaaagtctctagtgcggccagcaggtctatgaccagtgaacctagcattgatctgaaagtcagggtccgagacaatgctaaaatgttcattgctctttccatggaagtagaacacaattccatcaccacctatgaacctcggatctagacaaattgatccataggattcgcagttgggttttaccgctacaaaagatcatatccaaatcttaaaacatattttcaaaatctaaaattaatcaaaatgatgaaattctattaattctaattttaaactgcattggtatatcatcaattacaaaaagaaattggtggttaaataattaccccgacacacggcctcgcaaaggggtttaaagcaatcaacccaacaaattttgttctgagagttggggaacatttcggtagggcactcttcaggacagtcgatgtaccggagctggcatcggggagtcgcattgccaccacaataagtctgaccatgccaagccttgacatgcaagaaacatgaagctaccacaaaaattatcattagcaatgaggattttgggacctccatcctcgttttttttttttggctgaagtgtggaatctatatggattagagaagaaggtagaagattgtgttgggatgagttttcgattgttagtttataaggttgataaaagtcaaatatttttcttcggaagagggctacctttgatggtttctttttgttgagaacgcataaatttctaaaagtcgtatatacatccaaaaaatgaacatgggacaaatatactattacactcgatcttaatacatgtatataaaataaaataaaatcaatcggttttcatcaaactctaatgcaacatg

SEQ ID NO: 3815 - DNA, 3000 bp, Unknown
  misc_feature (1)..( 3000): cDNA_ID_1013540_gDNA_ID_1620666_Annot_ID_163938 3000 nt of promoter + ATG
tgtacgttcttggtattcttgaggaatttgaacaatgttgaaagcttcctataacaacagggaaatcttttataaaatatgaaattaaaaaactctagcatatgttccacggaaaacagagggaggcactggaaatacaaaaaagtaccatcagtttgtgaaatttctgagcatcatcagtgcgatcaatggttaagcaattgctctggttcaaataattgtattcacttgctgctttaatcttcaatctctctgcaaacaaaattatataataaatggtctagcactagcagcttctagctactcttagccttgagcaagtaagctaatcagtaaattatatatgtctacactttgcttcagcagggatacttccaaagaatctcatatgtagctgaaagattgaattcctgcattagttcatagatatttcggtttaaaatgttacctttaagaattggtgaagctcctgcacacaattgataaaagatatggtagcatctctcgccattgcacagctgagccactcttgactggtccaaagagactactaattagcccatgaatagctagcaagtggaactggctataaagcttctcaacagaaaatttaccttttctaggagaactatggtcgttcagcacaagtagtcacacaaacatggtgagaaaataataaaagacgtgagctccatagtcaagaaaatatgacaaacaatcatacaaatgttcaagtcttacaagtttcaagtttagctccgcatatctttccctttgcactaaaatgaatctccatcagtttaccctgcaccaattcagatttactattgaatccaaaccacttctcaatttacggctgacaccaaactttcaaatttatacaaacgattttagtattcctatgaaaggaaaactttcagtcatgcaaaaatttgaagaaaaaaaggatgtacaaattactcacgaatcggctagagttatcatttcttgatgttttagcattcccaaaagcttcaagtatacaatttgtctttaggatttcattttccaccccaaagctacctccaccaagagcttccaagtactgcattgcatattttgctgtctcagttttcccagctccactttctccactaagaaataatattttattcatttgattgatgatatgaatatcagaagtcaccttcacatatgcatagtcaaattatcagtgcacaaaaagcattcagaatagaaagcatcgtaccttatgataatagattggttcttctcctctgcgtaaagaaaaattcaaaaatgtaaatgcatacaataactatctcaacaccaaaaagggagaaagtgtatgctttcactcacctctcatcatatcatcataagctgcatctgccactgcataaacatgaggagcatccaaagcattcttctgataagctgatagaaactcttctccatagatctggacattcttaaaaggatttactgcgatcaaaactggccctgctttactctaaaacagaaaacattaaaattatgttatatacctctgctacactgaaatataaacgaacaaaccagaatgtttttaacttacataaatcaagtcttgtgagtatctgacccggaggttgtagagaagagatggctcattcaaataactaagctgagtaaggtcttcaactccttctaaaatctctgggttagcagggaaaatctcctccattgctactttcacaaccttagataacacaaaactacagcataaggccttttccatatcctaagaaatttcaacaatctcaaagaacttcttacatcgtcgttagcggacagcataacacacacatcatcactagaagaagtagaatgtatcttccccaagtgccactgcccattagcagcaactcgacaccaaacacaaagtttctggcataaaatagatgcaatgtaaaaactgtattcttcttgtcattggagaaactagaaaccgcatactttagtttaaaacaataatgaatcactaaaagttcaaacctttcagtttctcctcaatgatgaatatagaaatacaacataaaagataacacaaagaagcaatcatttacctccctgacgaaatactcagcgctattgatccattcaggatcatgcgagttcttcgctcgactcatctgagcagtactaatcttcacaacttcatttccagttttctccttctctgcagattgtgtgatctgctcagtgctccaatccttgtcttctttctctatggttttgctttccagcgaaattgcattacgaaacttcgccggaagagattgacgaatcaacggcattggagccctgaaagtagacggagagggaagcgacgaagacctctcgcttgaatcaagcaggcgaagagactccaaaatttccttcactgaacttttcatcattgtagtcggaggagacgccgataaacctcaaaatccacccaccaacaaaaattcaaactttttcgtttttgtcttgaatcaatacccattttcgcgtaatgtgagttccttaaaagccagcagaagaatctcgaaaccagaaaatctgaaaattttattgaataataatctctctcaacattgtaacatgtaactagaaattcaagaagggctaaaaataataacactaaaaacagcaacaaacctcaaataaagaaactgaatttcgccaaggagaagccattccaacggaatacataacataagagagagaatttgaaaatacagagacaatgaaactctaattaggtagatgatgatcatcatcgggctgttatttatttattatccattagtggataaatgggcctttaccaaaactatgggcccaataagtagacacgaattagtaaattgacccgacacagagcattaggtgaaattctaaaattcgattgatttccgtctctctactctcgttgctttgcttcgtgccgtcgtgcgtctgacctaatcagca

SEQ ID NO: 3816 - DNA, 3000 bp, Unknown
  misc_feature (1)..( 3000): cDNA_ID_2170393_gDNA_ID_1620666_Annot_ID_163934 3000 nt of promoter + ATG
ttatttacaatgtcatgtatgactagttgaagctcttaacatgtatttttttttacatctttactaaatgtctcttaagctaatcttttctttccatattaattcccactagcaaagttgttttttctttttaatctcaaatttgttaaactaacaaatgtatatatatattccttttttaattgttttctttttgtcaaagtgttttctcaattaaaaaatatacaaagaagcaatataacatttttttttaattgttgaggttggcaagtaaatctttctttcttttttgccaggacgagaaagatttgtttttttaattctctctttaaacgaaaacaaaaataaactcgttggccagctcaaacaaaactattcgcctgtctttcccgacgtgtcaccgacccgtataacaaggataataaaagctccaatttaattttttatttctacagctttttccaccaatacgataattttccatttttataaaaaaaaactttatttgagaattttccttattaaaaaaagaagtacagtataaaggtaaagacactttgccgcgtttctctcggtgccgctcgacgtgttaatcttcttcctcctgaagatctctctctgaaagacattctcaaattttctcgggaaaacacctttttctgattcgtttttctccagatcattccttctttcttatatccgatttcttcgggaggaggcgaagagacggtcaacaattttatccaatgtcgcgccgtcttttcgcctgtttcggcctcaagaaatcttcaactaaacctatctctggtggtaacaattccgccgccgtagccgcagaaattcccgccggagatggtcccgttctcgtccagctattctcgtctcagggatgtaaaacatcgcccgcggcggagatgttgatgtcccggctaggtcgaggtgatttcgacgctcagatccgtggcgaagatggtggatctggatctccgacgatggttttggtgtttcatgtggattattgggattacaaggggtggaaagatccgtatggatcgagccaatggacggtgaggcagaaggcgtatatagaggcgttgaatctggatacgatgtttactccgcagcttgtgatccaaggtcgttctcaattgatcggaaacgaagaggagacgctgctcaaatctatctccgaagcgcctaggtttccttctccagccttccgggtgagttttcgtaacattgtaaactattcgattgttgtggtgattgtgatgatcttgatgtgaaggaattagatttaatggtagatttcagctcttgtttatgtgatttcaatgtaagtgtcttgttttgtttgagtgtcttctggtgctaaatatataggagaatattataggattccaagtgaagcttgtatctgattcttgcgccttgcctgcagattcaagagcatgttcttgtatctgactctgtgttaggaaaatgtgtcctatggtttgcagtgtcgcttgtccttgagtcttgtgaatgtttaatatagtaaatcaaagagttctctttaggtacagggctgtatccaggtcgctgatgctctttctctgtatcaaaatgatcattagacatttaggagtaatattgcttttagagggattttgtctctgctaaaaaagtggtcaatgtggttgctttctagatagttataggtatatatgacagggaatgtagttttatgaatgcagcaagcttctattgcattagaattagctacttttggtgaattgactaaacaacatctgtgataaatttttgttcgacgacatgttcttgttgattgtgtcataggattagctacctaactaaactttacttcaaccatgaattttctctgctcttgaactcaatgagttcttgactaaacagaacaatgtggctcactcttcttcattggctttgtcactctccacataagtggtgttttttgtcgaaattttcacatgtaatattaatcatttgtttctctctttaccaggcgactttccagagaccaacctcagagacactgcaagtatcactcaccggagctttgagaatgaaagtagacggagacggaatggacataatggtggcaatatacgaaaccgggcttgtgaacgactgtgcaagaggagagaacgaaggaagaatgttgtcgaatgattacgttgtaagaaagatggaaaagatgtgcactgtgaaagatgtagcaccgaagaagccagtctcggggactgctcattttacgctctgggatggattcaacagcagcaaatgtggagtcgccgtctttcttcagaactcttctcttcagatttttggtacacagagttttaaattacctgatgagatttgagttaatttccctaatatctgaaaaataaagaaaagaaaaccgatctttgtatcgtccatattttgcttgtgataatcattcgggttccactctgcttttgtacagttataaatgtgtgactacttataacttaatagggtttaaggtttcttctaatttgtttttatttcaactcatattatcctaacctttctcttctcatgctacttcatttgatttctttttaagttaaacccttttttagttaatcagtatgtcaaagttccattccacgaatcttggtcctgataaatgttgggatgcatgaaacagtctagttgtttataaaaccctaaaccctttttattgttttttttgtaaacagtctagttgggatgtcaatgtgacatcgttttgacgcttagttattgaaacgacgtcgtttaaaattttaggataatttatttttgaaaataaatctgaaagcagagtgatatgttcgttcttattgccgatgaaatctctaatatgctccctgagtaatacctttgatgcacaaacgcgggaaatgaccttcattgtcccaacaccaaaacccaaatccatcaggaagctgagtgaatcagaaaatg

SEQ ID NO: 3817 - DNA, 3000 bp, Unknown
  misc_feature (1)..( 3000): cDNA_ID_1823625_gDNA_ID_1620666_Annot_ID_163933 3000 nt of promoter + ATG
ttgtctacatttattttacttcacagtgtgcatatactatcaatttgtattagagagatctcaaagagaaatcaaaatggagtgataggttgtattatgaggattcgcagagcttttaaaatggcagccaacaacattctatgaactaagttaaacagtgttatgaaacataaataatttcatttgcaataaccaaagagaataatatttatttattttctttggctctatcatctaataggaggagaagtaaaaaaaacagaagagaaagatccaatcattctagaaaggaacacaatatgcttcacggatcccaagaatctttctatgcctgcctaaacccagcaatataaatcaaaccttcacacgcttcggttcttctttacacgtgccggaaaaaaaaccctagtagtagccgcccaatgaccatctaaagtggtccccgtgatgacacgtgtcagttggaccactatccgtaacttaacatgaaagcacatgtggggtcccctctttcgtcctttgccctaccagttccttgtcctagcccacaatacaatctacgcggtatctatatcaaagtttatctagctattttccgaaatagaaagcatatacttccatttatttttgaacaaattaaacttggtagaaataaaatctttcgatattgatttatttcgatttagtgtaattctattatcatctcgcgtgtcattctaggcttatagcaacagtgtaggtatgttgcaatgttgggttggtcatgccgtttggatttatttccagtgattaattcagattttatttttcttcttaattatctacgtataacaaaatctcgctaaccgcagagtgaatttgcatgtcactcatgaatgttttgagtataagaagtgagtaatttgttttataaatatatgaacttatgaagatacatattgaagttgttttgtttgggggtaaaaaaggttatttgagtgttatatgataactttactcagaaaacgtacttagcaaaggtaattcgaagtacctttggaatcgagtaaatactgataactagaaaaaataagatacataatggagaaataattaaatatatttgtatttcttttttgtttaacaacgtacgttttattattagctagtatacatttacaacggttacgtagatcatataatagccatttaagatgtacaacatctcatctggttacttcatttatataaaaaaaaaacgaaatctcaacacatagtaatgtataattacttcagtggggcttctcttaagacttgtattgagaatatccatataaaacaaactttgtattaagataattaaaattttctaatagtaggtattgggctgaagccaagattaacatggaggcagctttaaaatgtttccttatatgatgcagccatcatttctactctactccgtagctccaaacccttctcgtaattcacgtctctcatgctattctttttgctttcgtcctcctctcatgtgaagcaataactatctctcgattttttttttcaaataccgaaagctaactttttcaaataaatgtcaaatatattaattttcgttttgtatttagtattttatttgtcagctaagtatagtgagtttttaagcttactcgtcgtatttatcatatattcatatacatatcacattagtcaaagtaaataaaaatttgtttttgaagaaaaaaaaaatacatataactgcgagtctgcgactgtaactggacttgcttattttagttgatatgagctgagtaaaatcacgttgtcccagaccttgctcgctacaatcggcgaatggtctaacgtcccgacacctgtcctcgatccgcgggtactatattctttgcaatgtgatgcacgcgctgttactattggacagtgtttctcacctcacgactgagcctatgcgagtagcgacaatctccgatttgctgtctccatggtagggattatcacaatctctgattttttttatcaggaacaagtaaataaatagctttgagtttttgttttttttctacattcttcgcccaaaagatgtaagaaaataaaggatttgaaaccttgttctgttgttactcctttaaattcttaaaaactataaatcattatatctttgatctgtttcacaaactaatcatattcgttgcaaagtgagaattcgtcccactttactctttacaccgatactagtattatagatgtacagcatagtattccatatctagttatttagtcaaaactctatatattaagaggtaggttaattaattaaggagtaattgaagattatagaaagaataaaaaataccatttaatggacagaaccaaagataactaactatcatactataatgttgaatttcttccacgatccaatgcatggataacaacatcaatcaaatcatacattcatgctatataacatagttttcagttacaaactctcttttttatttatttcagttgttccttttcatgaccatattaacatcaaataatgcatttttttcaacgtctcttgacttacacccactaatattgacaaattgaacatctatacgactatacacacataagttaaaaatgcatgcaagtgctaagggaatttataacatctaaggttaataagactaagaaagtataaaataagaatacgtattatgaatttatgatatactttactaatctttttgaaaaatactttaatttaatctactatagggggtaaaaagtaaaaaagaaataaagatacgtttatccgcatatagtacctggaaataacagaaaataaaaacacaggtaagtactttgcctgagctagtatatgaacactaaagagatacacacacacaaaaagagagcagaaacaaaacacacacacttaaagctttcgtctttacctcttcccttctctctctctatctaaaaagagttccgagaagaagatcatcatcaatg

SEQ ID NO: 3818 - DNA, 3000 bp, Unknown
  misc_feature (1)..( 3000): cDNA_ID_1825089_gDNA_ID_1620666_Annot_ID_163957 3000 nt of promoter + ATG
cttcttcattacacatagattacaacaacagttctcgatctgttgttgatggagtcattactatcactaactctcgttacttcgcatcccacgtacgtttttgaaatttgttgaagatagattaattatgcatacaaaaatcgttgagctgttttcacttaatattttcacatattctgcaggggaacaacggagagaagtcagaggaagaggcgatggggacaactacagatggtaaagctccgaatgtgacattgggtcatgcggcggatacagccaaagaaggattgaaacgagccaccgatgcagccatcaagaagagtggagatgtgggcaagccgaagagtgtagagaatgatgaaggagatgatcaggaggatgtagcagtgggtgatgatggaactgtcaaaggccaaaatcagtcagcaggatgagaatatatatagagacttcgttaaaagattatcagctcctaatgaaatggatgctggtttaaaccgtgtagtatgtttttttatttatgtagaaaaccatctgttaccatttataaactcatccttttatttcttacaatgtgtggtttcttttttgttttgtttttagatgatgttgtctaacattcacactttcttaatctaccatctaactgctattgttgtctgcctctctctgagtttgagttaccaaacactacatttcttgatttccaaaactgctgatgaatctctcattcaaaatccaaaactcgtgtggatgcggtttatcttcctcgagttggtttcttggatggcgtgagctttctgaacccagcatgcaatatcataactacaacatagacacagaagtattagaggtcatgaaaggccatacaaagttatatcagacttgacaattgcttagtaagttacctgaataactgatcgcaagagcagagaaaagagccatttggacattcaaaaacgttagaagaaccgctgttgctgcaagtagaagaagcaaggaaacgatttaaggtccatcctactatataatccattgacaaatgtcagtttcttgctaataccatgtataatcaatcccataagaactttcaaaacattgtagcccggaacaaattgatccaaaacattacagaaactcaaaagtctctcttattgaatgcatatcaaaacgttttgcagcattctgtgactataaacaagttgcagaactacaaataccaccacggtcccatcttcaattagcaaaagacaggaacaaaatgatcgaaaaactcaccgcattgtccaataccaatcgagagtttcctcatggaagggtgacgatcaaatttccacttatcactgcagtatttgaatagctcccaaagagctaagcttcctaacaatcccaccaatgcaagtggcatctgatatctacaaacaccaaaaatcaacacttcaattccaacacaatttcaagattcacactttagtctaaagctttagcctttatctaattaaagagtaatgggtcctcacagtgcacaagcaaagaagacgatgaacaacgtagcgtaattcctagcgaatcgtttgatattctcatgaactctcattctcgcttgctgagaagacgacgggaacgaataagagtcacaattgccaatgaaaccggtggtccacggtgtcgtatctccggaaaaatcatcggcggagagcttagagaaagggttaatagtaagaagagaagagacagtgacgagtcgagataagagagaagcgaagaaaccaccggtaatggatgaaacgacatcgtcagatgccgcagaagttgcggcagctgaggatgaaacggaggcggaggaggaagcggcagctgcagcggcggaggtgcggtgatcgaggagctcgaggtaaccggaatctcgaagccaagattcgaaagcaggatcggggacgcttagagagagaggattaggagagaaagccattgttgttgtcgccgtgattatcccatagtaggtctctcgtctcctcggtcttcccaaaatcaatttacaagaaattgcaactcgtgatccaaaatatcttcataattgctaatatagggctcttatattatcttttgttaatttaactcctataatgtagtttaatggttcttgttaatcaattggcttactaaataccttttatattagatgaaacatgcatgcacgaaactaaatatcatattaattattaaaaaaatcattctatgaattaagatagctagtagtttaaaaaataaaataataacagaaattatttattaaatcccattttttaaaaataaaagattctggtatgtacatgttttttaaaatggaactaaatatattgatacagtatctattaattttaatttttgaatatcaaatgatgataaatagttatcctaagaagaactatacaatgtataaaaccaggttattggatacaggtattaattaactagtgattttaaaatatgagtgtggacaaatatatgaaagacacatgtctaaaaatgtgagaaccacttgattataaaatcgtctactaatatatagtataagataataaagtttcttattttgtgtaaacaaacgttcacaaagaaataaattcaaaaggtaatattgaattgaaaactctgtctttagccaagtgttttaacgagtttgagattttatcctcactttatctaatatattaatgggatctgatacacgacagaaataaagaaagaaaaaaacagaagcatgtacgtatatattttcaggactattctaggaaaaaaatcagcaaaagtgaaaataatctaaagctaactagagaaagtttttcacctcaccaaaaggaaagactagctaaattcttaattattatcccgcaccctgccaaaagtcgagcgttaagtttcttataaattagaagaaagacgagaccattcttctcatagcttttttagaaggaatactgatagagagaaagaaaa

SEQ ID NO: 3819 - DNA, 3000 bp, Unknown
  misc_feature (1)..( 3000): cDNA_ID_1380010_gDNA_ID_1620666_Annot_ID_163956 3000 nt of promoter + ATG
atattacctgtgatggcataaagtgcgcataattgattaaagtcaatagaacaatcctgacatagaaggatgaaatctttatcagaaactactataagaccatcacaaatagtataactcgtgacaacatcataaaaccgagaaaataacaaaccaggtgaattattggaacagaagagatggaaccaaaacgaccattaattcgtccaacatggtaatgacattggtctttgatcttttgatctgtaataggacacaaacacaatcctatgaatatgatgcacatattagcttataaaagaggaagaagagatagaaaaaacttacattcaccaataccgttccttgttggcactgcaatctgaagtaacatgactttaccacgccactctgcattttcctctaagaacttctcaaatgcctgatatttttgtggaatccctttgatcgtatcgagacgatcaacacctaatatcaactgtcaacaaaaatcattatgttaattaaacagtttcttcttctaagcttcaaatatataagtaaatatatatacctttctcccaccaaaatcgtttttgaacttcttcatgtattgaacaacttcagagagttcacttgtgtttataaacctctcaggttctatcccaatgggaaactaacatccaaataagacaaaatgtttcattaaattaaacaaatcatagcatataatcaatataaagagattttaagataggtcattacaacagctactcgagtgactttgccctgatccacaattccttcagatgttgcttcgactccaagaatacacatgcatgcattcaaaaaatgtcttgcgaagtcataggtatggaaactatacaaacaacaacaaaaaaaaaaaacagagaaaagggagtatatatgagatcatgggttgattactacactgttaaaaagtaaaagatatttacatacccaactaaatcagcagtaagaacagaacgaagcagatcggatcgcgagggcaatgttttgtacatctcggaagaaggaaatggtgtatggagaaaccatccaactttcatcttactgttgtattccttaagatattgaggaagaagcataacatgataatcatggcaccaaaccacatctccttcttcatagtgctctttgacaacatcaaagaaaatttgatttgctttcttgtatgcttcatactgtgactggtatgttatggttgcatcgttacgatattctggtggcgttcccaagtagtgaaaaatcggccacagaatattgttgcagtagccattatagtattgatcacacacttcttccaaaaacactgggatacatccctacaaaaccaaaaccaagaatgaaatcatcatattattaacaaaaaaaaagttaccacaatctttagcattttaaccaaaaaaaatgttttaatatgataattaatgacataatctaggtggtcgtgttttattagtcaagatcaattaatgatcattgtctcctttactctctttaaccatgcaatacttacataacggttacacaatccgtattaaagttcatgttttcagactctaatttcgagttacaaaacaaaattaaacatgactgtatacgatagaagatttacgaatgtgtacgtaccttttcagctagggtaatggagagtgtctttttgccaatcgcatcatgaacatctactccaggccatccaatccatttggtctcaaattctttcaaacctttaagagatcatgacgaaaattaaaacaggtttctttgtgtttaaagcaataattaattattaattacgatattaccaaagttggtacattctcttacctagaagagcactaactagaccaccaggactcatcgtgaaagaccaagactcttctccagtcctctttgcagtgaccggaagcgacatcgacactacaagcagtcgtggccttgccatttttctttctctctatcagtattccttctaaaaaagctatgagaagaatggtctcgtctttcttctaatttataagaaacttaacgctcgacttttggcagggtgcgggataataattaagaatttagctagtctttccttttggtgaggtgaaaaactttctctagttagctttagattattttcacttttgctgatttttttcctagaatagtcctgaaaatatatacgtacatgcttctgtttttttctttctttatttctgtcgtgtatcagatcccattaatatattagataaagtgaggataaaatctcaaactcgttaaaacacttggctaaagacagagttttcaattcaatattaccttttgaatttatttctttgtgaacgtttgtttacacaaaataagaaactttattatcttatactatatattagtagacgattttataatcaagtggttctcacatttttagacatgtgtctttcatatatttgtccacactcatattttaaaatcactagttaattaatacctgtatccaataacctggttttatacattgtatagttcttcttaggataactatttatcatcatttgatattcaaaaattaaaattaatagatactgtatcaatatatttagttccattttaaaaaacatgtacataccagaatcttttatttttaaaaaatgggatttaataaataatttctgttattattttattttttaaactactagctatcttaattcatagaatgatttttttaataattaatatgatatttagtttcgtgcatgcatgtttcatctaatataaaaggtatttagtaagccaattgattaacaagaaccattaaactacattataggagttaaattaacaaaagataatataagagccctatattagcaattatgaagatattttggatcacgagttgcaatttcttgtaaattgattttgggaagaccgaggagacgagagacctactatgggataatcacggcgacaacaacaatg

SEQ ID NO: 3820 - DNA, 3000 bp, Unknown
  misc_feature (1)..( 3000): cDNA_ID_2107732_gDNA_ID_1620666_Annot_ID_163954 3000 nt of promoter + ATG
attataggagttaaattaacaaaagataatataagagccctatattagcaattatgaagatattttggatcacgagttgcaatttcttgtaaattgattttgggaagaccgaggagacgagagacctactatgggataatcacggcgacaacaacaatggctttctctcctaatcctctctctctaagcgtccccgatcctgctttcgaatcttggcttcgagattccggttacctcgagctcctcgatcaccgcacctccgccgctgcagctgccgcttcctcctccgcctccgtttcatcctcagctgccgcaacttctgcggcatctgacgatgtcgtttcatccattaccggtggtttcttcgcttctctcttatctcgactcgtcactgtctcttctcttcttactattaaccctttctctaagctctccgccgatgatttttccggagatacgacaccgtggaccaccggtttcattggcaattgtgactcttattcgttcccgtcgtcttctcagcaagcgagaatgagagttcatgagaatatcaaacgattcgctaggaattacgctacgttgttcatcgtcttctttgcttgtgcactgtgaggacccattactctttaattagataaaggctaaagctttagactaaagtgtgaatcttgaaattgtgttggaattgaagtgttgatttttggtgtttgtagatatcagatgccacttgcattggtgggattgttaggaagcttagctctttgggagctattcaaatactgcagtgataagtggaaatttgatcgtcacccttccatgaggaaactctcgattggtattggacaatgcggtgagtttttcgatcattttgttcctgtcttttgctaattgaagatgggaccgtggtggtatttgtagttctgcaacttgtttatagtcacagaatgctgcaaaacgttttgatatgcattcaataagagagacttttgagtttctgtaatgttttggatcaatttgttccgggctacaatgttttgaaagttcttatgggattgattatacatggtattagcaagaaactgacatttgtcaatggattatatagtaggatggaccttaaatcgtttccttgcttcttctacttgcagcaacagcggttcttctaacgtttttgaatgtccaaatggctcttttctctgctcttgcgatcagttattcaggtaacttactaagcaattgtcaagtctgatataactttgtatggcctttcatgacctctaatacttctgtgtctatgttgtagttatgatattgcatgctgggttcagaaagctcacgccatccaagaaaccaactcgaggaagataaaccgcatccacacgagttttggattttgaatgagagattcatcagcagttttggaaatcaagaaatgtagtgtttggtaactcaaactcagagagaggcagacaacaatagcagttagatggtagattaagaaagtgtgaatgttagacaacatcatctaaaaacaaaacaaaaaagaaaccacacattgtaagaaataaaaggatgagtttataaatggtaacagatggttttctacataaataaaaaaacatactacacggtttaaaccagcatccatttcattaggagctgataatcttttaacgaagtctctatatatattctcatcctgctgactgattttggcctttgacagttccatcatcacccactgctacatcctcctgatcatctccttcatcattctctacactcttcggcttgcccacatctccactcttcttgatggctgcatcggtggctcgtttcaatccttctttggctgtatccgccgcatgacccaatgtcacattcggagctttaccatctgtagttgtccccatcgcctcttcctctgacttctctccgttgttcccctgcagaatatgtgaaaatattaagtgaaaacagctcaacgatttttgtatgcataattaatctatcttcaacaaatttcaaaaacgtacgtgggatgcgaagtaacgagagttagtgatagtaatgactccatcaacaacagatcgagaactgttgttgtaatctatgtgtaatgaagaagctctatgtatgtttatggctcctctctttgctaaaaacatagccgccattttctacacttttcaattcattatctagctctcgctctcatctatatacacaccgatggaagtactttgaggatcgagttagtgtcgggagaagaacacgtggctaatcactgtgcttctcacgtgtccccagagcaacagaagcaaaggctgattcagagattcttgtgctaaaaaaaagtgactctagtcttcttatcatcatcaactctaagaaagaaaataaagggcccgaaccttataagcccagcccatatgttcaaaatgttgcaagtgttgtatctactatagactacggactaccacctgtaccgctcttccgagttcgcaagtttctttcgtcgaaaatacgtaggagagaccatcagaccaatatgtactaatgtcgatatggttgaagctttttggtattctcatatcaaatggaaaatgaatttgcaattaagacctgatgcaagatttcagacttttcggtattctcatatataatggaagcatatgattcgttgaatccgattctttccacaaaaccaactgttctctaatgcgtttttcccggggataaattcatataacttcaaatcccaaaaagaattaaattaaacacgtcggcagatacgaagaagcaatatcttcttttaatgtgaggaaaacgagtagatacagagattcaatttcgaacacgtattacccataaaaacgacctctctctatcattaagacaaaaaagcttcacactttccttagcccattataaacgcttcatttctatataaacatctcttatcttgttgaaaatctctcgcagcttttgaaaaacatg

SEQ ID NO: 3821 - DNA, 3000 bp, Unknown
  misc_feature (1)..( 3000): cDNA_ID_2995167_gDNA_ID_1620666_Annot_ID_163952 3000 nt of promoter + ATG
catcaatgcttcacaaagcattggaaggtgtaataatgatggagacgtttccaaaaacaaccgttgatgtttttgcattggttcttgaatctggaggaagtaagtcttaacaataactcgactgctatcaaaattattttaccagaatgtgattgcttattggttcgcttggacattcgtggagttgattatggaagcaacttattggattgttgtttggcattttctgattttctccaatggtattgtattgcaggtgacctctctgttttgatatcatgtgctagtcttgctttagctgatgccggaattatgatgtatgaccttatcacagctgtttcagtggtatgtgtatgttacaatagttgcattgattcctctgcgttatctcttatgtttattagcattaagtgaagaagaaagtaacacatacattgacatatacaagtgcaccatagtctgagacatgtaaaacgtatagatatctgttaattctttattttgatacactgaaattatgcctgcaattttcgaagtcttgcataggcaaaagccttatgatagacccggttacagaggaggaaggatgtgaagatggcagctttatgatgacgtgcatgccatctcgttatgaaatcactcagctaaccatcactggtgaatggacaacacctaatatcaacgaggtatgcctttcaataatatctcttgtccttaatttgccgatgacggttagagacaaaaggtctttcttttcttagtgttgaatattgatgttattcaactgctttgtttgtctaaatcacatggatattggttaattagactgttcttcattttctttttaagctgttcataccatagggtctatgttgttaacatataattgtgacataggagctgtgcagacatgttaccaaacatttgtatttcaaatattgcaggcaatgcagctttgcttggatgctagttcaaaacttggagagatcatgcgtgattgtctgaaacagtctgcctcagcttccgatgaatgagcataaataactatgattttggattgtagctcagacttggtatgaaaccggttttagctgttataggtaaacggatttagtctaaacctgtgtgtagtttaaaccgatgtatgttttcacataagatttgatggaactagatctttagctatgaaatggatcccaattgcgagtggtatcaaagacatacagaatttaaagtagggaatttcaacaaatcaatcacattgttctttacaatttcaaaaaacttgtggatgatattaatatcagattttctaaatttatacgaaaatggaatgatattaagaatagtatacagaaaaatgaagaaaagagtaactgatttttgcatcttaaaaaagaaaaagtcttctctggttcacacatcacacaagttgggggcggtgatgaaggagggtgtttaggtaatatcagctaacgtcggaacttcaactgatcatgtagtacgtacgatacgaagaagaagaatctaatccgcatgacatgtgattattttggtcagagagagaagagaagacgtgtgtcgcagcaaagtggacagttgtgcccttatagccaaagaagacttcacacgttttcaacaccacctaacaactgtttctttctatctcccacctcttccccatttttgtctttttatttcttcttctagtttctcccaattttctctttgatttttttttgttttttcttgtcttcttgttaagattgatacatgaactaatagagtaactagtaaattctaagacctttcagcattcttgaaatgacaattacaaacacacgataatttgcgggaacatgaatgatagaagacattagaaaaaaaaaactccaatgtataaaaagtttatgaaaaatataataacattttttacgaattattcagttttctgtaaatttttatttatttcgtaaatgcttgtatctaacatttcagctagattgttctactgattaatttctatctaacattttatgaactttatcatttcagtaaccgcaatgcccgtgaccactctgcatataaaagtgtatgtcttcttcacattcaatcacacgtactttcaaaattctactaaaaattaaatgttttttttttatataactaatcaaagatatctaaagtttttgagtcaaagttatgcgttactcaaatagaaaaaaacatttagaaacctaaaataatatctgctcctcctaaaacatttaataacattcaaaaacaagtcaataaaaaaaaaaaaatttacgaataaagcccttaattagtcaaaaatgaacgaacaaaacaaaggtaggagaaagtatgaatggcccaatcggggagattgcagtagattcatacaaatctgtaaatacaattttaccgggtttggtaaaaatcacaatagatcattttttattaataagaaagagaaaaagaatgcaaattcgtggggtttccaagaaatgcaagtgatatatttagagattgagatctgaccccattttttgcttaacacacaaaaaatccttgggcagaggaaaaagtttatagcgactcttttcctctaaaagggtctgtctcttccttcttctctcttcagatctccatttcacggtatccttctctcttccccttgtctctattgacttttatttgctttgatttttatcgatcgtctctgatcttttgctaatttaacttgtttccgtttgttttgaatttactctctcctgatctttggcatgtattttgaatctgctgttcttagttttttatttgatcttgttctcgtctgtcttaatattgaataattgactagttttatttacagatctttgcattatagatcccttcaagtgcgattttaatcgtagattagttttggatccgttatattggactgatgtttttgatgtattttttggtattaggatcaatcctgtgtttgaaaca

SEQ ID NO: 3822 - DNA, 3000 bp, Unknown; identical to SEQ ID NO: 3821
  misc_feature (1)..( 3000): cDNA_ID_3100721_gDNA_ID_1620666_Annot_ID_48060 3000 nt of promoter + ATG

SEQ ID NO: 3823 - DNA, 3000 bp, Unknown
  misc_feature (1)..( 3000): cDNA_ID_1822168_gDNA_ID_1620667_Annot_ID_48062 3000 nt of promoter + ATG
ttagttaattacgctataataactaaatatcatgtaactcagtataaaaatattacagacatatataatgatttctttacaacaaaaactaatatttaaaatcaatcgttataaaaccagagttatttttatttagttttattttgattttactattattttagataatgtgaatgctctgttaattttatagacaaacaaatatttatatatttgaatagaagaagatctattcaatgagattttatcctattttcatatatttggttatatattatgtttgtattttgttaatgctatgttcacacgttactttctatgactttttttgtcatcatccaagaaaattaatatatcaacgttcacaaaacaatcaaatatcgactttgtaataatatatactacaaattagtacgcgttattattatatagagcaaaaagagagaatatatttcaatggatgggacccgtgagaaggtgctttcgttccttttataaattttattccaaatgatcaaaatttgttattttatttggtttgttaattatcttttttggtcactgatgtggctagctatttactttacacactgttatgatatactcttcttttaaaattccttaagaaaatattagtttaagctatccattgtacgactagcaaccaaatcaatcattataagttttaataatggtttattaattaatttctccaacttgcttaatttagtggctattgttgaattatggagcctattacatctataactttatacataagaaatagataatgaaataattataataattacaacaataacgttgatgaatgatgacgacattgaccgtcatcatcctactcgtagcaatacctactaagtttgtttctcctctttattttcgaaaatccaacggtattccaatttgtgatgatttctataaaagtgctttttcatatacgtgaaatgaaaaaatagtaacaccatattcatatattagttgatactttgtagttgtatatacgtggaatattaactataataacatatctttgacgatacaatgagtgattgcttaagcataaatgtgtctgaaagtggacgacgcataatatatagatttccattatcttacccatgaatgttaaaagggacaaaacaatcctcggtcttttcttttgataatgctttacaatttttaaggtacaattcaatgactattacgtgtatatgtgttcaagttattgaaattaattttcaaatcaatacgtgtcgatgactgacatatacacaacttcaaaatagaaatgtagccaatctattaatgtgttgttaagaaaaaggcaaccctactagaatgtgtacttattgtgtataactattgttttctcacggacaagaagtactagttcaaggaataagttcaaagacagaaatacataaaaagcatgaaaatagtgaaataaaagagaagacataataattaaagacgcgcatatatattatttgatacacacatttagtaccctttgtcgggaataaaaatactgcagacggtgaaatcaagattccggtgaccggagaacaggaatccgacgagaaaaaccctaagtaaaaagcaagattttgtaagagaagatcttgtgtggggctatatatctttcgatatacttttgtcacaacatcaatagaaatccactcaataccaaaacaaaagataagtataaaaaggtaataaataaaaattcacgtgggacttgggtccatctgttttttcacctgggaacatatgattcatatatatctattgtatttgtatttttttttgcccttagcaagaatgccttttcttttgttaagaaagttacaagactgtctatattgcatttttttcctttagttatgatacgaaatgatggcgtaagtcgtgactagtaatcaatcatcttttaagttaatggaaagaaaaaccgttggaatgaatatgccattgcagtgtgttaccagtaataaaccatgtaaaatcttctataatgtgctctaaagctactttgaaacaagtttctctgtattttttttctttctttctaatatcaaccagaagacaaaaaaagataatatatatgaatgttggttttgttgtattcataaaagacatagagaaatcatatctcaaattttccaacttttttagtgataaaaatactcgacactctacagtttctgaagattggtatgcagggccggcccaagtctttttgttgcttaaagcaaaaatgtgtttgacccattaataatgaggtattgaggaaaaaaaatcaaattctgacaaaagttagactcaaactagacacatagaagaaggttattcaaagcgttgaccactataccaccaacaattttacaatttgatgcctcaaattttgttactaaaatgtgatgcctaaagccctagcttcaccatctttagctctgggccgggcctgttggtatgttatatagcccacaatcctttggttacataaaaagtataaaaataataattcatcagctaattttatattggtatgataatattttgtttgtgaacaaattctatgagtcatatttttttcagttttttttccttctttgtaaagtaagagcccagcaatagtatgataaaataagctattgagcctaataacgataagcccaattaaggcccgtatacatgttattatctcaggcccatacataattacaaaaaaagttagggacgtaagaacaaataaaaatgagaaattatctggaaaagctgaatcaaatgtacagacacatgagactgagaatctaactttaggcttctctaattatgattcatcagagactttaattaattaggtttcaaatttctaataaagaagaagagtcaaagtgattaaattaaatggtcacagcttttatttattaagctctgtttcatttctgctgcgggagagagaaagagagagagacaatg

SEQ ID NO: 3824 - DNA, 3000 bp, Unknown
  misc_feature (1)..( 3000): cDNA_ID_1822077_gDNA_ID_1620667_Annot_ID_48069 3000 nt of promoter + ATG
caaatccgccacatcgtcttgaaaattcgcagatgtcttcgtaatcttgtcttctttctttattacctccaaatgcaagtcattgagttttccaagctgtgtcgcggtaagatcactcatgaaaccaccatggtttatatcgaagtcgtcatcgatcttaagaagatattgagaaagctgagtttcggcctgggatccacaaagtgcgtatataagtctaatgaaagaagaaggacgacatcctcccatccatagcatactgttctctataggagtgttccacgacggtgcaaagtagtgagcgcagcatcggtacgagagctctgatcgttttcccgcatatgtgtggtagtcattgacgattttaccaacgaggtcttcgagtttgtcatcgttgtttcgttgacacatgagtgcttctttgagatcatctatgtgtttagtttgtaaactcatccactcatggtaacatcttttttgaagtttttcaaccccataactcgaagatctttccatatctctcttattgtttttagctggttagttattaaaatgtaattcccgtatggtcttatatacattggatcggtgcatatatgtgtatcttttttttaatgtggtttagatacatgtaaatgtaaatgcatgcatacggtacgtgtaatctaatcactacgcggtgggtttttgtgaaatcgtgctttaacctttattaaattggatgttatcgctcttggtttgtagatatttgagtttatatgtaaacggacaaaacgcagatgaataatactagtgcctgacaaaattattttggacatacttcactttgaaaaatgaaataatatcttcttttctgaatcatacaagtacatctaaaattttacagaaaaacaatcaaaataaaacaaaacaaattatgttggcaagaaaaacccataaatttaagttggtaaaaaataatatctaagtcgtgcaaaaaaaaaaacccataaatttcatatgaaacgtataaactagtagtattttagtaactcgacagtgaaaaaaataactcaaataaacaaaaacaaatcatggtataagaaaaaaacttgtctgtattcatagacaaagagtaagcgtcgctagacttgttggagcttttgttattccttatgtgtataagacgacaacagcaaaagcttaggcatgcatcatgtcggtagtggtactctactactacgtctcactctcgtatacacattaagacacctaacatgatctcttctctacttagacaatattacaaaaagattatctactatacgtacctcaaactcacgtactcacatcaacaagtggttaagtttgacttcccggctccgcctcttgcggcggttgcatcctccccacgtgcacacccacgcctttctctaactcttccccactcttgcaacgacaagtttaatctttactcggcgagcaaatactatgccgcttgaaccggcgtaacaacacccacgatcttcctaagtgtctcaaacctcagcttatcagcttactagtatccaatctataaatgtaaacactttaacttgttatgatttatcgtaaatcatttatgaatcaagaaaaccaaatttatatgcgtctacaactctacatgaactggaacatctgattgataacacattatagttcatattttcatatttgcaagcaaaggtataagaagaggatggaacaaaatataaaaaatgaattgaatcactcgccataaaataatatacttggcacattatttatgttttttgccaaacatttggcacaatttataaatttataaattacaaagactgaagcaaaccattattccatatatacaaaaaaaacttagcatttaaatttatattatagacaatcgcaataacatcaagggtaaatataaacattatttcatattctgtcgatccaatatatatagagaaatataaaggtatattattactgtgggtcatgtcgttttaagacaattccgacataagaacagttaactgttgaactttatttatgttttggactagtgagtagtgacacctcaaaagaaaaaaatgaatacacgtgagttacgagtttcaactaattcatttaacttactgtttgacatgatagctgtaaaatacaaagcacagcaacattttcattttatgggctttaacaacattgataatccatgtcaagcgagagataacgataattgagttcatttagattcaaatttcttttaaatgagaacttttaacaatggagctctttttttttggcttcggttagatattctgattcaaattgtacacaagcatcattatggatatgcttatattaaaaaccgtgtgatggcctattagtaacaagtagtatttaccaaactttgatcaaaaaattattagtagatataaatgttttccaatgcaactaatcgttgtattggaatagttcatgatgcaaacaaaattattaacaagtctttaccaaaatttaatccaaatgtatggctaatcacaaaaggtttccaatatcagcaagtaataattaatagttgaaatgatgctaaacaaaattaactacctaatgcctagagcaatgtaaattgtctctaatcaaaactttagtgttgaccaaaatcattaaacaattataatttgtaacgtatataatcaatcatgtgattagttcaaaaaagaaaccaaaaagtcgatcatacatttatataattgttaggtaattcatggacacacatcaattaattaacattacacttttgacagtgtaaaacagacagtgttataataagtgaagagtatatgaatagggctgagctgtgcaaagacctgtctctctctcacttataattccctcttcacacattacttcttcacttatagagattctcacttacatttcccattttacccttcttcttccttcaaatccactgatgtcttgttatgtgaagtaatg

SEQ ID NO: 3825 - DNA, 3000 bp, Unknown
  misc_feature (1)..( 3000): cDNA_ID_1822069_gDNA_ID_1620667_Annot_ID_48071 3000 nt of promoter + ATG
tgcttgcaaatatgaaaatatgaactataatgtgttatcaatcagatgttccagttcatgtagagttgtagacgcatataaatttggttttcttgattcataaatgatttacgataaatcataacaagttaaagtgtttacatttatagattggatactagtaagctgataagctgaggtttgagacacttaggaagatcgtgggtgttgttacgccggttcaagcggcatagtatttgctcgccgagtaaagattaaacttgtcgttgcaagagtggggaagagttagagaaaggcgtgggtgtgcacgtggggaggatgcaaccgccgcaagaggcggagccgggaagtcaaacttaaccacttgttgatgtgagtacgtgagtttgaggtacgtatagtagataatctttttgtaatattgtctaagtagagaagagatcatgttaggtgtcttaatgtgtatacgagagtgagacgtagtagtagagtaccactaccgacatgatgcatgcctaagcttttgctgttgtcgtcttatacacataaggaataacaaaagctccaacaagtctagcgacgcttactctttgtctatgaatacagacaagtttttttcttataccatgatttgtttttgtttatttgagttatttttttcactgtcgagttactaaaatactactagtttatacgtttcatatgaaatttatgggtttttttttttgcacgacttagatattattttttaccaacttaaatttatgggtttttcttgccaacataatttgttttgttttattttgattgtttttctgtaaaattttagatgtacttgtatgattcagaaaagaagatattatttcatttttcaaagtgaagtatgtccaaaataattttgtcaggcactagtattattcatctgcgttttgtccgtttacatataaactcaaatatctacaaaccaagagcgataacatccaatttaataaaggttaaagcacgatttcacaaaaacccaccgcgtagtgattagattacacgtaccgtatgcatgcatttacatttacatgtatctaaaccacattaaaaaaaagatacacatatatgcaccgatccaatgtatataagaccatacgggaattacattttaataactaaccagctaaaaacaataagagagatatggaaagatcttcgagttatggggttgaaaaacttcaaaaaagatgttaccatgagtggatgagtttacaaactaaacacatagatgatctcaaagaagcactcatgtgtcaacgaaacaacgatgacaaactcgaagacctcgttggtaaaatcgtcaatgactaccacacatatgcgggaaaacgatcagagctctcgtaccgatgctgcgctcactactttgcaccgtcgtggaacactcctatagagaacagtatgctatggatgggaggatgtcgtccttcttctttcattagacttatatacgcactttgtggatcccaggccgaaactcagctttctcaatatcttcttaagatcgatgacgacttcgatataaaccatggtggtttcatgagtgatcttaccgcgacacagcttggaaaactcaatgacttgcatttggaggtaataaagaaagaagacaagattacgaagacatctgcgaattttcaagacgatgtggcggatttgccaatcgcggatgtggtgcatgctgatgtagcggtggaggatgctttggataagcatgaagagggaatggcggttttactggcggaggctgataaactgaggtttgagacgcttaggaagattgtggacgttgtcacaccgcttcaagcggtggagtttttgcttgccggaaaaagattacagctgtcgttgcacgaccggggaagagttagagcagatgtttgtggaggagtggggggcgccgctgtctgaagaggtgaggtggagcggggatgtcagacagagccacttgttaaagtgcgtgtcagtcagtagcgtataatatatgtgtaatatttgtctaattagagatgggtcatgtttagtgtgtgcttcatgtgtatgagatgttgcattattattttcacagtcgaattactaaattattatttaattatcttgttttgttttgattgattttctatgacattttactatgtaaagagtataatgttaactctagttgtaaattttcctggaaaataaacttactaaataatttggaacagtatatttaagttttatttatcataaaaaatacgtggaaaaagcttaaacaaaactagtggtaggtgttctttcaagacatccgataaatttggccaatggtaattggtaactgacaaactaatttggtgactggcagttgttggatctttatataatttgaatattcatttttgacatagattatcattgttgtgtaagcccataaaattaaatgttgaaattgtaagtcgcgtgtatccattttctttagtacctaaagaaaactttggttgttacgagaccacgagagagcaggcccgtctcaatataagatgaggttcaaagtgatattttgaaacattatattatagtagtttattttcgttaaccattatttacggaattcctacaaaaggaggtattttatattttttttgacgtcgggaagatattttgtatctttaatatactttctaagtgaaataggtccaaaaatagttttgtcaagcactttcatccgtgcccttttgtctgtttccggctaaagcaaagatccacaaaccaagagaaacttccatttaagaaacgtttaaaccacgatacgattacacgtaccgtcgtatatgcatgtagttgtaattacattttttacttaaaagtatatgacgacagataaaaaaactttaaattgtacatacatgcaccaatccaatgtataaaaggcaaaagaatagcgttaaaatgcattcacgaactaaccaacgaagaaag

SEQ ID NO: 3826 - DNA, 3000 bp, Unknown
  misc_feature (1)..( 3000): cDNA_ID_3012350_gDNA_ID_1620667_Annot_ID_48073 3000 nt of promoter + ATG
gaaaaataataaagacagagaggctaaaagagatgatgagttatataagaagtttgactaaataagtttgcagctttgactagcccaccttctcccaccgactgccaacccatccgtcaatatttctatcttcatttcctcacaaatatttattcaatctcttcattttcaaatatatagttttctagtactcgtagtatggtctaaagactttaaaactaaataaaatggtaggaagtaaatgcaaattacttgaatttgtaaactatattcatactttcgcaatgttagattagtctgaattcaaatgtgattaaatacgtttgtatatattacgttatcaaatataggttcaaattgtagggattgtccataactattgcgtatatatgttcaaaattatattatatgttgtatttgtataccatagacgttatgacatttgtaagttgtaatgtatcttaaattaatgttttgacaccggttttcaactattatggacgtctttaacgtaagaaaactgactttctgtgtgtttgaaaattagtctgctttacaaattaatctttgcttatataatttttaatgataataagattaaagaatttgataaaaaaaaaaatatatattaaaagtaatgtatattgtttttaccaaagataatctgaggttaaagttacaataataatcatatagaaacaagttcaatagcaaaattaacttagacatgcaatttaccgatttcttgacattagtcgaaaaacatttgaaactcggttatacaatgaggttatcgttcaggcctctggaaagaaaatcaattctataatacttcaataactttttagtaaaactaactggatcaactgatgaatcatatatcaaaaaaacaaaaaaaaaaactaacggaggtagacaatagtttagctggaatgcttgaagaaatggcaagaatatgcttcgagaagttatgatttatgaagaggttacctgcaaattttttcatttctttttgccgacggttggctgttagttaggaaaaagaatttttgttataggattttctcttccgtttcgtacaaacccaatcattattctcgtctttatacttaactttgcctctcattttcatgttatcaatcttttaaattaaatatatcgtcaatgactgttatgaataattagttcttcattctctgccttggttcgaacctcagtcacatggtgcacgttattgtgatttcccatacctcaagagttattcaagatcccttacagaaatatatttatataatcttttatctaatgtagttatttacaaacatgtattatctaccaaaataaaaagggctaaaagcttcttgagtgagaccgcttttggttcgattcattttcctacactccaatagtattacactattgtatataacaagaatcgtgggatttgtttaatccgtacaatgaaacaagaaagatatacaataacttaatatcatttttttttggggacaatcttaatatcatttctaatttctatagaaccaaaaacactcataacaacttaaactttgttttttgtgagaaaaataacaacttaattactagttactacattgacaatttaacatcttcagctaaaaccgaatgtatatgaacatttataatctagttgctattgtatatacgattggataatacgcatatcgacatttaaataattgagcctgaagataattcacaaatatgcaatgtaaatccgtccatacagccaaaagtatgtatgtcccatgcataattgaacaaaaagaaattatattaatattatttttgttgtcttctgcaaatgctaggactgctatcattatcatcattgattttaatattgatgtttccagaaaaataaataaacaaatataaagaaaaaaacaaacacaataagtaaagctacactattaggtaataattaaagctcatttttaagtctaaaattttaattataaaataaaaacattaaaaagttaagacccaaagaaacataaatgcttttttctttcatcaatgtcaaaaaagaagttttcccaccaaatggtcaaacttggatctttgacaatattgttccaatttcatcatgccctatcttttctatttatacacataccttagatataattattaaacccaaaatttgtgttaagaaaaaaaatagacccaaaatttgtgttaagaaaaaaaatagacccaaaatttggaatatatatataagtcaccgctggaaaaaaaattattgcaagtaatttcttatatgaaattggaatgataatattttgatcaagtatccattactaaaattttacaacgctagataacgagattgcttgaagtcgaacttgtgaacaaattataataatgtaaaactaacttgtattgactaatctttgattttttttacaataatgagtgatattacattcattttattaactaaatacaacgaatatgataaatattcagtcctcttataaactttatgatagtgaaaatttgagacattgacaattctagcattctaacattttatgagattacatgaaatgtcaatttagaccttaaaccaaacgaatacatgattcaaatttgaccgacaagtacatgatgccttccctttgatcacgaaatttccacaaagagtccgtgtctgcgtaattaaccagcaatttcaagggtgtttacgtaattgtagcttaacaaataaaaaacacgaaagaagatggcgaagaaaacggaaagtagtagatagataaagaaagagaaagagaagagctggattcacatggtcttgttctttctctctccttcttttctcatcttgcggcttccctttttctctctatcgccacaatgatcattaccaaccaaactgattgaaactcatttgttctctctctctcaaatccactctctctctttcttttctcttctcctctctgtgtctctatcgcc

SEQ ID NO: 3827 - DNA, 3000 bp, Unknown
  misc_feature (1)..( 3000): cDNA_ID_1842475_gDNA_ID_1620667_Annot_ID_48075 3000 nt of promoter + ATG
cacttcatgaatggatacatggttttgctttaagcataagtatatttgtattaaattttcactcaatttaattgcacgaatcattacaaaaataatatctcgctactcatataaataccctataaataaataagtgaattttttttatctctcatggaaatttgatttatgtatttatatgttttaagattcgaagaaatttttaaataatgaaaatttacaaatatataattcttaattcagaatttcagatattgaattacttattggatttttaaaacaaaaagaaaattacatgactttttttttcttttttttttttaaatatctgttagttcaagttaaaagaccatacattttctaaaggcgggacctatatcaggttaaattcatctccttttagaaaaaaaatatatttgggaaaggctttgatagcaagcaattaaagtatccgaaactaacaaaacctatctggtcttggactcttagtctttatataaacaacatcagatagatcgagagaccatacgcaacaatttactaatttctcttctccttcgttgcttttgaaaccctagttattatcgagagatcaaacacgtacgtacacaaaagaccgatcaaacagagaaggatgcagaagcgtgagttcatggagttgttcgaggcagcacttagagcggctaagtctgtgaaaggtgatgagaattctccagaggtatcgaggtttgtcgatgccatgaatcgtttgaaggaagcacccaagtcacttgtttgtgacgtggtctgcaaaacctccatggggcagggtttggaattcttcatcgatcacaaaaaccctaaaattcgatcggaaggaaggattcttcgggatctttggatgaagtttttttacgcttcaggtagagaaaagagccgtgataatagagaagctgcggtgaagatcccgacgcacgcaacgatgaagaagactggagattcaaagcgagacaaagtgcgtgagattctacaaacatctttggctaaagtcgcttctgaggttgttgacacggagatgaagacacgagtgactgcttgtgatccttgggttgtggctgtatctgtggaaactgcaatgtttgagaacttaggttgtttcatgggacctcaaaaagcaaagtaccggtctattctgttcaacatgggagatagtaacaatccagatttgaggaggaaagtgttacttggtgagattagtggggagagattagtgaagatggagaaggaagagatggggagtgagaagattcagaaggaggttcaaaggattaaagagagagcaagatttaaggaagagagtcgcgtgaagatgctttcatcagcagatatgatcatcatttagttagctgcagagatttagtcatgagtttcattattgtatagaatcagtattcgtgtcaattttctatcacaaactcgagatattagtagattgtaatttcaatacgatgatcgttttcaagttgcttcattgaatggtgtttctaaatctgcgtttaaagaatctagtcaaagtgtttcgtttcataagagggagctctgcagtttatgcagtttaaggggtctttggttttttcttttgaatgtttgtcttctattcgcattaggactcattgttcttatgcagccattaattcccggagaaaatgctgtacaatggttccttgcaaattacattctttggctacaaaatcctcattgtatgaagttgttgtacataggttcttggtacaccaattcgagaagaaatccgttgtatgaatccacgcattacacagatttcaggtttccgcagataaaggcacatctgtggcacaaggttcgtgtcttttctctttttacatacattcttgagagaaccaaacgctcatttacttaatggaaggcctttcccacctctcttcaacttcaaacaagaagtagctggagcatcacctgaactagtcaacaagttgatccagaccatatcaaaacacaattaggtctaagtttcttgattcaatctggaacataaagaatctgcacaaagacaataactctttaaatgtaatgtaccattacacgagccacaaggtcatagttgaaggaaaaagtggaggacacacttcgaagtttttcctcctcgaacaagtttgatggtcaaagccagctgcaagcaaaccaacttccccaaatctgcaaaaacaaaaactctcaagttgtatctgcttatttctcttctcttttcaagtttggtgaaaacaatctcatcttttcttgtttcttttacgcatatgtaaatgagtttagtcagaagttttatatagtatttgagcagaaggtgaagaatctagtcaaagtgatcaccaaagtgtttcataagagtttgtgcagttaagggtctttggtttttctttttttcatacagtacttttgaatttttgtcttctattattaccaaattttatgaaatggtttgtttatgactcattttcttacaaaggcaaaatcttaaatacttttttcctgtatttctgcgtaaagattctctcattattcattcattgtccttggtccttaccatattcatcaaaggtagctgagagaagtcagagaatgatgattcttaacatgttgttttaattaaatgtaatagcatgagagggcaacaatccgttgtagtctagctggtcaggatactcggctctcacccaagagacccgggttcgagtcccggcaacggagttttttttataattgttaaccgtaagtcaggggtactttcgtcattaccttatttgaagaaaccctagtgtctttcatataattatcacacactacgcagccgacgcaattcgtgtgccactctatttgctcatctccttcgatttcgaacccctaatcttgagatggtaaagtttcatccttttgatctatggttatcttcgttcctcgttttggggatttaacttactatttacg

SEQ ID NO: 3828 - DNA, 3000 bp, Unknown
  misc_feature (1)..( 3000): cDNA_ID_1822038_gDNA_ID_1620667_Annot_ID_48081 3000 nt of promoter + ATG
aaagaagctttagaacagagcactgttgcagtttaaaccaggttttatctacttttgtaactgtgtgttgtctcatcttcgttaaaaatctttccaaaagtaaaaacaacaacaaaagagtcgtgtagaaacatgtttgtatactccatatatcgtacattgtagataagatttacaaaagcttattgacgacaacaataaagattgtaccttttgatccgtggaggttcttcaacaagattctgaaatttctctgccatttctctgtctgtgagaattttgccttgtggtgtaagaaaagcagtccgttgaaacggtggagaccagataccgcttgtctggtaatcaaactgaaactcagacacgtcaatgtacttctgaagaagtttgtctgaaactggttttgtaacattctgagttaaaacagaggaagaagatgaagatgtaggtggagtttcagacattttttaaagaaaagaaaaagtaaagaatctaaattttgataggagggtttcatgaggaaaagggttgatggagacttttatggtaatgacaaaataatggattttttggctaataatggaggatgagtggagaggagcacagaacatttgtctatgttcctttttcactcttttttttgtttcttttcttaatgtacagatgcgtttttggattacatattacataatacacaaatcattgaactcttttcacatggcagcagatatgtgagtttttgctaacctcaaagaatttagacaatacacacaactactatgtgattagcccatatgggcttccattttagtgtgtgttgaaacccattgggtatatacagaatccactaactagaagatagagctagaaatgtttcatttttgttagatcatcattgagagtgactgaaatatcgccgtttaccaatgtaacatgaccaccaccactactttttgaccttttcaagaaaatgaaagcatgtaacatatacatacaaaagtttaacgaaatgtcggatctacccctgatcttagggagtgaatccggggtagtttagtacatgtatacaaaatatttcacccagaatctatcggtgatcatggtccagctagaaagacaccagtcttaccctaacttttttcaaagtctgtgtctttctgtagaaatctgaggaataaatatttgaatctaaagagaataaagaagaaagtaaaaaagcaaaatcgaagttttgttcaattttctgggatcatagagcaattttcgtttctttattcgttgaaagtgtgaagcttttttgattcagtgagaagtgttaatggcgggttacagagcagatgatgattacgattacctattcaaggtggttctgatcggtgattcaggtgttggaaagtccaatttgctttctcgattcaccaggaacgagtttagtctcgagtctaaatcaacgatcggggtcgagttcgcgactcgtagcttgaatgttaatgaaaaagtcatcaaagcccagatttgggacactgctggtcaagaaaggtttaagctccgtctctttgattttgtcttcatttgttcatttctcgatctgtgttttaggtattggccctctgatgcattgtggagtcaatacaatttcattagatctgtcttagttaatggaatcagtttatcgtagagaaagcttgagaaatcaacctaacctgtgatcgtgtatataattactggaggtgaagtgtacattgtatttgtgtataatgagagaactcaacaattatgcttaaagttaccagctttgtagaaattctgttgttttgctgattagtttgatcaaccagtggttgatgataatcttcggtatcgtatatgttcatggtgtttctatatgttcgttaattctgatgacgatatcgatttctttaatgatcgttttctaccattgaagctgaagagcttattgctttgaagtctttcttgtcatttcggttcttattatgttcctatctttctaatttaacagagtttcaatgactaagtcgttaacgggtttttgtttctcctcttttcgctatttttagataccgagcaatcactagtgcttactatcgaggagctgttggggcgcttcttgtttacgacgtaacccgacactcaacattcgaaaacgttgagagatggctaagggaactccgtgaccacactgacccaaacatagttgtgatgcttgtgggaaacaaatccgatcttcgccatcttgtagcagtccaaaccgaagatgcaaaatcttttgcagagaatgaatcactctacttcatggaaacctcagctcttgaatctaccaatgttgagaacgcgttttctgaagtactcactcagatttaccatgttgtgagcaagaaagcaatggaggctggtgaagattccggtaatgttccttcgaaaggagagaagatcgatgttgatgtttccgcagtgaagaaaactggttgctgctccaactaaatggtcttatgtcctaaagctgaaatcggtttttaaattttacattcaaattttgtttttgaagatgtttgcttttttttaggaaaacaaactatgttatggcttttgatttgcttgtttgaaaattgcttagctttggtctgattctgtaccggttaagggattttgtaatttaaccggttctggtctatggtttgtttttaattcaatccgcaaatatctctaaaccaatatttattgtgctaatccttgaacacaactaatttttgttataccaatttagaaaattttcgtcaaaaaaatagagatcacaattcagtttctaataatagaaacttttaataacagttcatttttagaatttgcttttgttttctcatttgactattcttgactttaattttaattttatcaaaataatccatgtaatcttttaaaattttcttaaaacaaatcacgtcgtcagtaacgccgaaagaatattccgttactaagatg

SEQ ID NO: 3829 - DNA, 3000 bp, Unknown
  misc_feature (1)..( 3000): cDNA_ID_1822030_gDNA_ID_1620667_Annot_ID_48084 3000 nt of promoter + ATG
ggaacttttatacgtttttttctctcaaaatatttaacatttactttcttctttatacaacgtttccttctacatagaagatcaaaagaagttttgtatagtagatcaaatactatcatcacttaaccaaattggcttgatatactgtcaaatcatgaacataaacggtcgctgtacttagagttgttcaatacaacaatcttgttcacgagccgtgcctattcccgactttttccaaagtagttgatcaatttaaagcatccacactagcgccacacatacaataaatattatcaatgtatacaaccaaaaaataatgtgaacaacgttataacaaactatagagaagattccaataatgatgatatgacttatatacatgtctcgactttcttttgtatagctgcgataaaacataactttttgttattctgggaccattaattataatgtttcacttaaaaagtgattttggtcccaaaatgttacaggtactaattaccaagttctacaactaggttaaaagtgaaaacacacactcacaatatagttcgactatttatctatatattaaatcagtatggttctgattctactgagtaccgagatttatatatataacttccatgctctaggatttgtgtccggaaagtgttattttgatctgttgccaattttgtgtccggaaagagtcatctcgaactttatcgacgttgtctaatttctgttttcagttctagtaaaacttttattcatttactaggaaaaaaaaggatccgagtactcaacatacataaaaagaattcaggtgcctaaaacttagattcgatcatatatataaaaatacaacacataccatacatgtatcgttgttttttttgtgtgtgtgtgtgtagccatgttgccattttgtagtacaaaaatgtctcatgagtcttgtaaaagacacgtgataacggcttccttcgaccaaccaaattactaatttccaaaatatagaaatcggtggaccatgcgtactccatacctcccatttattagttttatccgaatcctatgccaattcttcacttgtgttgtacgtatattaattaggaacaagtaaatttctttaaagtgttgaagctatatatgatctacactgaattgtgaactaattctgtgatctataggcatacgttatatttacagttaagattagttatatcatatagcaagtttagattttgaaattacatcttcctcgtttttgttttcacaaaaataacaaaagtaacttgaaaaattagtgatcatctcggcctcaatgtgtgcacgtgatctgacgttgaccgtaatattatagtccggagttttttttttgtcgtatcctattctttgggtgcttgtataattgcagttttgggagtaattaaaacacaccaagtccatatttttcataatggaaatttggaattttatttgagacagtaaacatttcgatagtttattttataacaacctaggattttcttttgttccgccatatttagaaacaaatcttagtccatcacttacagtcttacactgttaaacactattcatctcgatcatttttaatgatttttatagtaatcatctttacaattgatgagacaaatcaattttgagtggttgcaaaatagaaaccttaacttaatcaaaagaggcctgatattaattaagagcttccacaaatttagaatctttcttttcatcatgattaaaagggaaaatatatgataattattttggattattactattttgatgagtagaaagatttgactagcttgagtggacattgttctccttttaccatatttattgagaaaataaaaaagaattcgttatttaaccaacattatttcaaatgtagtaattttcgaaagtaaattttaatggatatttccaagcattcaaatagtcaaatggaccaatgatattactaagaaacatcagaaaaaaaagaaaaacacaagaataagaaaataaaatgccaacgactagttttaaaatctgtacttttttttcctagaaaatttgtacaaaaaataacaaaaacccaaggcgtatattcaaaggtcgaaactttatggtaatgtactaatgtctcagtgaaaaaattcagaaactttttaataccctaaattttttttttttttttttaataccctaaaactttttaataccctaaatctttttaatttaggaaaagaaagaaaaaagaacatactaatttctattgcatgcttctctcctacaaacggacacttctttattggttttgttcctatcataagcctctgtgttcgtgtctgcaacagatctgtctcctctttcatttttctttttctctttagaagaaaccggaaaacaacaaaaccctctacccgaaagggaggtttttaaagcactgtgccaaaaagccatcgttttctccagaaacccatcagtttcctctgaatcctgcatgtgaaagtttggtgaagaaagaggagagagatctgtgatttcctttaaaacgctgccgtttctctccttttttttgtttctctttctcttgatctctgttgttctgtggctgatgatgtcactaacaacgatgcccacttgcctccatcaatttttcaatctctctcatcttctttaatgtgatacaagttctcatcttcagtgtataagaatcataaattttgatcctttagcttctctgtttcttcttcttcttcttcttcccttgtaacagagagctcgaaagttttcatttttctttctttccccatctgggttttcaatttcactaatttactactcctgatttgggttttttgagattttgtggacttaaagctattgccatagtttgtcacacaaaatcacttcaaatttggaaactttttgcaaaaatgagatacaattcgatttggtacttatgcaagattccgaggaggaaagagatgatatttttctgctgaatta

SEQ ID NO: 3830 - DNA, 3000 bp, Unknown
  misc_feature (1)..( 3000): cDNA_ID_3071923_gDNA_ID_1620667_Annot_ID_163989 3000 nt of promoter + ATG
ttgtcatttactgttgaaatttacttttgcttcaggttaaaggtgaagccaacatttcttacatctgctcacgattctaccgtgcacccgagctcatatttggtgccactgagtacacaacttctattgatatctggtctgctggttgtgttcttgctgagcttcttcttggtcaggtaaacaattctttcagtaaccagcttattcaatctccatgtgtatatttgcattaggactcattgtgactatatcatgttcttatgcagccattatttcccggagaaaatgctgtggatcagctcgttgaaattataaaagtaagaatctttaaacgatgattccttgcaaattacattctttggctacaaaatcctcactgtatagttgttgtacacaggttcttggtacaccaactcgagaagaaatccgttgtatgaatccacattacacagatttcaggtttccacagataaaggcacatccctggcacaaggttagtgtcttttctctttttgcatgtgttcttgtttcagtttctttcttcacacatcaactgatcataattacgttttggtttagatcttccacaaaaggatgcccccagaagcgattgattttgcatcaaggctgcttcaatactctccaagtctaagatgcacagcggtaagcattggtcttgaggtttcttcagtctctaagaatccaactgaatccttactatatattttgtttcctcgtatttcagctcgaagcttgtgcacatccgttctttgatgaactcagagaaccaaacgctcgtttaccaaatggacggcctttcccgcctctcttcaacttcaaacaagaagtagctggatcatcacctgaactggtcaacaagttgattccagaccatatcaagagacaattgggtctaagcttcttgaatcaatctggaacttaaaagggatcctgcaaaagacaactacttttttatatataatgtaccattacacgagccacaaggtcgtagttgaaggcaaacgtggaggacacaattcaaagtttttcctcctcaaactcgttcagacaaagccagctgctagcaaaaccaactcccccaaatctgcgaaaacaaaaactctccagtgttgtatctgcttatttctcttctcttttcaagtttggtgaaaaacacagtctcctctttgcttcatttcttctttctttcccccttatgtaaatgagtttagtcagaagtttttttatatagtaaagtttgggcagaaggtgaagaatgtaatcaaagtgatactctttcaacgaggagcttctttcaaacactttttttttttttcaaacacttcatgaatggatacatggttttgctttaagcataagtatatttgtattaaattttcactcaatttaattgcacgaatcattacaaaaataatatctcgctactcatataaataccctataaataaataagtgaattttttttatctctcatggaaatttgatttatgtatttatatgttttaagattcgaagaaatttttaaataatgaaaatttacaaatatataattcttaattcagaatttcagatattgaattacttattggatttttaaaacaaaaagaaaattacatgactttttttttcttttttttttttaaatatctgttagttcaagttaaaagaccatacattttctaaaggcgggacctatatcaggttaaattcatctccttttagaaaaaaaatatatttgggaaaggctttgatagcaagcaattaaagtatccgaaactaacaaaacctatctggtcttggactcttagtctttatataaacaacatcagatagatcgagagaccatacgcaacaatttactaatttctcttctccttcgttgcttttgaaaccctagttattatcgagagatcaaacacgtacgtacacaaaagaccgatcaaacagagaaggatgcagaagcgtgagttcatggagttgttcgaggcagcacttagagcggctaagtctgtgaaaggtgatgagaattctccagaggtatcgaggtttgtcgatgccatgaatcgtttgaaggaagcacccaagtcacttgtttgtgacgtggtctgcaaaacctccatggggcagggtttggaattcttcatcgatcacaaaaaccctaaaattcgatcggaaggaaggattcttcgggatctttggatgaagtttttttacgcttcaggtagagaaaagagccgtgataatagagaagctgcggtgaagatcccgacgcacgcaacgatgaagaagactggagattcaaagcgagacaaagtgcgtgagattctacaaacatctttggctaaagtcgcttctgaggttgttgacacggagatgaagacacgagtgactgcttgtgatccttgggttgtggctgtatctgtggaaactgcaatgtttgagaacttaggttgtttcatgggacctcaaaaagcaaagtaccggtctattctgttcaacatgggagatagtaacaatccagatttgaggaggaaagtgttacttggtgagattagtggggagagattagtgaagatggagaaggaagagatggggagtgagaagattcagaaggaggttcaaaggattaaagagagagcaagatttaaggaagagagtcgcgtgaagatgctttcatcagcagatatgatcatcatttagttagctgcagagatttagtcatgagtttcattattgtatagaatcagtattcgtgtcaattttctatcacaaactcgagatattagtagattgtaatttcaatacgatgatcgttttcaagttgcttcattgaatggtgtttctaaatctgcgtttaaagaatctagtcaaagtgtttcgtttcataagagggagctctgcagtttatgcagtttaaggggtctttggttttttcttttgaatgtttgtcttctattcgcattaggactcattgttctt

SEQ ID NO: 3831 - DNA, 3000 bp, Unknown; identical to SEQ ID NO: 3826
  misc_feature (1)..( 3000): cDNA_ID_3012350_gDNA_ID_1620667_Annot_ID_163987 3000 nt of promoter + ATG

SEQ ID NO: 3832 - DNA, 3000 bp, Unknown; identical to SEQ ID NO: 3824
  misc_feature (1)..( 3000): cDNA_ID_1822077_gDNA_ID_1620667_Annot_ID_163981 3000 nt of promoter + ATG

SEQ ID NO: 3833 - DNA, 3000 bp, Unknown
  misc_feature (1)..( 3000): cDNA_ID_1822229_gDNA_ID_1620669_Annot_ID_48115 3000 nt of promoter + ATG
ctagtctatgaactaaacttggttaatttatctctcgtcaatcatcgaaggaccacaacatacatacatatatttgttgcaacatctaaataatatagataaatatatatgttatagcatattatataaattatagcatagtcaaagtgagttcaacgtcatgtttccatcaagccccaaaactatgattaaagcagacgaaataaaatgtgttaccaccaaggaacttacaaaatttatatgtaaaattaattttccaaaataataatttggacaatattatatactttagttaaggcccagtgtatacttcacggcccatgttaagtttcggtttataactttggtttgtttggtttaaatgttcagactagtttcctttatatgtggtttaaaagtggaaagtctccaaaaaattgaaggcctttccgatagttcaggctaaatagaaggaatcaccggtcgtctaaaacaagggaagatatttaaactcatcagactctcccaccatttaaagactactacgaatatggagacaaggtttccaaatgttgcaaaaatcaccctacatctttatctccgacgacaatgatcagaataatctccagtacacgagcttgaaagacgtgatctcaagttccgatggatttggttcgttgttttgtcacccacaatacagtgttccttcacaagatggttttctcttgtcagagatggattcttctaacatcgccattagcaacgagctcgtgaaaagagcagcctcgatgtatgttcaatcttctatgattgtcattgctcctgacacgaattggttccagagattctgtttgaaggctaagcatcaggcggttgctgcgattgattgtcttagaccggtttgccggattttcgctcggtctagttaagagatgtctttagaaagggtgattctaattcttcttagtaattgtgtaaatattgtatataattttagattatcaaataaaatttctcaatcattcaacagttttttttttacttcacctgaagcataagaactcatttatgaacatcatacctacgtagattaagcatcacgcccaagtcttttccttttaacgtttcttcttagctcgtttggaagaagacctcaacgtctcttttctcagatcttccgtagcttttgtgtccaggaacggctgcaaaataagagcaaaatctcaaacaagttaacacatgaaaagccgggttcatcaactttcactgtttaggttccaagtctaacaatttcaatcccaacatcaaagaaccctttggattttatgcccttggtagttctttgcgtttaagctacttcttggtccgacctcgtagtccattataagagtctgatccttagattaattcattggtttcatgctttgatttgtatatctatagagtcgataagcaactaatatgatatataaatcaagactctattaagatagataacaatgggttcattctacatctaaatattgctacaagttcaaacaaacaatgaagtagataggaaatggatttctaacctcgtcctttctcttttggagctccagaagctctcggcaaagagcaagacactcaacgtggtaagcagcagctaaatccttaatcaaagctttccttttgatgatcccaatcactttcaaaagaaccaattcaaagcatttggttagagaaatcacactgcagagatattgaaagaagtaaaaatagcaagctggtgaatcatgatcagagcaaaaacataagtatgatcttaaacatcaatgtttcatcttaaagataatccttcatagctatctatacagttgctttaagaatgcagattgagaatcactaaacttccatgaatcttcttcatttgatttttttatgaaactaagaaacagaatcaatgttcacaatcagttttaactataatctctcactcagcaaagtaaagagaagctctttctctacacttagtcaaattagtgattatgcaggaccaaggattttcgattagaactacaaaaaatgcgagctttgggtacgattaaaaagatcattctaattgaagggagataatagaaaaacccagaaagcaaaaccctagaaatcaatttgatgttgcagaagaaaaggggaaagtaagatattacttcgactaggatcgaatgtagccggaggagtagacgtttccggtgggggatgttcgggttgggatgaagattccggcggagaaggaagaggaggttccggtgaagttcgcttctcttcttccgccattgaagaagtttcaagaaatttttttcccacagagatttttattttattaaagtcagctgaagtaaatacaaaatctccttattgctattttccactgtgatttatttatttccgttttgttaaaaaagttttaaaagctctttataatgtcattttatcaaatagtgatactattatattttaatttctttcatataatttatcattgtttatttcgctgagggaaaaaaaactataaagtcgtttaaaaaaaaacaaatccaactatattttgtaaaaccacctataaatagtacaattaatcgataaacggtctatttccccatgggaactatcgcatctggctagatgaagcccgatctttgacctcttgctatttacccatgaaatgaaagttaaacgtctatttccccaccaaataaaagttgaagagcttaatgtccccgaaataaaacttcgagagcttaatgtccatagaactggattaagtcggtttactgtatgcgaaaccgatgacttaaccaactaaacctatttagaaccagaataaacctaatttaaaccaaaattatgacccgtaacccgactctcgaacctaaaaaaaaaaatccccaaattctctcccgacgaaccctaatttcactcccgacgaatcctcaaatccagtttttccaaaccctagaactttgatcgatcgatgtcggg

SEQ ID NO: 3834 - DNA, 3000 bp, Unknown
  misc_feature (1)..( 3000): cDNA_ID_1822225_gDNA_ID_1620669_Annot_ID_48117 3000 nt of promoter + ATG
actgaagttccaagctttagcaaagaagctcagagtttcttgcaaggcataatcgatggatttagcatagacgatgcattggaaattaagaagattgagagagtaacaaatcatgatgtgaaagcagtggagtatttcttgaaacaaaagtgtgaatcacaaccagagattgctaaggtttaggttcttttctctcacttataagttcttagggtttggatgctttgatgccctgtaactaaaattttggatgtctttttactgagttaggttcttgagtttttccatttcgcttgcacgtctgaggacatcaacaatctttcccatgctttgatgcttcaagaagcacttagttcggttatacttcctaccatggatgagctgatcaagtcaatctctctgatagctaagaactttgcttatgtccccatgctttcacgaactcatgggcaggtaatgtccaaagagaagaccttcaccattttacctttccctatttatctgtatctatctctttactaatgattttgtttactatgaattgtaatgcagccagctacgccaacaactttggggaaagaaatggcgaattttgctgtgaggttaagcgaagaaaggagatatctttcagaaactaagattaaggggaaatttgcaggtgctgttgggaactacaacgcccatatttccgcatattcgaatattgactggcctcatgtttccgaggagtttgttacttctcttggattaacattcaacccatacgtgactcaggtaatatagtttatattgatcaaacaatcctattcaaattcataaagatcatcgctgattgattgttctgtgtgtattttttttgcagattgaacctcatgactatatggctagactttttaataatatcagccagttcaacactattttaattgattttgacagagatatatggagctacatatctctagggtactttaagcaggcaagtgttaatataagaaaggaaaaaaaaagatgtcaaatcatttgaatctgaatgggaaaatcgtctcattgtttgagattttgcagacaactaaagcgggtgaaattggatcgtcgacaatgcctcacaaagtgaatcctattgactttgagaacagcgaagggaatctagggaaagcaaacgcagagcttacttttctcagcatgaagcttcccatttcacgcatgcaggttttaacatttctccatattctatgtatctcagctagagtgatggaagtaaactaagcctgaaaaatgtacaatctgcagcgtgatttaactgattcaactgtcttgagaaacatgggtggagctttaggacactctcttctcgcttacaagagtgcgatacagggaatcgggaagcttcaggtattattaccgtagccctaagaaatgtttccacttgtcacaaactaagaatgttcttgatataggttaatgaagctcggttaaaagaagatttggatgataattgggaagtccttgctgaaccaatacaaactgtaaatttctcgagtttctaatcttctatatcaatcaagatatttgatgtatctctaatccacagaagtattatggtatcaaataaaggtgatgaggagatacggtgtccctgagccgtatgagaagctgaaggagctaacaagaggaaaagctgtgaatgaagaaaccataagaacgtttatcaaaggtttggaattgccttcagaagcaaaagaccaacttctggagctaactccacacacatatgttggtgctgctgctgcattggcactggccgtggatgaagctctgcacttgggacattgatgatgatcaaagtggtgatagattgtcctcttttattatggtattcttttcgaaattggtggaaaacagagacaatttataggtcggtgacttgcaagtcgtcgtttaaaatgttaagaaaaatcttgtaccattgttgtgttatgtttcctctttgagtgtctgtgttttatctaagtcttgagctataagctgtggtcaatgattctcgaaccaatacaaattattgtaataaaataggtcatatacacattggtgtcaaataataaagagttctcaagttgaaattcaatttgagtggtttttgtttttctttataaccaagtgttatgtaggtatcaaaatctagcaaatatatatgcatatagtagtcaaataaattgtccacagaaacaaaactgagaaataataatgttaaaatgttgtttgtcaattaagagctttaagtaattcttctatttattgctaacatttacatgaacacaaatgttttagccttttaggtctaaaataaataatataagatctatctcaaaaacaaacttactagtttcctttagacttgatctattactaaaagtctagtacatgtgtccaacaataatctcaactctacactatatttagtgtcatataaaaaaaatccttagaagttaaaaatagaaatggaaaatttcatgacaatataccataaaaaatcttttacctagatatcttcctacacattgctataattttatttatgaacaaatttccctgtgattttatttgagaaaagctataaattgaattattgaattgaagacataataatattgttttttcctgcaagtgtatattgttctgcgtttaccaagttcatggcggccataaacccgaagatttcgtcaaacatgtttgttctctaatctttccaacgactttcaaaacatatacatatgctaagtcatgcatataataataacaaatgattgaatcctaatattattcttatttttataacactaccaaaaccaataagccctttcgtcgttacccactacccataatttcatttcattacaaaacacaacaacacatcattcatttcattagatcatattgcaacatctctctgaattcttctttacgattttgtaacttctatcaaataccttaataatg

SEQ ID NO: 3835 - DNA, 3000 bp, Unknown
  misc_feature (1)..( 3000): cDNA_ID_1822221_gDNA_ID_1620669_Annot_ID_48118 3000 nt of promoter + ATG
tctttatcgatgtatgaaaagctaaatcagtattaaggttcatcaatctaacagtagaaacaagtcatttagaagctatatttctttttataaccaaaaaaatagttaaaaagttttttaaaatgcgacgagcgtggaacgaaacattaaaacaataaacttatgtttgatttaataatcacaattctccaaaacggatttgtgcctctggtgggaacacgtcatagattctcatgaagcgttaaactgaagattaatatgtttattatacaaaagtgaattaatactctgcatctagtccttttcaagagtacacaatctgcacttttttaatgaaaatagtacacaatctttatacttcaaactgaggtaacattattaaattaatttattgaagttgacttaagatgatctattcacataatggtacgtgtgtgtgtgtatacacagaaaacccctgattttatgtggaacctaaaaccctccatgaaatgcggtcagtaccttagaacacaagtttcaccaactgtacttcccaattatcctgccgcagatttcccattcaacgtacacacaaaacccccaaagcaacaatctctttaaaatgccctaaatctcaccaacacatactcctctctgattcaacaatggcttttggcaatatccaagaactagacggcgagatcctaaagaacgtttgggcgaattacatcggaacaccacaaaccgatacaagatcaattcaagttccagaagtttctagaacttgggaagcgttgcctacccttgatgacataccagaaggttctagagaaatgcttcaaagcctagatatgtcgacggaggaccaggaatggacagagattctcgatgctattgcttctttcccaaacaaaaccaatcatgatccattaaccaaccctaccattgattcatgttctttgtcttctcgggtttcttgcaaaacaagaaaatacaggggagtacggaagcgtccgtgggggaaatttgcagccgaaatcagggattcgacgagaaacggtgttagggtttggctcggaacgttccaaactgcagaggaagcagctatggcttacgataaagccgcggttagaattagaggtactcaaaaagctcacacaaattttcagctcgaaacagttataaaagctatggaaatggattgcaacccaaactactaccggatgaacaactcaaatacgtccgatccattaagaagcagccgcaaaatcggattgagaacaggaaaagaggcggttaaggcttatgatgaagtcgttgatgggatggttgaaaaccattgtgcccttagctattgttcaactaaggagcactcggagactcgtggtttgcgtgggagtgaagaaacttggttcgatttaagaaagagacgaaggagtaatgaagattctatgtgtcaagaagttgaaatgcagaagacggttactggagaagagacagtatgtgatgtgtttggtttgtttgagtttgaggatttgggaagtgattatttggagacgttattatcttctttttgacagaaatacattgaaaactaccgttgctaatttgataggtatacatatatagacatgtatatattgtataattatatgtcaagattatttatttattttacatttttcacaaaaaaaaacgttaatctatttttctgtcacaagtgtgtttttattcatactacatactacaacgccaatttaacatgccaaatataaaacatacatgggcaaaggcccaacagccagtttaaagaactttgtctgaagagaaagttgttgtatatatcacaagggatatgtggtaattgggaaacatgttgggttgacacgtgggaaattgaaggagatggagtttccgtcactggtagaatcttctaacactagagagcttcaattcaggttgaaatcgtcagaaaactaatgcagacggtagatctcaatcttcgcccaaaaaaactatttagcttgatgagaataatttcacttaatttaaatttgtaattttttttcattttctttttcaatagacaacttttcaattttcaagttgcagttcatcaaaccggaacaaaagttagcctataatcgccaaagagataaacggcgatacaattagaaataaagccagccatcgacgctatagagttttgggatcaaggttaagctactttatccaccttgatctcattcaatctctaaaagctaaatgagtttcgatttaggaattttgtctattttcaatcgataaaacgacatcgtagtgtacagtaaactaatatcgtttagacataacagagaaaactaacaaaaaattaacaccgtaatttttttttgtgaatctacttatcatcatatctaaatagtaaaatgtttacatttagtcatttaacgccaccattgagaccgccgcttgttaacccatttctaatcttatacatgacatataattgtactaactaacctcaaatggtattaataaacagtttttggttcatttcagttatatcagtatatgacaaactcttagtgagatataaatctacacataaaacacatgagtattgttttgtcattgtccaaacatttttgattcacaatacgacgatttataaattattaaagtttccctccaaattattttgaaggcatttttaatccatatatttgaaactattaataaacgtgttcaaaataaaggataaggtgataagtaacaaataatcctcctccaataagcgtaataagtagggacatcaagggtaaatatggaagaaagaaaaaaaatgcacatgtgtttttttttaatcggaatctcctaaaaccctatatatcggcggtacagttacgcaaagcttccagtgactcactcacatcgtgctttgattctggaatctaggtttaaagtttagacctttgagatcacactatatcaaaaatggagctcaatttctcttcaatg

SEQ ID NO: 3836 - DNA, 3000 bp, Unknown
  misc_feature (1)..( 3000): cDNA_ID_1822213_gDNA_ID_1620669_Annot_ID_48120 3000 nt of promoter + ATG
atatacaacaactttctcttcagacaaagttctttaaactggctgttgggcctttgcccatgtatgttttatatttggcatgttaaattggcgttgtagtatgtagtatgaataaaaacacacttgtgacagaaaaatagattaacgtttttttttgtgaaaaatgtaaaataaataaataatcttgacatataattatacaatatatacatgtctatatatgtatacctatcaaattagcaacggtagttttcaatgtatttctgtcaaaaagaagataataacgtctccaaataatcacttcccaaatcctcaaactcaaacaaaccaaacacatcacatactgtctcttctccagtaaccgtcttctgcatttcaacttcttgacacatagaatcttcattactccttcgtctctttcttaaatcgaaccaagtttcttcactcccacgcaaaccacgagtctccgagtgctccttagttgaacaatagctaagggcacaatggttttcaaccatcccatcaacgacttcatcataagccttaaccgcctcttttcctgttctcaatccgattttgcggctgcttcttaatggatcggacgtatttgagttgttcatccggtagtagtttgggttgcaatccatttccatagcttttataactgtttcgagctgaaaatttgtgtgagctttttgagtacctctaattctaaccgcggctttatcgtaagccatagctgcttcctctgcagtttggaacgttccgagccaaaccctaacaccgtttctcgtcgaatccctgatttcggctgcaaatttcccccacggacgcttccgtactcccctgtattttcttgttttgcaagaaacccgagaagacaaagaacatgaatcaatggtagggttggttaatggatcatgattggttttgtttgggaaagaagcaatagcatcgagaatctctgtccattcctggtcctccgtcgacatatctaggctttgaagcatttctctagaaccttctggtatgtcatcaagggtaggcaacgcttcccaagttctagaaacttctggaacttgaattgatcttgtatcggtttgtggtgttccgatgtaattcgcccaaacgttctttaggatctcgccgtctagttcttggatattgccaaaagccattgttgaatcagagaggagtatgtgttggtgagatttagggcattttaaagagattgttgctttgggggttttgtgtgtacgttgaatgggaaatctgcggcaggataattgggaagtacagttggtgaaacttgtgttctaaggtactgaccgcatttcatggagggttttaggttccacataaaatcaggggttttctgtgtatacacacacacacgtaccattatgtgaatagatcatcttaagtcaacttcaataaattaatttaataatgttacctcagtttgaagtataaagattgtgtactattttcattaaaaaagtgcagattgtgtactcttgaaaaggactagatgcagagtattaattcacttttgtataataaacatattaatcttcagtttaacgcttcatgagaatctatgacgtgttcccaccagaggcacaaatccgttttggagaattgtgattattaaatcaaacataagtttattgttttaatgtttcgttccacgctcgtcgcattttaaaaaactttttaactatttttttggttataaaaagaaatatagcttctaaatgacttgtttctactgttagattgatgaaccttaatactgatttagcttttcatacatcgataaagaattcttcggtgtttagttaagtttgttagaagttattattttaccatacgatcacagtttaacgcatattgcctagagaatataatataatgataactaaacgctatcaaaatgtgaaacgaaataagaaaaaacatgtaagggctaagtcatcactaactttttatccaagtattatttgtatgagatcattttccgtaagtccaaagatttgaaacaatgatgagaggtgaatagaatatataaattccacacgctttgaaacatagcttacaattgaaaaaaaatgaaaaagagattaatatctctattcaatgtattatagagaatgagctagagatactttatatggtaggttcaagtcacctcaagtacgtatcagctaatattaaaaaactatctgctaatttttatatcaatcgtttaagattcattcattcgttctccactacgagagtttcttgctttggcacatatatagttcaagaaagtctcgtgttggagagactccaagcgtgctagagcgtttcgattagaaaggtgttttgttcgagcattaaagattgttgcaatggttctatcttaaggtagtcatttgttaaattttggtattcaatctcgagagcttcataagtctagcgagcttcataaacacactacaagtcatgtgtataaaatttccaattctgtaatcacaagtctaaacttaatctgaatccaaatcacaaaaagcattttcaaaattgattaaaaaaaaaactacaatatagaaaagattttaattgatgcttggaacggaactaacattacctgttatgatttcgggcctgaaagtattctgagttttgattcagaaccactcggtattaaagaaaaagaagacttactacaaaaaaaaaattatatatatttttatgaattattataaccaactaatattgtctctattggttctaagttcaaacttctaaccttcgagggccgggttcaaattccagtaagtgatttattttttgctaacaattctcttatggcgggaaaattgacttctgtcgagaattagggtttctacaaatctttctccgttctaatttcggattaagatttcaatctctccttctcgttttcttctttggtgctgctgagaagaaattagtgaaattgtgaaagagaag

SEQ ID NO: 3837 - DNA, 3000 bp, Unknown
  misc_feature (1)..( 3000): cDNA_ID_2031704_gDNA_ID_1620669_Annot_ID_48122 3000 nt of promoter + ATG
acatgggattcaggtttttctggcttcttaaaaaatctggatctgataagtcctaaatctttgttttgcatggccctcaaattatcgagccctgccatgctgcactcagtttacagtatactgcagttagatatatatttcatcttcaaaaattactggcagaatgacaaagtactcataaagtttctaacctgtgggacggatccagtggtagcttttcactcaaatcttgtaccttggcagtttggcttgtacgagtgcctggtgatattttgcctgagagggttgttagagaatgtccagcatctgagttatacagtgctcctttagtgttatcctgtatttctgcctgagtgtctgtacccatttcttcctgttgatgttctatcttgtctgaacataaatgagatgagatgcttggtgaagtctgttctatcttctcataacttgattccatggtggtaatcattttcttgttggcattttctggatctataggacagtcttcttttgtaccagacctgcagagttcatggatatctggactggtttctctgtttactgcaatatgtgcaatctcagaagcatgtaatggcgagggtgctatggtctcatttgaaggacatggttcattcttttcttcaacctttgaacatgatgtcttcaatggtgaagtatctacggattgaggttgcacacacattgtatgagtttgtgaggctttttttcttgaaccctgaggtgattccaccgcctcaaaatctcccatgctctctaatgcagcttgattcgagtttttgctcttattaacaaccagagtatctgtagtcttgtaattttggctctctttttcagctgaagcttttgcctgaacatctgtgtttgccttggagggaacttgtctagttattggtaagtctagaccaaagtccaaatcgtctgacttatcactcttactacttgcacaaatttcttcacagtccatgctcttggtcgtagtcttgcttcccttcttcggggggcttgaaccaagatcaaagtcgtctaacctgcttgcagaaaaacataacatggcgttaagcaattttagatgacatagataattctaaaaggaaattgatttactgaaggattcatacgcatcaaagtcgtaagagaaggcaaatggattctttttctgttttgaatttccactaggtttatcatcagaggtctctttcgtttttgtggttttcttggctgggcttgagaaatcaaagtctggcatgtccattttaaatgatgatccaaaatctccatccagatcgaaacccatatccctgagaaagagacaaagaaacagaactatatgagacactaggccttgttgccaagcaacagaaacttatagtagtaatcatgataaaggaggaaaaatttcacgattgaactacatttatttaggtgcaaacatggtttaagaaacttatcatattggttacactcacaacttgaaggcattcttcttattttttgctggtgagccaaagccaaaatccattggatcatcatctgtcattgacttgaagttccatgtatccttttccatgtctttatctgcagctaaccatggaaattaaaagacaacgaacctttgaatcacccattttaacaatgggaactacatcttatggtttctatctacgcccaaaaaattaaaagctggccaaaattgagaaatagaacaataaggagataaagaagaataaaagatagtgtgcatgatctttttgcctatagcatcaagttattaaggcagtctacttggggattccttttcttcaatggaattttcgccgcaagcggcttaaagacattccactagcaatgccatgttagttatgaatcatatcacatgaacatttgaaccataccgagcattagatctttgtcctgagtatctgtagaacttcttttagcaggtgcagacatggcaatatctgttcagtatcactcttgaaaaccaactgcaaagaaaaaactaccatcataatcattctagcactcactcacgaaaacacttatctgttatgttatgataatcacaaggcaaccaacaaaaaaatcatcctactacgtcacaaactcaactagcatagacaaatcatcagttccattaacactcttctaaaactatttctaaggcgatatgacgcataacgtacgtaggtatgattatcggagagactgagaaacataacagatcaaacaatgtgattatccgagaaccaatctaaacgaagaagaacagtagcaggaatcaaattatgagattcaacaccaaattataaaaaataaccaggcggttcgtcgattttaagcaaggagacgccactcgagactaaatttcagggacaacgagcagcacgaaactaagtttaggagaaagtgcatcttagcattgatcgaacatttcttactcaaatctacgcataaacgtcacctctaacacagaaatgttcatcgattatgatcaaccgatcgtcaatcgtcgaaccttagcaaaccgaagctaaaacaacgcctgacagtgagattctactcaatcgacgagcaacgagggtaaattcttaccgattgaatcgctttgcagttgtatatgtagtaggcgctaacgataaacgttcaacggcaacaagacgacgacaccggagagaaaatcgccgacggaactcgaaggggggagattttgaaattagctgggctccgaatgatttgacttgggcctttatattcttatgtttggtatatatatatagaagctcgcctttttttttggtacggctattttattttctatatcatttttgatttataaataaaaaaaaggaggagatagaggaggaaatctatctccttatcctgaccacagaaacaaacataagccaatggaaacaaaaaaattctaaggtgaaaaaagccaatcagaagctgagtaaactctaagctcacacaaaaatg

SEQ ID NO: 3838 - DNA, 3000 bp, Unknown
  misc_feature (1)..( 3000): cDNA_ID_1822197_gDNA_ID_1620669_Annot_ID_48126 3000 nt of promoter + ATG
caagaaacatatagaaaacactagtagcacataccgttgatttcgagtctgtctcattccgcaaagcgcttgaagcggtttcaaccacaccgagcgttggaagaccataatgaattatgtactccgcatcaacaacaccgacatttttctttcggtcaccctatccgcaaccaagaacatgttagtaaaaaccgtacaatgaaggaagtaagggcttatcaaaacaagttagaagaagaaacaaacttgagcacaataaccaagctgcgtatccagaccccaagcatggatcaaatcattctgcaacgcaaacgaaagcattaaacccaatcctctcgactcggggaacaaaaaacgaatgctacacaaatgttacctgaatcatataccaagaacatctccatgcagctctagagaaaacaggtgccatcatttccacccacctacagatccaagttacatgttaactggagaatgaggtagaaagagagtttcaagaacatttcacggaatatgcgaaaagcgtttacccgatgcaaggaggattggtgctatggtcatcacatcgcccgctacctttgtatttatacattcttctatgaacttttgatttttttcgacgagcggttataggatgatgcacttctgattttgaagtgtcaagagcaggttgcgatatctcaagcccctcttctttgacaatagatagatatctaaagtaaaacgattggaatgagaaatgaaaaaagataaaaaagaacacaaattctatatttagtgtgttaccgttgaggattgaaatgaccaacaccaagatcttcgtcccaaagaaatatatactcgtactctgcaactatatcgggatgcaagaatcgcttggcgaaccaccttgtgacattaacaacattcaagtattagagagtatatgatggttgacgaaaacaataacaagaagttcaagaaaacggaccattttgtttgattcatcacggaaacatgaatcgcatgattattccatggatactgcttccagtcatcgacaacaccatcataatgaaaaagcatgaccgcgaaatctcgaggaggaaactgaagtcacagcaatttgtataactaatcgaaataaaagacgaaaatcttgctgatagaaacaatcaaatgagaaaacaaaaccttttggataactttgttaactagctccttttgcttgataccgaccgccatggctaacaaactcatcgaatggttaggccttctctgaaagaaatatacagcaaaagattaagctacacgaaaaaaaagcaatgaaactttccaaatctttgaggaatcatgtaactactaaataaccttttttgtgtcatcgtagttccatagatgttgtgtttccaggttcgatgttttctcgataattccttgcggtagtgcttcagtacccactggcttattgaaattctagtgaaagatatatatatttgtaagtttaatatcaaagaatctcataaaacaaacctcaaagaatatttcaaagacaaaccttgcatgtactggttgttgttgcattctgcatcttatcagtactgttatgcatcttatcagtgatttcccacttcagcaacttctgcagatttataatcttatacatcaaattcagaaatctaaacttattgttctaatgttgactataaaaccagaattattcaacaatgtcatgttatttacatgtcggaaaaaaacactactgattacacaaaaagacagctgaacaatttaaccaaaatgacagtatcatagaacacatatagatcttaagtgatgccaaatacaaagaagtttacctctttaaagtctttagcaagataagcattgcaaatgaagtaagcaccacaaatcagagcagtggtgattaagacactacagagacacgatctattcattgaaccctgcaatttagagaattgataataagactttgagacgaaaacatagatcagagcctagagacaagaggttttaaatcacacatcagaagaacactgagcaaggttataaactattaacaatatttgaatcatcagtaataaaaaatcttatttgattcaataggacaatgaggacaatttggaaaagacaataatttgacagatattttttttagattttcctctatgtttacacatgagaagaagatatagctaaaaaattcctaaactatgcacataattatctaactgaattcatcatcgtcaacaattaaacagccaatagacacaaaaattggatatatgaatgaaatcaataaaaaaagaagagaccaaggaagaagaaaatatgtattctcacctgtttcatgaattagatgatttgtttttctctgtttctgccttttgtgtttctctgaaaattgaagctttttttaccctctcaaaaaggtttcttttaagacagaataaacccttttcgaaagagaagaggaagagaccaaagtagacgaagaaacgaatatcctgaacttggtcgtttcaaattctcttctcgaatttggaagctttaaacaataaagattctgttttttatcttcttccgagtctaagaagaagctttttattagctcagttgcttcataaaacccagaaacggtaagtgataaagaagattgaagtcagtcaaagagacacgtttcagagatcgtgtagcaaaattcaagggttttcaggagagagagacaacaaatgcagagaggaaagtgggaagtgatgagacacgtgttttacgtttattggttttgatattaagtcgtgtgtgtactgtatatttgtctctcgcttaggaatttgaaaccgaccgagatattatttgttgtcgtcataattaccagatcagattataaacttttaattctctttaccaaaataaataaaaaagagaactttatctgattttttttccggcgggagatctctgtgtgaagcttcttctctttctccatcgccgacaatg

SEQ ID NO: 3839 - DNA, 3000 bp, Unknown
  misc_feature (1)..( 3000): cDNA_ID_2785806_gDNA_ID_1620669_Annot_ID_48127 3000 nt of promoter + ATG
gataaattaaattatttcaatgagttatctatcctaatttatttgtatataaatcttgagatttttttttttaaaattaacaccatatcaagtatataatatgatagtgttgacaccaatttgtttagctttagtttttaaacaaaaatcaaatatacatactactaagcataaagattagtaggcacctttatagtatatactttatagggtataaacttgtgtgtacaatcatactaaaaataaggcataacatataaaataaaatagtttacgcattttacatcattcaaaagacaaaatgttttctcactagaataaaacagtactatgaagaggcaggtagttgataatataaaattttcgtctattaaccagtatagatacgtatcgaaatagtcattaatcaacacaaattcaaagggtcttatccaggcacttaagattatctaagcattatataagatggaaagaataagctttaattacgatgagaatataaaaccatcaaaaggccataaacttggaagcagcaactcggttcattgtgccaaagtggggacctatagtgtgcattctgattcaagaaagagatgatcatgacctcaattgaaattgtaaatcatttttaaaaaaagtaaagggacttcatatagtctatatatagcatatttttatcattaaaaatgtttgtttaaagattcaacttagaaatttgattaaatactagtattacttaactagtgcgttcaaattattagtaaacaagatccaaccttacaaaaaaaaatcacactttattggcacctcaactgaatcttttattttagtcgtcaaagaaaaaaaatggattcattcaagctgtaaatggaaatgtgtcactaaggcccataaatctattttgaaaaagcccattaaaactaggttcttaagtcttaaattgaaatatatcaatctacttttttcttaatagatataattggtcatcattaaaattcttgcattggctaattgcaaagaagaaatattcgacatgaaatttgtacatttggtgctattgtggaacgcatcttttttttcataaactttatcatataagaaagaacttgaaaaaaaaagagattctaaagaagaaagatcaagatgtctccaagtaacaagttgcagaagattcaacagcttcatcgagctcaatatctccacaagtagagagaattgttgcaaatatataatcatcaacttcaaatccctctgcctccattctatacattagcttcaatgcttccctgcaaaacccattcctcgcataacccattatcatcgccttccatgaaaccaagttcttctcaggcatactgtcaaaaacccgaaaagcttccgagacaaatccacattttgcatacatgtgaatcaaagcacttcccacaaagacatttgatagagcatgattcttctttgcaatggaatggattgatctaccgataagaagagattctgaattcgcacaagcttttaaagccgaggagtatgtaaatgggtttggctctacaccttcttgaatcatctctttcaagaagtctagcgcttccgattcatgtcctaagctcgaacatccagagatcatagcggtccatgaaaccacatctctagatggcaattgctggagaacattgaaagcgtcacgagattctccgcatttacaatacagccacaccaaagtacttcctatatagacattcttttcgatcgaattcttgataatctgtgcatgaagttccttccccaacaataaagctccaacagatccacacgctctaagaatgcttactactgtcaaattgttagcaatcaaatgccgcctcttcattatccggaagaggctgatagcttcctcaccaaaaccttcccgagcatgagcagctataatcgaagtccatgtgaccgtgtttctattactcattccatcaaacacttttctgcaatcagaaatctccccacacttagcatacatgtccatcagcgaagttcccacaaaaacatctgtctttatcatcctcttaacaaccaagctgtgtacttgccttccgaatcttaacgctttctcctcactacaagccttcaaaatactgcacaccgtaaactcgttaggcaaaaaccagtgattcaacattccgataaacatgcctatagctttaattccatgcccttttctcgaacacgccgatataacagcagtccaagatatcacatctttctcctccatcatatcaaaagctcgtaacgcacttgtcaattcaccgcattgcgcataaaaataaacaagagaactctccacaatgagattccccactccaactttcaccatattaccatgaacttgtctccctaactcaaactctgctctcctactacacagattcaacaaacacacaaacatcctctcgttcgtaaaacgtattccatgcttcacataatcctcaaacagtgcaaaagcctcatcctcaagaccatacttcaaatacccatcaatcatagcagtccaagtaacagtatttttctcaggcatactgtcgaacactttacgtgcataaaccaaatcaccaagtctaacacaagaactaatcaaattgttcccaaaatagataacttgatcatcaaaacacttcaacgccatcgcatggatccttttaatgagtcgcatcccattagaagactgtagccactccgctaacagagcataatcaactctttcgctatcgaaagaagacgaatcatcctgattcacattctctcctttgaaaccactaaaacccgaatcgaaagatgctctctttccagaaactaatcgaaacccaggtaatctcacgtgtctctgttcctctcgcttagttcttgaatcgctactgtaacatatcgtcggagatttgtaggattgagtcaccggaatctctgaaatccggagacgcggttggattaacgataacgaaaacattgtcggcg

SEQ ID NO: 3840 - DNA, 3000 bp, Unknown
  misc_feature (1)..( 3000): cDNA_ID_2992760_gDNA_ID_1620669_Annot_ID_164035 3000 nt of promoter + ATG
tgctattgtggaacgcatcttttttttcataaactttatcatataagaaagaacttgaaaaaaaaagagattctaaagaagaaagatcaagatgtctccaagtaacaagttgcagaagattcaacagcttcatcgagctcaatatctccacaagtagagagaattgttgcaaatatataatcatcaacttcaaatccctctgcctccattctatacattagcttcaatgcttccctgcaaaacccattcctcgcataacccattatcatcgccttccatgaaaccaagttcttctcaggcatactgtcaaaaacccgaaaagcttccgagacaaatccacattttgcatacatgtgaatcaaagcacttcccacaaagacatttgatagagcatgattcttctttgcaatggaatggattgatctaccgataagaagagattctgaattcgcacaagcttttaaagccgaggagtatgtaaatgggtttggctctacaccttcttgaatcatctctttcaagaagtctagcgcttccgattcatgtcctaagctcgaacatccagagatcatagcggtccatgaaaccacatctctagatggcaattgctggagaacattgaaagcgtcacgagattctccgcatttacaatacagccacaccaaagtacttcctatatagacattcttttcgatcgaattcttgataatctgtgcatgaagttccttccccaacaataaagctccaacagatccacacgctctaagaatgcttactactgtcaaattgttagcaatcaaatgccgcctcttcattatccggaagaggctgatagcttcctcaccaaaaccttcccgagcatgagcagctataatcgaagtccatgtgaccgtgtttctattactcattccatcaaacacttttctgcaatcagaaatctccccacacttagcatacatgtccatcagcgaagttcccacaaaaacatctgtctttatcatcctcttaacaaccaagctgtgtacttgccttccgaatcttaacgctttctcctcactacaagccttcaaaatactgcacaccgtaaactcgttaggcaaaaaccagtgattcaacattccgataaacatgcctatagctttaattccatgcccttttctcgaacacgccgatataacagcagtccaagatatcacatctttctcctccatcatatcaaaagctcgtaacgcacttgtcaattcaccgcattgcgcataaaaataaacaagagaactctccacaatgagattccccactccaactttcaccatattaccatgaacttgtctccctaactcaaactctgctctcctactacacagattcaacaaacacacaaacatcctctcgttcgtaaaacgtattccatgcttcacataatcctcaaacagtgcaaaagcctcatcctcaagaccatacttcaaatacccatcaatcatagcagtccaagtaacagtatttttctcaggcatactgtcgaacactttacgtgcataaaccaaatcaccaagtctaacacaagaactaatcaaattgttcccaaaatagataacttgatcatcaaaacacttcaacgccatcgcatggatccttttaatgagtcgcatcccattagaagactgtagccactccgctaacagagcataatcaactctttcgctatcgaaagaagacgaatcatcctgattcacattctctcctttgaaaccactaaaacccgaatcgaaagatgctctctttccagaaactaatcgaaacccaggtaatctcacgtgtctctgttcctctcgcttagttcttgaatcgctactgtaacatatcgtcggagatttgtaggattgagtcaccggaatctctgaaatccggagacgcggttggattaacgataacgaaaacattgtcggcgatggagaaagagaagaagcttcacacagagatctcccgccggaaaaaaaatcagataaagttctcttttttatttattttggtaaagagaattaaaagtttataatctgatctggtaattatgacgacaacaaataatatctcggtcggtttcaaattcctaagcgagagacaaatatacagtacacacacgacttaatatcaaaaccaataaacgtaaaacacgtgtctcatcacttcccactttcctctctgcatttgttgtctctctctcctgaaaacccttgaattttgctacacgatctctgaaacgtgtctctttgactgacttcaatcttctttatcacttaccgtttctgggttttatgaagcaactgagctaataaaaagcttcttcttagactcggaagaagataaaaaacagaatctttattgtttaaagcttccaaattcgagaagagaatttgaaacgaccaagttcaggatattcgtttcttcgtctactttggtctcttcctcttctctttcgaaaagggtttattctgtcttaaaagaaacctttttgagagggtaaaaaaagcttcaattttcagagaaacacaaaaggcagaaacagagaaaaacaaatcatctaattcatgaaacaggtgagaatacatattttcttcttccttggtctcttctttttttattgatttcattcatatatccaatttttgtgtctattggctgtttaattgttgacgatgatgaattcagttagataattatgtgcatagtttaggaattttttagctatatcttcttctcatgtgtaaacatagaggaaaatctaaaaaaaatatctgtcaaattattgtcttttccaaattgtcctcattgtcctattgaatcaaataagattttttattactgatgattcaaatattgttaatagtttataaccttgctcagtgttcttctgatgtgtgatttaaaacctcttgtctctaggctctgatctatgttttcgtctcaaagtcttattatcaattctctaaattgcagggttca

SEQ ID NO: 3841 - DNA, 3000 bp, Unknown; identical to SEQ ID NO: 3838
  misc_feature (1)..( 3000): cDNA_ID_3071987_gDNA_ID_1620669_Annot_ID_164034 3000 nt of promoter + ATG

SEQ ID NO: 3842 - DNA, 3000 bp, Unknown; identical to SEQ ID NO: 3837
  misc_feature (1)..( 3000): cDNA_ID_2031704_gDNA_ID_1620669_Annot_ID_164030 3000 nt of promoter + ATG

SEQ ID NO: 3843 - DNA, 3000 bp, Unknown
  misc_feature (1)..( 3000): cDNA_ID_2050286_gDNA_ID_1620669_Annot_ID_164028 3000 nt of promoter + ATG
tgatattggagccaccacaagactttcgatatctgaaatctgtgagggtaagaaatgtaagttgctttagaaatgtccaacatattacaaaagatggaactaaaaatatataaacaaaagaaatggagatggacttactgggttatagaacttctgcttcgagaaaccactatcaatcacatagacaacgccctgaataaagaaacgacacagaaagttactctcaatgatgtatcagcaatatctgtatgagaaatacatctgttcgttccatgggattttgcaacaaaaagacagtaaagaagaatccttgcctctagagtcaatgaagtttctgcaatatttgttgatagtataacttttctctttcctctgggagttggagtaaagatcaattcctaatataaaaaaggagaaaacaacatttcgccgtttcagttattcaaatactctcaaaagtatggtttagattgtctagagccttgcaacaaaattaacctgttctgatcgagaaagtcctgaatataatggaagaggtagcagtcctgaaaaagatatgaattgcattatggtgcttaaaaactgaaggcaaatgctaaagttgatcgacatgatcttatttatgtgtatatattatacctgaagaattcttttgattgctatgagcttcttcttcaagaagtttaatagcagtttcaatatcctcttgaccagtaagaaatacaagaacatccccaggtggctcctgaacataagaagagacaatttaaatacaagaacatacctggaaaataatatactaagtttgaacacattgaatggttataagaacatcaacttaaagtacccgttcattaatcaacagtatcgttgaaacaactgatcggatataatctgatacaggctcctcgacatagtgaattttcacactgaagcctctgccctaagaaattttgaccaagaaaacaaaaatatttaaatatcacataggaaaataggttatcagagaatgatcttacgcaagagagtcacaatatacctcaacagataagattgcaggttccaactttggtccaggggtactaccttctggcgcatggcgttttttgctacataatttaacataatgtataagattatatcgtactagtgattccaagagccctaaacttcaggaaaaagaactataaccattcggtaagatcagaacctggaattgaagaaattggacatggtttttgcttcgattgtggctgaagatataatcaggcgtagctcaggacgacgacgttgtatctgaaaatcaataataaatagatgttgctgaaagtacactaacaattaagactgtgtttgactgagataccttttttaagagaccgagtaaaatgtcagttgaaatagatctctcatgagcttcatctatcataataacactgcacaatgacaaataagaaaaggttttaccaacacgatttactcataatctgaacagattatacagtgcaacaaaatcattacctatactttgtcaagaggggatcctccatcatctctcgaattagtaccccatctgtgagaaattttacactagtcacaccctgttgtaaccaagcaaaagatcttgtaagcatcatcagaatactccatacataagaaaaagtagaagagcgttaaggaaagagtctgacggaagttgtatgatcttcaaatcgaatagtgtagccaacttcctccccaagattcactcccatttcctcggccactctcgcagaaaccgcctaagcaaattacaaaacaaagcatatatgtgatcaaatataaaaacttgagctgagatatcactcttcaaagttcaaacttgagttgtaagattttgtttagggagagaaaacaaacctggacagctaaacgtcttggctgtgtgcaagcaataactcggcctccttcagcccacccagcttctttcaggtactacaaaatataataaacaaagctattgagctaaacaagaagaccttgctattgatcgaattgtagttttctccaattctccaacttccccaacagctattgagctaaatattgcatgattttgcaagattttgagtaacttttatgcctctctctagctacattgcaaatatatcagcaagttactatcacaatccaaattcgcaagtcgcaacctttgactcctatcaaaatttgcctactggtctaagaaccttgaaattagcaaagctaggtgctttccccaaaaatattaacgaagagcaaagaatgaagaagaaacctgaggaatctgagtagttttaccactacccgtctcgccaacgataatggtggtagcgtgattctccaccaaatacagaatctcagttctgtacttgtacactggcaatctctgtctttgcttctctatattcgcatacccatagctacaatttcgactaagttacaataacaatcatctgctgaacaagtaagatcaaagagaaagagaaattagcatacctagaagaagaagaggatgcgagattgttggacatgaacactatgcctccttctccatcctcttcgaaacgaggtttctcggtccctggtttccaaaacgccatcttttcttcgcccaagagctttgccttcttcagttatttcagtttatgagaaggctttttctctcttatgtgcttttcgttgttaacgccgatggcgacacggttgccggcgattaacaggttcgggtctaaattttaggcatttggtttaaatgatttcggttcaatttaaaaaaatcaatttggttcggtttgatatcggttatatgttcaccattccttgggattatttaataattaaaagaaaatgtatcgtcttgcttcttcttcccacactactccaccactccataacaagctctcaccttttctcctccgccgtaatctacgccaccaaagtcaacgacttcaccgtcggaattgtcagatcagagcaatg

SEQ ID NO: 3844 - DNA, 3000 bp, Unknown; identical to SEQ ID NO: 3835
  misc_feature (1)..( 3000): cDNA_ID_2050294_gDNA_ID_1620669_Annot_ID_164025 3000 nt of promoter + ATG

SEQ ID NO: 3845 - DNA, 3000 bp, Unknown; identical to SEQ ID NO: 3834
  misc_feature (1)..( 3000): cDNA_ID_2050298_gDNA_ID_1620669_Annot_ID_164024 3000 nt of promoter + ATG

SEQ ID NO: 3846 - DNA, 3000 bp, Unknown; identical to SEQ ID NO: 3833
  misc_feature (1)..( 3000): cDNA_ID_1822229_gDNA_ID_1620669_Annot_ID_164021 3000 nt of promoter + ATG

SEQ ID NO: 3847 - DNA, 3000 bp, Unknown
  misc_feature (1)..( 3000): cDNA_ID_3610175_gDNA_ID_1620669_Annot_ID_164012 3000 nt of promoter + ATG
attgtaagctcaaactcgtctcttagcatttgtagcatcttcctaactcccgcttctccatccgctgcaagcgagaacaagctcggcctcccgacctaacggaacaagtaattaatcacatgtcctttggatatttatatgatcagtgataatactcatatgcagcaacgggacacacatttgtttcattgtttggcttcatttcgacaaattaaaaacaacttaataaaacagaggatatatttgggtttgttttgaaaatttagaagtttggtgcaaaatgttaacaatttgtaaaaatcaagaagagataatcaaggttattgcaatgaaactgaaaatgaaaggagcgatttgaaaaccgtgagagaaaacaggggaaatgacaagagctaagtgtatatgatgaatgaacttacaaagacacctgaagcgccaagagccaatgccttaaagacatcggttccacggcgaaccccaccgtcaagaaaaaccggaatccgaccctccacggctttaaccacctgcgatttgtgtttgcttgattaatcaatgaagaaagctgaaactttttgttttaacagttttaaatcttgatccatttaaaagtttacctcttctaaggccactatagttgcaggaacataatctagctgacgagctccgtggttagagactattatccctgcagctccatattcaacagcaattcttgctgccaaaaatttgaatgatcatagaaattatcttaaaacataatgaaaacttcaagcaaaaggttgatgcatattctcattcttagtatatttgttttaccatcctcagctgtaataacacccttgacaagaattggcaagcttgtgatagattggagccattttatatcctgtaagaagaaaacaaacagcgaaaagaagcgagtttactatgtttctgaatcttggtatgcaaaaacaaagaattgatcatgttacattttctgaccttccagctaagtgattgatcaacttgaccagcaacatatgaagctagccctgagtcattcgtctgcaattatccaccaaaaaaggttagttaactattgagcttttaggtcaattgaagactttgttatatgtcttttgaccttgtctattttcccaagatccaacccttcgaagttcttcaacgttagacctcgaggaagcgcgaatctgcaagagaataactatcaagaaaaccaaaagatctaacaatctggtttatgtgatggtggagtagtttcatatcacctgtttttgatgtcagattctctgcgtccaagccttggagtatctacagtaagagcaatagctttgaatccagcttcttcagctcgtttcacaagctgtataaccacatttctatccttataaacctgaatcaagagagcaaatagtcaacacagagccaaaaaatcaataagaaacaagtaaatcttctgaaacatacataaagttggaaaaaacgaatccctggtccggttgaagcaacttcctcaacactacaagtagcccatgaagataaagtctgaaaacatcaaacaatacagataatgaaaacacaacaataagagaatatccaatcaagtaaaagagacagagagaatgaatcaaaaccatgattgttccagcagcagaagtagctctcgcggttgcaagctcgcctacaacaataacaaaaacattctccatagtgaaactaaagttttcttcttgacaagaaacctcaagattgtgttttggttacactgatcattacataacactaaagacttaccatcaggatgagccattttctgcattgcagtaggagcaatcataattggcatagaaatattaaaccctaaaaccgttgtgctcacatcaatcttgcttacatcgataagaatccgaggcctaaatctgtttccagctcataacacaagcacatcaataaaaagacagagaaaggataaaaacacattttgagtccttgttgtgaatagtttcacttacagaatcctagagaaagcgtttcgattctcttgaagagtccattgatcttcagcaccagatgcatagtaatcataaaccatctttggtaatttctcctttgcgatcttctcatattccatcacgtttgttatctccatttttatttactcaacactcaaaaaaattcctgtgacagataaatacacattttcatcatcaaaatcactttttaaaacccttgaattcaagaatgaagaatcaggaacaaaaaacgacactgacactaaaaaaagtcaattagcagactaataaaatctgccccggctcagattctataatcacaggatcgtcactcgttgagtttgatattgatgaaaatctaacaatcagataaacaagcatcgacgagaaaagtaacagagagcttcttacctagaggcctagagagacttggtcttctcgggaaggtggcgaagaataagaatataagaacaaaacaaaatgttgatcgagtactcttaatataatatagacactcataactaagtcacaaagaaacatacgtctctgtgactgtgtaaataattgtcagtgattgtcacgtgatggatcacgtgaaacacaagctcaccagacaccagggcttttcatttgttacaacaacatgcatagtttaagacccattattctcaaataagatggaccagattagtcatttgtgatttggctccaattttatgatttataaaagagttgggagtccacaaaatattggttatattgtgagtgggtaatggatgttgttcagaggatcaggtagttagtactctgctgttttaaaatccaatagactttggttaacaaattgtttaaatcacaaaaccatttacggttcgaccgaaagaaccgaattttattctctctgccttatcacctctgagtggaaaaaattgagtgagcgccattgtaggagagcttcgggaaagaagaagaagaagaagaagcc

SEQ ID NO: 3848 - DNA, 3000 bp, Unknown
  misc_feature (1)..( 3000): cDNA_ID_1822181_gDNA_ID_1620669_Annot_ID_164040 3000 nt of promoter + ATG
acgtgtaactgtagatgcacacagagattgtgtaataccttcaccgatagggtttgtcgaaatgactaatatataaaatatttaaaagctaaacgtttatctatagcaaacaacaacaaaaatagagttaaaaagtatagtccaaaacttgaaatgaagatttggctattagattaatagggttggtacattaatgactgatggcttatagatagatatggataccatttcattttatcgttctgcttagaacttagaagaataaacaaaacaaaagcatgtgggaagagaaagctccctttaacacctcaaatatggctaagagtccccaacacaaatcctattaataaattcacacatacaacaagtgttcatgacctaaccaacaaattcaatagagcccacttttttgagagacaaagatgcaatactcaaaataggaacaattctcttaatatgtctaattacatttttgttactagacaagtcagcatcaccaacttcaaaactaatgaaccttatttaatgtaccgaccaaaagtttaacaaaataaatagtaaatttgctagatttttatcttctgatccaatctaatccctattacgatggaatcaagttcaaaacaaaaacatgtcacaagggatcataatcggaaaagcaatctttatgtataagatatagttaggtatgtgtacacatgtgttaatgtgtataaatttgtgtatattttgtatgttacagcaaactatagaagagacaagatgttgattttttgtaaaaggaccaccttcaaaatattattattaagggttttattaattgaaacatatacatatatacacacatatgaatagatatattcacccccacaaggttatgtgacattcttttcaattctctgttctttccccttcttcgacgctgctcaacattaatttctcctttcactttcatagtaattagctaagtttttttcctcaataaatcaatctaagaaacctctaaatgactaaaccacgtatacgtttataccttctatttttttttttgtctaatacaaatttaacaataaaacattttatgttgacaaaaaaaaatacaatcaaaattttaataaagtgacccatattcgagtttcaatgatgactgcaatcaataagttgcattgtaattaaggttcattagattatcaatatctcacgtcattctacttcatcatcgatttgttttatagtttaattacaattactaaatgagagttgtagtgtcatttgtcaaacttttttatttttattatataaatagatgtgttaattaatttgtgtttgatcaaaacacaaatagaagtttaacacacctttttttcgtcaagaagtttaacacacatgaacacgcaaaagaagggggaaagcaatatgcatgatgagatgtgctgagaaagcaatgcgggaaaaagtcagcatcaaaacagctctttctctttccaattgttctatgagtttaaatactgatggtaaaacaacatatacaattacaaactgttaggctacatatcttagtccatatgtatatcacttgattaattaacattttatgtacgtatctaacaaactttaattttagatgtgcgagttttattacattattggcttaagtcttataacgggattaacatctttaaaagattgccatttttgaactaatttcgaagtaatttcggtgacactaaaaatatcataattttcacacgcacaaacaaaaattcatgatcttcaaatcatcgaatgatcatcttattagttacttatattcacaatttaaaatgcacctcataccgttactactttttataatgcagtggcttcgagtactacatctatgatattacctattagattgttcaaattgtagttgatgatgatacgtatatagaatgatggagaacatattattaggtttacgaatagtgtcattttgacatatgttacatattacatatatacaccctaattaataaaaataataattcaacatacaaataaacccctatctaacactatgattaatgaaatgataatgacttatattcaaagtttattaaatttgaataaagggaaaattataatttttgtttgaaaaataacattaaaatagaaaacgtcatttattttgtgaaacagaaagagtactaattaaaagttacaaatttaatgtgggatttaaatcagcttaactagcattgaaacaattttaatgtcactaatgctgttatttaccattcttaaaccttatcgtcaataactctatcacccagctatcataacagtttattaccatacattttttttggaaacgagttattacaaatttcttcgaatcgagttattgccatttttacgaaaaataaaacaaaaattataattgctcatgatttcatatttttctatatatgattctatggtctaaccattgtcagcatttccgaacacaactgaaattgtcaaagacaaaggtaatctaaagaaaagaaccaaagcactccaaagccttaaagtgttctttactttggttttaaaatttgaatctaaaatgaacagaagaacgttcctcgttatatgtgtacactctctcaacactgtacttaaaaataaaataaagcacagtgtagtttcaatttcatatgctaaatgtaggattatttttccaacggtcgaaaaaagcttaaagcatttttaaccaattctttatttattttttaaaacattacaaacttttcatatttttattactctctcaagtagtctcatcttcttcttaatccaaaggcccaaactttgaatcatcactatcactctctctctctctctctatctctcaagaactgcacggacaacgacatgcttttaatttccatgcaaatctctcctttcttctcaagtcatttttgaaaatcaatcaaaaaactgaaacttggtggagcttttatcattcactcatca

SEQ ID NO: 3849 - DNA, 3000 bp, Unknown; identical to SEQ ID NO: 3848
  misc_feature (1)..( 3000): cDNA_ID_1822181_gDNA_ID_1620669_Annot_ID_48130 3000 nt of promoter + ATG

SEQ ID NO: 3850 - DNA, 3000 bp, Unknown
  misc_feature (1)..( 3000): cDNA_ID_1822172_gDNA_ID_1620669_Annot_ID_48133 3000 nt of promoter + ATG
cttgcaagatttaaatattggttttgcttaatgtttttatgatgaatacttagttcccactttttggtgcaattattgcatattgattggatgaaaaaaatacattttggaatatagaaaacatagagggatagacaagaacaacaattctgatggtccccaattttatgataaaagtcaattgttgatggcaggacatttgtaaaattgttttttgatactgttcttcactctattattgtttttttgcttgtttacatggtaaaactattatgtactacatgacaaattcagatatatacaaatatttagcaaaagtaaacttgaatacattgtttactttaatgttttgtggggttttcctatgtgcacgcctgtgaattttcgagattttctctattgtatcttcttgtctgtttcttttgttgttgctttgggattataatagacaaatcaatagggaatggaatcagattctctgaagactttttatgccttcattgtcactctttgagtcttaatgtttagtgtagtgtgctcaaattggggtctgtgcaacttataagtcatgcaaatctcatattttttgaggaacttggaatttggtaaagtatgaatgttttgaattgttgtggaatgtgatttcagattaaactggcatccgtgaaactagcgatgaagtatatgaagagagtatccgcagagctagaggctattgaaggtggtggccctgaagaggaagagctaattgtccaaggtgttcgattcgcattccgtgttcatcaggtaaagttaaaagaccttgatcatcttctctttcgatttggttctgttctgttacaatattaaactcttaaaatctgttttgtttttgttcagtttgccggaggatttgatgcagaaacaatgaaggcatttgaagagctaagagataaagcaagatcatgtcatgttcagtgtcaaagccaaacacatcaacataaactttgttttcgatctaccccttgttaaagaagcaatcttagcttcatatataatccacctcttgttgtcattttctcgatttaatttgtttttttgttctttcgtcttaaaagacctataactcttgtgaatatacgttctcgatcgtcttgctgaaaaaggattaaaacagttgatattcaaaggaaacccatcttatcatatgtactgataaaagcttcacaataatgtcgcggctaagaatgaaatattcaaatatttcaaagagacagcagaaataaaactaaatccattgccctaaaaccccaaacttcaaaccctgcaaattttgattgcacctcctagttacacaacaaaccactcatcactgctgtatccagcatctttggctttagactcatcatcaccgactgcatcttttgagagttccatctgaaaaccaaagagacgtatttgttaggaaaatcaaaacagaagaaaggatatagtttcaagacatgctaaaagttatgcgaaactagaatacacaccatttgaatagctcctggtttctctgttttaacattgggcataatagcttcagctttgtctacgactacatattcgtcatctgaatgacctgatgatgcatacgtcagaagttaacaaagacattacagatcgattaaaaaacgaatggacaaagaacggatttagttacttgcactagtctcattcacaaagcaaaaacaattacctttatcaccttcaccactctcatcatcagaatcgttgtagaaatcaaacgtatcaacagggggaattttcctacgaggtcggatcagatatggtaaaggaactcctgaaaacgacacaaaatttcctgattaaaaactcaaaactcgaaacagaaggaacctaaaggataatatcaaatggtaaaaaacaaaaaaggtgaaaagtgagctcaccgttgcagcctcccctcttccgagaatgcagaacagaaacagcatgaactggtgccaatgttgccatgtcctgattcaaaaatggtacctgttagcaattgcaacaacttttatgagaaacagagagatcagcacaaatctaagaaaaccctaaaaacgatataagctaaccagacaaagaagagataacgaagaagaaacctaaagagattaagaaatttccacacaataagttaacatctttgtataccaaatcggcgaaaaccatcttaaaacaagaaattcagatcgttcgaaacagaaatttactccgcaagaaatataacgcaaaccctaattttccgtgtgatcatataaacagaatcaaaaccaaaagttccatagaaaaatagcagaaaaggagaattatttcaaagaagagatgaattctcaaataaacataggattaccttatcgaagattcagagaaaatcgtttatcagatcttgagaaatttgatcgtcgacgaattatcaaaactcagtaagagaagaacaagacatcagcggtggcgaaaactagagattagcgatgaacagtaatcttattagcgatataaatagggattatttactttttattttgtttcccttttctaaaccttttccaattaatttatgttggctgacgtgtctctgattaaaccaatctcgagcggttcagcttccaacaaaccggttcggtttaacactattaatttctcgacctcgctcctatcttctcctctcattcgtcaatccagagactagggttttcttcccgccgaaacctcaccggaaattctctccggcatctcctaattcgtcaatcgggtactgttaaatcacaaggctttagtaatttcttcttatacataggtctaaatctatctgcttgatttgaaatttggattttggtctaattagggactgacactaccaatttacttaatgatttgaggataattacttcgattttgacttagatgatatgaatttgatttagtttcagtgagaaagacgaatgaatgttttgatttttatagaga

SEQ ID NO: 3851 - DNA, 3000 bp, Unknown
  misc_feature (1)..( 3000): cDNA_ID_1822168_gDNA_ID_1620669_Annot_ID_48134 3000 nt of promoter + ATG
tagttaattacgctataataactaaatatcatgtaactcagtataaaaatattacagacatatataatgatttctttacaacaaaaactaatatttaaaatcaatcgttataaaaccagagttatttttatttagttttattttgattttactattattttagataatgtgaatgctctgttaattttatagacaaacaaatatttatatatttgaatagaagaagatctattcaatgagattttatcctattttcatatatttggttatatattatgtttgtattttgttaatgctatgttcacacgttactttctatgactttttttgtcatcatccaagaaaattaatatatcaacgttcacaaaacaatcaaatatcgactttgtaataatatatactacaaattagtacgcgttattattatatagagcaaaaagagagaatatatttcaatggatgggacccgtgagaaggtgctttcgttccttttataaattttattccaaatgatcaaaatttgttattttatttggtttgttaattatcttttttggtcactgatgtggctagctatttactttacacactgttatgatatactcttcttttaaaattccttaagaaaatattagtttaagctatccattgtacgactagcaaccaaatcaatcattataagttttaataatggtttattaattaatttctccaacttgcttaatttagtggctattgttgaattatggagcctattacatctataactttatacataagaaatagataatgaaataattataataattacaacaataacgttgatgaatgatgacgacattgaccgtcatcatcctactcgtagcaatacctactaagtttgtttctcctctttattttcgaaaatccaacggtattccaatttgtgatgatttctataaaagtgctttttcatatacgtgaaatgaaaaaatagtaacaccatattcatatattagttgatactttgtagttgtatatacgtggaatattaactataataacatatctttgacgatacaatgagtgattgcttaagcataaatgtgtctgaaagtggacgacgcataatatatagatttccattatcttacccatgaatgttaaaagggacaaaacaatcctcggtcttttcttttgataatgctttacaatttttaaggtacaattcaatgactattacgtgtatatgtgttcaagttattgaaattaattttcaaatcaatacgtgtcgatgactgacatatacacaacttcaaaatagaaatgtagccaatctattaatgtgttgttaagaaaaaggcaaccctactagaatgtgtacttattgtgtataactattgttttctcacggacaagaagtactagttcaaggaataagttcaaagacagaaatacataaaaagcatgaaaatagtgaaataaaagagaagacataataattaaagacgcgcatatatattatttgatacacacatttagtaccctttgtcgggaataaaaatactgcagacggtgaaatcaagattccggtgaccggagaacaggaatccgacgagaaaaaccctaagtaaaaagcaagattttgtaagagaagatcttgtgtggggctatatatctttcgatatacttttgtcacaacatcaatagaaatccactcaataccaaaacaaaagataagtataaaaaggtaataaataaaaattcacgtgggacttgggtccatctgttttttcacctgggaacatatgattcatatatatctattgtatttgtatttttttttgcccttagcaagaatgccttttcttttgttaagaaagttacaagactgtctatattgcatttttttcctttagttatgatacgaaatgatggcgtaagtcgtgactagtaatcaatcatcttttaagttaatggaaagaaaaaccgttggaatgaatatgccattgcagtgtgttaccagtaataaaccatgtaaaatcttctataatgtgctctaaagctactttgaaacaagtttctctgtattttttttctttctttctaatatcaaccagaagacaaaaaaagataatatatatgaatgttggttttgttgtattcataaaagacatagagaaatcatatctcaaattttccaacttttttagtgataaaaatactcgacactctacagtttctgaagattggtatgcagggccggcccaagtctttttgttgcttaaagcaaaaatgtgtttgacccattaataatgaggtattgaggaaaaaaaatcaaattctgacaaaagttagactcaaactagacacatagaagaaggttattcaaagcgttgaccactataccaccaacaattttacaatttgatgcctcaaattttgttactaaaatgtgatgcctaaagccctagcttcaccatctttagctctgggccgggcctgttggtatgttatatagcccacaatcctttggttacataaaaagtataaaaataataattcatcagctaattttatattggtatgataatattttgtttgtgaacaaattctatgagtcatatttttttcagtttttttttccttctttgtaaagtaagagcccagcaatagtatgataaaataagctattgagcctaataacgataagcccaattaaggcccgtatacatgttattatctcaggcccatacataattacaaaaaaagttagggacgtaagaacaaataaaaatgagaaattatctggaaaagctgaatcaaatgtacagacacatgagactgagaatctaactttaggcttctctaattatgattcatcagagactttaattaattaggtttcaaatttctaataaagaagaagagtcaaagtgattaaattaaatggtcacagcttttatttattaagctctgtttcatttctgctgcgggagagagaaagagagagagacaatg

SEQ ID NO: 3852 - DNA, 3000 bp, Unknown
  misc_feature (1)..( 3000): cDNA_ID_1822276_gDNA_ID_1620670_Annot_ID_48135 3000 nt of promoter + ATG
tcataccgtcatcgattacgcttgaactctctaatttcgtctccgatgtgattgaatcagttgattctgtatcagagccatgatgaagaagctcccaatcatccatgatgatcgaattcgaagatttcagattgggattgcaataatcagaaaccctaatggataaaaccccaaatattggaaaaggatcgcaacaaattagagcggttgatgatggaaaagaatggttcttatccactttgagaaagtaattacgtggaggtatctaattggttgcgtgtcaatctcagtcctcaactaaattttttggcattaaagtttagtagattcagagaactatagtatttattcattttgttctttcatttttattttattttttaaaacgatttaattaggattcggcaataaatcgtatggtgcggatcaaatgaattaaacaaatatgtatcggttaaaatagagtagacgatgtaagaaaaatatatataatcaagattcaaacggttgaggtgggttttgcaaataaatccatcggtagattgaaatattttcttatttattatttatagattagtatttataatagtactgaccaaaaatatagaaaaaaaaaatcggtaaaaactttagaccgattttatatagaaataaatttagtttataacggattattgtccgctccaaaattaaatggtttagtctctaatagtttagtttgtttcgaaaagaatggttcttatccactttgaggaagtagttatgtagaggtatctaattggtcacgtaacattctcagtactcaactagatcttttgacattaaaggttggtagattgagagaagtatggtatttattccttttgttctttcatttttttggtttttcacaatgatttaattagggttcacgacgaatcgtatggtgcagatcaaatgaattaatcaaatactagatgatttacccgaactatgtacagggagaaatagttatatgaaatatataaacaagtttttggaaacagattttatattatcacttgatatataagtgtgaatatttgaatatgatttagtaactgatatattttggagattttattagttaggaattaggatattctatatttggaataagattttaaattaaaatattgacccaaaagaaaatctgaaatatcattcctataattcagaaatatattcgaatattttttgtattttataagattttattttggaaacaattcaatataaaaactgaaaagagtatgaataattatgttttaaacgtaataaatttttgattatcttttattattcttcataattctatgtagttaggattgatttattgcatatcccttattttattaatcaatttatattgttacgataaggttttgggttgtaaataaattttaactaaaatgagtaaatgactaattaaattgaataaactgtgtaaaagttttaataaattgataaggtaaaaatttgaaaagaaataatattgaaagtaatcagtaagcggatacatttttaacatagattaatattgaaatattgttcatagtgaatgtgtaataaatgaaatgttactaactaatttatgtaaaactatgttccgaatatattcaagaatcatatgggctcacatatacatttagattttttgcaatttataacaaaaaaatagaatgtcatatatgttaaaattctaaatgttttctataaaacctaaaaaaataaagtacgaaacatataataaacatttatattatatgttgttcatcataatttatgatatatactttttacttgtttgctcaaatatatatggttttttgattaattttctttattaattgctactctcttaaatgtagaggaaaaatatgcataagtaccactaatggcattatatgtaattagtctagtaaatattggataactattaagtttgttgaaagtttttctggttacgacatgtcagcatgatagtcttgtaaatcacacgtgaatgtaaggttttttatttaaaatacttctcaattaatatataggggatgtatcagttaaaatagagtagacggtctaaaaccatctccaatgcacacctctatttttttctttcattttagagacaaatttattttagaggaaattagattttgctccaatgtattcttctaaaatagtttttttctccaaaatagagaaaataaatagattttactctttatatagattaaaacgtaagattcctttattttagagaaaaatctattttagagacatatattgaagcaaaatgtatctaacatagaatcacctctaaatggagaaaaaaaatagagatggacattggagatgtttagaagaatatagattcgagcggttgaggcgaataaatctttctgtagattgaaatgtttattatttattatgaataaattatcatataatagtgtaaaccaaaaattatagaaaaaaccccgctaaaactacatacccattttctagaaataaacttaggttacaacggattgttgtctaccccaaaatttggatggtgtaatctgctaatggtttagtccgcttcgagtaacatttaagcaaatcgttagtataaaatgggtaaaataagtgatactcaaatacatattaaataatgtcaactttaaaatattttaaatatttttcatgtttcaaataattttcttacaaaatatatcatttaaattcttaaagaataaacaaattttaacaagaaagtaaacgtgaaccatacttcaattcttagtccaaatgtagttcatacaaatatgacaataatttaacaaaaaataagaaaaagtattcttccgggttaaaaaaatagattcgatcaaacttaaggtcttttttgttaaagtcttcttttcgcaaaaacctaaaatctcctctcctttgtactctcaagcttcgttttttcttcttctccgtccaaatttctcc

SEQ ID NO: 3853 - DNA, 3000 bp, Unknown
  misc_feature (1)..( 3000): cDNA_ID_3072039_gDNA_ID_1620670_Annot_ID_164069 3000 nt of promoter + ATG
cacagtcttctattagtattacttttccatttagtggcgatggaatagctagctgctcatcgaaccctaaggctaaatcgaggagattcaaagaacgatccatggagaaatttggacggagaagaagaaaaaacgaagcttgagagtacaaaggagaggagattttaggtttttgcgaaaagaagactttaacaaaaaagaccttaagtttgatcgaatctatttttttaacccggaagaatactttttcttattttttgttaaattattgtcatatttgtatgaactacatttggactaagaattgaagtatggttcacgtttactttcttgttaaaatttgtttattctttaagaatttaaatgatatattttgtaagaaaattatttgaaacatgaaaaatatttaaaatattttaaagttgacattatttaatatgtatttgagtatcacttattttacccattttatactaacgatttgcttaaatgttactcgaagcggactaaaccattagcagattacaccatccaaattttggggtagacaacaatccgttgtaacctaagtttatttctagaaaatgggtatgtagttttagcggggttttttctataatttttggtttacactattatatgataatttattcataataaataataaacatttcaatctacagaaagatttattcgcctcaaccgctcgaatctatattcttctaaacatctccaatgtccatctctattttttttctccatttagaggtgattctatgttagatacattttgcttcaatatatgtctctaaaatagatttttctctaaaataaaggaatcttacgttttaatctatataaagagtaaaatctatttattttctctattttggagaaaaaaactattttagaagaatacattggagcaaaatctaatttcctctaaaataaatttgtctctaaaatgaaagaaaaaaatagaggtgtgcattggagatggttttagaccgtctactctattttaactgatacatcccctatatattaattgagaagtattttaaataaaaaaccttacattcacgtgtgatttacaagactatcatgctgacatgtcgtaaccagaaaaactttcaacaaacttaatagttatccaatatttactagactaattacatataatgccattagtggtacttatgcatatttttcctctacatttaagagagtagcaattaataaagaaaattaatcaaaaaaccatatatatttgagcaaacaagtaaaaagtatatatcataaattatgatgaacaacatataatataaatgtttattatatgtttcgtactttatttttttaggttttatagaaaacatttagaattttaacatatatgacattctatttttttgttataaattgcaaaaaatctaaatgtatatgtgagcccatatgattcttgaatatattcggaacatagttttacataaattagttagtaacatttcatttattacacattcactatgaacaatatttcaatattaatctatgttaaaaatgtatccgcttactgattactttcaatattatttcttttcaaatttttaccttatcaatttattaaaacttttacacagtttattcaatttaattagtcatttactcattttagttaaaatttatttacaacccaaaaccttatcgtaacaatataaattgattaataaaataagggatatgcaataaatcaatcctaactacatagaattatgaagaataataaaagataatcaaaaatttattacgtttaaaacataattattcatactcttttcagtttttatattgaattgtttccaaaataaaatcttataaaatacaaaaaatattcgaatatatttctgaattataggaatgatatttcagattttcttttgggtcaatattttaatttaaaatcttattccaaatatagaatatcctaattcctaactaataaaatctccaaaatatatcagttactaaatcatattcaaatattcacacttatatatcaagtgataatataaaatctgtttccaaaaacttgtttatatatttcatataactatttctccctgtacatagttcgggtaaatcatctagtatttgattaattcatttgatctgcaccatacgattcgtcgtgaaccctaattaaatcattgtgaaaaaccaaaaaaatgaaagaacaaaaggaataaataccatacttctctcaatctaccaacctttaatgtcaaaagatctagttgagtactgagaatgttacgtgaccaattagatacctctacataactacttcctcaaagtggataagaaccattcttttcgaaacaaactaaactattagagactaaaccatttaattttggagcggacaataatccgttataaactaaatttatttctatataaaatcggtctaaagtttttaccgattttttttttctatatttttggtcagtactattataaatactaatctataaataataaataagaaaatatttcaatctaccgatggatttatttgcaaaacccacctcaaccgtttgaatcttgattatatatatttttcttacatcgtctactctattttaaccgatacatatttgtttaattcatttgatccgcaccatacgatttattgccgaatcctaattaaatcgttttaaaaaataaaataaaaatgaaagaacaaaatgaataaatactatagttctctgaatctactaaactttaatgccaaaaaatttagttgaggactgagattgacacgcaaccaattagatacctccacgtaattactttctcaaagtggataagaaccattcttttccatcatcaaccgctctaatttgttgcgatccttttccaatatttggggttttatccattagggtttctgattattgcaatcccaatctgaaatcttcgaattcgatcatcatg

SEQ ID NO: 3854 - DNA, 3000 bp, Unknown
  misc_feature (1)..( 3000): cDNA_ID_3089354_gDNA_ID_1620670_Annot_ID_164074 3000 nt of promoter + ATG
cattttattaagaaaaatatgaatgaaacgaaaactaaactgtgatccctcttaattcatttcttttaatgtgtaataatttgtttataatagtatttttttataatatttgggaatttgatattgacataaattttagggtcattgttttctaagattataaccaaaacctaaaattccaaactaccagttatattataaaataagcaaattatagttataatcttgtgtctatattggactttgatataatatttaaaagataaaatgaaatgcattactacacaagccccataatgaatatgtcaaggaatatccaaaaacgggtaaggagctttgtgaccattcgactctttctacgattctagttcttaagtaaagctttcacacccattattcacagatttaggataacgtccacttgcccaccgaaagagactcttagacttattgtgacaacttcaaagtattcttcaatccagtagagatttttcagatatttattagagtaaatctgttaattatatagggctcattgtttgtcagtttattgatggatgatacactgaattttttttgcggtgaaacttatgtattggtgttttttttttctttctttctacatcaatctttttcttttaagagtgtaaagctcagcccaaattcccaacagtcaaaaagttaattgttgctttcattggtaatcatattaaagacagttaaagatataacccttatttagttactatttaccaatcatacaagcagataaaataggcaattgaaaataaaagttcaaatattaactaaccacatatttccgatgcagtcaaatatttttcttaaccacatactaatatactatcaatgaaaagaaaatctcattattttttccaaccacaactatttcttttttttttctacctttctcgatatctaaccgtatcatatcacatatgcaaacaacatttcttagagttgactcttttgagctctaaataaagatagattgacaaaaaacaattttttaatttttattgacgcattcaactttaattttctaaatatcaatcaattcttacaacacactaattttttttctagctggttgaccttctctggtatatctgctttctatttttagtttttgaataaaataaaaatctatttttagtatgtgttaagtatatttattaagaaaaaaacaacgttccaagtaagatacaaaacgtttttacaaatctgaatcatgaaaaatgctacttcacttataatttattgttttctcatgttcctccttatgaacaatgttaaaggtaatatcttagtctcgttaagatttaactaataccttattcacaagatcgaaaacattgattatatctataaaacaaatatgcattaaaaatagagctttcatttttttgtattatcaactaaattctatatattttatacttttttattgattgaaaatagggcagggaaaaaaaaaaccaccatgcccgcttggactgtcggcaaacggaaaatgtgggcatgacggacctaagttatgttttagtgaaatggaacgaaaatttaataaagatgtggttaaaactattacccactgcaagtgctgggatgatcgacgcaacaatgtggacaagcatcggtgcacatgttatttaaaacatggttttccttgcaccaatggctaagtttgaagttataagatagttttgtttatggcaaatgttactggaaaatcttcaaaaaacagctccatttatttttcatttgtatgtttactatccaatactttttggttagaaataaaaatacctcatttaattttttttggcctaaaaataaattatctttaaaaagttaattacaaaatagacatttgtcttaagaatttatttattttaaaacatttctgatatgtctttacgaaaacaagtatttctctcatgtgaaaaatcatctctaacctcatttcatttgagtcatcttctcaaatcgagaaagtttaattagtgttgtagtgttgtgtcgttgtgtctatgtatgcatcgcagactgtcgactaaacggtttgggtttacaagtccaattctagagtatagtgttttgtgaaaaacaaaaaattatgttgcgaaggaccttctctgtcgttgctttgagacaccaagaagcgctgcaccaccactgaagctgtttgccaccatccaccattgatgccattggcgaccctccaccatcaaacccgtgaaccaccatcaaagctttgtgctacagccgcttactgcagaaggttaaaatcgtccaaaattgaaaaataaacggccactgttgcattcaactgtgcaacatacttcttttgaaattactaaatctaaaatgcctatttttgatataaactcatctttaaattattggtagattcgaacacgcgacttaagagccgttaacggatattacatcatataatttattaaggtaagaaagatttttaaattttttcactgattcaaaattttaaaaacgaacatatattaatcaattgatgaaaaatgtgtggatttaacatcatacattggctaaaaagtttaaataataattcataatcatataataaataaaactaacaataataaaactaatgagatttttggcgggatgttacttaataacaattgtaaactatcagatatattttttctttataaatacatacaattttcaaatttttttatatactaaattttataaatcgttcagtgtagcgcgggtaaaaaatctagttaaagattttttgaatacttttaaaatatagaggttaatttagtcattttctcatttaaaacaacaatttttctcaaaatcttgtaaattacaattcggccctctcgaagtttcttcatcttctcttcaatttttaaaacttaagcttttgatttctcgattcatcttcttctcagctttagggtttcgattgttccgatcactatg

SEQ ID NO: 3855 - DNA, 3000 bp, Unknown
  misc_feature (1)..( 3000): cDNA_ID_1822266_gDNA_ID_1620670_Annot_ID_164080 3000 nt of promoter + ATG
cgcgtccgtgggagtgatcaaagctgatgtgttcatcatccatatctgaatattctgtatatttttgtttatagaatgaatcctattgacattaaaatatataactttggatgagtctacgtatggccttttttgagatgttgctgacattatcatatactaaaataataaagtgcaatgtggttcactcgcaatagccgcattttgtcaccatttaagggaatttactatttttgtggtgaaattatgtaaattaccacatgttaaaaaaagaaaaaatattagatctcacaacttcatttgaactagggaacggttgacattgttttttttttaaatagttaagaaaatttggaaataattttgaaaagtaactttgacataaagaaaatcttgagaattgatcttttatttgttttcagaaatgattaattttatgatgatttttcttgaatcatagaaaagtcatataggaattgctccatgaacaaagcgacaagtttctccgtcatttagaagatctgtagataacatttgccaagaaaggactcacaatcacttctcaaaatgatccagctgacgagccattgatcgaaccatcttatagctgacaagacatttaatgaaagtcgcgcttacgtcacttacactcaaaacacgttcttctttctaagaaatcgtcaaaaaaaaaaaaaaatagattgcacgaaaatgccgagaatacaacttggaatgttttaactagtcccattaattcgatattttacctaggtcaagtaacactcttataaataatccttgcactctcgaagaaaaagaaatagggagtaaggtaattcaccagttcccaccttaaaagtaaacctaacttgctatatctaaatacaacaaaatttcactcatgaggaggagaacagttcacggatcatccaacttgttctctctcattccttctttcttattctcaaatggacatcatcgtgtttcaaagattttcagcacttattacagagacaatctacatttctacatctcattcattttgtcatttgtaatcaagtcattcaagttaaataataaaaagtgtgttttttctttcaaaagtttgtaatcttttgaagctttgtcaattcaagtttattggtgtgattccatagtcttgtttgattgcgtttctagtgtgtttgtgagattcaaacattctagttcgtgtgttgttgtggattcaacgacaaaacttccattttccatctctaccatcgttccatcgaatcattcaaaccgtaggccgagaaaccgagaaacataaaccttaggtaaattccaaggtttgcatcagattgctttgaccaaggctcataagtcattacttgacaccactctatctttcacgaatttaagaatttagagagactttgtgaccttttggatatggttagatctctgttattatttggttttgagagtcattggtaattgattcaacatctttatcacttaatagtgatactttttctatgtgtttttttttgttggttctatttggcttaccctttaagaattctagtggtcttgtatcttcctatatatctaataacatatggttgtttctatttcatttattttttatatttaccgcgacacgcatcagaaaacgaacttggcaacttaacaaattagctattaatcaatggacatgacatgtacatgccaaattaaattgggcttaataaaacacgtgttcgttggaaaaaattaaatatgttttgtatttttatagttaatagtgtaacgatttatcatgatctgcgccgaaattcacgctcagagttatatttgagttctttaaattattatttataaaaagtaagtcagaatatgaaaaaaccggaaacatcgatcacattaacttaaaagtaataatttttcattttaggatatattttggataccgacagctttgtcactacatcgaacaattttatgtttttttagaatttgttaatatgatgataccatttgatatccaataagatacttatttactttatattattagattagaatcatctacaacataaaatctaattatttagatgagtattatagatttgttacctctcgagtttaagatcgataactcatgttgttgaaacaagaaacataaaagatagttctgaaatttaaaacataaaagagagtttgaaattgaaaattatatatattgtagaaagtttatgacaagaggagaaagtatgattcttttagtatttgtttctatataatattaagaggaaaaagtaaagttcttatagaatatattctttcaagcaatttagctacttccagctaaatcattaaactcctttgactagcaaattaaataaatttaaatcatataaaggtaaaaaaacacacataaaatattagttttaagaaagatgaaaacaagtaaaaaacataaacaaccgaacatgtgtcaattgttttcagcagtctaatactcgtgtgactggccaatttaatgactatgactcactttcaactacctaacggtttcaaaacatgttaaccttgttttttttctttaaacaaaatcccattagttgtcactttaaatctctattattatagtaattattacaatctttttttaagaaacacttagtgacccatattaagaaaaaaataactttatttttaaacccatatcttatattttgtatctatccaattccttcctattatgtaaatttaattctatattattatattttgttgtgacatcttctcataaaataaataaatagctatcacaatttgatagcacctgaatacttcacctgaaactttccccacctctctctctcatcttatctatcaccattgcttcatctccaaatcttgaaattctctgttttattttcaagaaaagacagaaagtgaaacaagtcttttttttttttttttttggtgtggaacattgatatttgagtgacg

SEQ ID NO: 3856 - DNA, 3000 bp, Unknown
  misc_feature (1)..( 3000): cDNA_ID_1822270_gDNA_ID_1620670_Annot_ID_164076 3000 nt of promoter + ATG
taaatggagctgttttttgaagattttccagtaacatttgccataaacaaaactatcttataacttcaaacttagccattggtgcaaggaaaaccatgttttaaataacatgtgcaccgatgcttgtccacattgttgcgtcgatcatcccagcacttgcagtgggtaatagttttaaccacatctttattaaattttcgttccatttcactaaaacataacttaggtccgtcatgcccacattttccgtttgccgacagtccaagcgggcatggtggttttttttttccctgccctattttcaatcaataaaaaagtataaaatatatagaatttagttgataatacaaaaaaatgaaagctctatttttaatgcatatttgttttatagatataatcaatgttttcgatcttgtgaataaggtattagttaaatcttaacgagactaagatattacctttaacattgttcataaggaggaacatgagaaaacaataaattataagtgaagtagcatttttcatgattcagatttgtaaaaacgttttgtatcttacttggaacgttgtttttttcttaataaatatacttaacacatactaaaaatagatttttattttattcaaaaactaaaaatagaaagcagatataccagagaaggtcaaccagctagaaaaaaaattagtgtgttgtaagaattgattgatatttagaaaattaaagttgaatgcgtcaataaaaattaaaaaattgttttttgtcaatctatctttatttagagctcaaaagagtcaactctaagaaatgttgtttgcatatgtgatatgatacggttagatatcgagaaaggtagaaaaaaaaaagaaatagttgtggttggaaaaaataatgagattttcttttcattgatagtatattagtatgtggttaagaaaaatatttgactgcatcggaaatatgtggttagttaatatttgaacttttattttcaattgcctattttatctgcttgtatgattggtaaatagtaactaaataagggttatatctttaactgtctttaatatgattaccaatgaaagcaacaattaactttttgactgttgggaatttgggctgagctttacactcttaaaagaaaaagattgatgtagaaagaaagaaaaaaaaaacaccaatacataagtttcaccgcaaaaaaaattcagtgtatcatccatcaataaactgacaaacaatgagccctatataattaacagatttactctaataaatatctgaaaaatctctactggattgaagaatactttgaagttgtcacaataagtctaagagtctctttcggtgggcaagtggacgttatcctaaatctgtgaataatgggtgtgaaagctttacttaagaactagaatcgtagaaagagtcgaatggtcacaaagctccttacccgtttttggatattccttgacatattcattatggggcttgtgtagtaatgcatttcattttatcttttaaatattatatcaaagtccaatatagacacaagattataactataatttgcttattttataatataactggtagtttggaattttaggttttggttataatcttagaaaacaatgaccctaaaatttatgtcaatatcaaattcccaaatattataaaaaaatactattataaacaaattattacacattaaaagaaatgaattaagagggatcacagtttagttttcgtttcattcatatttttcttaataaaatgaaaatgataaataattggctaaactataataaaagaaaaactacatattttgggtagatgaaaaaaaacaatatccatgaatttgtcatttgttgttcactcgaataataaatttcatatttattgctatattacaattttgagtttggatatttcccctatgaaagaaaagaacatataacatctttgttgtctctttttccatgtcactcgttccaatctcatgatcccatttacactcaagatatattattgtgcaaatgagcatcaacatgatttatatagactttaaagtccatactatttcagttaacctttaccatctcctactcagattcttcttcaactatagaaaccattcacattagttttcgggtttgaagtggcttaaaggtatccaatttgtgaaagcctggaatatgctctgttccattacctccacatgccaaaaacagagctaactacatacttatacgactttaaatcccttttcttcacgtctctacctgcaataatacacatcatcatattacactcatctttctcaacctcaatcatattcacagaaaacaaacttggtcaccgtgtcgaaaacagggtttaatcgagttagttatttagaggttttggtcccgaacaaagacgttgaagttcagtgagagattgagaaggcagactcgagaaaacatgaggctatagaaacaagtctaatgggaacaaatgaagaaaaaggccttgtgccactcattattctctatctccacaaaagaaaagaagagacaaacttgaaaaaggaaatgggtgattcttattcttttagagaatctgataatgcaaaaaaacttactaaaaaagaagattctctttgagattaggacagaatatttgtctttccagagtttaacggttataacatgacgttgtaatatgccatctgagagatgataatacaaataacaagaaccacaccaaagttaagcaaatatttgaaattaaatatcaagaaataaaagagtaaagagaaaaaggagggaccttttgtatgagattataaaatgcaaagctaagttgatatacaaaactaggcctctcttccaccctatagctgaaggagattcggtatgtaaaatgccgaaaaatcgaatttgttccttttatctattgctgtgtgtatagatgtttatgtaaattttgtcaaaggagttttcagtgcaacaatcagagag

SEQ ID NO: 3857 - DNA, 3000 bp, Unknown; identical to SEQ ID NO: 3852
  misc_feature (1)..( 3000): cDNA_ID_3089358_gDNA_ID_1620670_Annot_ID_164071 3000 nt of promoter + ATG

SEQ ID NO: 3858 - DNA, 3000 bp, Unknown
  misc_feature (1)..( 3000): cDNA_ID_2050395_gDNA_ID_1620670_Annot_ID_164068 3000 nt of promoter + ATG
tttagttgaggactgagattgacacgcaaccaattagatacctccacgtaattactttctcaaagtggataagaaccattcttttccatcatcaaccgctctaatttgttgcgatccttttccaatatttggggttttatccattagggtttctgattattgcaatcccaatctgaaatcttcgaattcgatcatcatggatgattgggagcttcttcatcatggctctgatacagaatcaactgattcaatcacatcggagacgaaattagagagttcaagcgtaatcgatgacggtatgattctttctgatcatttctctgctactgatcgggtgattgaatcgggttattttgattcttttcgggttgattacgggtcggagtgtctgaatccgggtgaggttagtgttgattctggtttggatcagttcagtgttagtcaatcgggtgatgattgtgtcagaaatgaatttggggtttatgattcagaaactggaattttgggtgatggtgaggttaggcttagtgattttgaagctgccaatgagaaatatgttgagagcgaagctgctactgaattaactggtggaaccgtatctcactatgaaacagagaatctcgaagaattcgttgatggaaggcacggtgagaacgaatcgggtgttgaagaacctattgaggattcgagcaagttgtgttctgatttagggggaaatgaattggtttctcgagattctggggttgtgaatggtgaaaaagaagttgtttctgatagtgtagttgcttctagtgaagtaattgagggaagtggaggagatactgtggaagttggaggcgtgagttctggtggtgagggtaaaagtagagagactgtgtggtggaagatgccatttgtgcttcttaagtactctgtgtttaggattggtccggtttggtctgtctctatggctgctgctgtgatgggtttggttctcttgggacgtagattgtataatatgaagaagaaagctcaaaggttccatcttaaagttacgattgacgataaggtacactatattatcattgacccttgtgttttcattttgcttgaagttggtaagctggtctagattgatacgttttaggagttagctacactctatgttgtgttgatgcaattggtctgacttgagccgtagaatttcaagtttagtttagttcttgtcttgtcctgccttatattaaggtgggggtattggacgcatgaatttgatagacttcaatagaatcttaaattctagtgttattcaattagacatttcacaaattcttttaaattcttgtgttatttaacttgctcatttcttaattctattagttgcaagtgttattcagttttcggtagttttgtttgacaacgttacttcacaagaatttaatagaaaaattggtctaaaatgtgaagaacaaattctgagtttttgagttgagatttggatagaatataacacatccatcctttttttctctttcatcgatttgcttcaaccatacaaaaaaaattctcaaatctgagggagagtgtttaacacatttattagaatctgtgatttcgatccggtttattcttcggatcatcattcgttcgattatatatgaggagagtgcgttaatctatagagagcagatgagcggaggttgtgatgacgtcgttgtcgttgttgtcaaaatatggatctcttccatttcatgtaaacgtcaacgtagattgtttctgggttaagaggtttgtgaaggaaaaagtacagtttttagagattgggcatggtggctgtcccgataaagagcattgtggaacaaaagatttcagtaatttatcttcttaattctagtagaattctattaaaaatactgcaaaatatttatttgaattgagaagaaagattcgaaattcttttattatacctgaaaatctagaatttatgtccaatacccccctctaagatatagattttgtagttaatatgttcttgtaatctgtctgaattaagtacaaaaatactgaggcatcatccgctgaaaatgctgtgatttgatattttcccttagcgcacatctctttgcttggttggtatttgtttggtgttggtttacttctatcattatcacgtcttgggttgtttatgatctgtgcagaaggcgtcgcgggtgatgagtcaggctgctcgactcaatgaagtgttcacagaggtaagaagggtccctgtgatccgccctgctctaccatcgcctggcgcatggccggttttgagccttagatgagaagccgttttctacaatacctagacacagtggagaatcaatcatacaatgtccatcactttatgtaccgtaagaatacaaatacatgtgtttatgtcgtacctatgcataagtagtagtttaccatcttatgaaatcgcgtatgtgagtcgtgtcccaaccgtgggatacactgcagagtgattaccgtagcgatttatgtatgttcagagactgaaaatcccagttggtaagcctttttctatgtttgatcttaagaatttcataagctatatgtgggttttgttatggatttcattggggtttcaagcttgtaaactattatagagaggaggacatagtccaaagtcgataaaaccactacaatggaaataaagaccctacaaatttctactatgttgtcgattctacaaaatttgagtagaagctatcgtctcaacaacatcccctcgacgatcaacaaagaaaacatcattatttttgataactttaaaaaaaaaactggtagcccatttttaggcccaataaaagcccgaacattataaatagacgttaaagccttaaacgttacttctccaccaccgttcagagtcgcaacccaaactcttttcactgccggagataattctcttcttccccaaaccctacagtactcagctttccctaaattcctcgccggacgattcgtttccagatg

SEQ ID NO: 3859 - DNA, 3000 bp, Unknown
  misc_feature (1)..( 3000): cDNA_ID_3089354_gDNA_ID_1620670_Annot_ID_48137 3000 nt of promoter + ATG
attataaccaaaacctaaaattccaaactaccagttatattataaaataagcaaattatagttataatcttgtgtctatattggactttgatataatatttaaaagataaaatgaaatgcattactacacaagccccataatgaatatgtcaaggaatatccaaaaacgggtaaggagctttgtgaccattcgactctttctacgattctagttcttaagtaaagctttcacacccattattcacagatttaggataacgtccacttgcccaccgaaagagactcttagacttattgtgacaacttcaaagtattcttcaatccagtagagatttttcagatatttattagagtaaatctgttaattatatagggctcattgtttgtcagtttattgatggatgatacactgaattttttttgcggtgaaacttatgtattggtgttttttttttctttctttctacatcaatctttttcttttaagagtgtaaagctcagcccaaattcccaacagtcaaaaagttaattgttgctttcattggtaatcatattaaagacagttaaagatataacccttatttagttactatttaccaatcatacaagcagataaaataggcaattgaaaataaaagttcaaatattaactaaccacatatttccgatgcagtcaaatatttttcttaaccacatactaatatactatcaatgaaaagaaaatctcattattttttccaaccacaactatttcttttttttttctacctttctcgatatctaaccgtatcatatcacatatgcaaacaacatttcttagagttgactcttttgagctctaaataaagatagattgacaaaaaacaattttttaatttttattgacgcattcaactttaattttctaaatatcaatcaattcttacaacacactaattttttttctagctggttgaccttctctggtatatctgctttctatttttagtttttgaataaaataaaaatctatttttagtatgtgttaagtatatttattaagaaaaaaacaacgttccaagtaagatacaaaacgtttttacaaatctgaatcatgaaaaatgctacttcacttataatttattgttttctcatgttcctccttatgaacaatgttaaaggtaatatcttagtctcgttaagatttaactaataccttattcacaagatcgaaaacattgattatatctataaaacaaatatgcattaaaaatagagctttcatttttttgtattatcaactaaattctatatattttatacttttttattgattgaaaatagggcagggaaaaaaaaaaccaccatgcccgcttggactgtcggcaaacggaaaatgtgggcatgacggacctaagttatgttttagtgaaatggaacgaaaatttaataaagatgtggttaaaactattacccactgcaagtgctgggatgatcgacgcaacaatgtggacaagcatcggtgcacatgttatttaaaacatggttttccttgcaccaatggctaagtttgaagttataagatagttttgtttatggcaaatgttactggaaaatcttcaaaaaacagctccatttatttttcatttgtatgtttactatccaatactttttggttagaaataaaaatacctcatttaattttttttggcctaaaaataaattatctttaaaaagttaattacaaaatagacatttgtcttaagaatttatttattttaaaacatttctgatatgtctttacgaaaacaagtatttctctcatgtgaaaaatcatctctaacctcatttcatttgagtcatcttctcaaatcgagaaagtttaattagtgttgtagtgttgtgtcgttgtgtctatgtatgcatcgcagactgtcgactaaacggtttgggtttacaagtccaattctagagtatagtgttttgtgaaaaacaaaaaattatgttgcgaaggaccttctctgtcgttgctttgagacaccaagaagcgctgcaccaccactgaagctgtttgccaccatccaccattgatgccattggcgaccctccaccatcaaacccgtgaaccaccatcaaagctttgtgctacagccgcttactgcagaaggttaaaatcgtccaaaattgaaaaataaacggccactgttgcattcaactgtgcaacatacttcttttgaaattactaaatctaaaatgcctatttttgatataaactcatctttaaattattggtagattcgaacacgcgacttaagagccgttaacggatattacatcatataatttattaaggtaagaaagatttttaaattttttcactgattcaaaattttaaaaacgaacatatattaatcaattgatgaaaaatgtgtggatttaacatcatacattggctaaaaagtttaaataataattcataatcatataataaataaaactaacaataataaaactaatgagatttttggcgggatgttacttaataacaattgtaaactatcagatatattttttctttataaatacatacaattttcaaatttttttatatactaaattttataaatcgttcagtgtagcgcgggtaaaaaatctagttaaagattttttgaatacttttaaaatatagaggttaatttagtcattttctcatttaaaacaacaatttttctcaaaatcttgtaaattacaattcggccctctcgaagtttcttcatcttctcttcaatttttaaaacttaagcttttgatttctcgattcatcttcttctcagctttagggtttcgattgttccgatcactatgtctgggacttccaattgcaccgtatacataggtaagtttctctttcaacatttccattgatcttgactgttaaaaacttctcgaaaaccaattgattttgaaaaatcagggaacgttgacgaaagagtaagcgatagggttttgtatgatatcatg

SEQ ID NO: 3860 - DNA, 3000 bp, Unknown; identical to SEQ ID NO: 3856
  misc_feature (1)..( 3000): cDNA_ID_1822270_gDNA_ID_1620670_Annot_ID_48138 3000 nt of promoter + ATG

SEQ ID NO: 3861 - DNA, 3000 bp, Unknown
  misc_feature (1)..( 3000): cDNA_ID_3089366_gDNA_ID_1620670_Annot_ID_164065 3000 nt of promoter + ATG
aagtggtagtatacaatttcgtacagtcaattcttctattttggatcaactttttaccacaatatagtataactagtgccataaatagcatggtaaattggtaatatttatcgtgatggtgcaacgttaccaatttcagctcattttattgtcattttcactaatgattttcatattaatttgatagattaataactatatcattagttaatatatatgtttactaatgcaaactccacttggtggataattttaatgtagtctcattagtttatatatagagttaatatattcaagacctctaattaccatccattttgttcgagagaccttattatatatcatcttccactttattcgaagtaggcagatacttaatatcttcattttgttttatctttctgtgataaaacattttttaaaacttattgcattattaagttagtattagaacgcatgatctgatgtttaaactcatatgaaccaccaagaggttaaactacacgaaaacaaattcaaagataacgtgaaatatagtaaaattgtaagtaaacaggtgttgacaaaggaaacaaataagatttttttttttttctttgaaataaaaatgacactgacatacttttcaagagtaaaaagctagcaagagttcacattcttcattactatttaggaaacgaatggtccaaaatacttttagacacgtaatttgattgtgacatgacgatgattttattttttttgaaagatttaactatttgatataaaaagacaaatgaattaccatttgagtttgaagttcactttccgtgtgaccattcttctccatctttaattacctataaggagattaagattctctggtcatggaaagagtttataacacatggaacaaaaaagatacataaactttaaatggaaacatgtattgcaaaaggattttttttttttactatgagaaagcttgataagtaccatgaaaagtggaaaacaaaatccaaaagataagctaaagtttgaaaattttgcatatgagattgagatttattaagaaaatgatgtcagcttttgagtggagaaacaactcctgcagagtaactactattaaaagctgagaattatggttatttgcggagagacagagagggaaataagaaaacgagaaaagcttgaaactgatgatgacacaaatatatgtatgaagaagatcatattaatatttaagcaaaagtgagagtagtattaccaaaggagtttgatttcagtgtgagaaagcaaagagaaggggtttgatatattgaagaatagcaagctttattttatcaagatctagatttcttttggtagcaaaacaattgaagaaataagatagggtatggtaggacccttggttgttgaggtttggcatattgtaaaatcggaaaaaaaaaaacagaaaaaaaaacagtggacattttcttcctacaaactatattttaaggcacataccataaacgtgaaattttgtacgttactaagttattgtcttactaaaaaacatttaaaagagaaaaacaaataaacaacaattagagcattcacatcaaattttgagtttttcgatctcataattttaaaacttttaacctcacattcacaattttagattgttaaatttatcattcaagtagtaaaccaccaccagctttatatgaggaaataatgtcccaagcaatctttgcctctcttccggcggtggtcatcgatctttcgaggcatcagagaagtttgaaatcttgagtacgccggatctaaggctctggtcacttttgtttgcgtccatcagcagaggtccgatctctttttccgattccggtcttctttaccgttttggcattttataactggatattgaattgtaaagcgaaagccaaggtccatttgtgtatattttaatataaattttttaaaaaattgtagtctttttatacatagtttatggtcatctatttaatagaatcactaatggaactgatgtaaattgttgttttaatacataagttatgtcatatattcaatctttgtaagtttgacttaaacttaataacataaactttgacggataattactataatcaaagcaactctctaacgaacaacacatagaccgtcaaacaaacaacgaccggcaaacgaacaaagccaacatctttcttctgttcatcctttaacaaaatctcttgatcgagttagtcctcacaatcttatttgcatcccagagagttctaaccctatttcggagaagttttacatttttttcctcaaatttctaatatcgacataaatataacatattggatccaaaatcacttctaagtcagactcgaaactaaacaaacactattcttttcccacgaaatcttatttacactccggagagttctaaccctatttcggaaaagttctacattttttttcctcaaatttctaatatcgacataaaaacaatatattggatccaaaatcacttctaagtcagactcggaactaaacaaacactacttttttcccacaaaatcttatttgcaccctggagattctaaccctatttcggaaaagttctatattttctttcttcaaatttcttataaatcatcataaaacaacattttggatccaaaatcacttctaacttctaagtcggacttggaactaaacaaacactactcttttcccacaattgacgaccctttttgttagtcatattgacccgttgaaagttgaaaactgcatggtgggtgagacaagtgatattaaatcatatgggcctaaaatggcccaacaagagataaaagcccatactattctacgtccatcgaggtgtcaccttcctattgaattttgactgaaaactgaaaaaagcaaattgtagaagaagaagaagaagaagagtgatactgagaagatctgtgagattattatattcgattttgatcagtttctaaaaagctttcaacaatg

SEQ ID NO: 3862 - DNA, 3000 bp, Unknown; identical to SEQ ID NO: 3855
  misc_feature (1)..( 3000): cDNA_ID_1822266_gDNA_ID_1620670_Annot_ID_48141 3000 nt of promoter + ATG

SEQ ID NO: 3863 - DNA, 3000 bp, Unknown
  misc_feature (1)..( 3000): cDNA_ID_1822346_gDNA_ID_1620671_Annot_ID_48148 3000 nt of promoter + ATG
aacagatcattccacttatgaatccccattactaattttccattcctattacagacgttttacgtagtagggaatctagtttattaatatacatatcacatagattaatcttgattgtttcgcaaattttaatggttttcggaaacaaaaagggggtacaaagtgagctttccgaaatagtgtagttcccagcatccaaatctctcaaaattccttccacaattagaacgattgttcgttcgttcgttttcacaatgtatctcgacctcttttagcaagagtttgctactaaactcgaaccaagtggaaacatgtgggttttgcaatctaaattgaatttgttttgtcaaaaaaggttcttatatttagtacactgtaaaaaatttcgtttctaataacataaatacctagtatagtgtaatggtgttcagagttagcatgcaaacttgtgttaggaaaggatatcaaaagtctcttgtttcaacaatttttattttatattcaaaaattattatgatttgatctttcaagttgattcaattcatgaagatcacataaagcttcttctctgaaatgaatgtcacatggaataattatgtattgaagagcaaaaaccgcatatagtaacctagcttaaaccgaatatacccgaagtcaagactttaatgagaatcagactaaatcctgaatttatttgaaaacaaatcatatgatttggtcttcggtccggtaaaaaaactcagataagtttgaaaacaagttttaatatttatactatatgattccgtcttaatcaaaattgtcaacttacatcaataaaatcaaaactcattttaactagattctaagaatctcatcgaacaatcgatctttgtaaatcttcatggaatagtggttagcatttgtatcattgagtttgaaagaaacggaataattaaagatgacactaaattcacaactttgaacaaacaaacaaaaaaaagtgacaagaaaaatagaggtcggtgtcggagccgcccaaggtggcaacttgttcacacctcataataaaagcttctcacaagttggaagtcgcggtcgagtccagtcaagattttgttgcccttttcccgtgtgggctcaccaccctctttgtcttcttctccccaaaaattttccacgttttttgtttcactctctcaatttatttatattttttttgtcggctcatatttaatttgtgttaattaacacttccttgattagaaagtttttttgtaccgacttaaatttatcatgcaatgtgattggtcgctttcccaaaacaatctctcaacgacaaaaaagtagtaattagtaattaaatacattatattttgttgttaaatagtactcattctatttcaaaatataaaatatttaagtaaatatcacacggttaatgaatttaaatatataactcaagtatagtactaaaaagaatactttaacaaacaaacagaaacctattgtacagtaaaatatcaatcagtgaattattaatcaaatagtaagggaaactaggatataatagaaaaagaattgccgacctacaaatcagagtcaatggtcaagcaagtcaagggaaagttcgtaattgttatggatctggagtctggacaaattaaaaaaaatttgttaaatagaagaggatataaagggaacacagatcctacatattgaaatttatgtatgacgtccaaatttttcttcagcatgggacactgccccgccgaaattattgatttttcggatctttcttctacttgcttcttttttgtttgcttttataagttttgcatagctaattcttaatttcttatcatttatttctagttggtagagacttataaattgaacgtttcaagtctttggacggtatttgagatttcttgtaatttcacttgtaattgtaccacctaacagtgactaaagcagaataaattacgattcgtatacaacaaagtattcaaatttctaaatgtggatatattattgattttattttgggaaacatgtttatgataatcacctatatctcctctatagtctactagaaacgatatttgtcaccttcatcgtacaagactataatgtataattctatccataatgaacgatctagtttttaacatgtactatagagatgaatgattacgacagtaaatttaacccatgcatacgaaaatacataccgatagatataacacaattcagaatgttttacacaatcccatatttttagccaatcagtgtgattttaatagacagctttctatgtcttgttgtgctttttcttcttctttttttcccaaagtctttaatgtcttctggactttatagaagacagctttttatatgttatcttcactttcgaacgactttccttcctaacatatcccaaaacctatctctttaatttattcctatcgtacttacagcttttattaaaaaaactttcttattttaatcactaaacaattaataaaacatttatttatgatttttcattttcgttaaagctcttttattaaaaacttaatcacaacaaatttattaatcttaaatttgaccttaggataaaatttatatattaatcttatatctgttatacattaaataaactttaatttctgcgcaacaaactaatttattatttatttcttgtctctgtctttgtagttttagtataaataaagccattttgctccgaggaacttctcattcagtcggaccaacttgtgaccgaagaaagcaaattgagactacgcaccaactagtcctttggtttgtatcttaagataaaggtttcttttatggacggttcttcgtttctcgacatctctctcgatctcaacaccaatcctttctccgcaaaacttccggtaagtccggatttcgtctgatccattttcccgaaatctaagttgatttttgtatcccttcaatttctatgaactgggattttgggaattaatcatg

SEQ ID NO: 3864 - DNA, 636 bp, Unknown
  misc_feature (1)..( 636): cDNA_ID_3092768_gDNA_ID_1620671_Annot_ID_164125 3000 nt of promoter + ATG
ttcttctcttcgcttcaaatcgacgtctgtgtgaggttaaatcgcgtcgcgttttcatctagcagttttttttggttcaaacgaacgagacacaccagctaaaggccatttgcgttagatctaaggagagagcgacgtatacgtggtttcaagcaaattctccacgggaaggagattaacgagcaaagtcgatttcagtctcctttgtggagttttctcttcaacgcatcgagggtatggtttagctcagtttcgtgatttctagcgtgttattcatcgagttcctgtgtgtaatttgatgatctccaattgtggttattggaaacgagtttggatttagcttctgatgggtttgtttttcaattgaatctggagattgattttcgtttagctgctgcacaatttgggtctgtttttttacaaaatttaaagccacacaagctttttatttgtcttgttcataattctaagccactatatttgtgtcggtatcatataagttttgtgaaatttagctcagttttctttgttgtgattggattctgcgtcaatcaggtggcacgaaccatggttatctaaacttggtggtgatccacgaagagtcattgtgggaacaagaacacagtgaatcgaatg

SEQ ID NO: 3865 - DNA, 3000 bp, Unknown
  misc_feature (1)..( 3000): cDNA_ID_3072070_gDNA_ID_1620671_Annot_ID_164100 3000 nt of promoter + ATG
aatatccaacttgaccaatatatctttattgttcgtcaactgtcatcgatctatatcactttacgtataggattaatgtggcgtaaaaagataaagaagtttggtccaaatttcaatatcaaacttctagtgatgagaaatttctatttggtctacatcggggaacagatcattccacttatgaatccccattactaattttccattcctattacagacgttttacgtagtagggaatctagtttattaatatacatatcacatagattaatcttgattgtttcgcaaattttaatggttttcggaaacaaaaagggggtacaaagtgagctttccgaaatagtgtagttcccagcatccaaatctctcaaaattccttccacaattagaacgattgttcgttcgttcgttttcacaatgtatctcgacctcttttagcaagagtttgctactaaactcgaaccaagtggaaacatgtgggttttgcaatctaaattgaatttgttttgtcaaaaaaggttcttatatttagtacactgtaaaaaatttcgtttctaataacataaatacctagtatagtgtaatggtgttcagagttagcatgcaaacttgtgttaggaaaggatatcaaaagtctcttgtttcaacaatttttattttatattcaaaaattattatgatttgatctttcaagttgattcaattcatgaagatcacataaagcttcttctctgaaatgaatgtcacatggaataattatgtattgaagagcaaaaaccgcatatagtaacctagcttaaaccgaatatacccgaagtcaagactttaatgagaatcagactaaatcctgaatttatttgaaaacaaatcatatgatttggtcttcggtccggtaaaaaaactcagataagtttgaaaacaagttttaatatttatactatatgattccgtcttaatcaaaattgtcaacttacatcaataaaatcaaaactcattttaactagattctaagaatctcatcgaacaatcgatctttgtaaatcttcatggaatagtggttagcatttgtatcattgagtttgaaagaaacggaataattaaagatgacactaaattcacaactttgaacaaacaaacaaaaaaaagtgacaagaaaaatagaggtcggtgtcggagccgcccaaggtggcaacttgttcacacctcataataaaagcttctcacaagttggaagtcgcggtcgagtccagtcaagattttgttgcccttttcccgtgtgggctcaccaccctctttgtcttcttctccccaaaaattttccacgttttttgtttcactctctcaatttatttatattttttttgtcggctcatatttaatttgtgttaattaacacttccttgattagaaagtttttttgtaccgacttaaatttatcatgcaatgtgattggtcgctttcccaaaacaatctctcaacgacaaaaaagtagtaattagtaattaaatacattatattttgttgttaaatagtactcattctatttcaaaatataaaatatttaagtaaatatcacacggttaatgaatttaaatatataactcaagtatagtactaaaaagaatactttaacaaacaaacagaaacctattgtacagtaaaatatcaatcagtgaattattaatcaaatagtaagggaaactaggatataatagaaaaagaattgccgacctacaaatcagagtcaatggtcaagcaagtcaagggaaagttcgtaattgttatggatctggagtctggacaaattaaaaaaaatttgttaaatagaagaggatataaagggaacacagatcctacatattgaaatttatgtatgacgtccaaatttttcttcagcatgggacactgccccgccgaaattattgatttttcggatctttcttctacttgcttcttttttgtttgcttttataagttttgcatagctaattcttaatttcttatcatttatttctagttggtagagacttataaattgaacgtttcaagtctttggacggtatttgagatttcttgtaatttcacttgtaattgtaccacctaacagtgactaaagcagaataaattacgattcgtatacaacaaagtattcaaatttctaaatgtggatatattattgattttattttgggaaacatgtttatgataatcacctatatctcctctatagtctactagaaacgatatttgtcaccttcatcgtacaagactataatgtataattctatccataatgaacgatctagtttttaacatgtactatagagatgaatgattacgacagtaaatttaacccatgcatacgaaaatacataccgatagatataacacaattcagaatgttttacacaatcccatatttttagccaatcagtgtgattttaatagacagctttctatgtcttgttgtgctttttcttcttctttttttcccaaagtctttaatgtcttctggactttatagaagacagctttttatatgttatcttcactttcgaacgactttccttcctaacatatcccaaaacctatctctttaatttattcctatcgtacttacagcttttattaaaaaaactttcttattttaatcactaaacaattaataaaacatttatttatgatttttcattttcgttaaagctcttttattaaaaacttaatcacaacaaatttattaatcttaaatttgaccttaggataaaatttatatattaatcttatatctgttatacattaaataaactttaatttctgcgcaacaaactaatttattatttatttcttgtctctgtctttgtagttttagtataaataaagccattttgctccgaggaacttctcattcagtcggaccaacttgtgaccgaagaaagcaaattgagactacgcaccaactagtcctttggtttgtatcttaagataaaggtttcttttatg

SEQ ID NO: 3866 - DNA, 3000 bp, Unknown
  misc_feature (1)..( 3000): cDNA_ID_2187191_gDNA_ID_1620671_Annot_ID_48150 3000 nt of promoter + ATG
gtaaaaactttttccctggaaggcatttatcgagggcaagaaattttgtcactgacccatcattcccgtgttgaacagcagcagcaaatttgcaatgtaaatgagctgaaaaccaatattgaggcttcagtttttctagcagtagagccgctggtttacttccaagagttttttcctcgatctgtaataaattttggtcaaatcaattgaaaacctctcaaaaccaaaatgaagaagtagaatcatgttcccacagatttacctcttgacgaaagtatggtttttgccgcataagtgattctgagtctccataatcagtgattccaacaggccaatcatgtgatagaaatatatcaagcggctcttcaagttgcatcaacttctggacatcatagtcacgaacatgatagaccgatctgatggtgctctcgttatatggtggccgctcaaagtgtcctactcacacaaatgactgattctcactttattgacaccaaacaaatcaaacgaattccctaatctatacatttccactatagacactaactcagaaatccaactttctcccatttcaaaagctgaaaaattggtactttgtcagagagatgaagaagaaacaaacctgaacggtaatgacgctcattgtatataccagaaaggccaccaattcgcacattaccaaacttgacaactccagcaaaacccaaaaagtaaatattggtggcagcccaacccccataatacctatagcacaacaaccagcaaccatcaagaacacattttttaagcctcggaatcctaaactcaaatactagataacttacaattcccataagtagttagaagcctcatgattcccaccaatgaaaattgtgggaatcggagcaacttcttggccggagtagtacttccagaaagatttcatctctctgtattttctaggtacgttaaggctatccatgtctttctcatttctaacagcctaatgttttccacaaagaacgaatcttttcagacttaggaagcagaatcgaatggatttttattttcaaggtaaaaaaaaacaaacgattacctgaaaatcgccgcagcagaggaggagatcgactttagtgttgtgaatctgttcgtaatgttgaattgttttatacacattgtctaggtctccatgcatacaaccttcaattgcaatcttcatctctctgctgaattctactattctcgggtttcactaattcgacgagctcaacttacaaatttgaattcgtgccgtgagacgaacaaacgattagtggacaaggaccaagaaagaggcagaagaattgagtaagaagagcagagaagaagcgtggatttagggttgtggattttgagaatcaaaactgaggaagaagaagaacaaaacgatgtcgtttcaataaacaccaaaaccacggtcgtttcgaagagaagagtcaaataaagaaaaaacgcgggacggcggcgcggaatgaagaagaacaaccaaaagcccaaaagctaaaattgaaaataaatttgggttaggcccaaaagcccactaaacattttccatgtgtactgcgagttttgattttagtccgttaaaatagggcctattataagaaatggtctgtctttctttttttgataatgggttaaaatcatagttgcaacagttgattatgagtttgatatataaataattttttgtctgttaatttttctcgaaactaaacgaatgtgagggatatcctaggttttgcacctatatttgttagatattagaataattaaattcatgttcgtcgtagtttccttgtaaaacacgttttgttttagaatctaaagcatgtgaaaggcatgcctcgccaacttttagttttcacaccatgcgtgcctttttcttgttctttggtcggtcgtagtcttcttactaataacgaattctattccatgacgagttccttccacttttctcctttctaatctaaaccttttataaattattgattatatctgagtgagtagctcaaatataactataaataacaaaagtacctcaaaattatagtattaaggtataggaacgagtggagaattggaagcatgaaacacatgtgcatcagaatgccaacgttgactcacgagttttgaaatcttaatgaattcgataaatcgtctgagtcggattatacttcgttttttcataactctttttcagatacaagaatcggttgtttaagaaaaaaagaaaaatcgctgtttaatgaatcattttaccaaagaacccatgtagactatctatatctatagtattataccatgtggcttggatcgggtccgaagtactataagcctaaggcggaaaatcttttggttgagagaattgagctaaaatatcaatccagtatataaaaaacatataccgtatctctattcattataagttggttaaaaccattcccaaactcatgataatcactctctcaccaaaaaacaaaaatcaaataaactgatatatatatatataagaaaaacttgaacatttcctcacattgttactctagattttaaaggtgatagtgatacaatggctgataaatgtgctaaaatttgaaattaatttgtccattatgccgacatccatttataagcttttaacatgatactagaatcaacaaataaatatttttattattttatttggaaactattaatgagtacacgatatttacatttacataaattggttgattggttacctgaattttggtagaaattgcccacagaatattcggataagtatttcggtttagccaaaagcagtgtcgtcttcttacacaaaaacaacaaaactccaatcgtcctccctcgtcctgaatccatccatcatccactctcctcttaaaaatcctatctttgtggtttgcaatctctcccacgacgcgcttcatcattcatggctatttgaatctctcttctctctctctatcaaatatg

SEQ ID NO: 3867 - DNA, 3000 bp, Unknown
  misc_feature (1)..( 3000): cDNA_ID_1822338_gDNA_ID_1620671_Annot_ID_48151 3000 nt of promoter + ATG
gaacagacaaatgaattatgaaggagtaaccaaactatagaccttaatcctcacctggcaataaaagtggaagttgcagcaaaattagattgatgaacaatgcgtggagatgtaccataataagtcattttccacagagttccatgtttcaccagaaaattatagctcctgggaagctggttgaacggccagggcgtatgatctgtccacaaatccgtaataaacacctgcgcaagcactcttagaacggaacaaaatcaacaatggctcacactacttaaagtaccaaagatctagactttcaaatgtatttggttaattattccaagaaccaaatttaatttaaagtcagtttcacactcttcagctggaacattcctaagccatcaagtgaatgtaacgcaatgctatccacttacatgaaccaaacatctaaatcctattttctctaattcaagaaactctaaacctgactacaattacaagtttataagtaaactgaatctgaagcttcgaagaactctaaaactaagaagacagaatagagattctccgaacatccaaacagatacttcaatttactaccaaaacttgtaaaagtcccaaactgaaatccatcaatgatcaatcaatcgtgattctacccaaaaagatggatggaaatatcaagacgaacctggtactcatctccaaactcctgattaaaagcagctctaatggcttccgcagaagctctgtgaccaccaccagtatcactcatcaaaatcaaaactttcttcggccgatcagcttcaacaccattcaacggcaatccctcctcacccaaaaccccaccagtcccattttccctaatcccattctcatcactcgataatccgactcctccgacggaggcaaagctctccggaaccactttatcgcagtgaaacctaataaagctattgaaatcgctgataaacctacggagactcgaaccagcactgctcttagtgttgaagctcaaggaagctagggtttttcccatccttcgggagggtaaagtccggaaaccattgaagtacaaggcattggacgatgagagagcatacccatctgaattcgaacacggggatcgatttctagaggttaaacctctgagccgtgggaagaaatcaaagaccggtgcggctgattcctgggttaccgttgaagggttttgcatatttgatagagagagagaagagagattcaaatagccatgaatgatgaagcgcgtcgtgggagagattgcaaaccacaaagataggatttttaagaggagagtggatgatggatggattcaggacgagggaggacgattggagttttgttgtttttgtgtaagaagacgacactgcttttggctaaaccgaaatacttatccgaatattctgtgggcaatttctaccaaaattcaggtaaccaatcaaccaatttatgtaaatgtaaatatcgtgtactcattaatagtttccaaataaaataataaaaatatttatttgttgattctagtatcatgttaaaagcttataaatggatgtcggcataatggacaaattaatttcaaattttagcacatttatcagccattgtatcactatcacctttaaaatctagagtaacaatgtgaggaaatgttcaagtttttcttatatatatatatatcagtttatttgatttttgttttttggtgagagagtgattatcatgagtttgggaatggttttaaccaacttataatgaatagagatacggtatatgttttttatatactggattgatattttagctcaattctctcaaccaaaagattttccgccttaggcttatagtacttcggacccgatccaagccacatggtataatactatagatatagatagtctacatgggttctttggtaaaatgattcattaaacagcgatttttctttttttcttaaacaaccgattcttgtatctgaaaaagagttatgaaaaaacgaagtataatccgactcagacgatttatcgaattcattaagatttcaaaactcgtgagtcaacgttggcattctgatgcacatgtgtttcatgcttccaattctccactcgttcctataccttaatactataattttgaggtacttttgttatttatagttatatttgagctactcactcagatataatcaataatttataaaaggtttagattagaaaggagaaaagtggaaggaactcgtcatggaatagaattcgttattagtaagaagactacgaccgaccaaagaacaagaaaaaggcacgcatggtgtgaaaactaaaagttggcgaggcatgcctttcacatgctttagattctaaaacaaaacgtgttttacaaggaaactacgacgaacatgaatttaattattctaatatctaacaaatataggtgcaaaacctaggatatccctcacattcgtttagtttcgagaaaaattaacagacaaaaaattatttatatatcaaactcataatcaactgttgcaactatgattttaacccattatcaaaaaaagaaagacagaccatttcttataataggccctattttaacggactaaaatcaaaactcgcagtacacatggaaaatgtttagtgggcttttgggcctaacccaaatttattttcaattttagcttttgggcttttggttgttcttcttcattccgcgccgccgtcccgcgttttttctttatttgactcttctcttcgaaacgaccgtggttttggtgtttattgaaacgacatcgttttgttcttcttcttcctcagttttgattctcaaaatccacaaccctaaatccacgcttcttctctgctcttcttactcaattcttctgcctctttcttggtccttgtccactaatcgtttgttcgtctcacggcacgaattcaaatttgtaagttgagctcgtcgaattagtgaaacccgagaatagtagaattcagcagagag

SEQ ID NO: 3868 - DNA, 3000 bp, Unknown
  misc_feature (1)..( 3000): cDNA_ID_1822330_gDNA_ID_1620671_Annot_ID_48153 3000 nt of promoter + ATG
acactaacatcaaatgcaaattatgaagtgaacagttgcagtttattacaacaaccttcaagattcctctcattctcctttctattttcattgtcactttattcgagtcaaaacacagagacaataaaaatggcgtcctcttacagaataaactgttccactcttcttcatctccttatgtttctgtctagtcttctcacttcctccgccaacctctcctttaatttctatgctagttcttgttctgtagccgagtttctagtcagaaacaccgttagatcagctacctcctccgatccaacgatccccgggaaactccttcgtcttttcttccacgactgtttcgtccaggtaacacgcactaattacgaattactgaggaaagttcaaacaatttggcttaaactttgtttgttggttgaacttgcaagggttgtgatgcatcagtgttgatacaagggaatagcacagagaaaagcgatcccggaaacgcatctcttggaggattctcagtcatagacacagccaagaatgccatcgagaatttatgtccggccactgtttcttgcgctgacatagttgcacttgctgctagagacgccgtcgaagctgtaacatttacttcactcccacttcacttcaatctatattgctctaatccggtttaaccaatcccaactgaaccgaaagcatacacatgaaatcgaaaaaaagaaacaaaccaattctgtatcattttcgcatagactacacaatgaaccaaatataaccggagttgtagatacattaaaccggttatccttattaaggtttgaatgtttttcttctttggcgggacaggcaggaggaccggtggttgagattccgacagggaggagagacgggaaagaatcgatggctgcaaacgtgagaccgaacatcatcgacacagattttactctcgatcaaatgatcgatgccttctcttccaaaggcttgtccattcaagatctcgtcgtcctctcaggtatatatcaacgtttcttgaaacttctaatcaattttaccaacatgttttgctaaacgcaaacagagtatgaaacagagttttttttctttaactatggtaaagtcaattcttgtagcaaaatctgtttcatattctgttacactcagcttcttctttttttatttacattcaggagcacacacaattggagcatcacactgtaacgcattcaatggaaggtttcaacgagactcgaaaggaaacttcgaggtaattgatgcgtctctcgacaactcctacgcagagacactaatgaacaagtgttcgtcctcggaatcctcatcattgactgtgagcaacgatccagagacatctgccgtattcgataatcagtactataggaatcttgagacgcacaagggtttgtttcagacggattctgctttgatggaggataatcggacgaggacaatggtggaggaattagcgagtgatgaggaaagcttttttcaaagatggagtgagtcgtttgtgaaactgagtatggttggtgtgagagttggtgaagatggtgagataagacgttcttgttcttccgtcaattaaaaacattgtccgcttcttaattaatttgtcccattttggatagtctgtaatgttatctcttaaattttgtatttgtgacgagttttggtacttgaaaatcgtcttctagttgtcgagacagatcctctttctaaagttgcgtctaatatgggaaacacattttcgatttggaaacaaacaagaaaacgagtagcaagtaaagtgaaattatttactactactagttagtacagaggaggacgtgagataaatcaagcgtagaacaatcagctgcatgtgacagccacgtgtcgaaatctagtgagaaggacggttgattcattctaacttgggttcaccgtaaagttgacaaacccaaaaaaaaaagaaaaaaggaaggaataataatcatctttttaggcccacgagattgctctttgcttatagagataacatcaaatatatttatttctcaaattaccaactacttatccgtaattaaatcattattattaattgctaataatgaaaacatataattgtatccataattaattgggtatcatatttcaaaaagttagctggttcttcgtcataaatttctccagttttgtcaaaaacgaagaccacagcgagccctaaatcttgtcgggcgttgaatcttacaaatttgcaagtgattctcgtcatacctgtatcttcttcttcttcttcgttcttcttctggtacgcccaaattactctcaaatctcccccaaattactcttatttttcgatctgatcgtgctcaatccattgccatttcaatttgtttgctcaatccattggctatttccaattatctgctcattatttgtgctgtggatagtcgttctggcttcaggactcggtctcgtcattggtttgatatgtctgttgagcatttggtgattattgacatattgttttacatgtttttcgacgttgtgttaggatttgattggtggacaaaggtagctgaatcagcttcagaattgaatttgatctttgtttgagacaagaagcattggtgtttggagcatttctgaggagttatgggatatctgaattctgttttgtcatcttcgagccaggttcactccgacgatggacctgttagcggtggtggcctcaggttcacttttctctttctccccagcttaatctttctcaggtttttagtattaagttataggattaagaatgcaactacagattatagattgctcagaatcatatactctttttagcctttattaatgtctgattcaagtcctagctactgatttgaaaccttgtcttggctgatttcttctgataactcttgcgttatacttatctttattggaagctcatctctgttggtgtgagttaaagagttattgtgcaaaataatatctcaattatac

SEQ ID NO: 3869 - DNA, 3000 bp, Unknown
  misc_feature (1)..( 3000): cDNA_ID_1459029_gDNA_ID_1620671_Annot_ID_48156 3000 nt of promoter + ATG
taaatatagcatgccaatctttttcctaaaacaaatctccaatatttaattgcaatttcggtggataatcggattccacttttgtacttgaacggccagttctttcttactagtaactttcattcatgttttttaatggttaaatacatttcaactataacagaaattgttggcaagaggcgaccaatcaccaacgaaagctcgtgtagattacatccacataaataattattacatgtattgctgtttatattccaactttatcataagtaatctagttaattgaagattagcgacaaaaatatgatattaaattggatgggagaaaacatatatttaattaagcaaacgaacatattcgcaacttgagtttttggggggtgtttggtgacgtacaaacttctcttcttctagataaggaactatgcactacaaattttcttaattatgcaccacaaattttctaaagtacgattaaaaaagaggaaatctaaagccaaagtagtaatcaaccctacaacaacacatgagtcacgactttcagttaactacaattatacaaatattacttgattaagtggtgttatcttaactagtgtaatgtatgtttgaaattaataaagtccatctacaaaccattttatcaaaacaaaaaatccatcaagcaaattgaagccactcttatagccgactaaccgtacctacaaattttctgtttcaaacttatgcatatctatatgggtgcttatgatacttcctattaaatttaataaaattagtaaaaatttccctaccatatatcatattattattttttcgatccaagaaagttactttttaaaatagttttctattttgtgacacttctaaaatattataagtgtatagccatttttccccaaacaaggaatagtctatcagtctatacagtatacacacgatttatttgcaaagaacctacatacacaatttctcttctaccatgttagatttttagtacttgttttactagattatgtatttttgtttgtctatcggtcttttaattttcacttgctggaggtaaataatgaaggaagtagttaaaaattgagataacatagttgtgtagaaattagaatacagtgcagaacttaaaagtatggttacgatcacattgacaacagtcgatattccattgagatcacatgaacattgcttcgttagaaatgctcgtcgatcgcctgaagtaaaccgatttgattggccaccatgttttgcctcttcctgatttcattgatatattttatttttctttactattttaaacaacaaaaaaatttagaatccgtattccaaaagtaaattaaatttttgcatacaatttttctttttctttaaaatatctaggttttaatataatattccataatttgatgaaaagaattaaagagaaagttcaaatcaatccatatagcttgtcctagcctatagccaaaaatattcctatgccgcgattgaacaaccgttttttaaaaatcgtcaaattaaatcaaacctttttccatgacaatgagacttggatatagtttacattagattctgattggcccctttgatataactaggtaaactagcttcttgaataaactgtctcttattttggttttatacaaaaaaaaaaaagcttttggaaaatgatttaaatgtaaatacataatacgtagcgtctaagaagcatatttgagaaaatatggatttatttatctggtatttatccattaatttacctacaaatggaatccaccattaaccaaaaacaaacaaacaaatggaatcccgtgaaataaagtatcatcatatacatatctctcttttatgtttttatggagagaattagtccaatccttcttcactgaatttaccacctgcttctcgtagaatatataaaactacccttaagtctttttctaatgactatgagttgacaaatgagaaaaacaaaaactgcttttgttggtcattaaatattccgtctagatggagttagtgctttcattgtcatattctttgtctcccatcaaattaaagctcactatacagcagattgtacaacactatacactaaagttacatttttgagattttattgattgacaatttcgtttcgatattcttagatacactaaactcaaatattgattttatgggaagagaataaaaaatggattgtgaaaaaggaaaaaaaaaaacctaaatttgggccatatgtgaagaatacttccttaagtttgggccatagtttaaatcaataggcccattagtctatctaacgattctttctcaactcttaaaaatctgaccggcggagatggctctgagttggaccagtcggaggattagggtttcaacggagactcactagtcgatctccgatcctttcttctacccgcccgaaatccgtcgaaacttctcttctttaccattgatttgcctcgtctcagctcaattctcttccgttgctgcttcgtttaggttcgcattatcgcttactttattgaatttttcctctatgtctctggtttcaatttcagctcaattttgtctttttttcggttgaattttctcttgggtggtatcgaattttgctcatgaatgctgtttcttgatgaatcagagccctcttagtttacttcacgtcgttcaattcaaaacttggtgtggtcttttgcaacacaaatcaggaatagttcgttacttagaaacaataatgtcatacgagaagacaaatctggaacagagaattagtaaattgagctggaaagtttcagtagtcaaaattctcgtaaaacttattttggtataattgtgtcatgagtcatgacattctttcttaggtttcgtacaagtttctaatttgaggtagatactagttcagaggttctttattaatgtttgattttgaaaacctttctttacttacagttgttgcttcgcttcagtactctggtggtgggagag

SEQ ID NO: 3870 - DNA, 3000 bp, Unknown
  misc_feature (1)..( 3000): cDNA_ID_4450919_gDNA_ID_1620671_Annot_ID_48158 3000 nt of promoter + ATG
agaccagtttccctggcttttgaaaacactcttgaagcaaggaaccgattcatatgaactacaaacactctggttggtttggtcatcaatttgagaaggtccacagagatttcatcatccgttgcattgggagaaatcaccgtcctataaggtatacggatgttaatcgcttgtaatgcatcagtaagaccaggcattataccttctccaaacgcattgttctcatacacaggtacgacctctctccaaccaaacacctttatgatctcacttatggcttgcacttgtgatgagtcgtcgtaagtagagcgaaagaagtatggactacggccagagtcaaggaaagggctcgttgcagaaaatgaaataattggcacctgagatttttggcctacctcgatcacgaaagaagcttgcatcgtcgttcttggccccagaattgctttcacttccttgttctttataagatcaagagctgcggaaacaaacataagacatgtggtgttatatgagaaacttgaaaacagaagaccaaatggaaggtagtgatgactatatctttgtggagctgaaaactatcaagttctatatagtttagagccgaaataaattcattgccatgaaaatgcagtactgaaggatgcattgtccacaatataccacaattacatttaaacttatgtaaacaataccacaagaaaatatatatgaatccctttatatatatgtacgcatgccaagacgtcatttcacgtaaaaacgatattcaaccgttttaacagaaaacgtacttttgcggtttttgacaacaaaaatgtgactaatcggttttaaagggaaaacatgtgattgtgcggttgttgatgaaaaacagggattatgctttttggagagaaaacatgattctaaaatatctaatttttcatactgaattaaaaaacgaacaaccctatatttcatattctcaaatttatccttccagccaggaacatgttacacgtgtgcatatatgatgcgcataattagtgtgaataaggccacatatgatacgcatatatgatcagttgttccaaaaaacaatattagcggttgcatgaacgagaaaacagaacccacaaggacaattcacatttcttgagctatactatatatagttagtataacgtggaaacggaaaaaataatcacaaacgaaattttttgctttcatttgcgtttcacgtttacttatagaaacaatcgaatcattaaagacagaacataccagccgctgcagcgccaacaacatcgtctctagagtcggcaaagttaagaagaagcctggtccgagattctggacgagaagagtaaaagtctgagagagacatgttaatggcgagcaagctcaagttggaggcagttgtcccaacatcagtcacaaccccaacattaattacttggattgtcgtattctgtcccttccccaatttcacgccgaagataaaaacgagaaacactaagacgacgtcgttgagatgtctcttcatttttcttttgtttttggttttggttaagtaccgtggaatgtatacatcttgaaaatattttgaactcatatttataaatggataagatttaacgccaaaaggtgtttggttcgaagaagtttttgtttttagaagtaaattatacatattaacgaccctttctgctaatgacgtaatataaaagttacatttccataagaaacattcttttcttttttgtttaattgaagatataaatccttacatcatctcttgtcaaaaaccagcatacaataaagtacttatcttattaaactattaaataactaataatatggttgaaattttaacaaaataggtttttattaattaaccagtactggactaacgtacctttgcaaaattaactttttttccattttaacttgacaagggcattattggacctccctacacacgcatgcatttacatagtagacgttataactcccatgttaacatattaaactcatatcatatgttatatgtgccacaaattaaatctctgctcaagtggccgcaaatttcagtatctcatattttctgttctaacttaaaagttaacacggttacttttcattcctcggtctcaagtctttcgtgatccatccagttttgtataaaaacacaaaagtaacaaaattatagatgcagcaagtcgcgggtagtggtgaaaaataagtttcatcagtaaaactaaataaagaaagcatatatatatgccttttgtaagtgatatcatgcaaccccgtttctgattaactaatattacagaactagatgtaaaaagagaagacaaatatattttacttatctaacatacagtttttaagttttgatataagaaaaacattgtttaattaacaagacgaatgtagtagtaaaagacattgcagtaaggcgtaaccacgtagtattcattcaccatcacccgtgacccgaaacattttattttatatcgttgaaatgacttggtttgtaaggaagagagatagtcaaacaacaaaaagaaagaattagtcagatatcgtactcccggaaaagaaaataaaaaacgattccgtgattgaaacaggttgcttaagagaataatcattggcagaaatttgtttaacacgaacttttttaatcaaggccaagttgcaaaaaaaggtcaaacaaaattacacattattttgaggagaaaaggtttatatatatatattttttatttttttttgaacacggaaggtttatatatatatatatatatatgtatcaaattttcttcaaaataaactaatgctatgttttttctgtttgaaattattatttcatgaatttaggaagaagaaaatgataaaagggccatcgggcccataatcgcagaaaacggcccatataaatccaccaaacgaatcttctctcttggtataaatatgctgtcttgcgttacagagaaaccctagacgtcgaag

SEQ ID NO: 3871 - DNA, 3000 bp, Unknown
  misc_feature (1)..( 3000): cDNA_ID_1822316_gDNA_ID_1620671_Annot_ID_48159 3000 nt of promoter + ATG
aaagaattagtcagatatcgtactcccggaaaagaaaataaaaaacgattccgtgattgaaacaggttgcttaagagaataatcattggcagaaatttgtttaacacgaacttttttaatcaaggccaagttgcaaaaaaaggtcaaacaaaattacacattattttgaggagaaaaggtttatatatatatattttttatttttttttgaacacggaaggtttatatatatatatatatatatgtatcaaattttcttcaaaataaactaatgctatgttttttctgtttgaaattattatttcatgaatttaggaagaagaaaatgataaaagggccatcgggcccataatcgcagaaaacggcccatataaatccaccaaacgaatcttctctcttggtataaatatgctgtcttgcgttacagagaaaccctagacgtcgaagatgaaggtgcgtgacggcgaaatcgaatagactctacatttgctcgtattcgagtttcctttgctaacctttttcatgtttcttcgtttcagttcaacgttgcgaatccaactactggatgccagaagaagctcgagatcgacgatgaccagaaactgtaagattttgcttctctgtttcatcttcattcatttttaatagatatttcgtgctaggttgccagatctattgattggtgtttgtatatatcactgttaaattgataggtctagtaaacagtaattgtcaatttttctatgttcgtcttataagcttaataagagttagaatcttcttctatgtttaatacttacattaaaataagtttcgtatctgctcataaacatatctggattatattattcagcttgatttatgttgatgcagacgtgcgttttacgacaagagaatctctcaagaagtcagtggagatgctttgggcgaggtacagattccatttttcttactttgatctaatgagtgtgaagattagcatttcgaagcagatgatgatgttttgtttatgaattgttgttattgcaggagttcaaaggatacgttttcaagatcaagggtggttgcgataagcaaggtttcccaatgaagcagggagttttgactccaggccgtgttcgccttttgcttcaccgaggtaactaaacataataccttttcttacacttttgcatctataatggatttgtatttgtgtgtgtgtgtgttttgctgtagattaacattgtttcgtaatgggtgaacaggaactccttgcttcagaggacatggaaggagaactggtgagaggagaagaaagtctgttcgtggttgcattgtgagccctgatctctctgttctgaaccttgtcattgtgaagaagggtgagaacgatcttcctgggcttaccgatactgagaagccaagaatgagaggaccaaagagagcctccaagatccgtaaactgtttaacctcaagaaggaagatgatgtcaggacctatgtcaacacttaccgccgcaagttcacaaacaagaagggtgagacactgaacttgagaaatagtggtttctgaatcacacttgagaaataatgttttctgaaacttgtttcttctgtttggatttttgacaggcaaggaagttagcaaagcccctaagatccagaggcttgtgaccccattgactcttcagaggaagagagctagaattgctgacaagaagaagaaaattgctaaggctaattctgatgctgctgattaccagaagcttctcgcctcgaggttgaaggaacagcgtgacaggaggagtgagagtttggcaaagaagaggtcgagactctcttctgctgctgccaagccctctgtcacagcttaaaaaagcttgagaatcaaatcaaagatgtcacctttctagttttgttctcttttcttctccggctattaaaaagttagttcgagttcatattcagctgtttttgttccaagacatgggtacacaatcgctttgggcttgtttcatgatttatgcttttagttgaagaccattttaaactcaatttttattgcttatctttctcagtttttgatcaaagcgtttctccattgaaaaccattttaatcacctgtttcaatcatacataatgttaaacacatgtactggcgattacaataggtatatattttgactgaaatttatggagcattgtatgacggtttgataaatttctgagaaaactcattcttaagttttaagattatctcaacaactggtgaatcaaaactgtgatgtgtggtttgggccaaacgacccataaacgagttcaacttaacagagaaagaacaaaaacaattatatatgttgacagagagaggtaacacagcaaaggggtggtggcgcagttggctagcgcgtaggtctcatagctattgagtgatcctgaggtcgagagttcgagcctctctcaccccatatatttttgtcctcttcaaactaaccttaaactcacgtttctccttttttccttgtcacactgaaactgaatcgtttttttttctttgtcgactgatgatatatctagataaagagtttcagaaagccaattacaaaagcatcaaaaacacaaccatgatgctctaaccaaagcagccaaacttacaggcttaaacaacaagccaatatacaagatcacaaaaaaaaaaaaaagaaatctcgttaggctatcttttgtgatttagattttagttttgttttctatcaaaatgtactccctctattcctaaacttcaaaagtctttagtgtcagtgaatggtgttgtcaagtgaatggtattgtcacatttttttatattgttttttattaatctaaaaaattctgatatttgaaagagattttgtcttttgtcaattcatttattgtgaaatggcgtacatataatgtagacaagaatctcctttgtattttattacattaagtcaccgagaaaacttttgggcttttggctttgttagagtgatcgga

SEQ ID NO: 3872 - DNA, 3000 bp, Unknown
  misc_feature (1)..( 3000): cDNA_ID_1807213_gDNA_ID_1620671_Annot_ID_48161 3000 nt of promoter + ATG
aagttttagaaaatcattattattggaacataaggaatatctttaatcttgaaaattttgaaactggaaaaataaattaaaatcttttttttaaaaaaaaacattgattgaaaatatttgaatttagttatatgaatactattggttcagagttatggaaaacagaaaaatgtttaatgtcactgattcagtgaatggtgttgtcataatgtgtcttaatttatgtgaaacttttacaaaaatcattatttttaagaacaaatgaagtatctttctgtagaaaattttgaaatttgaaagagattttcatctcaattcatttattgtgaaatggttatataatgaagtagacaagaaagtctattccttgtattttattacattaagtcgccgagaaaacttttttgctttgttggagtgatcggaatggcgaatgcatcacagttatctccgacaaacaaacacttcttcaagcctcttctccccggattccagagaaacctcgtacggaatctctctgtctctgtctttctctcaatctgtatgaacttatagtctcacggttctgtttctctgttgcagaatattcctgtgaagttcttctccgagcacatcgagggaaaacacgagggcgagactgtaaagttgagagcagatgcgtcgaagagaacatgggaagtgaagatggatggcaacagactcaccgaaggttggaaagagttcgtggaggcacatgatcttcgtatccgcgacttcgttgtctttagacacgaaggagacatggtgttccatgtcactgctttgggacctagttgctgtgagatccaatacccacagtctatcagccatgaagaaggcgaagagagtggtgaagttggtatgattgaatcatcattcagtgaccacatttacatttatttagactcttttctattcttgaaacgtttcaatttctgattcagaaatatccgagagagaagttgaggagaatttgcaaaaagaatatgatcagtcttcagcagatctgaattgttttagccaatccgtaacgcactcaaacatatcaaatgatcttgtggttagtcagattaacggtttctttggtgttgttatgtttatttatagttcaaatctgtgtgagtgtatataagtcccaatgcaatttgatgactgatgcagactctgcccagggatttcgcaaaacgaaacggtttagacaaaggaatgcatgagatagtattgatgaatgaagaaggaaagtcatgggaatcagaagtaaggagtagaatgtctggtcaggtttttattgttggaggttggaaaagtctctgcagcgaaaataaattaaaaggtggagattcttgcacattcaaactgctgcaaaatgcgaaaacgcccgtgtttcagctctgtagccgcatcggagaaagtcggtttgtgaagttaactcctacactaaacagccttgagattggcaaacaggtgacttttcgaaacctctatctctggtttcttcagtgcagtgtctttttaattctgaatacttttgcagcatctaccggtaagtttcacgaaagggaatggactcatacatccgggggagataattctggtggacaaagacagagttgaatggtcgatgaagcttcaggttgataatagaggagggatgcatatatttggtggtaatgactggaaaagtttctgtgccgcaaatgaagtaggcgcaggggagtcactaactttggagttgattcgaggaggcttaagtcctttattcaagttcttctccaaggtcagtatttcaaatagcttgcagtccacgttttaggttttgctaaatcaaacaacgacttgttttcagatagagcaaccctcattcgaagcagaggataggagacacaagagagctcgagtccataatgggagccaggaaacagataagggagaaccttctcgagcaactaaaatgggaccggagcttgagaaaagggagaagacagctgaaaaaggagaaccgtctcgagcatctaacaaatccagtggtaaacaaggaaacttacagaaaacgcaagcttgctctgtcacagatcacgtggctaaggtgaaagagagcgttgtagatactttaactagtatcagacggttccaagcagagcttgaaacaatggaacagaaattagaagattcattgcaggaaatcaacaagttaagttaggtatgatctgtaatctgtaatattatcattcttataacaatcttttagtttcggttttggttttgttcaaatttctaacaatttgaatttggcacagagagaggagaagataacatcttcaagtaataatcaagtttaaatgtgaaactgaagactcttgtaacctctgtttttattatatgactttgtttaagatgtagttgttttattttcccttttttcattttgttaattaatcgtaaagtttataatgttcttgttctctgttggcggactaatgtcgtatttccataatatttattaattagtatctgataagtgataacaacttaaaatggttttttttttttccttatctgcatcactgcattgaaatggtaaacaaaaaatgactttatctgctgcaacaagccatagccaaaaacaatacaaaaccaatatacagtagttttttttttttttttgtcgtaaccaatatagttttattaaggaaaagaaaagtaatcatagccaaaaaaaggaattattacaaggtaacgacaaaaaacgtagttgaaaaaggaaaacaaaaaagcatataaaggcccaatctttgtaattgcattggaaaggcccaaacccaacaacatagaacactgtcttctctactaagtaacaaaaatcaacgaagcggtaattcttgaacagacaaagaaaaaaaaaaggtgaatacttgaaatatataaaagatacagaagacacgagaagggagaagagatcgatgattttgagaagcgaattag

SEQ ID NO: 3873 - DNA, 3000 bp, Unknown
  misc_feature (1)..( 3000): cDNA_ID_2781838_gDNA_ID_1620671_Annot_ID_164123 3000 nt of promoter + ATG
gtggtcaacacagctggtggtgtgtggtactcatatgccaagtaccgacagaaaaaggctaaaccggctaagctaatgtctgatttggaagctcacaaaaaatgagaatttcggtccggtttggtttcgtttgggaaggcattaccccggtttatagactttgccactcaaatcaatgatcagaacgaaccgatgtatttgagagttgaaccaggaaaatcggtcctagagtgagatttaattttgatgtgaaacttcattgatcagttaatttctcgtttaggttaagaaaaaaaaaaaatcaatacctatttttatatgtagatgcaatcatgctaatgtataattgttaagttgtggctgtagcataaccatattaaacattagacatgtgttggtatcaactatcaactatcaagaacacatgaaatgtttgttctatttaatggtggaaaagttttttaaatgggtctactactactactaattaatactttggattaagacattttgtgatagaaaaagacagcacataagtcattacaacgtcagtgacctctgtttaagtcttaattcgtttccttaaatctacggtttgtgcatacggatcataactaatatttttggtttttgaatttgcaaacgtttttagttggactttagagatttcaaataaatgaagataaataaatgactcataattcatacgaaaggctatagcatttatagagttcattttcttggcgtgaaattagtagtacattcatttattccatgattttgctcagaatattcaaatttataaaagaaatggacattactttggaagagttgaaaaacttataaaacaaaaaacataacaatagaaaactttaatcgattaaatgaattattgaatgattgtatccactaattacaattattgaaataaatatgtataaagtagagggtgtaaagcactgtatgaaaagattatgataacatagttcaaagaatatcattatgagtcataactaataatcattcaccaatacacaatcgatcatcttaatatatacatgattaatttggattcattttaaagcacacttaaaaatatatcatgtccaataatttgtgaattattatttcatcagaattgtcatagttatctaaccatttgtgtttagggcagaactgtgtctgaggctaaattcattaaaaaatgtcactaaattctgcagtttttgtttttttccatctatgacgttatataatagctagccagtaattattaaaaccgtatagaatatattcttgagtctaactttaatctacatgacaaatttttaattactcagcaccgattggtttctgtagatgcatgtcacaagcaacacaaaataaaaaaaggtattacaaaaaaatagtactaacctacaaaattacttatttataattcttttgatctttctccttttagcttttccttttctcttattagtgtttatatgatactttcgtaaaacgttaggtattgtatagtaaataaaaccttaaaaatgccaacgaatatccttatcttctagtgttctacatgtgttgatatcaccaccgacaagtatctcgggtaacctaattgttggttggaactttcagaatttttaaaactgaaaaattgacattatccttctaatgaatcacattcttcttttttttgtcaaatacttccctttgtcaaaggcatgcaccactaaattatcttttgttttacaaaatgaccaaaattagcggcaatattttacgtcaacacttgaccaattttgattgttagagagcactttgtcaataaaccaaagtataatgtttccctccttactctcctaatgtataatatatattttgattatagaactcatagttaatattgagttgcatccctttgttttaacagtaaggctttgacttacgtttgtgattataccaattaccaagtatgatcaacactcaagatttttttttgacaagaatataataatgaaaatgcttatgctttgagtaaattaatcaggaaaacttttaactcatgttaatatagtatttttaacaaatatgaatggactacaaagagaatttgactaaatgtataaaatatataatttggaaaaaacatggaacatgacatggggagcacgtaggagaagcggtgatagcaaaatagagtgattcacttgaaaccgatttggtagtatcttttcttataaacatgttccaatgtaactagtacatagttggtcacaaatacaaatttgaatttgtcttcacctcaaattgccaaacaacccatatggtccccatccatcaatggattttcctcaattttctttcttttgaatatataacaaatttgttttttttaagaaaatacaaatatttgtaatgaagatccatgacatgacaagtgcttgtgaaagattacaaagagtgataataaaaaggggatgaattttgcatgctgaagcaatcaaataagtagctgaaagagtaacacacacatgaaagtgcaagtgacacatcttttacaacttctctcactgatgatacctttcttcctcttcctctgcctttgcttctctctctgagtcactacactctctcaccaacccatccttctctctgtcattctctaaaaaaagaggtccactataaatgagccttgagctgtggatgcttctttgtctggttttttagaatataataaaaaacaaaatgggtctctagatttcagatttctgggatctgggtgttagattaatctctttctcttccattattagtagagaaagctcactcctttcactcaaagtttctacctttttgttttcctgaaaatgggttgtgtttgaaatctcacactttgagatttgggtgtttattttgggatccttcttaccacatttagaaatttcagctagggttttcgatttctctacttctcagaggagattttagaggcaaaag

SEQ ID NO: 3874 - DNA, 3000 bp, Unknown
  misc_feature (1)..( 3000): cDNA_ID_1822300_gDNA_ID_1620671_Annot_ID_164118 3000 nt of promoter + ATG
catcaatttcttgcaatgaagcttctagattctgttcttttaccttgagctccgactgaaaccgccttacatcggttaaagtatccacaatactctgtttcacctttttaacgtgatcagatattgagcaaggttgcttttgctgcaagtttcccggatcagccctagtgctgcgagatggccctccttcctcagtaacttgagctctcttttcgacccgattatcagtttgttcttcagccagtggtgcttgatccgtcattcggggtttcctatccgcagtcttatggccatcagatgatgctgcttgtttcacctgaacacaattcgttttaaaacaacgatttcacaatagcaaaagccaagaacaaagactgtaactgattttatgttaaccttggaacagatcttgagaattggagatggtcctcctcgaataacctccaatgtgaagggatcaccaacattctttacgccattagctacaaagaaatcttgacaacctctattgtaaaactgatcgcgtcccttgatgttaactagatgcgacttccactctatgccatctttgttcaatacagttacctctcctgcttccacgatcccgttctctcttgcgaacgatgcaggaagaaactgtacattttcaacacatttaagcgaatgacaacacaaaaagacttgaaaaacacctagaacaaaggtcttgaaaacttacaaattgacatgacctgaacacgtaaggtttaagatcaaacgtcagaatcttgttctgattcaatggaatagtctctgagcaattctcagattctatctcatcaccttcaatttcagaaacatttcgtttttttcttgctttggaagagtttccttctggaatgctagaggcgttgggacacagctgtagcacaggttttattccgctttggacaagcttaaacctacagatagatccagctttgatcccgttattacgacaaaaacttctccatcctccacgcataaaagcctgaccagtttttttgttgtgtctcaaaagcagagtccaagatttttcatgttcatccctcagatcaatctcacactctctcctgtccagaccatttgaccttgcaaatttgcttaaaacacactgcaaaatcacaacttcatatatattgtagcaaaagaatagaatgagaattgtattaaagattccagcgaagtagtaatcaccatattatctcggagtaggcttgaaggtgtgacgtgtgcaacaagataagatttgtctgatgaagactctgtttcttttcttgctctcttcttcgacgaaattttctttgaacaaaaatcatcttcggatatcgaattgtcatcatcatctcctacatcgtcgtcttcatcatcatcaaaaacagtgcgttcatcatcatcatcgtcagaggtagaagaagagattaactgtatctgagagaaactacgtccgaagggtgagacgtggaagaccatgcctccgtcgtgccggaaactcaaaaggtcgtcgtctctaacagagtgggagacggagaaatctttccatccgccggcgaatctcgcgccgtccaatttcacgtcccagtttctgtccgaagcgtcagaagttagtttcatattcgttgactgaatcttaccattgaagtgattccaaatgaactcagtaggaatgatctgcaaccacaacaattaagaaaaacagaaccgattgatgcattgtaacagagacatggaaagagacgatgagatagagacagtggaaaagtacaggattggatttttgtccagatagatctatgatgaagaaagctttgttggttggggagggaatcagtggatccgccattgtcgaacagctaaagtaattattctctgaaaatttgcctcttcgaattattcttcgctggcgttatagtaaggtttataatctaaagtctaaactccgttattcattctcattaaacacctgatttattgtcattaactaaataatgactgtgttaaaaaaaaaactaaaaaaactaaataatgacttggtgaacaaaattatttaatgacaaagatatttcttgataaacgcattaataaccgaaggcttttttttttcttctgatttgatcgatgtaggactgaaaagtaagtcagaagaataagtttcaacccaatttctaaaaatctaatcgtttgatttgattatttttttcccaggattaaaaactttattttattctatttgatatctatatagtaaaaatcaacactattcaataacaaatttttgttcattcataactgatatcaaactattaatgtattaattaaatgagtcaacaaaataaaaattcatatattctttgtaaagtttaagttatttggatctttatgttgttgattcatttagctaacacatttatatctacatttttttttgttcaaccctttttttacatttatatctagagatattggaagaaaaatgtaatgagtttattgtgttacttcttcttttttcatatacaacagatttatttcttttacgttaaactttatatattgacagataaattttgatagcaacagttaacatagtgatttatctttttgtcaaccatttaattaacatgcataagattggtcaatttattccctgctttatgtgatttagttagttttttcataagttgaataacagagactaatgaagacactgtttacaaaaattatgtaagttttattcacatagttaattttattgaggatcccattactgtttctattagggcatgtcagaagacttcgaagtaagcaaaaccaaaagagtaaaaactatcttttcgctttttgcattattggatttaagtagaattgtaaaattaaagaagtaaacagagtagtactcttccaaagcaactcaaaagctccaaaatttctgtgaatctccccaagaacactttttggatctttaattcgaagtgatcggcaatg

SEQ ID NO: 3875 - DNA, 3000 bp, Unknown; identical to SEQ ID NO: 3872
  misc_feature (1)..( 3000): cDNA_ID_1807213_gDNA_ID_1620671_Annot_ID_164115 3000 nt of promoter + ATG

SEQ ID NO: 3876 - DNA, 3000 bp, Unknown; identical to SEQ ID NO: 3870
  misc_feature (1)..( 3000): cDNA_ID_4450919_gDNA_ID_1620671_Annot_ID_164112 3000 nt of promoter + ATG

SEQ ID NO: 3877 - DNA, 3000 bp, Unknown; identical to SEQ ID NO: 3869
  misc_feature (1)..( 3000): cDNA_ID_1459029_gDNA_ID_1620671_Annot_ID_164109 3000 nt of promoter + ATG

SEQ ID NO: 3878 - DNA, 3000 bp, Unknown
  misc_feature (1)..( 3000): cDNA_ID_3072066_gDNA_ID_1620671_Annot_ID_164105 3000 nt of promoter + ATG
ttcttcttcattccgcgccgccgtcccgcgttttttctttatttgactcttctcttcgaaacgaccgtggttttggtgtttattgaaacgacatcgttttgttcttcttcttcctcagttttgattctcaaaatccacaaccctaaatccacgcttcttctctgctcttcttactcaattcttctgcctctttcttggtccttgtccactaatcgtttgttcgtctcacggcacgaattcaaatttgtaagttgagctcgtcgaattagtgaaacccgagaatagtagaattcagcagagagatgaagattgcaattgaaggttgtatgcatggagacctagacaatgtgtataaaacaattcaacattacgaacagattcacaacactaaagtcgatctcctcctctgctgcggcgattttcaggtaatcgtttgtttttttttaccttgaaaataaaaatccattcgattctgcttcctaagtctgaaaagattcgttctttgtggaaaacattaggctgttagaaatgagaaagacatggatagccttaacgtacctagaaaatacagagagatgaaatctttctggaagtactactccggccaagaagttgctccgattcccacaattttcattggtgggaatcatgaggcttctaactacttatgggaattgtaagttatctagtatttgagtttaggattccgaggcttaaaaaatgtgttcttgatggttgctggttgttgtgctataggtattatgggggttgggctgccaccaatatttactttttgggttttgctggagttgtcaagtttggtaatgtgcgaattggtggcctttctggtatatacaatgagcgtcattaccgttcaggtttgtttcttcttcatctctctgacaaagtaccaatttttcagcttttgaaatgggagaaagttggatttctgagttagtgtctatagtggaaatgtatagattagggaattcgtttgatttgtttggtgtcaataaagtgagaatcagtcatttgtgtgagtaggacactttgagcggccaccatataacgagagcaccatcagatcggtctatcatgttcgtgactatgatgtccagaagttgatgcaacttgaagagccgcttgatatatttctatcacatgattggcctgttggaatcactgattatggagactcagaatcacttatgcggcaaaaaccatactttcgtcaagaggtaaatctgtgggaacatgattctacttcttcattttggttttgagaggttttcaattgatttgaccaaaatttattacagatcgaggaaaaaactcttggaagtaaaccagcggctctactgctagaaaaactgaagcctcaatattggttttcagctcatttacattgcaaatttgctgctgctgttcaacacgggaatgatgggtcagtgacaaaatttcttgccctcgataaatgccttccagggaaaaagtttttacaggttctctttctttcctgtccacaacattatgctttgttcttttgaaacaaaaaggatatcttttaatttctttggatgttcattagattattgaaatcgaatcagagcctggaccctttgaggtcctatacgatgaagagtggctagcaatcacacgaaagttcaattctattttcccgctaacaaggagatacacaaacgtcaggtataccatcccgaacaagctacctactaagaaatgtttatatatcttccatttatctttctacctaccgtcccacttacgtattgttttactacaatagcactgctggaactatacaagagagccgtgagtgggtgaggaagaagctagaagaaaggcaatttaaaccttttgagtttgcgagaacagtacctgcatataacccatcacaacgtgtatttgattccattcctggtatgttaatagtgtactggatatagaggattataaaaagttgatggatcgattaaaagtgttttattcatatggcattttgtagagatcccgcagaatccccagacgctgtctttgttagagctccttggtctcccatatctccttgattcatcaccagtaacaggggaaagaaccgatatccctgcttcactggctccatcaggtatgacgatagttttctttgtagatgaggacttggtttgggattatcagatacatattctgtgaagttgttcatttactctttctatctgcctattgtcatgaaactgcatcaagcaccaatgacagagatgtttagtgcagtgtcaagaatcaaacatgtcttgttgtgtattgcagatcttccgacatatgatagcgaagaaatcccaattgatgacattgatgaaatagaagagatggaggaagcaaaagcagatgatcatacaagagacgatgcatgaatatctccattccagtggtcagaatatattttatcttgctaatatctgactgcttcatcgtcaagctggaaaacaaccacattagttgggattctgtgattagaaaaccaagttttcttgttcattttttagaatcagcataagttttatttgtgatattaaagaaaagtgaatcataaaaatgtcttggagaaataaaaagttagatattaatgtttcatccagtattcaagaaagttgatcaccttttcttccacaagttctctggcatgcattggcttgggaagttactcgccgacaaaacccatagataagtatgtcggattcacttaaaaccatggatgatgctgggaatgttggattcaactaaacacgaccatcaatgattcttcattgaatgcgttgactcaacttcatcacctcaactaattttctatctctgacactaacatcaaatgcaaattatgaagtgaacagttgcagtttattacaacaaccttcaagattcctctcattctcctttctattttcattgtcactttattcgagtcaaaacacagagacaataaaa

SEQ ID NO: 3879 - DNA, 3000 bp, Unknown; identical to SEQ ID NO: 3867
  misc_feature (1)..( 3000): cDNA_ID_2138953_gDNA_ID_1620671_Annot_ID_164104 3000 nt of promoter + ATG

SEQ ID NO: 3880 - DNA, 3000 bp, Unknown; identical to SEQ ID NO: 3866
  misc_feature (1)..( 3000): cDNA_ID_2107050_gDNA_ID_1620671_Annot_ID_164103 3000 nt of promoter + ATG

SEQ ID NO: 3881 - DNA, 3000 bp, Unknown; identical to SEQ ID NO: 3874
  misc_feature (1)..( 3000): cDNA_ID_1822300_gDNA_ID_1620671_Annot_ID_48164 3000 nt of promoter + ATG

SEQ ID NO: 3882 - DNA, 3000 bp, Unknown
  misc_feature (1)..( 3000): cDNA_ID_1822296_gDNA_ID_1620671_Annot_ID_48165 3000 nt of promoter + ATG
tatgaaaaagagtttttaaaacgaaaccacctttctcaataagctaatgctcgtagaaagggacagagacagagtacgaggtaggagtcgaagcaaggaagaagaggctgaaagaaatgtgggtttgtcgtagattgaagaactggatccgccattgttcaacaaaaaaatgactcaagtctaagttaaagatcagtgtcttttcgttatcatctcatggctcctcttatttattagacatcccgctacctgttttaatgagtcacaacatttattttccattaatgagtcagggaactcagctagtatttatggcctctgcattacctgaggtggagtatatttctagtgagtactatattggtaaaagaatctaaacatttaacctttttgttaaaagaaaatctaaaaactcttactgaagaaaccctaaaataaattaaaccctaaaacgaatgtgctttcttgatcccccattgtagctagtagtttaatattacgtgggagagtgctataaaaagtccaacctaacgctccatacatgcgtagatcatgtttcaaatcataacttagttttcgtttcctgtaacaaagcttccaaattatgttcctttgtctcgagtttagcccggaaccgtctaatactatttaaagtatcttcaacgctctgtttcaccttagccacatgatcaaagataaagcaagattgcgtttgctgcaacttttcttgatcaccagtagccttgttagatgaccgagtgcaacgagatggccctccttcttcatctaacttctgcctcacgtcatgcttctgtctactccccccgctgctactttggactcgagatctcttgtgtggccgagcctctgctccagcctttgggcggctgcagagccgaaacacgggaattttcgggttgcggagcagtttaaatgtacaagaatctccaacttctaatttatttgcagtgcagagacttgtccaacctccagctataaaaacccgaccagacttgtaacttttaacttctgattcccatgtatttccttcttcgtccatcaaaactatctcatgcctacctatgttcaaaccatatcgctttgcgaaatctctgggaataccctgcagtagttatcaaacacaaacacaaacacagtcacacatactcaaactctaaaatcgatatatggaacacaatcataactaactaaccactaaatctctcgttaggtttgaagcggtcacagattggctaaaacatgttagatctggtgaaaactgatcaggttctgttttcacattctcctcaataattttctcatttcttgaagattcccctgaagcagaaatctaacgcttaacaaatagtaaagagtctagataaatctaaatgctctctgaatgatgattatgttataccaatttcatcactctcttcgtttctgtcgtggctacgagatggtgcgtattggacttcacagcaactgggtcctatagcagtcacatggaacaacatgtctcctttgtgtttgaagacgacgaagtcaccgactcgaagatcatgtgcctccacgaactctttccaaccttcagtgagtttatggccctccatcttcactttccacgttctcctcgaaggatatgatctcaaatagacagtatttccctcgtgttttccctctatatgcttggagaagaacttcacagggattttctgcaacaaacgagtagaactgtgacatgagtctatatgttcagagagagagaaacagagagattacttacgatgtggctcttgaaaccgggaagaataggctggaaaaagtgtggactttttggagcaaagagtgtcggattcttcattgccgatcacttcgaattaaagatccaaaaagtgttcttggggagattcacagaaattttggagcttttgagttgctttggaagagtactactctgtttacttctttaattttacaattctacttaaatccaataatgcaaaaagcgaaaagatagtttttactcttttggttttgcttacttcgaagtcttctgacatgccctaatagaaacagtaatgggatcctcaataaaattaactatgtgaataaaacttacataatttttgtaaacagtgtcttcattagtctctgttattcaacttatgaaaaaactaactaaatcacataaagcagggaataaattgaccaatcttatgcatgttaattaaatggttgacaaaaagataaatcactatgttaactgttgctatcaaaatttatctgtcaatatataaagtttaacgtaaaagaaataaatctgttgtatatgaaaaaagaagaagtaacacaataaactcattacatttttcttccaatatctctagatataaatgtaaaaaaagggttgaacaaaaaaaaatgtagatataaatgtgttagctaaatgaatcaacaacataaagatccaaataacttaaactttacaaagaatatatgaatttttattttgttgactcatttaattaatacattaatagtttgatatcagttatgaatgaacaaaaatttgttattgaatagtgttgatttttactatatagatatcaaatagaataaaataaagtttttaatcctgggaaaaaaataatcaaatcaaacgattagatttttagaaattgggttgaaacttattcttctgacttacttttcagtcctacatcgatcaaatcagaagaaaaaaaaaagccttcggttattaatgcgtttatcaagaaatatctttgtcattaaataattttgttcaccaagtcattatttagtttttttagttttttttttaacacagtcattatttagttaatgacaataaatcaggtgtttaatgagaatgaataacggagtttagactttagattataaaccttactataacgccagcgaagaataattcgaagaggcaaattttcagagaataattactttagctgttcgaca

SEQ ID NO: 3883 - DNA, 3000 bp, Unknown
  misc_feature (1)..( 3000): cDNA_ID_1822292_gDNA_ID_1620671_Annot_ID_48166 3000 nt of promoter + ATG
gaacaaaaatttgttattgaatagtgttgatttttactatatagatatcaaatagaataaaataaagtttttaatcctgggaaaaaaataatcaaatcaaacgattagatttttagaaattgggttgaaacttattcttctgacttacttttcagtcctacatcgatcaaatcagaagaaaaaaaaaagccttcggttattaatgcgtttatcaagaaatatctttgtcattaaataattttgttcaccaagtcattatttagtttttttagttttttttttaacacagtcattatttagttaatgacaataaatcaggtgtttaatgagaatgaataacggagtttagactttagattataaaccttactataacgccagcgaagaataattcgaagaggcaaattttcagagaataattactttagctgttcgacaatggcggatccactgattccctccccaaccaacaaagctttcttcatcatagatctatctggacaaaaatccaatcctgtacttttccactgtctctatctcatcgtctctttccatgtctctgttacaatgcatcaatcggttctgtttttcttaattgttgtggttgcagatcattcctactgagttcatttggaatcacttcaatggtaagattcagtcaacgaatatgaaactaacttctgacgcttcggacagaaactgggacgtgaaattggacggcgcgagattcgccggcggatggaaagatttctccgtctcccactctgttagagacgacgaccttttgagtttccggcacgacggaggcatggtcttccacgtctcacccttcggacgtagtttctctcagatacagttaatctcttcttctacctctgacgatgatgatgatgaacgcactgtttttgatgatgatgaagacgacgatgtaggagatgatgatgacaattcgatatccgaagatgatttttgttcaaagaaaatttcgtcgaagaagagagcaagaaaagaaacagagtcttcatcagacaaatcttatcttgttgcacacgtcacaccttcaagcctactccgagataatatggtgattactacttcgctggaatctttaatacaattctcattctattcttttgctacaatatatatgaagttgtgattttgcagtgtgttttaagcaaatttgcaaggtcaaatggtctggacaggagagagtgtgagattgatctgagggatgaacatgaaaaatcttggactctgcttttgagacacaacaaaaaaactggtcaggcttttatgcgtggaggatggagaagtttttgtcgtaataacgggatcaaagctggatctatctgtaggtttaagcttgtccaaagcggaataaaacctgtgctacagctgtgtcccaacgcctctagcattccagaaggaaactcttccaaagcaagaaaaaaacgaaatgtttctgaaattgaaggtgatgagatagaatctgagaattgctcagagactattccattgaatcagaacaagattctgacgtttgatcttaaaccttacgtgttcaggtcatgtcaatttgtaagttttcaagacctttgttctaggtgtttttcaagtctttttgtgttgtcattcgcttaaatgtgttgaaaatgtacagtttcttcctgcatcgttcgcaagagagaacgggatcgtggaagcaggagaggtaactgtattgaacaaagatggcatagagtggaagtcgcatctagttaacatcaagggacgcgatcagttttacaatagaggttgtcaagatttctttgtagctaatggcgtaaagaatgttggtgatcccttcacattggaggttattcgaggaggaccatctccaattctcaagatctgttccaaggttaacataaaatcagttacagtctttgttcttggcttttgctattgtgaaatcgttgttttaaaacgaattgtgttcaggtgaaacaagcagcatcatctgatggccataagactgcggataggaaaccccgaatgacggatcaagcaccactggctgaagaacaaactgataatcgggtcgaaaagagagctcaagttactgaggaaggagggccatctcgcagcactagggctgatccgggaaacttgcagcaaaagcaaccttgctcaatatctgatcacgttaaaaaggtgaaacagagtattgtggatactttaaccgatgtaaggcggtttcagtcggagctcaaggtaaaagaacagaatctagaagcttcattgcaagaaattgatgcgttaggtatgatctgaataccagtgaacactacttttaattgtgtgtgtggtttattttggttccagattttttgataatgtgatgttggaaacaaaaacaggggaaaagataatgggaatcagcaaaatcttcaacattagtcaagtttaattcagaaataaagattagaaaatggaccaggtactttatgtttgcaaccatggagttaagtatgtcactggataatatttcggaacttttccgtttccacttgtcttggatattaattatcccatagcctttatctcattcacgtctccgtcaagataaagttactgacattgtctttagattcgtatcccagtgattgaactgttgtactgaacgggacatgtctgtcttggtaatgatggtaagatagacttttaatttaaactggatattttcttttttttacgaaccaatctaaacgattcgttcttatagtatgaatcaaacgggtttaaataatgggttccataacattatcattaggtatttggctatgatatttaaataatgctgacaaaaataaaaatatcttggttgaagaattaaatttacaaaattattaacaaaacgtataagactaaacaaaaaaaaagaaaaaaaaaagacaaatttggctataaaaccaaaaatccataaagacctcaagaaataacttaaagagttcaaca

SEQ ID NO: 3884 - DNA, 3000 bp, Unknown
  misc_feature (1)..( 3000): cDNA_ID_1822288_gDNA_ID_1620671_Annot_ID_48167 3000 nt of promoter + ATG
tcaaaaaccaaaaatattagttatgatccgtatgcacaaaccgtagatttaaggaaacgaattaagacttaaacagaggtcactgacgttgtaatgacttatgtgctgtctttttctatcacaaaatgtcttaatccaaagtattaattagtagtagtagtagacccatttaaaaaacttttccaccattaaatagaacaaacatttcatgtgttcttgatagttgatagttgataccaacacatgtctaatgtttaatatggttatgctacagccacaacttaacaattatacattagcatgattgcatctacatataaaaataggtattgattttttttttttcttaacctaaacgagaaattaactgatcaatgaagtttcacatcaaaattaaatctcactctaggaccgattttcctggttcaactctcaaatacatcggttcgttctgatcattgatttgagtggcaaagtctataaaccggggtaatgccttcccaaacgaaaccaaaccggaccgaaattctcattttttgtgagcttccaaatcagacattagcttagccggtttagcctttttctgtcggtacttggcatatgagtaccacacaccaccagctgtgttgaccactaaaccggacacgttcaaagcatgtacttcaacaccacccaagaggacaaaaccgagcgtctaggagattaaaaaggaggcaaagattagtaaatgattgcctctatagatttcatctcgaaagagagccaaatgagggtttatacttacagtggaaccaacgcctttgagaacaccaacgatggttgttgttagtgcagagttcacaatggtgcaaagaaacatggtgaagttgaggacaatgcccataaccagtgaaagaatgagaatcaccaagaacggcaaataagaacactgtcaaagaaaaaaaaattgattttgacattttgaagagactagtttctgagaatagccgcaagcttggaatgatgaagtttctaacctttgcaagtaatagtgatagagagtttgggaattcgccggtaactatgatgaggatggacaaaaatgggagagaaaggaagctgttatagaacattatctcgatggaggaaagcccgtcttctgcaccagacttctccaccagcacaaggtacatagtctgcagcaatgatgagaaacaatattcatttactcgtatgggtgagtggagactgatttaagagaaggaaaagaacaaatgaaaccaacctggaaaaagacagatgttaaagccaaaccatacccaaaaagatcaaaagaaaaatcaccaagagctgcaattacacagcctgcagcggtaagtagtacagatagagcaacctgaaaattaaacaaaagattcagagcttgaaacattatacaaattcacaataaaaaatcaacattcttatggtaagtacctgagttgttggtttgcctttaccaaacaaaaccccagaaatcaaaacagcaagtggagtgagtctcttaatggcgatatacattggaatgtttactcctttcaaacttgcaagagcaaatgcaacattagcattgtagaagatagaaaccggaagaagctttttggccgtagccatatcaattcctttagctcttgtgtatcccattcgtctaccaaagtgtataagcaaagaagtagccaattgctaacacaaccaaacaaaagcaaacgggaccgaattcataatcagcatttacaggaagtgaataatctctttagatatctagtacttgagaaatatggatatcagtacctgaagagtaagaacagtcatggaatgtggatactgcataatcacagccttgttgataaaaaccattgccattgaagcaatgccatatgaaacagctgcgactaaactgcatcatagaacaaaccagtaaataaggttacttaaaatgtctatagctttgattctctataactctctagagatccagatctacccagatgaagaaccgcaattcaaagtttcaaaaatcacaactttaagaagttatcgaatcctctgaaccaataattatcacccctactaactaaatcgatcagaaacatccctaatcgaattgaatttgaagaaacagagcactaaagaaggagactacagtacctaatggacgaggtaggctccatttcagcttgaacctccatggggaaagaagagtgatttgagttataaatctttggaaaattcctctcagggtacacgtttcttggcagattcaacgtgatttagacgcatttcgagaagaaagagcgattaaaaattacttctttatcagattttcatttcaatttacagtttttttcccttggattgaggatcttagttcttaagcgaggttacagctttttccagtggattactaaattggacgagagagtaatagtcaacactcaaaaagtctttaaccttctgtcggaacaagaagggcttgctgtccgttgctcatctcatatagtaaggcccaaaaggcccaaaggcttctttttccaattaaaactaatttttgtatagcgaaattatgatgaagaaaatcgtttcatggcacgtcaaaaaactttcgcacaacaatttttttttacaaaagggtcacttttatcagaacctaatctatcatagagttcccatcaacaaaaaacctatcatagagtctagtcctgtgttaacgtaggtgatgggttggtttcatggtttacatggacaattattatggtgtaagaaaaagatgatgggtacacatattccatttaaccaatgtgaaagattcacatcacctttttcgatttttaatagattcggttttaccttctcgtaacgtaattctaagaaaagaaaacgtcaatcatatttactaggaaagataattataatttattgctttttctctcactctctgacctgaaatctcctactgagatttttgaagtgtattcaacaatg

SEQ ID NO: 3885 - DNA, 3000 bp, Unknown; identical to SEQ ID NO: 3873
  misc_feature (1)..( 3000): cDNA_ID_2781838_gDNA_ID_1620671_Annot_ID_48169 3000 nt of promoter + ATG

SEQ ID NO: 3886 - DNA, 636 bp, Unknown; identical to SEQ ID NO: 3864
  misc_feature (1)..( 636): cDNA_ID_1822280_gDNA_ID_1620671_Annot_ID_48171 3000 nt of promoter + ATG

SEQ ID NO: 3887 - DNA, 3000 bp, Unknown
  misc_feature (1)..( 3000): cDNA_ID_1822358_gDNA_ID_1620672_Annot_ID_48173 3000 nt of promoter + ATG
catcattcacattgtgtttcagtttagaactgcttatatctctccttcttctcgtgttttcggaagaggcgagttggttgatgatcctaaagctatagccatcaagtacctctcctcctacttcatcatcgatcttctttctatccttccactcccacaggtaacctttagttcctaatggttttatagttccttcttgatggttctttaatattctgttgtatctgctgcagcttgtagtcttagctgtcatccccaatgtcaacaagccggtctctttgatcactaaggactatttgataactgtcatatttactcaatacattccaaggattcttcgtatctatccactttacactgaagttacaagaacatctggcatagttactgaaaccgcttgggctggagctgcttggaacctatctctctatatgttagccagtcatgtgtttggagccttatggtacttaatatcagtagaacgagaagacagatgctggcgtgaagcttgtgagaagataccagaagtgtgtaactttagatttctctactgcgatggaaacagtagtgttagaaacgatttcctgactacctcgtgcccgtttatcaaccctgatgatataacaaattcaactgtcttcaactttggtatctttactgatgctttaaagagtgggattgttgaatcagatgatttctggaagaagttcttctactgcttctggtggggtttgcgtaatttaaggtttgtaacactctctctatctagttattagtaatttaggattcatgtgacacacttgatggctggctaagatatgttgagcatgaaacactaatctgatcacttgctgtttctcactcgctgcagtgcattgggacaaaatctcaatacaagcaaattcgttggggaaatcatatttgctgtatcaatttgtatatctggactagtcttattcgcactacttatcggcaatatgcaggtatatattcatttcactgccttttttccatcacttacttgatccccaaggaagataaaacactactgatgtttccactttccataacagaaatacttggaatcaactacagtgagggaagaggagatgagagtgagaaaaagagatgcagagcaatggatgtctcatcgaatgttacccgatgacttgaggaaacgtatcagaaggtatgagcagtacaaatggcaggaaactagaggagtagaagaagaaaaccttctgcgtaatctccctaaagacctcaggagagacatcaaacgccatttctgcctcgatcttctcaagaaagtaagtgcttctagttccaccttatctctttgatcctcaaatttgacatttcattcaaataatcattgatcgaatcaaatatatataggtacctctgttcgagataatggatgagcaattgctagatgccgtgtgtgacaagctaaaaccagtgctctacaccgagaacagctatgcaattcgagaaggagatccagtggaagagatgttgtttgtcatgagaggaaaactgatgagcgccaccacaaacggtggccggaccggcttctttaacgccgtatacctaaaacctagtgacttttgcggcgaagatcttctcacatgggcattagatcctcaatcttcgtctcattttccgatatcgactagaacagttcaagctttaaccgaagtagaagcctttgctcttgcagcagatgatctcaagcttgttgcttcacagttcagacgactacatagcaaacagcttcaacatactttcaggtttgtttggtctcttttgactgatctctctgcttctccaatctccggttctgtttggtttaattcggtttaactgtcaggttttattcggttcaatggagaacttggggtgcgtctttcatacaagcggcgtggcggagacattgccggaggaaactagctagatcattaaccgaagaagaagatcgattccgaaacgcgatcacaaaacgcgaacgcaatgcggcgtcttcgtctagcctggttgcaacgttatacgcgtcgcggtttgcttcaaacgcgcttcgcaatctgcgtacaaacaacctacctttgctacctcctaaaccctccgagcctgatttcagtctccgaaacccttaaaatatctcttacacatgtccacttaccacttgtatataatattgtgtcaacgacattaaagcttaaactaattacaaaaatttagtgaccctattttataggcacgatgctccaatggtcacttttaaaatagagtttcctcaaaaataggaaaaaaatagagactaaatgtagagatctttatttatagagatgatatctcctctattttaaagaaaattctattttacatgtgaccattggagcagcctctaaaatagagtcatatctataaataaaggaaaatatagagatcactattgaagatacctttataaaaataaaacatggttatatatatgaatttgataactttaggtaaccttaattttttttttagttttaaaagctttggagtaaatataacaaatttatttaaaaattgttttttcatgtgtgtgttttgaccaaaaaaaaacaaataacatgtttaaccaataacatacaatttatcatgttattttatctaagagtaatttttccatatatatatatttattataagattcaattgtagataatttttacttaataatacatcatttaccatatcatatatagatattagtttggtcaaattgtacaaaaaaaatcgatttctcctgaccgacatagattcagacaatataaagcccagtcataaacccaaaagtgtggataagataataatcttagcccaacaagcagcgagagagagagagacttattattagggctccgtcaaatttccccaatttctctctgattcctctctagaaatcgaacttcttcttcttcgtccaagcttttgaatcgaaaatcgatg

SEQ ID NO: 3888 - DNA, 3000 bp, Unknown
  misc_feature (1)..( 3000): cDNA_ID_1822354_gDNA_ID_1620672_Annot_ID_48174 3000 nt of promoter + ATG
acaagacaacagcataactcgaatatctgtactcaagtgattcaaaactagcttggacccaaagagcacttgtcaacttggagattcttaaagatacctgttcacaatgaattttcttcaaaatctgccgccggtaggcatagataggcagtccatcctctagccttcgacactctctaagaatcaaataatgaatacgtctccaatcataggccccttccaaagaaaacacggccacgtcttcgtcatcttcatcatctacatcaaactcatacccgtcttgtcctatgagatatcgcaaaatgctcttcatggcattattgaattcgtcaagccgattcacaaccaaatctctctccgcttcaagagccttctttttctcaaaaacctcaaatttcagaccccttttagacgaaaaggacgcaacttgacgagacttgtcatcaatctccattctcaccttcttgaccccttgtccattttccataagcgaaagaacatgagacgagaaaagatcacgaagcctgtctttaagctcgtccatgtcagacggaacaacaacattaggaatcagctcaggaacaaaatcatgtctcccttgaagacgataatcccaaagagccacaacggcagaacgcgcatcgacccactgacgaaaactgaagcttgcagcgatacaaccaaattgaggcacgtgaactgattcctccggaatttcgcaaagcaaagcgatactctcgatctcttgcttcttagacagctttgtgtcactgttagcggcggcggggtgaagcagctgaacgatgaaattaggcctagcccgcgtgactggaggagagaatcccgacgacggagcacgatcacgtctgtaatttggcgggaaattagtgttatggtactgagagtgttgctggttccaagtagtacagtggttgagcggcggagaagattgtgcagagcgagagttataacggttcgttgaggatgagggaaacgactgctgacgacgatcagtcgtcgatctcccaccgtctgaaggaggaaaagagttcctcatgatgagatgatgccagttttttttcttgttaagaatgagagagcgaaagagaaagagtcagaagttgaaaagagtcacagaagagtcagagagttatatcaatcaatattaaaaccctattaaaatttatttaacttttcgtctactctttcctttttctttaacctaatttaattttcttctaatcaatattaaaacccattttgttactatcaattctttaattattggttcgacctatagaaacatccagaaatccaaatttgaggataaaagtgttaaagtaacatttcttagtatttcaattttatgtttttaccacattttaaaatttaagttagaaatagtgtatctaccaatgatattgccatatacgtattaaaatgtacatatcatcaaaagtaaatatgaaatcttaaaggtattaaatagttaactcatattcttgtaaagtttaatatttgtataccatttagattttattcaaagcattgaattttattaataattagttagtagtttcaaaaactattttaaaatccctacaaaaaaaaaactattttcaaatccctacaaaaaaaaatactatttcaaaataaaagaaaatagaaaatattgaaagcagaaaatatagaaaggtgttaacaaaattatataaaagaaaaaacaaacagaaagtgttacatgttttatataaaaaacaatttggttaaaaatttcaataacctcatatcattttttctcatctgcttaattaatgatattcaaatgagttattttcaaaaaatattgcttatataagtgatgatatgatgcggttcgctacaaatttttcgtgccaataaaaatttcatatatttttctacattttttgtcaacatcatatattattatttcctaattttattagaactctcgtctttaaaaagttttaaaagcgtcatttatcgttcttttatctacaaaaaaaaacaagatttcatgagtcagacaagacaaaagccataaacaacacaaaagtcctgcaagattgctcacttgggcggttgggcctatatgaaaatttactatctcaaaatttaactaagagcccataaaaactgtaagatctttgctttaaatcacattgtcttcatagattttgtgattcatggtagatttgtgaagatctttggtcatctttttgtttacatttggcttattgagtgtagagtgtgaacaatctgctatgaagttggtaaaattctttggatccaaacctttaaatcgtagcatatttactatttcacactgctaggatctgtttatagctgatgcattactggaatctatgatgtttactgtgttggtctgatatataacaagttctgaattttaaaatcaaattcaatatcgaattgggcttttaattaaggttaggcccatcaaatgtttttgactctttaataattccctctcttttgtcttttattgtaaaatgcacacaatttcgaagaaactgccaatggagtctccattttccagcgccatgccaagcttgactctacgatgatagcttatttgactgcttcaaaaaaaaacttcagagaattaatttcgagaattttcccaatttcagatcatcggaaaattcttactataatctttcttatatcgcttctctcagttacttcaacgttctggtcagtttcggatataaatgttttaatttcttagtttccgtttcttcttcttcttcttttttttttttttctgttactgtaaacttggggataacgaattaaagcgatcaaatcgatgttcttatgattcaggatccgttatagcaaaaaaagcttgactcatggcttttggccgcaacaatcgtgtaaggttgttgtttgcttgctttctttaatctctgtctttttttttttttagaatgaatttactgagaaactatg

SEQ ID NO: 3889 - DNA, 3000 bp, Unknown
  misc_feature (1)..( 3000): cDNA_ID_1016643_gDNA_ID_1620672_Annot_ID_164137 3000 nt of promoter + ATG
ccggagctccaaggtatcaaagaaaaggtgcatggtgtggatctcaagctcaatacccggtaccatgttattcaggttcatgggagcaaagaaatgaggcaggaagtacaaaagatggtcaatgaacttgcacgagaaaagagtgcactgggtgaaaaaccagatgagattgaacttgaatgccccatttgcttgtctgaagttgatgatggctactctcttgaaggatgttcacacctcttctgcaaagcttgtttgttggagcaatttgaggcatcgatgagaaactttgacgcattcccaatactttgttctcacatagactgtggagctccaatagtagtcgctgatatgagagccctcttatcacaagagaagctcgatgaactcatcagtgcatccttgtccgcttttgtaacatccagtgatggaaagttgaggttttgctccacacctgattgcccttccatctaccgtgtagctggacctcaagaatccggtgagccattcatctgtggagcatgtcactcagaaacatgcacaaggtgtcacctcgagtatcacccgttaatcacttgtgaaaggtacaaaaagttcaaggagaatccggacttgtcgcttaaggactgggcaaaagggaaggacgtaaaggagtgtccgatttgcaagtcgacgatagagaagactgatgggtgtaaccatctgcagtgccggtgtggaaagcacatttgttggacctgcttagacgtcttcactcaggcagaaccttgttatgcccatttaaggacaattcatggtggaatcggattagtcgagttaggtgtcccagagcaccctgttgcccagcctgttcacaggctttgaaaccggactggacccatgtatctatatcctgtaacatctggtttgcttaatgtgtacatatatgtgaacatagtgtagttcggtatagtaccttctttaaccaattgaatgaaccgatcatattctaatccggatgccaaataaactaaagattgttgtaaatgaaagacttgggacttgactcgctacatcactgattacgcgtaaatgtctacagagagtttactaagttgaaagaaaactacttcctaacatacagagacatcgccattaatggccttaacttaagagtcaaaaaaacatttgatgggcctacccttaattaaaagcccaattcgatattcgaatcgaacccaccggcctaactaaactgttcagtgtccccaaatctttttgcaacttctttcttcttcatattcttctcaccgtgaaggcgtcgtcaccgccgatgttattatctccggcgatgttttctgatcatcactgctttactcttactgcgaggttggttattttcaaatcttcttctctccgttctttctttcgaagtcagaaactttgccgccattttcagtaaaagggttgattctacattccctagaatcatctaataactagggttttcattaggttacgtattggttaaaattagttgaaatcatgtttcttatttctcttttcgaactaaatttggtaatcagatctctagagtgtatgatttgtcataacatctaatcgaaattagaatccgtatatgtttcattcagagaataaatcctgacttgttaatttgatatagaatgtcagattctgatgaagctaaaacgtcggaggaagaatctcaacttgctgagcaagaaacagagactcaagaaggtgaaatgactaaaaacttaaagaaaagagatcttgatgcagtagaagatgaagattcgaataacgaaagctccagattagagaaactagagaagaagataaaaaaagaaacagcgaggaagcttgaaactgactttgtgctaacaggggaagaggatgatgatgcattgcccttagcctgttccatttgccaaaacccattcttggatcctgttgtcaccaactgcaaccattacttctgcgacaagtgtgctctaaaggtaatcttttccttacaacaagtttcgtaatttctgaaaacacactcaaaacagattttccttgttattttttttcataatgcagcatcacactgagaacgatacttgttttgtgtgtaacgagccaactctagggcttttcgacacagccgtggagatcaaggaaagaatagaggaagaacgtgagaaagccagaggtttgttaaaaacgcaaaactctctgttttgacaccaaaaacctactcttacaaaactcgctcggtgatgtctctttgtagccatggtaaaggaagtgacagcaatgttagaaaaggcatcgacaatggcggatgacgccaagggcgtagcgcaaaaggttgtaaaaatggtggaggagattgaaacaatggtggaaaaagtggcggctatggccacaaaggcgggagaaacggcgacaatggcggcagatatggtgaaagaagctgaggagacgatggaaacagctaaagctaatatgtccaaagcctttgtggtaatgaagtcggtgaattggaacgtgtaaatcgggtcaaaacagagttttattgtgatctcatgctgacatcagctacaatctttatctaataagatagattctcacaagattcttttatctatctactttttagagaagatgagatcatacttcggagatagataggtgtcgtaaaaattgggaagcttacttggcaggagaagagagatatacacacgtgcttaaagtcaacagctaatccaaaaaggtagacgacaaaccagttaaactaagacacgtaatctatcttaaagatttgtcggttcatcgtaaatccgttggtggattaatatatgtcggtgtcttcgttgattttcttagcctaaccaaccaaacataaataaaaatcgaagctttactttgtttgcttctattatatccacttccaacaagattcctcaaaaggaaagaagagaaagaagataagagatatctggttggtcggag

SEQ ID NO: 3890 - DNA, 3000 bp, Unknown
  misc_feature (1)..( 3000): cDNA_ID_3072075_gDNA_ID_1620672_Annot_ID_164136 3000 nt of promoter + ATG
agacagttgaatttgttatatcatcagggttgataaacgggcacgaggtagtcaggaaatcgtttctaacactactgtttccatcgcagtagagaaatctaaagttacacacttctggtatcttctcacaagcttcacgccagcatctgtcttctcgttctactgatattaagtaccataaggctccaaacacatgactggctaacatatagagagataggttccaagcagctccagcccaagcggtttcagtaactatgccagatgttcttgtaacttcagtgtaaagtggatagatacgaagaatccttggaatgtattgagtaaatatgacagttatcaaatagtccttagtgatcaaagagaccggcttgttgacattggggatgacagctaagactacaagctgcagcagatacaacagaatattaaagaaccatcaagaaggaactataaaaccattaggaactaaaggttacctgtgggagtggaaggatagaaagaagatcgatgatgaagtaggaggagaggtacttgatggctatagctttaggatcatcaaccaactcgcctcttccgaaaacacgagaagaaggagagatataagcagttctaaactgaaacacaatgtgaatgatgtagaaagcatctataaacgtgcgaagcacactagctgctatctccaagttacgatgcaaattaagacagtgtctttctccatcaacaataggaatatagaaaaacaatggatcaatagccaaagcaatcactgaagcaaaaagaaagattttgttccagttctgtaaaaaagatccttgtgggtttataatattcttctgtgtagtggtactagaattagaatctctcttcttattatgtgaaccaaaacttaaaggtttcttaagtcctctacgaacattcttcaaaactgtgtttagagatggtctagctttatttcttccgtaaccatactctgttccctctgaaatccaatctctgaacctaaacaaaaaatcatcaacaaaaaagaatattttttctgagaatcattcatatccatagtttctcagtaaattcattctaaaaaaaaaaaaagacagagattaaagaaagcaagcaaacaacaaccttacacgattgttgcggccaaaagccatgagtcaagctttttttgctataacggatcctgaatcataagaacatcgatttgatcgctttaattcgttatccccaagtttacagtaacagaaaaaaaaaaaaaagaagaagaagaagaaacggaaactaagaaattaaaacatttatatccgaaactgaccagaacgttgaagtaactgagagaagcgatataagaaagattatagtaagaattttccgatgatctgaaattgggaaaattctcgaaattaattctctgaagtttttttttgaagcagtcaaataagctatcatcgtagagtcaagcttggcatggcgctggaaaatggagactccattggcagtttcttcgaaattgtgtgcattttacaataaaagacaaaagagagggaattattaaagagtcaaaaacatttgatgggcctaaccttaattaaaagcccaattcgatattgaatttgattttaaaattcagaacttgttatatatcagaccaacacagtaaacatcatagattccagtaatgcatcagctataaacagatcctagcagtgtgaaatagtaaatatgctacgatttaaaggtttggatccaaagaattttaccaacttcatagcagattgttcacactctacactcaataagccaaatgtaaacaaaaagatgaccaaagatcttcacaaatctaccatgaatcacaaaatctatgaagacaatgtgatttaaagcaaagatcttacagtttttatgggctcttagttaaattttgagatagtaaattttcatataggcccaaccgcccaagtgagcaatcttgcaggacttttgtgttgtttatggcttttgtcttgtctgactcatgaaatcttgtttttttttgtagataaaagaacgataaatgacgcttttaaaactttttaaagacgagagttctaataaaattaggaaataataatatatgatgttgacaaaaaatgtagaaaaatatatgaaatttttattggcacgaaaaatttgtagcgaaccgcatcatatcatcacttatataagcaatattttttgaaaataactcatttgaatatcattaattaagcagatgagaaaaaatgatatgaggttattgaaatttttaaccaaattgttttttatataaaacatgtaacactttctgtttgttttttcttttatataattttgttaacacctttctatattttctgctttcaatattttctattttcttttattttgaaatagtatttttttttgtagggatttgaaaatagttttttttttgtagggattttaaaatagtttttgaaactactaactaattattaataaaattcaatgctttgaataaaatctaaatggtatacaaatattaaactttacaagaatatgagttaactatttaatacctttaagatttcatatttacttttgatgatatgtacattttaatacgtatatggcaatatcattggtagatacactatttctaacttaaattttaaaatgtggtaaaaacataaaattgaaatactaagaaatgttactttaacacttttatcctcaaatttggatttctggatgtttctataggtcgaaccaataattaaagaattgatagtaacaaaatgggttttaatattgattagaagaaaattaaattaggttaaagaaaaaggaaagagtagacgaaaagttaaataaattttaatagggttttaatattgattgatataactctctgactcttctgtgactcttttcaacttctgactctttctctttcgctctctcattcttaacaagaaaaaaaactggcatcatctcatc

SEQ ID NO: 3891 - DNA, 3000 bp, Unknown
  misc_feature (1)..( 3000): cDNA_ID_3072079_gDNA_ID_1620672_Annot_ID_164135 3000 nt of promoter + ATG
caccattatctacaaacacaattaaaatcaattcaaaatgaccaaacacagactcatttataaaactgaaccttagcagacaatatgaactagtacaacaagacaacagcataactcgaatatctgtactcaagtgattcaaaactagcttggacccaaagagcacttgtcaacttggagattcttaaagatacctgttcacaatgaattttcttcaaaatctgccgccggtaggcatagataggcagtccatcctctagccttcgacactctctaagaatcaaataatgaatacgtctccaatcataggccccttccaaagaaaacacggccacgtcttcgtcatcttcatcatctacatcaaactcatacccgtcttgtcctatgagatatcgcaaaatgctcttcatggcattattgaattcgtcaagccgattcacaaccaaatctctctccgcttcaagagccttctttttctcaaaaacctcaaatttcagaccccttttagacgaaaaggacgcaacttgacgagacttgtcatcaatctccattctcaccttcttgaccccttgtccattttccataagcgaaagaacatgagacgagaaaagatcacgaagcctgtctttaagctcgtccatgtcagacggaacaacaacattaggaatcagctcaggaacaaaatcatgtctcccttgaagacgataatcccaaagagccacaacggcagaacgcgcatcgacccactgacgaaaactgaagcttgcagcgatacaaccaaattgaggcacgtgaactgattcctccggaatttcgcaaagcaaagcgatactctcgatctcttgcttcttagacagctttgtgtcactgttagcggcggcggggtgaagcagctgaacgatgaaattaggcctagcccgcgtgactggaggagagaatcccgacgacggagcacgatcacgtctgtaatttggcgggaaattagtgttatggtactgagagtgttgctggttccaagtagtacagtggttgagcggcggagaagattgtgcagagcgagagttataacggttcgttgaggatgagggaaacgactgctgacgacgatcagtcgtcgatctcccaccgtctgaaggaggaaaagagttcctcatgatgagatgatgccagttttttttcttgttaagaatgagagagcgaaagagaaagagtcagaagttgaaaagagtcacagaagagtcagagagttatatcaatcaatattaaaaccctattaaaatttatttaacttttcgtctactctttcctttttctttaacctaatttaattttcttctaatcaatattaaaacccattttgttactatcaattctttaattattggttcgacctatagaaacatccagaaatccaaatttgaggataaaagtgttaaagtaacatttcttagtatttcaattttatgtttttaccacattttaaaatttaagttagaaatagtgtatctaccaatgatattgccatatacgtattaaaatgtacatatcatcaaaagtaaatatgaaatcttaaaggtattaaatagttaactcatattcttgtaaagtttaatatttgtataccatttagattttattcaaagcattgaattttattaataattagttagtagtttcaaaaactattttaaaatccctacaaaaaaaaaactattttcaaatccctacaaaaaaaaatactatttcaaaataaaagaaaatagaaaatattgaaagcagaaaatatagaaaggtgttaacaaaattatataaaagaaaaaacaaacagaaagtgttacatgttttatataaaaaacaatttggttaaaaatttcaataacctcatatcattttttctcatctgcttaattaatgatattcaaatgagttattttcaaaaaatattgcttatataagtgatgatatgatgcggttcgctacaaatttttcgtgccaataaaaatttcatatatttttctacattttttgtcaacatcatatattattatttcctaattttattagaactctcgtctttaaaaagttttaaaagcgtcatttatcgttcttttatctacaaaaaaaaacaagatttcatgagtcagacaagacaaaagccataaacaacacaaaagtcctgcaagattgctcacttgggcggttgggcctatatgaaaatttactatctcaaaatttaactaagagcccataaaaactgtaagatctttgctttaaatcacattgtcttcatagattttgtgattcatggtagatttgtgaagatctttggtcatctttttgtttacatttggcttattgagtgtagagtgtgaacaatctgctatgaagttggtaaaattctttggatccaaacctttaaatcgtagcatatttactatttcacactgctaggatctgtttatagctgatgcattactggaatctatgatgtttactgtgttggtctgatatataacaagttctgaattttaaaatcaaattcaatatcgaattgggcttttaattaaggttaggcccatcaaatgtttttgactctttaataattccctctcttttgtcttttattgtaaaatgcacacaatttcgaagaaactgccaatggagtctccattttccagcgccatgccaagcttgactctacgatgatagcttatttgactgcttcaaaaaaaaacttcagagaattaatttcgagaattttcccaatttcagatcatcggaaaattcttactataatctttcttatatcgcttctctcagttacttcaacgttctggtcagtttcggatataaatgttttaatttcttagtttccgtttcttcttcttcttcttttttttttttttctgttactgtaaacttggggataacgaattaaagcgatcaaatcgatgttcttatgattcaggatccgttatagcaaaaaaagcttgactcatg

SEQ ID NO: 3892 - DNA, 3000 bp, Unknown; identical to SEQ ID NO: 3887
  misc_feature (1)..( 3000): cDNA_ID_1822358_gDNA_ID_1620672_Annot_ID_164133 3000 nt of promoter + ATG

SEQ ID NO: 3893 - DNA, 3 bp, Unknown
  misc_feature (1)..( 3): cDNA_ID_2173159_gDNA_ID_1620672_Annot_ID_164132 3000 nt of promoter + ATG
aag

SEQ ID NO: 3894 - DNA, 3000 bp, Unknown; identical to SEQ ID NO: 3890
  misc_feature (1)..( 3000): cDNA_ID_1822350_gDNA_ID_1620672_Annot_ID_48175 3000 nt of promoter + ATG

SEQ ID NO: 3895 - DNA, 3000 bp, Unknown
  misc_feature (1)..( 3000): cDNA_ID_2107309_gDNA_ID_1620673_Annot_ID_48178 3000 nt of promoter + ATG
aaaccgatttgtttccatttccaggtcataccaagcacagagaaaagcatttggggaagagtaggttttgcgatctgtgattttctgaggagaaacgaaaatggcgtttagagggaaggagatgatgaagaagctggtaaagaaagttggagcggagaatatcacgccggagctcaaggagaagctcaaggcttgtgttcctgataccaaagtcgtcatgggcagagccaaacgcggtctctacgccggccgccacatccagtacggaaaccgtgtcagtgaagacggtggaaacaagtttgtctctttctctctatgcctctctatctgtttatatgtgtatgtgtagtcggttgaggttggtcggatttagagcttgtgatggttttgcttaatattcaagcatcggaggagctaaactacaggttcttaggaatgcttcatggatttaggtttcaatttggtagaaatctgaaactatttaagagggttcgaaatcttagatggttagagattttatagtgcctcattttgtttagcatctctcatttgttgcctgaagatggcattgttgttttgtttctgtatcatgctactctaaagattctcaatatttgaacaatggtgtgatgaaatctatcccctttctagagaaatgtaggatacttatgagttttaatctgatttcttctgtattgtttggtaacttgtttgtggtgtgatttgagaacaggtcaagaagatgttggaaaccgaatgtccaggagaagcgattgttcagctacatattcgacagtcacattaaagtcaaagtcacaacacacgctcttcgctgcatcgacaaagcaggaggaatagacgagtacctgctgaaaacaccataccaaaagatggacacagagatgggtctttactggaaaaccaaagtagaggcaagatatgcagagctgggtcaaatggaagtagccttcttcaatccagaggatgaagccaagttggaacaaggattcaaagacttgaatatagctaagaaagatgctcgtcgggaagctagaaggacgtttcgaaagaaaggtggaggaaacaaaggtgatgaagaagcttctattgaaggtggtggagggtcagagtcacaccaagaagatgataatgggtggttagaagctaaagcttagtggctgctctcttttcttttgctgagtttcttcaacgtttttagattttggaagatgtgagaggtatgtgaggttgtaggttataggttcgattcctccctacgaatcccataactcagcgttttgactttgatcaatgtcgaaaaagtcttgtaataaatggtttacacctctttgaaatctttatttaccatttttacatacttgtcattttctttcgattcctcatctccaatggtgggtgaccttttagtgattttagtattatacaatatatccaaaataaattgaaattttgttcatataaatcatgtgtgttagtgattttttctgattttgtatttatttcagttgtagtatgtatttatgttatcaatcatttaaccattcatttcatacatttgatttggatccaccaaatattttaaatttaaagaattttgttgctctaccataaagtcacaacaaataatctgatactttattttttttagaaaagccaaataataaagaaagagagattaaaaatacaaaaatcaaggataaaggctaagaggtttgttgctataatagaggacagataattaaactagattatccttagtcgtggcatcatcaccaaatactacttatcgaattctcatgattttgttttctttttccatcttctaaccaaacaaaatttagttctttaaaaaagattttggtcataataacttttgtttaatatctttagttctctaccactacctagagacgtcgtaatctctaccaaccgtcagatattccgaccccattatcgacggcgaggatctctgcgtcttcgtcatctcagattctttctttcgatataaaatttaatgaatatttgctttaaggtcattatggaataaaaacaaatatttgatttattcttaattccaaaaagataaattacttaaaataacataataaaaaaccgaagaaaaaatatcggcaacaagaacaaaacgctcttctatttttctccatcttccaatttccaggaacaagattggacgaaagctaaaggtaatcatcgaacaaaataaacagcttaacttctaaaaatcttcctttatcatggaatttttttttatgttttgagacaaattgactttttttttgtgtttgtgatgttttggaaatgaatgatgttactgttcttgattctgaatcgatttttaagttgtaactctcttttgtttagaccaggtaacaaaaaatgaaaacatgttctgtttttgtttctctccaatcacttgtgtatagagagacacatgtattattgttgagaattgtttctcttcatgttcaagaaatttgattgttttattagttccttgtcaagatgattctttattgagaagtgattataggcatcctttggatcatcatcttatgaaaggtttcatttttatttgaaccatcacagatgataagcttttagctatagacttttgtgattgaagcactttaagtttggctgttgattgttaagatcgttattacaagagtttcataacaacaatgttttcttctaatgaatacttttatgtctggtgcaaaggttttgaatttgcaggttttcgcagtttagtctcagagagtatgaatatgtattgatcttttgctcgttgttttctttcagtctctgatctgtttttcctgtgtttttttttattctttggcgaacttttaagtcccaatgaatagttttggttaactaaaataaggaatatttttgttacaggtattgcatccatttaaaaagttcatggataggtggtccagtaaaagagccatg

SEQ ID NO: 3896 - DNA, 3000 bp, Unknown
  misc_feature (1)..( 3000): cDNA_ID_1822380_gDNA_ID_1620673_Annot_ID_48181 3000 nt of promoter + ATG
aacagacgacaggatcgaggagaagctgacctgaagtgaaccaaaccacataaatggtcaagcaacgagagagaagaagcagaaatgaaactgacgatggcacgagtcgaggtttcggccggcgatgagaaccggcgtcgatcttagccatagggttcaatttctgagttttgaagcgttgggcttttttaattcgttggctcttaggcccaaattaattctctcattaatttacggttcggttttaatcggttctaatttgtcaatccggataaaaagtcaataacatctaacatagaccaaaccattatcccaaagaaaaaaaaaacatagaccaaaccaagtcaacatgaattgaaatttaagaacctcggtcctcccaactcaaccgaaacacaatcaaaccggccaaacattgttttttttacggcaacaaagatatatcaaaacacaaattgcaacactaaaaatcatgtgttttattggtgccttatataacaaatgaaaccttacccgaaaggtttagcatatatgacatccagacaagagaaaacgtaattcatcattttcgttatctaacatacaagaatcaaaacaagatttcacattaacaaagataaagtgtacatagttgaggaaaataaaggtaaagataaagtgtagacaatattcaaaagggtggttgtccaacaatgttaccaggaggatcatagttacaaataataaatgtgtcaccggtcttgcaaaaactgattgcacacccaatcctcgaactcttcttccatacaagttgcgtgtaatgcaaacaatccccattcgccttgcagtgggaagtcctccggtcatagtatttcatctccgaggcccatgcagccaccgcatcccgtggagtccaaccttttccgcttccccagaagagattctccccgtaaggtcccccggagtggataagtttgcaatctccacggcgggttctggcccaccggctcgcatagagggcgaggctattgctccatttgagaggagggagacgaagcttggctcgtaagatgttgtgtggtcggagaaactgctgctgaatggtgttgcgggctagagctttgtcttgagaaaaaattagtgttgatgttgtcggtgttctgtttgatgggatttgaaaagagagagaaggaagtggagtgctgataactatgataatgatgatgaatatcagagttttttgttccattgggatgctaagttagatttgtttctgagcctctagatctagctagtacgatccttaccatatatatatacacacacacacataattgtttatgctttcatatttgtacgtatatatcatctaacgaatctaaacacatgctatgttaataatgcgcaatgacaagtgctaatcatttcggtggaacattgattatttgtagggaatgattttattcaaacaaagcatacattattgagctaattaatagatcattatatatgaaggaagttttaataggatgttttctttttttcttgtaagaagagactttatcatagcaacgagaatatatcccaagcataaaacattatatacaaactcattcaaatgaaaacctaagttagatatttaatttgaccactcttaaaatacttgtttagttataacatgtttactatgcagatttatgaggcgtatcagatggtgtgctagagaacgtgatacaaatttggatgccttgttttcaagaaatcttatacattccttggagatcaatttgtattgtgaggcttatagtcattgagcttaccgttgattaactaaatttatattatatagaacatcaaatagacgaaaaaaatcaatttagttgaccaccgtttgttagctaggttataaactctgacccaaagtgtcctatgctttcagtattcagtttattttataacgtgtggggtcgttttggaaacaattaaaacaataggggctatatttttctcaagttctgttggactgggcttgtcgttaatcaatatttgggcttttgaggttgactcgcttttttccgttcttcgttttccaaaatcaaacccaaaaggatttggaggagttaattcacctgacgaatccaccaccataatattaagcacatttgatctctcacttccttggtgcgagtgttttgttttccgagatccaaaatcttctcttggatccaaagctgtgttactgtggatctcctcctcctctctccctggatctcgtacctttgaggtttgtctctctgtgttaaacttgcgactcagatttcatagagatcgatcccacttttgccttttcctttgtgaaaatctacaatgttcaattattctctggcgctctttgtttgatctcgttgaatattgatctgattccggtaggaaaccgattttcatgtttgtgcagctgagtgagactgcgaattatgtagatttcattgtttgttcatctaatctggggagatagatcgcattttttttttttttgaattttggttgatccgaagctgttttaactgatttttcgtttttatgttattattttggtcgtagttgtagtacagtgatgtgtattgctggatctgaggatttagatttgtcaatgttttgcatctttgggtctctgattggacattaccgaatattcttctgaaattatgatgttttctcataaaccacggattcgagaatagagatcatgtattcaatgtattgaaatccaagcagagaggtatggattatcgccgatgatactgttgaacttcttgtatagaacttactctagcactgatgaggacactagtaaggtgcttatattcagtaattcgaacttgaaatcgccagaaatattaaaagttttgatatcttgtttttacttgtgatctatacttcattatgtctttaatcaattgtaacaattttgctctattcatcttctatttcttatattaacaaaggaacacttgttcgtga

SEQ ID NO: 3897 - DNA, 3000 bp, Unknown
  misc_feature (1)..( 3000): cDNA_ID_1822376_gDNA_ID_1620673_Annot_ID_48182 3000 nt of promoter + ATG
ctaaagcgtgcaactggagaattcaccaaggacgagaacgatgctaacaaacttaaccgcattcttcaactcacaggattcagtgacccagtctatgctgaagcatatgtgacggtacaccattatgatattgctcttgaagttacagtaatcaaccgaaccaaggaaacccttcagaacttgtgcttggagttagcaaccatgggtgatctcaaacttgttgagcgtcctcagaactacagtctggcacctgaaagaagcatgcagattaaagcaaacatcaaggtgtcgtccacagagacgggagtcatattcgggaacatcgtctatgagacatcaaatgtaatggagcgaaacgtcgttgttcttaatgacatacacattgatatcatggactatatctcccctgctgtgtgttcagaggttgctttcagaactatgtgggcagagttcgaatgggaaaacaaggtaatttattgaaaccttttatagttgtaccttcttttcgtatgtttgttggagtttggtataaccaattcctgttgtattctttatgtcaggttgctgtgaacaccacaatacaaaacgaaagagaattcctcgaccacattatcaaatctacaaacatgaaatgtctcactgctccgtaagtgtaaattcttctttcatcctgtagaaacgaaaaactcttcttactaattaatacttctttacttgcagatccgcaatagaaggcgaatgtggattccttgcagcaaacttatacgcaaaaagtgtatttggtgaggatgctcttgtgaatgtgagtattgagaagcaaacggatggagcattgagtggttacataaggataaggagcaagacgcaagggattgccctaagtcttggggacaaaatcaccctcaaacaaaagggtagtagctgaggttagctaatcttttcaaaacatattctatttctcgattaatacatgttttaatccttaaaccgcaattggtctaaatttcagtaccataccgatgatttctcacagtggcgtgcaaaggtaacaggtttagactacgtacgtttctcttgagcaattatcgttggttgaatctgcttattatatggagggaggaggcgttcaagggtatatgtaaaaagagtaattggctatcgttcttacttaaccggtatattttctggtatggtaccgatggatttcttcatctcatatggcagtgtgttttttactgtactagacgattttgttttatttgtaatgctttttcttctataatgtcgtttgttgaggactttaaaccgtgaactttatgatattgtagatttcaaagctacatttggtttgctccattttagaactcgtcatttcagatttgatctctattcttttctttcatatgcatttgaagtgaactattcaattgtcaaagctagactttaatttgctagtagctatataatacgggttatgttagcaagtaagttgtaatgaaacgcatgtattaatatggaccatattcaaaatctacaagccaaagaaaccaattgcttcacaaccaaacccataacatttgattcttacagccttttctattctcaagaaaaccaagcaataatttttaagcaaaatttaataatcttaaatcacttgcctcaaggtaccaagggacgatcacatacacattcgcgtaactagatatcgctaacatcattagacaagaaaatactagacgcgagtagaagaggaaagatccaaatacatcatcttctatcataaaatcatccatctctaaccgaaagttggagcacgtttcaaggaaaaactgacataattcctaattacgctcacttttaaaagtttggggtcgttttggaaacaataaaaaagtaggggctatgctttctcaacttctattggactgggcttgtcaacaatcaatatttgggcctgcgaggttgactcgcttctttccgttcttcgttttccaaacagaaggaaaaaaaactaaaaaacaaaatcggatttggaggagtaaacacaagggaagacgaatccacgataatattaaggacatttcataatctctcactttgtgcgagtgtttttttttccgagatccaaaatcttctaacggatccaaagctttgttactccgtggatctcctaccttgaggttcgtctctatctgttaaacttgcgactcagatttcgtagagatcgatcccacttttgcttttcctttgtgaaaatctacaatgttcaatattctctggcgttctttgcttgatctcgttgaatattgatccgatcccggtaggcaaacgattttcatgtttgtgcagctgagtgagactgcgaactatgtagattccattgtttgttcatcaaatctggggagatatattgcatttgtgatatgaactttggttgatccgaagcttttttattattcgattttatgttaatgttttggtcgtagttgtagtaaaagtgatgtgtattgctggatctgaggatttgaatttgtcaatgtcttgcatctttgggtcgttgattagacattaccgaatattcttcagcgattatgatgctttctcatataccgtggatttgagaacatagatgctttcttcattgtactgaaatatatgtagagaggtgtagattattattgctgagtagtattatggggatactctgaaacttcttgtttagaacttactcgagcagtgatgaagatactagtaaggtgcttatactaacttagtaattaaaagaaaattcttaaaattttggatatattgattgttacctgtgatctatactacttcattttatctttaaatcgattttcagtattttaggttcctattctctattcgctttgaatttcttatgttaacataggtacacttgttcttgcatgatttttccttttcatatgagctcacaattttattttatttttcactctttgtgcagcacctgaaaag

SEQ ID NO: 3898 - DNA, 3000 bp, Unknown
  misc_feature (1)..( 3000): cDNA_ID_1031118_gDNA_ID_1620673_Annot_ID_48183 3000 nt of promoter + ATG
aacttcttttttatttatttgttttcttgcataatgtaccgtgaaatttgatcgagaacatcatcagcctttgatattcttaaacgtcaaagaaactggtatattacgttaaattgttgaagttatgttcccttgtttctttctacttctttaattgaatattgatcaacatcaacatattaccactcttttctttcaaacataataaatgttttaaaaattatgtttgttaacctgtgagtagatctaaatgattgaactgttcctttgtttttcaaaactagtaatttgtgttaattatggttaaatactgtttgatgatctaaatgattagaatactacccagctcttccataaatataagaattattagtttaagttttggattttggttcccacttcaaaaaataatcgtgtttaaatcttttacgacaagtgaaattcggttgtaagaaaaagaaaaagctaatataatgttaaatccgtgtagattatcagtaatcaattcatatctggttccactgattttaattcataactttgcctttttagtaatgagtattggataaggttgaagagagtttctggtgtccacccaacacttacggtacatggccagcatcggatttaacggagacagtaaccccgaaacgtcaggctaaaatttccaatccattatcgccacgtcagcaataacgtgttaaatcgtcaaaaagtcgacgttaccgtccttccctcggatactaattttagtacacacacagagagactcaaaaatactgtcactcatacgtatatatatacgttttcgtatattactatttatcttctttttttttgttttaataaaaaaaaaactatcttttcttttttatcttcttcttcttcttctccgatcggtggagtcttgtctctctttctttttttatattacttgttaacctgcgcttgcttattggagctcttaacctacgcggatgctccgattttatgacagctgagctcgatttggttgataaacaaaggcttcaagaattctaccggaatcaatggaggttctggtaggttctacgtttagggatcgtagcagcgtcacgacgcatgatcaggccgtaccggcgtctctgtctagccggattggtttgaggagatgtggtagatctcctccgccggagagttcgtcgtccgttggagaaaccagcgaaaacgaggaagatgaagacgacgccgtttcgtcatcacaaggaagatggctcaattcgtttagttcatctttggaagattctcttccgattaagtacgtttctttattaattatcttctaattattctgttatctacacctgaatatattcgatcgatttattttattacaagaataaagtaaatcattagattctcttatgttcttgggtttgattttattgatgaatctgtaagatgttgaaattgtttcttacttattagattctcagtttaaatgttattactacatgttgtgtttttgtttagtcatgtggtttaggttttggtttttgttacaggagaggattatcaaaccattacatagggaaatcgaaatcgtttgggaatttaatggaagcgagtaacacaaacgatttggtgaaagtggagagtccattgaacaagagaagaagattgcttattgctaataagctaagaagaagatcgtccttgtcttctttcagcatctacactaaaattaaccctaattctatgccgttgcttgcattgcaagaatctgacaacgaggatcataaactcaatgatgatgatgatgatgatgatagtagcagtgatgatgaaactagtaagctgaaagagaagaggatgaagatgacgaaccatagagattttatggttcctcagactaagagctgttttagcttaactagttttcaagatgatgatgatcgatgatcgatgatcattcttcttcttttgtccaagagtagataaagtttcgttgacaaataagttggaggaagatttgacagaaaccaatttacgtgtaattgtaataaattaatttgactgtttgtatattttgaattttctcaacgaagtagactttttattttttttgtcacacttcttgtcaaccttaacatttgttagtaagcccatgagattggttctataaattttaatgtccgcatgagaacaaagtcgttaatattgacggcttagtaatttcaatagcggctgcgaagtcaatagggacatctttaggctcgttctccgaaatactcttttttttttttctctaccgagttgaatttatgtacgattcatcttagattgacgaagtagaatatttgtctcactgtgacctactgttcaactgcaaaaatatgaacatatttttctacaaaaattgactacagagtaattagaaaacttaaaaactgagagtttagttttttggttacgtatactttttttttctttcagtttacgttatagcataggagaaaatgatcgcttcaaatttcataggtatttttaggaatttttctaaagtaccattttttatgctttgtttttaaatcgatcatatcagttcaaaaagaaaaaaatcaagaatgatgtctaaatgaacaaaagtttatgagatttataaaaaacaagttgatgatattttattacttcataatatacttactgttctatagtatatttttagaaaacaaaaccaagaggttatattcttatccaatatcttcacattttcaactcttcatcgatctcgctttcagtattattgtgtaacccaagttacattttttaattccaaaaaccagtagtccacctactaacatcacgttttaaaaacaagggaaaattctgtcacctgtcaaaaaatccaaaacaaaccaaccaataaaactttttgtcttgctatataaaccacatcatcattcaaagtagaaaagtatccgaacacaaagacttaagtaagtcaaacagaaaaaaatg

SEQ ID NO: 3899 - DNA, 3000 bp, Unknown
  misc_feature (1)..( 3000): cDNA_ID_1822366_gDNA_ID_1620673_Annot_ID_48186 3000 nt of promoter + ATG
tcctgttcgatatcatcactcccaggcaacgccacttcatcatcatcactttcttgcaataaatcaacattgggaacattgctgaagacattgacttctccatactttttaggtctggcaatgggacctccaggacggccacggtcttttttcactagtagcaaagggttgatctgaaattacaataatgtaattactggttaaccacatacactgattattttgttccaattaacaaatcaaatacttctgctacctctctgaacaatgctatgagggaagcagatgctgctgagatggcttttctatgggtacggtactttttatccgttttatactgagcaagatcatgcagcaagtcttctgtcatcaactgaagtatagcagacaaaaaaaaatatagaagaagcaaaaagacaactcagaaaaaaaaaaaaaaaaaaggattggtgctgtaaaactacatttatatgagaatgttaaaccagagttaagaactagttacctcgggaatcctaaggaacatttctcgtaccacattgagtgcgacaggaatagcctggttacatatatgaaaacaatgaattaaaaaggaaaaatataaatgatagaataagctttctagttaagtccctccctaggtgtttgaaatcacacctccggacttgagcgatcgtgtaaaaacttattcactatttgcttgaacagtggctccacggcatccgaaggtacctgctcgatataaaaatgattggaaggattgcaggatgagaaaagggatgatgctttaaagtgtaagatgtttgtataccccatcatggcaagcctgaactgctgctgcaagtatttgtgtaatgtcctttacaccatcctgcatttaagagcatccctgtttcaataaattttcagcaaagaaattgtaaaaagggcagttagcaaatcttaccttagcatacgcttgaagataagtataaaatttgaataaaagcaacttgtgaagaccaattgttcgtgcaataacttttataatcatcaacctggtctgcaaaatttattgaatacatggttagttagctcatatgtttctatagaatggatgaagcgagttaaaatacaattacctcgcgccgttcataagtttccccagtgctcttgtcatcagtttccccactgctcttgtcattagtttccacagtgctctcgtcaggcttaggcctaataaggggaagcaacctctctgcaaaattctgtaaaagaagaaaaacattcaagtacatagccacatagaaaaagctaggaaatgaccactacaaaaaagctaggaaatgaacctgtgcatcatttagatgattaagaggtgaataagttgaagtagtgttctcagacgacgcacgctgctttcgtttaatacttcgcatggcgcgttgcagttttgcttgctttttcttcttgctagaagatgtacctttgttgttggcctaaacatcggaaacaggacctagtattatacttaattcataatgataaaaatgatagtgacaactatatgaaggtggaaaattctattcacaaccagtagtaagcgtcttcgtcatagtctctaacaaaattcatgtataaatatgttgtttaccttgtaaacagcctctctgttaaacacaacctgagatcactatcatcctcatcgttaatgttgtcgtagtcaagaagaaaccgaagggaagatatcctgatcctgaacatgtaaaaaaaaagagaagttagtaattcgaccaaccaaatcatatcgaaatcttgcacagttaggaagatatacctaggtgaagtatgaaagcaggcttcacaaatggcaattgctactctgtcatgtttatcaccaaaccagacttttttcttgtgaagctcacaaagggtaacaagtgctctcttagccttggtttcatcttcttgctacaaccgaagttaaaaatcatctacttgattatacactgatcagttacacaaaaaacccatgaaaagggaaaagaaaaaagaaatacctccaacatagagaaaacaatcttgtgaagagatttgtgccttggatcagtgatactcattttacgaatggtttgaacaatatgagagaaagcaagctttcgcaagtttttatcaccaagagtttgaatatctagaaacagagctaacaaatcctcgatgacaagactctttaacacacaccaaagcaaacatattaaaaaaacattactttcgattacgatcatcttagaattcgtatcaatcacgtaataaataaaaaaacatacctttcgattcataagaagaatcagagattgcgcaacttggtaccgaagccccgacggcattgccaggcatgaggtacggagtaaatcagtcaattgagctggaaaagcggcgagctggttcggataaaacggagtgacatgagcgagaaacatggctcggtctcggagttccttagcaacggaagggccggggccgacggaggagaaagtgagagccgcctgttgctgaaagagatcgacggaggctctgaactgtttgtaaatcaaatggacctccgtttcgtaaccctctggttcacgcttgatttggctctgaaggataggaaggctgagcttctaggagatccggctagaagccttcaaggactccggcgtaagacctagagatccggccataatcggaggttttttcagagagggaaaggaaccaaccaaaccctttaggttttatacaaacacacagacttttgatatatttataggtttagttcttcactgtaccagttcggtttaggatttgattctctcggtttaggattttatttgaaaccattacaaggccaaagcccatacggccagaggcccaatacaaggaaaaaacgcaccaattgaatgaacaaatttatttgatttttgaatgaacaaattaaataatggcttctccttaaaattatctaagctcgcttgaccaatc

SEQ ID NO: 3900 - DNA, 3000 bp, Unknown
  misc_feature (1)..( 3000): cDNA_ID_2107665_gDNA_ID_1620673_Annot_ID_48188 3000 nt of promoter + ATG
agttcatcttccaagaccaccatgtgcttggttcatgtttagacgttaaagtgaagaatataaagcaaaattattcgacacccaacgttacatccaaatatgcgttaaacattgatattagaaaaatacaaaatatgacatctagttgaagtccacattggattccactctcattttactttttgtcttttatctacatattcttccttacagctttctttcaatgtttatttaattagtacaagtaaaataggcatagcattgtgtcataaccctcaactctacaacatgcatgcattatatatgcatatatagtagaattgatcatgcatgtattaactgtaactgaagtgagattaagacttatgaaacaaaactaataggactacaaatattagtcttttttatcatcccatatttctctgtatataaactctgtagttatttctaattttaagatttataatcatccttgacaaaaaaaaaaaaaaaagagatttgtgatcagaacatttgttgtttaaagaacttgtttgagttgttgttaaaaaaaaataacataattgttatgtcaagattatttgaattaatattttttatccgttaaattgttatgtaacttcttgtcatgaagtacaaaatatactcaattattaatacgacaaaataaatagtacgtaacgttgcagagtcgtagagatagaattaacatgcaatttttttttaattttttttttatatcaacatgcaatttaacgaacacgtttcttgcacctgcttgatagaaaataataatataaattattggaacgaaatacaaccagagaaaaacgagcataattttattattttatttttagttttctaaaaatcatcttacttttttttatcttgttttatgtttcattgtagttttaatacggggaacgattttaccccgcatgtatagaacaaaaacaagtttacttttaaaattagtgaaagactagttccaaaaccgcattgacatgttagttttttctcttacaaatatatatttgttatcttattctaatgttaaccaaacaaatattgatcgggaagaaaaagagatgctcagaaatattataacacaatgagtgattgagacatagaaaaaaggatgatcattgagattttgtaactatgtagataatatagacgtgcacgacaataataatacaactcggtcgatcgggtcaactaccccatgttataatttaatcgttgacataagaaactgttttaaataacaacaatccatggtttcttccccacccatatatagccataaaacacgttacatgaacactcaacacgttctattttcattttttattttgttaataatttaagaattttaagctgaagtccagattaatttccaaaacatagagagacaatataattattgccagctaagataatcacaattactgaatacgattaaaatccaagttggaagattttatttttgtaaccaatggactagtatccaagataatgttgatacatacgagtacattttatgtcactatatacaatttccgatattttttatttttcaatcattcgttaataaaaattctacaaacaaaaataattcatcaaaacactaaataaattttttttccctttttctcaattttatgccttgcctaatttctgttccattcatttttgaaacaatttcaatagtggaacatgataacaaaagtcgacacgtgacaagaacttaatagctggctggagattttaataggctcataaaatcataaaaacatagtcaacacttgtatccacagatccaccgttggattgacctttcgaaaatccagtggttcatataagagttaatgggaccacccggttaccgaggtcgtcaaatagctttatgttcaaagaaataatcgtaaattcgttattttttattttcttacaataatttagtagcactactactttaacattttaaatagtcagcttttcaccttcctttgtcgtattgatgaatcgctgttctagtggacttttaaaatcattagtcaaaccattactgctattttaattataatgactattattatttgttgttttcacaatatgtgtagaatacttaggtgaatttgaggttaataaagtttccaagtgaagactgtttctaaaatgaaaacttcttgttgtaaataagtaaacagtcaaattttatcaatagaaaaagacaaaaaagaagtaaaagtccggcgccaaatatttattggttatggaaaccccttaacttagtcttgaattagttaatcgtaaatctagttgacaaatattaaagtccgtagaatttgaaagaatacagaagattcaaattgggacaaacataatatataattaaagctttataaaagtcaaatgtatccattattattattttgggattaatcaatcatctctgtctctcgttgacaactcttccttctcttgcctcaaccaaattccagctggccctctttctccattgtgtgtgaatgaatcattgacattatttttacttactttggtcatgcaaacttctttctacaccttttgcttaagctaagttgaatgatttttgttaagagtgttgttatttagagaaaattctgtccatccattatctttttgggttgaaaaatatcttgaatttgaagtaacgataaaattcggatgccaggggtgggtcccagtaacctcgaactttgaggagaccaaactgttgattgctttattccgtggaaatcctcaactcaatcacagccgttggatcaaaacctccttcccggtttgactaaaaaatcaccaaaaatctgacccggtcacctcctcttttccccatatatcacgcatccttcttcttctctcttctccatcacaaccatttctctctctcgtcttcgtcttcttcttcttcaacgttcctctccaaaatcctcagaccaagaaatcatcatg

SEQ ID NO: 3901 - DNA, 3000 bp, Unknown; identical to SEQ ID NO: 3900
  misc_feature (1)..( 3000): cDNA_ID_2107665_gDNA_ID_1620673_Annot_ID_164166 3000 nt of promoter + ATG

SEQ ID NO: 3902 - DNA, 3000 bp, Unknown; identical to SEQ ID NO: 3899
  misc_feature (1)..( 3000): cDNA_ID_2173372_gDNA_ID_1620673_Annot_ID_164163 3000 nt of promoter + ATG

SEQ ID NO: 3903 - DNA, 3000 bp, Unknown; identical to SEQ ID NO: 3898
  misc_feature (1)..( 3000): cDNA_ID_1031118_gDNA_ID_1620673_Annot_ID_164160 3000 nt of promoter + ATG

SEQ ID NO: 3904 - DNA, 3000 bp, Unknown; identical to SEQ ID NO: 3897
  misc_feature (1)..( 3000): cDNA_ID_1822376_gDNA_ID_1620673_Annot_ID_164159 3000 nt of promoter + ATG

SEQ ID NO: 3905 - DNA, 3000 bp, Unknown
  misc_feature (1)..( 3000): cDNA_ID_1822380_gDNA_ID_1620673_Annot_ID_164158 3000 nt of promoter + ATG
agagaagaagcagaaatgaaactgacgatggcacgagtcgaggtttcggccggcgatgagaaccggcgtcgatcttagccatagggttcaatttctgagttttgaagcgttgggcttttttaattcgttggctcttaggcccaaattaattctctcattaatttacggttcggttttaatcggttctaatttgtcaatccggataaaaagtcaataacatctaacatagaccaaaccattatcccaaagaaaaaaaaaacatagaccaaaccaagtcaacatgaattgaaatttaagaacctcggtcctcccaactcaaccgaaacacaatcaaaccggccaaacattgttttttttacggcaacaaagatatatcaaaacacaaattgcaacactaaaaatcatgtgttttattggtgccttatataacaaatgaaaccttacccgaaaggtttagcatatatgacatccagacaagagaaaacgtaattcatcattttcgttatctaacatacaagaatcaaaacaagatttcacattaacaaagataaagtgtacatagttgaggaaaataaaggtaaagataaagtgtagacaatattcaaaagggtggttgtccaacaatgttaccaggaggatcatagttacaaataataaatgtgtcaccggtcttgcaaaaactgattgcacacccaatcctcgaactcttcttccatacaagttgcgtgtaatgcaaacaatccccattcgccttgcagtgggaagtcctccggtcatagtatttcatctccgaggcccatgcagccaccgcatcccgtggagtccaaccttttccgcttccccagaagagattctccccgtaaggtcccccggagtggataagtttgcaatctccacggcgggttctggcccaccggctcgcatagagggcgaggctattgctccatttgagaggagggagacgaagcttggctcgtaagatgttgtgtggtcggagaaactgctgctgaatggtgttgcgggctagagctttgtcttgagaaaaaattagtgttgatgttgtcggtgttctgtttgatgggatttgaaaagagagagaaggaagtggagtgctgataactatgataatgatgatgaatatcagagttttttgttccattgggatgctaagttagatttgtttctgagcctctagatctagctagtacgatccttaccatatatatatacacacacacacataattgtttatgctttcatatttgtacgtatatatcatctaacgaatctaaacacatgctatgttaataatgcgcaatgacaagtgctaatcatttcggtggaacattgattatttgtagggaatgattttattcaaacaaagcatacattattgagctaattaatagatcattatatatgaaggaagttttaataggatgttttctttttttcttgtaagaagagactttatcatagcaacgagaatatatcccaagcataaaacattatatacaaactcattcaaatgaaaacctaagttagatatttaatttgaccactcttaaaatacttgtttagttataacatgtttactatgcagatttatgaggcgtatcagatggtgtgctagagaacgtgatacaaatttggatgccttgttttcaagaaatcttatacattccttggagatcaatttgtattgtgaggcttatagtcattgagcttaccgttgattaactaaatttatattatatagaacatcaaatagacgaaaaaaatcaatttagttgaccaccgtttgttagctaggttataaactctgacccaaagtgtcctatgctttcagtattcagtttattttataacgtgtggggtcgttttggaaacaattaaaacaataggggctatatttttctcaagttctgttggactgggcttgtcgttaatcaatatttgggcttttgaggttgactcgcttttttccgttcttcgttttccaaaatcaaacccaaaaggatttggaggagttaattcacctgacgaatccaccaccataatattaagcacatttgatctctcacttccttggtgcgagtgttttgttttccgagatccaaaatcttctcttggatccaaagctgtgttactgtggatctcctcctcctctctccctggatctcgtacctttgaggtttgtctctctgtgttaaacttgcgactcagatttcatagagatcgatcccacttttgccttttcctttgtgaaaatctacaatgttcaattattctctggcgctctttgtttgatctcgttgaatattgatctgattccggtaggaaaccgattttcatgtttgtgcagctgagtgagactgcgaattatgtagatttcattgtttgttcatctaatctggggagatagatcgcattttttttttttttgaattttggttgatccgaagctgttttaactgatttttcgtttttatgttattattttggtcgtagttgtagtacagtgatgtgtattgctggatctgaggatttagatttgtcaatgttttgcatctttgggtctctgattggacattaccgaatattcttctgaaattatgatgttttctcataaaccacggattcgagaatagagatcatgtattcaatgtattgaaatccaagcagagaggtatggattatcgccgatgatactgttgaacttcttgtatagaacttactctagcactgatgaggacactagtaaggtgcttatattcagtaattcgaacttgaaatcgccagaaatattaaaagttttgatatcttgtttttacttgtgatctatacttcattatgtctttaatcaattgtaacaattttgctctattcatcttctatttcttatattaacaaaggaacacttgttcgtgaatggtttttccttttcatttgagctcacagatttttttctctttcactttttgtgcagcaccggagaag

SEQ ID NO: 3906 - DNA, 3000 bp, Unknown; identical to SEQ ID NO: 3895
  misc_feature (1)..( 3000): cDNA_ID_2107309_gDNA_ID_1620673_Annot_ID_164155 3000 nt of promoter + ATG

SEQ ID NO: 3907 - DNA, 3000 bp, Unknown
  misc_feature (1)..( 3000): cDNA_ID_3072104_gDNA_ID_1620673_Annot_ID_164152 3000 nt of promoter + ATG
cttcttgtgaatctgtaatgttccttttcgttctttctcagtcagctggaaaatgaagcgaagcaaatgatgcagaccagcctatttgtagccagtgttcttggttttggacctctttcttctttttctttttgtttctacacataaattttattttaggtttgtcttgtgacattactcgcagcagtcgcagcctttgtacaaaaactaaacaaaaagcctttttgggatattgtagtacccttttgtcgttgtctcttctttgttttacatgcatctctggacaatgtagatattgagagtaaatcagaagtcaacgttcgtgtattaatttttaacatttctatttcagtgaacatactctttttaaagcttactcttattaccaagtagcaacacaacttggtcaaagactcaaaagtacatgaaatcatcatacaatccaacacttgagaacaagtggcacatacacagaaactaatatgggacgttattgggcaagtttcttatgacattactcttcactccgatcttggtacgcattgtctcgcctctcttgctcatctccttgcgcactttcatcctcaaagtctcctctttcgacggtactgtcttcagacccaggctcttgtacctgagaatttaccatttgttggaataaccttagtttaccttgccgattatctgattggatagactcggatgattaacgggtttggagaaaacaaaccttgaagataaagaggcaattatctggttgctgtcttgagaagttgggcgtggcttctgtctgtagtaacgcatgaattcacgggacccgagagttttagacgttgttgtgttctcggacttctccgtgatcaagagctcagaaccaccaacgagttctacagtattgtctgtttcaccagatacaacaatttgctttccagcttcatcaacatagctgctcaattcatatattccaaagaaaggtgcggattaagatttggcatagaacgaggaatacaggcgagaacaagaataatcagagatagaagagagttgaaacctgctgctgtagtcataaaactcttctagctcagcatcttcttcatcatcaccatcaccataatgcagtttgcaatgactctttgcttccatatgttttcttacagcttctaagctgctgaatggacggcacagctcattgcagtacagacacatgaagtctctcttgacctaaatgatgagcaatgtataagtaaacaggagtaagaatttcaaagcttgacaacaacgaacactgaatggtaaattgatgagtccaaaccttaagaccaaggtaagtgagaagcccttcaggatccttgagatactcaatatcgggaataaagaaaccatgatgcttatgcatgtgaagcatacagctctctaaggtcttatgttttttgtcacacatcaaacagcaggttggatccagctcatacttatctgcatcaccatcatcatccatatcttcagcagatccagactcattcacattcaacttagacaaagaatcagaggcttcttcagcagccaattcctcgtcagaatcaacctccacccattcatcttcactatcatcatcaatggaacccctgtgttgaacacggcgaggaagttgcctgataatcgctatatcctcctctccgttgattgatgtcccttgtgaaacccgcaaaacatggctacgcgactgaagatgctgctcatgagccttggaactcctgtaacctttagcacagattgcacaagtataaagcataggtgcttcatttgatttattcttctcctgagcaagagcagattgtctagcctcaaacaaggcttctgtaactccaggaactccagccacctaacataaaaaattacagaaatacaaagattcaaatgcctagaagtaaccaaatctatgattattgaaatccttgttccttagtagaataagcttcaaaacaaattttcatataaactctacgattccataaccttaactaaacaatttcgatagcaaaatggaaaagctgtttctcagaaactttcatctcatcaccgacgcaagattttcccgagaaacagataggcttgagttcaaattcgatagagaaagcagaagaaatgaaaccttgcgcttgagattgtagcggtgccaatcggatttgtaatgaaggttacgttcttcttcgtccttgaactccatgttacacgcgttacatgttaaaccaggcatcttctctccttcaatatcgatcgattctagaaatggaaactggagaagaaaagaaaatcagagaaaagatagttgggaggataagatttgttgttgatatgtgtagagcaacgacggctcgtaaatggatcggcgatcgtgtttgtctctaaaaaagcgtcgattgatgatgattgattgccatcaaaatgaaaaggaaggcgccccgcccattttagatccgatcgggttggaactgacccgttcctgacccgatacaagagtagcccatttggcccattcttttagcctttttgtaacactgacacagttgacgaattaagtattactgtatgagtaaccaaaaaacatttttctaatattgtttttaaaataactacttacaacttgattaattacttcgtttaatcatgtaacttttttttcttccaaattctaatctctctattaaattactgcatttataagatctaaacatcatgtgatatgttcaaaatatgaaaagagaagaatataatacatgattttactacgattaattttttttaatcgcaatgttttgtttttgcctaattttattagtggaagaaattttaaccgcaggcctgtaatttaggaaactaactattcacccccaattaaaaaaaaaaacaagaagacgacaaataacgagaaattaccaatttttcctcaacactttcattatttcctacaacgaacttctccctcctcctctcactttcacc

SEQ ID NO: 3908 - DNA, 3000 bp, Unknown
  misc_feature (1)..( 3000): cDNA_ID_2173338_gDNA_ID_1620673_Annot_ID_164147 3000 nt of promoter + ATG
ggatgaggaggaaaattctcgtccatcttccaagcagcgaggttgtgtcttcgtacggatcacttgagaagatcttgaagaatcttgggtgggagaggtactacagtggagacaataccgatcatctgctccagttccacaagagaacttcgatcgatctcatctctctccctcgtgacttctccaagtttaactctattcacatgtatgatatcgtcgtcaagaaccctaacgtcttccatgtccgtgacatgtagtagtcaatcatccaaaacaatggttcaatatcattctccgatcatcgccgctggtgatatatctatcatgtatatatatatgcaggtttttattttgtcgttgggtgtttttgtttttggtttattttgtttttaatgcatttaatgtacgtgttttccgttcgacgtcgatcgattggggtgggttcaagctagagccattctaataacttttatcattttgtgattttaatgaaattgtatcatgttgtcaagttctcttattatggagtggatcaaaaaatatatacagtacatcaaatttcgaatgttatatgatgaaatatcataatttggtctatgatttgcatttaaataatatgatgcgtggaatttatgtaaataatttaatcaaatatactcatggaatgcaaatatacctaacatgtgaagaaaatttgttctgtcaaaaattactattatatacagcttaattagcaatttaaacaaaaactactatatatacaagggccgatagattatacaaattttcatgaaaataaaaaataaatgtgttgtttttaaaaccccaataattatcacaaataaaaactacagttgcgtttttgtattttttcaaacaacagtctactagacgtaatttttttgataataatacataacttcaattgattgatcatccatcacatatttgagtatcgatgaagtaacatgggagattaataagttagaaactttaaagtcataatcatattatctaatcgtttaagtttttttttttttgaaaccgtctggctaaaaaaacagatatgtatacaaattaaaaccatatagatagatagatatagggtaaagatactggaatacaaatgatcaattttcaagtacgaccaaaatctaaagaaggaaagtcaaaaggtgtccaattagagaagggcccccaaatgtttgggaaagacaacggataaaatgatgggcgcacgtgacattcgctacttttttacccaactttcacacgtgtcgattccctattgctcattttcccactttgtcatagattcatatgatgggcgcacgtgacacataaaatactttttaagacgcaatgtgtgggcacgtgtcgattccccattgcccattacccccacttcgtcacttccttatcgatgtcgaacaaaactttctttttcccaaataaattcgcaccatattcgggacctctttttttttttttttttttgggattttattatatagtttgtatgattttggttttctttttcttttactcgcattatgggtctaagattctggagtgcttgatttctcaagtaatatgcaggtttaatttctgcccaaagattttcagatatccgatagtccaaaatcgtttatattggtttactaagttttctttaaacattcgatattagtaaagagacgtgactaagattttggctatatcaatagaaaatgaaaaagaagttttgggcctataaacgctgactatacacacatgcttctattagagtggttcttattgtaaattggagtatcaaactatgtagattgtgtctgtcgaagctcgcaagggttagaaaaatgattgtctcgtccagataaaagcattttcttacacaagacacgaaaatgtttgcgatcaaaacttcaaatgattaagcattttataatttaatttggataacggatacatttttccaggcaaaggtaacgattatgtttggaaaatctgaatcaagatgacatcatcgtgaacataattacattttaagacggagcagaacaacgagacaaactacgaatacattgaaaaaacatatgcagatcctgctgatttatgacaagaaattaactagtttttataatcacacatggaagtactatgactactacttctacatcatttttatagtaaaagtaggagatcaaattacatgagatggtaatggatcaaagcttaccaagttaacatgcatgaagtgatttatacgtgctattgagtatcagccatactcccgtttaaagtccagtaagctacctagcgttttatgcctcaattttgtgaaagttttatggcgtgatacttctacataatacgatgcaaaagagaattaacaatgtttgtgataaagtgtagctctagccatgaagaaaaactcatgaatggaagcaaagtaaagaagtcctgctaagtaatcgtttttttaggacaagagattcattaccatctcatgtcgccacccacactttgtaattgtagtggatcggatggtataacaactaagaatacgaacctatatataaaacgtatgttttcattagtgtattgttataaaacttatacatagatttgagtattcaattaccacacgaatatgtattgtttagttgcgaacaacgttgcacctttcgtggccacacaagactttccccgatcgcagcttcttctctgcttggcgccaaatactatcacgtatcttaacaaaccaacaaaaaaaaactgcgggatgtagaaagaaacaacaaaaagttttgggtcgatttgctacagaattacatttattgtggtctttttgaagataaagttcttttagttcttgtggttggtagtcaatttatttcattttcggaaattaatatttattttagttttttcgtccaacgtaaacgtatccactctttcgcttcttctttcttctgatcatcctcccgtagctgattc

SEQ ID NO: 3909 - DNA, 3000 bp, Unknown
  misc_feature (1)..( 3000): cDNA_ID_3072093_gDNA_ID_1620673_Annot_ID_164167 3000 nt of promoter + ATG
ttttctattgataaaatttgactgtttacttatttacaacaagaagttttcattttagaaacagtcttcacttggaaactttattaacctcaaattcacctaagtattctacacatattgtgaaaacaacaaataataatagtcattataattaaaatagcagtaatggtttgactaatgattttaaaagtccactagaacagcgattcatcaatacgacaaaggaaggtgaaaagctgactatttaaaatgttaaagtagtagtgctactaaattattgtaagaaaataaaaaataacgaatttacgattatttctttgaacataaagctatttgacgacctcggtaaccgggtggtcccattaactcttatatgaaccactggattttcgaaaggtcaatccaacggtggatctgtggatacaagtgttgactatgtttttatgattttatgagcctattaaaatctccagccagctattaagttcttgtcacgtgtcgacttttgttatcatgttccactattgaaattgtttcaaaaatgaatggaacagaaattaggcaaggcataaaattgagaaaaagggaaaaaaaatttatttagtgttttgatgaattatttttgtttgtagaatttttattaacgaatgattgaaaaataaaaaatatcggaaattgtatatagtgacataaaatgtactcgtatgtatcaacattatcttggatactagtccattggttacaaaaataaaatcttccaacttggattttaatcgtattcagtaattgtgattatcttagctggcaataattatattgtctctctatgttttggaaattaatctggacttcagcttaaaattcttaaattattaacaaaataaaaaatgaaaatagaacgtgttgagtgttcatgtaacgtgttttatggctatatatgggtggggaagaaaccatggattgttgttatttaaaacagtttcttatgtcaacgattaaattataacatggggtagttgacccgatcgaccgagttgtattattattgtcgtgcacgtctatattatctacatagttacaaaatctcaatgatcatccttttttctatgtctcaatcactcattgtgttataatatttctgagcatctctttttcttcccgatcaatatttgtttggttaacattagaataagataacaaatatatatttgtaagagaaaaaactaacatgtcaatgcggttttggaactagtctttcactaattttaaaagtaaacttgtttttgttctatacatgcggggtaaaatcgttccccgtattaaaactacaatgaaacataaaacaagataaaaaaaagtaagatgatttttagaaaactaaaaataaaataataaaattatgctcgtttttctctggttgtatttcgttccaataatttatattattattttctatcaagcaggtgcaagaaacgtgttcgttaaattgcatgttgatataaaaaaaaaattaaaaaaaaattgcatgttaattctatctctacgactctgcaacgttacgtactatttattttgtcgtattaataattgagtatattttgtacttcatgacaagaagttacataacaatttaacggataaaaaatattaattcaaataatcttgacataacaattatgttatttttttttaacaacaactcaaacaagttctttaaacaacaaatgttctgatcacaaatctcttttttttttttttttgtcaaggatgattataaatcttaaaattagaaataactacagagtttatatacagagaaatatgggatgataaaaaagactaatatttgtagtcctattagttttgtttcataagtcttaatctcacttcagttacagttaatacatgcatgatcaattctactatatatgcatatataatgcatgcatgttgtagagttgagggttatgacacaatgctatgcctattttacttgtactaattaaataaacattgaaagaaagctgtaaggaagaatatgtagataaaagacaaaaagtaaaatgagagtggaatccaatgtggacttcaactagatgtcatattttgtatttttctaatatcaatgtttaacgcatatttggatgtaacgttgggtgtcgaataattttgctttatattcttcactttaacgtctaaacatgaaccaagcacatggtggtcttggaagatgaactataaatatcaagaaaatgatgtataatgggtgatccaaaccaaagcacatataatctctagagttaaagtgggtcgaataatctctagagtttgtggaacgcatagtatctttgccatttaacgtacgtacgtatctagaaccaataatgataaaaactgtagtggattaattactcgaaactcaaaagtcttattcccaacatcaagataagtggtaaattttaatactggaataaaccattatcccacgaaagagaatattataaagtttatatattggttgactttgtgttaaataatgatgggattatattaagaaaaacttgttaaatgaatatcagaatcaataatcgtatcaattagacaacttgattaagatttgattctggtcagtaaaatatatgaaacatgctccatatgctatcatatcttcaataaaataaacgaattgaagacgagtatatcgctatcatggcaggttccaattagttatctccatcctcttttttgtttccacaaaggagccactttgtgttctttatttttgaaaatgtttgattggttaattaaccaagtgaagttgtaatactattatgcaagaattaattgcagcactctatgggtttcgtaatttggttaatagtttaatgggcctcgtacaagtcagcccattggatatatttcagattaatcgggtcgggtcacaaatgattatccttgttgccttgcctttgccaatcgtttgtttccaaaataaaaatc

SEQ ID NO: 3910 - DNA, 3000 bp, Unknown; identical to SEQ ID NO: 3909
  misc_feature (1)..( 3000): cDNA_ID_1024576_gDNA_ID_1620673_Annot_ID_48189 3000 nt of promoter + ATG

SEQ ID NO: 3911 - DNA, 3000 bp, Unknown
  misc_feature (1)..( 3000): cDNA_ID_3093332_gDNA_ID_1620674_Annot_ID_48191 3000 nt of promoter + ATG
gagaagatgatgaagttaacaatggtggaatagcgattcttcgacgacgatgatggcgaggtttgtttctgtgtcgtcttgtcagtttcatttcggcttccgtgaggtttctcctccgtcggtaacttcttatcctagacgattcgaggtaaattcttgtcatgtgttttcttcagtgacagtagtgtgtgatcggtcatttgaagtcagatgttctgaattaggtctctgatcggagatttcctgcgattccgattaaatgttcttcatctgagccggaaaacggtgaggattcggcaccgtcgctgtcttcctcctcctcatcgtctacaagtgaagtatctactagtaacagttcgacatacaactggtacaccggaatcggcggtattgggatgttagacactgcgtatttgacttacctcaaggtcactggctccgatgcgttttgccctattggtggtggcacttgcggtgatgtcctcaacagcgattatgccgtcgttttcggtattatccatcgctttattgattatagcgtttgatttatgtagctaattgtcctctcttttatagtaggcatgattaaatactcgcatgtgatagtctctgtgaatctttgcttgaagctatatcatttaggagctttggtacttagtatgcatagaattgttagagttaaatagcatgcttcactccactctatgtagtgctttgtcttcgttgtttgtccaacattgcattgcaggtaagttgaactcaatgaaaatccttttttacattttgccaggtgttcctcttccagtgattggatttgttatgtatggcgtagtaaccgctctaagtgcagagcttggggaagggaatctaccttttggaatcagtaagagcaatgggcgtttcgcgttatttgggatcacgactgcaatggcatctgctagtgcatatttcctgtatatccttagcacaaaactctcaggatcatcatgcctgtattgtctggtgtctgctttcttatcatttagtctatttttcctctctgtaaaggtatccctttatttccatttctttttttttcctgatgttgactcaagataacttctaaacttcggattatgataatgtgctccatgcatgtggtaggatgtgaagttgcaagaaatacagcaagttgtaggattgcagatatgcttagcaatcatagtagttgcctccttgactgcttcttacagtactgctcaaccaatcccttcacggtaatcaaagttcatagttttctttggggagtcccgatagaaattttagtcatttgtaacgagtagtgaacaaatagcttccgaaagatgtatgagtcttatcaggtggtctcttttaatcccgatcgttttttgtttcactccttccagctctggtgacattgaactgccatattttagaacagagatcagttcatcatcgagcccttatgctattgctttagcaaaacatctaaactccattggagctaaaatgtatggggcattctggtgttctcactgcttagagcaaaaagaggtagttagttcattcatcacctgtttgccaagaatcagttttatgcttttattatatgttcattatagttccatccatctacagatgtttggaagagaagcggcaaaagaactgaactacgtggaatgttttccggatggatataagaaaggaactaagatactcaaggcatgtgcagatgctgcgatcgaaggattcccaacatggataataaatgataaggtgagtaaatcctctgaaccccttgtacatttcatcacatgtcagtacctatttcacctcttttataaattaggtcttaagcggagaaatagaactcgctgaactagcggagatgactggattcagccttgatcaggcaaatgagaccaatcaacttcagtaaattttgtattggtgcagaaaatattaaggtgaatccgtaaatgttgtttacttgatcctcctgatagctatagggtgttctatacaaattcaagtaatgaaagtgcttattgttgccataggaggttacaacttcatctgtatcacttagcctacaccagagcatcactattttataattgaaagattcataggttcttccaaagaatgttagggtactattaattcgagaatctacagccatctagtactggctttatgtaagtataatgtctaaaagtatggtctatataagagagtcacacatgtattttgtatatatatgcgtgtagagtagtagcagatatatgatgtatgggaaacttagagaattacgtttacaatatttggtgccctattgaataccttccttgaatgtgcctcctcggtatttttctattgtaatgatccatccacaagtttcgctgttattatccgtttaatatgcagaagataatgtttttccttatattttttaaaagattccattgggcattggatagatatgaacatagagatctttataatctttaataatttgtaagctcagattagtttaactcaacatcggatgggatgatccaaaataacgcccatcttatccaataatctacatgaatcatgtgatgagacgtaacgcttaaggcggggggcgggaaaagagtcaaaaaaggcagtagccgttagatgtagcaaaaacggatggaccagattagttgcttaacaacgaaagatcaagagagggcgaaaaaggtaataattattggaatgtaggacccacaaagaggtgaggaagatcatgataaaaaggaagatgctatagaatattcgtaagagcccgtcgtttctcccattaccctccaattaatacactattttttttatttttttgtctttccctttttaaaatgatcatcatcttcttcttcactcgcctcaatttttgttcccttcttcttctataattcaactgtgaatttcaccgacgaaacaaaaaagagagagagagagagagaaacgatg

SEQ ID NO: 3912 - DNA, 3000 bp, Unknown
  misc_feature (1)..( 3000): cDNA_ID_2999332_gDNA_ID_1620674_Annot_ID_48193 3000 nt of promoter + ATG
tgattcatgtagattattggataagatgggcgttattttggatcatcccatccgatgttgagttaaactaatctgagcttacaaattattaaagattataaagatctctatgttcatatctatccaatgcccaatggaatcttttaaaaaatataaggaaaaacattatcttctgcatattaaacggataataacagcgaaacttgtggatggatcattacaatagaaaaataccgaggaggcacattcaaggaaggtattcaatagggcaccaaatattgtaaacgtaattctctaagtttcccatacatcatatatctgctactactctacacgcatatatatacaaaatacatgtgtgactctcttatatagaccatacttttagacattatacttacataaagccagtactagatggctgtagattctcgaattaatagtaccctaacattctttggaagaacctatgaatctttcaattataaaatagtgatgctctggtgtaggctaagtgatacagatgaagttgtaacctcctatggcaacaataagcactttcattacttgaatttgtatagaacaccctatagctatcaggaggatcaagtaaacaacatttacggattcaccttaatattttctgcaccaatacaaaatttactgaagttgattggtctcatttgcctgatcaaggctgaatccagtcatctccgctagttcagcgagttctatttctccgcttaagacctaatttataaaagaggtgaaataggtactgacatgtgatgaaatgtacaaggggttcagaggatttactcaccttatcatttattatccatgttgggaatccttcgatcgcagcatctgcacatgccttgagtatcttagttcctttcttatatccatccggaaaacattccacgtagttcagttcttttgccgcttctcttccaaacatctgtagatggatggaactataatgaacatataataaaagcataaaactgattcttggcaaacaggtgatgaatgaactaactacctctttttgctctaagcagtgagaacaccagaatgccccatacattttagctccaatggagtttagatgttttgctaaagcaatagcataagggctcgatgatgaactgatctctgttctaaaatatggcagttcaatgtcaccagagctggaaggagtgaaacaaaaaacgatcgggattaaaagagaccacctgataagactcatacatctttcggaagctatttgttcactactcgttacaaatgactaaaatttctatcgggactccccaaagaaaactatgaactttgattaccgtgaagggattggttgagcagtactgtaagaagcagtcaaggaggcaactactatgattgctaagcatatctgcaatcctacaacttgctgtatttcttgcaacttcacatcctaccacatgcatggagcacattatcataatccgaagtttagaagttatcttgagtcaacatcaggaaaaaaaaagaaatggaaataaagggatacctttacagagaggaaaaatagactaaatgataagaaagcagacaccagacaatacaggcatgatgatcctgagagttttgtgctaaggatatacaggaaatatgcactagcagatgccattgcagtcgtgatcccaaataacgcgaaacgcccattgctcttactgattccaaaaggtagattcccttccccaagctctgcacttagagcggttactacgccatacataacaaatccaatcactggaagaggaacacctggcaaaatgtaaaaaaggattttcattgagttcaacttacctgcaatgcaatgttggacaaacaacgaagacaaagcactacatagagtggagtgaagcatgctatttaactctaacaattctatgcatactaagtaccaaagctcctaaatgatatagcttcaagcaaagattcacagagactatcacatgcgagtatttaatcatgcctactataaaagagaggacaattagctacataaatcaaacgctataatcaataaagcgatggataataccgaaaacgacggcataatcgctgttgaggacatcaccgcaagtgccaccaccaatagggcaaaacgcatcggagccagtgaccttgaggtaagtcaaatacgcagtgtctaacatcccaataccgccgattccggtgtaccagttgtatgtcgaactgttactagtagatacttcacttgtagacgatgaggaggaggaagacagcgacggtgccgaatcctcaccgttttccggctcagatgaagaacatttaatcggaatcgcaggaaatctccgatcagagacctaattcagaacatctgacttcaaatgaccgatcacacactactgtcactgaagaaaacacatgacaagaatttacctcgaatcgtctaggataagaagttaccgacggaggagaaacctcacggaagccgaaatgaaactgacaagacgacacagaaacaaacctcgccatcatcgtcgtcgaagaatcgctattccaccattgttaacttcatcatcttctctcctccgctccactatctcagccacttgtttcaatattgggcctaaacgaggcccaaatacgataatttggatccataattagtttatcacaattgggccttacggtcttcttatccgtccgagtcagcaagttatcctcttcaacacgactcacgaggcaccgagttggacttatcatgattcattatctacgcattgtttacattttggaatcgactttggtacataattgaatttatccatagaaatgatagagactcgaagatcggacataaaacttgctgacgtgacacccatacctttgtgtctgtatgtattatataaacgctatagaactaagagaagaagtatctaagtagcatcaaagcattctaaaagaagtttcaaagaagaagtgaaa

SEQ ID NO: 3913 - DNA, 3000 bp, Unknown
  misc_feature (1)..( 3000): cDNA_ID_1822424_gDNA_ID_1620674_Annot_ID_48194 3000 nt of promoter + ATG
agtcgagggaggcactatgatcgtgatgattacagagaccgtaggtcaccaagacgcgactattcacctcgtgatgaaagaaggtctagaagagatcggtcttactctcctcatggaagaagcccagagagaagatcagagagaaggtctgagaggtcagagagaaggtatgaaccccgtggctcgagatgacctgttttcatccttttgacaaaggattcaaaaacttctctgttgatttaggttgtgtaattgatcatccttaaaatagcacaaagattctgtcaggcaacgctttgggtttcatttattttctgttgttaacgtgttattctgtcggaactctctgaagtgaaaactaaaaactgtaatagcttctctgttatgtctctactctacttgtttttgaatgaatcagaatatcttatgtgattagaatctttagattgttcgcaattttttgttaaacaaaaaggtggagataccaaattaaagcttgaaagttgaaacttaactaaaaacaaaaccccaagttgtgaccagagacaaaaataatcaatcgtatatacttgtttaattatcgaatactaacacaaacctcatcaagaattggcgtatttgtgccaacaaagcaacataagaatacatcttctagctatataaaacctagaacgtctctccttcaccatggctaaacatcctttattcctcctctccattgattctctgcaacattcttcttcccttttcctctttctcctcatctttgtcgccgatgagcattgccccataattgttctcttctctttgattacttcgtttcttcacacttttacgttattgctctttttgtgctctacggagagatgatttttcgttataaaagacaaatggaagaagaagaagaagaagcaatattaaagggaccaaatgtgaaaagagtggagaggaaaaataaaatgaaaaaagactataaatagaggagtggtggagcaatgatgatgcgatgacgttcaacatcattaagttctttcatttatttacgtattcgtaaagaaaatatattatttcattttgcatatgtacttacgcgattaaacaattccacattactacgctttatcattgttacttaaatcgtttattagtggaataattgtctttgtgtctaataccataaaagatagtactaaagtcttcatatgactagatcatcccttccgttttttaacgttaattcgtatgttacatttcaaatcatttattgtggcttattaaagatatactataatgtaaggatcggagaactaatggtgatcatgtaatgaaagacaaaacattgtcacatatattgtaattatttttggttttcgttattaattaattgttagtatcttccggattttgattcataaaccaaccaaaaacgcgtctcaggtggttttagcgtacccgacgttgcaactggcttatctttttcctacacgtgtcttcctctggttggtattatatcatacgtgtaaaatggacttttaccttaattaaccgcatcttatggtcatcaattcatttcttaagctacttttttaatttatttgtatgacttttcttatcgttacttatttgattaaacctttcttacgccatttttttttctcgacaagtatgttgcatgaattcatattggagaaaaattaaagatcaaataggattgaaattgtttggtaaaccgcatccaaaaccgcaccgcaacagtgctgtaacagtatcaaaatctctacatatacatatgtatctatgtattttcgttactatttgaaccgcactgcactttttccgcaccgcaaaatgcagtcaccattcggaccctaagtttagttataagaagggcttcttcgtaaacgcaaaagcaacgtacgtcagcatgaactggtggaagagaataaagtatctggaagaagagaaggcagtagtgaccaatcattggtacttgattggtttacgccacgtcatcacactttcctttcacagctgtataatattcccctcttcttgttttttcttgacaaaaagaataaaaatcatttttttcattttcttatttttatttcggctgatcatttttccagtttctggatacattttatgattttaattaccgaaccagatatgggatatggttataagcgtcgtcatatggatattgttgtcgccattttcattttgtctttaactttgcgaacgttgcccacttgccactttatttacttgtgttaaagtgtgtaaaataccaacaccaagcaaatatgggccacaaggcccgacaaaaatgatctgttgcgttaggattgaaatttgaaaggcctattatcatttaggctcactcgtacctcgtacgtattgctattgcctattggttgtaacaagatcaacttttatgtaattaccaatattaaacttatagtgttatacaacaaatagtgaaataaaaacaaacatgtccattaatatgtcatcatatttgtatcataagtagcaaaacataaaaaaaaatatatataaaaaagtcatcaccatccaccatcatctccttttctttttgcttcataaacatgaaaaccaccatacatttatctcgaagccaaaaaagcaaaactgtccattatccatttaaagcattacaataactaaaaaaataagagtattctcgtgacccacactcatatggaccctacataatgacgtggatgagtcctacgtgttacacaacgaaacgttcatgtcctccctggctttcaacccaaactcatacattacaccctctctctctcttctcttcaatttccgtcttctcactctctaatcttttcgcctttagttgaatctctgggatcattctacctttttgtggatttaggatcgaagaagagatcactcctactgttgaattctggttttacttgagagagtttttcaattctgatctgctgttttgcgatg

SEQ ID NO: 3914 - DNA, 3000 bp, Unknown
  misc_feature (1)..( 3000): cDNA_ID_1822420_gDNA_ID_1620674_Annot_ID_48195 3000 nt of promoter + ATG
gatacagaaggtgtgaacctcttagctgtcatgtgtcacgaagatgtggatccaaagaggacaacaagcaatcacttgattgaaattattgaagttctcggaattgaggcagttcgtcgtgctttgcttgatgaactccgtgttgtgatatcctttgatggttcttatgtgaattaccgtcatcttgccatcttgtgtgatactatgacctatcgcggtcatctgatggctatcactcgacacggtatcaatagaaatgacactgggcctctgatgagatgctcttttgaagaaacagttgatattctgctagatgctgcggcttatgctgagacagactgcttacggggtgttactgagaatataatgttgggtcaacttgcaccaattgggacaggagattgtgagttgtatctgaatgatgagatgctgaagaatgcaattgaacttcagctccctagctatatggatggtcttgaatttggaatgactcctgctcgttcaccagtgtcaggcactccttaccatgaaggcatgatgtctccaaactacctgttaagtccaaatatgcgtttatccccaatgtcagatgcacagttttctccatatgttggtggaatggccttttcgccttcttcttctccaggatatagtccatcatcgcctggatacagtcctacttctcccggttacagtccaacttcgcctggatatagcccgacttctcccggttacagtccaacttcgcctacctacagtcccagttctcctggctatagcccaacaagccctgcttattctcctacaagtccttcctattctcctacctctccgagctacagcccaacgtctccaagctatagcccaacgtcgccaagctacagcccgacatctccgagctacagtcctacttccccaagttacagcccgacttcgcctgcttacagcccgacttcacctgcttacagcccaacttcaccagcatacagcccaacctctccttcttacagcccaacttcaccttcttacagcccaacatcgccttcttacagccctacttcaccatcttacagcccaacatctccgtcttacagccctacttcacccgcatatagccccacatctcctggctacagccctacttcaccaagttacagtccaacatcaccaagctacggtcctacgtctccaagctacaaccctcagtctgctaaatatagcccatctatagcttactctcctagcaatgcaagactatcaccagctagcccctacagtcctacatctcccaactacaggtaagtagtaatatcttaatttttacactttctatgaagcttctcttatctgttgtggtgatattgtgtcatcttctctaatcgttaactcttattaaaaatttactctgcagcccgacatctccatcatactcacccacatctccatcttattcaccttcaagtccaacatacagtcccagcaggtttgacttttacccgcttgaaaatcttggatctgttgtaatgcatccatctcaattgaattccgcaaaaagtttaactgggttgttgttattaaatctgtctcagcccatacagctcaggagcaagcccagactacagcccaagcgcaggctactcgccaacacttcccggttattcaccgtcatcaacgggtcagtataccccacatgagggcgataaaaaggacaagactggaaaaaaagatgccagtaaggatgataaaggcaacccttgaaagagagtgagaattggcaatccatgttttaggtaacgtctaaatctcttggaaccattggggtttacaagtcttactagctcacgaacttagccacttgggatatcgtgtaacccgcaggtcatgatttaagagacagtgaaagctgagaaaaggaagggaccgtttcaaagtgatcttctgtggataactttgtgaacaaggttttcttaatagatccttttttcgtgagttgtatattattccaaactgatccataaatccatccaatcctcatcccccaaaaagaaaatagtataaacatagaaaaacgaaaacatatcagactttgggcttttcgtatggtttagtttttggctttttgctgtgttgttctatttcagaaagtaaacatgtgaaacggttcatttgtaatccatgaaaggattctttatgttactgctgttgcttcattgagtagatacgaatcgagaatgccttttttccttgtttccgacaattatcgattgacgtgtgaccactttaaaagtttaaacagctcgactttccaatatgggtttatttcttgttttatccacaccattaaagaatggtttttgggatttttatttatgtgataattaatcatttttccaaattttattttgtatataataaatgaagcaaatgttggaaaactatccaatggatgtggtgggttaatatcaccagattcgcatagctggtttttgacttgtcttcttaattatttgtccagaaaaagagaagaactcttcacatcatcattgtcaactttagcattattgtattagctttttatttctttacgtctacaaagctattggtacaacgttctaaaatcaaattcgtcatcagtagattttgtaaactaattaagtaaagttcagtgattaaagaagctagatgaagaacgtgtgcaacgactcctctgagatctacacggaataatgtcgtcagtgagcaaacaactcccatcacgtcgtccctccacctgtcctctcttctccttccttgcttgtctttctctctcaaatcatttcacctaaaaataataaatatctttcgttttctaaagaaaaaaaaaaaaaaaacttttcaaattcatctttggtttctgcagcagcaacaacaaccgagccctgttcgttagggttttcggtttttgttagcttttcttcttcttcttcttcgtttccttccacctgaattgttgtaaccatg

SEQ ID NO: 3915 - DNA, 3000 bp, Unknown
  misc_feature (1)..( 3000): cDNA_ID_1822416_gDNA_ID_1620674_Annot_ID_48196 3000 nt of promoter + ATG
tgtatgcaggtgtatatcttgtgtttatcagtggattaaatacatttgcagctaggtaaaatatctcaacagtagattgttggaaagagttcaactcataagtgtggtgtggaataaaacaattatcgtacttgaaatagtctaactactcaactgtatatttatttgtttgttgaatataccgcaagataataaaattttaacagtgtttttttttttccttcatactaaacacgacaaaaggaaaaaagttcgtgtacataattatatattatgtgtatcaataagattttaacttaaatgccataacgtgattttgttggtgtagcgtttgagagctcctgagagacgtatcaggatgaaattgacaatgatacacacatattagtacatgttggtgagatcatagagacctgccaaagacgacagaaacattgaaacaatcttgagacaatacaaagctttcatcactaaagtgaggtttaagagctttacatcttcaaaagctatctatcttcttttttattcaagtcaattgtactcgtgaacgtgaaaccatttagttgatgaccacttgtttcctttgatcactggacaaccacctataccaatcagaaaagattttgagaggtttggtttcagatatcaaatgggttccttgagatttaaaaaagtttcaagaaagacacaccatgcaaactagaagggtctagagacgcgtcaggcttcatgctccagaagagtaaagcgtctctcttctttggcagaacagagagtccttctttaccacattgtgagagctcgtcccaccatgggacatcactaacgtttcctttggctgcagggaaaactgtttctccgccttcatcgacatccgagctaataagtacaaatcaaagaaagaagattaacaaacacattgtggctaataagaaagattattgtaagggtttaaaggctacacacaggtacattagtactgtagcaattcgttgccctcctttcctgacattgaactcatcaaagaaatagtcatggtgaggctcatatctctgcccaacttcataatgaagaacttgcagcccctctccattttctgtaattccattacattaactccacaatgagttccaagacagagaaaccgatataaacattacctggaggaatgaaggtgaaatctgaaatcctattctcaatctcttccactatttcgtcatgtcctctgttaagaaaagttcctgaactggttcgtactctgcataacgaaggatttgcaaatttagaattctcgaatctttccaaattaagctgaaaggtaaaaacaacaacactagttagagtacagaacctgctgtcgatgctctttccggttttcacatcaaccacctttgatttcatcatactaggtttcgcaaggctaatcaagtgctcacattcttcatttgtcttacaaaatttacagaaacagagcatataaattccacacctttgttagcttgtctgacaagaaacacttaaaaactatatgaactaactagcatgaagatgttaaattgtgattacgcataaaacaaaatcttgataagaaattaatccgaaaaagttaccaagaagttgtggtaaacaaaagctctaggctcccaggagataacttccagccagcggtcaccattaccgtcttcttcgtctccaaaactctcccttaataaattcaaaaactattacgtaacaacaagcaaaaacacaaaacatcagagaatcatatccctaacctctcctggatcgtttgtacaatggtggtcaaatccatcggcatagaagaggtcttgttggtgctgggtagtgaaaagattccgagaccgacaaggatcaaaatgacaaagagtacaagtacgacaactgtgaaagtttgcgtcgaaaaagatttacgcggcttgttacggagctgcttcggtttcttcgccatttttgtttgatgatctagatagtttgaagaatcctattgagcgatcttaatcaaaagaacaaaagaagttataacgaaaacatgcatttgaagataaaagctataaagtataaataattttctttcttttttcgttgttttgtttttgtatcagcgtgtgtgttatatacataacaaagtgggcttcacataacttgagactatgcctccgtacgtgtaatatttatttgttagttttccgtattataataatgggttcaccctactttgctagagtagaagaataatttcattttattaactcccaactcattcattactcacttttgggatattgaagaagttaggtatttactattccgaagatgaaatgaagataattaatcgtttcaatctaaattacacattagatttcttttagcgtagggactcctcttcctttagagcttcggccactagcagttaaaactttaatggttcagatttttcagtccactttaccaaacatggtgaaataagggaactattatcgttttgctcttttaagaagaaatctatttgacggaaaataagaagaaatcttatttttgatatatcggtttgaccaactgaaccgatataaaccaatcttactagcattcttcgttacaacacgtttctttggtcagtgccgacgcaggcccgttaatccgtttaactgggcctgagacagttacagcccaattaaccagaacagacctttgagccgcctatttttctataaatagaggcttagggcatggatcgtgtttcttttgctcattcatctctcctcgtgaagagacgagagaattccagatctggtcgtgtcaaaacccagagagggaaaaaaaaaacggaaaaaagtttagctcaagtaactgtaaactactgactcacagattcaaacaaattggcaaaagagggtttaattaatttttgattccccttttaattcacgttctagggttttcgatttttgattcgtctttgatcggagcttagccgccatg

SEQ ID NO: 3916 - DNA, 3000 bp, Unknown
  misc_feature (1)..( 3000): cDNA_ID_1822408_gDNA_ID_1620674_Annot_ID_48198 3000 nt of promoter + ATG
cagttaaacggattaacgggcctgcgtcggcactgaccaaagaaacgtgttgtaacgaagaatgctagtaagattggtttatatcggttcagttggtcaaaccgatatatcaaaaataagatttcttcttattttccgtcaaatagatttcttcttaaaagagcaaaacgataatagttcccttatttcaccatgtttggtaaagtggactgaaaaatctgaaccattaaagttttaactgctagtggccgaagctctaaaggaagaggagtccctacgctaaaagaaatctaatgtgtaatttagattgaaacgattaattatcttcatttcatcttcggaatagtaaatacctaacttcttcaatatcccaaaagtgagtaatgaatgagttgggagttaataaaatgaaattattcttctactctagcaaagtagggtgaacccattattataatacggaaaactaacaaataaatattacacgtacggaggcatagtctcaagttatgtgaagcccactttgttatgtatataacacacacgctgatacaaaaacaaaacaacgaaaaaagaaagaaaattatttatactttatagcttttatcttcaaatgcatgttttcgttataacttcttttgttcttttgattaagatcgctcaataggattcttcaaactatctagatcatcaaacaaaaatggcgaagaaaccgaagcagctccgtaacaagccgcgtaaatctttttcgacgcaaactttcacagttgtcgtacttgtactctttgtcattttgatccttgtcggtctcggaatcttttcactacccagcaccaacaagacctcttctatgccgatggatttgaccaccattgtacaaacgatccaggagaggttagggatatgattctctgatgttttgtgtttttgcttgttgttacgtaatagtttttgaatttattaagggagagttttggagacgaagaagacggtaatggtgaccgctggctggaagttatctcctgggagcctagagcttttgtttaccacaacttcttggtaactttttcggattaatttcttatcaagattttgttttatgcgtaatcacaatttaacatcttcatgctagttagttcatatagtttttaagtgtttcttgtcagacaagctaacaaaggtgtggaatttatatgctctgtttctgtaaattttgtaagacaaatgaagaatgtgagcacttgattagccttgcgaaacctagtatgatgaaatcaaaggtggttgatgtgaaaaccggaaagagcatcgacagcaggttctgtactctaactagtgttgttgtttttacctttcagcttaatttggaaagattcgagaattctaaatttgcaaatccttcgttatgcagagtacgaaccagttcaggaacttttcttaacagaggacatgacgaaatagtggaagagattgagaataggatttcagatttcaccttcattcctccaggtaatgtttatatcggtttctctgtcttggaactcattgtggagttaatgtaatggaattacagaaaatggagaggggctgcaagttcttcattatgaagttgggcagagatatgagcctcaccatgactatttctttgatgagttcaatgtcaggaaaggagggcaacgaattgctacagtactaatgtacctgtgtgtagcctttaaacccttacaataatctttcttattagccacaatgtgtttgttaatcttctttctttgatttgtacttattagctcggatgtcgatgaaggcggagaaacagttttccctgcagccaaaggaaacgttagtgatgtcccatggtgggacgagctctcacaatgtggtaaagaaggactctctgttctgccaaagaagagagacgctttactcttctggagcatgaagcctgacgcgtctctagacccttctagtttgcatggtgtgtctttcttgaaacttttttaaatctcaaggaacccatttgatatctgaaaccaaacctctcaaaatcttttctgattggtataggtggttgtccagtgatcaaaggaaacaagtggtcatcaactaaatggtttcacgttcacgagtacaattgacttgaataaaaaagaagatagatagcttttgaagatgtaaagctcttaaacctcactttagtgatgaaagctttgtattgtctcaagattgtttcaatgtttctgtcgtctttggcaggtctctatgatctcaccaacatgtactaatatgtgtgtatcattgtcaatttcatcctgatacgtctctcaggagctctcaaacgctacaccaacaaaatcacgttatggcatttaagttaaaatcttattgatacacataatatataattatgtacacgaacttttttccttttgtcgtgtttagtatgaaggaaaaaaaaaaacactgttaaaattttattatcttgcggtatattcaacaaacaaataaatatacagttgagtagttagactatttcaagtacgataattgttttattccacaccacacttatgagttgaactctttccaacaatctactgttgagatattttacctagctgcaaatgtatttaatccactgataaacacaagatatacacctgcatacatgaggtgaagagtcatcatttataaaattgaccaaaaccataatgataacaaaaatgaaaattaaaataacttgccgacaggtgtcactctattacttgctgacattcattattagttttttttccaatgattttcatattctagttgtattgatttatttatttttgttctttggacttgtataaaaggaggatcagacggcaaaaaaatatatattagagtttgtattttatgaactcacacaattcataaaaggaaaaccctagattcgtgttctctctaagttttgttacgagttcatgtatattttctgactcacttgtgaacgca

SEQ ID NO: 3917 - DNA, 3000 bp, Unknown
  misc_feature (1)..( 3000): cDNA_ID_1822404_gDNA_ID_1620674_Annot_ID_48199 3000 nt of promoter + ATG
ggttttgcttagcccttaagagagaagatccgatgtctggcctacttgcaattaagttttttaacctcaagtaggtgaagtaaaatctagggtttgcctgtcatgatctatgttgaaaacaccactaatttttttttaatcatttcaatgctcgaaagatagaagcagagagttataaagaaaaggttatttatagtttaataaaataacttcttcgttttttacataaatttttaaaatgtgttagattttaattataagaaaactacgggagatatttagattgtctgaataataccaaaatatggtagggtcgatcattttcgaatcatacaagcaatcagaagaaacaattagatacgaaacagaaataatttctatacatgttaactatttgaggaaatctcaaaatcttattttgattcttcctttccttttatagtaagaaccttaatatgagcaatactttattgttataccaaactaaaatgggtacggtgagactttgttattgtgctattacgtgcgagaagctgaatgattacccttaccgtttctgtataattgtattccaagactctgtgtttttcgatctctacagtggtaagccgattaattaatcatttcaagagataattagttgcagcgtatgtctcatctaatgagtatttgcatgatcggatcatttatataactttgaaattttcatatttctttatttagtcaaaataataataataatattgttgatatgtaaaatttcaaaagatggacagaaataatgacatatagtatttatgtttactgaatatatttgacaaggctctatgacgattttttttaacatactgtatttcttaaaaatatctatctaccttagatagttgacatgataaaaaaaaaatatatatctaccccaatatatttcacctgtattttaatttatagacattatggggcaattaatggtccagaagctggtcccatgagtgattaaattgaaatctaagcatttgcatgatatatagttacgtgtcacttacatacatgtcttgtattgtttagtttcactgctgagagtgagtttctctatgtactgtaatgaacttggccgatcgtgttttactagtttttctcttgaaagaaaaattcgtattactggtacttggactaaaatttggtctccacaccactctcctctaatcattttacaaacaattctatatttgagagaggatattattgaacatgatacaaattaaataatattttatgagtacgtatttgcatcttgtgagaaagaattaagtgttttctaagggaaatattaacaatgggtaagtgaaagtaacagaatgttttacctataaggatgtataataatataaagagagaggaaaagaaaaagccaaatagacaaagaagatataattatgattggtaggttatctacatgctgaccaaagtcacatttttaccggtggtgcgtctttgtgttggcgtgattgataatttaacccggccaccacttgcatctgctccttaatttatttgtaattgtatggaagcatcatcaaatcaactccataaatataagatactttataagctttcgtccatattaaaataaacaattttttttttttataacttctttcttattgatattagcttaaaagatcgtataaacaaacttatatacgatcaaacaaactaaaaaagagagttctttatcaaaaacaaacaaactaaaaagagacgataaatgaaagagataacaatagtatgtaattgtccttacataaaaaaaaaatatgagccacgccaaatctaaaacgatttcgttaaacatatatagttctcgatatttatcaacaaagacgatgtaattcgtaatctatatacgtacatcttcttaacttttttaaaaatataaaaaggtgcttcagattcaagggactgaaactagtgaggtttcttaaaagcagatatatacactgaccacgttcaggttaatagttagtagatttttaggtggatagtaatatattgatggacaatatttaaatacagactataaaatttaagagacttgaagtgttcctaagagtaaatttaattatacattttaatcatggcctgaaaaactaaacaaggaggggtagaataattaatcatctcagcagctttccatctggacacaccattcagctaaacgacattgtttaatctctaaccaaactgggctagaccgaactgggtacaaagatgggttaaactgggctaggcccaaattaatcagaacataaatttcgaacggagcgacccatttccaaaataaaaaaatgttttttatatatatatatatatatatatattttttttttttttaaatcgttgcatgcaggttggtggcgatattttttggttttgtcaccaggtggtggtgaaataaacgacgatcattgaatatttttggtgtcttgtatatgtttgtgtcattgtgtgtatttttttttggtgtgttgtaacgacgatcattgattgtatatgtttgtcagaaattaaggtttttttaatcaatcaatgccatgtgaaattgagaaaccttgaagaaaattggattacataaaactagatactatagagaagaggcacatatcagattggtggattataagtttgtgaaaataaaatcatgattgaacagatataattcacttgatacaaaaaaaagcaaagaatggatattcacaaaaaaaaaaagttggataattaagaaaatagaatataaaataaaaataaaaatcaaacagccatcagttctgacgaaaagagcccaccacggatctgtcagatttatttccttcttacatataaaaaaaatctgaatcggctcaggctcgtgtagcctcaccaactccgcttataaactttctctcttctgaaaacagatctctctactttgcttcttcactcgacttgtatctatcatccatg

SEQ ID NO: 3918 - DNA, 2037 bp, Unknown
  misc_feature (1)..( 2037): cDNA_ID_3072158_gDNA_ID_1620674_Annot_ID_164213 3000 nt of promoter + ATG
ttcagagaatcacaatttagatagcattagagttccctaagcaactaaatcttttttattcttaacttgtttgaatcatggttaatgccacgttgtatattgacagactaaaagtttaagcagatatagtttggttagcgattgtatcagccgcaaacaagccaaatacacagagcagagcagcaacattgtactactaagtttcaaaaccaacaaagacactaatttatgtgacaagtagagagatacagtgagattgagaacttacagacaagtccagtattatcaatgttgtatcgattagatatctcgaagtcattgagatcactacaattatccactctttgtctgcatatattttaaagaagctcttaggagtggcaaatctatcgaacaaaacataacattgtttcatttgatgaaaacttcagatcaaaatcctaacgttagatagagtttgggagagccagtgatgggaagtgtgtagcaaacggatgcttcacgagacttatccgattgaggagaagagtccaccacttgacaaggaatcaagttgaatccttgagttgctttccttgaaatccgtttggtctcagtttgagattgagaatctgaggaaaattgaaagatgatccattagctatgcgaatgtgtgaaatcgaaaagtggatgcaggaaggagaaggagtaggggagtatcaaccagatctacggagaagcgcttggcgaagaattttccatctaagagcagaggaagaagaagaagtgggatccattgaagaatcgttatagctttctccgccggaatctgaaatttctcttgcagactaaacagcaaaacagggaagatgacgatttcgcttcccggcgaactttagtttggtttttttgcctttttaacacagtactttttgggggtcaaacaaagtacagtgaaaattaaattgtcaactgtaaagtacagtaacatttagattctgatctcactgatgttaattattttaaaattgaggacttgttttgtaatttaatattaaaagtgacacaagatgacaacacaactgctataactcaaaagtcaaatgacaattgtcaagggataaaagctgtatgttagaaataaatcttattcactctttagatttggtgcacaattttttttaaaatctatagattttcttaatcttacttatttatacagttttaattactctaaaaactctattgattttttttttgacatctaaaactctattatttaattttcaaataattgtacttcatagagtgatatgagattatgcaattgatttcttcttaaacaaaatagaaaataacatgtgacagaatattatgtttttagtagacatatatttttatacaaaaaatagtataagtgttatatccctttaaatcttattcttatttttatacaagaaaaaattttcatcatcataattgattataccttttaatcattttttttgccttttatgttttctaatagaaaaaaaaaccaaagttttcctccatggtttaggtaagatcctactgttaaatagaatttcatttggcaaaacaaagtcaatacagattaccattatcatagtcaattacacatcttaattacttgaataattcttgtttagtgtgacactaaaaaaggtggcaaaacaataaacaaatgtacaatatacactcaacaaaaagaaattttggatataaacaaatttaatatttggataaagcgcgggaaaatctcctaaaatagttaaaaaaaaggttaaaccggcccggttcatagtcaaaaagtatgctcctcttgaaacacgcaacgcccacgtcttcctatctccgagactccgacagcaaggttacttaacagttaatcaaactagattcgctttcttccatcactaatcttctgactttttctatttctgccccaaatctttttcaaattcatataaataaccaaacacttgttcttcttcattcccccttcgtcttcctcctcctaaatcaccggcgataatg

SEQ ID NO: 3919 - DNA, 3000 bp, Unknown
  misc_feature (1)..( 3000): cDNA_ID_1824395_gDNA_ID_1620674_Annot_ID_164203 3000 nt of promoter + ATG
gtaattcctaatctaaattttccacagtttcagctgcttgcgaattggaaatggcttgtaattcctcaggctgtgagtcaggttgctatgaccgtgagaaagataatggaagtaagatagtggatgatgcagtatctggtggcggtaatcatgagagtgtctgcgtcaagtgtaaatgcaatgcgcctatgacatttggtgacggtggcttcgacgatggaagattctgcgcagattgttttaggaacaatgtctttgggaaattccgtcttgctgttacttctcatgctatgatcactccttcagataacgtccttgttgctttctctggcggatcatcttccaggttttgctctctttttttcctttagtttctgttttttgatatgttattgattggtgtctaaacgtagcaagtatgatgttagggtttctcttcaatttgtgcacgagttgcaaatcaaggctttgaagaattacgaggcgagtcgagatagatctttacctgtgtttggtgttggtgttgcttttgtggatgaaactgcagcttttcctgctctttccactgaaatgattgatgcaattgagtgggttcgatatactgtctcgtgtttgtctccacctgctaaggatctccatgttgttccagtcgaaagcatatttggttcagactctcttgacgcacgggatagacttctgaagctattagattctgttcctgacgatactggaaaagaagaccttctgctgcatctgaaaatgttatctttgcaaaaggtttggacattatattgcttttgtttctgtctgggaaagaaattcagatttggaaatatcttttgtttaatgttgtttgataaacctttttaggttgccgctgaaaatgggtacaatagattagtgttgggatcatgcacgtcgagaattgcttcccatgttcttacggctactgtcaaggtgtgttgcttagtgccctgacttgactcgtgtttcctctggcttagttattctatagattgcatcttagagtgagaacttcatgccagaaagcaatcaatggctaccttaaagaatgtagatattttggacttaaccaattacatctctaaaaattgaagttttggtgtaaagattttatttcagtacacaatgttttgtgtactttatttggacattccctttagactatgttctatcagaattgtgagttgaattgctttttcttgaaacagggacgaggttattcactatcagcagatattcagcatgttgatgctagatggaaggttcccattgtacttccacttcgagattgtgttcgactggaaataactagactctgccttttggatgggttcgtttattggctgcctagtctacattgtattgttatagtgaaccttattcttgcataatccaactattgagtgacgtcacatattctgggcagggcagacttaagactgtggagttggcttgtcgttctcaatgcggaatcaatgatttggtgtcttcatttgtcgctctgttgcaggttcagataatgttcatcttctgcatatgtttaagtgcatgcatggttacctgttactttgtttttactgattcatttgtctctgggttctgttgtgcaggaagaaaatccttcccgggaatgcacaattgtacggacagctgcgaagctgactccattttacttcaataaaattccggaaacagacgactctaatgtacctatggccactcagaggcgcctaaagagattcaatctcaaatatgatggatcaatgactactgaagctttctgtcctatctgcaatggcccgctaaatagatcagactcatcagagttggatacttttgaagaaggccaggaatctgatgtcctctatgctgcttgctgttcaagttgccggtttcaaatacttccacaggatggatcatctcttgagcaattcagttcatttctaccagatcacatgatttcccaagtgaaacatcaaaaagttgatagtcaagcttatctgaggtgagtagtatgcattaactctgatctcaaacttggattccttttccattcgttttacctacattattggtagttcatgtctctaggaagcatcagatttaaaacaaccaagatcaagactgagtgaaacactatttgagattcctaacattggtttccatttatttcagggagaaaattaaagactgtctgctcttggacgatgaagaggttgtctaaatctgcattcggatgcttgcacaaggtatgagaggaagtttaaatcctgtcatgcttatcaaggattattcctagaaacctaagatcatcttagtttaatgtcgatctgatatcatcgtagatgttaaaagtgtttttactcattcgttacaatgattgtctcaatgtgaagcaaaatcactgagcaattgaatgaagcatctacagttttacacatataatacaagaatcatgggaagtttacaatttgtaacacaagtagtaaacttgttaggggtgatgcgagaatcaagttttgtaatatttctatgcgcagaatcagagattcaggagcattaatctagagtgcaagtgatcaacatcttccaatagctggataagaaatctgtgtaaattctaaccaatgtcccatagacattataacacgaagcgcttaatgtttgatcaatttataaagtccgacggacgaatggtcaacaaattagaattgagggcatcaaacaagaactataaaatatagaggcttatatttgaaaattttctcccctagctagaataatatatacacattgaagggaccgtttgtgaaacataaaaattgaggggcatggttggaaacttttaaatttataggggcgttttgcgtttttactcaaaaagtccaaaactatcgctcaacgccggtcgattctaccggagatcggaaaaaaggaaaaagtccggagagagctaaagatcaaagctttagaatg

SEQ ID NO: 3920 - DNA, 3000 bp, Unknown
  misc_feature (1)..( 3000): cDNA_ID_2134143_gDNA_ID_1620674_Annot_ID_164201 3000 nt of promoter + ATG
attctttctccatgtgtttcggtcatgatggagttggaaggatcagttttggggacaagggtagttctgatcaggaagagacaccgtttaatctcaatccttcacagtaagtggtgattcacttatgcgctaaattggaaattctgttcctttgtggatggcacctttaagccgtggttaaattcattgttgcagtccaaactacaacatcacggtgactcgggtacgtgtggggactactttaatagatgatgagttcacagctctctttgacaccggtacatcatttacttatttggttgatccaatgtatacgacagtctctgagagtgtaagcatctaaacaccatcatattcgtgtttcttccgcatgatgctgagttttgataactctatgattcacattatcttcttcagttccattctcaggcccaagataagcgccattcaccggattcaaggattccatttgagtattgttatgacatgaggtatgagtttgtatctatccacgctcaatgtctatttttcattgtcactcaaatcttaacatttttcttgtaaacggtgtgattagcaatgacgcgaatgccagtttgataccgagtttaagcttaacaatgaaaggaaacagtcacttcaccatcaacgatcctataatcgtcatctctactgaggttatactctctgtctacttctttctctattgctccgtctcttcttcaaccaaatctgttatctgtgtgctgatactattagaatctctgcatttcctcagggcgaacttgtatattgcctggccattgtcaaaagctctgaactcaacattattgggcgtaagatcagtttttcttcctatcaatcatggaacatccgctaaataatgacattgtttactcttaatgaaacagaaaactacatgaccgggtatcgtgtagtattcgacagggagaaactcgtcttagcttggaaaaagtttgactgtaagtttcctcttacgtgtgttatatatcactaaaaccctctgtttcctaacttatgatctgtgaatatctcttaacgcaggttatgatatcgaagagacaaacacaactgttgccggaacaaacaaaacagcagcggtagctccagcaatggcagctggaataaagactcataacaattcctcagagctacacaaaacaaaccaaaccatctccaaaagtaactcctccccaaaccaaatatccaaaacagtagatgtatggtcttttttcagatttgtgttcatattacttccacttgtgtagatttgtaagccccatccaaaacacatgccaatagtattttttttgtatcataacgacactatagggattttttcaggaaatatatgctcttcatacgcatcttactatctttgcaaattctcgtcttttttctcttcaataatgaggtagttaaaccgagataaaccgaaccaaaagggaatttggctgtaatgttgaacgccgaatattctaaaggaaattaaatgggttccacattgataacctgcctcggcaagtggccaacgctcgacacttttacacgaccgagacaatgaatctttcattttttcgtcattttattctaaaattccaatattggttcgagtcttagatataatttttagtattggatttgaaaatacactcattaatcattgttaaatatactaaaatcactctgatagcattgtttagtatatcatcatatgataatgcatcgtttgtccatagttaaaagttaaaactgtattctataaactgtaaatcgtgtgataatgttaacatttacagactatgtatcaatttgattattaaaaagcaaccaacgactattatgaatatacagtagtttttggtgagtatgaatatacagtagtttgttaagatagttttgaacaaatccacatttttacgatcatatctcataataaccataaagccatatatacattgctatttatcatatccaatgactaaagtgaatattgttaaatatgctagtagtatttgttaacaaatttatcttatgcatatattaatattatatattagccttaacaacaaaaaaatctatgacttgattttttcccatatatactaattagaagattatgtaagaaataagaaaaaatggatactgtatccctgatttggaaaacagagattttaatccttctataaatattttcatttatttgcaatcttacaattacatatgttttatataatggtatatctattatagtataatataaattcaaaattaagtcgaaagttgaccacataacttagcgtttttctctcttcggaacttttttttttgtgtaatttaatttatacaggaaaattaatttaggggaaataaatgatttaattgtttgacctattttaagagaattaaaaaaagaaagatttttttatttttgtgaaaagattagatcaaatcttacatggtaattttctaatgtcaacgtcaacaatcctgccattagctttttggccaatcagattcatccaaccaaagaaaaacaaaagtgtgtttttttccttgtgtttacttcaagggtaatttagtaacttctaatatccgcggtagccaagtaaaaccaaaaccaaacgaaaaaaaaacaaatggaaagaacatataaaatcgaataaaaaataaaggagagagagagagagagaagagaagagaagaggagactacactgctccatcatcttctccttctggggatttttttttggaaaaatcgttctgttaccttttttttgcccattactcaaaccctaaccctaattttctgaaatcgcagagagagagagagagaggtttcttcgaattctttcatcatcaattcgctaactttgtttttttggggttaaatcgattaatcgttattttattagatactgtcgatcggagctaatcgactctctcttaacaaaccctaattttttggtcctctctc

SEQ ID NO: 3921 - DNA, 3000 bp, Unknown; identical to SEQ ID NO: 3911
  misc_feature (1)..( 3000): cDNA_ID_3093332_gDNA_ID_1620674_Annot_ID_164184 3000 nt of promoter + ATG

SEQ ID NO: 3922 - DNA, 3000 bp, Unknown
  misc_feature (1)..( 3000): cDNA_ID_2991529_gDNA_ID_1620674_Annot_ID_48202 3000 nt of promoter + ATG
ccagacactgttagatgccgctcaaacttggaaagatacgagagcgcagaagggattacaatgtacatactaacaaatatgaagacgttgggcaggaactgaaaaatcagagatccaatccagccagaagtttgcacccaagtgagccaatactgagcactatccaatgcttcagcattgaagattctcccggcacttaccaatgcactgatcaaggccaatggggagctgaaaaacacaagaatcaacagtagaatagtattaacaatcactcttcgcacaataagagcaacttttgtcaatcccagatgattccaataaatatcagtagccaagggtgctctgtccactttccactggtttctctgtaatcgcagctctgtgacagagaagaactttccagtacgccttgatctctcgtttcgaaaatcctgaacagccttattagctgtgtacacatccttaaacatcacaaaagcaaccccagcgccttgtgctcgtccttctttataagctgctaactgagactccaaatcagctctcagttcttgcagcttcctcagtttttcatcatctgtaaatccaaacctctctgtaatctgagaccacaaaaccttcaccctaacccacaaagaacacacacagaacactagtccgttatctccaacattctcatactcatccggtagaagcctagagtccatcttggcaactaaccaagtaatctcatctcgaacacgaaccaactctgtagcaagatcatccaaagcacacaaatccatgggaacaataaacttataaactttcccagggtacttcagcctaaagcaatcttcaaactcaactctatcagaccctaaattcttaggcaaaccctgcaccattatagtaaacacagcagtagaattcgcgttcgggtcactgatattcccattcccatctctaaacctagtaaacttcaacctagcttcaatagcagcgattccaaaatgcgagataacaacaacaataacaacaaacacaaaatgcagccaaagcaaagctgaacctttctgaatatgcgtaatcatcgttttcgaaagctcatcactcaacaaagcagtcccagcatataaattcaacggaagcataaccgaaacagctaaaacagcaatggagaaaagaagcacaaagcttccaccttcaattaaaagaaactgagcagcatcagcaccacagtgacgagcgatctcgcgacacgtggctttccaaacggcgaggagcttagagaagagagcagaaggaccaggcatacgacggtggtcgctgcgtagcttaacgaagagaaagatggagacgcagcataagagaccaatgaccgagatattaagcagatactgaatgttgccgtaccaagcatctgggatttcaggtaagtcgccggaagatggaggaggagagaatgaattatctattgtcattgatgaaatcggtggcatcgcagctggtgaaaaattgcgattcatcgcgaatttctcaaccaaattgagaaacccaaatcttcgaagtttcttcagagattcaggatttatacaacaaggttttgatcaggagaaatttgggggctttagggttagactttgggggaagtagatcgacgaagatgatggcaaaagtagaaaggtaaatagaaaaggaggaacaaggaatgctatcgcggtttcgaatctctcaaaagattcttctccttaaatcatgaaatttaatcccatctttttaagataaatacacccaaaaaaaacgaattaacacaactaaaaaatataaataatttgatagaagtatatcaaattggtaatttacagagtttttatgaataaaacgatagttctttaaacgataattacatattctctaaatatttcgtgattagtagaataagagaatataatcaaattcataactcttgtatattcattttaatcaaattctccttaaagcatgaaattaatcaaataatttgaaggtaaaatacccaaaaaaatacgaaataacataactaagatcggtttgagtttgggatgaaataacatcccctgttctctaatggatggaactctgtttcgaatttgcttctcgaatttgccattgtagactataagcatttgtaaggaactcatctctaatgtaggatttgagttcttcttatcttcccactagaacattcatcttaaacacagttatgtaatttccataagagatatgaaacagagcatactaccgtgataatccggacacaattgatattagtagccttgtatcaaggtacgtgtgtattccccatcatataataaaagaagcttttgctaatgcaaatttctggtaagttcacagttttgatgtgcaagttcttttgtatcatcaatttagcgattatggactgcgccatgcttcagatgaatagaaaaaagaaacttatgctggtctcgaaatccactaaccaagccattcaacatcaaagaaaaaagcccacattataaaaaaataaaaaagcccactttaaactatcaaatgcccaacaatggatgatgcactagtcgagtcagagtggacggagccaaaggcagagatggattttaagctttaatttgtttcccagatatttttcatctggtccctctgtttttaaataattaactaaaacgactataataattaataaattatactatagagtattttgtgtggatttttatttactgttgaaacttaaggatacaaaagaaaaacaattattcagataattcgtcattagatccctttaattttagtaattaagtaaaaagattataaaagatgagaaggagaagatagcttcttcatcgagaaacctcgaaatcaaaaagcacgtcggtgacttgtactcttcaatctcttcttcctctctttcacatctccttctctcgaacccatcgacctgcgctaattcatcatcgaccttgctcaaattcatcaaccatg

SEQ ID NO: 3923 - DNA, 3000 bp, Unknown
  misc_feature (1)..( 3000): cDNA_ID_1822388_gDNA_ID_1620674_Annot_ID_48204 3000 nt of promoter + ATG
gcaatttttcaccagctgcgatgccaccgatttcatcaatgacaatagataattcattctctcctcctccatcttccggcgacttacctgaaatcccagatgcttggtacggcaacattcagtatctgcttaatatctcggtcattggtctcttatgctgcgtctccatctttctcttcgttaagctacgcagcgaccaccgtcgtatgcctggtccttctgctctcttctctaagctcctcgccgtttggaaagccacgtgtcgcgagatcgctcgtcactgtggtgctgatgctgctcagtttcttttaattgaaggtggaagctttgtgcttcttttctccattgctgttttagctgtttcggttatgcttccgttgaatttatatgctgggactgctttgttgagtgatgagctttcgaaaacgatgattacgcatattcagaaaggttcagctttgctttggctgcattttgtgtttgttgttattgttgttgttatctcgcattttggaatcgctgctattgaagctaggttgaagtttactaggtttagagatgggaatgggaatatcagtgacccgaacgcgaattctactgctgtgtttactataatggtgcagggtttgcctaagaatttagggtctgatagagttgagtttgaagattgctttaggctgaagtaccctgggaaagtttataagtttattgttcccatggatttgtgtgctttggatgatcttgctacagagttggttcgtgttcgagatgagattacttggttagttgccaagatggactctaggcttctaccggatgagtatgagaatgttggagataacggactagtgttctgtgtgtgttctttgtgggttagggtgaaggttttgtggtctcagattacagagaggtttggatttacagatgatgaaaaactgaggaagctgcaagaactgagagctgatttggagtctcagttagcagcttataaagaaggacgagcacaaggcgctggggttgcttttgtgatgtttaaggatgtgtacacagctaataaggctgttcaggattttcgaaacgagagatcaaggcgtactggaaagttcttctctgtcacagagctgcgattacagagaaaccagtggaaagtggacagagcacccttggctactgatatttattggaatcatctgggattgacaaaagttgctcttattgtgcgaagagtgattgttaatactattctactgttgattcttgtgtttttcagctccccattggccttgatcagtgcattggtaagtgccgggagaatcttcaatgctgaagcattggatagtgctcagtattggctcacttgggtgcaaacttctggctggattggatctctgatttttcagttcctgcccaacgtcttcatatttgttagtatgtacattgtaatcccttctgcgctctcgtatctttccaagtttgagcggcatctaacagtgtctggggaacaaagagcagctctcttgaagatggtttgcttcttccttgtgaacctcatcattctcaaggctcttgtggagtcgtcactggaaagtgcactcctgaaaatgagccgttgctatttagatggtgaggattgcaagaggattgaagaatacatgagcccttccttcttatcaaggtcatgcgtttcagctctagcttttctcatcacaagcacgttcctaggaatctccttcgatctactcgctccaatcccgtggatcaagaagaaaattcaaaagttcaggaagaatgacatgcttcagcttgtccccgagcaaaatgaagagtacgctttggaaaatcaagagccaagcagtaaccttgagacaccacttctccctgaaaacatgtttgagtctccaagattcggggacatagaacctatgagccaagacctctctgaatacccaatcagccgaacctcaccaatccctaaacagaaattcgactttgcccaatactacgccttcaatctcaccatctttgccttaacaatgatatactcttcattcgctccactcgtggtccctgtaggcgcagtttactttggttacagatacattgtcgacaaatacaacttcctttacgtgtacagagtccgtggcttccctgcagggaatgaaggaaagctaatggacacggttttgtgtatcatgagattctgtgtcgacctgtacctcgtctcaatgctgctcttcttctcagttaaaggagattccacaaagcttcaagccatattcacacttggagtgcttgtgatgtacaagcttttgccttcggatacagaccggtatcacccagctttactaagaagtattcagaccgtcgatagcatcatcgacggacctgtggattacgaagcttattctcacccaaacttcgattgggacacttacaacaacagatgattctacgaccttttaagtcttacaaattttgctctttgaccaaatacaactggaatctatttgtatatctcttctttgtgtatattccatcttttgtgcaattattttttgttcacgggttaagtttgcaagatttatcagttgagtccctttaatcattaattttggggttgtaatagcttcattcttaaaatatggggtatgaaatcggaagaaagagaattataaaaatagtaggtgggacccagtgttctctgaagtgagtatatcagagttctcttttcaacacatggactgttacactcacctaacgacgacgaagaagaaccaacatagatctcttctcttcctctcaaactcactaagcttcattgttaccccaaataaaccctaattttgctctcactattcgaagatctaaaatcatctcgcattttgatttccgaatactttcctgagttttgctggtcatgatttctcatttgctctttgttttcccgagaaaaatcttcaggagagtaggataatctctcgagtttcgaaatcgtttcca

SEQ ID NO: 3924 - DNA, 3000 bp, Unknown; identical to SEQ ID NO: 3920
  misc_feature (1)..( 3000): cDNA_ID_1824402_gDNA_ID_1620674_Annot_ID_48205 3000 nt of promoter + ATG

SEQ ID NO: 3925 - DNA, 3000 bp, Unknown
  misc_feature (1)..( 3000): cDNA_ID_1824395_gDNA_ID_1620674_Annot_ID_48207 3000 nt of promoter + ATG
agatctctgagatgaagaagtatcctgagactcgagagcctctcgaagggcttgaggatgctttgagaaggtcttaccttctggtcaatagctgtagagaccggagctatctttacttgttggctatgggttggaacattgtttaccagttcaggaaacatcaggatgagattgatcgttttcttaagatcatacctctcatcactttggtcgataacgctcgcattcgggtaattttacctgcattttggtctaacaagtttctctgcttgatgttatggtatattgaaattttgattgttatacaggagaggtttgagtatattgaccgtgatcagcgtgagtacactctggatgaagaggatagacatgtgcaagatgttattttgaaacaagaatccaccagagaagcagcatcagtactgaagaagactctctcttgctcataccctaacttgcgtttctgtgaagctctcaaaacagaaaacgagaaactgcagatcgaacttcagcggtcgcaggagcattatgatgtggctcagtgtgaagtcattcagcgtttaattggtgttacacaagctgctgctgctgttgaacctgactctgagaaggagctgacaaagaaagcttccaaaaaatctgaacgtagctcaagcatgaagacggaatattcgtatgacgaagattctcccaagaaaagcagtactcgtgcagcttcgaggttagaatctcatgtttgttctaaagatccaaatttccttacaagtttaagaaagtataatcttcaattctttgctgtgactgtaatgcttttaggtctgttttcatgtttgaaggctaagatttggtacaatgttctataacatcggttacacaattgttccatgcagatccacttctaatgtttcatctgggcatgatctgctttcacgaagagcatcacaggcacaacaccatgaagaatggcataccgacttactagcttgttgctcggaaccttctctttgtaagaccacactatttgtttacaatgtggctccactttgttttctctgttacatagatgattagcgtttcacattctatacttccttgttatctgcaaagttctcaaagattcaatgatggaaccgcaggcttcaagacattctttttcccgtgtggtactttggcaaagattgccactgcagcatccaacaggcacatctgtaagggatattattgaataccgtgactttattaattttcaatcttttagtaatacatgtgaaagctaataagtcaactggattttttttaattttcgctctcccagcttcagctgaagcatgtaatgagctaatggcgtattctttgatactttcttgttgctgctatacttgttgcgtgaggaggaaactccggaagacactgaacatcacggtattacattctcattctcttccactcgcttgaatccttaccattaatcccatttgatcccaaaaatctatatgcttccgagaaaatttctatcatttgcataccataaacaacaaatgaaatttcggttaaagattaagtagacacctgcaaaaaaattcagtagtaactatcatggttgagattgaaatggctatgtttatgccactcaatgtagagtcggaatgaatgcttaatgttttctgatttcgcagggaggattcattgacgattttctatctcatgtaatgtgttgttgctgtgcccttgtacaagaactgagagaagttgagattcgtggggcatatggtatgatttacatacaaacatattatcaatatttgtttcaatcttgaagcactaacaaagatctgtctctcatatctttgcaggtacggagaagacgaaaataagcccgccttcgtcgcagttcatggaacattgaaatcttctattatacaaaaggtgaacaaaaacaacgatttgttgtaactctggatacgagacgagattcttcttcgtactactcacttaatattattgtgttaaatcgtggagtcgtatgtaaattagtttgggattctcatcttaatttcagcaatttgtgttgtgtgtatcacatatagactaactaattcttatttcaaccttttatcacaagatagggtattaggtttaccggatggccaattgaaccaaacttgtgttttgggtcaaaatagtagttttcttttatgaatcaaggagaacatatacaatttgctggtgggtgaatattaatattacaatagcaaattaaggaaaattctttgaagaagaaaagagatgaagaaatgcatgtgaggtatcattaccatgactaaaaagcctaaaacattgacaaaattgatatgactgatgatgattctcttctattgctcccaaattggacaaaacttgtcggttccttttaatggatggttacatgtttacggtttagcatcttttaaatacttatcaaaccataatttctttactaatcgtctcaccggtatgggtagactcgtaaataaccactttcatcttcttccccaatttttcttgctttctctaaaccctagtttcagacaaagtagtgacatttttctaacaattaaaccaatatcgccgtagtcaaccaccgcataacgttttggcgccgcctgaggctgacctggggctgctaaagattttatcgcgacgactctctttctctctcaaactggtaactaatcacttatttgcttgtttcgattttgaatgtgcacacatcgctatctattcaatatattcgctttatagcaagacttagcaatatacagtgtaataggattgattatatactgattgagtaaaaaagactaatgatttcgtttagagtaacaatctcttaattatctcgttaatggcggaaagtagttaagtctcgtgaattagatgttgatagcattgtctactcctttgtgttgtaattcctaatctaaattttccacagtttcagctgcttgcgaattggaaatg

SEQ ID NO: 3926 - DNA, 3000 bp, Unknown
  misc_feature (1)..( 3000): cDNA_ID_1824387_gDNA_ID_1620674_Annot_ID_48209 3000 nt of promoter + ATG
tccatacatatgcatacgtgggaagggtagacattggtagtggtggtggtggtcctggtggactatgactactacgccctctatcttttcgagagtgcctatataccatgcgttttactctatatatgtaaccatttcttttttccaaaagtatattactgattttaacatttaaatactagtttttataaagtgttttatactgttatagttgctccatgacggaaatgatcaaaatgtttacttatataaaccttgtaaatgtccattcgattcttcttttaaaacaactcacacattacacacacaaaactgcaaattaaactccgatgctaatcaagtccaaacaataacataaccttttttttgtatgtactctagtagtttgtattaatatttgttgctttatatggattagtgaattgtatacgatataaatcaataacataacaaaaagtatcaggaatacattacactaaagttgatgtcaactacccatttgcactatagatcgtttgtctagtgctgtaatgtattttaaaagagcaagtagatcacatcaaatttgttctttaaacgtagtgggaatgtatcatatacacgcctataaacggttttggtatatatgagtgtgttttactatgcaacaaacaaactaagttaacctaatttttgtaagcaaaatttcaaacgaactaacacaacatgatctatgtaacatgtcataattgtaaaagtaagagaggagacgtcttattattggaggtaaagaagatagacaaactgttgttttagtcgttaggtgaattgtctccatgtgatttagttgggaataatcgtgcttcttactttatgttaaaaaatatgtctcgaaatgtccttatctgtaacaataaatgggacagctaaattttccatacacatttaaaaaacaaaatatcactactaaaacctaagtatttatacagtacttttaactaatttttgtttggggttatcgaatgtctaacactttgtcggaatcacatctaaaaaaaaatagtttaacgaagaaagtacttctcagaatctgcattgcttctgagcacataaaataaataactaaactataagcatcaacacactttgtacctatctttttcatttttcaatgcttttaccaataccgtttatttttccctttctcagttagtttccaatacaaattaagttaaacctagactaatatacaaattatatgtgtcgatcaacattactattgtttataatttgataaaacgactgtatattattacaatcatatattcatatgcatttacaaacacttattatatactaaatacaatataacttcataaaataaataaaaagttatgtgctaatcaactaacctgtaacatatactaataatagctttaaataaacacatttaatatatgctaaaatacgaataaattatacccaatagtaattatttctgtaatttaatagcagctattaagttccagtttttttaaaaaaaatttaaatccaaaattgtttaaggttgtgtttgcacaaatggattgttactttaaaactttaaacaagaacataaacccatcattatacaaatgggctgaactaattgattagtaagcccattctatttctcacgtaactcagttattgcgttattggcccaaaccgaaatggacttttcatagacaactggtactctcgtcgtctagctgtgcaattaaagataccagaccaaaatacccttcacgtgatacaaacaacgagaaaaggaaattaataccaacacgagaaaaaatggaaattcagatttcgttttgtgatatatcgaaaagcttttagttatatagtttccaaaattttgaatctattcactcaattaataatccagtacgttattaatatcctatagagattaaaaaaaaaactcacaagaaaagccactctcgtaattaataaggcgtgatttaggttaatagtgtccttttctaacattcaatttaatcatgctaagtaccccaacattggacccgcacttcatagctcatactggaaattcctaattacccttcattcccaaagcgtaaaagcccacaaggataaggatacaaacgtcattacacgaaatgattaaagaataaagtaaaaaagaaaagtcgtactactacttaaaccatcttttaaaataaaataaaaatctaaaagtaagaggtcgaatctatctgaacgcgcaatctccgccgtcaaatttggtagagctagtgaaaagtggtcccacgtctccgataatctatgcttaaccaatcgtaacgtaccacgtatagcgattactttggtaattgtagcgtttagtgaaatcgttttggcgggcgtaattaataaattcaaaatcagagcccaaattaaaaacaaatcaaaaccctagcgcctctttttttgttccatttctctctctctcactccctctttgctcaaatcgattctccctcgcttatcgccatttctccctcgcttatcgccatttctccctccattttcgctctctcgatatcgagcttcctctttccgcctatcgaatctctaatctgaagctgtctttctcgatctggatgtttatcgaagaaggaggtctctgttaatttaggtaataatcattctccgtgacttttttttccttttcgatttctagggtttaaatttgctcgagattctccaacttctttgatttgatagtttattcaagtgtaatcgattgaatgatttggctgaggtttaacttttcaatttcgttatccatcagttaatcgttttttacccagctagagcaaagtctgaagaatctggacttttcgatatctaatttatcataatttattgattcaattctggattgatgattttcatactgctttcactaggtgtatagggaaattaatctattgggaagtgttgtagtagctgttaggaggataaagaaggcat

SEQ ID NO: 3927 - DNA, 3000 bp, Unknown
  misc_feature (1)..( 3000): cDNA_ID_1824383_gDNA_ID_1620674_Annot_ID_48210 3000 nt of promoter + ATG
accatcttttaaaataaaataaaaatctaaaagtaagaggtcgaatctatctgaacgcgcaatctccgccgtcaaatttggtagagctagtgaaaagtggtcccacgtctccgataatctatgcttaaccaatcgtaacgtaccacgtatagcgattactttggtaattgtagcgtttagtgaaatcgttttggcgggcgtaattaataaattcaaaatcagagcccaaattaaaaacaaatcaaaaccctagcgcctctttttttgttccatttctctctctctcactccctctttgctcaaatcgattctccctcgcttatcgccatttctccctcgcttatcgccatttctccctccattttcgctctctcgatatcgagcttcctctttccgcctatcgaatctctaatctgaagctgtctttctcgatctggatgtttatcgaagaaggaggtctctgttaatttaggtaataatcattctccgtgacttttttttccttttcgatttctagggtttaaatttgctcgagattctccaacttctttgatttgatagtttattcaagtgtaatcgattgaatgatttggctgaggtttaacttttcaatttcgttatccatcagttaatcgttttttacccagctagagcaaagtctgaagaatctggacttttcgatatctaatttatcataatttattgattcaattctggattgatgattttcatactgctttcactaggtgtatagggaaattaatctattgggaagtgttgtagtagctgttaggaggataaagaaggcatatggggaaggtatctccaaaggatttggattcaaaaacctcggtgaggaaaaagaagttgaaaagttcaagtaacaagtatttaaagccaggggctttggttcagctttgttacagcaaagcatcggctgctaagtcatgtaatgaattagggaagaaacgagtacctgtgtttgatactaagtcctgcaatgatttggggaagaaacgagtacctgtatttgatattaagcatgcgaggaacaataaaatggcagtggaacagttgaattctccaaaaagccctcttatgttgtcccctgtcaacgttgttaagcggagtactctggtgaggccaatgaagtttgatgatctgcaggtggagagtaataatacttgtaagaaaagccctttaatgttatccccaatgggtattgttatgcaaaacactctgttgaggacaccaaaaactccccaagctgatccttgcgtttcagaatcacagcttgagtctcttcccatggatttactggtaagtttttcgtttacatttaagttaataggttctttttggtagtcatctgaatgtatgaagttagttcttataaagatcacactttctgtaacttccaggttaaaatagtttgtcatctgcaccatgaccagctgaaggctgttttccatgtttctcaaagaataagaatggccgtatgttcttctttcccctgtttaagtttgcatccataaaagctcaattttttgcagttttacttgatgtgtattaatctgttttgacttttctttgaaacagaccatacttgcaagacaatatcatttcaattatacaacaccagaccgctcaagacaggaaatgttgagggtcatgaccccagttccaataaatcgttggccatttcgtaggtacatgttttacttcaacttttacccttttgaaaagagcatcaaacaactcgtttggctcataacaaaaccttctttgatctaaattagcagaggagatggaaacccaacaatggtgtcaagcccacatacccccaaagcaccaaaacatgctcctagaccaccctctcgaaccaaactcgcggagatgaagcaaatcactgctgttcttttccaagaccagacaccatttccttcaagatgcatcgttccttctgttctccagaggccgactttgttcaaaccaatggctccaaagcaccctcgagtgctcttctatgaggatgaactatgtcaagctgttgctcaaaacaacctcacctgattacacttagctgcagtcatatcggtttcctctctctgttgatagtaggttttgtcttcattgcataattgatcattgctcttgatgatcatcattacctatagtaagaagcatgcaagttttgtagcagtgctagttcagggttttaggtttacatgggaatctcctagtatcatttaaggggttttcaagtttttactctcttgagtttgtcataataagcgtctttgatttggtcagttgagtcttgtgtatattttctgcatatcttatctggatcagttgcttttttttttttaatataatttgattgcttatccttgctttcatcttattggttattgagttctccaatttatcgtaccgcgattcaaaccgtacttaaatgttaaaccggatattattaaatcgattgaactgaataagattcggttcaagtttggttatatttttcttaaggcctctgatttagttgggcctatttacgatcttacaagcccaaacttattgccgaagatccattattgaaaagtctcgacgcgtgtaagcttactatatccctgttgccaaacaaggcttttgtcccttgtagggccaatcctttatttggctataaataaaggatgtatgtcttctaaacaaacactttttctaatcggagagcttcgaagggttctgagatctcgcggctccttcgatcttctccgctcaactattacctccgatcgttggcttatgtctactgtaacctcttagatttgattttggcgcgttattagaaacccctaacatctttaaactcactcgaggtctctcgtgatcgatctagggtttcgcgagatctgagatttcatattttccgattcaccttcgcaatccaattttttttgttgcttggattttgtttgtgtgtaatcgtgtggtaag

SEQ ID NO: 3928 - DNA, 2037 bp, Unknown; identical to SEQ ID NO: 3918
  misc_feature (1)..( 2037): cDNA_ID_1824374_gDNA_ID_1620674_Annot_ID_48214 3000 nt of promoter + ATG

SEQ ID NO: 3929 - DNA, 3000 bp, Unknown; identical to SEQ ID NO: 3923
  misc_feature (1)..( 3000): cDNA_ID_2147267_gDNA_ID_1620674_Annot_ID_164199 3000 nt of promoter + ATG

SEQ ID NO: 3930 - DNA, 3000 bp, Unknown; identical to SEQ ID NO: 3922
  misc_feature (1)..( 3000): cDNA_ID_2991529_gDNA_ID_1620674_Annot_ID_164197 3000 nt of promoter + ATG

SEQ ID NO: 3931 - DNA, 3000 bp, Unknown; identical to SEQ ID NO: 3917
  misc_feature (1)..( 3000): cDNA_ID_1822404_gDNA_ID_1620674_Annot_ID_164194 3000 nt of promoter + ATG

SEQ ID NO: 3932 - DNA, 3000 bp, Unknown; identical to SEQ ID NO: 3915
  misc_feature (1)..( 3000): cDNA_ID_1822416_gDNA_ID_1620674_Annot_ID_164191 3000 nt of promoter + ATG

SEQ ID NO: 3933 - DNA, 3000 bp, Unknown
  misc_feature (1)..( 3000): cDNA_ID_3072185_gDNA_ID_1620674_Annot_ID_164190 3000 nt of promoter + ATG
tacagcccaacgtctccaagctatagcccaacgtcgccaagctacagcccgacatctccgagctacagtcctacttccccaagttacagcccgacttcgcctgcttacagcccgacttcacctgcttacagcccaacttcaccagcatacagcccaacctctccttcttacagcccaacttcaccttcttacagcccaacatcgccttcttacagccctacttcaccatcttacagcccaacatctccgtcttacagccctacttcacccgcatatagccccacatctcctggctacagccctacttcaccaagttacagtccaacatcaccaagctacggtcctacgtctccaagctacaaccctcagtctgctaaatatagcccatctatagcttactctcctagcaatgcaagactatcaccagctagcccctacagtcctacatctcccaactacaggtaagtagtaatatcttaatttttacactttctatgaagcttctcttatctgttgtggtgatattgtgtcatcttctctaatcgttaactcttattaaaaatttactctgcagcccgacatctccatcatactcacccacatctccatcttattcaccttcaagtccaacatacagtcccagcaggtttgacttttacccgcttgaaaatcttggatctgttgtaatgcatccatctcaattgaattccgcaaaaagtttaactgggttgttgttattaaatctgtctcagcccatacagctcaggagcaagcccagactacagcccaagcgcaggctactcgccaacacttcccggttattcaccgtcatcaacgggtcagtataccccacatgagggcgataaaaaggacaagactggaaaaaaagatgccagtaaggatgataaaggcaacccttgaaagagagtgagaattggcaatccatgttttaggtaacgtctaaatctcttggaaccattggggtttacaagtcttactagctcacgaacttagccacttgggatatcgtgtaacccgcaggtcatgatttaagagacagtgaaagctgagaaaaggaagggaccgtttcaaagtgatcttctgtggataactttgtgaacaaggttttcttaatagatccttttttcgtgagttgtatattattccaaactgatccataaatccatccaatcctcatcccccaaaaagaaaatagtataaacatagaaaaacgaaaacatatcagactttgggcttttcgtatggtttagtttttggctttttgctgtgttgttctatttcagaaagtaaacatgtgaaacggttcatttgtaatccatgaaaggattctttatgttactgctgttgcttcattgagtagatacgaatcgagaatgccttttttccttgtttccgacaattatcgattgacgtgtgaccactttaaaagtttaaacagctcgactttccaatatgggtttatttcttgttttatccacaccattaaagaatggtttttgggatttttatttatgtgataattaatcatttttccaaattttattttgtatataataaatgaagcaaatgttggaaaactatccaatggatgtggtgggttaatatcaccagattcgcatagctggtttttgacttgtcttcttaattatttgtccagaaaaagagaagaactcttcacatcatcattgtcaactttagcattattgtattagctttttatttctttacgtctacaaagctattggtacaacgttctaaaatcaaattcgtcatcagtagattttgtaaactaattaagtaaagttcagtgattaaagaagctagatgaagaacgtgtgcaacgactcctctgagatctacacggaataatgtcgtcagtgagcaaacaactcccatcacgtcgtccctccacctgtcctctcttctccttccttgcttgtctttctctctcaaatcatttcacctaaaaataataaatatctttcgttttctaaagaaaaaaaaaaaaaaaacttttcaaattcatctttggtttctgcagcagcaacaacaaccgagccctgttcgttagggttttcggtttttgttagcttttcttcttcttcttcttcgtttccttccacctgaattgttgtaaccatggcggagaaagtatcggaggacgttatgcttctacacggtgacctcgatttgaaaattgttaaggctaggaggttacctaacatggatatgttctcagaacatttgcgccgtctcttcaccgcctgtaacgcctgtgctagacccaccgataccgatgatgtcgatcccagagataaaggcgaattcggtgataaaaacatccgtagccaccgtaaggttatcaccagcgatccttacgtcaccgtcgtcgttcctcaagcgactctagctcgaacacgtgttttgaaaaactcacaagagcctctttgggacgagaaattcaacatttctatagcgcatccgtttgcttatctcgagttccaggtcaaagacgacgatgttttcggtgctcaaatcattggcacggctaagatcccggttcgagacatcgcatcgggagaacgcatttctggttggtttcctgtactcggtgcttcgggaaaaccgcctaaggcagaaactgctattttcatcgatatgaaatttactccgtttgaccagatccatagctaccgatgtggaatcgccggagatccggagcgtaggggtgttagacggacttatttccctgtgaggaaaggaagtcaggtgaggctttaccaggacgctcatgttatggacggaacgttgccggcgattgggttagataacgggaaagtttatgagcatgggaagtgttgggaagatatatgttatgctatatctgaggctcaccatatgatttacattgttggttggtctatcttccataagattaagcttgttagggaaacaaaagttccaagagataaggatatg

SEQ ID NO: 3934 - DNA, 3000 bp, Unknown; identical to SEQ ID NO: 3913
  misc_feature (1)..( 3000): cDNA_ID_2140554_gDNA_ID_1620674_Annot_ID_164187 3000 nt of promoter + ATG

SEQ ID NO: 3935 - DNA, 3000 bp, Unknown; identical to SEQ ID NO: 3912
  misc_feature (1)..( 3000): cDNA_ID_2999332_gDNA_ID_1620674_Annot_ID_164186 3000 nt of promoter + ATG

SEQ ID NO: 3936 - DNA, 3000 bp, Unknown
  misc_feature (1)..( 3000): cDNA_ID_1011433_gDNA_ID_1620674_Annot_ID_164185 3000 nt of promoter + ATG
aacctttaaaattctacaaaaaacttaatttcctctttccgtctccacaaaattcttttaatcttcttagaacagaggtacatgtctttaatttctacataattttggacaggttgtcaaagttgccgattttggtgttgccagagtgcagactgagtcaggggttatgacagcggaaacagggacataccgatggatggctccagaggtattacttctttgtcttgttcttttttttgactttccatgcttttgacactagactctgtgaacccaggtcattgagcacaaaccttatgatcacagggcagatgtcttcagctacgcgattgtgctgtgggaacttttgactggggaagtaagactcctagttttctctctctggattttagtcgaaagttgctaaactcagtaaatctcatgtgtttaacacacttttttttcttactggtgtataatgaatgaaaacagctcccatattcttacttgactccactgcaagctgctgttggcgttgtccaaaaggtatcatgtctataggactttatagttatttttctcgtgctttgattaacggccttcaacacaatgacttgtaattaatttacagggacttagaccaaaaattccaaaggaaacacacccaaaactgactgaacttcttgagaaatgctggcagcaagacccagctctaagacccaattttgcagaaatcatagaaatgcttaaccaactaatccgcgaggtaattgatttatcattgcatctctctctctaaccaacacgattcttagcattaatatgttttgaaaccaccaggttggagatgatgagcgccacaaggataaacatggtggttacttttcaggcctaaaaaaaggccatcgttgactctctcgggtgcgctgaaaaatttggtttgatcggtttgatagagctctactcacttctcgttttttcgttgtacagtttcttagagcctcactctttttgtccatgtataattttcttaaaaaacaatctccttttgatacaattatcactgcagagattgatttggattgcaactcaataaagtgaaagccattcttttgaagccattcttaagagcggctacggatttctttgttaatcaaagcaagtaatcatattaactgatcgtaaacgattcagatacagaaacacctgtgttgagattgatattagttttcataatattagtttcggttcctttcggtttgatcttgtccatgtataaatatgtttttctatcattttataaatttaacacttaaacttaaagaataataatttaaaaccaatttaaaacttaaattttaagaaagtaattaataatttttaactaaaataatgttaatttcactattatcatttaaaaattagtttaagtattaaaattttaaaacggcgaaaactaaacgtgtgtaggcatgcatccccgtccttaattggtccgtaaactttgtggtgttcgaagttcggtaaagctttcacccaatatagatttgacagttaaactatgttttagagaataataatgatgattgatacttgcgttgagaacatctacagaatttattgataattacaggaggtgatatggctatgattgttttcactcttctaccggcagctcattctctgtccaagcgacgtatcctccagcaatgtctgtgatcgccgtgaagccctgtacatgtggcgacattaaacccgcttgtcctaaaccggataacggctatataaattgaagtgatattacacacatacagcagtgagaagatcagttgaggccataaatgacatttgaccgctctcacaaccctgcagaagtagtttattacgtgcatcagagattttgtgaaacaagggattgtcttcataggggtttatttagtctctgaatgtcaaaactgaaacttacgattatgatttcatcgtgtttcctgaagtgggacgagacctgtcttagaaaactcgggttcttaaccattcctgcaacggttttggcttggtgttagttttaagttgtttttcattttcactctttctcataagaggaaccttaaggtcggtgatgaaaacctgatccgactctgtacatgtaaggtacgttgatggctctagtcggatgtccgatgctgaattcgtctggtgtcctcacgtcgagatagcggtatcctgcttgagctagctcacgcgccactcttactggtactgacgtaggaattttaactgcctctgctgcaacatttcctctgcttgttgtcgttgctttcctccttgagcaagaagttaatactcagatttaatatttattcataatctaaaatcagatagagaaggcgattctcgtcgttgattgctagcttaccatcggaagtttgagtttcgaagatcagctacaataacacctcttcgtgttggtaattggcacttgaaagatccacatgtttgtagaggtggagaaatagccgatgaccagtttccaattcgtgatgttgtgttaaaagcagtggtttccattttcacttcttctttgaaacttcttttagaatgctttgatgctacttagatacttcttctcttagttctatagcgtttatataatacatacagacacaaaggtatgggtgtcacgtcagcaagttttatgtccgatcttcgagtctctatcatttctatggataaattcaattatgtaccaaagtcgattccaaaatgtaaacaatgcgtagataatgaatcatgataagtccaactcggtgcctcgtgagtcgtgttgaagaggataacttgctgactcggacggataagaagaccgtaaggcccaattgtgataaactaattatggatccaaattatcgtatttgggcctcgtttaggcccaatattgaaacaagtggctgagatagtggagcggaggagagaagatgatgaagttaacaatggtggaatagcgattcttcgacgacgatg

SEQ ID NO: 3937 - DNA, 3000 bp, Unknown
  misc_feature (1)..( 3000): cDNA_ID_1822512_gDNA_ID_1620675_Annot_ID_48215 3000 nt of promoter + ATG
attaaaattgtaaattgctatttattctgcatattttcccttctgttttatcacacggccgctcaagtttatttttaatttgtttttgggtaaaagtaactaaactttgcgcatgaaaacttttatgtgaggtttatgtattattttttttggtttgttgctgacttgttgttgagtgttattaaagaactaaatcgattttacctaaagcgtaacttttgttataggttttattacttaaatattaatttacactttcattttcaatgctacaagaaaaagaacagaaaatttacaattctgattccatttttcagctgctgccacatgtgggaaataagaccagccctccaataactccaagaaccggtagagaaatgaaggtatatatgatctattaaaccggggggtttccggtttatcattgtctcaaatcaaatcatatctttattaaaaggagtcgacgtaaagaatgaaaaaaagctggttggtttcggaactttttcgttgattataaaaattaaccgagagaaaagagaaagcattataattgtcatgatgaaatcatgcaattgtttattcaatccatatccttttctttttgaaataataaaaagggtaacacagtgagtaatgtgcaatgagcggaaattctatggttaacttttttttacgttcgaaataattgctgacaaaaagaaggacttcatttgagaaaactcaaatataatgtcaaacatcaatttggctagatctacccgttacatgaattcggttctagttttattggatttttagattcggattaatatgttatgtctggagaatataataatatatactagtcaattagactactcctcgccaagtgactattactagatgatatattatgagaatcaaaacatatgagcaaatatgaataaaatcgttgtgaatgatacagcatttgtacaagagcatgataagaggaagaacaatgggaagaagattaaaggatcagaaggagaagaagaaacaagagaccagaactcgcaacgctgagattcacgccgcggtctctgtcgcaggagtagctgcagttgttgccgcaaccgcagcatctaacgctattgcggccgcagaagatgcggttgaatcaacaaccgttgcagctgcaatggcatctgcagctgctctcatcgcttcacattgcatcgagatagcgggagagattggggcgggttataaccagattgccacggctgttagctccgcgaccaatgctaggactaacggagacattatggctttaacggcaagtgctgcaacaggtatcatttattgttttctcgcatagtctaccgctttcaaatgataccccatatgtgattttgaggttttgttgagagattttagcgttgcgaggagctgcgattctaaggtcacgaatggaaaggaacaacgagaacaaagcaatgctatatgcaacaaaggagcacgtcgtagaaatggaagagagaaatgtatttggagcgatgactttcgtctctagaggagaagagcttctcaaacgcacccgcaaaggtaacttgtgctccaagaaaacaccgttttgatcatgtgatgaatctgtcagggttaagtttccgaggatatttggtgacaggggatcttcattggaagcaagtatcttttaacatcaattccaattggcaagtaagttttttttttttttttttaagaactttcataaaaaaatgatatatatgatgttcctcatactcataggctcttgattttgaaataggtggttcttaaaatgaagagcaaacatgtgggtggaactttcacgaagacgaagaaatgtaagcttacatgacacaagtttctagcgaattagtgaataccaaagttgatagtcttcttaattaccttgtacaaaccaacattcccttggcggtttatttggatgcaggcgttgtcaatggagtgtgccgagatatacccgaatgggcacatagaggacgagcagataaaatggtagagcgaagagcctactttggggtgaaaacagtggaaagggtgattgaattcgaatgtggaaacaaaagagagaagcaaatgtggatagaggggattcaacagttgcttaactcactcgaaatcggttctagtgttcaatggaaacattagagttaggatcaaattaaaacactatttcacatttgaacatcatgtaataacgattgattttttttttcgatttcacgtgtgttgaagaatgtatgtttgtgtctggtgtaataatatttgacattgatatttatttgtcacactaacgacatttattatttcccgtctttctcactttatcgatttacagctggatttctgagtttttatttctttcttaaaaaggaaaacaaatataagaaaattagaacttaaaaaattccctctatcagtcaaatggagttcttcgtccttccggtggaaaattctcggaaacgattgaacttctgataatcaaatccggttcatgcgagttatgtaacatttatcggtaatatatcttcccactctactgcagtaattcgagttcaatttaggatagaattgctttacaaataaatttgagttatcttctacttcagtcttgtattgtatcttacaagttcatgggtcaattcaagatctcccttttcatgtttccgaatcaattttcttttacttgagagaaccaaaacttagcaggattcgcgttttcttaatttaatttgtttcgattcagctccgtttgcttcttgtcgcttccaatttcccgaccaatgggtgatagatttgtcctagcatagaaaaaaataagattaattgatgtctcagatgtaagatccattacagtaaaattcagttgtaacatccaattcgtgtgtttgaattcaattctctgttttttattctatcctgcagatcattcgttaagatggtgatattgagttgtttcatggagtctacatg

SEQ ID NO: 3938 - DNA, 3000 bp, Unknown
  misc_feature (1)..( 3000): cDNA_ID_1822508_gDNA_ID_1620675_Annot_ID_48216 3000 nt of promoter + ATG
gtatatatgactttaaagattgcttacctaaagtttttactcatgcatagatcgacatgagctagttttggggaatacttttagtgctgtgccaggcgcaaaggctccaaacaaggaggttccaccagaggttctcactcctcccttgttggttactttgttatctgttaaatagttttccaattgtatccggatagtgttctacttctccttgtagaaaatctcaagtttttgttactcttgctattctcttggatgttgatttgtaaagcatgtcgttttattgtaggaatttaacagaagagtgtccgaagggttccaagctactccattttggcatcaaggtcacatttgcgatgatggccggtaattatatgattctatgcacaacaagaattcactatattataaatattggatattgagtatttttgttgaaaatttctgtgtttaaatctgacttgacttgttttgtcagtactgactatgcggaaactgtgaaatctgctcgttgggagtatagtactcgtcccgtttacggttggggtgatgttggggccaaacagaagtcaactgcaggctggcctgcagcttttcctgtatttgagcctcattggcagatatgcatggcaggaggcctttccacaggtgtgagctttgcttgattgacttaaagttaataaatagacggttaagtttacttgcctagtactaacagaaaattaagaaagaaaccaccctctttctatcagcagaaactgctattgtagttcttattttttctcttgtatttgcagggtggatagaatggggcggtgaaaggtttgagtttcgggatgcaccttcttattcagagaagaattggggtggaggcttcccaagaaaatggttttgggtaaaacatttcatccttttgctacatttcttgttgcagactttagttagctagtggacctgtgtatacacccacatgtagtatacttgtttgatagctttatttgtcaatgtctctttacaggtccagtgtaatgtctttgaaggggcaactggagaagttgctttaaccgcaggtggcgggttgaggcaattgcctggattgactgagacctatgaaaatgctgcactggtatgcacttataagatcttcttaagcaatgacagtgagtattagaaggcagatagtttacaaaagctctgggcccttgtaaatctgcaggtttgtgtacactatgatggaaaaatgtacgagtttgttccttggaatggtgttgttagatgggaaatgtctccctggggttattggtatataactgcagagaacgaaaaccatgtggtaaatttgttttactagtttcattcagttttacttttgacatcatatcattcccttatggctagattccaacacccgatgaatgtcttgtgacaggtggaactagaggcaagaacaaatgaagcgggtacacctctgcgtgctcctaccacagaagttgggctagctacggcttgcagagatagttgttacggtgaattgaagttgcagatatgggaacggctatatgatggaagtaaaggcaaggtatgtatgctaatgtgatccaatccctgtagttaaaagtcttaacaaatcctaaggcagtgaaagaagattatgaacgtttgttatggttaacaatgatgcaggtgatattagagacaaagagctcaatggcagcagtggagataggaggaggaccgtggtttgggacatggaaaggagatacgagcaacacgcccgagctactaaaacaggctcttcaggtcccattggatcttgaaagcgccttaggtttggtccctttcttcaagccaccgggtctgtaacattgatgagtgttttgtttgttgatagagacccatgtgatgaatgaagccttagtcatgtcattgctagcttcactattatgtatgtatgattttagttcgttcggtccttgtggtaaatgatacgggccagtgtaaagtctagttcaataaaagccttgagtcgcataatttcaatttcaaattgcatcagaatttcatttttactttttaggtatttcttctattttattttttgtttctccactcattgttcctaggtagaaaccacgatctataatggattggtaatgatataggttcgaattgttggatattgtataactatgagtgggaggcaaaaaggagaaaagaagaagttccttaatatcggctcactttgtcttagcatcattacaaatgcactctctctggctcccacaatcttacttttattcttcctcacataaataaacccttctttccgttacactcatatatatgtataaacattttctcacttctaaaatataaaaacatttggtaattttgttttcctaataaagagttaagatctatatatgaacttaaagcagcattttttttccaacaaagcttcaatttaggcaataattaggacacaaatggcaaaaccatcattttgttttatatatatttaaacccgcgaaacccattcgaggcagtcgaaagaaaacaaagaaaaaagcaaagtaaatcgttaacatattttttttttttctacttgtgagttgtgagcttctatctctgttttattatttatcatgttatgtttttaaacttattaatacatgagttaaagttttgggagtagaatgatcttaatagagttgatgatgttagtgatcatgaattatctcctaagctaagaaagactttttgtagcattttagttaaaataaaaagtttctatatcataaatatacaataaaacctttattaaagaagataaaacttgaccaaactgtattttataatgtttctttatgtattagttattaacaaaacaaaaaacgtaaattactttgaagtgtacgaaaaaataaaagaggaatcaattttcatatatagccaaagtcacatagtgattcttctccaatcaaatctctatcaacaatg

SEQ ID NO: 3939 - DNA, 3000 bp, Unknown
  misc_feature (1)..( 3000): cDNA_ID_1822504_gDNA_ID_1620675_Annot_ID_48217 3000 nt of promoter + ATG
caggccaagtgaccttgtaaaagttttttttttgtcttataacatagctattgatttatactgtccaacgttttcacagagctacatcgagctctggtaacggggttctaaatcagttggccctccctgcaccacctgtaactaatggttcagccaattccaaaatagacctcctcagtggcgatgatcttgcccttgttcctgttggacctcctcagccagcaagtccggttgcatcagatcaaaatgcactcgcccttatcgacatgttctcagataatactaataatccaagtcctgcaactgcaccaagtggcaatccagctcagaatattcctttgaatcctcaagggcaccaacaaccaaatagtcaagctggagaagctggattacaacaatccaatggatttgcgcctcaagtgggttattcgcagtttgagcagccatcatacgggcaaggagtctcttctccctggagcagtcagcctgcacagcaaccagtccagccatcttatggtaatatatataaacagtttttgtttttcacacatctggagattagattgcagtatgccaatgtttctctggttatggcaacaaggagaaagaatttccttcttttggattcagaagaatcagcttcaattgtgtctcatgtctaatcattaattgttctgtttttatggtaatcttgtaatataaagaaggtgcccaagacagtacggcatttccacctcccccatgggaagctcagctccaagactatagtccctctgcggagtcaggaagtccgttttctcctggaatgcatccaactcagactgccttcacacatgctcaaccagttaacaacaacaatccatatcctcaaattccccaaaccgggccaccagtcaacaataacagtccatatgctcaaatgccccaaacaggtcaagcagttgccaacatcagtccatatcctcaaattccacaaaacggcgtgtacatgccaaaccaaccaaatcaggctcttgggtcaggctatcaaccacagcaacaacagcagcagcagatgatgatggctcagtactatgcccaacagcaacagctacagcaacaacaacagcaacaggcgtatggaaaccagatgggaggatacggatatggctataatcaacagcaacaaggaagcagcccatatctggaccagcaaatgtacggtttatccatgagagaccagacatcgcatcaggtagcatcatcatcatctaccacatcttatctgcctccaatgaaacctaagaataaaccagaggacaagctatttggggatcttgtggacatctccaaattcaagcctacaaaaccgacttccggaagagctggtaccatgtgaaaattcctccatccattcatcatttaccagtattcatctcctctatcctcctcagctaactctctttcttctctttgttaagcttttttcatcattgattttattaccctcttgggagataacatagatatacatatgtgttatgttcttccttataatttaccgttggttatgggtttgtatatttcttgtagagaaaagaaaactggaaaatcttttgttgagaactcagcgatttggggtttgtctcgagattctattttaggacattttaatctctcatttgtattttcagaccttttatttgttatatccattggcaataaagtttgatatcaattggatgagagttatggttcttaaatttgccaaaaggacagtttatgttctttgtatatgattgcaaccctaattccatagtcaatggagacatcaaaatgtcaaactatgcttgcattatataatctctttcgactcaatgatgtcaattaccgaaaaagtagaaaggaaggatttgttttgtttgcgactgttgttagttcttatgttgctcgtcgtaaacaagaaaaacctgccattcgtttgggtttttgaaatctagtctaacagaaagaaacaagagacaaatgaagaagagtaaatctagtccattcatcatcatcagtcttttggatcgtgcatatattaatttgtataagagtctgtctaacaaaattgtcaatatgtccgagtggttaaggagattgactcgaaatcaattgggctttgcccgcgcaggttcgaatcctgctgttgacgtattctattttgttttcttttcagctctcttcagaatttttgtaaatattttaaaagggaaaaaaatctcaaaatacgatttcaattaaaattgtagagattctcctcacgtctgtttgtgaaatgttgtctctaataaatttccgtaaattactgaaaacaagacacgagaaattgttaatttaacaaaataaaaatacgttacgtttggggtttgccacgtaactacttaccgccacacgttctcgtccttttcttcttcctctctgcattcttcacagagtttgtcaccaccaacaccaaacacacaatttcacattcttttgcatatttcttcttcttcttccattatggagatacggagcttgattgtttctatgaaccctaatttatcttcctttgagctctctcgccctgtatctcctctcactcgctcactagttccgttccgatcgactaaactagttccccgctccatttctagggtttcggcgtcgatctccaccccgaatagtgaaactgacaagatctccgttaaacctgtttacgtcccgacgtctcccaatcgcgaactccggactcctcacagtgggtaaattgatccattccattccatttctcttctcttgtttgttttattaagctccaatttcagtttcgtcttttaatttatatgttcttcttacgatcagtgggacttaaaaaattgctcctttaaatgcttcagtatgttttgagtattacaaagttgtaagattttatttttattcatttggtggctcaccattcgacgactacttttgaatttgagtttttgaaaaatg

SEQ ID NO: 3940 - DNA, 3000 bp, Unknown
  misc_feature (1)..( 3000): cDNA_ID_1822500_gDNA_ID_1620675_Annot_ID_48218 3000 nt of promoter + ATG
tgcataagtgtcataccaaattcttctttgcaagaatcaagatctttgcctgcttgaaagagtatgagttacattcggcacttcattgtaaaagtcaggttcgtcttcttcttcatcagatgataataaagatggtcccatccatgctttaaacccctcgttcactcgtctttcaacgtctggtgtgaattccaacggattagcttcaagcatctccaagccctgatcatttctgttcccaaactctccttcgtcaatagttaaagcagctcttcttctaagggagaaagcagttccagcatacaagattactaaaccccatgaagaaatctcgtagcaccaaaacaaaggcacagaacagctgcttcctaatgtgaggaggcttgagccgagaaatatagcaaggagaccatagatgatagcaaacacaacattcagaattgacagacaacggaccccacctgtgaatttattggacatgataaagaagatcaataacctattttgaggtccaagcttagtgataaactctgaagagcccagattctcaaaggtagaaacatagtaattactagcagatgaaatagaattacacataaaaatttataagataaagtctggcactgaaaaggaatgaatctattacacgaatgcatggatatacaaagaacaaatatggaaagctgaatacatattaaagagagaagagagtatacctcttcttgaagcacagtagttattttcaacgacttttagaaacccatgacggtgaggagcggaataagccacaaaaattcctgcagtattgcaacaaaatagcgagaataataagcagcagacataccacacctgtaaaacttagaagggctgccatgtggaggcagaaagcaataaaggaaataaatcagctccactaagttacatccatataaaattcaaatccaacaaaatctagcagaggaattaactggatttagcaaactccacagcttgctctatggctaaccccctaaaatcccaataaacctgaaccatcatcagacctgtctttatatagtggcttcaatcaaaacgagtgattctagaactaaacataacaacgagcattcagattttgaggacacatcaatcaatcaaccctctctgacaatatttcacctcaccaatcgaaaaattcagaagccattttgccagaaatttgctaagcatcaatatctagcgtaaagccactcagaactgagcatcatctaatgaaatcagccaacaaaacacaaatgcaaacccagctctgtagatatgaaataacgaagaacaaaagctagagacttgacgctcacctgctacaagataaacagatgatacaaggaaaattatagtcgagggaacgaaaacgaccatccagtaataatcaacagtttcttgatcggtcaagtaaaaagcaccgggaaagagatcggagtcacgagctttgccatagataggcaaaggttgtagctttatgtcgctgcaaaatggcctcttaagaacattcgaaggaaatacaattttcaagctgacgatcgtgcaagtgaagatgacaaaacaaaggaaagccacgatcgagactaaagtcggcctctgaagcttaatccaggctctatcttcttccctaaggctctcgtactcttgctttggcataaacgcttgacgcaacgcatctccaatgatcgccattgaagaaacacaaaaaaaaaactaatccacaatcgaattagacccttctcaccagataattccgaaacaattcaaaataggggtttccgaagtttatcaggaaccctaaatcaatgaacaccgaactggggaaatgaggaagaagtattagtgatgcagaaacaattaggcgcgtgtaaaggtacttgctttgataacttctgtgtaattacagtttgacccccaatagtttgttaaagttcgaatctatccccacttcccgctcaattattatcataatcatagaattagaatatgcttagctatagagtcctaattaattcaactgatgaagttagaactaacactcttatgcaattttgatgtctataaatctaaattattttttgcaagtgggtgaatacatccaacacagaaagtgataaagaaacgagaactcaatagaatagaatagagagtaaatagatgtgtagcaagttggtttaggtttgtatcacaccaatcacgactttcataagaccaaaatgttttctttatgatgaattttgtaaagatgtggatttaacggtttcatagcgttatcaaatgacactcataattaattgcatacgtgtgcaatcgcaatcgtaatcgctggttagttttgttttgcaaatactttgtttcgatcattaaaaagaaaacattgtaagctgttgagaatcgaccaatcatcaaactgtaatgttccatctaaatctaattcattcatttagattggataacattattatatttagctcccaaaaacgaaaaaataataatactaataactaacatttactgttagtgaaacgatgaccgtcggatttataggtgggtcaaaagcaacggtccgatggaaagcaatgacctgactgaattggtgtaactatccaaacacaacgatatgaacacgtggcaatcttttagtggacccttttccagaagatattcgacttatttccttttttgctatttcgtggaaaataaaaaatgatctgaagtacagaaaatacatttttaaaaaacaaattctgaaaattaacaattagagaaaaagaaaagaaaaggaaaaaaaaaagatttctagtagaaagagagaagggcgtgaattcctgagcgagagattcttcgccggagtaatctctttgcgtgatcttaccggctgcttaattcgtcttcgcctgattcgttggtttcaaaattcgtctctctctttcaatcggaggttaattgtttttctgtttgggggtcaaagcgaagatg

SEQ ID NO: 3941 - DNA, 3000 bp, Unknown
  misc_feature (1)..( 3000): cDNA_ID_1822480_gDNA_ID_1620675_Annot_ID_48224 3000 nt of promoter + ATG
attcgtgcttgctgcaacaacttcaagtttctcaacacttcaaaaacttgtgctttttgaaatctgacctatatcgattcaaatggatgaaccttgtactttgttgagtcttcgattcattggattgttttgggcactcccagtaacttgaattgaatcacattttggtggaatcctatcatttgaattttctactaagtcagtgaagtcttttcatgaacaaagtcttacactttgttaaggattttccatgaattagattaaaaagtaatgtttttaaagctttttcttcagtcaaattttgaaattagttaggatgaatgagaagtgggtcaaaagtcggagttttgtgacattgaagcttaagtgtgtttgtactgaatcatttttcttatgttgcttgtcactgtactatcagttttatgtatcgaagaagaggaaacaccagtcaccaaatttaaagtctgggaggaatgagaaaaatgtgaaggtgacaggggaaagatctcctggagacaaaggcactttggacagttacttgaaagcctctctggatgacaagagtactaccaatagtgggttgcaggcaaggcaggaagcgtttacaagaaaattggatttggaggtttctgcttcgtctgttggtcaaaatatacacccttgcctgcctaaacctgtaagttttgcaacttttaaggagtgtttgggccagaacggatctcaagatttgcataaagaaggtgttgcagctgaaactcatgctacagatggtttactctgtgctaaccagaaagataattcagaactacgagactttgccactagtttcttgtccttgtattgtaggtaatgtgctttcattgtgccacatttttattctttccattatcatcgaggagttagttacatgcttacattcttttattatgtctgacttttgttctgaaatttagattttgtaaattgtgcttgtctgttttttgcagtggagtgcagtctgttgttggctcacctccacatcagaaggaaaatgaattgaagcgtcgaagcagttcatcatcacttgcccaagatatacaaatttctcacaagaggcgttgtgagtccgaaaatataccatcactagatgatcttacaaatcctctcgggagtaagcctgaatcactcgctaggaatggtaataatagagataaacctgtttcagaccctacaaagaaggtataattggaatcaacaatcgtgattacctgtcctcctactaaactaatttatctcaaataattttatgtgtttgctctgatatattcatagatgccgagcaatgaatctgttgaaattccaatgggcttgaggaagtgtagtaaggcgccagaatcatctgctcatctaactgaattccacacgcctggatcagccattaaatcatgtcctgttggaacccctaagtcaggatgtggtagctcaatgttctcacctggtgaggctttctggaatgaagcaattcaagttgctgatggtttgacaattccaattgaaaattttggttctgtagaagctaaagttagagatcaacatgtaactattctttcatgcagcaagaaaacagataaatgcactgaaaagttagagaggagtttagatttagatgaaatcagagtaaaggataaagatgccattggtttttcaaaggtagtggagaagcatgggagagattttaataaagaagtatatcagcttcctgtcaagaatcttgaacttttgtttcaagataagaacattaatggaggtattcaagagcgatgtgcttcatttgatcaaaataacattactctaggaagcagtaggatctctgaatctgctttcgtcggtaataaaggatgtgaaaatcttgatattgcaaataatgctcaggcagataaaggtttgataggcaagatgtatccagaacccgaaggaaagaaagttttactgtgtgaggaaaatcgtggtgtaagatctgtttctatgataagcaacatgaggaaaccagttggttctagtgaatccgaagaaagtcatactccttcaagctctcatcgtaattacgatggcttgagtctcagcacttggcttccctcagaagtttgcagtgtatacaataagaaaggaatatctaaactctatccttggcaggtacataactattagttgatgtgtgggttgttatttgttaattatttttggatacagctgataatatttttgaagtgcctactcctatagatagatagatagatagatagatagatagataaatagatagatagatagatagatagatgtaaatctgtttctctattgcagttcaaaaataaataatatcagttgagagcctgctgctagtattcgccatccaaagttaatcggctcttcatgcattgttcctttcatgacatttatcatatcacttgtgccgtggttgtacatgtgatgtatgttggttttcttattttttaatgtttttcatgaacttgcacaaaatttattgacaatttttatcctcgactctattcttatatcttgtatttatactttctaaatatgtgccgttgattaatgagtgattttaggtcagtatcatatctgaaaaagttttcctattctttcttgtatgcctgtttgtacgcatgctattgcctctgaagtccttttcatgagctgaatacaaattgttaattttctaggtcgagtgtcttcaggtagatggtgttttgcagaaaaggaatctagtatattgtgcttctacaaggtatcttcatcgttggctatgaatctgattcaaagtttctttttcatacattttctttggatcatgatagcagtattattaatctcactaggaggcttctatcttacaagaatttattatcaatttcaaaaccatgctgtttgcgcagtgctggtaaaagttttgttgcagaagtcttgatgctgcgccgggtcataagaactggaaaaatg

SEQ ID NO: 3942 - DNA, 3000 bp, Unknown
  misc_feature (1)..( 3000): cDNA_ID_1822469_gDNA_ID_1620675_Annot_ID_48227 3000 nt of promoter + ATG
caccgatgccttatcttgcagcgattgcatctccctctctctctctctctctctggttttcgtctctctcgcagtgatgaagaaactgtgggtgattgaattgaattttaaaaaggaatggtgggggctctggtcgtggtcgcgtggaggcaacgctctcttttttctattacactagttgggcctttttggcatatgccgtgaccaaaactaaagacacttgtcttgatgattctctttgacttttggtcctatccaatcaatttaggattttgaagtaattgggcacacttgaattggcccgttaagaagcccattattctaaacgcgacaaactctttagtgacgacgatttgcgtttgaagaaataagtgatttaaaatccgcgtttaaaaaggactaagctgagctgaccccgtcgagaattggtttcctcttttcctcgctccgaagacaagaaatattccggtgaggcaatggcgtcgaacagcagagaagccaggaggcggaagatcctagatagaggatctgatcgtttagcctttatcactggtcagatcaacggcgttccttctccacctccttccgattctacttcttccctttcccagtctgaccttcaaactgaccaatccttaccggatacgattccccctcgcgatcagattcttaaagctcaagaaatcggtactctttcgctctctctttctctagggaatattgtcatccttggattgtttgtgtgtgtaagaatttgagcgacacaatcgaattttacttactctattgggtgaaaggataatcaaattggcttctttgatcagattttatgtgtgtttggctcgtttcagagtggaattcatgtgtgttaagaacccggcttgaaccattggatgtttgaaatagggcaaatttgtagagaagaataggacaacgcattatctacatttttatcttttagtttattttgtcctctgagtatagtagttaatgggcagtgaagctgttaaatccagatttcaacttggaacctacttgtcttaagctgaaattagatattatgaacctgatttcactgttctctacttttgcttaagtcacctcgccccttgaaattttctttgccattctgtgaaattctttataggtgtggttcaaccacagtcaagtgtttggaaagcttattatgttgtgtgtttttgaaatttgcttgccttgtattgtgtcacaaagtttggaaggaaaagattgctacgctgcttgattggagccaataaatcttaaggcgttgtatatattcacaatcagtgggttcttagtggtggtggaaaaacccattgattgtgaatgttctttttggcgtttcttgaagctaacctttgctgattttgatgatccttggttgtgaaattgcagctttcacaagtcaccaggacaacatctctgatgctgcaatgcttgagaatgtggatcatatcatccatcaaagcagggaagaacctcttcagcctcagaggcatgctgaaacattggcagaagcctctgcttcagatcctagagacacaacaacaatacaaccgcctcctacaacatcaagtgttcaaaacccatcagtggtagatttaggtgcttctcaagcatttattcctgtggttagttttgtgaacgccatcacaccaaagcacattggagcggccattgatgcttcggaatacgcacggatgttcacagctcttgcgattgcacttgttgtcatactatctcatctcggtttctcttccctaggcaacattgtaagcttcaggccagttttcttgcttgtcttgactgatgccacaattgtgcttggacgtgttctgctgagtcatcgtggagactcttcctcggcctcagggacggtgatgagcgggcagggtattgtggaccaagtaggcaacgctttggagacggtgatgatggtgaagaagataatggatgcacttcttatggattttagcttatacgctgtgattctcatatgtggcctcttggtcacccaaagcatctttccttaggtcaccttttaaattaggtttctttgtgctcggtagatttgtgttttgcttatggtttgaatatcttaaaattatagttagttccaaaacataattacatgtttcagatatctttctctttccttttcttttgcgtgagaagatcaatatttattggtgtttggtagtttggaagaataaatttaaaggttctcctccaattttttttaaagttatcattgcatcactgaattagggtgtattttttcttgttttgagattttgtgatctctgaaaggaaaagaaaagttaaggtgggaaagtgcagactgaagagaaagacaaaggaagaagtaaataaatttttggctgtcacacaataaattaccgagaaattagggaagcaacgtaagaaagtccctctgtcgctgtcaaaaaaacaaaggtaaaaatacgtcatacgacgaatcataaacgtttgtttctttttttttttctttttttttgattatttataaattacttttttttttctttttggcagccatttttttcatttgccgctaaagtgaaagtgcagactgaagagaaagagagagatacaatcgaagttccaaggtttctagttcccggaaatggagatttctccggcggaagacaaactcgttggctccggcgaagctgttactacagaagaagtatcagacataaataacaaagctgtagacatttgtcggatttgccaatcaccggaggaaccagacaatccgttgagacatccgtgcgcgtgtagaggctctctcaagtatatccactcagattgtcttttcctctggctcaatcgccgtaaacgcaaccattgcgaggttttaaacccctttttcaaaaactctgtttctgctacgaattgagtttaaagtttacttctttttcaaaaatttcctcttttctatgtgatttgaggaag

SEQ ID NO: 3943 - DNA, 3000 bp, Unknown
  misc_feature (1)..( 3000): cDNA_ID_3072217_gDNA_ID_1620675_Annot_ID_48228 3000 nt of promoter + ATG
cacggtagtgagtgtgacaatggaccagtacattgagtaagtgtaccctaaccatacacttctttccttaaaatcctcaacttgcgatcctatccatgtatccgtaggccttggataatggtaggctatccagtataaaatgcaacccgccaaatgtatccaaaatatcgttacctgaatcaaatttcacaatttgaataaaagtcatagattgacatagccaatttagtgattgtatggaccacatatagataattcaatataagtaaaacttacacatagaagtttgatgactcggatcacgaaatagttgaaatgtgcgtctttctctagtctgttaaaaaaagaaagaaaggaagtgtaaaatagacacacacatatgtactatatgataagtggatttcaatattgcatattatatagaaagtagtaaagaaaaaaccttttaaagagttcggctacacgacggagacgccagaggcggagtaaattaaggaagccgaaagcttggcctcgtccgacatctccggtaatagttttataaatgaattgaatgggtaacgttgatgctacgtccatcacaaaagccacgctcttcaagtacctataataatgcacaacatatataattcaattctaacttattcattttacttatgttatttttttaacatataaaaacaaattgatttgttaccgtttggcgatgagcttgtggtcggtgacattgaggtaagtagtattatccaagtaggaaacaaaaaaggtgaggatgatatcaacggcgaagaagaagtcaacgacgagatcaatggtcaataacgctccttcggcagctttctcgaaagccaactcgaacaaagatgcccacgccgaatacccaaccaatatcaccaaaaacaattcccacaacctaccattaatttttatatggaaagattaaaaaaaaattaagatatatgaatattaataagaaataacaattttaagacgtaaaaatatgaaaattaatgaacgaatcatttgatcattaatttatggactaatagaaacagaaaagttatgaaatctgtaaatcactatttattgtttgataaccaaaaaacatttcttcgttgtttagttagtgagaaatgaacctgtaacgacgatcaaagtgaagaacgatgaaaggtttggaagaaggattatcatcttcgatgaaagtcccaaaagcaggcaagagactgctcgaaactgacgttatgttcctcacatctttgctcgatcttcttctgaactgcagtatcgataacggcgatcttgcttccgccgtcgacgccgataacgccgtcgaagaccttcctcttctcaacaacaacggcaacggtgatctcgcctcagtagtcgtcgtagacattcttttttccttcttcttcttctctctcttcttcaagcttgatgatatatacttccctcttttgtctctttcatttataccttttttttttagttttgaattattaaagaggtgtttagatgatcaagaaggtggtgagcaaattaagttgacttttttttttactggtttttgttttccctatattttttggaaaaaaagaatataacaatactataaaacaaatttacttaaccatctaataaattataatttttcaagattgtagtatgatgaattttactctttatatattcaactttgttgttatatatgcagaaggcttcatcgacttttttgactcttatttacgtctctgtgtgtatttaatgtggcatcaggtgtagtgattacaatcgagatctacaatatcagggggataaggtttttttttttttttttcttacgataaattatgtaataattagctgtttaaatactggagttgaaaaaattgaggaactcaaaagtcaaatcttgacgtcttttttgttgttgttattaaatgagaccgtgacaggaatagtagtgttgaaaacaaaacgaacaataataaacaaatgaattacgtatcaatatctatcatcagtcagaatttagtatgtttttaatacaatcatttcagtttttttgagataacatatcatatatatatacttctttccactttccagtgttggatgtgcatgtttacaatttttttaaaaaattctaaggaaaacaatgttttgaaattctaagatacgtttaggtaatacatgaagggggatacactttgtcttcgtcccttaattagctcctatgaagaatttcacatacacaaattaagaagatgcatgcaataacaaggctaaagccatttcttaatagttcatttgtacataaagtaagtttgtgtatgttaaaaaaaaattgtgtatgtactgatgtacagtatgttgttgattgttgatacgtaaaaccaaatagtcaaatactatacatttttacgtttgctcgtataaattaggaaacgaaagcataattgttacggataaaaaaacacgaaaatcaattaatgaaacaaaacccttttgtaaaaaagcccatttttatggaagcccattttgagatggaccagttaatgaaaaaaaatccaagaaacaatgaaacgaacgtttaagatccatgatggaaatttgggccaagattataagaagatctcaccacatttcatttgggccgggtgggcgaaacattccgggtgatcgtgtagacccaattttttcggtggaaagtgcaaaaaaaatgcaattggtggatgtcgtcgcggttcgaccccaagggatttggccggtaaaattattgggagttgtctttctcttgcactctctctagttccaaaccctagcaattcctctgttttcaccattttcggagattatcaccttctccccgattcgccgccttgtgattacatctacgtaaagagtttctggtagaaattttccctcttttagctgcagattggcatcagattccgttctggatgtgtcggtgatcgattttccgcgtcggtgatg

SEQ ID NO: 3944 - DNA, 3000 bp, Unknown
  misc_feature (1)..( 3000): cDNA_ID_1822461_gDNA_ID_1620675_Annot_ID_48229 3000 nt of promoter + ATG
tgctacagattccaaaagctggcatccaaaatcccgaacaagggccagaggaaatgcggagtatttatttctctttagaaagtcaaacaaacttggcccaagcttctcgaacacctggtatcaccattagagttcattcacaggaaggttccgtttagttccaaacttcgaaaaaatccacatgagtaaacaaactacacaaacactatacacggaattggatttctgtcacttgggcatcaaacaaagaaaggtagccagaaatattatgattcattcatttgtaacactaacaaacctcacaggtcactgaacatagaaccaattaaatattagagatgcatttgaacggtggtggaaatcaatgagcttagttgggatacttacaatgcaaatatgatttcggtaatcaaaccagttcttcatctgtacacagctgcaaggacaaagcagaaatgaagaaactgagcaatgatatacacctctgaaggaaacgatgtcatcaactaaagtctagaagataaataaataccgtgtgcggcctttatcactcttaacaagtttctgaagtacatcaatttcaatcattgctgcatcccggtatttcttaatgcttcgaattatctttattgccacatattcttttgtatcacgatcccaacattccaaaacccgaccaaatgtgcctacaacaccagcaagttcactgaaatggcacgatttgattcacataaacattttttttatctcgaacacaccatgccacttgacagctaaccttcacccatcttgctaagtattttatctgtcaaaagtcaaaacagaacacacaatagcgtaagttaagcaattaaaaatgttcaggaaggattctcatcccaatgaaacgaaagcgaaaaaagattatccctaaggcaatggtgccaaacaaaacaaagagttactagcaacaatacacatatagaagcaacataggtaaatatcttagctcacatagaatagaaagttagcaactttatccatcaaaaactcacatctaggagtgagattgtccctcaaactgaaaacataatgaccatcacgatcatcgtcccttaatggtggtgacaaaatcctcccatcgcttccatgtcctttaatcacagcccttttagcctatcacaaaaaagtcaaaattcattcattgtcagcatatcaaaatctcaccaaagaaacataaatgctcggtctttcctccacattctaaaccctaattcgaagttctaaatgtcaaagattaattaaaaaaagaagaagaagaaagaggagcaacctctggttcagctggggcctcgtcccaggtcatacgaggacgtttcctgactcgttctttatccatactctcgaatccgttagctatcatcaccgacgcggaaaatcgatcaccgacacatccagaacggaatctgatgccaatctgcagctaaaagagggaaaatttctaccagaaactctttacgtagatgtaatcacaaggcggcgaatcggggagaaggtgataatctccgaaaatggtgaaaacagaggaattgctagggtttggaactagagagagtgcaagagaaagacaactcccaataattttaccggccaaatcccttggggtcgaaccgcgacgacatccaccaattgcattttttttgcactttccaccgaaaaaattgggtctacacgatcacccggaatgtttcgcccacccggcccaaatgaaatgtggtgagatcttcttataatcttggcccaaatttccatcatggatcttaaacgttcgtttcattgtttcttggattttttttcattaactggtccatctcaaaatgggcttccataaaaatgggcttttttacaaaagggttttgtttcattaattgattttcgtgtttttttatccgtaacaattatgctttcgtttcctaatttatacgagcaaacgtaaaaatgtatagtatttgactatttggttttacgtatcaacaatcaacaacatactgtacatcagtacatacacaatttttttttaacatacacaaacttactttatgtacaaatgaactattaagaaatggctttagccttgttattgcatgcatcttcttaatttgtgtatgtgaaattcttcataggagctaattaagggacgaagacaaagtgtatcccccttcatgtattacctaaacgtatcttagaatttcaaaacattgttttccttagaattttttaaaaaaattgtaaacatgcacatccaacactggaaagtggaaagaagtatatatatatgatatgttatctcaaaaaaactgaaatgattgtattaaaaacatactaaattctgactgatgatagatattgatacgtaattcatttgtttattattgttcgttttgttttcaacactactattcctgtcacggtctcatttaataacaacaacaaaaaagacgtcaagatttgacttttgagttcctcaattttttcaactccagtatttaaacagctaattattacataatttatcgtaagaaaaaaaaaaaaaaaaaccttatccccctgatattgtagatctcgattgtaatcactacacctgatgccacattaaatacacacagagacgtaaataagagtcaaaaaagtcgatgaagccttctgcatatataacaacaaagttgaatatataaagagtaaaattcatcatactacaatcttgaaaaattataatttattagatggttaagtaaatttgttttatagtattgttatattctttttttccaaaaaatatagggaaaacaaaaaccagtaaaaaaaaaagtcaacttaatttgctcaccaccttcttgatcatctaaacacctctttaataattcaaaactaaaaaaaaaaggtataaatgaaagagacaaaagagggaagtatatatcatcaagcttgaagaagagagagaagaagaagaaggaaaaaaga

SEQ ID NO: 3945 - DNA, 3000 bp, Unknown
  misc_feature (1)..( 3000): cDNA_ID_2135468_gDNA_ID_1620675_Annot_ID_164246 3000 nt of promoter + ATG
actaagcaactcggaccgaggatcaactgaattcttaccagaaggcaatggatgcaatctactcgcagatggtgaaccaggagtaacagaatttgaaggaaactgggtacagtttggatcaaaccgtgaagacagcattattgcagcattagcttcaagattctcctcatcatcttcccgtgataccttggatattctaccagaagcatcacctgaagacttggcctcttttcccacgcgtctgtttgatgctgaggacttcctttttctgctgttactatttctttgtttaacaacaaccagctgatcatctttcactggagactgattagaatgcccattttccaactgcaacggagctgcggaattagattctttgatatctttgtcagagtccttctcttcaactttagagggttgatcctgaacactagattcttcagcagtaaccttagggatattaacaaccagctcctcctgactatcagactcccctgcagacttctgtgctaggccattctcaaacctactcctcccaacaaaatctctcctgcgtctaggaacataaatcgtactacttgccaaaccaacagaaatcacttgaagcccattactgtcacacaatttctcatccaaacccacctccttggagtcctccaaattgtgcaatatagtggtgccattgcatgccttatccagaatactctcgttctggctacctactttcttaaaactacttagagaaacaactttcctgctcttcttgtcctgcttcaactgatcaccatcaatcccagacctatgttttcttttaaagctcttattcactgaatccttggaaatgctagacttatagagcgtcttaagatctaaagacctggatttcttcgaaattcccactccattagagttacctagtctattttccatgaaagccacctcgaaccaatacccagaatcaaaagccagcaggtctcaaattccatcatatacgcaagcaaacatttttcagatctgtgacaccaaaaccaaacccagaatcacaaaaagtacccaaagtatgataaaagaagaacacacaagtcacccaaagaaacagatcaaatcccacttcaggaaaaaactttgcattgaaatccaagcaattgttttttcaacaatcaagcaaaatttaactgcaaaaaattaaaaaaaaaaagagagaaatttgcatgcctacctgcatcactttatcagacgaaatcgagtctcttaaggacctttatagtcgccacaatcccaaaatcaaaattagggtttcggtaaatcggactgcgaatcggatccctaaatcaaacaatcgaaaatttcccaaaagtattcgttcaatttagccgaaaataaaaaaagcaaaatttgcttcttttttttttcttttttaaccgggagaaacgggagagctagggtttcgtctggttccgcgagagtaaggttttttcagttataaagaaaacatattccaaataaacatcgtatcacgggtaccgtccgatggagacgcgttactatatctacggtccatatttagtttcgaaataagcactaaatttttaactctgcaacagaaaagatataatggacgttcgagattctcagctgcgaaatatttgtttggacggtcaggatttaaagatttcttcagagagaataatttattgttgtcacgtgtgttgctaacctaccgcaatcttgtgtttgtccacctagccaacaattgttagagacatcattcaacttaacaactattattactagaatactaggggataatttaagtataaaatcatcacattacagtattatctttttaataatttatatatatatatatatattattgttattttcttttaatatataaacttcattcatccattagcttaacaattttccaatattttgtaaaaatatatatatacatattattaggagttttcggaccatatttaagtattagtgtattactaccttattatgtgtttaaatatatatttttattaaatatagacatatagcaaaaagaattagtagtagagagattgattggaatcaatttttgattaattatatagtgtaaactaagctttaagaatatttaaaaaatagatttggtttccttataaatatgaattaaggtcattattaacgtatcataagatttagagcaatgtataaacacaagaagaaaaacaataaaagttcagaaattcctttttcgattcaaaaatacgttaaaaattgacaaaatattttggcgggtggattgtatattggaacccaaaatttgcttttttaatacagaaaaataaaataaaattggcttaattggaaaaactaatattgagttcataaaccaaattaaggtttaattagacagtctaatccaatgttcggttcaattttgtaatcaaatgttcggttcaattttgtaatcaaatgttcggtttgatgatccataagagaggagataacatcccaaatagagacagatccccttcccttgtcgtgtagcccagtagctctaatcgctacgattgctacacaccacatcccttaagaaaaccctaatcatctctctctcgcattctataggaatcgcttcccgaagcttccaacattctcttgtttctcctttgtctctcaatttcagtttcctatattatacgcttgtattaatcaccagtatacattttgtcgtttctgggtctggaaccctagtagttattatagcatccatcgctttcttcaatcgccgtccatcagagtttcaagggatttgctttaaagatcaatcctttcctaagaaaatagcgacaattcatcagcttttcctttcccatccttcattaccttaacttactcgagattcatcttccagctgaaattgtgaaacttcgtttctgggtttttatcagaaaacactctgtgacttattgtgtggtgatcgaggaaagaaaaaag

SEQ ID NO: 3946 - DNA, 3000 bp, Unknown
  misc_feature (1)..( 3000): cDNA_ID_2135462_gDNA_ID_1620675_Annot_ID_164243 3000 nt of promoter + ATG
cacacagggcacatcaatttctgcaacctgggtcagtgaataggtttacacatgctatgatgtggaaaggtggaaaagattggaccttggagttccctgataggggccagtggttcctttttaaagagatgcatgaagagtgctacaatagaaatactcgggctgctttagttagaaatattcctattcctggcatccgcatgatagaaagggataattttgatggaacagaaactgaatttattcgcagttcttctaaatattttcggcagactgaaactgatgttgagatggcattagatccttcacgtgttatgtatgacatggacagcgatgatgagcagtgccttttgagaattcgtgagtgttcgagtgctgagaatagtggctcttgtgagatcactgaggacatgtttgagaaggcaatggacatgtttgagaaggcttcatttgtaaagcagcgtgataactttaccttaatcgaaattcaagaattgacggctggagttggatccttggaagcaatggaaacaatatatgagctttggagaacaaagaggcagaggaagggaatgccattgatcaggcatcttcaggtacaatctctgatgccttttcatcttttattatttatttggttttcatgtttttcttgagatttaaaaatctgcatgactaggctcaacatagatctttttggaatcgggggaaatgcagaattgtggacaataaggctatgtctagtagtaggtattacttagtgttcttttcaggatattgaatgatgtgggtgttttatgcaaatggaacgtctattagggggaaaattgcatctttttgcattccagtttgttgtgcacgaagatgtctggaagtccataactgtagcatcttctatagtctgttgattttactccttgttgattagtcttacttgctagctcaacaataatgtagttactctgctgcaatatttttaattttgcctaacgtaaacacttgttttctacccttgcaattcagccacctctatgggaaaaatatcaaagggagctcaaagactgggagttggttatgagcaaagcaaacactccaaattcctgtgggtcgcagaagaaacagtcacctactgagaagccagcgatgtttgctttctgttttaagcctcgaggtttggaagtcaaacacaggggaacaaaacacaggtcacagaagaaactctcagtttatgctcaacatagttctgctttgggagattatgatggctgtaattcatcaggtaactcgtttttacctgcttgatattctataaatcctctattgactctgatttttcaaaatgaagtctgtgtttaatccaacttttccatttctctagcaggaagaagacctgttggttttgtctctggcgacgagaggtttttatattcaaatcaaagctatgagcactcgaatgaattttctgtacatccaggaacatattcccctcgtgacctaggcatgggatatttctcgagcggtggaaatggatatcataggaatcaccaaaacaagtcgcaaagaatcaatgggaagaggaatacgagtgaacgatgggatgcaggctattctgaatgccccagttccaatcttgtctgttactccaacggatctcagcgtcctgatgtggaaggaatacggaatagtacagacattgatgagtacaaattgcgagatgcagctggtgctgcaaggcgagcatgcgctttggcgaagctcaagcgggaaagagcagagagtttgaggtacaaagcagatctagcgatccagaaagctgcagctgctctcatgtgtgcagaggcagttaaagcttcttccgaggacctaggcaacaacaatggggtagaaagctcaagcgaaggatgagtcaatagataccactcttgttaagtctgggtattgtcacctcttgagcaaaagaagagatagtgattcgacatgtcctgttcaacacacgagctggtcttgacacgaattaaaaaacgacccagatgagctccactgtacagaaatttgcctccctctgctttaagtaagctatattttgatgcagcaataacaccgaactgggactctgaaacttgatctcatgtacccatcggctgggaatgttcttagtaggttaagaagagagacaaaaattgaggagatggtaaaaaaaaaaaaaaaaaaaaagagagaaaaaagaaaagaggagattgtaagtaatttggtttattaggcttcttttggtagagagatttagtttgagcaaaaaaaagattattctactgcaagtattttgcggtgctcttcttctccatatttcttctctgccttcttttcaattttagtcaagatcataaagtttgaaaaatattgaaacgaagtcaaacttgcaacacttgccatgtagtcatataattacaaaaattagttacaaatcacatttgtcaatactcttccaaaaatttagtattctcttataatttgtaaaacattgggaaaaatgagagagaagaaaaggtggtgagagaaattccaacggcgggaaatctttgaagttagcagttttgtcggaagatgtctcattcgtttgctggcttcatgatctctctgttacttatttcctaaatttgtcatatcttggacaacctcctgagagaagttctttctcatcattctttccaccccaaattctcttcttcgactggttcctcttctttttgtaaggtttttctcttctctttttttttttgtttgtttgaacattttagagcatcaggggcttgaagcttaaaatttcccatgtttctcgcatgtaacgtaagattaaggatttaaagatgcacgagaataacctcaatgtttttggcttaagatagtaatttcttctcaggtaaatgatgacattgctctttgataggatttctcatttgagatattgtttttcttcatgagagaggcatttttccaagaatg

SEQ ID NO: 3947 - DNA, 3000 bp, Unknown; identical to SEQ ID NO: 3944
  misc_feature (1)..( 3000): cDNA_ID_1822461_gDNA_ID_1620675_Annot_ID_164242 3000 nt of promoter + ATG

SEQ ID NO: 3948 - DNA, 3000 bp, Unknown
  misc_feature (1)..( 3000): cDNA_ID_3072217_gDNA_ID_1620675_Annot_ID_164241 3000 nt of promoter + ATG
gcttgtgtatcgcaatatatcattgatcgcactcctctgttcagcagaagaatgattattgtacgactggtagagtaaatgaatgagtaaacaatcttttcgggtttaagcaatgaatgattatataccatggcgaatgtacgaagagcgccatggacaactagattggtcatgataccgatgatataagaagtgaggccaatgttgaaaagcatgtagaacatgttgaatgtcttctcacggctattaactgcatgcaaatcaccgtaacccacggtagtgagtgtgacaatggaccagtacattgagtaagtgtaccctaaccatacacttctttccttaaaatcctcaacttgcgatcctatccatgtatccgtaggccttggataatggtaggctatccagtataaaatgcaacccgccaaatgtatccaaaatatcgttacctgaatcaaatttcacaatttgaataaaagtcatagattgacatagccaatttagtgattgtatggaccacatatagataattcaatataagtaaaacttacacatagaagtttgatgactcggatcacgaaatagttgaaatgtgcgtctttctctagtctgttaaaaaaagaaagaaaggaagtgtaaaatagacacacacatatgtactatatgataagtggatttcaatattgcatattatatagaaagtagtaaagaaaaaaccttttaaagagttcggctacacgacggagacgccagaggcggagtaaattaaggaagccgaaagcttggcctcgtccgacatctccggtaatagttttataaatgaattgaatgggtaacgttgatgctacgtccatcacaaaagccacgctcttcaagtacctataataatgcacaacatatataattcaattctaacttattcattttacttatgttatttttttaacatataaaaacaaattgatttgttaccgtttggcgatgagcttgtggtcggtgacattgaggtaagtagtattatccaagtaggaaacaaaaaaggtgaggatgatatcaacggcgaagaagaagtcaacgacgagatcaatggtcaataacgctccttcggcagctttctcgaaagccaactcgaacaaagatgcccacgccgaatacccaaccaatatcaccaaaaacaattcccacaacctaccattaatttttatatggaaagattaaaaaaaaattaagatatatgaatattaataagaaataacaattttaagacgtaaaaatatgaaaattaatgaacgaatcatttgatcattaatttatggactaatagaaacagaaaagttatgaaatctgtaaatcactatttattgtttgataaccaaaaaacatttcttcgttgtttagttagtgagaaatgaacctgtaacgacgatcaaagtgaagaacgatgaaaggtttggaagaaggattatcatcttcgatgaaagtcccaaaagcaggcaagagactgctcgaaactgacgttatgttcctcacatctttgctcgatcttcttctgaactgcagtatcgataacggcgatcttgcttccgccgtcgacgccgataacgccgtcgaagaccttcctcttctcaacaacaacggcaacggtgatctcgcctcagtagtcgtcgtagacattcttttttccttcttcttcttctctctcttcttcaagcttgatgatatatacttccctcttttgtctctttcatttataccttttttttttagttttgaattattaaagaggtgtttagatgatcaagaaggtggtgagcaaattaagttgacttttttttttactggtttttgttttccctatattttttggaaaaaaagaatataacaatactataaaacaaatttacttaaccatctaataaattataatttttcaagattgtagtatgatgaattttactctttatatattcaactttgttgttatatatgcagaaggcttcatcgacttttttgactcttatttacgtctctgtgtgtatttaatgtggcatcaggtgtagtgattacaatcgagatctacaatatcagggggataaggtttttttttttttttttcttacgataaattatgtaataattagctgtttaaatactggagttgaaaaaattgaggaactcaaaagtcaaatcttgacgtcttttttgttgttgttattaaatgagaccgtgacaggaatagtagtgttgaaaacaaaacgaacaataataaacaaatgaattacgtatcaatatctatcatcagtcagaatttagtatgtttttaatacaatcatttcagtttttttgagataacatatcatatatatatacttctttccactttccagtgttggatgtgcatgtttacaatttttttaaaaaattctaaggaaaacaatgttttgaaattctaagatacgtttaggtaatacatgaagggggatacactttgtcttcgtcccttaattagctcctatgaagaatttcacatacacaaattaagaagatgcatgcaataacaaggctaaagccatttcttaatagttcatttgtacataaagtaagtttgtgtatgttaaaaaaaaattgtgtatgtactgatgtacagtatgttgttgattgttgatacgtaaaaccaaatagtcaaatactatacatttttacgtttgctcgtataaattaggaaacgaaagcataattgttacggataaaaaaacacgaaaatcaattaatgaaacaaaacccttttgtaaaaaagcccatttttatggaagcccattttgagatggaccagttaatgaaaaaaaatccaagaaacaatgaaacgaacgtttaagatccatgatggaaatttgggccaagattataagaagatctcaccacatttcatttgggccgggtgggcgaaacattccgggtgatcgtgtagacccaattttttcggtggaaagtgcaaaaaaaatg

SEQ ID NO: 3949 - DNA, 3000 bp, Unknown; identical to SEQ ID NO: 3942
  misc_feature (1)..( 3000): cDNA_ID_1822469_gDNA_ID_1620675_Annot_ID_164240 3000 nt of promoter + ATG

SEQ ID NO: 3950 - DNA, 3000 bp, Unknown
  misc_feature (1)..( 3000): cDNA_ID_3072232_gDNA_ID_1620675_Annot_ID_164236 3000 nt of promoter + ATG
caattagcttctcccagtttggtgatgattttttccaggaaacttcagatcaaacgatggaatcaaaatcaagagtcaaaaaatcttgccgcagaagtagacgtcaaataacaacttttctaaaaatataaactaattttgtcgaacttgtttacttggctctttgaactcgatcgttgaatttcacaaagcatgattttctatatatagctcaatctatttttgctctgagttaagaatatttataacgagtgttgatgatgaaaatgaatacttgtaatgagaataaagattaaaacacaataaatttcttcaagtaacacgaacaaaagattattatcaactattttaattaatcatgaaatttgctacttgctttttagtttcttacgttcttgtctttctcgttcttagcgtctgtaaaggtaatatataccagatattttctttcgattctgtttcgttacttgcgtaatatagaactatgacccttacaaattattggcaaacaaaattacagtgttgacattagaaaaaactaacaaaaatgttgttctagaacaatgttttttgttttgtttttttttttttgcattatcaataattgttttatctaaagagcttcaaccaaaaacaaactaacagttcttgttgtagaagtggaagccaaagaactgtgtaatagaatagaagacatcgatggaaattgtgactttgaaggagagaaggggtgcttgaaattcatgacgaataaatataagaaagaaagacatgttagctgcacatgtactaacctttacatgttacacaagaccaaacgtttttgcgactgtaaacatcgctgctcaggataaactcccctaaccaacattgcttttacctattttttagtttttactaatagaattgttatgagtgtttgtagtgttgtcattttcatgacccataaataagttatgttattctaatgtatctctctttttccacacaaatttttaataaagttatgagttacttctttctaagtagttagtatgagttttccaatcaatctattttccacgttcagttttccaaattgtattgatcctgttatagtgtaattacgcattttgtaattggccatggtactacaatactaatactatcatgttatctgcagacttcaatcttttatttttaaaaattaattattagcatttgtaatattgatgtaattttaatacaaactgtttattaatttgtttgaaaacttatgtggacaaataaaattagtatacagaacaaaaaaatatgtttcaataccaaaaaaagttcactccctaagcttttctgtctcttaaggataacatcctggatgaggtctctcgatgattccccccacatacaacataaccatataaaaaaaaaatcatcagccaagtgaagcctcgggaacagtagtgtgaacctttggatccttggcctatcgtcaaatgatcgacgacggtcgagttgattgatcctacacagtacacaacctgaatgttttcccatagcatctctgcttcatctattccttgctagtaggattgatcccagaaaaccataaatttgttttataaagattgaacgtttgtctatagattaattttcaatggattaaacattgtaaattaatggtcttatggattttgtgagtttagattatcaaggttagaactgtgtattttgaaaagaataggtgatgcgtcatcacaatacacgcaaaaaaaaaaagtgaaaaatatataatactagtaagtagatttacaaagaagaatttttccaaaaaagaaagagttgatccgtcgaactcgttaattaagaaggctcgttgaattttacaaagcaaattctaaaaaaagatgcatctatttttacgatatctcgaatatatttattatgagtgttgttgataagaaagataaaaaattcgagaggcaaacaatagttttctgcaactatagagataattaataattcttatcagcttttcaatcatgagatctgttatttggtttatagtttcttatactctcatgttactcgttctgagaggtggtaaaggtaatatgttgagttttttttgtatggacgtaactcgtatataataagatataaaacaaggatgttctttctaattgcaaaaacggtgttgtgattaaaggaaataaaaagcattgttacaacgttaacatatggtttaatagtgaacttatttggattgtcatttgtttattaatcgaactaaaattaacgtttttttttttttttttggtttgtgtggttgagaaaacaatagaagtggaagctgagaaactgtgtacaacgataggagacttggacggtaaatgtagccaagacggagaaaagttgtgcatgagatacatgactgatcaatctaaaaaaaagtttcttagctgcacatgtaataacgttgttatgttacacaagtacaaacattattgcgaatgtcaatctcattgtactccaaaacaaacgtaagctgtaactctataatcaatatatctctttacaactaaataagaattgttgatagagtttgtagtgttttcacgactcaaaaatacaaatgttgtgctgattgaagtatgaatttttggttcaagtcttgatcttgatcattgaaaaaaatcgtgaaaatattgatcaattgccaacgaaaagacgtaatggggtgaatcagatagtgtaggattatttggggtaattttgttacattctaaagtatagtgggtggggttaaattgatagtattaaaaaagtcaagggttaatacgaaatacaaatataatcaatagcgaaaaaccaaaaaataaataaataaatgacaatttgactcgaaaactttaagagaaaatggaaactgtgtctcaataaaccctagtaccctttttctctcttattcttctatcttcctcctcctctatctttcgctcgagccattgagcaattatg

SEQ ID NO: 3951 - DNA, 3000 bp, Unknown
  misc_feature (1)..( 3000): cDNA_ID_1012450_gDNA_ID_1620675_Annot_ID_164233 3000 nt of promoter + ATG
aaggacgttgaacaaaaagtagctaaacatatattacgacaatttgttagatatagcaaggacgttgaaattttcccaacaaaatattgtatgcttttgttaaaaatttatgaacttaaaactgcggagttgcaacagaagatatctaccttagagtcggaaattctggctctgctgaaggttcaggcacatcattaccaggtccagcgttacgaagatttggagggtaagatgtcaaaggctgtgtttgaggaggtgtgaacacaggagctgatctctctgatctctgagggaaaacagcaccagcacgctgaaagggacatgagtcactggtggttaggcaagagtagtagaagattttctaacagaactcacaaaaggatctaagaagaattcattatgagatgtaataaaatttcagtatgagacatctggacacccagaatcagaaacactactctactgaaggaaaaaaaaatgaaacccaaaataagtatatcaaacaactaaattatgtagacataccaacaattcctggtatcctgcatagtattgtggatatcttgccctagggccaccaaaggcctcttgccatgtatcgataaggaccagaatcttctctttgacatggaagtccggctatatgcatcagaccaattaggattagagaggcagagcaagggagagagaaagagagaccaatttggaagaaccattaccttcttcttaactatccggaccatctcatgaataacacctttctcagccacatgcatatgaaccatgtcaccacagttcttcactattgtctcaagcagctagaacataacaaaaagcatgacgatgagtgaataactatcattgcaaaacaaacaagaaagatgaaaaaacgtgaaaataattatcagcatatcattcttgttagaaaacttgtaagtcattaaaatcctcatcatgtacattagtatcatgaacaagtaatctctgatcatgtcaacttccactaataaaagaggtttgtgaaacaaacacgctatccaaatgcaccgtttcagaaacaacagtggctatttcaatgaagtagccatcaaggaaaataaaaaggagagacagttatctaggagctcacagttaaggcaagaagctgagcttttggattcctgctaccaatccgttttttaatgcctttcacaacatcttttgcttgcctacaaaacaggaaccagtttcagacatcacatagtattggtgcagttagtacacacactgaaatctccttcttccaatcacaaagcatataaagaaaataacttgagagcttctacaattaaagccctatgaaagatgactaaattgagcaaaacagtaggccacaagtattccaattggtcctagaaaacatggaaatatctaactctggtaaagaaacgaaatttgatttccatcttactgttaactctctctctctctctctcactgaaccaaaaatccaaatccgtatagagagttacaatagtttacaggagactaatcgagaagtatagaaaacaaaaggtagagagagagagagagataacaacaaaaacaaaatcggagggagcagagggaaacatacgctggatcgctattgagcatatcacagatctcgaggttcatagcccaatcaggcccgatcagcatctcgctcgtcgctctctccaccatagcgttcaccatcttcgctttgacccccaaacagaaaaacaattaacctccgattgaaagagagagacgaattttgaaaccaacgaatcaggcgaagacgaattaagcagccggtaagatcacgcaaagagattactccggcgaagaatctctcgctcaggaattcacgcccttctctctttctactagaaatcttttttttttccttttcttttctttttctctaattgttaattttcagaatttgttttttaaaaatgtattttctgtacttcagatcattttttattttccacgaaatagcaaaaaaggaaataagtcgaatatcttctggaaaagggtccactaaaagattgccacgtgttcatatcgttgtgtttggatagttacaccaattcagtcaggtcattgctttccatcggaccgttgcttttgacccacctataaatccgacggtcatcgtttcactaacagtaaatgttagttattagtattattattttttcgtttttgggagctaaatataataatgttatccaatctaaatgaatgaattagatttagatggaacattacagtttgatgattggtcgattctcaacagcttacaatgttttctttttaatgatcgaaacaaagtatttgcaaaacaaaactaaccagcgattacgattgcgattgcacacgtatgcaattaattatgagtgtcatttgataacgctatgaaaccgttaaatccacatctttacaaaattcatcataaagaaaacattttggtcttatgaaagtcgtgattggtgtgatacaaacctaaaccaacttgctacacatctatttactctctattctattctattgagttctcgtttctttatcactttctgtgttggatgtattcacccacttgcaaaaaataatttagatttatagacatcaaaattgcataagagtgttagttctaacttcatcagttgaattaattaggactctatagctaagcatattctaattctatgattatgataataattgagcgggaagtggggatagattcgaactttaacaaactattgggggtcaaactgtaattacacagaagttatcaaagcaagtacctttacacgcgcctaattgtttctgcatcactaatacttcttcctcatttccccagttcggtgttcattgatttagggttcctgataaacttcggaaacccctattttgaattgtttcggaattatctggtgagaagggtctaattcgattgtggattagttttttttttgtgtttcttca

SEQ ID NO: 3952 - DNA, 3000 bp, Unknown; identical to SEQ ID NO: 3940
  misc_feature (1)..( 3000): cDNA_ID_2992728_gDNA_ID_1620675_Annot_ID_164232 3000 nt of promoter + ATG

SEQ ID NO: 3953 - DNA, 3000 bp, Unknown
  misc_feature (1)..( 3000): cDNA_ID_1023707_gDNA_ID_1620675_Annot_ID_164252 3000 nt of promoter + ATG
cggcttcggctgcaaagaaaaaaacgaaaagtctcttctgagttttgaaacgaattgtatcaataatcgacgagaaaatcgcgccgagagttacaccgaagaactcgagctctatctcaagaggcgtcactgcagaaatcccctgaggagatgatgcttgagaagaagaagaagaagagctgttacaggagattacgcgagctcttccacctccggaaacttttcgatgctgctgaatttgtgcattggagaaggtgaagccgaggttgaaacctaacgaagccatttcttccggctaaatcttcccgtgttagcttccgatctccggcgactttggtacgaagattccagaaactaaagctaaaccacgaatttaattatgtggacttcatcttctacatgttataaggctttttgtctctgttgttaacccattaacaagcccatttaacttattttcaatttatatcttcgacttatctttaaattataaattgaaaagacgttaagtgggccttttagtgctaattttttcaagcccatttaacttatttgagtcttggaatatttcacttggaaaacaatgcgctaattccatctcctataatttccctgtatatattttgagaagatggatggattgagcaattttaaagacaaatatttatgtaactaaaaaattattcttaactttctgatgatttatgtctgagggaagcatctagtatgcattgtttctgtttcatgtgagataagcaagaaaagtaagtgggaaacaagaaagcagaacagtgagattaccaattgtgcaaacaatcatatcatatagtatactttgttcgccatcttactgtcacttaaacaacaaaattcactatcatcgtttagcggattattttcaactatataacccagtaaaagatagtttacttgtcatgtggtatatttgacagttatcaaacttttgagagtttgtgacacgtacgatacagacacaaaatcaaatctccctctccgaccatttttttttcttagttacataaatctcttttccttctccagcaacagaagaattctgctcgataatagattggtaatcacaaaaagaaaagaaaaagtgttggagatccttccgagagagacgcgacatctccttcctcttcgaagatgagtggtactgtgaaggatatcgtttcaaaggaggagcttgataacttgcgccacagcggagcaccactcgtgcttcacttctgggcttcttggtgtgacgcttcgaagcagatggatcaagttttctctcatctcgctactgatttccctcgtgctcacttctttagggttcgtcgtctctgttcgaattttatctctttcaattggtttttgactttgattggttttatttatcttcttaggtagaagctgaggaacatcctgagatatctgaggcttattctgttgctcttgtgccgtatttcgtcttcttcaaggtaaactttaggcatattgattctttgtttggttgcaattttttggcttattgacaaagcttgaatctttgtcactgcactgaatccttttcttattgaaggatggcaaaactgtggatacacttgaaggggcagatccatcaagtttagctaataaagttggcaaagttgctggttctattactcctgcaagcttagggttggctgcagggccaacgattcttgaaactgttaagaagaatgcgaaagcttctggacaagaccgagctcagcctgtatctaccgctgatgctctcaagaatcgtttggaaaaactcaccctgttatgttattcatgaatggtactcctgaagagcctcgatttttaatatctattgagtactttctttatagttggaattcttgtggatatatatcaggtagctacttggagcaaacatgttgctaaagttgacctgctactgttgtttgaagaacacgtgctatgtcttgtcgttgaaggaattatgttcatatgggaagaacataagcctactggaaagtttacccctagctctattgttaacccagatacttgagcctccatatcacaaacatctagttaaggtttgtgtagtaagaacaagaaaaacaacacgtgttcccaattcccatataaatgaccattatacttctatcaacccaattaatcacagtccggagactagttgattaaaaaatcagctaatactaatttggtggtttcaataaacatcttaaatactccataattaaactagattaaagtgggaaaaatcgtcatgagtagttgtaaaatcgatttcatttaagagtatagaaattcgtcatgagtggttggttcatgagttctctctcttactcatattagagtaagaaatcaaacacttataatcattcaaaattcaacaactctcatctcaaaaccatatatttaggtaaagttatatgcatacattttgcattttaattttaaaacagattatttggcgcgtaatgataaaattatgtgtataaaaattatttaactaatcgatctaacaaccacatatgagtaaagtagttaacattgtactactacaccaaattatagtgtgttggttagattagatacacaaactcactttctcaaatcaataacattatgaatctatgataaccttaatttaaaaagagtctataatgccatgattttacaatcgtacttttttcttttgggctgaacttttaatcatatattatttgaaagatgtgattattataatattaaagggaattaaaatcatgtaagagaaacccaataaagtagcttgaagaagaaaaagacaagctttattatacacttacccagaaaaacaaaaaacaaaaaactgataatatctctctctctctctctcgttgagtgtgtccatgaaataatactctgccagagacagagagaaagactgtaacggaggatgtggtggcgaagtggccacactgacacactggtttc

SEQ ID NO: 3954 - DNA, 3000 bp, Unknown
  misc_feature (1)..( 3000): cDNA_ID_1021721_gDNA_ID_1620675_Annot_ID_164250 3000 nt of promoter + ATG
acatcaggagagagagatagagagacagagcagaaccgagatcggaggttgaggagagaccgccgagtccaccggcggaggaagcagaagccgtggaaggagtcatcgccgctttagccgccttattatccggtggtagcctatggtcagccatggaagtggatgctaaagtaggattcttggagcctaaaaagtcatggaacaagagcttatcttgttctgtctgtcggagacgagaatcaatatcagtgggtcgctggccattgttgtggttcaccatcatgaaaccagtgtgtcagtgtggccacttcgccaccacatcctccgttacagtctttctctctgtctctggcagagtattatttcatggacacactcaacgagagagagagagagagatattatcagttttttgttttttgtttttctgggtaagtgtataataaagcttgtctttttcttcttcaagctactttattgggtttctcttacatgattttaattccctttaatattataataatcacatctttcaaataatatatgattaaaagttcagcccaaaagaaaaaagtacgattgtaaaatcatggcattatagactctttttaaattaaggttatcatagattcataatgttattgatttgagaaagtgagtttgtgtatctaatctaaccaacacactataatttggtgtagtagtacaatgttaactactttactcatatgtggttgttagatcgattagttaaataatttttatacacataattttatcattacgcgccaaataatctgttttaaaattaaaatgcaaaatgtatgcatataactttacctaaatatatggttttgagatgagagttgttgaattttgaatgattataagtgtttgatttcttactctaatatgagtaagagagagaactcatgaaccaaccactcatgacgaatttctatactcttaaatgaaatcgattttacaactactcatgacgatttttcccactttaatctagtttaattatggagtatttaagatgtttattgaaaccaccaaattagtattagctgattttttaatcaactagtctccggactgtgattaattgggttgatagaagtataatggtcatttatatgggaattgggaacacgtgttgtttttcttgttcttactacacaaaccttaactagatgtttgtgatatggaggctcaagtatctgggttaacaatagagctaggggtaaactttccagtaggcttatgttcttcccatatgaacataattccttcaacgacaagacatagcacgtgttcttcaaacaacagtagcaggtcaactttagcaacatgtttgctccaagtagctacctgatatatatccacaagaattccaactataaagaaagtactcaatagatattaaaaatcgaggctcttcaggagtaccattcatgaataacataacagggtgagtttttccaaacgattcttgagagcatcagcggtagatacaggctgagctcggtcttgtccagaagctttcgcattcttcttaacagtttcaagaatcgttggccctgcagccaaccctaagcttgcaggagtaatagaaccagcaactttgccaactttattagctaaacttgatggatctgccccttcaagtgtatccacagttttgccatccttcaataagaaaaggattcagtgcagtgacaaagattcaagctttgtcaataagccaaaaaattgcaaccaaacaaagaatcaatatgcctaaagtttaccttgaagaagacgaaatacggcacaagagcaacagaataagcctcagatatctcaggatgttcctcagcttctacctaagaagataaataaaaccaatcaaagtcaaaaaccaattgaaagagataaaattcgaacagagacgacgaaccctaaagaagtgagcacgagggaaatcagtagcgagatgagagaaaacttgatccatctgcttcgaagcgtcacaccaagaagcccagaagtgaagcacgagtggtgctccgctgtggcgcaagttatcaagctcctcctttgaaacgatatccttcacagtaccactcatcttcgaagaggaaggagatgtcgcgtctctctcggaaggatctccaacactttttcttttctttttgtgattaccaatctattatcgagcagaattcttctgttgctggagaaggaaaagagatttatgtaactaagaaaaaaaaatggtcggagagggagatttgattttgtgtctgtatcgtacgtgtcacaaactctcaaaagtttgataactgtcaaatataccacatgacaagtaaactatcttttactgggttatatagttgaaaataatccgctaaacgatgatagtgaattttgttgtttaagtgacagtaagatggcgaacaaagtatactatatgatatgattgtttgcacaattggtaatctcactgttctgctttcttgtttcccacttacttttcttgcttatctcacatgaaacagaaacaatgcatactagatgcttccctcagacataaatcatcagaaagttaagaataattttttagttacataaatatttgtctttaaaattgctcaatccatccatcttctcaaaatatatacagggaaattataggagatggaattagcgcattgttttccaagtgaaatattccaagactcaaataagttaaatgggcttgaaaaaattagcactaaaaggcccacttaacgtcttttcaatttataatttaaagataagtcgaagatataaattgaaaataagttaaatgggcttgttaatgggttaacaacagagacaaaaagccttataacatgtagaagatgaagtccacataattaaattcgtggtttagctttagtttctggaatcttcgtaccaaagtcgccggagatcggaagctaacacgggaagatttagccggaagaaatg

SEQ ID NO: 3955 - DNA, 3000 bp, Unknown
  misc_feature (1)..( 3000): cDNA_ID_1985369_gDNA_ID_1620675_Annot_ID_164249 3000 nt of promoter + ATG
ttaagaataattttttagttacataaatatttgtctttaaaattgctcaatccatccatcttctcaaaatatatacagggaaattataggagatggaattagcgcattgttttccaagtgaaatattccaagactcaaataagttaaatgggcttgaaaaaattagcactaaaaggcccacttaacgtcttttcaatttataatttaaagataagtcgaagatataaattgaaaataagttaaatgggcttgttaatgggttaacaacagagacaaaaagccttataacatgtagaagatgaagtccacataattaaattcgtggtttagctttagtttctggaatcttcgtaccaaagtcgccggagatcggaagctaacacgggaagatttagccggaagaaatggcttcgttaggtttcaacctcggcttcaccttctccaatgcacaaattcagcagcatcgaaaagtttccggaggtggaagagctcgcgtaatctcctgtaacagctcttcttcttcttcttctcaagcatcatctcctcaggggatttctgcagtgacgcctcttgagatagagctcgagttcttcggtgtaactctcggcgcgattttctcgtcgattattgatacaattcgtttcaaaactcagaagagacttttcgtttttttctttgcagccgaagccgggtagcgacgggtcatatccggtagataaagcaaaggctgtgagtggagataagcttctcagaagcattatgcaggataacaaaattgaactctacgctgcttacgtgagttatgttgatttctctctctttaattacgaaatttaacttcagattttctcaatcttaatacattgattgatttgatgtttgaactagtttctggaataatttagtagacaatgaaaatatttagttctagattttgatgtgaggagatggtttgttgaaggcttatgtaaactttggattttggtcaatttgtgatgattaggggaaagtgatgaactgtggtggtggaggaagctgtggaacttgcattgtggaggcaagtgacttcatacaatgttaattagattctgattatgaatttatgagctatgattgttctagcattcatggatatcaatggaggaaaatagatttgtgtttggtcttcttatgatgaccagtaactcaaagcaaaaaaatacacatttggtcttcttgtgtgcagatactcgatggcagagatcttctgaatgagagaacagatacagaaaaccggtacctgaaaaaggctagttatttgatcactcctctctatattattgttagattcacaagtttctcattgctagtgtttggaatgggtatgtgcactaacaagatgaatgaaatgttgagcattgtttctggttaaatgtgaatatatgttttgttgtctgatatggttactaagtaacttttcttagatatgcaaattttggataaaataagagccttggctgtttaaatcttaagggttttgttactattgtgcagaagccggaatcttggagactcgcatgtcaaacaatagtagggaacaaagaaaactcaggaaaggtacctactttcatacaccaatttatgcatatgcaaattgcaaacgctaatgtgcccattatttgggatcataagagtttatttttcctttttatgatctttctcattgagaaaagtcggctttggatataggttgtcgtgcagcggattccacagtggaagaagtgaattaatgtaaaggttatttgtctcagatttatgtgtatataacacatctctgtatgaatgttgtctcgtattaatggaagattcgtttgtctagacgtatttttctttagttcttggatatgtggtgccatgatagtgaaatttaagagagaaactatcaactagctcgcatgattgaaatgtttaaaatttgcttaaagatacggtaggagtgaagctggtcagaagattcggtaggaagtgtttttatgatgatctgaaaatcagtagcatgttttacctttttgagctgaaaatggcatttgtttcttaagctttgaaaacgtgtttctaaaaaataagaacttggtttagtattcgaaccgtttctttgacaactttcagatcactttatttatcgaatgtcaccgaagagacaactttcagaacatctaattagattacgcgccgccccgtaaaacaggggtaaagtcaaaaagcaatatcttctcatttttactttttacttttttcttgttgagggaaaatataaagaggaaggagccaaagaaagcatcactatctgaatttttctttgtacatttatttatatataatactagtttttgtgtgattgctgtttggctccgaattttatatccataattttttttttttaatctccccttggttgatcggtgaacacaaaaaaaaaaatctaaaataatcgcaaaatacatttgaagaagctacacgatcaacaacagcaaaggatttcgattgttgaaaaagttgactcttcttaatttgattcgttgtcttggtttctgggttttcttcttcttcttctgcggcgctctccaattttacaccttgcgaccagcgagaaaagaaacaaatttcacccccattgaagaaggtttgtttcccctaattgcttgattttattctgagattaatcccaggcgccaattatatgcttctgttcttctgataaatctttgcccttttacgatttttctttgattttaccctagttttatggtataatctgggtgagtttctttcctttaattcatgtatgattaagcttggattggtcgattctgatgagtcaaaatcttgaaacagacataaattgatgatttttcgtggttgttttaggtcatttgagggtttaagctttctttgtggatttgcaggacctttggttaagctccatggtgtggtatgcgcaaagtggacaatacctagatg

SEQ ID NO: 3956 - DNA, 3000 bp, Unknown
  misc_feature (1)..( 3000): cDNA_ID_1013621_gDNA_ID_1620675_Annot_ID_164248 3000 nt of promoter + ATG
tataggaatcgcttcccgaagcttccaacattctcttgtttctcctttgtctctcaatttcagtttcctatattatacgcttgtattaatcaccagtatacattttgtcgtttctgggtctggaaccctagtagttattatagcatccatcgctttcttcaatcgccgtccatcagagtttcaagggatttgctttaaagatcaatcctttcctaagaaaatagcgacaattcatcagcttttcctttcccatccttcattaccttaacttactcgagattcatcttccagctgaaattgtgaaacttcgtttctgggtttttatcagaaaacactctgtgacttattgtgtggtgatcgaggaaagaaaaaagatggttggtggtggaaacaggagagatgagggatcgatgccgattcagaacaccaacttgtttgctgctttggatacttcgaggaagaagaagaagtctgataaggctggtaagagcaaagcttcctctaagagagaagattcacagaaggagcctgagccacaggttttctgggcacctacgcctctcaaagcaaaggcttgggctgatatcgatagcgatgatgaagatgatgattattacgctaccactgctccacctcagtccctgtggagcacttctgaagcctcccattcagatgctaaagacgttcccgctgaggtcacaagtccaaatctttcatatatatgttgattttgggttcatcatcatagctttatgcatttcacatgttgaaaattgtaacactggtttaatatgtctcttgcaataagcctctttagatttcaaatgcttccacgaattgaatgagttggcctttttttctactgttgttatctcgcttaggcttaggcttgtgttgtctgaattctgaaagggaaattaatgttattgtgaagtaagctgctttgtctcctgaaggttcatatatctaattgcattgttatcgaaatttttctaggcaatgtaagtttgttgtgcaatggtttctctaaaccgtggttgtgtgcctatctgttcatttgtttctcatagagatgcatttgatttcaatgtcgcaggaaattgaaagcgaagaagacactcttgatgatggagatgatgatgatgtggaggaagatcacgagcagggaacagagacacaagttcatccagaagcagagcctgaggtgaaaaaggctcctgaagttcgtgctcctcctaaggaggcagagaggcaactttccaagaaagagaggaaaaagaaggaacttgctgagcttgaggctttgctagcagattttggagttgcaaccaaagatgagaatggtcaacaagactctcaaggtatagcacaatttcactttactatattcactcgttggtaacaattctactctactctattcactcgttggtgatatttatctgtggatacctttctacgctgaggtatcactggctgagaaaaccatgttatggctaatactgatagacgtttcttctgcaaatatgaacagataagggggagaagaaagaagtgaatgatgagggagagaagaaggagaacacaaccggagaatcaaaggcctcaaagaagaagaaaaagaaggacaaacagaaggagctaaaagaatcccagagtgaagtgaagagcaactcggatgctgcaagtgagtccgctgagcaggaggagtcttcttcttccatcgacgtcaaagaacggctaaagaagattgcatcaatgaagaagaagaaatcaagcaaggaggttgatggtgcttcaacagctgctgcaaaggaagcagctgcgaggaaggcaaagttggccgcagcgaagaaaaaagaaaagaaaaactacaatcagcaacctgtgaggtgaagaaatcaatccacccaccgttgtgatatgaacataggttttgttcatatgagacttacttgccttgaacaaatcttttgatggggaatgtggttgggtcgtgttttagagttatgataactttggatcttttaatcctatcacaatggaacatgacaagaagaaactctgtttgaatttttccttttacatacattctttgctcatcatggttatacttggatttgttttatctcccacaacaatttctacttcttgatcttacatattattagttgtggctaagccagcgcttaataaagttaatctatgagtctgaatcgacaaaatcaattgattattttaattatatgtttatcaaacgaattagatcatatttttgacaaacctaaataggtatatttctcttgcggtttattcgacgaaaaagaaaagttggtacagtatttattttactctcttaagacaattcgtcgtgttgcttgctactctcgacgacggagaagtagaaatgtggagaagagtgatcggaaatgtcgccgtccggcatcaattacagcgagcgctatctagtaaagccggtggaagtggaaagagcgccaacgtttcagctgcagtggattcgatgcttctgcgttccctcaaggaacattacttagaggtttctaagatgactcctcctccggttcgttcctcctcttctctctctctttctgtgttttctctctatgtctcgtcttaggtacaactgaaatttcagtactgttacttaaaccctagcttagctgctgcttcctccacttagggtttatggtgggatttacagatttttgattgattttgcagaaagtgagtcctccgtcaccatttgagattgtgaaagggtcgcttgaaggaagtactggtgctgttctgaagaaatctgttggaaatgaagagatcaatcttttcgttatgcgcttggctcacggaggtgatgaagaagacgatggtgggatcaaccagttgttccttcatgttgctgtatcaaagccaaatcagcctgattctttgcatttcctttgtggcctttaccctgatgcattgggtattcattctgtttcc

SEQ ID NO: 3957 - DNA, 3000 bp, Unknown
  misc_feature (1)..( 3000): cDNA_ID_2135426_gDNA_ID_1620675_Annot_ID_164231 3000 nt of promoter + ATG
tactcttctttacctcgcaactttgtttttcagggacgagtctttgttatgtcaaggtctggctttgaatgatgacttgcagcgtgtcttaaccaattatgaagcaattgcttctggattacctggaacttcttctcagatcgagaagcccaagtccgagacaggaaaatcccttgttgatgttgatggtccacttattgatacaggggacagcagtaatcaggcgaacgggtacgttctaccaaacttgactgttatgcacccaagaatgttggataaaatcacctatttttggatatgggttaccgatcctagctgcaatcttgagctcgatatatggcttgcacgtccaaactattacaatctaggatgtgaaaacgaaaagttacttatgaatctgggagtaactttataatcattttaatataaacggtgttaatttgtctcttaaccaagtaagaactggggtttcaggccaagtgaccttgtaaaagttttttttttgtcttataacatagctattgatttatactgtccaacgttttcacagagctacatcgagctctggtaacggggttctaaatcagttggccctccctgcaccacctgtaactaatggttcagccaattccaaaatagacctcctcagtggcgatgatcttgcccttgttcctgttggacctcctcagccagcaagtccggttgcatcagatcaaaatgcactcgcccttatcgacatgttctcagataatactaataatccaagtcctgcaactgcaccaagtggcaatccagctcagaatattcctttgaatcctcaagggcaccaacaaccaaatagtcaagctggagaagctggattacaacaatccaatggatttgcgcctcaagtgggttattcgcagtttgagcagccatcatacgggcaaggagtctcttctccctggagcagtcagcctgcacagcaaccagtccagccatcttatggtaatatatataaacagtttttgtttttcacacatctggagattagattgcagtatgccaatgtttctctggttatggcaacaaggagaaagaatttccttcttttggattcagaagaatcagcttcaattgtgtctcatgtctaatcattaattgttctgtttttatggtaatcttgtaatataaagaaggtgcccaagacagtacggcatttccacctcccccatgggaagctcagctccaagactatagtccctctgcggagtcaggaagtccgttttctcctggaatgcatccaactcagactgccttcacacatgctcaaccagttaacaacaacaatccatatcctcaaattccccaaaccgggccaccagtcaacaataacagtccatatgctcaaatgccccaaacaggtcaagcagttgccaacatcagtccatatcctcaaattccacaaaacggcgtgtacatgccaaaccaaccaaatcaggctcttgggtcaggctatcaaccacagcaacaacagcagcagcagatgatgatggctcagtactatgcccaacagcaacagctacagcaacaacaacagcaacaggcgtatggaaaccagatgggaggatacggatatggctataatcaacagcaacaaggaagcagcccatatctggaccagcaaatgtacggtttatccatgagagaccagacatcgcatcaggtagcatcatcatcatctaccacatcttatctgcctccaatgaaacctaagaataaaccagaggacaagctatttggggatcttgtggacatctccaaattcaagcctacaaaaccgacttccggaagagctggtaccatgtgaaaattcctccatccattcatcatttaccagtattcatctcctctatcctcctcagctaactctctttcttctctttgttaagcttttttcatcattgattttattaccctcttgggagataacatagatatacatatgtgttatgttcttccttataatttaccgttggttatgggtttgtatatttcttgtagagaaaagaaaactggaaaatcttttgttgagaactcagcgatttggggtttgtctcgagattctattttaggacattttaatctctcatttgtattttcagaccttttatttgttatatccattggcaataaagtttgatatcaattggatgagagttatggttcttaaatttgccaaaaggacagtttatgttctttgtatatgattgcaaccctaattccatagtcaatggagacatcaaaatgtcaaactatgcttgcattatataatctctttcgactcaatgatgtcaattaccgaaaaagtagaaaggaaggatttgttttgtttgcgactgttgttagttcttatgttgctcgtcgtaaacaagaaaaacctgccattcgtttgggtttttgaaatctagtctaacagaaagaaacaagagacaaatgaagaagagtaaatctagtccattcatcatcatcagtcttttggatcgtgcatatattaatttgtataagagtctgtctaacaaaattgtcaatatgtccgagtggttaaggagattgactcgaaatcaattgggctttgcccgcgcaggttcgaatcctgctgttgacgtattctattttgttttcttttcagctctcttcagaatttttgtaaatattttaaaagggaaaaaaatctcaaaatacgatttcaattaaaattgtagagattctcctcacgtctgtttgtgaaatgttgtctctaataaatttccgtaaattactgaaaacaagacacgagaaattgttaatttaacaaaataaaaatacgttacgtttggggtttgccacgtaactacttaccgccacacgttctcgtccttttcttcttcctctctgcattcttcacagagtttgtcaccaccaacaccaaacacacaatttcacattcttttgcatatttcttcttcttcttccattatg

SEQ ID NO: 3958 - DNA, 3000 bp, Unknown
  misc_feature (1)..( 3000): cDNA_ID_1822457_gDNA_ID_1620675_Annot_ID_48230 3000 nt of promoter + ATG
cattttgttttatgcattttgtctagagttaatatgtgaacaagttgcattttgcagatgactgcatcatctgagaaaatggaaattcctagaagtttaattgatgatgtaccagtttcagaactatctgatgaaggcattattaagaattcaagtgaaattcctgcatctctaaagaccactgaggagccagctcctaattctttggaagctttgttgtttggatcctctgttccttctgttgtccctggaacaaacaactatgaactatggaacacaagtgatatttcctctactgaaaactataccgcagttaacctcgggacccagacaatgccaggaataccagacagtgttacctcttttgccacatcaccaacaactgcacatgctcattccggttcttcaggtccagtggtacctgttgctcctgataacttaaatacaaaagagacggctacacttgcaaataaccaggttggtctctgtagcagtttttaaacacacatttacaaatattttcttgaattcaggagtttaagctgcatcaactgttagtaacagtagatgtaaccggatcatttacagactttgaaaaagaagaaaagactatagtttcaataaaacttgttctcttcatgtgctaaccctttgcaaacacatgtggcatctacatatatcatctaagggaccatcagatttctctatggaacagacaacactggctatcacagattatgctcatggagttggatctgagcatcatcaagatgatgagacacaatctagcataagaaaggcgcttcctgaggtaacgaacccttctcttataacagaaatttggatactcttttgggaatctctgatcataagaatctaaccattggcaggaccttttcactggaggcttctcatttgcccctcagcaagttcatggtcaacatcatggcatgggatatggcatgcaatattatcaatatcctgtggtatatgttccattgacataattattacagcatctggttttatgctgatatatgtcctttttcttagcaggctatgggagccttaacatatacagcaaaagcagcaaatccctttgatcttagctatgatgatacagctccaaaccaaacaccacaagtatgaatcctagagttaatttcctgatagtatatatgatgaaaatgaatatatatatatactcagttcctttctcttttctatgtcttttacagtttcctactatggcatatgtgcaaggaggaggcttacctcacgtgtcatctccaatagggtattcagattcttcaagtccagctgcagattccattggactgatgacctctcagtcaccttttcatgcaaccgctttatccccaaactctccagctcttgcatcccatctttcccctggtgagacgaaatttatgtaaaaagactgttttcagtggttggagtttatattctaagagttgaaatctggtgaacaggtgcactaatggggcagcaatcacaggtgaatatgtccccatcattcaggtacatacatactctgactcttcttaattagtgttcactgaatggttcttgactctaaattgattttggtgtgcaaaggcaagagtatagtggtcttggtacagaaggaaatacgttcaacggagtacatacatttcatcaagcaaacaatggatatccttctgcaaacccaaatgcttatgtatccagaggaaatccctttgaatgagaaacagcttaatgcagaagttttctgattacggaaatgggatagatttcgtataatccttctaaaacatgacttgcttgacgatgaaacagaggtttcaatcatctactatttgctaattgatcaaatgaacattgatgtggaaagatattactttgtaataaaaagattatagaacttatgtaatttatctacagagcttgttctattggccatttgacaatcagattttagtgtgcatgtgttaagtgtattgtaagttgtaaacaacaaaacaaatatttcttacaaagttataattaactacgcaaactagtatcacaatttcaattaatatatattttaaaagttcatatcattcttatacttattaaatatacaatttgcgcataaacttaaagatatttaatggcgttttaacaagaaaataaaattgaataaattttgtatatttttgacataacaataccaaaaaaattctagcattcgattgaaccaaacttgacgtgtgaatgagtctggtttactacagtcaaattgataactcttttttttctaagttccaactcttcaacgttttttattcatgtacccttgcattttgttgaaattttgcaatgtgaattttctgtcttctcttacggacaacaaaattttagtttttatcagtcgtctgaatcctgtgacagacaccgacgccgttaaccgtcgtcgctgtcgctgtgtctctctttctcactctgttccatagatctgagcttctatcaatattctcggatcgctatcagtcaaatcttaagaatttcgtcgctttagctcaattcgggtacgtgtttcaattttctcgatagacccttttgagattcttgccttttttgttttttctcctttagatcagatttcggtttcctgatttattagtttattaccattgatgaagttttctagattcgtctcctttgtttatggtcttgatagggtctttatgttctgaaggaataaaaaatcttgtctttggatggataattattgtcttcaattgtatttgttgtttctaagaagaagttgtgtagttactgccaccaagtctgtgtgattgatcggatcattgttagtgtgtcagtgtttttatcttcaatttctttaattgtggcatttgctgattgattacttgaatttgttgattttcgcaagactttagattgtggaggaagttttaggatttgatctccatctcgtatccaagcatg

SEQ ID NO: 3959 - DNA, 3000 bp, Unknown; identical to SEQ ID NO: 3946
  misc_feature (1)..( 3000): cDNA_ID_1822453_gDNA_ID_1620675_Annot_ID_48231 3000 nt of promoter + ATG

SEQ ID NO: 3960 - DNA, 3000 bp, Unknown
  misc_feature (1)..( 3000): cDNA_ID_1822449_gDNA_ID_1620675_Annot_ID_48232 3000 nt of promoter + ATG
ttctccggttgtgttctccttcttctctccctcatcattcacttctttcttctcccccttatctgttcatatttgcagaagaaacgtctatcagtattagccataacatggttttctcagccagtgatacctcagcgtagaaaggtatccacagataaatatcaccaacgagtgaatagagtagagtagaattgttaccaacgagtgaatatagtaaagtgaaattgtgctataccttgagagtcttgttgaccattctcatctttggttgcaactccaaaatctgctagcaaagcctcaagctcagcaagttccttctttttcctctctttcttggaaagttgcctctctgcctccttaggaggagcacgaacttcaggagcctttttcacctcaggctctgcttctggatgaacttgtgtctctgttccctgctcgtgatcttcctccacatcatcatcatctccatcatcaagagtgtcttcttcgctttcaatttcctgcgacattgaaatcaaatgcatctctatgagaaacaaatgaacagataggcacacaaccacggtttagagaaaccattgcacaacaaacttacattgcctagaaaaatttcgataacaatgcaattagatatatgaaccttcaggagacaaagcagcttacttcacaataacattaatttccctttcagaattcagacaacacaagcctaagcctaagcgagataacaacagtagaaaaaaaggccaactcattcaattcgtggaagcatttgaaatctaaagaggcttattgcaagagacatattaaaccagtgttacaattttcaacatgtgaaatgcataaagctatgatgatgaacccaaaatcaacatatatatgaaagatttggacttgtgacctcagcgggaacgtctttagcatctgaatgggaggcttcagaagtgctccacagggactgaggtggagcagtggtagcgtaataatcatcatcttcatcatcgctatcgatatcagcccaagcctttgctttgagaggcgtaggtgcccagaaaacctgtggctcaggctccttctgtgaatcttctctcttagaggaagctttgctcttaccagccttatcagacttcttcttcttcctcgaagtatccaaagcagcaaacaagttggtgttctgaatcggcatcgatccctcatctctcctgtttccaccaccaaccatcttttttctttcctcgatcaccacacaataagtcacagagtgttttctgataaaaacccagaaacgaagtttcacaatttcagctggaagatgaatctcgagtaagttaaggtaatgaaggatgggaaaggaaaagctgatgaattgtcgctattttcttaggaaaggattgatctttaaagcaaatcccttgaaactctgatggacggcgattgaagaaagcgatggatgctataataactactagggttccagacccagaaacgacaaaatgtatactggtgattaatacaagcgtataatataggaaactgaaattgagagacaaaggagaaacaagagaatgttggaagcttcgggaagcgattcctatagaatgcgagagagagatgattagggttttcttaagggatgtggtgtgtagcaatcgtagcgattagagctactgggctacacgacaagggaaggggatctgtctctatttgggatgttatctcctctcttatggatcatcaaaccgaacatttgattacaaaattgaaccgaacatttgattacaaaattgaaccgaacattggattagactgtctaattaaaccttaatttggtttatgaactcaatattagtttttccaattaagccaattttattttatttttctgtattaaaaaagcaaattttgggttccaatatacaatccacccgccaaaatattttgtcaatttttaacgtatttttgaatcgaaaaaggaatttctgaacttttattgtttttcttcttgtgtttatacattgctctaaatcttatgatacgttaataatgaccttaattcatatttataaggaaaccaaatctattttttaaatattcttaaagcttagtttacactatataattaatcaaaaattgattccaatcaatctctctactactaattctttttgctatatgtctatatttaataaaaatatatatttaaacacataataaggtagtaatacactaatacttaaatatggtccgaaaactcctaataatatgtatatatatatttttacaaaatattggaaaattgttaagctaatggatgaatgaagtttatatattaaaagaaaataacaataatatatatatatatatataaattattaaaaagataatactgtaatgtgatgattttatacttaaattatcccctagtattctagtaataatagttgttaagttgaatgatgtctctaacaattgttggctaggtggacaaacacaagattgcggtaggttagcaacacacgtgacaacaataaattattctctctgaagaaatctttaaatcctgaccgtccaaacaaatatttcgcagctgagaatctcgaacgtccattatatcttttctgttgcagagttaaaaatttagtgcttatttcgaaactaaatatggaccgtagatatagtaacgcgtctccatcggacggtacccgtgatacgatgtttatttggaatatgttttctttataactgaaaaaaccttactctcgcggaaccagacgaaaccctagctctcccgtttctcccggttaaaaaagaaaaaaaaaagaagcaaattttgctttttttattttcggctaaattgaacgaatacttttgggaaattttcgattgtttgatttagggatccgattcgcagtccgatttaccgaaaccctaattttgattttgggattgtggcgactataaaggtccttaagagactcgatttcgtctgataaagtgatg

SEQ ID NO: 3961 - DNA, 3000 bp, Unknown; identical to SEQ ID NO: 3945
  misc_feature (1)..( 3000): cDNA_ID_1822445_gDNA_ID_1620675_Annot_ID_48233 3000 nt of promoter + ATG

SEQ ID NO: 3962 - DNA, 3000 bp, Unknown; identical to SEQ ID NO: 3955
  misc_feature (1)..( 3000): cDNA_ID_1985369_gDNA_ID_1620675_Annot_ID_48234 3000 nt of promoter + ATG

SEQ ID NO: 3963 - DNA, 3000 bp, Unknown
  misc_feature (1)..( 3000): cDNA_ID_1822633_gDNA_ID_1620677_Annot_ID_48274 3000 nt of promoter + ATG
ataatctcaaatggtttgaaggaaactcgggcttcagaatatcgaaatcattgtcgcggatattagcacttttgagcatgaagggacatacgatcggatattctccatcgagatgtttgaggtttggatttgtttctttaagtactgtgcttcattatatttttgcctgtcaaagatcagaggtttatatcttagctttggcttgggattgtgattagcatatgaaaaactatggagagctactaaagaagataggaaagtggatgaaggaagatagtcttctgtttgttcactatttctgccataagacatttgcttaccactttgaggtatggatcaatgtctaacttgatagcttcttgttttcttggcaataatggaatcttgagattgtgttgattcactataggatgtgaatgacgatgactggatcacaagacacttcttcagcggaggaacaatgccatcagcagatcttctgctatattttcaagtaatatacattataacttgtgtatgattcagtagattatgatcaattgaaatatatcaatatgttgttgttttgttcaggaaaatgtttcgattgtggatcattggctcgtaagcgggacgcattatgcaaaaacaaggtaaaaaaactcggaagatttgttgtaaaatgctagagaagacgagaattatcttgtaatgtttgtaactttataattaaacaacattttgcagtgaagagtggctaaaaagaatggataaggagatagttgcagtaaaaaaaatcatggaagtgacttatgggaaagaagaagcagtgaagtggatggtttactggagaaccttcttcatcgcggttgctgagcttttcggatacaacaatggagaagagtggatggttgcacacttcctcttcaagaagaaatgatgatgatttctttatttttcttccaatttttcaataaagaatacaacaatcccattctactttgtattctatgatgttatggtttcataccaaaggagtttgttcaatctttttaaagtgacaatgttatctcgaaaaacatggggatcaagtatcatgaactggattcttttgaatcagtagcttgctttgttggattcagctccccatctacctccaaaatgcgagtgagaagcttaccatctaaattctcctgtttaattacatgaaaaccgaaaatcaaaactcaggaacgagaagcttatcatttgattaaagatcacaggaaacatgaatagagctgatgaagcagagaagcagagtgagttaccgagagacagtctctgtattttttccactcggcaacacactcttctttatcccattggcctttaacaaacttctccgagtaccatctgcagaaaaaaatcaagaaaaaaagatgcaatttttagcgttttggacagacagataaatacaccaaccaaagggaagaattagaaaggaaaaaggaataagacaatgccatccaaatggtccaaacctttcaaaagaccagaaatgaaatccctgaaaaaaatacccatttggctaaccaaagctaaacccttaaacccagcaactagctaaatccatcaaaaggagaaacaaacgaaactcacttgttgaagcaattgtggtaagcgtttcgcaaatcggcgcagggagaagtagaggagcgagctgaagttgaatcttttttcttcaataagcccattgtcgttgcaatcaccactaatactctgtcccaccttagcaactctgaaaatccatctatctataattcagaaaaaaaaaaaacctatatcatcactcttaagaaaaggataaaaatgtaaacagtgagacaataagaatctaacacaacaacaagcttcagaattcatcacaaacagagaaatataatccaagatgaccaaaagacaactaaaagattcatttttgatactctaaaaatataaatgaacataaccaaagttgcagaaagaatcaaatagagagattgtatcaaaaatgaaactcagacaatgcaaagttttaagaagtatgaagcttttcaaggataatagaatttcaatacccaaaaaaaaaagaaaaaaaatcagatctcagaaggaaaaagaattgaaatttaccctgaatttgattaaaacgggatatcccgtaaaacctcagattctccgagattgagagtctctcgtctaactcagaaaccgtaaatttaaacacccgacctagacgacgacgacgacgaagcttgggaagaactcgattggaaagatcctaacgacgtcgtttcagaagacgaaaaccctaggcaagaaagaaaactaaattagtctcgttgaccaaaaaaagaaagagaggaaattaacattaaaaaagagaaactatacaattcaaaattttaaagtcttattatgatgatataaataagggaataaagatcatcttcatctcactgttaagtataatggccgagctccaagggacagaggctacaacctgatgaagctacgtggaacatggcggatgctcctcgagaaacggacacgccgagccaagaagatcaccctggtcatcagtacaacatgggactcaggggatgttgggaatctgatcaaggagatgattgaggatatagaacgattaaatgtgtgttgttcaaactagatccgcgggactttgagttgacgagtagtagtgacattgaatcttcttatgaacaagtgtaatctgattaaacatttcttcactggtcaaaacacattttgtcatattcggcctagcttggagatgctaatggataatccaacgtcattgaatttgatagtgatattattgaatgttttgtaaatgttattaacgttgcgtcctctactagaaacgaatcactcgcgtggcgtaacataaaacaattgcttacaaccctcgtattataaaagacaaaactccaacaagagaaaacaaaaaaaaatcatatctgcaagtaatagaaaatg

SEQ ID NO: 3964 - DNA, 3000 bp, Unknown
  misc_feature (1)..( 3000): cDNA_ID_3593713_gDNA_ID_1620677_Annot_ID_48275 3000 nt of promoter + ATG
ggccagttcatgagcaactacagtggcaacctagcagcagaaatttaactgctttagataattgcacaagagagcacaagacaatttcctctagagaataaatggacatgtttacagtaccctctgtttgttagaagcagctgaatgttgttcatcatagagaagagctgtttcacggtatgtaactaaaccataattctccatagctccggcagcaaaatctggtattgcaatcatatccattttgggaaggggatatggcacagcaaagtacctacaagaatgattggacttatgcaatgagatgatacatccattaaagaagctcagaaatatgcatgcacataaagtttcaaatgtcaacgaaggacctactctttgaacagatccaatgtcttggcaccaacatgcaatgcaaatttcccttggtcggctttgcccacttgacagtatactctgactttaatccctgagaaaaagatgaaacttgatttagagcttctcgacttgactagacgggagataataatggataaaattaatttaccatcggatgtatgatcttccacgtagtcaaacaaaccaacaacaattgctaccaaatatgtagacatgattggtgactcttgataggagacaatcttcagattcccattgactttctcctccattattggcatattggagagagccaccaaatcagttggcacctctaatgtaatcttgaaggtagcctgttgaacaatgtgtcaatattgatagataaagacagaagaagaacaaaatcaccaacttgataaactcatgctgatagaaagaggagggaatgagaaagaacaagtggaaaccttgcaagcaggttcatcccaacatggaaagcatctcctagcatcagctggttcaaactgggtaactgccatattcttcttctcaccgttatgttcataagtactgccaccaagacaaatacaagatcgttctagaattaatctcgagctatctaacagtaaaaaaagatcgaaactcattgctttaccttctgtagaatcccttcattttgtcatttagtactccattgaaaccaagtttcagaactcccactccatggggaagaatctcaccaaactcaagcacgagaatctcatcctcctcaaacaagacaacttttggagctgcaagcgcctgcttaacaaaacataagaagcaacaacaagctaaatctttgctgattccagattcaattccaatccatgacagttttctaaagttgaggattggtttttcagtcgaacagaaaagtctggctgaaacgtgattgtatctctctagttaatttaccattggaatcaaaaatcatagatgatgatatccaaatactcagatcaagaagctaatcatgaaaatgaatatctccaaggcgctaattagctcaaaaccataactccaatcacattgctaaaatcggaatccataacagcaaaaaagaaacgcgatagagagaccttagaggaggaaggaggagtgaaggaaacggaggcatcgttgacggagagatcagctgcgttgagaacgatgaaacgagtatcggcgactatgtcgagatcgatggctacagttccagtgaaggtgcaggcgatgagatcgggattgaggcggagatcgtagcgcttggggacggcgaacttgggtagacgaggctcacctttgaactgatccattttctattacttgcagatatgatttttttttgttttctcttgttggagttttgtcttttataatacgagggttgtaagcaattgttttatgttacgccacgcgagtgattcgtttctagtagaggacgcaacgttaataacatttacaaaacattcaataatatcactatcaaattcaatgacgttggattatccattagcatctccaagctaggccgaatatgacaaaatgtgttttgaccagtgaagaaatgtttaatcagattacacttgttcataagaagattcaatgtcactactactcgtcaactcaaagtcccgcggatctagtttgaacaacacacatttaatcgttctatatcctcaatcatctccttgatcagattcccaacatcccctgagtcccatgttgtactgatgaccagggtgatcttcttggctcggcgtgtccgtttctcgaggagcatccgccatgttccacgtagcttcatcaggttgtagcctctgtcccttggagctcggccattatacttaacagtgagatgaagatgatctttattcccttatttatatcatcataataagactttaaaattttgaattgtatagtttctcttttttaatgttaatttcctctctttctttttttggtcaacgagactaatttagttttctttcttgcctagggttttcgtcttctgaaacgacgtcgttaggatctttccaatcgagttcttcccaagcttcgtcgtcgtcgtcgtctaggtcgggtgtttaaatttacggtttctgagttagacgagagactctcaatctcggagaatctgaggttttacgggatatcccgttttaatcaaattcagggtaaatttcaattctttttccttctgagatctgattttttttcttttttttttgggtattgaaattctattatccttgaaaagcttcatacttcttaaaactttgcattgtctgagtttcatttttgatacaatctctctatttgattctttctgcaactttggttatgttcatttatatttttagagtatcaaaaatgaatcttttagttgtcttttggtcatcttggattatatttctctgtttgtgatgaattctgaagcttgttgttgtgttagattcttattgtctcactgtttacatttttatccttttcttaagagtgatgatataggttttttttttttctgaattatagatagatggattttcagagttgctaaggtgggacagagtattagtggtgattgcaacgaca

SEQ ID NO: 3965 - DNA, 3000 bp, Unknown
  misc_feature (1)..( 3000): cDNA_ID_2156563_gDNA_ID_1620677_Annot_ID_164286 3000 nt of promoter + ATG
cagctgcataaacagacacactgcttctacttctaagccattttgagctattccggcaataactgaattccacgaaatcaaatctcgttcactcatattgtcaaatactgtcctagcgaaaccgaattttctcagtttacagtacatgtttattagactattcgaaacagtaagcatcaaatcaagtcctaacttcaatgccatacaatgaacttgctgccctaatgctaaactatctactttaacagctgtagctaacattaaaataaatgtgacttgatcacattccacgtcggactctaccatatccgcaaaacatttgagaagagctgaatactggcctgaatggagatattcactcaatcctttgttcctgaatattatttctgaaacagaagaagcatcattaccatttgcaaaggatttcacttgtcctgcatcagaatcatcacctgaaattctagcaagtaaacgcagagtgatttcattgggatttaaaccacttgaatgaaatgcagaagagaggtctattgcttcttccttaaaacccatttccagataagccttcaacatcaagttccataacaccacatctctataaggcatctcctcaaacaaaaccttaccttccttaaccttaccaaacttcaaatatatgttaacaagagctccggcaacaaattcatcaccgtccaaaccaatcttgcaagcatacccatgaaatgactctgaagcccacacatacccagaatgcaaacaaagtttcaacattggagacagagtcattcgactggtatacacaacgtcctggcgtaatatcctgaaaagaagaaaagcttgttgaatgttctcgacaacgcattcggaagactgagcataggcagctaaaatcgagttccaggaaacaagatctctgtcaggcattttatcgaacactcggcgagcataagtgagtgatccacacttggagtacatggagatgagattgttaatcaggaatcgttctgggttttcctcgaaggttaggatacgtgcgtgtgtacattttccgagcatcaagtccgacgaggtgattgcattccgaagaaagccgaaccattgtgacgaagacgaggaagatgaagacggcgaagcagcagaagtaaaacgcagaggacggagacattgaacaatgagagatgtgtgaaaggagaaagggatggccttggaggttgatcgcatgatcgggttaaaaatgtaaccttttaaagttgagaggtgttatcttgcaaaccaagcaactcatgagatggtaaccggtttttgcgtaatcttgtctccggagattccaattagcatttgaccaaattaattggttcaaaattaaacctaacaaacaagttttcttatttaatcgacgcttagacaaccaattaaagtttatttaatcggcgcctatacaaccaattaatttttccatatgcccgttaacttatattcatgtgctttaaaaggttaaaaatacaactatattttgatcaaaagttaatgtacgtgcctaaaatagtttaaaaaacaactgtagtcgtttgtgcttttggtccaatccttatagcttttatacctctctttaagttgggttaggtatccctttatcggggttgggtcttttaagtttcagtttttaaaaatatttgggcttgacccattttgtaatgttccatcttatgataaaaagtcaataaacagatctttaggcaaaaaaaaagaaaaaaaaactgtacagtagtgaacaataagttacacaacaaatgaaatctcgacccacgcgctgcaggtcctctcaattttaaatttatgaaaaaatccccaaaaaggagggttatagtccacggattatagtctcacgcgctgcaacgcgcatgtgatgcgagtggttttgtatttttaattcctacacgcgtgtagttctatttgaataaacttcaccaatcacaaccataatcgttctatgtttctttttgaataaacacttcggatttcctatatttcggactccaattcggattttcatggctaaggttgtctgaataaattaattcctatgaatttaacacgaaaataaaaatacaactatatatttgctcgtattaaaaacaaaaatatataaaagatttttttaaaaagatagaaaaccccttaaactaatacaatgtacgctcaggcaaccatgaaacacgttttaggctccaaccacctgaaaatctgatcttggcctaagaatattggacatatctaaacacaagttttaagatttgacacgaatttcgacataaataaggctttaaatgggggagatttatcatttgagtatagttttgtttttttggcagctgtaaaaattttgttattatatttttggaattttgttttgagacacaaaaatcgtaaaaacagtttttggattctctaccaaaaaaaaactcctagattttaggaaaacaaaatctttaagaagttgattaggtaataaactgttttttttttaatagtaaatctaagaaccgttgtctttttgtttggttcaacttcaaaaaccattgtaatatctagtttttttacatggactttagaaatcattcttgtacagattcaaggaaaaacaattatcgtgtatattaaagaatggaaacaaatataaaaatcacaccattccttcaacgttacatccctacacattgaatacgattatcttccatattatgatctttttaaaaaaaaagattttgtccatttctcaccctttctcatactctctttttttctcggacaagaaggctacagaaagatatgtcgctgtcgtcttacctcagcccgacgcgccttctagaaggctacctccgccgttgtctcagggcggcaggactgacgtcgcagacgctttccatagactctgaaacaaccatccacttctggggcccaccacctctagaccaccggagcgacgatgacagaccggtt

SEQ ID NO: 3966 - DNA, 3000 bp, Unknown
  misc_feature (1)..( 3000): cDNA_ID_1822624_gDNA_ID_1620677_Annot_ID_164283 3000 nt of promoter + ATG
gagagagacaagtaaaaagggaaagaatgtgtgttgtgcaacttcttcttcactactatccccaaaaccaaaactataacctgtgaacataaatattgactttaaactgctattctttgtctgattggagaaataattgagacaaaacagaatacaagtacataaaacaaaaataataatttatgacagcatttttggagttattcaatagggaattgactaaaaaaataacaaaaagaaaaacttaggccaactaacttttgtttgagttagctgaaataacgctaactagctaccttttttagttggcgtaagttttttcaccattgatgttcacatacaggagaattaaagtaaatcataaaaccaggattaacgcacggagagtgtggagatggcacggtcacgggtgtgaaataaaagatggagacaaaagcaaaagagaaagttaggagctgcctcttctcttctcttctctcttcaaaagtggcgattcgtgtgggttgtcttctcttctttctttctttctttctttctttttttttcattcctttttctttttctttttttattttaaacagttttacctttcgaataataaattaaaagtaactactttttcttttgctcgtgtttctcttatatatatacgtatcaaattaaaattccataaaacaaacaaatctcttttctcttttttttttgggcatcaagtcacatttgtcttttatcattttgtcaaacttggcgttgaattctccatccaagaatacaacaaccttttgtggtcatgtcatacaaatgctattgttctatggttatttgagtttgtgaaatctctcactttgaaagtgaatatattttttattttttttggtaaaaggttgagttgaaagtgaatatttataaatccaacatcatgtttctagatgcacattcaactcgaggttgttgcatgatgtttcatttaccaaaaaaatcatagtcaaattatgtaagcaaatgatattacagaaaagttttactagagagtttcagatttacacatgcacaacgttaaaaaaaatagcagaaaaaagaaagaagaaaagttctttatttgtgagaaaaaatgtatgaaaaaaaaagagatgggtgtaaaaagcaaaaggataggaccactgttactttgtagcctcgttgaggaatctcttctcgcatctcgacttttgtgccattgcaaagtcaatgcccagaacttgttcccaggccatctccaattaactacgtctatttaattaaacttttaaaagaaaacctaataaattaaacaaaagaaaagccgtcaacgaaatctaagcttgcagcgatatcgatgaactgataccaaaacaatgttcaagtttcactttcaaattgttttttcttgaaatagtttattgggtaaggcccatagatatttcataagaagaacacttgtcgaggttgaatcgtatgtctgcccaccgcggcccatgcatcctctgttggtagcataatcgttttaggccatactattgttcgtacacactgattttgaagtcacctttgtgcactccttaattcctaaattgaagaagcttgttctcattcttctttgggttacaaatgccaaggcaaaaggaacttgggccaaattaagacaacaactcaagcccactctctgcaaataatacttgggaatttttagtaaaacggtgcgtttcatccaagaatctattaatatccctaacttgaaatcatcatatacgtaacccaacatattaaagagttaataatgttaaaaaaagtctcagaagagagagacgtagagaacacggaaagtggtaactggtaagcgtcgtcatcgaggatatagtagctacgtgagcaaacgtcttcactcatctctgtctatttctcttcgaatacacgtaatacattttcgattggattgatcctccctcggtcctatccaagtatccatccacgtaaacaagagcttgttcctttcttgtttttgctttctttaaatagtaaaaatacttatttcatttgtttcgtttgatttcattattattgtctatggcattatatactatatatattatttttacaacattggctggctcacgttgttctcgtgtatacaacaaacttaattaatgtctctctattgcattagatagtttcggagcatatccattatgtgaaagccacattaagttataactaaaagtagttttcgaaagagcttaattaagttatgttctgtttcaaaaaaaaatgaacacgaggatttttttttttttttgacagatcattattaacaaaaatgattacctgaagaaaggggaaaataattatagctgattacagatcattattaacaaaaagaattcttgtcacatcatacattataacaagaaatattatattatattaatttaatctttcgctaacacgcccacaatatattaatcatatacgtaatttagcttataaaaaggacggaaagagattattactgcgcctaaaaaactcactaattccaaagaaaaaaaaaaacttgtattttttcttgacaaaccagctcacaggcattgcatgatcaaactcatcaggtacgttttgattccttcttccataattttcccatcttgaggaatgcaaatttggagagcgctttagctaaatcactgccttcattttttcactttggatttaataatttgcgttcctctcttcctctctgctctgttctgttctgttctgttctgatttgagttttcaattaatcgctcgagcaaaagctatttctcaactcgttaaatttctgttcccagtttgttcgattttcaacagtttcacattaaagtttgggtttttgatgtttggttgatgaaactcgaaatatgaaatgtttgtgaatctattccagggtgtttaaaataagggtttgttgttcatctgcagagattatatgtttttacatgaaagatg

SEQ ID NO: 3967 - DNA, 3000 bp, Unknown
  misc_feature (1)..( 3000): cDNA_ID_2156553_gDNA_ID_1620677_Annot_ID_164281 3000 nt of promoter + ATG
ctacacactacttcttattctaaattaacaatcatttgtcaattatcagcactttctttgttaatattttcaatgcagcaatcacaatcttcaggtgtaattttatattttggacaggccatagtgtttatccattaaggctcaatataattataaacctaacgcctcacattatcattcttttaatttaatcggtagttaaccgatcataatatagattaattacttttatatcttctgttagtccaattgtaattacaaaacctactctttaagttcttaaaaatttagttccggatggcaactactagttcatgttctaatcaacaagcattagtccattatcaacagtttctttgttaatattttcaatgcaacaattgtatggttgttacaaattttaataaggttatgataaactaatagaggaaccaaaaaattaaaaatcttacgtaatttactttaaatccaagggagatgactttaacttatacaaccaataatccccttagtgattataagcctaccacaatggattctatgcttagatgcagaatacaattaagctcctcactgcagctcctcctgcagggcataacccgtcctatcaaccttaccccttagtgtatctttctaagatctcagagttcttattgaatagatgctcagggaccagctcggtgagtctgaaaggtgattctaaaattagaggagaaagagtttgcccatgggttgatctctccagccaatatggctatccctaagatcacataataactctttgcttcttcattctacttgcaaagcttcactatccaaagaatccacttgtttactctctcttttcctcgtcacctgtcaaaccagaaggaattatctgtttagaaactagaacaaaagaaggcagaaaactttgtaaagagagtcataccgacttgttagggaaattttgagcattagtgaactttgaaggagcagaataatgagacttcttttgtagaatctcagagagacgccgctcgtttttctcttgcctaagtagatatctcaaggaaactgattcttgctcaagctttgacaccgtgatttccaatattgctaagctatccaaaagctcctgtgcctgaaaaaaatctctataaagttattaaagaaactcaatagcaaaaacaacaaataagatttttatatgtcggagaaagaggattgagtaccttatcaggaagttcacaaggcgaatccataaacggtgaactagaatgctcaactgcgctagttagagctaaccgtaagttaatctcctcttgtaactgctgctgcaatctcttaatctgtatcatcatcccaaatatcattaaccattaccattagcagtagtagtacaaacttttcagtggtttcttaaatgtgacttagttctataaataagtacgacaaagagaagcaagtgagggatctgagtgacttacatcttgttcaagctcacatttgtaccatagtttggtctttccatcaaatctaccactagtttgatcaatcatcttgctttcctgcttccaaaaaaaaaacaaaaatgcaatttcaaaacctttggcgtgaccataaccccctcaaaaccctagatttactaaatacattccaagaaatcagataagaataaaaggcagagatatatgagagagagaaagaggtacattacatcgagatcaggaaaaaacaaagagccatcaccagaagagtaagatcttctcgagaatgtaccagtcttcttcagatatctccggatcgagcttcccctgtatcagaaaacatcagcaaaccaaaaaaacaaaacaaatcgggagcatagagagaaggaagaagaagtatagatttagagagagtatatataccaattgatgggaagacgaaaagtggcatttccgaaggtgcgatcggtgctaggagaagaagaagaggaagcaaggttttgatcttcatgaagagcttcggctttgatacagagcatcgtttgtcacggagcagagaagaagaagaaagactctgaagaaagaaaggttccaactttgaggtttttttattattgtattgaagacagaagagtttggttgggttctctcactgctcacacttcactctctttcctttttttggtctgtcgcttttatgattttgtaacataaaattataagtagaaaaaagctgaaaagggaaacgaaggaatttattcgtgtctcacacaatttgactaggtgctcctcattttcataatttcattttacacacttttttttttggtcaaacatttacattgtctctatattttctagtagtatattatttaatagaaaaagagaagaaatttcggtttcatattattgcttttcatttcattatattccatttcggtatttatttttccataaattacgaaaaatgcttcatgtgtttttgaggactcaatgtatcatgtgtagggtaaatgatgacgcagataaacaaacagtggaatatctaactttaacatgttctttttctgaatcggactcaaaagaaagacctgattgcaacatatgagtcacacactcacatagagaaaaagattccaatcgtatcaaagagtgaaccgtattatggtttagtcaatttgacacaaaaccggatcaacccaatcgaaccagcctcaatgacaattttgggaccgacttttaaagacgtgtgtctctttattgtcgccgttcaattggtaagaggccacggcgtaatcgtaggacgacgacgaaacatatttttctttagtgtttattttatttttgtgttgggtttcagtttcaaagagtcccaccaatgaccaaaaagtgctccaatgcatgattattacgttggagcctcttcgatagagagatttttgctttctcaatttattattttttgtgtctctctctcgcccgatttggagtttttagggtttgatttttgtaatgtgagaaaggtttcgtt

SEQ ID NO: 3968 - DNA, 3000 bp, Unknown; identical to SEQ ID NO: 3963
  misc_feature (1)..( 3000): cDNA_ID_3072264_gDNA_ID_1620677_Annot_ID_164275 3000 nt of promoter + ATG

SEQ ID NO: 3969 - DNA, 3000 bp, Unknown; identical to SEQ ID NO: 3772
  misc_feature (1)..( 3000): cDNA_ID_1821876_gDNA_ID_1620677_Annot_ID_164271 3000 nt of promoter + ATG

SEQ ID NO: 3970 - DNA, 3000 bp, Unknown; identical to SEQ ID NO: 3774
  misc_feature (1)..( 3000): cDNA_ID_1821880_gDNA_ID_1620677_Annot_ID_164269 3000 nt of promoter + ATG

SEQ ID NO: 3971 - DNA, 3000 bp, Unknown; identical to SEQ ID NO: 3775
  misc_feature (1)..( 3000): cDNA_ID_1821883_gDNA_ID_1620677_Annot_ID_164266 3000 nt of promoter + ATG

SEQ ID NO: 3972 - DNA, 3000 bp, Unknown; identical to SEQ ID NO: 3764
  misc_feature (1)..( 3000): cDNA_ID_3071828_gDNA_ID_1620677_Annot_ID_164265 3000 nt of promoter + ATG

SEQ ID NO: 3973 - DNA, 301 bp, Unknown
  misc_feature (1)..( 301): cDNA_ID_3092966_gDNA_ID_1620677_Annot_ID_164292 3000 nt of promoter + ATG
ttcgagcttggaagattgaaatttgagatcttttgatcttgaatcaagcataaattctggattttgaagtttgagagtgacccagtgactttggtctgaatctcggaggtatcttattccaggtaaaatccattaacatctctctctctctctctcaagctcctttcttcttttaagagaagtttatgttgattttcgtggttaccattcatcttcagggatcaaggattagacttaatgcgattaagcaaatgggtttttcacgatgactctccttgttgttggggagattcaataaatg

SEQ ID NO: 3974 - DNA, 3000 bp, Unknown
  misc_feature (1)..( 3000): cDNA_ID_1822589_gDNA_ID_1620677_Annot_ID_164291 3000 nt of promoter + ATG
ttgttatactcataggcaaggtagtctgacaatatctgttaagaaactgcctgaattgctacctgggcaacgtgaagggaagatttggatgtggcatcggtgcctgaaatgtcctcggatcaatggctttcctccagccacacgcagaattgtaatgtcagatgctgcgtggggcctgtcttttggcaaatttttggagctgagcttttctaaccatgcagcggctagtcgtgtggccaactgtggtcattcccttcacagagactgtctccggttctacgggtataaatagatgcttcctaatataaatattttctgcggattgtttcacttgttattacacattactgattttccctcgtccaatatgtctgattctcaagtagcatcttgcgtaatgcaatcaggcttagcacttagtatatattacatcagatgtactgtctagataggctctgcataagtagtactgtagtgttggtcattcacttctctaattgtcatctatacggcaagtgtcagtctatgtttgacggttgtggccttgtattaaacaaccatgaccacgccagtaatgagtatcacttaaatttttcttaatgcagttttgggagaatggttgcttgcttccgctatgcttcaatcaatatttacgcagtgactctgccaccagcaaagctttattttaactatgagaaccaggaatggctccaaaaggaatcaaaagaggttacaagtttcccacatttttaatcgaatatttgtacatattcaacaaagccaggagtcttattttacttaattgtcatggtctgtatactataggtgattaaaaaagcggaagtcctttttaatgaggttcaggaggctcttagtcaaatttcagcgaaaactatgggcgcaggttccaagggcagcactcccaacaagatcaagctttctcttgaagaacttgcaggacttcttgagcaacgtaaaaaggaatataaggtagcctgtcatgtaacttacacaccattagaattaagaagaaatagagttgcatttggcgcattacatcactcacactcactctaactcacgcagacagaacccacccacctgcacactacacacacattcacacatacctacactcatacacacccccaccacgttcatacttctcacgaatcatgtgtgtaaaatatagacagagtcaaaactttttcttataaataattgtagaagcttgtctcataatctgctggcctttataggaacgagtcttttacatagcctctgtacctagagtcctttcttcactgtaggatgatttttcagttttctctgtatgcaataccgattaaggctgtcgctggttttcaggattcattgcagcaaatgttaaatgtggttaaggatggacaacctactattgatatccttctgataaataaacttcgaaggctgataattttcgattcatatgcttgggatgaatgcctagcaggggcggccaatatggtaagaaataactatttggaagctccgaagaattcagccccaaaagttatgggtcgtaacgtctccttagagaagctcagtgatgaaaaagtaaagtcgataccgacccatgttgcaatttgtaatgactctcttctccaggatgcagactacgaaacgtgtcttaaccaaggtaaatcatttgctgatactagtggcaaatttgctattcctgaagatgtaggctcagacagacccccagattgtaggatggagttcgaccctagtgaaggtggtaaagataattttgtagagtcttcgcaggtggttaaaccagcacacaccgagagccagtttcaagcaacagacttatctgatactcttgatgcagcatggataggtgaacaaactacttcagagaatggtattttccgtccgcctagcagagctgcttcaacaaatggaactcagatccctgatttaaggctgttgggttcagaaagtgagctgaactttaaaggaggccctaccaatgatgaacatacaacacaagttcagttgccttctcctagtttctactattcactcaacaagaattattcgcttaattctcgcaagcatatcatggctgaagaccggcctgtttatgtttcttcatatagagagcttgaatggcgaagtggtgcaaggctgctgcttcctctgggatgtaatgacttagtactgccagtttatgatgacgaacctactagtatcatagcttatgcccttacatcatcagaatataaagctcagatgtctggatcagataagtcaagagatcgcttggatagtggaggttccttttcactttttgattctgttaatcttctctcattgaactctttgagtgatttgtcggtcgacatgagtagaagtcttagctctgctgatgaacaagtctcgcagctgctacattcatcactgtatttgaaagatctgcatgcgaggatttcgtttacagatgaaggtcctcctgggaaagtgaagtactctgtgacgtgttattatgctaaggagtttgaagccctgaggatgatttgctgtccttcagaaacagatttcattagatctcttggtcgttgtagaaaatggggagcccagggtggaaagagcaacgtcttctttgcaaaaagtttggatgaccgttttatcatcaagcaagttacaaagacagagcttgagtccttcatcaaatttgggccagcttacttcaaatacctgactgagtccatcagtactaaaagccctacaagccttgcaaagatcttgggaatctatcaggtacgaaaaataacaaaatacttaactaacaatctctctgaactacatgataattgagaatgcttttgttcgactcaaaacataatttttcttgttatctcttttgttgacatttgacgagacccgttattctttgctaaatctttaaaggtttcatccaaacaccttaaaggaggaaaagagttcaaaatg

SEQ ID NO: 3975 - DNA, 3000 bp, Unknown
  misc_feature (1)..( 3000): cDNA_ID_1822593_gDNA_ID_1620677_Annot_ID_164290 3000 nt of promoter + ATG
tgataaataaacttcgaaggctgataattttcgattcatatgcttgggatgaatgcctagcaggggcggccaatatggtaagaaataactatttggaagctccgaagaattcagccccaaaagttatgggtcgtaacgtctccttagagaagctcagtgatgaaaaagtaaagtcgataccgacccatgttgcaatttgtaatgactctcttctccaggatgcagactacgaaacgtgtcttaaccaaggtaaatcatttgctgatactagtggcaaatttgctattcctgaagatgtaggctcagacagacccccagattgtaggatggagttcgaccctagtgaaggtggtaaagataattttgtagagtcttcgcaggtggttaaaccagcacacaccgagagccagtttcaagcaacagacttatctgatactcttgatgcagcatggataggtgaacaaactacttcagagaatggtattttccgtccgcctagcagagctgcttcaacaaatggaactcagatccctgatttaaggctgttgggttcagaaagtgagctgaactttaaaggaggccctaccaatgatgaacatacaacacaagttcagttgccttctcctagtttctactattcactcaacaagaattattcgcttaattctcgcaagcatatcatggctgaagaccggcctgtttatgtttcttcatatagagagcttgaatggcgaagtggtgcaaggctgctgcttcctctgggatgtaatgacttagtactgccagtttatgatgacgaacctactagtatcatagcttatgcccttacatcatcagaatataaagctcagatgtctggatcagataagtcaagagatcgcttggatagtggaggttccttttcactttttgattctgttaatcttctctcattgaactctttgagtgatttgtcggtcgacatgagtagaagtcttagctctgctgatgaacaagtctcgcagctgctacattcatcactgtatttgaaagatctgcatgcgaggatttcgtttacagatgaaggtcctcctgggaaagtgaagtactctgtgacgtgttattatgctaaggagtttgaagccctgaggatgatttgctgtccttcagaaacagatttcattagatctcttggtcgttgtagaaaatggggagcccagggtggaaagagcaacgtcttctttgcaaaaagtttggatgaccgttttatcatcaagcaagttacaaagacagagcttgagtccttcatcaaatttgggccagcttacttcaaatacctgactgagtccatcagtactaaaagccctacaagccttgcaaagatcttgggaatctatcaggtacgaaaaataacaaaatacttaactaacaatctctctgaactacatgataattgagaatgcttttgttcgactcaaaacataatttttcttgttatctcttttgttgacatttgacgagacccgttattctttgctaaatctttaaaggtttcatccaaacaccttaaaggaggaaaagagttcaaaatggacgtcttggtgatggagaatcttctgttcaagcgaaacttcactaggctttatgacctaaaaggctccactcgggctcgttacaatcccgatacaagtggtagcaatacagttttgctggatcagaatcttgtcgaagcaatgccaacatctccaatatttgttgggagcaaggcaaaacggcttcttgaaagagcagtctggaatgatacatcatttcttgctgtaagtttccagttgttactcttcttttaaaccgctttgaaataccgaacttgttcttgagctttacatagtaatgctgatgcaagatcttggtttgtttctggctgaagtcgattcacgtaatggattactccttactagtcggggtagatgaggaaagaaacgagctggttctaggaattatcgatttcatgaggcaatacacttgggacaaacatctggagacttgggtcaagacttcagggctccttggaggacccaagaactcaactcccacagtgatatcgccgcagcaatacaagaaaagattcaggaaagcgatgacggcttattttctgatggttcctgaccagtggtcgcctgccgcggttgtgccaagcaacagttcttcagcagaggtgaaggaggaagaagagaaagacaatcctcaagctgttggtaacaagtcctgaagtattttcagcaaacatacacaatattcagttagcaaatatagtttttattttttttggttggaatggtcttttgggtaatttgtgtttatgtattacccttggccttaagtgtggcatatgcctcttccatcgcctttgcatcagaattaataaaagaaagatgcaattgtacagacactgcttctatcttttagtgtttgttattcgtcgtaacttatgtttttatcaacaattcttcttggttagtctttcaaatgctctcaaatcattttattaaatttctcgaacgtttgtttaaagatgggatccttgaagaaatatgttgtttgatcagattgagttctaaaattacatcttgaattttgtagatagtcccaaccaaatgcatcacacatggggactaaactaactttagagtgtttctctaatttctacttaaacaaaaaaccctaagtgaaacttgaacaaacgaatgaatcttagggacttattttgactcatcacttataagtcttaacgcataaattttagtttcgtataggaagctaaacttagaaggcgtgaaattggctcaaaacaatatgcatcaatcaaaacagaggaaaataaataaacacaagaaaaaatagaaagactgatcttcttccattttaacctccctgccttagcttgcttctaaggcagaggaaaattcaattttcttctctcaaagtgacaaaaagacagagaaaaagttttaagcaaaaatg

SEQ ID NO: 3976 - DNA, 3000 bp, Unknown
  misc_feature (1)..( 3000): cDNA_ID_1822597_gDNA_ID_1620677_Annot_ID_164289 3000 nt of promoter + ATG
ctggaaaaagctttcactgatatgaccctttcctattgttaagacctcaagattcctgaaacagatcaaaagcattacgtttgatatataataactaagttatcgaaagcatatccgagggtaaacaagacagatacctcaaagtggtagcggctttcatagccagagcattaacagcaggagcgccataaacattaacttcagtagcatttggatagcgactacacatgttttcaactgcacataaagcacaggaggttatattgtatcccacgtatatttccacaattagcaactgtttttttgttttcctcaaacggcaaataacagaaaagacagatttaatgtatgtatgaagaacaacttacattgttccatagaaatccttatattttcaaagttcaagaccctccagaaatcctcatgagcactagctactctccactgccgacataccatagcagagcgacagaggtcgacatgattcaagaacgagaatacctgaaagaaagaaaatttttaaaaaaacaaaaaaaaggatacttacatgtatttatcttaaaatgcaagaaagaaaaaaagaataccatatgtaagaggtcatcagtcaaatcaatatgaacttcaaaatcttctgtgtctgaagaaccattatcatctccatcatcctttttcccatctttccgattataattcaagatgaaattctggcagaacatatcagtatccgtccgggaagaagaggcaatgccaaaactaacagttctctccaccgacgaaacagaatttccagcatctgaagatacccccgaaactgacctgcactcactgcaattgaacttcatagtcagaaacacatgaaatcagacagacgaataaatgacagattaaggattgatgtcaactaaaatatcactcttgatgacgctgataagccttaaacaaaacaaaaatccaagaaatcgattctacactaaagtaattgaacaaaacagagtttacgaatcatgcatgatacaaaagtaagagagctcacgcaagcccagagtagactttggcacgcttgtgatacgaatcatgatcagcttcctccatcgtacaatcctctgcttctgcaaccacattgctactactctcaccctgaaccaactgattcaagggaatctcagaggtccaaaagcgatccaattcagcccaagcggcttcactttcctcggcacacagcctcagcctccaacgtgggactcttggtgccctctcgttttcaccgaaattaacaaaatcaccatcgccgttactgttatccatggccgttgctaaagattgtttcttcactctgccgccgttatcgtcttcctcgtcttcgtcttcgtcggtgaagcaagaaaaacaccaaatcctcatgcaacccctaagcccacctccccaaaaacgaaatcttgtctctcgatctaccacatttatagaaaacttgctcacaaaaaccagaatttggggaaaagtaacggaattcggaaagcccagatagaattgagaggaaacagaattgaatctctaattctggatttaaagtgacgggaaggagaagatcaaacgctaatctgattcaggattagggtttgagagaaatgaaaaggtagaatcggatcagatcttgcgaggggcgagtagaggcatattgtgaggtttctttggaagaaaaggtggtcgatgatataatctggatgccgattcggaagaagaagcaaaataaaaatcggcgaaaatggaaagggaatgataaaaattaaaaagacaaaactaatcgcgaaacacaagggactttggaagtctttggttcttgcttcaccgttgtttttgttcagaaaggacgatgtaaaaacggtgtcgtttgacaataagtactactgtgtgtaaagtagatagatagatactctgaactctgaatactaggatattataacaatgtttagttcgtacgataaaataatggtttagacacaaccgtttatgtttgggtcaaagttacaaaatttgcgtcacgtgagcagtcgactgaaaatcgaagatagtcaggcgtcagtaggtagaccgagccacaactgtagtatattgtattagcaatttagcatacgtaacgtacaaatacttgttgttttagtattttggtgatgttatcgttttgtgatttaaataaaaaaatttttgtttttattcaatcaaaattctaaatttttttatcaaaatttgatattactagtttaagatttgtaaaaaataatctaaaatcttcataaatctgaagttattggattcatacttttataaaattattttgaaaagtttatattatttaattaaaacaaaataaagtatgattgctaattaattaaaattattgtattattgatttatgactttctaccatttttttgtgttaaattctatcattttcttcacaaaataaaatcatcaaaataaagaaattgattgaaaaagtttcaaaattataaaaaactaatcaacaatattatataaaactctgtgtttaaaataattcatttatttacgttcgatgatattattaaagttaataaagtttgggatcactaatcaaaattcatttccgagtaaaaaacacagacatcacatcactgtaacttttgtaccagcgaaacccacattaatattggggttgtttctctttatggcccaatggctatatcttcgttgtaactaggtcacgtgagccattgacttttcgcccaatatttaagcccatttaaaggcccaatatttaagcaacactcatatacaacatgatgataaaattaaaaccgttgaagtatgtaattaagattgagatgacggtggatgtgtgaaacagctgcttccggtgtgctagtgccccgataggaccaaagctgagaatataattgaatatgtggacggttgagttataattaggagaatctcataaatattattgaaatatcaacg

SEQ ID NO: 3977 - DNA, 3000 bp, Unknown
  misc_feature (1)..( 3000): cDNA_ID_2156571_gDNA_ID_1620677_Annot_ID_164288 3000 nt of promoter + ATG
ggtacatcatcttttattggagtcgtggagagtttaactaaataaattccaaaccaatagagttgtttgttgtacaggtgcatcgtatatcttgttttacaagaatatacagtaattgctgttttgctgttttatgtacataacatttataatctaaaatctttatcaaagcaaaaaaatacaacatttataatctaaatttttttatcgaagaaaaaaaaacatttataaatttttatattacattttgtatttatatgtataattgttttatattattctgatttgtatatataattattacaaataaatcaaccgaacatctggactgattaatgagtcgcttaactgttaaatgggcaccaaacattcctttgtcatttgatcaaaaatcatggcatttgaatataaacaactgagtttaaaaatctttctcttttaattggttggaatggaaaaggcaacaagttatataccaagtaatcacactctttctaaacatagcaaccagtttcacaaacgtcaattttatcctactttccatataccggcaataagcatatctatatcccgtttgtttgtttctttttgttaatttaagttgtcgattactcaaatttggttattatcatcttttcaaatttcacccaagaaaatatgtattgatttaatctcataacagtaattttgacctcgtgatcagagttaaaaaaaggtttatgcattcaaagtttccaactctataaggatgtgataaaactagagagattgatatatgttgtaaactagagtttaagcctttaaggtaccttttggattctcagaagcagaagcagaccaagtgagctcctctgaagaaaagtcaagcagatcaaggcaatcggaaaccgcattctgcagccggcgatctccgctgaaatcagcgaactgagacaaaattgaactcacttgtcttatcactaccacaattgtgtttatggagctcacaaactcgcttgccggaactttcaagtagtcatattgaaaattctcctccgatggagacacacagtcccaacatcaataagatcaagaaatacttcaaacatgacattttgtaggaataataaataaaatagttagaaaaagaaaagaaagttttgtggtttttgatgatatcgaagatcttctcgagtcagtggaacctataaaagaaggagatgtattaaattccaaccacctctctgtccacttctaaacagttagtctaatctttaatattgggacttaacttcattatcccacccaacatttgcgttccttcatcgttgatatttcaataatatttatgagattctcctaattataactcaaccgtccacatattcaattatattctcagctttggtcctatcggggcactagcacaccggaagcagctgtttcacacatccaccgtcatctcaatcttaattacatacttcaacggttttaattttatcatcatgttgtatatgagtgttgcttaaatattgggcctttaaatgggcttaaatattgggcgaaaagtcaatggctcacgtgacctagttacaacgaagatatagccattgggccataaagagaaacaaccccaatattaatgtgggtttcgctggtacaaaagttacagtgatgtgatgtctgtgttttttactcggaaatgaattttgattagtgatcccaaactttattaactttaataatatcatcgaacgtaaataaatgaattattttaaacacagagttttatataatattgttgattagttttttataattttgaaactttttcaatcaatttctttattttgatgattttattttgtgaagaaaatgatagaatttaacacaaaaaaatggtagaaagtcataaatcaataatacaataattttaattaattagcaatcatactttattttgttttaattaaataatataaacttttcaaaataattttataaaagtatgaatccaataacttcagatttatgaagattttagattattttttacaaatcttaaactagtaatatcaaattttgataaaaaaatttagaattttgattgaataaaaacaaaaatttttttatttaaatcacaaaacgataacatcaccaaaatactaaaacaacaagtatttgtacgttacgtatgctaaattgctaatacaatatactacagttgtggctcggtctacctactgacgcctgactatcttcgattttcagtcgactgctcacgtgacgcaaattttgtaactttgacccaaacataaacggttgtgtctaaaccattattttatcgtacgaactaaacattgttataatatcctagtattcagagttcagagtatctatctatctactttacacacagtagtacttattgtcaaacgacaccgtttttacatcgtcctttctgaacaaaaacaacggtgaagcaagaaccaaagacttccaaagtcccttgtgtttcgcgattagttttgtctttttaatttttatcattccctttccattttcgccgatttttattttgcttcttcttccgaatcggcatccagattatatcatcgaccaccttttcttccaaagaaacctcacaatatgcctctactcgcccctcgcaagatctgatccgattctaccttttcatttctctcaaaccctaatcctgaatcagattagcgtttgatcttctccttcccgtcactttaaatccagaattagagattcaattctgtttcctctcaattctatctgggctttccgaattccgttacttttccccaaattctggtttttgtgagcaagttttctataaatgtggtagatcgagagacaagatttcgtttttggggaggtgggcttaggggttgcatgaggatttggtgtttttcttgcttcaccgacgaagacgaagacgaggaagacgataacggcggcagagtgaagaaacaatctttagcaacggccatg

SEQ ID NO: 3978 - DNA, 3000 bp, Unknown
  misc_feature (1)..( 3000): cDNA_ID_3072252_gDNA_ID_1620677_Annot_ID_164287 3000 nt of promoter + ATG
cttgttggctgtcgtgctgttacttctcttgagttgaagtgccctcgcatagagcagatctgtttggatggatgtgatcatcttgaaactgcattcttccaacctgtgagtgttacttttctcatatcaaataaccaacatatcttaactgatggatttcttgcttcttccttcttgttgtgaataggtcgctctgcggtctctaaatttaggaatatgcccaaaattgagtgtgctcaatatcgaagcaccttatatggtgtcccttgaattgaaaggttgtggtgtactgtctgaagcatccattatgtgtcctttattaacatctttagatgcgtctttctgcaggtaattatttgtttttttttttgtttttttctctatttatgtgactgatattatcgtgctgctaatcattttcccccattccagtcaactgagggatgactgtctgtctgcaaccactgcttcttgcccactcattgagtcattggtgctaatgtcatgcccgtctattggctctgatggcttgtcttccttgaacgggctcccaaatttgactgttcttgatttatcgtacactttcttgatgaatttggaacccgtcttcaagtcctgtattcaacttaaggtaattaaggcattaagacttgtatgatgctggatgtttccctttccgtcagcagtagagcatatacattatcttgccaatgaaaacttcttgagttatgttgttgtgtgcattctttgtatatcagctattcatgattcatattgcttttgggcttactttgagactttttattgtttaggtactcaaattacaagcctgtaagtatcttactgactcatcattggagcctctatacaaagaaggtgctttaccggcacttgaggagttggacctgtcatatggaactctctgtcagactgcgatagatgatctacttgcgtgctgcacacacttgacccatttgagcttgaacggatgtgtaaacatgcatgacctggattggggttcaaccagtgtacatctttttgattactttggggtctacagttctagtgacaatacccaggaaccagctgaaacagccaatcggttactgcaaaacctaaactgtgtgggttgccccaatattagaaaagtgctgataccacctgcagctcgcttttaccatttatcaacactgaacctttcgttatcggtcaatctgaaggaggttgatctcacctgttccaacctggttttacttaatttaaggtttgagcttttgcatttgctagataacttatattctttatcttccatgaaatgagtggtcttattctattgctaattccatttcgaattgtctagcaactgttgctctctggaagtattgaagctcggctgtccaagattagctagtctctttcttcaggtatgtttttgctccgtaacttttaccactaaacacactttggtaccttaagcttgggtctatatgttaccactaaacacactttggtaccttttgtctttggtagtcttgtaacatggacgaagcaggagttgaagcggctatatcaggatgcagctcactcgagacattggatcttcgtttctgtccaaaggtactaacaataaacgagtgttaacttcgatattgaaaacttagcaagtaatccatttttatgtaacaattaaaaccttgtcttggtgaattaacagatatcctcggtgagcatgtcaaagttccgaacagtgtgccctagtttgaaacgcgttttcagcagtccaaatctcttgcaagattagggttttgcgccaaatgtttgattatatacaactttttctgcagattatagaaataatgtgttgtgtggtgtggtgtttgggttgtaaatggctccaagtcataagtttcagtagtgcatataggcctctggagtttgtactgtggccttcttaggatgcttgtgtgatgacacaaacctaaacaacattagtactttttttgtgtacgtggttgatgatattgttgctactgttatatgtagatcttatatttaccttatcaatttaccttttaagctttgatccacattgactcacataacaaagataaaaattaaataaaacttttggaataagtagggggtaagaaaaatttagtatattttttggaaactaaagtctaaaatatgaatgaaggaagaaatctggaatgtaaatttggactcatgcgtattggatgataataatttggacttcttcttcccccaaactcttatttggactctcatcaccatatatgaaattacaacaacaataatcgacaacaaattttggaatattttctctataaaagagatctagtaattataataaatataaataaacctcactaactatcgtttaagaatgttatattcaaatattgccttctacatttttgacttactatttttaatttgctaaattactaaaaataacaagtttttagcgtcagtaaattaactacacagtttgttttactaatgtgaaatcaattttgcgagtaaggattaaaccctataaatgattcgaatcaaagataataaacttggcatttactccggaatgtgacgtaaatttttatccctaaaaacttctgtgtttttgttttggatctagtcttcttttgttttttaatgcaaaatccgagagggcgggaagtaattgttgttgttgatgctcttttttttttttgttgcttttgggaacttttttgggtagcggtttaagtaactttgaacctttaaaaaaaaaaaactccacagtagtaaaatttcgccccttctctctctatctccttagggtttctcaattcttcttcattttgaaatttgaaaaattctctggcgcaacctcacggactctctttctctctctatgactcttgcttcccccaatctaattctctagggttttctcgtcgagctcttcacgagttcatgagaaattgtcttccaatg

SEQ ID NO: 3979 - DNA, 3000 bp, Unknown
  misc_feature (1)..( 3000): cDNA_ID_1841049_gDNA_ID_1620677_Annot_ID_48277 3000 nt of promoter + ATG
cattctagttcaccgtttatggattcgccttgtgaacttcctgataaggtactcaatcctctttctccgacatataaaaatcttatttgttgtttttgctattgagtttctttaataactttatagagatttttttcaggcacaggagcttttggatagcttagcaatattggaaatcacggtgtcaaagcttgagcaagaatcagtttccttgagatatctacttaggcaagagaaaaacgagcggcgtctctctgagattctacaaaagaagtctcattattctgctccttcaaagttcactaatgctcaaaatttccctaacaagtcggtatgactctctttacaaagttttctgccttcttttgttctagtttctaaacagataattccttctggtttgacaggtgacgaggaaaagagagagtaaacaagtggattctttggatagtgaagctttgcaagtagaatgaagaagcaaagagttattatgtgatcttagggatagccatattggctggagagatcaacccatgggcaaactctttctcctctaattttagaatcacctttcagactcaccgagctggtccctgagcatctattcaataagaactctgagatcttagaaagatacactaaggggtaaggttgataggacgggttatgccctgcaggaggagctgcagtgaggagcttaattgtattctgcatctaagcatagaatccattgtggtaggcttataatcactaaggggattattggttgtataagttaaagtcatctcccttggatttaaagtaaattacgtaagatttttaattttttggttcctctattagtttatcataaccttattaaaatttgtaacaaccatacaattgttgcattgaaaatattaacaaagaaactgttgataatggactaatgcttgttgattagaacatgaactagtagttgccatccggaactaaatttttaagaacttaaagagtaggttttgtaattacaattggactaacagaagatataaaagtaattaatctatattatgatcggttaactaccgattaaattaaaagaatgataatgtgaggcgttaggtttataattatattgagccttaatggataaacactatggcctgtccaaaatataaaattacacctgaagattgtgattgctgcattgaaaatattaacaaagaaagtgctgataattgacaaatgattgttaatttagaataagaagtagtgtgtagttgtcatccggaattaaaactgaagagttggttttaaattttaattacagttggtttttggggccttattatgtcttttaatcagtagtttaccgattatattattataatataaattaataacttttatctattttgttagtcaaagtcctaaaatatttttgaaagcccattaatgtcctaaatcggccctgttccaaattttttggcttagcaaaatggtgatatccgattataagcacggactaaaaagataagataaggttttgttaaagttttattgttaaaatttatatatggtagtataaattatatttaaaaaagttataattagtagcgatatatagtatgtttttggaatctttaaaaccaggtcacatggaagtgtcgaacaaaagaataagataatacaggtaattaacaatccttagtgggctgaacgttgaattaagaaataaagccacgagtttggttttcttgttatttaatttacgtctctctctatttatatgtttaacgttacacttattaagatcgtaccttagggaaaaaacactcaacagacaaaaaaaaaaaggaaggcgcatcagtgatggagaagattattgacgtagcttatggtgcatcagtgaaggcgggtttgacgttgttggagaagaatctgttgccggatcttgtcattaggcggctcatacgtctgcttttggccagtcgtctccgttccgtttacaaacccacggcggagatgcaactctccgatctcctccgttttgttgactgtaagtgacactgaaacatatatagttgctccttttcaacatctagattttatttatttatttgagattatagtttacaaagctattatagagaactagcagattttattaattttgctttggtgttattgagtgattattatgacgatttttaaacatctggtgtgtgtgttgcaagttgttacacttacacatacatagtttgtgtagggttttgactgtatacacttaacatgacgtttttaccatctccaatgtctatttctctattttttcttactttagagtcgattatattttaaaggtattttactttaagatcatctctaatagttgtttctattttcttctaaatatattaaaaaataaggatctttattttagaaataaaaatatagataagttgaactgaaataaatacaaaaatatagtataaagataaaaatagagttgaaaatactctaatatatgttttaaaatagagtttactctaaaatagaggagaaagataatgtatatctctataaagtaatctaatgtctctcctctattttaaaagaaattatatattagaaatttacattaaagcaaaaaatatctaaaatatagttaattctaaaatagaaaaacatatagagatgaacattagagatgctcttagcgccgcacaactgtgaaacaaaaagtagtttagagatattgttgtcgagtgatccacgaaaacaaaatttcttcttcttttaatatatttgtataatttttaaaaaattagatgtcagtttttttgggttaattggatctccggtctctaagcctctaagactaattcaaatgaaaaatatatacatttggataattagaacattttatagtttgtcacataatataatttgcaaaatgtaaagaaatgttttataaatgtcttgtgaatgatgtatacttcagctctaaagaagatg

SEQ ID NO: 3980 - DNA, 3000 bp, Unknown
  misc_feature (1)..( 3000): cDNA_ID_1822628_gDNA_ID_1620677_Annot_ID_48279 3000 nt of promoter + ATG
ttttcaatgcagcaatcacaatcttcaggtgtaattttatattttggacaggccatagtgtttatccattaaggctcaatataattataaacctaacgcctcacattatcattcttttaatttaatcggtagttaaccgatcataatatagattaattacttttatatcttctgttagtccaattgtaattacaaaacctactctttaagttcttaaaaatttagttccggatggcaactactagttcatgttctaatcaacaagcattagtccattatcaacagtttctttgttaatattttcaatgcaacaattgtatggttgttacaaattttaataaggttatgataaactaatagaggaaccaaaaaattaaaaatcttacgtaatttactttaaatccaagggagatgactttaacttatacaaccaataatccccttagtgattataagcctaccacaatggattctatgcttagatgcagaatacaattaagctcctcactgcagctcctcctgcagggcataacccgtcctatcaaccttaccccttagtgtatctttctaagatctcagagttcttattgaatagatgctcagggaccagctcggtgagtctgaaaggtgattctaaaattagaggagaaagagtttgcccatgggttgatctctccagccaatatggctatccctaagatcacataataactctttgcttcttcattctacttgcaaagcttcactatccaaagaatccacttgtttactctctcttttcctcgtcacctgtcaaaccagaaggaattatctgtttagaaactagaacaaaagaaggcagaaaactttgtaaagagagtcataccgacttgttagggaaattttgagcattagtgaactttgaaggagcagaataatgagacttcttttgtagaatctcagagagacgccgctcgtttttctcttgcctaagtagatatctcaaggaaactgattcttgctcaagctttgacaccgtgatttccaatattgctaagctatccaaaagctcctgtgcctgaaaaaaatctctataaagttattaaagaaactcaatagcaaaaacaacaaataagatttttatatgtcggagaaagaggattgagtaccttatcaggaagttcacaaggcgaatccataaacggtgaactagaatgctcaactgcgctagttagagctaaccgtaagttaatctcctcttgtaactgctgctgcaatctcttaatctgtatcatcatcccaaatatcattaaccattaccattagcagtagtagtacaaacttttcagtggtttcttaaatgtgacttagttctataaataagtacgacaaagagaagcaagtgagggatctgagtgacttacatcttgttcaagctcacatttgtaccatagtttggtctttccatcaaatctaccactagtttgatcaatcatcttgctttcctgcttccaaaaaaaaaacaaaaatgcaatttcaaaacctttggcgtgaccataaccccctcaaaaccctagatttactaaatacattccaagaaatcagataagaataaaaggcagagatatatgagagagagaaagaggtacattacatcgagatcaggaaaaaacaaagagccatcaccagaagagtaagatcttctcgagaatgtaccagtcttcttcagatatctccggatcgagcttcccctgtatcagaaaacatcagcaaaccaaaaaaacaaaacaaatcgggagcatagagagaaggaagaagaagtatagatttagagagagtatatataccaattgatgggaagacgaaaagtggcatttccgaaggtgcgatcggtgctaggagaagaagaagaggaagcaaggttttgatcttcatgaagagcttcggctttgatacagagcatcgtttgtcacggagcagagaagaagaagaaagactctgaagaaagaaaggttccaactttgaggtttttttattattgtattgaagacagaagagtttggttgggttctctcactgctcacacttcactctctttcctttttttggtctgtcgcttttatgattttgtaacataaaattataagtagaaaaaagctgaaaagggaaacgaaggaatttattcgtgtctcacacaatttgactaggtgctcctcattttcataatttcattttacacacttttttttttggtcaaacatttacattgtctctatattttctagtagtatattatttaatagaaaaagagaagaaatttcggtttcatattattgcttttcatttcattatattccatttcggtatttatttttccataaattacgaaaaatgcttcatgtgtttttgaggactcaatgtatcatgtgtagggtaaatgatgacgcagataaacaaacagtggaatatctaactttaacatgttctttttctgaatcggactcaaaagaaagacctgattgcaacatatgagtcacacactcacatagagaaaaagattccaatcgtatcaaagagtgaaccgtattatggtttagtcaatttgacacaaaaccggatcaacccaatcgaaccagcctcaatgacaattttgggaccgacttttaaagacgtgtgtctctttattgtcgccgttcaattggtaagaggccacggcgtaatcgtaggacgacgacgaaacatatttttctttagtgtttattttatttttgtgttgggtttcagtttcaaagagtcccaccaatgaccaaaaagtgctccaatgcatgattattacgttggagcctcttcgatagagagatttttgctttctcaatttattattttttgtgtctctctctcgcccgatttggagtttttagggtttgatttttgtaatgtgagaaaggtttcgttatgttaaagaggcactctatcgccattctctccagaatcgcaagcttcgattcccataaaaccctt

SEQ ID NO: 3981 - DNA, 3000 bp, Unknown; identical to SEQ ID NO: 3966
  misc_feature (1)..( 3000): cDNA_ID_1822624_gDNA_ID_1620677_Annot_ID_48280 3000 nt of promoter + ATG

SEQ ID NO: 3982 - DNA, 3000 bp, Unknown
  misc_feature (1)..( 3000): cDNA_ID_1822620_gDNA_ID_1620677_Annot_ID_48281 3000 nt of promoter + ATG
atatatatatagaagaaaaaaaggaactctttttaatgcaaattcccacacctcaggttgtttgattccaagtataagcccacaatcagacaaatcatcagaaatttcacacccaacatcttcatacaaggcatcatgatggatacgcttagcagatggctgaaccacaatgcgggaaatgccggttctgtctttcccaccgtgtaaaaggcgagcgcaatgcgatggcgtcaatggtgttcgtctctcccatttgttaactgtttcagctagaatccccacaactccattccccaacttcttctcctcctcatggccatttgaattcatctttcatgtaaaaacatataatctctgcagatgaacaacaaacccttattttaaacaccctggaatagattcacaaacatttcatatttcgagtttcatcaaccaaacatcaaaaacccaaactttaatgtgaaactgttgaaaatcgaacaaactgggaacagaaatttaacgagttgagaaatagcttttgctcgagcgattaattgaaaactcaaatcagaacagaacagaacagaacagagcagagaggaagagaggaacgcaaattattaaatccaaagtgaaaaaatgaaggcagtgatttagctaaagcgctctccaaatttgcattcctcaagatgggaaaattatggaagaaggaatcaaaacgtacctgatgagtttgatcatgcaatgcctgtgagctggtttgtcaagaaaaaatacaagtttttttttttctttggaattagtgagttttttaggcgcagtaataatctctttccgtcctttttataagctaaattacgtatatgattaatatattgtgggcgtgttagcgaaagattaaattaatataatataatatttcttgttataatgtatgatgtgacaagaattctttttgttaataatgatctgtaatcagctataattattttcccctttcttcaggtaatcatttttgttaataatgatctgtcaaaaaaaaaaaaaaatcctcgtgttcatttttttttgaaacagaacataacttaattaagctctttcgaaaactacttttagttataacttaatgtggctttcacataatggatatgctccgaaactatctaatgcaatagagagacattaattaagtttgttgtatacacgagaacaacgtgagccagccaatgttgtaaaaataatatatatagtatataatgccatagacaataataatgaaatcaaacgaaacaaatgaaataagtatttttactatttaaagaaagcaaaaacaagaaaggaacaagctcttgtttacgtggatggatacttggataggaccgagggaggatcaatccaatcgaaaatgtattacgtgtattcgaagagaaatagacagagatgagtgaagacgtttgctcacgtagctactatatcctcgatgacgacgcttaccagttaccactttccgtgttctctacgtctctctcttctgagactttttttaacattattaactctttaatatgttgggttacgtatatgatgatttcaagttagggatattaatagattcttggatgaaacgcaccgttttactaaaaattcccaagtattatttgcagagagtgggcttgagttgttgtcttaatttggcccaagttccttttgccttggcatttgtaacccaaagaagaatgagaacaagcttcttcaatttaggaattaaggagtgcacaaaggtgacttcaaaatcagtgtgtacgaacaatagtatggcctaaaacgattatgctaccaacagaggatgcatgggccgcggtgggcagacatacgattcaacctcgacaagtgttcttcttatgaaatatctatgggccttacccaataaactatttcaagaaaaaacaatttgaaagtgaaacttgaacattgttttggtatcagttcatcgatatcgctgcaagcttagatttcgttgacggcttttcttttgtttaatttattaggttttcttttaaaagtttaattaaatagacgtagttaattggagatggcctgggaacaagttctgggcattgactttgcaatggcacaaaagtcgagatgcgagaagagattcctcaacgaggctacaaagtaacagtggtcctatccttttgctttttacacccatctctttttttttcatacattttttctcacaaataaagaacttttcttctttcttttttctgctattttttttaacgttgtgcatgtgtaaatctgaaactctctagtaaaacttttctgtaatatcatttgcttacataatttgactatgatttttttggtaaatgaaacatcatgcaacaacctcgagttgaatgtgcatctagaaacatgatgttggatttataaatattcactttcaactcaaccttttaccaaaaaaaataaaaaatatattcactttcaaagtgagagatttcacaaactcaaataaccatagaacaatagcatttgtatgacatgaccacaaaaggttgttgtattcttggatggagaattcaacgccaagtttgacaaaatgataaaagacaaatgtgacttgatgcccaaaaaaaaaagagaaaagagatttgtttgttttatggaattttaatttgatacgtatatatataagagaaacacgagcaaaagaaaaagtagttacttttaatttattattcgaaaggtaaaactgtttaaaataaaaaaagaaaaagaaaaaggaatgaaaaaaaaagaaagaaagaaagaaagaaagaagagaagacaacccacacgaatcgccacttttgaagagagaagagaagagaagaggcagctcctaactttctcttttgcttttgtctccatcttttatttcacacccgtgaccgtgccatctccacactctccgtgcgttaatcctggttttatgatttactttaattctcctgtatgtgaacatca

SEQ ID NO: 3983 - DNA, 3000 bp, Unknown
  misc_feature (1)..( 3000): cDNA_ID_1822605_gDNA_ID_1620677_Annot_ID_48285 3000 nt of promoter + ATG
tcgctagcaagtctttcccttgttggctgtcgtgctgttacttctcttgagttgaagtgccctcgcatagagcagatctgtttggatggatgtgatcatcttgaaactgcattcttccaacctgtgagtgttacttttctcatatcaaataaccaacatatcttaactgatggatttcttgcttcttccttcttgttgtgaataggtcgctctgcggtctctaaatttaggaatatgcccaaaattgagtgtgctcaatatcgaagcaccttatatggtgtcccttgaattgaaaggttgtggtgtactgtctgaagcatccattatgtgtcctttattaacatctttagatgcgtctttctgcaggtaattatttgtttttttttttgtttttttctctatttatgtgactgatattatcgtgctgctaatcattttcccccattccagtcaactgagggatgactgtctgtctgcaaccactgcttcttgcccactcattgagtcattggtgctaatgtcatgcccgtctattggctctgatggcttgtcttccttgaacgggctcccaaatttgactgttcttgatttatcgtacactttcttgatgaatttggaacccgtcttcaagtcctgtattcaacttaaggtaattaaggcattaagacttgtatgatgctggatgtttccctttccgtcagcagtagagcatatacattatcttgccaatgaaaacttcttgagttatgttgttgtgtgcattctttgtatatcagctattcatgattcatattgcttttgggcttactttgagactttttattgtttaggtactcaaattacaagcctgtaagtatcttactgactcatcattggagcctctatacaaagaaggtgctttaccggcacttgaggagttggacctgtcatatggaactctctgtcagactgcgatagatgatctacttgcgtgctgcacacacttgacccatttgagcttgaacggatgtgtaaacatgcatgacctggattggggttcaaccagtgtacatctttttgattactttggggtctacagttctagtgacaatacccaggaaccagctgaaacagccaatcggttactgcaaaacctaaactgtgtgggttgccccaatattagaaaagtgctgataccacctgcagctcgcttttaccatttatcaacactgaacctttcgttatcggtcaatctgaaggaggttgatctcacctgttccaacctggttttacttaatttaaggtttgagcttttgcatttgctagataacttatattctttatcttccatgaaatgagtggtcttattctattgctaattccatttcgaattgtctagcaactgttgctctctggaagtattgaagctcggctgtccaagattagctagtctctttcttcaggtatgtttttgctccgtaacttttaccactaaacacactttggtaccttaagcttgggtctatatgttaccactaaacacactttggtaccttttgtctttggtagtcttgtaacatggacgaagcaggagttgaagcggctatatcaggatgcagctcactcgagacattggatcttcgtttctgtccaaaggtactaacaataaacgagtgttaacttcgatattgaaaacttagcaagtaatccatttttatgtaacaattaaaaccttgtcttggtgaattaacagatatcctcggtgagcatgtcaaagttccgaacagtgtgccctagtttgaaacgcgttttcagcagtccaaatctcttgcaagattagggttttgcgccaaatgtttgattatatacaactttttctgcagattatagaaataatgtgttgtgtggtgtggtgtttgggttgtaaatggctccaagtcataagtttcagtagtgcatataggcctctggagtttgtactgtggccttcttaggatgcttgtgtgatgacacaaacctaaacaacattagtactttttttgtgtacgtggttgatgatattgttgctactgttatatgtagatcttatatttaccttatcaatttaccttttaagctttgatccacattgactcacataacaaagataaaaattaaataaaacttttggaataagtagggggtaagaaaaatttagtatattttttggaaactaaagtctaaaatatgaatgaaggaagaaatctggaatgtaaatttggactcatgcgtattggatgataataatttggacttcttcttcccccaaactcttatttggactctcatcaccatatatgaaattacaacaacaataatcgacaacaaattttggaatattttctctataaaagagatctagtaattataataaatataaataaacctcactaactatcgtttaagaatgttatattcaaatattgccttctacatttttgacttactatttttaatttgctaaattactaaaaataacaagtttttagcgtcagtaaattaactacacagtttgttttactaatgtgaaatcaattttgcgagtaaggattaaaccctataaatgattcgaatcaaagataataaacttggcatttactccggaatgtgacgtaaatttttatccctaaaaacttctgtgtttttgttttggatctagtcttcttttgttttttaatgcaaaatccgagagggcgggaagtaattgttgttgttgatgctcttttttttttttgttgcttttgggaacttttttgggtagcggtttaagtaactttgaacctttaaaaaaaaaaaactccacagtagtaaaatttcgccccttctctctctatctccttagggtttctcaattcttcttcattttgaaatttgaaaaattctctggcgcaacctcacggactctctttctctctctatgactcttgcttcccccaatctaattctctagggttttctcgtcgagctcttcacgagttcatg

SEQ ID NO: 3984 - DNA, 3000 bp, Unknown
  misc_feature (1)..( 3000): cDNA_ID_1822601_gDNA_ID_1620677_Annot_ID_48286 3000 nt of promoter + ATG
tagtctttttctatatctatgtaaataaacttgtataactatatattactacgatacaccatgatccatgaacgatcatttattctatttttgcatggtacatcatcttttattggagtcgtggagagtttaactaaataaattccaaaccaatagagttgtttgttgtacaggtgcatcgtatatcttgttttacaagaatatacagtaattgctgttttgctgttttatgtacataacatttataatctaaaatctttatcaaagcaaaaaaatacaacatttataatctaaatttttttatcgaagaaaaaaaaacatttataaatttttatattacattttgtatttatatgtataattgttttatattattctgatttgtatatataattattacaaataaatcaaccgaacatctggactgattaatgagtcgcttaactgttaaatgggcaccaaacattcctttgtcatttgatcaaaaatcatggcatttgaatataaacaactgagtttaaaaatctttctcttttaattggttggaatggaaaaggcaacaagttatataccaagtaatcacactctttctaaacatagcaaccagtttcacaaacgtcaattttatcctactttccatataccggcaataagcatatctatatcccgtttgtttgtttctttttgttaatttaagttgtcgattactcaaatttggttattatcatcttttcaaatttcacccaagaaaatatgtattgatttaatctcataacagtaattttgacctcgtgatcagagttaaaaaaaggtttatgcattcaaagtttccaactctataaggatgtgataaaactagagagattgatatatgttgtaaactagagtttaagcctttaaggtaccttttggattctcagaagcagaagcagaccaagtgagctcctctgaagaaaagtcaagcagatcaaggcaatcggaaaccgcattctgcagccggcgatctccgctgaaatcagcgaactgagacaaaattgaactcacttgtcttatcactaccacaattgtgtttatggagctcacaaactcgcttgccggaactttcaagtagtcatattgaaaattctcctccgatggagacacacagtcccaacatcaataagatcaagaaatacttcaaacatgacattttgtaggaataataaataaaatagttagaaaaagaaaagaaagttttgtggtttttgatgatatcgaagatcttctcgagtcagtggaacctataaaagaaggagatgtattaaattccaaccacctctctgtccacttctaaacagttagtctaatctttaatattgggacttaacttcattatcccacccaacatttgcgttccttcatcgttgatatttcaataatatttatgagattctcctaattataactcaaccgtccacatattcaattatattctcagctttggtcctatcggggcactagcacaccggaagcagctgtttcacacatccaccgtcatctcaatcttaattacatacttcaacggttttaattttatcatcatgttgtatatgagtgttgcttaaatattgggcctttaaatgggcttaaatattgggcgaaaagtcaatggctcacgtgacctagttacaacgaagatatagccattgggccataaagagaaacaaccccaatattaatgtgggtttcgctggtacaaaagttacagtgatgtgatgtctgtgttttttactcggaaatgaattttgattagtgatcccaaactttattaactttaataatatcatcgaacgtaaataaatgaattattttaaacacagagttttatataatattgttgattagttttttataattttgaaactttttcaatcaatttctttattttgatgattttattttgtgaagaaaatgatagaatttaacacaaaaaaatggtagaaagtcataaatcaataatacaataattttaattaattagcaatcatactttattttgttttaattaaataatataaacttttcaaaataattttataaaagtatgaatccaataacttcagatttatgaagattttagattattttttacaaatcttaaactagtaatatcaaattttgataaaaaaatttagaattttgattgaataaaaacaaaaatttttttatttaaatcacaaaacgataacatcaccaaaatactaaaacaacaagtatttgtacgttacgtatgctaaattgctaatacaatatactacagttgtggctcggtctacctactgacgcctgactatcttcgattttcagtcgactgctcacgtgacgcaaattttgtaactttgacccaaacataaacggttgtgtctaaaccattattttatcgtacgaactaaacattgttataatatcctagtattcagagttcagagtatctatctatctactttacacacagtagtacttattgtcaaacgacaccgtttttacatcgtcctttctgaacaaaaacaacggtgaagcaagaaccaaagacttccaaagtcccttgtgtttcgcgattagttttgtctttttaatttttatcattccctttccattttcgccgatttttattttgcttcttcttccgaatcggcatccagattatatcatcgaccaccttttcttccaaagaaacctcacaatatgcctctactcgcccctcgcaagatctgatccgattctaccttttcatttctctcaaaccctaatcctgaatcagattagcgtttgatcttctccttcccgtcactttaaatccagaattagagattcaattctgtttcctctcaattctatctgggctttccgaattccgttacttttccccaaattctggtttttgtgagcaagttttctataaatgtggtagatcgagagacaagatttcgtttttggggaggtgggcttaggggttgcatg

SEQ ID NO: 3985 - DNA, 3000 bp, Unknown; identical to SEQ ID NO: 3976
  misc_feature (1)..( 3000): cDNA_ID_1822597_gDNA_ID_1620677_Annot_ID_48287 3000 nt of promoter + ATG

SEQ ID NO: 3986 - DNA, 3000 bp, Unknown; identical to SEQ ID NO: 3975
  misc_feature (1)..( 3000): cDNA_ID_1822593_gDNA_ID_1620677_Annot_ID_48288 3000 nt of promoter + ATG

SEQ ID NO: 3987 - DNA, 3000 bp, Unknown; identical to SEQ ID NO: 3765
  misc_feature (1)..( 3000): cDNA_ID_3072275_gDNA_ID_1620677_Annot_ID_164263 3000 nt of promoter + ATG

SEQ ID NO: 3988 - DNA, 301 bp, Unknown; identical to SEQ ID NO: 3973
  misc_feature (1)..( 301): cDNA_ID_1822589_gDNA_ID_1620677_Annot_ID_48289 3000 nt of promoter + ATG

SEQ ID NO: 3989 - DNA, 3000 bp, Unknown
  misc_feature (1)..( 3000): cDNA_ID_1822677_gDNA_ID_1620678_Annot_ID_48290 3000 nt of promoter + ATG
ccataaagatagaatcaagtcagattttgctacttcgagaacattggtcaatgagtcaaaatgtcaaatagtcaatactaaaatcaaaattgaactttgtttattaattttgttctaatctatttaaccccacaaaagtttccaaaactgcttcactcaccaaaatagatctaaaacatggaaaccaaaaccctaattttctcaattctcttcgttgttctctctctcatttacttaattggaaaactcaagcgaaagccaaatctacctccgagtccggcatggtcattaccggtgattggtcatctccgccttctcaaaccaccgattcatcgcacattcctctccctctctcaatccctaaacaatgctccgatcttctccctccgactcggtaaccgactcgttttcgtgaactcgtcacactcgatcgccgaggaatgtttcaccaaaaacgacgtcgtactggcgaacagaccaaacttcatcctcgctaaacacgttgcgtacgattacacaaccatgatcgcagcttcctacggtgaccactggcgtaacctccgccgcatcggctccgtcgagatattctccaatcaccgtctcaatagctttttgtctattcgtaaagacgagatccgacgacttgtgtttcgtctttctcggaacttttcacaagtaagcgagctttaaaacttagttaattagctcttaatcacgaatttggatttaattaatactctgttttattctaactatactctgttttgtggactctctgttctgtcattgtaggagtttgtgaaagtggatatgaaatcaatgttatctgacttaacattcaacaacattttaagaatggtggccggaaaacgttactacggagacggtgttgaggatgatccggaggctaaacgtgtccggcagcttatagcggatgtggtggcttgtgctggtgctggaaacgctgttgattacttaccggttttgcggttggtttcagattacgagacacgggttaagaagttggcgggtaggctcgacgagttcttgcaaggattggttgatgagaaacgagaagctaaggagaaaggaaacactatgatcgatcacttgcttactctgcaagaatcccaaccggattacttcacggatcgtatcattaaaggaaacatgctcgtaagtaccctttttcgatcaattctttagatcactccttgtcatattttggtatgaaacatgctagtttagtgacgtgtatgtgtgcaattttcaggctttgatactagcagggaccgacacatcagcggttacgttagaatgggcattgtcgaacgtgttgaaccatccggatgtattgaacaaggcgagagatgaaatcgatagaaagataggtttagacaggcttatggatgaatcagatatctcaaacctgccttatctccaaaacattgtgtctgaaacgttgcgcctttatcctgcggctcccatgcttcttcctcacgttgcctcggaagattgtaaagttgcaggatacgatatgccgcgtggcacgatactattgaccaatgtgtgggctatacacagagatcctcagctatgggatgatccaatgagcttcaagccagagaggtttgagaaagaaggagaagctcagaagctaatgccgtttgggttaggaagaagggcgtgtcctggttctggactggctcatcggcttataaacctgactcttggatcattgattcagtgtttggaatgggagaagattggagaagaagtggatatgagtgaaggcaaaggtgttacaatgcctaaagccaagcctttggaagccatgtgcagagcacgtccctctgttgttaaaatcttcaacgagtccgtttgacgtttagacttttggtaatggctatgtatacattagataactagttatgtttgtatgttttctttttttttggtgaaaatattatgtttgtatgttaatgtatatgtgaatatttaacctatattcctagatgatattttgggtatgtgatttaaaatatttaaggttgatgaggcttgtatgttattggtttctagcggacgcttgaaatttaatgttttaagttctctcacacgttgaacgatgctgatacgagcgataaaaatgatgaagatacaaaaccaaaactaaattttgctacggggaaatctactagcaataaataacaaagtgttttaactttaagcattaaaccaaaaaaaaaggaaaaaattagatattaagtatctccaatgcaaggttctcttgataatttgagagagttttcttgattttggtgattaaaataaaatcatcaaaactgattaaatttgagagagtaaactatttgaagagagattttggaagctgagggagccgtgataggttgaggagataaaacttaattcaagttcttaagtttgataaaatcaaaatttaaacttaaaaaagggtgagagcctttcatgtggttctcaacattagagatggttttataattgggatttggaagtaagcctctattctattgagagtttttggattggagatataaaatcatatttcttcaattctgtattttaattcattttatattaagggtataattggtttttaattttccttaaaacctatttcaccaaatttttatctatataaagtatagaggacaaacttttggaaaagatccttaatatacaatttccccaaaataaaggtgtatcaaagtgattttactataaaataatgtgtaattaacaaatgaaactgagttaaaaaagtcaaaaaatccaaatatcaacaaacaataaatgtgacacaagaaaatcatgtaacgttttcctcaatgagtccatttgtcaaaataaaaaattgggtttttgtttgagtctattttttgttctgtttttcaatctatttaagcacactagatttgccaacttcatcactcaccaaaatccaacgtgatcaatatg

SEQ ID NO: 3990 - DNA, 3000 bp, Unknown
  misc_feature (1)..( 3000): cDNA_ID_1838404_gDNA_ID_1620678_Annot_ID_48291 3000 nt of promoter + ATG
tcgtgttacaaatataaatggatggttaccgtggaattttagatagtattagattccaacattaaaacttcaaccggaaacgaatatatagttcaaattttctctagaatttacttctacaatatctatatttttttctcacgtaatttctacaagtaaaaagaatttaattaaaacagaagttgacgggaacgtcacatgactaaggtcggaacacagaacatagctttagttctgtagacacaattaatatgtctcttcttcttacaccttttgtctcgttcccactttttttctttttcttttcactcccctctaggttttgtccctcttctttccttttttgattacaaatgtaaaattttaatcttcttgactattactttagttgtaggaacatgcatatattgtaaaatttctttgatctctttgtctcaaccaaaatctttctttgatctctttgccccaaccaaaatcttttttatccctttagtttactatactatatgctctatatgctgttttttctttccacgatttgtcttggcttgtgaattttaaaaatacagtataatttaattaattagctacatttactcgtctcgtcttcatctttaaatttataagatgggcctgtaattgatcaagaataatgggcctattccattaacatacgggcctgaagtttttcaaagcaacattaatgaattaaacccattttattggaaatttagaagatggcttcgtcaccacttctcgccacgtcactaccgcagaatcagttatccaccaccgcaaccgccagattccgccttccgccgccagagaaacttgcagttctaatcgacaaatcgcaatcagtagatgaagtgctccaaatccacgcagctattctccgtcataacctcctcctccaccctcgttacccagttctaaacctcaagctccaccgtgcatacgcttcccacggcaaaattcgccactcgttggctttatttcaccagacgatcgatccagacttgttcctcttcaccgccgcaatcaacactgcctccattaacggcctcaaagaccaagccttcctgctttatgttcaattgctttcttctgaaatcaaccccaatgagtttactttctcgtcgcttttgaaatcttgctcaactaagtccggaaaattgatccatacccatgttcttaaattcggattggggattgatccttacgtggcgactggtctcgtcgacgtttatgcgaaaggaggagatgtggtatctgcccagaaagtgttcgatagaatgcctgagaggagtctcgtttcttctacagctatgatcacctgctacgcaaagcaggggaacgtcgaggctgcgagagctttgttcgatagtatgtgtgagagagacattgtttcttggaacgtgatgattgatggatacgctcaacatgggttccctaatgacgctctgatgctatttcagaaacttttggccgaaggtaaaccaaaacctgatgaaataaccgttgtagctgctctttcagcgtgttcgcagattggagcgctggaaactgggcgttggatccatgtttttgtcaagagcagtcgtattaggctcaatgttaaagtatgtacgggtttgattgatatgtatagcaaatgtgggagtttggaagaggcagttttagtttttaacgatactccaaggaaggatatcgtggcgtggaatgcgatgattgctggttatgcaatgcacggttatagccaagatgcattgagattgtttaatgagatgcaagggatcacagggttgcaaccaacggatataactttcataggaacacttcaggcttgtgctcacgctggtttagtaaacgaagggataagaatctttgagtcaatgggacaagagtatgggattaaacccaagattgaacattatggatgcttggtcagtctactcggtcgtgctggccagttaaaacgggcttacgaaaccataaaaaacatgaacatggatgctgattctgtcttatggagttctgttctcggaagctgtaaacttcatggagattttgtgttaggcaaggaaattgcagagtatctcattggactaaacatcaaaaactcaggaatttatgttcttctttcgaacatatatgcatcggtgggtgattatgaaggtgttgcaaaagtgaggaacttgatgaaggagaaaggaatagtgaaggagcctggtataagcaccatagaaatcgaaaacaaagttcatgaattccgagctggagatagagaacactcgaaaagcaaagaaatttacacaatgctaagaaagatcagcgagcggatcaagtctcatggttatgttccaaatacaaacacagtcttgcaggatcttgaagagacagagaaagagcaatctctacaagttcacagcgagagactcgcgattgcatacggtctaatcagcaccaaaccgggaagtcccttgaaaatattcaagaacctacgagtatgttctgattgtcatacggtgacaaaactgatatcgaaaatcacaggacggaaaatcgttatgagagatcggaataggttccatcatttcacagatggttcttgctcttgtggcgatttctggtaaaaccaaacaccacacattgtaatttgtacgtgaaaagaagatcaaagtgaacaaatttagttggattatctaaatatcattctttcatgggaattatgttgaacacgtggagggcattatttgtgaagttgaaacgaggactatttttcaaactttcttgaggaacaagacttgacttttgtaaccataaagatagaatcaagtcagattttgctacttcgagaacattggtcaatgagtcaaaatgtcaaatagtcaatactaaaatcaaaattgaactttgtttattaattttgttctaatctatttaaccccacaaaagtttccaaaactgcttcactcaccaaaatagatctaaaacatg

SEQ ID NO: 3991 - DNA, 3000 bp, Unknown
  misc_feature (1)..( 3000): cDNA_ID_1822669_gDNA_ID_1620678_Annot_ID_48293 3000 nt of promoter + ATG
cgaaattattggcggaatggttgttgccaagaagggtcccaagtctatattatccaaagatatcttcacaaatatcgtcagcaacgaaaaaccataaaataaatagtaacgacgccatgccttctttggatctaatctatatatctctctctttaacatagaataatcgtgttcttttttctttttttcttttttgatagaagttgaattggtcaaattttagtttgtacaaaactaaattcgcttactagatgtttttttttatgatcaaggaaatctcaggcaaaaaaagtaaaccaatcattaacatatgtaaaaaaaactgtaataatatgttgaaaaatagtcacacattgaaaagactaatcatttttatttttatcctctgtttgatttttgttctataaaatctaccaaaactatcgccaaaagtaatctaatgatcatgacattatcactcattcaactatggcgtccagtaaatgggctagattgaattaaatgtgcgagttataaattttgattgtcaaatttggattttaaaatggtcgtggaatattatcatttatcagtactattgcctacctaattcaagggtcaacttgagtactgtataatattgactttaattatatatggacaattgacaacaaattaacgtaaaaaggaccatataaaacaccctatgttttactgtctatatgaacatctatttcaaatttgttttgaaatttacataatatgttacatactaattaattgaatggtaattttgtacaggggacaataaatatcttttagtgaataagaatcagccttccaaaaatatattgataataattattattatagtagtcagcagccttcgaatatatctactattcatataagaaaaagctaatgccgttaaaacaaaatcctactaatatatgagatagttgaagtgactattctaatgaacaatttgctccagaagaaaatttgttcccgaaatgtctaatcaaagataatgcattatccgtgcgattagcctcttcctaaaatagcgaccaacgtctttttatttcgttaagttatttataattattggtccctttggctttttaatcttattgttaatattagtactatttaatcaaggcccacatgtcgagcgacccaacgccatgaccgaatttatattctatcaaatatgcatatatcatattgtttataaatggtcttggtgttgaaacataaatgtatatacagttgatgcattcgtttaaaaaaattccagagtcctattgtggtaaagaaatagactatatataatatagtgaaaactagtgttgtatgtctataacttcaaattagtctatttcagttttgacaaatcgttatccaataaacaaaatttagtaatcataccaaaaatgtagaaacctaattcaatctgcactgcggcataccatttaaaccccgaatgattaaactttattcattggtgattttttttttcttagtttgaaaatatggtttacctaaacaacggaaaacaaagaagaataaagttttgatgaattattgcaaacacaactacacaaggaacaacaagtaggagattaaagtctcgaaaccatattaaaaggagattggtgacataagtgctctgtaattaccgttgtttgtaaaaagaacgaattttcaggaaaaaaataaaatgaattaaatggagcaagttggggagggtacagcacgagcgacgatcatgaagccaattaccaaatgaaattgtgatttagggtgctgatattcataaacttgggttaagtcgttgtttaaaattgtgttttggctgttagcgatgaattatagtaaaacaagaaagagttctagtaaaaaacaaaaattgcttagtactaataaatttcacaagaccattcacactatacaacaataatccttcgttgccagcagtctaatgggactgtgttataggttaatctctctttcacggactattaatttttggctcaacctcaatgtaatttatttaaattatatttcaacgcatacacgtgaatttatacatcttttcataggatttgcaattccggattctcatccgtcctaggaggttgtatatgtatattattggtaactacagcattaaacaactttaacactaagtacgatgatattatatgtacatgtacgtatgctatagattgatataagaaaaaagtaaagagagagcggatgattgttgattgaactaattaacaatagtgtattaggtaggcttgtatccgacagtcaacttaaacttcatagttgaaaccaataaaaccagaagaaaaaaaatttatatactaatcataatcagcatgatgttagacgatttgatatctaactttcttcgttatgatagagaaataatattcgcaataaatcacatataaaaaaaattactttacgtcatagattatcaacttgcctccaaacacaacaacatgatcccctacgctacaatacataatatgaaaaataaattaatcgttgattaacttaaagtcactccgttaataacgttataagcaaagcttattagtttttttgaccgtcattatcgacgaccaaacaaagaaagagtcccaacaaattatgccacgtaagtccagaacgacgcctatgaaaccaataagacaaaaattcaaaaaccaaaacatccgtgaaaactcttacgtggcggtgacatgtgggtcccttatgtctccattaactaacataagcttattgtcgactgtaccttttgtcccccgtctcggctacaaccctgtgacaaacaaagatcaagtcaaaatatctaacctaaagtactctcgtccacgtggacattgctgacgtggaacttctcccttctataaatacaggcttctcttcgccgaattatactcatcaaacgagtaaaacatttgctaatattaaacactttttcttttagaaaaaaaaacaaat

SEQ ID NO: 3992 - DNA, 3000 bp, Unknown
  misc_feature (1)..( 3000): cDNA_ID_2999361_gDNA_ID_1620678_Annot_ID_48297 3000 nt of promoter + ATG
caagaggctgggttctcccacgcggcggtgtatggaaacgatacgtgcacctggatgatgtatcttgacgtagacgagtttctcttctctccggcttgggataaacaatcacaaccgtcggatcagatgattaggtctcttctaccgtcggatcagagcatgattggacaagtgtcgtttaaatcacacgagtttggaccgtctaatcagacaaagcatccacgtggaggtgtgacacaaggttacacgtgtcgacgagaagaagatcaacggcacaagtcgatcgtgcggctaagcgcggtagagcactcgctttacacggccatccaccacttcggtttgaagagagagtacgagtggcgcgtggcggacacggaggagggagtggtgaaccattacaagtaccaagcgtggcaagagttcaaggccaagtttaaacggcgtgtgtcggcttacgtggtggattggactagagtctctaatcctaagtcgagagatcgaactcctgggttgggctttaggcccgttgaaccggaaggatgggctcataagttttgtgaagtcgaggatttgagattgaagatattaaccagaaaatggtttgggtacccagttaaaaacggttataggatggcatggcagagatgatttttttttttattagatgggttcttttgttaatagcatagttgttttggtaacagttttttttctgtttttgtgaacaggtttgaagttttttgttaggtgaaagtacggaactcaaaatagtttgaaatgtgactagagttatttttgtctagtaatcccaatgtcccatttaaaatatctgaaattcggtttcaaaatataatttttcttcgtgatacaagacaaaagtaaagtataaaaaggtacattcagaggcctggctaccttatctgtaacaatcattgtattctaatcaatgaatgtattttatgagttcaaagaaagaaagaaaaaaagaagattggaaacgtacgtacgtataagtttctgtgatttggtgcgatgataatagtttacgtaattataaaccttttaaccatcttggacctcatcaataaaattcagaagacaacaacttcaaaggatatgaatagttgactaactgaaaacgtacgatgaagaaaatgcaaagcaaacaaaagaatgttatcaagagcggtggaaaagaaatgctttaatgatgtgattcaacatcagtacatcaccatactcgtgtacgcaactttaaaagttgtcaaaaaaaacagacatgtgatcaaatatgattcgcaaatgcatcgtacacatgtgacatgaacaattatatgacagaattttgtttttgttagtgacaaattttcttcttttttttttctttctgtagcggtagattccaattagtatgataagaaaccacatacatatatatacacctttttttcacgaccacaagaaaatatattattgtttccttcttctgcctccaacattgatatgctttcaaaattctctaatatgagttgtcttactgtttaggtgacttttgattcaatagaataattttcttttaaatcaatttatgaacacctcacggaaaatcatctaagcgcaatgatgtatgaatgaaacggttgaataattcttgattttatgtttaaaaacatataagcacctcgatcgcagcaagcatgggagtgtgatttgcacgtttcatatattctcctagtccaattctctaagagaaagatatcgatctatgagatgagttctatttattgttcggtgagttttaattgatcaaataaataactttctttgttaattaattaaacaccatgcgactatagtattactccatatacagagatgtatgattagtgaacacgattgtagtatcctcgatttctttttgttatcaatttcttttacaccttgatcacaatctgagtggttgttactacttattagcacgtttcatataaagtaaataattttatcaattaataatacatatatgcttcaagttgagagcaattaacgctgtcaaaacaacacaaacaaacattaacaatgaattttgggaaggtgtctctcatctatgattgattttaagatttgtttttccttctatatttgcaggaaggaatagttctatacaatcatcagctaaacttcaaattctttgtaatcgtagatgttaatagtaaactcgaatattccccaagtcatactaataaacaatgaaaattgaagaaaataaaagtcataaacaatgaagaaataaacaaattgcaatataacaatttcttacaattctcgacttttgcgcctttgagacatggtcaattaatattatgtatagtaatggtagtggacgagtggttgatatgtgaatccgaatttaatcccacatcacgaatttgaatgttttcgaatttctatattaaaaagttttaaaatggttgccaagttgtattggttcgagtatctttattccgagactagcatatggaaaagattaaagaaagaaattctagagtttgagtttagtagctttattggtggagttttgaattagattgatttatatggaaaacgtgaaaacttgcatgtgttcgaatttccatgtgaaaggttaaaaaattgttttcaagctggcatgggttaatatctttaatcttcgacgagcacatagaaacaaatttcagagtttttatttaacttaataatggagttttgagagaaatgataatcataatatggagaactcgaaatcgtagaagatgttttttgtttttttcctctggtcttttaaaacgaaaagcacaactttcaagttccactactaattgtcacgttacagatatgacatcactactttgatttgagtaaaattttctctataaataaaagaacaaacaaaccataagccaaatcctcgcacaagtagaaaaaaacacaaacatcctgaaactagaagagagagacaaa

SEQ ID NO: 3993 - DNA, 3000 bp, Unknown
  misc_feature (1)..( 3000): cDNA_ID_1822659_gDNA_ID_1620678_Annot_ID_48298 3000 nt of promoter + ATG
gccggattaggtcagaggattgtgacattggcgcttggatcgttgattcaatgctttgaatgggagaatgtgaaaggggaagagatggatatgtctgagagtactgggttgggtatgcgtaagatggatcctttacgggccatgtgtaggcctaggcccattatgtcaaagcttttactctaataagatgagtagaggttaaaaaagaaaaaataacttattggatgtaactggtaattatctttaagataaagatgaataaaatgaatctttgcctcataaataacaaataaataatagataatttagattctttttattgttaactaaattatctccataaaatactttttatatatatataatttattccagtaaaattgagtttaggatgttattttactaagatgcagttttcttatacaaacgatttcaaagcttattttccgatataaaaattaattttgcttaaatcctcaagaatttttttattccactgacgaaatttccaggcttcaaatctcgctgaaatgaaaaataaagttagcaataagcaaataatcagtttaaaatacgtatcagaataataaaataacatgattttaaactaactagcattttctataagatactaaaaatgttagcaattgcgttttaacgaatggataaattttcattttaactagttacatttaagtttactctaactagttacataagatttagacttttttacaataattaataatcggaatcatgtcaaaactgaaaattttgtatgtgaattgtgaatgatacgtgactaaaatgctcgttgttgttctttaactgtgactttcataaataatcattgttatctatataaatttaccttccgagattgaactatatccaacgtcttctggaaatcttcctctcgacgtttaagttcagctagtgattcccactgatctggtatttccaggaaacgccttaaaaaagaaaattagagaaaccaatattaacgatttatccaaaaatacattatccatgtctattagaaatatttaataagcatatctataaaataagatatttactccaattgtttttccacttcggccagtcgtgcattgacttcttcgatctcatcttcgatctcctattttaagaaaaaaaaaagcatgcataagtactttaacttttttttgtttatatacctatatattgccaaatcatgagatttttattttattttaatcaacatgcctttggttgaattagataacgaagcccatcgtcaagactctcgtcactgcacttggtttctgaacgcatctgcatgaccaaccgttgtatattctagattctccataccaatcaagaaaaacaaaaaatttaggtaacgttaaacaaaatcactatacgaaaatcgagatgaattaaccgttagatagttttgatttttttaccggttcatgagggaggctgtgttcgatcagatggaccaaccgagtacaatatcaggagttcatgcatatgtataaaataagaatattagaactcatacaataaaattaaacaaacctattactttatgttcttatatataaatgcatgcattaacacaatgaatttaccgtgtgcgtacagcccgagcaagaaacttgcatataatctcttcgggtctataatcatgaacaataacgatgatttgatatcagatgatagtaataatatatatgatgaaataataaaatattggagctacaagaagaagaagaaaatgaaaacgtaatttattaatataatatacctctctttggcataaaagacgaagagtttaccagaaggagagaaaagaatgagagcaactggtacattacatagaacaaagagttcataagctttctttaaaagcccattttttcttttggcgaatgcaatatttctttgttgcctatcatttattcttttaatctgtatttttactctccccattttttcttgtcttcttttcacaatgttttctctttctcaattagctttcaaaatattttttataagtttatttatatagttatgagaaagaactttctatggctaaacttgtagattttccattaaattgtatcaaaattactaattactttaaattaaataaatttattaattaacatagaaccataatcttgtttgtcaatcaaaagatttagttttcttagttaatcttttcttctccagatatataaatgggtattatctattgcacatatattttataaattgaagtaaataattaatatatttataatataaagtaaatgttatattcattagattatgaatttggataagaaatctcatttattatggctcagtggcccatttcatcccatatatgaattgtgttatcaaaatttatgtcctggatgaattttttttaccaaatactatatgtaatgaaatgttttgaccaaatatatgtaatgaaaaaaataaaaaaaattgggtcaaaagggaaagaaatccttctctagaggataatggaccccacttgtgtaagataaaacagtctctctctctcccccacaagaaaaagcctcgaccacctaacgataatggtggctatgagatctccgtcttttctccgtcgtgtttctcaccgccgattataaaatacttatctactaccatctccttgtcggaaacggcgagctaagtcgattaggtatttattccttttatctcttttatctgttaaagctttcttagggtttttgtttttgttgttttgcatttgaaattgtgatctcatcgactatcaagcttcgaactttacattagggttttgtgtaaattcgtgttcttcttcactttctctttccaattcgacgcatatggatacgtgatgaaagttttcgaaaatttgttcaatttcaagtttagttctttatgactctactgattccggatttttctagggttttaattgagaagaaataaaaaggatattttggt

SEQ ID NO: 3994 - DNA, 3000 bp, Unknown
  misc_feature (1)..( 3000): cDNA_ID_1822652_gDNA_ID_1620678_Annot_ID_48300 3000 nt of promoter + ATG
ctgtaaatcgcgatattttaaataatttatttcctcttccacagatacgaatttttttataaagaataatacgtaacactctaaaacaacacaaatatcataatttctccacgaactgactaagagaggtaccaagaagaaaaccagagaagaatcttctttagagagatgggtgtggtagaagaagctcacaacgtgaaggtgattggttcaggagaagccacgatcgtgttaggtcacgggttcggcacggaccagtcagtatggaaacacttggttccacatctggtcgacgattaccgcgtcgtcctctacgacaacatgggagccggtacgaccaaccctgactatttcgacttcgatcgttactcaaatctcgaaggctactctttcgatttgattgcaatcttggaagatctcaagattgagtcttgtatctttgttggccactctgtttctgccatgattggtgtcttggcttctcttaaccgtcctgatctcttctccaaaatcgtcatgatctctgcttctccgaggtataactttttcacaagttgtacatagaaatatgttttgctttttatctcatcctgacatagtttagacaaaagggcttctctgttccttctcttgtctgatttcataaaaactattaaacattacaatttaaataaaaaaaaatcatcttaagtccttaaatttacacaattatctattatttcgaaatatttatttctcattctgacataatttcgacaaagtgcctctttgtttatcctcttgtctgaattatcctatttctcaaaatcagtgaagcatttcattatatatttcaataaaaatccgtaaattatgaacaaaaaatcatgaaatacccatttgtttatttgtttttttttatttggttttactgaggtgttacttacactttttttaaaaaaaattgttgaaacggtgctcacacagtatattatatattttaattttcttctgacaaaagaaacatatataatcaaattatattgttttggtacgtttatagatacgtaaacgatgttgattaccaaggtggattcgaacaagaagacttaaaccaactattcgaagccatccgaagcaactacaaagcgtggtgcttaggtttcgctccactcgccgtcggtggcgacatggactccatcgccgttcaagaattcagcagaacactcttcaatatgcgtcccgacatagctctctccgtcggccagaccattttccaaagtgacatgagacagatcttaccttttgtcactgttccgtgtcacattctccaaagtgttaaggacttagctgtaccagtcgttgtctccgagtatcttcacgccaatcttggctgtgaatccgtcgtcgaggttattccttctgatggtcatcttcctcagcttagctcaccagattctgttattcctgtcatcctccgtcacattcgtaatgacattgctatgtgattgtaagagatttaattagttaattattaaacgatgtaagaaaagttgaaaaaaaatatctgatgtgatatgtctgtctagtctattgagaacattatttcgttgtcgtttggttctgattcgtttatcttgagtatcttgatctttgttgttcttatcttgtttaacgaaaagtctctgtcttttgtccacagctttgctcagagctcattattgcttgatgtaatagtgatgttcgtaattgatggtccatagtgaattattgcaactttgcaagagtgcttgtgctatactgtgtgaagagtaattaacatgtgatactaggaattagcattgagtttgcatttatggatgggtaatccaaaccataaaacatacatattgtgatggttttgaaatttgtttgtttgtgaacaaaaattagccaagttttaaacaaagtaaaatgaaaatttagggttttgaattaggatggagttaagtcatattttgttaggtttgtttgcttatgaaattatggatttgtttgatgttattatagggatgcggtgcaaaagatattgttttctatattatcatttatcactaataactttcaaattttattgacgcgcctgctcagattttattcgatttgttgtttatgaaattagttatagattggtaagtaaatagctttaaaaaattagtgatacaaaacaaaatggtaaatattgtattgcttcttactagtcaatactatgattaaacttccattttataattcactttatataaaacttctatttattttcttaaaattattttattattgaaatttaaatatcatttggtacaatattatttcttcatcactagtcaaatactatgattagcctacccaaaaaaaaagtcaaatactatgattaaacttccatttttttaaaattcattgcaggtcatacaatttaaatgtttacatagtcatgaaagaattgagaacatatatatacttcaaatttgttctccaatacagtcacacacctaacttcaatttgcttagaatttctttggcaagacgattaacagagctagcccattgtaaaagggtaataaataataagtgggctaggcccatatatacacaacaaaaagtcacgtgacaagaaacttcatacgtgtgcgactcttgccccaaaatttgattagcaccacttattgagaagcagcagcagcaccacaagcaccaccaccagtatcacattcacattcaccatcatcgtctcttcgctcttatctctccgttacttttttatttactatctctctcttccccgttacttttttttcttccccgtttcgttctccgtcaaagtcttctctctttaccattttctccactgtactaatttccctttttacccctaaacccatcgttcccgtgacacgacggccacgaagaagagggataaaattgagaaagattaaataggcgattgatttctccatcggagacaccaccgctcaaaaaatg

SEQ ID NO: 3995 - DNA, 3000 bp, Unknown; identical to SEQ ID NO: 3369
  misc_feature (1)..( 3000): cDNA_ID_2156784_gDNA_ID_1620678_Annot_ID_164329 3000 nt of promoter + ATG

SEQ ID NO: 3996 - DNA, 3000 bp, Unknown
  misc_feature (1)..( 3000): cDNA_ID_2156949_gDNA_ID_1620678_Annot_ID_164323 3000 nt of promoter + ATG
ttttctgtacggcgtttctaacgatttgttcgacgttaggacaacttccggcgtagaagttacggcggagttgtgcggaggagaggtcgagggtgagacatagagagagaagaagcaataagagattcgttttgttcaccacaaccatttaaaaaaaaatattttcactcaatctctctatatgtgtataattacatgaatcgagtgagggatcttatatatatgcttttatgtgtgcgcacaagtagcgccggccagcttgcatatcattttttaaaagagaaaaagactaaatacttatctaattgttgacatcattttttgatggcttttttttactattgaattttttgttaattttaaaatatttgattagtatttacaaaaaaaagactttttccaattccattatttttgtatttttaaaatttaaaatgaatttttccaatttcgttttgttctctatcaatgtttgtgtgtgtatatgatcactaggatgatctatctatatgagggaatagagagtggtggtggtggggattgagagggataagttgaaaagtgaaaacgatgcttcacttgtcattgcgaataatatttgtgttatggccaccttgaatctttttgaaatctcaactactactcctgactattatacttttttggttcatatattagttaattagtctaatcaactacgataaccttaatcctaacaagtaatacctaaagctgatttaatgacagaaattcatatatagcctcatgtcttttttaccaaccatacaatttttacaaacgtccatttgcgtcttgctatttcattatcaatttaaatgtttactacgtacactacacatggtccgaaacagttgacatggtcatggctttattaagggctgttttactttgtttcagaagctaatggtttctagatttaaagttttctttatctatggttactggttaggcgataaattattgttattgatatagactttagttgacgtttaaaaaagaaacaaaaactttagttgacgagaatagttatactttaagagtttagagcagtcattcaaaatgggagactactgcatctgcatgcaagtaaaggcaatcacgcttctttctgttatttgtcatttatcttatattcttttctaagaaaaccatgtcctttatccaatcgatcgagaaaaatgataaatcatttaaccatatatatacatgtatgtcttaatcagtcaaaactttatgtctggctttttaaaatgcaagaaaattaattgatttctgggaagataattcatttgcgctgactgtaattttaaactaagaggacaacttcatacttaactaaaaatcgattaccatttttttttatgatggcaaggatctatattacatcagaatgacgagatcagaatgcaacaaaacaaaaaaaactatattacatatatagttgtggaaagatcagttttcaatataatgttcattctggatatagaggttaaacaagtcaggccataattagctaattattcaattttatcaaaactttacatgtctgtagcattcctctgctaaaaggcccgcatcatagagaaaaaaaagagacatgcacgttgtctttaatcaattaatctacatgttgtgtcctacaacattattaaatatactacagccaaaatgctatatgtttgtaagtcaatattaggatcgtttcgcatggagttacttagaatgcatgtatcattgtatcttgtcattaccttagcgattcactaaaattttccttctctattaaactctacacatacatgggtttgtgataaattttaattaaacactattaaactatagactctacacatacatgggtttgtaataaatataaaacagaaatttatgtgatcgagtgtaattgtagaacctaattcgttaatgagtatagtctttagattgcttcctgtcatagcatttttgtttatatatatacaataactaatgatatttgttagttacatgttttgatacaagtttcagtgacatgtatacctataagccgtgcttatgatttatgatgaaagttataacgccaataattacttagaaagagaggatctcatttccggtatgtttttcttttgtcaaccctttccaatatgtttaatatataatataatagtgttttgaattctataattggattctcattctttcaaatcgtttacaaaatactataatctaatttagatttaattttaccaattcattagattacttagataacacgcgtagagactcttgaccatgaaacagtaaacaatataatgtttgtacttaaataaaacaaatagttgtaagaaagaccaatataggatgacttgtacgttttctataatttttctaaataatgcaaatcggattaacatgtgccacgtgatttaaagaaaaaagaccaacacaaaaggaatctttttcctgcaaagtgtgacatatttatatataaagtatcatagattatatgattatatctatagtctattgtcatgattacgtattacatatgataattcatgctgcaatacaatacaatttatacaagcaaaataatatagattttgaatgcatgctatagaaaagtatccaacgtaacagagatccacatatagatttgagcatctttgaattttgaatgtgaaataatctaagtctaagctatattaatgatgatcatttcatactacaatgtcttacgggtcttgctatattattgggctttataataggcttttacgggcctgaatgatttacactgaaaccatgatccattagaaaaatctccccgccatgaccttatccatggaactctgcaatcttcttcgttaccattttcttctactgctgcaaaaatcgtgtcttttgcgtgttctcgagtcgaattggatgatttgattcttaatttttgtttgatagtaacagtctaaagaagcaatg

SEQ ID NO: 3997 - DNA, 3000 bp, Unknown
  misc_feature (1)..( 3000): cDNA_ID_1822644_gDNA_ID_1620678_Annot_ID_164321 3000 nt of promoter + ATG
tagattatgtttctgttgaatttgaagggaaaaagctaggttggcaagatattgctacttacaaggtaaataaaactgcatgatataacaaaatcacagtctacttctttggtctatctaacaagagtgatttctttattttttctcctgttgcttcagcctcctgaagatgctttattcgcacaccctaggctattcagagcttgtgttccaccgggaatgcatcgtttcagagggaacatatgggattttgacagcaaaccaaaagttatgcagaccctcggataccctttaacgatgaatgatagaatcaaggagataactgaagcaagaaacatcgaacttggactcggtttacaggtacaaaagctattacttctggctttgtcatgtgatatgttactttccttctctaaacttttttcacttaccttaaatcacacagctctgcttcttgcatccttcaaagcataagtttgaacacccgcggttttgttttgagcggctggaatatgtaggacagaagatacaggtgaggataacgatctctcatcttaaaagatcaaaagaacggttcttttctttctttctttttttttaacccgatttttcgtctcgggatcatgcaggacatagcaatggctgaacgtttgttaatgaagcacttggacgcaccagggaagtggttgcaagagaagcatagacgtctattaatgaacaaattctgcggccggtatcttagagaaaaacgtcttcacaactttataatatactcagaggaggttcatgatcggtatgaacataaccggagacttaggaatccggcgacaaccgctgtccaacaagccattcacggcctcgcctacaccatctacgggaaacccgatgttcggcggctcatgtttgaggttttcgacttcgaacaaatccaacctaaagctgtctgaaaatcgaagctgtctctctcatttgtctaatgtcttttagtatactactgggtttgatttatgtagttaaatgcttaattacctttggtgaaaagttgaaaactttaaactagcaaaatgagcttcatcagtataatcttaggttcatcagtttcaaatttgttgccaccaattcaaagagcttcttcttatggttgcataccttgagaagagaaactgaatgttgtgagtaaagtttcttcttaaggtattttgtagtttccaggtctgcaagtgagtaaagctcctggttaaatccatgtatgagctgcatctccccacttgagctcttctaaagctaccctcagcgaatggagttgaaattgtgtttagatgcaacaggctccaatttagctataatctgctcaacagcgtctaaaactgcagcaccatacatatcagagctcgcagaagcagcagtaggtgacgcgttaggaacctattaagaggcaatcaaaacgacaagggagcaataacagtgtgtgaggcatttggaacctattaagagaccacaaaaatgataagagagaacaatatcagttttgtcttggccaaaaagtccactgagtgcatgtaaccgagttagatgtaccttgtatgtgcttgtttctgacacaaaaactgaactaaggggaatgacacaacctttgtatgcaaatccttgacccatttcaacacctccatgtgtcaccaaaacagtcccattggtgcaaacatgaacaagagcaccggcctgtaataataatatgtgttggagtaagtatcttaaaatccagattctagatttgcaagcaaaggtagtgcaatgctgagatttccaaggaagcttcatcttattcttttacctttaaagttcctcgagagatgactaaatttgaaagaaaaaggattcacttctaacatgattcatgaactttgtggtaaatgaatatgacaattgtgtgggaaccatagctacaccacaccatgcaatgtgcggaagagagtgagattaatgtgtgatgggatctttgcagttgaaagttcatctcctaaagtcaagaaaacattaaactaacaaaatgaggacaaacttttaccaattttcacatttatagaaaaatattcaactcactttgatttcttcaggggctcagctgaatctagttttcaatggttgcagaacaaaatgaaaatgaaaattttagtatctcaaaatctagtttctattttttttggtgacattaatcaatgatttcaaaataactaaaaacctcagaataaactcaattccatcttaaaaccacacaactttcataaccgaggaatgacgaaaaacaaaataatagaggaggagcatcactactattttcatttttttagccaatcagagcgcaccagaaaacgcccactcgcaccaacctcgtgccacgcgctacagaccacgcccactcgcaccaacctcgcgttgagcgcgtgtcgtcgatttctgtaggggtaaacccacaaaatcatgcttattttacatctactcgctttgtttccaaaacagtctcgagtgacttttttttttgtttttttttctctaaaccgtactaattctaatgcaaaccgaaccaaaatcaattttcatttcaaaaccatgtaaaccaaacagagatcaacatctaactaaccggatttaactagcaatctaattcacacaaatcttttttttttttttttttcctatatccttcacagtcaataaaaagaataagtgggccgttgtgacttcaaaatcccaatagtgaaaaagcccgatttcgtgtctctacagccgtaaggcccgtaacaagcccacgacctctaatttttcaaaaacaatcagaccgttggggttcatttattttctttaattttgtttttatttcttataaaacggctcatcgtcctcaagaagcctcctatatagaagacgcccccactacttagactttttctactacaaacctgagattttagtctgagagaaagagaagagaacactaagatg

SEQ ID NO: 3998 - DNA, 3000 bp, Unknown
  misc_feature (1)..( 3000): cDNA_ID_2156878_gDNA_ID_1620678_Annot_ID_164320 3000 nt of promoter + ATG
agaagttttatataaagtgaattataaaatggaagtttaatcatagtattgactagtaagaagcaatacaatatttaccattttgttttgtatcactaattttttaaagctatttacttaccaatctataactaatttcataaacaacaaatcgaataaaatctgagcaggcgcgtcaataaaatttgaaagttattagtgataaatgataatatagaaaacaatatcttttgcaccgcatccctataataacatcaaacaaatccataatttcataagcaaacaaacctaacaaaatatgacttaactccatcctaattcaaaaccctaaattttcattttactttgtttaaaacttggctaatttttgttcacaaacaaacaaatttcaaaaccatcacaatatgtatgttttatggtttggattacccatccataaatgcaaactcaatgctaattcctagtatcacatgttaattactcttcacacagtatagcacaagcactcttgcaaagttgcaataattcactatggaccatcaattacgaacatcactattacatcaagcaataatgagctctgagcaaagctgtggacaaaagacagagacttttcgttaaacaagataagaacaacaaagatcaagatactcaagataaacgaatcagaaccaaacgacaacgaaataatgttctcaatagactagacagacatatcacatcagatattttttttcaacttttcttacatcgtttaataattaactaattaaatctcttacaatcacatagcaatgtcattacgaatgtgacggaggatgacaggaataacagaatctggtgagctaagctgaggaagatgaccatcagaaggaataacctcgacgacggattcacagccaagattggcgtgaagatactcggagacaacgactggtacagctaagtccttaacactttggagaatgtgacacggaacagtgacaaaaggtaagatctgtctcatgtcactttggaaaatggtctggccgacggagagagctatgtcgggacgcatattgaagagtgttctgctgaattcttgaacggcgatggagtccatgtcgccaccgacggcgagtggagcgaaacctaagcaccacgctttgtagttgcttcggatggcttcgaatagttggtttaagtcttcttgttcgaatccaccttggtaatcaacatcgtttacgtatctataaacgtaccaaaacaatataatttgattatatatgtttcttttgtcagaagaaaattaaaatatataatatactgtgtgagcaccgtttcaacaattttttttaaaaaaagtgtaagtaacacctcagtaaaaccaaataaaaaaaaacaaataaacaaatgggtatttcatgattttttgttcataatttacggatttttattgaaatatataatgaaatgcttcactgattttgagaaataggataattcagacaagaggataaacaaagaggcactttgtcgaaattatgtcagaatgagaaataaatatttcgaaataatagataattgtgtaaatttaaggacttaagatgatttttttttatttaaattgtaatgtttaatagtttttatgaaatcagacaagagaaggaacagagaagcccttttgtctaaactatgtcaggatgagataaaaagcaaaacatatttctatgtacaacttgtgaaaaagttatacctcggagaagcagagatcatgacgattttggagaagagatcaggacggttaagagaagccaagacaccaatcatggcagaaacagagtggccaacaaagatacaagactcaatcttgagatcttccaagattgcaatcaaatcgaaagagtagccttcgagatttgagtaacgatcgaagtcgaaatagtcagggttggtcgtaccggctcccatgttgtcgtagaggacgacgcggtaatcgtcgaccagatgtggaaccaagtgtttccatactgactggtccgtgccgaacccgtgacctaacacgatcgtggcttctcctgaaccaatcaccttcacgttgtgagcttcttctaccacacccatctctctaaagaagattcttctctggttttcttcttggtacctctcttagtcagttcgtggagaaattatgatatttgtgttgttttagagtgttacgtattattctttataaaaaaattcgtatctgtggaagaggaaataaattatttaaaatatcgcgatttacaggtggcaaaaaaaggtgaatggaaccatgtttgttggattgtcaaacatcgctattcgtgataatttgttttttggaatcaagcccaaaatattttggaacatttaatggagtacatgacgtggagttactgacttctgttcaacaataaaattgttacattgggttacaaatacatgaaccaattatttttaattttgtgcatgaatttcaacaatgcattaatgcgaaagaaaattagtttcaatcattcaaagagtggcagcaaatagtcaaaagctgatataattattattttaacaacactagttaaatttcgcatgtatacaacttgcaatgaatatagcatctaaaaacctcataatatttgtttttttctgcttgactttaacttgtcagtacttttcgatcatttagaagttagaagacattaattattcatggaatgccatggtgagtatacgaccacgtattcacatccacttcctcatcattttaagagtcaaaaatatctgtgagaggatcctggcccattaaaattcaaggcccatttagtgtaatatggcttcatgttctctctttcctaagaccgtttttactgttgaccaataaagtctgaactcgtgatgacgtggcgtgaaatcgagagacccacgtgtcatcggcgtgccgttatcctctttccacttccggtctccgttcccacctgagtaaaccatactggtcgtgaa

SEQ ID NO: 3999 - DNA, 3000 bp, Unknown
  misc_feature (1)..( 3000): cDNA_ID_4359769_gDNA_ID_1620678_Annot_ID_164319 3000 nt of promoter + ATG
agactttattgactgaggaaaaatgtggtcaacgcagatacaaggatgccagtagaatatcttaagctgctttctcttcatatgtatagtaagcttacccatccagtgtactcccctcttccaggccatcccagaatctttgtgccaggaccgtcctgctctttttatctttcccataagtttcaacataccatcctccgacatcatgcaaaccacaacgaggctcaaacaaccaaaacctgttttcaaatccatgcaattatggtttcatgtcactgaggtaagaaagatgaaggctacgttagggatcagtatcataagttcagcattccaacaaagatcactgactacttcagcatttcaacaaaggaaactacagaattctgtgttccagatatcaatttattgaattgcattctaacgaagatgaaaacagtgaaaaggctgtccaatcttgttattttatcgagttaaaggtgagccagaactaaaataaaacaaaaataatatttggcttacttgcttggtggtaacttcgctctactgcatctacattcacaaatggaaaccttttccccaattttgtaccagtgcaaatgtctcacctgtagagtgtggatgaagaattttcatacatgcctattccatcaaataactagcggatcatatctctatatgcatcacagaacaattccccgaaaaagtacacgttgtaatttgcgaaaggtacataaaaagaaatgctagatcatataagtcacaaaccagaaatgtcctatgtttcattatcacatgagtcttagcaccattcccatcatagacataacatgaaccttcatctgggattgtcccaagaccacttatagttccaacaagaagtctggcaccactttcatttcccggaggcgattcagtgccatgattagatccttcatctgaattgaggaaaacgtgtataagatcgtgatcaccctcaatttgtttcttttcatgatacccttttgggggaaccctaatggctgtagcaacaactcttccagatacatgcagctgaatatctttatacgcatcagaaacatggtttttacttcttgaagattgtatatgagatatctgaagaccaatcctttcagcagacatcatgtcattgttgcctttctcaactgcttgaccaaggtccgaatccataaacgacgacaaagccaatttctttgagcaagcagaagaaagctcaaggaagttatcaaccaaggaaaccataccaaaaagatcccgtcctgataccaaatgcaaaacctctcgtgtatcatacacagacctttcctcagcttcaaaacaatcaggaagaagctcaacagattcaacatcaggcccaaagtaggccgctcgtatagctgaataaaaatcttcttcaagttcatctaagtaaccagtaccatttgctactctcttctccaatactatatcatgtattgcttctctataccactttaaccattcaactacttccatctcttgactcaatgtcaatcctgttttatacctgtgaatcatataaccttgtcccgagtgcttcttcattaccattctccgagatagcaaatatctatcatagtgtgctctcttttcagaatctgatagaatctgtatcatcaccacaaatcattcatcagacacttctaaagctataactctatcacaaaagcttgaaaagcttgaaattttcgattttgaaactaatcataagagtgaagagtgaagctttcttcattgtacctcataagcagcgagaatctgaacgaatcgtctcgaatttgatggatctttcttggattcgatcagatcaggatgagtctccttggcgagtctgcgaaatgatgctttgatctctgcgattgagctggtttcggagacattcaagatatcgtaagcgttctccaccggaaactcgttccgattggactcagcctcgccgctcagcaaccgagttcttccttgactcgggttaaagagaattcgcgacggttcgaaaccgtaattcagttgaaccggaactaatctactaaaacgccggcgtatcaacccggcgagaatcgtcatttcacgaccagtatggtttactcaggtgggaacggagaccggaagtggaaagaggataacggcacgccgatgacacgtgggtctctcgatttcacgccacgtcatcacgagttcagactttattggtcaacagtaaaaacggtcttaggaaagagagaacatgaagccatattacactaaatgggccttgaattttaatgggccaggatcctctcacagatatttttgactcttaaaatgatgaggaagtggatgtgaatacgtggtcgtatactcaccatggcattccatgaataattaatgtcttctaacttctaaatgatcgaaaagtactgacaagttaaagtcaagcagaaaaaaacaaatattatgaggtttttagatgctatattcattgcaagttgtatacatgcgaaatttaactagtgttgttaaaataataattatatcagcttttgactatttgctgccactctttgaatgattgaaactaattttctttcgcattaatgcattgttgaaattcatgcacaaaattaaaaataattggttcatgtatttgtaacccaatgtaacaattttattgttgaacagaagtcagtaactccacgtcatgtactccattaaatgttccaaaatattttgggcttgattccaaaaaacaaattatcacgaatagcgatgtttgacaatccaacaaacatggttccattcacctttttttgccacctgtaaatcgcgatattttaaataatttatttcctcttccacagatacgaatttttttataaagaataatacgtaacactctaaaacaacacaaatatcataatttctccacgaactgactaagagaggtaccaagaagaaaaccagagaagaatcttctttagagagatg

SEQ ID NO: 4000 - DNA, 3000 bp, Unknown; identical to SEQ ID NO: 3994
  misc_feature (1)..( 3000): cDNA_ID_2156875_gDNA_ID_1620678_Annot_ID_164318 3000 nt of promoter + ATG

SEQ ID NO: 4001 - DNA, 3000 bp, Unknown
  misc_feature (1)..( 3000): cDNA_ID_2156861_gDNA_ID_1620678_Annot_ID_164314 3000 nt of promoter + ATG
agcaaagttacactgagttagcggaaaacttacaggtcttgatggaccttcctcaattgaagcttgttctgtcttcactagattcttatcgggaataatagatttcccttcccttcgctttgatgctagaatctcagacagtaaaatatctgttgtctcgtcgtcttcaggtgagacgtgatgagatgaaactgaagcagatttcaccggtttttcttcagagatgatcgatttctcatcttcgtttttgatagccagcaggggcttttgttgttctgagctggtgtatacatcagcagctccaagtggattcactgtgttagccagagggaatatacttggattttcactcaaaaccttgtctacgcggatcttcaagttacgggcttctgactttgctgcttcaattttcaaaagtatctgttccaagtacgcatcgccttctctaaactcgagaggcggtgtctcttcagagaaagctgtctcatccttggcgctcttattcttcttatctgatgacccaagacagaaaatattttataagatcaaagttttcaaaaggagtaatatcatatcatagttgagattttagaacaccatacctaggttgcgggagttgtcattaagagcaatatcggccaaagatttccgacaatctatacaaagatcagaaacaataagataagaaattattagacaagtaatggtagatgaacattaatcacgaccagaaagacaagaacaccaaactagttccataccataataagagaagagattatggtttgatgcataggatgtaacatcagcggtctcttcaactcgctttctcgttttcctcttcatgagtcgggttttctgagtataacatggaagaggaggtaaagcctttactccaagttcttctgatttgacattttctaactccaacttcttggcttggtaatattcttcaacttctttgtcgtacttctgtgcttggttctgaagttctttgtatttgagttcaatccatttgcaacgccacattaaagtaggctgtacaaacctcctccaatgatcagtcagcttcctttttctgccataaaaaggaacaaaccataataattaccgcataccattcacgatatagagcaattcttctcctgacttccttaaaaggagataaatcaaagacgcagctagctaagtcgtagtaaagtaacacacaaatttaagtcctttcagaatcaatcaaacaacacatagatggaactgatagtgttcaataataagtaacagtaaacaaggctaccaaatccatgaaaatctacaacaccaaattaagctacagacgtttttctcattagtacaggaacccaagtaactcctaaatttcagtcttttaagaatccagcaacatagagatggaactgatagtgttcaattaaaaagtaaaagtacacaagctaccaaaaccatcaaaatctctacaaaaccaaattaagcaagaggacatttttttctcattctgctattggttaaacacacaacaaaccttcatggaaaccattaagataaaagactaaataagaagcgtgaggaaagagcttacctcacccaaagaggaagtgaagtctcattacaaatcatggagtcaacttcttgatcattctcatgttcagaatccgttccaccaaacgaactcgaatatccatcagtcccatcatcacaccctgagacttgaatctcaatgttatcattgcattccaatatatcaacctcgtcctcgtcgaactctgcaacctcttttttaatagaagcatcagcatcaatatcatcaccaccacaaggaagatcctcagtgacatcttcttcaacatgattatgaaaactatggtcctcatagttactagtacaaggcatatcttttggtaattccccaatctccttattgactgaatcatccatatctatcttcgattccttcacctccataccaaaatatcctttttatttcttctcaattaaaaccctagaaaaatccggaatcagtagagtcataaagaactaaacttgaaattgaacaaattttcgaaaactttcatcacgtatccatatgcgtcgaattggaaagagaaagtgaagaagaacacgaatttacacaaaaccctaatgtaaagttcgaagcttgatagtcgatgagatcacaatttcaaatgcaaaacaacaaaaacaaaaaccctaagaaagctttaacagataaaagagataaaaggaataaatacctaatcgacttagctcgccgtttccgacaaggagatggtagtagataagtattttataatcggcggtgagaaacacgacggagaaaagacggagatctcatagccaccattatcgttaggtggtcgaggctttttcttgtgggggagagagagagactgttttatcttacacaagtggggtccattatcctctagagaaggatttctttcccttttgacccaattttttttatttttttcattacatatatttggtcaaaacatttcattacatatagtatttggtaaaaaaaattcatccaggacataaattttgataacacaattcatatatgggatgaaatgggccactgagccataataaatgagatttcttatccaaattcataatctaatgaatataacatttactttatattataaatatattaattatttacttcaatttataaaatatatgtgcaatagataatacccatttatatatctggagaagaaaagattaactaagaaaactaaatcttttgattgacaaacaagattatggttctatgttaattaataaatttatttaatttaaagtaattagtaattttgatacaatttaatggaaaatctacaagtttagccatagaaagttctttctcataactatataaataaacttataaaaaatattttgaaagctaattgagaaagagaaaacattgtgaaaagaagacaagaaaaaatg

SEQ ID NO: 4002 - DNA, 3000 bp, Unknown; identical to SEQ ID NO: 3992
  misc_feature (1)..( 3000): cDNA_ID_2999361_gDNA_ID_1620678_Annot_ID_164313 3000 nt of promoter + ATG

SEQ ID NO: 4003 - DNA, 3000 bp, Unknown; identical to SEQ ID NO: 3991
  misc_feature (1)..( 3000): cDNA_ID_1822669_gDNA_ID_1620678_Annot_ID_164309 3000 nt of promoter + ATG

SEQ ID NO: 4004 - DNA, 3000 bp, Unknown; identical to SEQ ID NO: 3990
  misc_feature (1)..( 3000): cDNA_ID_1838404_gDNA_ID_1620678_Annot_ID_164307 3000 nt of promoter + ATG

SEQ ID NO: 4005 - DNA, 3000 bp, Unknown; identical to SEQ ID NO: 3989
  misc_feature (1)..( 3000): cDNA_ID_1822677_gDNA_ID_1620678_Annot_ID_164306 3000 nt of promoter + ATG

SEQ ID NO: 4006 - DNA, 3000 bp, Unknown
  misc_feature (1)..( 3000): cDNA_ID_4254415_gDNA_ID_1620678_Annot_ID_164304 3000 nt of promoter + ATG
acattgtatctgaaacgttacgtctgtaccctgcagcccctatgctgcttcctcacgtagcctcgaaagattgtaaagttgggggatacgatatgccgcgtgggacgatgctattgactaatgcatgggctatacacagggatcccctgctatgggatgatccaacgagcttcaagccagagaggttcgagaaagaaggagaggctaagaagctaatgccgttcgggctaggaagaagggcatgtcctggatccggtttggctcagcggctagtgaccttgagtctcgggtctttgattcaatgttttgaatgggagaggattggagaagaagaggtcgatatgactgaaggtccaggactcacaatgccgaaagctagaccgttggaagctatgtgcagagcacgtgactttgttggtaaaatcttacccgactcctcttgagtttttgtatgtaaaatgctaatacgttgcttagcaacggtaacgaattaaatgaaacgtattagcataataaaaatcagagacaaaaatcatattctaatttccaataacccattgttaattatgttacagtcttacaaatatgaatgttcagtgttatcaatcaaacaaaattctaggtgtgaaaaaaaaataaaaaaatctaggtgtggcattgctatgctaaatgtcatataattagctaaaataaataaataataatgattaggtatctaaacgactaatgggcacatgtgatttggccgaaataagattctgttttcgaagtcaacgtctatggagtagttcaagcagattttgcaccacatcatcctctgttacaacccctgaagatccttgaggaagaagaagtcaaatatggaaggtcaaaccctaattttcacattccttttcatatctctttctctcacgtttatcatcggaagaatcaagcgaagacctaaccttcctccgagtccgtcgtgggcgttaccggtgatcggtcacctccgccttctcaagccgccactccaccgagtttttctatccgtctctgagtccctaggcgatgctccgataatctccctccgtctcggcaaccgactcgttttcgttgtctcttcacactcactcgccgaggaatgcttcacaaagaacgacgtcgtactcgcgaaccgcttcaactcccttgcttcaaaacacatctcatatggctgcacaacggttgttacagcttcgtacggcgaccattggagaaatctccgccgtattggcgctgttgagatattctcggctcaccgtctcaatagcttttcatctatccgccgagacgagatccaccggcttatagcttgtctctcacggaactcttcactcgtaagtttgttctttgttctttgttccaattttatgctaattagcaaaatttattataatcagaatccttagtccctagtcaatctctgcttataggtgaatttcagtgaattgtagcaaatatttaacatatgatatacaataaattttgcaggaatttacaaaggttgagatgaaatcaatgttttctaacttaacattcaacaacattataagaatgttggctggaaaatgttactacggagatggtgcagaggatgacccggaggctaaacgcgtgcgggagcttatagcagagggaatgggttgttttggtgctggaaacactgctgattatttaccgatcctgacttggatcacaggttccgagaaacggataaagaagatcgctagtaggcttgatgagttcttgcagggattggtcgatgaaagacgagaagggaaggagaaaaggcagaacacaatggttgatcacttgctttgtctgcaagaaacccaacccgagtactacacggacaacattatcaaaggaatcatgctcgtgagtaacattttaagttcattagtctattgtcacatttggtatgggattaattagttatgtttgtttttttgtgtatgcgtccattgtgttgaagtctcttatactagcggggactgatacatccgcagtaacattggaatggacattgtcagctttgttgaaccatccacagatactaagcaaggcgagagatgaaatcgataataaggttggcctcaacaggcttgtagaggaatcagacctctcacatcttccttatcttcaaaacattgtgtccgagtcgttgcgcttataccctgcgagtcccttgttggttcctcacgtagcatcagaagactgtaaagtagggggttaccatatgccacgtggaacgatgctattgactaatgcatgggcaatacatagggatcctaagatatgggatgatccaacgagcttcaaaccagagaggttcgagaaagaaggggaggctcagaagctattggggtttgggctaggaagaagggcgtgtcctgggtccggtctggctcaacggctagcgagcttgactatcgggtctttgattcaatgttttgagtgggagaggataggagaagaagaggtggatatgactgaaggtggaggaggagtcataatgcccaaagctataccgttggtagccatgtgcaaagcacgccccgttgttggtaagatcctcaacgagtccgcttgagcttagacttttgtactaaatgctaatttgtgttttttgagtaacggttacttttgtactacttttgttattatgtaaaaagaggaaataatttcgaggtgatacatccaaataatatattaatacacttatattttacttttaagaaagaaaatcttgagaagaaatctagaattataatttcgtctgcttttttaaaaggtttttcttaattagagtccaacgttcgaatttgaacttgtgacaatagtacattatcttttatagagcataatttttaaaaataatatatttccttgaccacatgtatatatctccaaaacaatagtaaaaaaaagagagacgaaaagaaagaaagagagagagccccacaaacaaacaaaatg

SEQ ID NO: 4007 - DNA, 3000 bp, Unknown
  misc_feature (1)..( 3000): cDNA_ID_3072305_gDNA_ID_1620678_Annot_ID_164303 3000 nt of promoter + ATG
agagcataatttttaaaaataatatatttccttgaccacatgtatatatctccaaaacaatagtaaaaaaaagagagacgaaaagaaagaaagagagagagccccacaaacaaacaaaatggatttgaaccaaatcttgatcctctcatttctctctctttttaccttagccatattcttgctcacaagatccaaacggaaactaaaccttcctccgtcgccggcgatctccttgccggtgatcggacacctccatctcctcaagccaccgcttcaccgtaccttcctttccctttccaaatccatcggaaatgctccggtcttccatctccgactcggaaatcgcctcgtttatgtcatctcttcacgttccatcgctgaagaatgtttcacaaagaacgatgtcgttctcgcgaaccgccccaagttcaccataagtaagcacctcggctacaacgccacctacttactctcggcatcttacggcgatcattggaggaacctccgccgcatagccgccgtcgagatattctccactcatagactcaattcgtttctgtatattcgtaaggacgagatccgacggctcatttcacatctctctcgtgattccttacacgtatgatctccttcaattctttttatttattatttgttctgtattcattactttatctttggtttgtcaactaacaaatttattatttattcattactcgtgacgactactttcatatagtacatacttttatatttattgtggtgataaattgtccatgtgactagtttatttttttgaagcattgcgtgtatattacgatactagctatttattcacgaaagtctgatcactatattcataaatattacatagtttattcacaaattacaaatgtacagaaaagcttaattttaaatttatagaaaaagatgcagtgtaggttttaattgtcttaagttggttgaataattatttggttcaaaataaacacattgttctaatatgttaaggtggcgaatatggaaatgcacaaatttttacatacttaccaaaactcttatctgtttactaatattgtattcgtactctcagggatttgtggaggtagagatgaaaacattgttaaccaatttggcatccaacaccaccatcagaatgttggccgggaagagatatttcggtgaggacaacgatgacgctaaactcgtgaagaaccttgtgtcggaggcggtgaccagcgccggtgcaggaaaccccattgattatctttccattttacgttgggtctcgagttatgaaaaacgaatcaagaatttgggaaataggtttgatacgtttttgcagaaattagtcgacgaaaaacgtgcggagaaggaaaaaggtgaaactatgatcgatcacttgcttgctctccaagacattcaacctgattactatacggatgtcatcatcaaaggaatcatacttgtaagtatcaatcaataagaaagtttttatatatatatagagagagtttaatgattgaaattttgtttagaccctgataattgcagggacagatacgtcatcagtaacactagaatgggcaatgtcaaatctgttgaaccatccagaaatacttaagaaagcgagaatggaaatcgatgaaaaagtcggtttagaccgattagtagacgaatcggacattgtaaatctctcttatctccaaagcattgtattggaaacactacgtatgtacccggcagtcccactactactacctcatttgtcatcagaagattgtaaagttggaggctacgatataccaagtggaacaatggtattgaccaacgcatgggccatgcatagagatccagaggtatgggaagatcctgagatattcaaaccagaaagatttgaaaaagaaggagaggctgagaagctaatctcatttgggatgggacgaagagcttgtcctggagccgggctagctcatcggctaataaaccaggctcttggaagtttggttcaatgttttgagtgggaaagagttggtgaggattttgtggacatgaccgaagacaaaggagccacattgcccaaagctataccattaagagccatgtgcaaagcacgttctattgttgataaactgatataaatgttttacgttgaaaaatgtattctatttaatgacatgtttttaattatgtgttttggtcttcaattcgtccttcaatcttttgttgtatctttgaatcttgcttaatatcatcgggtcaatgaagctgggcttgctcaccgggttagtgggctggctcttgcgttgttggtccaatgttttattgattgatatattttttaatgtgattgcattatagttaggttaaatatagtgtttttaatgaagttgtaaaatcaataggtcacgttgagtcgttgacccgtattttatacttgacccgtattctccagtaaaacgtgaagaatcgtaaaaaaagaactatcatatagtataaaattcacatcacataaagtcactacagattcgataataaatgcattgagtcttgtgattctatattttctattcatcgcccccaattaagctacgtaataacagggacataaattgtctttttaatagattttttaagtcggcaagtactgtcttttagatatttcggttgtcctatgtagaaggtagatatgtaaagggtagattaaaaaaggaaatttaccttctacatcctatttagtatatttactatactaaaaaaggaaatttacctaactttctcattgaaaattagttattaccttctctttcaaaaagcagatcaaaatctctatccaaccatttccaaaaattcaagtctctttagttttcagtcaattaattttcgtgttttaaaggccacaaagtacccatctggtccatctcgatcccacacacgacacaactttacacaaaaagaaagaaaaacccaaaaacaaaagaagcaatcaacaagaaaatg

SEQ ID NO: 4008 - DNA, 3000 bp, Unknown
  misc_feature (1)..( 3000): cDNA_ID_4262384_gDNA_ID_1620678_Annot_ID_164302 3000 nt of promoter + ATG
aaagtcacactcacatatatcgttagccggtttagatttggttttcgtaagtatattatggtatattgttggtttcagattgaatttgtttactttattttactttactagaaaatgtacatctctagctttggtttcgtttcaactttcagccaaattttttatatatagaaaataaatttaaaatcagataacttgaattttttttaaaaatttggttagggtttctggttcggttaaaccagctgatttaaggagtgacataagctaaattgactatgagtcggatctcatgtgtttgttttataatattgttagatacaccaaacctaatcatcaatgcttcaaaagttcaaacactttggtgttatttttcttgcacgaccaaaaatagttccttctcacgtgatttttcttgcaaaaaacattgaacaaccaaactttatactactcaaaattcaacatccaaattttagtttttgttaggtagaaataagaaatctatcctatgaaaagacaaaaccattaatttttatttcaactcttgctgctatatgacgttgaattatgataatttttccgtctcaagttcataaacgatttttcaaacagagttgtgatgaaatttatttattttctaaaaaaaaaggaagattgatagttttgaagaatatattattgatggtagccaaataatttaccggaataaagtgtaatatcatctcaaactgttcctttttatagcaaaatcgctcctttttatccgcagttagagtataagacaaagaaaccaaattccagagcatcaggaaactctttcccatattttaaggtgaaatcactattttgaaattattaacttagtttaataaccaattattgaataatacaaacaaagtacttaaaacccggtttaatgttttatttcgattttataaatattggtttggccaaaataatatagtttataagtggcgtaagaccacgccagaataatacaagaagaaaaaatgtttaactatgtatagttcggacgtggtagtccattaataatggaatcaaattctgcattaataaattcattatcaagattccagtcttttgtattccttccaattacatgaaattaatataattcttgaacaaatatctttggacaaaagaatttcaattatttacttaaatctatataaaagcaaatctttaatccattcaaatagcagatatgtatctctagggattaaggtagtatacaactataacatctcaaaagaaccaaattgtgactgcacaatgcaatatcataatttgtatatcgaaaacatgatatgttcacatggttcgtccataaacagtacttatattcatatttgaccactaaatatttcacattaaaaaatcgaaattagaaataattatggatttagttctgcaaactcgattttttttaaaaaagattcgaagatgcaagattgataatgaaataaaattgagggtacatcatacatgtgggggaagtgacgtttaaaaacaaaaaggaaaaagaggaagaagatagatgccaatattgttatcatgacaactatgaagcagagttagagtccgtccgtccatacaagtattttgtgtgagtaccaccgaatttgtctgtctatgttatctcccttctttttctcatgcccacgaaccaacatgacaattatgttttgttcgttttttgaaaaattctagagttttcatttattaattatcgttgagttatgatttagtatgattttggtttaaaaattccacttcttaggactcattgtttgatctttgtgtttcttatttatttctttgcacagtactaaaaatcatgcattagttcttaccattcacaaatcttcaaaacttaattagaaaaagaaaaaaaaaaatcgatcaatacaatgaaaacgttctcctatgcactatgcagaacaagtctcgaggattcgtatggtcaaatttattccgatcaaattattcgcgaaagtgtgagaaacaaatacgtactttatttctcttacctcctcctacgtcacttctacgcattcgtgccctaccttcatcagtactcttccagtttctaaaggttaaaaccgagtcgatgatccacgaccgtagagttaaatcaagtaatcaacttaagtcattgtaataagaaagcctccgctcaaaaaaaattctacaatattagtttgacataaaacttcaaatgatagaaatatgaaatcaaatagttgtagacttgtagtctagtactttcatttggctcatttggcaattgcaaagtttacgtggtgattactaaactccttgtcggtataaatgtttttgatcatgaaaccatataccgaaaatattggtatatatagtcctgcctaactccactaacaaaaagtcaggatttttaaattaccaactacaacttgaattgtcatttggaagattgattcattggaatattgtgtatcttaagccataaacaaatcccataatttaatagtgtgccagaattttgtattcatattttaagcagtaaaaacaaaaacaaaatacatatatatattctcaatcaaactataatactttagatttaaagctattaagaaaaacatttagctagtcaaaaaaaacaattaacacttttcgaaaggtccatttccaaggaagctagagaccgtccttttttactaattcgcctgcaccatccccttgtatcgagggtctaattctacaccttattccattttatattccctaacaatttttttagtttttttttttatattactttaattctaatgaaaactcctatcttccttcctctccatcctttttcatctacctttgaatcttttgacacttgtatataaagctttacttcctcctttgttactccttttctatcaatcaccaaaacacattcattgtcttaaaccctaaacctcaagaaccgaacaaccacaccaaaaa

SEQ ID NO: 4009 - DNA, 3000 bp, Unknown; identical to SEQ ID NO: 3999
  misc_feature (1)..( 3000): cDNA_ID_4359769_gDNA_ID_1620678_Annot_ID_48301 3000 nt of promoter + ATG

SEQ ID NO: 4010 - DNA, 3000 bp, Unknown; identical to SEQ ID NO: 3998
  misc_feature (1)..( 3000): cDNA_ID_1822648_gDNA_ID_1620678_Annot_ID_48302 3000 nt of promoter + ATG

SEQ ID NO: 4011 - DNA, 3000 bp, Unknown; identical to SEQ ID NO: 3997
  misc_feature (1)..( 3000): cDNA_ID_1822644_gDNA_ID_1620678_Annot_ID_48303 3000 nt of promoter + ATG

SEQ ID NO: 4012 - DNA, 3000 bp, Unknown; identical to SEQ ID NO: 3996
  misc_feature (1)..( 3000): cDNA_ID_2156949_gDNA_ID_1620678_Annot_ID_48305 3000 nt of promoter + ATG

SEQ ID NO: 4013 - DNA, 3000 bp, Unknown; identical to SEQ ID NO: 3792
  misc_feature (1)..( 3000): cDNA_ID_1822736_gDNA_ID_1620679_Annot_ID_48307 3000 nt of promoter + ATG

SEQ ID NO: 4014 - DNA, 3000 bp, Unknown
  misc_feature (1)..( 3000): cDNA_ID_1822728_gDNA_ID_1620679_Annot_ID_48310 3000 nt of promoter + ATG
aagtaagttgtcacgatttcgcacataaacgaattctgtcccttttggaccgaaagacaaatctaaagttacttttaaaatcatcagcaacaaggttttccataatcagtgggtaaacaaaaataaaacaaagaatatttcctcttgaaaaaagttcttaaaactgtgtataaaaatttggtttttgctagtgccggcgaaaaatccatatatagcaagttcggcttaaattgttactgcatattcagatctgcataaacagataaaactcttcacatgcaaaaaaggggaaagaaaaaaaaaacaattagcgcggtaaatgatgtataaagatcaaataagtgagacgtttatttttggtaggtgtaagaggaatcaaagttttggacaagaagaagcgtcaaatgacacatgatgtgtttcgactaaacgacatatcacctgggaacaatccttcacatgtgcctttcgatgttaactttatacgaccacatacctccaattacattactacatcacaaataacttcgtattctcagttgtcactattaatcttcactacttatgtgataaatctcccgtgttctacgtactatagtttttaaacttaactgaaagtcttactacgaaatatattattacatccattttagcgaaaaaatgttgtttttatatcaagactagcatttcttcacatacgaattacatatatacatttatgtttatgatccattcaatatttttttttgtttgtatgaaaaggtcgaaacaatgttggtgaaagcattaatttcttagtttgaccgacgataaatgatctacctgtgaattgattcgaacagaagaattttggaattggagcctggtaaaatagtttgggtttttacactttcatgagttactagtaatattttttgttggtcacaaatattatactcctcataaatctaaggacaacaatttttctaatcataaatatttaatactgatttttgaatgattcaagctttaaattactttatcctctaaaatattactcaaaattatgaaaactggttattttttatttaattaaaagtctcctaagaatgtagtattttgaatgaagaaaaatttcttatccaaaaaacctaaatttttaaaaaacaccatagtgtttttgaaatccgtaatctaagacacaccatgaattattagaggagtctctagtagggaccgttttatcttaataattactccagaatttgttgatctgtaatccaaaaaagaaacacaatcaagtggtaattaactgtgttcataatgcttttggagggaagccgcgttttatgattgaaagatgaattctaatcaaacatcattactcttagaattctaatgataattctttaggtcccctcaaagattatgaaattaatatttgtttaacttttttagttgtatacttttcttttacctttcatcaattaagtcaactatcttttctctccctccttggacttttcacgtatttatttgtttcttccacctatttttccgtataagttaagtataataactcctattcattaaattattttccatttcttccaaaaccaaaagtttttacctatgatactatcaaattattgatttttttttttttcattttaacattctactactaacgtgaaataaataaattacagagaaatattccccgttcttttgtcatcattatataaactcaatattcaatttcaactagattcactttattatactcttagatttttatactttacataaacctcgtatagtgtggtaaattcccactactaatgctacatgtatgtctatattaagattattaaaaacataaatctttttaaaaagctacatatatgtgtgagagtctccattatcaacggttcattgtctgctactctgattagcattttcttaaaaaaaagtaattagaaaaagaaaacaaacgaattaaaaaaaagaacaaaaaccctaataaatctctaaaaagtccacacacactaacacactctctctccgtctctcactaaaagcttctcacttacatttctgctttcattcattaatctctgtgtttccttcttttgatctttttggcaagatctctatttttcttccaaaaaaggaaaaataaaaagatcataacttcagaatcaaagtttctctttgttcacattgttctatccatctgcacatttgattcatgtagtgactaatctcacagtctcgttctcaaatttactttatctgcttgattcgtttcgtgaatccaagtaagttttacactttttgtttttgctttttggctttattctattcaagtttcaagtttaaaggatcctcttttactaatgtagaagcatttttttttttttgttgttttggtttctgggctttgttatattgcttattccttgcttggatgatttgtgaaagtgggttaattcttctcatctttaaacttttgatgtgtgtttataattttctcaagatttgtttttttttgtctttctctgttccactgattgctcagcaacagttgctactgtagtttctgtatcgtcttcaaacagttgaatttgtttaggtatatttgtctatagagatgttgagtttaccaatctacagtgtgattgaagtttccccaagtttttatctttaagttactttggagtagcctttctttatgtgcttgaatctcttctctgctcatttgattttgagttgtcagacgtataaagtttagtcttttatcactgtgaaagatagcaacactatctcataatttctgagaagagtgtggagattaacttgtgtagtggtttttaatacaattccaattctgtgaagtgattgttgttgttgctcaatatctgttgtttttcagggatgctaatgttatacattggattttgatactgcagatttagtctgaagagaattaagcttggcgcttctttggtgagaagcaag

SEQ ID NO: 4015 - DNA, 3000 bp, Unknown
  misc_feature (1)..( 3000): cDNA_ID_1822713_gDNA_ID_1620679_Annot_ID_48314 3000 nt of promoter + ATG
atcacaccacacgagccaagaactgccatgcatcccatattctgctcaactatatccaacaaaccattttatatcaaaaagttattactacgtgcgagaaataaatacatttttgaatatatatttacaaacaaacgttacaataaatgtatacctaatgcaaacattacaaggaagatgatggggagaacaagtgaagaagctgtcttggccatttctcttttgttaaaataaatttctagtaaattgaatattgttgatagacttgaaaaacttggggacaaccaaagtagatttatagatttatgggacgaccaaatcatagaaatacagtcatctatcattatatatgtttgaacaaaaattatttgactatcattttataaaaaaaatactattgactgtcatactgaaaaccatagttacgtatatgatttatacttttgggataaggttttcttttttttattatttgactgtacttttatcacaaatattatttgactgcccatattggaaacatgttatggtcaaacgttatttaattagacatgtaaaacttgatgacacatgtaaatcatcttttttaccatgttttaagaaggaagctctcttttaatttcttcttgggacagtttggtttcctcatccatggaaggagagtacgtggtgttcgatatagaacacgaccgttttttggtaaatatatatcaacgaacaattttacttttaaccaagagaaattaaggtaaaactatcagtgacaacatacatacaatttttttaatggttctaactagctagtaactaaatcgaaagattgttctagacttctaggcttctagcaactgaaaactcaattattagcaagaagggaaatatagttaattaggggtaaattgaggtgcatgcaaatgcatggtatcagacaacgttgatcatttgtttgaaaatagaataatgatgtggacatcgtgcatttctggctaagatcacatgaggtttatgtcaagttgctcaatgttcatacaactttctatataatatagagaaaactagagtttactatcttgactcggtctggcgaagaaggttcctccaaactattgacattaaaataacacacatgatgatccaagtggaagaattatgtctactagaaattatataagtatatacattagggtaatcaacttggtctcccttatgcaaaactcggaactaattttcaaaccaacaagtcttgtatgcattttgaattgtcaatatatatgtatgatacatatatcagctaaaaggatctatctgtatgagctaaaagtggataattaatttcgatcgataggaccaaatagcattttttttttgctcatttcaatagtttttttttacattctttccattttaaacttttttcaaatgttgtgtgtgtatatatgtatatggtgctgatccaatcttttaaaatgtatttgaaatatataagaattctaggaaatgtaatatgtttatttatatttacagatcaaataaagcaatcatacggctacttcctggacgggaccaaattggccaacggacttgatgacttggttaaactttgagtaacaaaggataaaactgtcttttaagacctggtttcagattcaaaggaccatatattattaatatatatccaaccaaataaatccaaggtaggccaggacattgcatgggatgagctagttttataaacgtgctactggtagatgcagattttaatctaaagttttatagcataacttttaattattactcccataaatacattattactcagattttaatgtactgattattttaaaaccgttgttaatttacttaaccttgtaattaaaccactatcgtccaaacttatgtgaaaaacacgcgctaatctgaccactagaaacattacacgtcatttctttttattttattttggacaaagacacgtcatatcataaggtttcaataataatgcatatatttttccgccaatgtatatttttttatcaatctctgcctcaaaaatttgcttcctctgtttcgaacccaattgggcatcttcgtcgtcttcttcttcaacattcatcatcgtcatcaatttctctgtagctctttcacaagtatttcttcaatttcatagcgagagagaaataaaagggagaacacagagatcagagagaaattcaaaaacgaatccgtgtgaggacgttttaaaactgccaaagagacgttttacttttacatgcacatagagacatacgtttattttgtgtagctatagctcttaagagtttgaattttctcgagatctttgaccggagcgaaaacgacgaagatatagaaaatctagcgaaacgacgattcggacttgggagactctcttgcgttgtgcttggatctggttccgttgtaaatttgaggttctaaattctttcacattgtttctcgttgattcattttgatttcgattctctcgtattgcttcgtttgggcgatgcgattagttaggaagagatcggaatgtgtttccggtattgtaactttgaatcgaaattgatatataacagtgtcgatttcgttttcctctgatgtttttttctgggaaatctgatgattttccgagaaaatggtttagattccttcaaagcatttctctcgtgaagcattcgttgaaatcgttgactctaattattgcgtggaaacagtgtaacgtttctttcattggcttaaggagctggtttgacttttcctctgtttcgtggatagctagaatttagttgttggactaatcttgaaggaacttatctagaattgaatctttctttgttggtgtattcaatattcattcttgtttctatttttgtaacttctccaggttttgattgaccagaggaagttagctttgttcatctagattaggctattattgaggtgttgttgtggctctgaagcaataaaggatttgatgagatg

SEQ ID NO: 4016 - DNA, 3000 bp, Unknown
  misc_feature (1)..( 3000): cDNA_ID_1822707_gDNA_ID_1620679_Annot_ID_48316 3000 nt of promoter + ATG
gtctataacgactgtttgtgtctgatcccaatttcatgtctttatatgtcttctcctttataggtcgcttttcatttacgctctttcttgtttttagctttcatttctctttttagcttttattttatcattctgttttttttcttttgtccaaactatttttcaaattttttatcaaatccattatatgtgaataaaataaaaaccataaacccaaataattgaatggaacaaacaaactaaaatgtataaattgaaaaataaaacaagcaagaaatattggcgagcatttccatttccgtcatgtctcgttgctgtctataaataattttttctttttaagaaatttgtttcgtccagttctcgcaaaatcccaaattgtggtttgccaacccctaaaaatataacatgattattagtagattgagttcacatgcccaagtttttccaaaagttagcccaaatctaaattacattattaacgacacttgtggtcatgaggaacatcgataaacatagaaggtgtaaccactaaggagtattacatgcaaatgtggtaaccaaaatctgaaggaataataagaggacaattagatcagatccggtggtttaagattcaaataccgaatttgcccttgtgacatgtaaattattactggattaacataaatggagacacacgtaataactattgacaaggaaagtatgtggtattgaccaaacaacacacatacacagacacacttcaaacttaaccatggttactcacacgtgatatgtcctccggttaaatatgttttcattatcattgttaattattattttcttattatcacattcccatatattaaaagattttagtgttatctaaaataatttcagattataatttcagtttcataattccaatcttgaaaattttggttcttatacttgtgtatataattggatattggatttttgtttacgtatggcctagatcaaactcttggtattattaattggaaagctaactcttacgacaaaaaaatacaatgacacatgcggaaatttattgagccttgctacgatcatgtaggattgacatatgtatgtcgtatctctatcttatttggatatatagggtatagtcatatcagagaaattttctaaaatgttttcttaggatccttaaattatattttaaaaggattatctaagtctcctgatttcctatgaattggttcgcaacctacgaaaaaactatgggatcaaaagcaaaaaattctaagtttttttttcaactttggtaaattttaacataaatagttagatgtttatctcccttcattcctttttgaaaccaataattttaatcttcctttcacttaccatttagaaaaacacacgaaactatgttttttgtttttaaaaatatgtgtacctcatatatatgctgcatgtacagcctttatacgtctatatgcagttgtgtatttcatataattatactatacaaatagaacataaaatagaactatagttatttacaacacaatatatatatatatatacagctgtataatgtattttagaatactagtctgggccaatcaaacgggaatataaaaacccgaggtagaattttatttttacatcgtttaaacacaaagaaagatggttagcaacagcaaattgcttacatggttatcaacaaaatatcgtgtttcgtaaacaataagttaaaaataattcaatgaactattgggattatcaaatcaaactgtaaaaattagtttattcaaagaacaattaatggctgagttaattagcttgccttgaattgttaaataattagatgcttctaatcagatttcaaggagatatgtcggaagcaccgacgacacgtgcggatccgtcacgtgcgcgattcaactctttaactcgtatgtcgatatttctttttttaattctcttcttttttcacactccatattgtcgatttttatgcccggaatcaagggtttgacttaccaaattgttaccttcttttaggcttaaaatttattacacttaaaataatccggattaatattttctaaaaaattcactaactagagaagaaataataataaaaaagacatgtgaaagagttaatgaaagttgagaaaaaagagataatattatttttattttatttttagttttgtttttctgcagaagagccaaagctctttccttcatatatacgaacccctttttccattttctttgtgcaaaaagtgtaaccttccttatccgattctgaagcagaaattagctgcagaatcttcagattctctctatacctagattggtttttcacagaatcttcgctattttgttcagatctgccactgtttcaggtttgaactaattttacataaattttctctcctaatctttctctgtttcatctttggttttctcaatcgattcgatatgaatttgatttggtttagcttgattcgatttgatcatcatgtctaactagttctatctaactttgttagtttactgttcttttgtgtggttcttgttcttacttcagaccgatctatgttttttttgctttgtctgcttcacacaacacaatcgtgagcttgctcttatgaaaatctaatctaactaaattttcttaatttgtggtctttttaatttcataatggattaataaactaaatatcctcaaaacgttcttgaagttttataatttgtattttttgttttctccggagatttggtatttgaaatcttcttactatctgaaatgaccctttttgtcggtttttcttgaatctttttatttatttttattttccgggaaaatttcgtttgttaggtaaagttgactgatacaaaggacttgagttgctaaataaaaagcatttgtattgtgcttttgtttggttactctgttctcaaacaaaagctgatacatttgtatttgttgttgcagcaaaaacggtcacaaaaaatatg

SEQ ID NO: 4017 - DNA, 3000 bp, Unknown
  misc_feature (1)..( 3000): cDNA_ID_1822689_gDNA_ID_1620679_Annot_ID_164369 3000 nt of promoter + ATG
ctcatccacatcacagcttccatccaccacaactccatcgatcggtatactttctccagctttaactgaaacaacggtgttgatcccaacctcatcaacatcaacttctagtccagtatccgcgatcactgccttccgtggcgctaagctcatcagtgatgacattactatgcttgcctgaaaacaattgttacttcagaacaatgatcaactgatagaattaatgaaaaccagaactgattttcacatttttgtatgactatgactgtttaaaatcatcaagaaacagaaaccctagattaagtaaccttatgagcagcactagactcaagccaatctgcaactgagaataaaaacacaattgtagcagcttctgtgaaatcctgcatacatagcgttgctatcactgttgaacaaaattaaccaaatcagattcatttacctcatcaaacaaaacataagctgatgctcagggaaaaggatttgtgttttaccagcaattagagtgagagcgttgatgtcaagcctgaaccttgtgactgaagcaacagctttagcaagaatggggaaaactccagccaccacggcaacaatagcgagccattcaagcggactataaaagtatttgaagaaggagagaactagcagtacaccagaaactattgcgaaagggcttggccattgactcttcaagcttgtttctccgtatggtctaacacttgcttctagtcttgcttgattcagagccttgactgtcaagaaatcaattttacacacaacaacaaaaaaaaagggtttaattgactttaagaaaacgtaaacctttgcctcatcaatagaccaatgattcaagacgaaagtcaaaacgtcgattgaaaaataacagtttctgttacttaccgatttgaagtggagaaatcaaaaaagtatcgtggacaacgatgacggttctagaaggaacgatgactgagaattctttaacgccgtccacttgacggagaacgttacctacgatagaaacctccgatgaacagcagattccaacgacgtcgaagtaacttgtctgtaaattcatcttctttgactcttcaccttccgccatcgttgagcttgagatctcggactaaatttcgaggagatacttttacgggatgatgtcggagggaaattaattatttggtttaggcttacattattatttataacatttgaaattttcagtctctataaggaatgttatattaattgctccacgattttttactatttccaaatgtcaatgctgagattggatacgcatttaaattttattttattaaccatgtaatttttgaaagatttacatttatttaatagaaataaatattaataaacaacaattaattagtcaattatagtagattcgattttattattgaaaaaaaacacttcaaaacctatatagttttccagatgttaaagaaaaaacctatatagttgatatattaaaatcttttttagcaaataatatttgagcagatagaatctaacaaattcttctaaatcaaattcagattttgttattaaagaaagagaaaagagcctattgggccataacatgggttcatacaattctcaatcagataacttccgaggccttataatgacttgtaatataaatggcaatttcgtgattaagtgagtatgaaagggtagacatgacaaaacctaactacagtaccgaggtagccaataatttatcttggctggggccatactctgaccgcagtttccattaatttacagaaatacccacgcttgggatatatatgtatatgtaaccataagtgtaacattttattagttttcagtcgttttccaaatttatgaatccatttacatgagacaaaccaaatccttgttggtaggtccatcctttacactattagaactgaatcatttttatttttctttcacaagaatagaatatttgtcgtaagcaaagaaacaaaagtaaggttaaaaattagtaaaacaacaaagggttgcatgtaacacaaggtttagaaggaataaaataaacaaaagttatgttagtaacgtctttagttaaaaaaaaagtttcatagatgaataaaacaaacaaaattgcatgtcccacgcagctataaaataagaaaaaaaaaaattgcatgtcctaacgccacctaataataaataaagtgaaataataagacaaaccaaaacaccattgactcattgagactgatgtcaaaaaatgagaaaaaaccaatcacattgagagttgagattttaaccaatgcaaggacaatggcaaaaccgaaaataaacgtaaaaatcgaggttgataataacataactcataaaatccgtattttcatggtgtcttcttcttcttcttcaccttcttcactcatcactactcacaaatatatttttgaccgttgttcactctcaccttcttcacacgctccacatcttcttctgattgacctttaacacctgaaaggttttgtcttctctctctatcgtccaaaaatctaaacttttctggttttattttatagatttgggtccctcagtttgtttattttacctttatttatgaacaaatgtgcaaagggtttagattttagctccttgaaggctcataacgcataaagttcttggcttcatcgttttctctcttgattaatttggcattgtatatcttatgtctgattgtgtgaaaaaaccacaaatgaaaggagtttagacacaaatcacagtttaagacaaaattatagtcttgtttctttcaaattatgcaaaaaaatcaagaatctgagacataagagaaacgtttatgtctctctcttttaatcaatgctatgttgcttttctcaactgtttcaagcgttattacattactagctaaaaatcttgatgtcttgttcttatttttgcagtttctcctcttgagctttggaattgaagctaagataagaaatttagagagaa

SEQ ID NO: 4018 - DNA, 3000 bp, Unknown
  misc_feature (1)..( 3000): cDNA_ID_1822697_gDNA_ID_1620679_Annot_ID_164365 3000 nt of promoter + ATG
cgaacagataaagataaatttactattctgagaaaaagttccgaagtttcgggaactaatattttaatgtatcaggtggtggaacaaatataagtagaatgacttatcgaaacacaaaagaaggatatctatcattgcaattcatatttcaattttattccctttcccattatacatgctttatatgttagtttatgatatctgtttagtcattagtgtttggctcatttacgttgctttttcactttgatatatatattttaaataaaaggaaagtaaattgttttgttttgttttgagacattggaagattcctccactactcgaaagccttttgaaaagatatagtggaggtgtgctgcataaattattagtagtctttaagatctcaaagggacacatgtatagattatcatctataaaaagaaaaagaaaaaaacaagtaaggcttgaggtttggcaatctttggttgtacaatggtagaaggtgctaatagccattaggaaaggaaagatcatggttcttgtaaaaaaatttggtgtccaaacagttaatgaattttcaacctttatttattcaaccgttgataaataattagtatatagaactattctgacgttatatcgtatgatccatcgtcgcgaaataataattatataatagggaaaattttgtgagaatcgacaacacaaagtgaaaaataaaatgttgaccacaatacttgcaatccgaataatgacattaaacaccaattatatatataatggaatatttgatgggaaatgagttagattctttttttctgattctctagctctctcgtaatatgtttttcattttctgtcaacctttctacttaaaatttttgaggataatgcacacacaaaaagagagagagagaaagaaatggaagaaaaactcaatccatatttcaaagattatgataattatgatcatgattatattgatgacgacgaaacaatgatatatatgaacagtaatgttgttactgtgttacaaatctgcaagctgcattgtggcctataattgaatctggaacacaattacatatttatctttactactagtacatttttttttcttaaaacagtgacatttagaatttaacataatttaacaaagaaaataaaagttctaaaaactaaaatcactaaatcgcaagcagacaacaaaaaattttgatacttttttttgtttaatcaatacacttggagagtaataaactattccaaatgaggaatcacacatggattccattatatgacattgtactgtttattcttccatatgttttgtagtacacctttgttctcgacttctcgcgttactcacctacaagactaaaacctcttccctaaaacaaaccctattcttttcatatttccttctcaataataaaaataaaactttacacaaattaaattcgtgacgtaataaactactcttctctccttgtttccaactcagatgttgcttacaatctcaaatatttttgaaatcatatcatataaaatacatgtgaatgcgcaaatctcttataccaaattcttaaactattttgaagttgtagtctctacaacgatataattacattttggtatgtgattctatcaataacttaccattcatgttgtcagatgaaatatatattagcacatgaattaccaatcaacgagttgcaaaaatatgttacgacttacgactgccaaaaactaattaaatcaacttgatgtatttttaccccctaaacatattaaagcgatacataatctctatagaagtgcttagcgcaacgcaatttcatctttccacacatgtatatccaaaataaaattaggcagtccgacaaataatatcgaatccttcaaggtacaaaactacaaatctccaaaaatattttatgtcaggataaaatcgaattttactttagtttacatacatttaaaaaaaattgaaaaaatagatgggaaggttaagagaataggaatctgaaagaagcagcagcctaccacagttctatatatggaatttacattattaagaataatatattagaggattctttacaaataagataataatatttactgttttttggtcagaacaaatgaaattaaaatttggaaagaatataataatggtaaggattcttaggaaaaaatctaaacccattattaatcattaattccactttctaacacactttcctatataaagcaatggccactctcatcttctttcaccttcaaatacaaatcatcattacataaaaaaaaaaacaatctcttctctcttctggctaattaacaaagcatctaaaccgaacatacccggttcggtcattgttctctgtccatctactagctctgtctctatctccggtatgattccttcttcttcttcttctcttatgtcttcttcacacatatttcatgacggcttcgaaacgtctttctctcttgcattattttcgtgactgttcattttctctcactcgcattagccaatcttgcatttgattttttttttcctcctaacttctgatgctcttgctagctagagaagctcctcaaagaagttttaaaaaaaaaaatattttgcaatgatctatctattaggagatatgatattctctatattctcgtttacgttgtttacgatgctaaagatattcccccatgtaactgtaaaacctttatattgcgatgaatgtagaacgatctcctcaaggagactttcactatctctactctagctcttttttctctctagcctgaaataattgtagagtgaacttcacgacaacgttatcattcatacccatcttcttttacacattttctttaaaacacgttacatgcaccccttaatatcatgttgggaaaataaacatgaaccaagaaatcagattcccacaataaaatctctgtttctgtttttttttttttttttttttgcagaatccttaaacaagaatg

SEQ ID NO: 4019 - DNA, 3000 bp, Unknown
  misc_feature (1)..( 3000): cDNA_ID_2050441_gDNA_ID_1620679_Annot_ID_164364 3000 nt of promoter + ATG
ttacactcatttctacagaattttccaaagcaatgcaggtatgcaacaaatatcaaaagacctcttctcatattcgctacagttcttcataaacaaaactgaagaaatacccagaaaacaaaattcagctaatcgtagagaaagttcaaaaaggctaaacctttacattgacattaacgctctaaatttgcagacttttgaaagaaaacctgggaagctaggcccaaatcgaaaagggtaagagtgttatgaaccgtacgaagagcagagacggtggatttgagttcgttaagcaaatggttttgatctccattgcagccattgttctctgaggaagaagaagaagcttctccatttccagtgaatgaagcaatttggagcgttacgagaaaaagaaacaaaagtagcttaaaaaacgccattattggagactgcaacagaggactttgcacagtacgagagaaagagagagagagcgcgagtcgcgagagagagacagagactaacgcgtaccaagtcaaataaagggtcttactatcttttctataattacatatttgtctctttacttttgataaattctataaacggcccaaataagtttgtatagattttgatgaaaaggtgtcaattgaaaaatatcttatgcaaaacgcctaatttaggcgtatccgaaaagtcctaattagccttaatctgactcttaaaatcttaatgcaactaaaacggaaggatataaacttataatgttaaaatatatgttttaatggtccattgtgtagtatttttccttttacttcacacgtttttgttaagaatttccttcttctttttgccatatatagttgcttgtaaaaaaacaaatcttgactttttcttaaactaattattttgctgtaaatatagatttttaataaataaatgatatttaaaataattgttttcaggcaaaactattatcaatgttagatttatcttattctttttaatcaacgtggctctctgtagttaatcaataattcactgtgtaattgtcaaactgtaaatagaccatttcaatataactaagaaagaaaactttatattttcattagtttccatgtatctcaactcatttagagaaaataatatttacatatttcttactataaaataccaaaatatatctttatattttaatttaaatatatcattttaatgaattttatcttataaattttaacaaatttttcaattgctgtaaagaaagatgacctttaattaactactcactagatagtagaggcggtaaaaaaaccgtaaacgtatatttaatttgttttagtaaaatttaattataaactgtttactaaaatgcaaagtaatcaataatataaacttttcctattttatgttattgtgtcacaatgtttatagctttaaatacgatttattgtactattatatttttaatatatggtaacttaccatattctctcattatactttattgtaccgctatctattatcgtatactcttatttttaaatccgtaagaaaatttgatcgacttagtatcaatttttttataataaaaaagctaaaatcatgtaacttctaatgttcatcaccaataaggcacatagtcttgctaaatacactattttagatttataccatctacattatatgtttctactgcaattctacggcttcaacaaccccattttcatcacttcttattaaaaccacaataatttacgcacgatttgattaaaaagctttaaaaaaaaaagctatatgacattacatgacctatgtagtactaatctattcgacacaaccaataaataatgcattttaattgccccaatccccaactttcttcttcgtgacaagagtagcccacatgattttatgaaagaaaaaaaagtgtagtctaatacaaatttagttacatacgaaatcagtcgaatttaattattgatatataatcatagaaacaaagcttatattctttaacccaatcacaagcatatgacacaggggacctagacagtaatagagtatccaaatcttaaacaattcaccagtcaatattaataatacaataaaactatataataagatagtaataaataagaaataaaaataaataaataaatgaaaaacctagtttttgacgcaataataatagaagcgaaccaaacttggcctcctcttcgcctataaatacgatatagagattagcgtcaaaagagtatgtaaatcgcaaaaacaaccaaacaaggtcttcttcacacactctcatcgtcgtcacttttttttttatataacatagtctcgttctagaccgtcggattatttctattggtcaaatccaacggtcgtgatccaatttgattagaaagagtctcatcgtctctcaaccaccagattctctcgctcgctcgctccctcgtcgtcgtcctctctacgatatcgaccaacataccagatcttcttcgatcccgcctccgtcgccgttgctttcgttattttactcagccgccgtttccaactgtttttaactttttctcgccggagattgagattgggattgagatttctttagggcatttagacgatccgattaattttagagacgaggttttatcgacccccaccgacaccgttagtggtttgttctctcaatctcgatcctttgattgttataataacctaccctccattgatctatcgtctctgattcattggttttgtttgttaattcgtctgattgctatttaaattttacttcttttaaacaattttaggttgcagcgatttaaagatcgttttttttttcgtaattgaatgtgattcgtatttgtttcaatcaaatttgcattacactgtctattgattgtggtttgtgttgggtttaaattatgtctgcagaagctggtgtcgtgagaggggataagtcttttgatttgtgttattgtgggattatacactgtttatgactatacatacgag

SEQ ID NO: 4020 - DNA, 3000 bp, Unknown
  misc_feature (1)..( 3000): cDNA_ID_3072336_gDNA_ID_1620679_Annot_ID_164360 3000 nt of promoter + ATG
ctgatcccaatttcatgtctttatatgtcttctcctttataggtcgcttttcatttacgctctttcttgtttttagctttcatttctctttttagcttttattttatcattctgttttttttcttttgtccaaactatttttcaaattttttatcaaatccattatatgtgaataaaataaaaaccataaacccaaataattgaatggaacaaacaaactaaaatgtataaattgaaaaataaaacaagcaagaaatattggcgagcatttccatttccgtcatgtctcgttgctgtctataaataattttttctttttaagaaatttgtttcgtccagttctcgcaaaatcccaaattgtggtttgccaacccctaaaaatataacatgattattagtagattgagttcacatgcccaagtttttccaaaagttagcccaaatctaaattacattattaacgacacttgtggtcatgaggaacatcgataaacatagaaggtgtaaccactaaggagtattacatgcaaatgtggtaaccaaaatctgaaggaataataagaggacaattagatcagatccggtggtttaagattcaaataccgaatttgcccttgtgacatgtaaattattactggattaacataaatggagacacacgtaataactattgacaaggaaagtatgtggtattgaccaaacaacacacatacacagacacacttcaaacttaaccatggttactcacacgtgatatgtcctccggttaaatatgttttcattatcattgttaattattattttcttattatcacattcccatatattaaaagattttagtgttatctaaaataatttcagattataatttcagtttcataattccaatcttgaaaattttggttcttatacttgtgtatataattggatattggatttttgtttacgtatggcctagatcaaactcttggtattattaattggaaagctaactcttacgacaaaaaaatacaatgacacatgcggaaatttattgagccttgctacgatcatgtaggattgacatatgtatgtcgtatctctatcttatttggatatatagggtatagtcatatcagagaaattttctaaaatgttttcttaggatccttaaattatattttaaaaggattatctaagtctcctgatttcctatgaattggttcgcaacctacgaaaaaactatgggatcaaaagcaaaaaattctaagtttttttttcaactttggtaaattttaacataaatagttagatgtttatctcccttcattcctttttgaaaccaataattttaatcttcctttcacttaccatttagaaaaacacacgaaactatgttttttgtttttaaaaatatgtgtacctcatatatatgctgcatgtacagcctttatacgtctatatgcagttgtgtatttcatataattatactatacaaatagaacataaaatagaactatagttatttacaacacaatatatatatatatatacagctgtataatgtattttagaatactagtctgggccaatcaaacgggaatataaaaacccgaggtagaattttatttttacatcgtttaaacacaaagaaagatggttagcaacagcaaattgcttacatggttatcaacaaaatatcgtgtttcgtaaacaataagttaaaaataattcaatgaactattgggattatcaaatcaaactgtaaaaattagtttattcaaagaacaattaatggctgagttaattagcttgccttgaattgttaaataattagatgcttctaatcagatttcaaggagatatgtcggaagcaccgacgacacgtgcggatccgtcacgtgcgcgattcaactctttaactcgtatgtcgatatttctttttttaattctcttcttttttcacactccatattgtcgatttttatgcccggaatcaagggtttgacttaccaaattgttaccttcttttaggcttaaaatttattacacttaaaataatccggattaatattttctaaaaaattcactaactagagaagaaataataataaaaaagacatgtgaaagagttaatgaaagttgagaaaaaagagataatattatttttattttatttttagttttgtttttctgcagaagagccaaagctctttccttcatatatacgaacccctttttccattttctttgtgcaaaaagtgtaaccttccttatccgattctgaagcagaaattagctgcagaatcttcagattctctctatacctagattggtttttcacagaatcttcgctattttgttcagatctgccactgtttcaggtttgaactaattttacataaattttctctcctaatctttctctgtttcatctttggttttctcaatcgattcgatatgaatttgatttggtttagcttgattcgatttgatcatcatgtctaactagttctatctaactttgttagtttactgttcttttgtgtggttcttgttcttacttcagaccgatctatgttttttttgctttgtctgcttcacacaacacaatcgtgagcttgctcttatgaaaatctaatctaactaaattttcttaatttgtggtctttttaatttcataatggattaataaactaaatatcctcaaaacgttcttgaagttttataatttgtattttttgttttctccggagatttggtatttgaaatcttcttactatctgaaatgaccctttttgtcggtttttcttgaatctttttatttatttttattttccgggaaaatttcgtttgttaggtaaagttgactgatacaaaggacttgagttgctaaataaaaagcatttgtattgtgcttttgtttggttactctgttctcaaacaaaagctgatacatttgtatttgttgttgcagcaaaaacggtcacaaaaaatatgataaatgtgatgaatccaatg

SEQ ID NO: 4021 - DNA, 3000 bp, Unknown; identical to SEQ ID NO: 4015
  misc_feature (1)..( 3000): cDNA_ID_3072311_gDNA_ID_1620679_Annot_ID_164355 3000 nt of promoter + ATG

SEQ ID NO: 4022 - DNA, 3000 bp, Unknown; identical to SEQ ID NO: 4014
  misc_feature (1)..( 3000): cDNA_ID_1822728_gDNA_ID_1620679_Annot_ID_164350 3000 nt of promoter + ATG

SEQ ID NO: 4023 - DNA, 3000 bp, Unknown; identical to SEQ ID NO: 3792
  misc_feature (1)..( 3000): cDNA_ID_1822736_gDNA_ID_1620679_Annot_ID_164346 3000 nt of promoter + ATG

SEQ ID NO: 4024 - DNA, 3000 bp, Unknown; identical to SEQ ID NO: 4019
  misc_feature (1)..( 3000): cDNA_ID_1822701_gDNA_ID_1620679_Annot_ID_48318 3000 nt of promoter + ATG

SEQ ID NO: 4025 - DNA, 3000 bp, Unknown; identical to SEQ ID NO: 4018
  misc_feature (1)..( 3000): cDNA_ID_1822697_gDNA_ID_1620679_Annot_ID_48319 3000 nt of promoter + ATG

SEQ ID NO: 4026 - DNA, 3000 bp, Unknown; identical to SEQ ID NO: 4017
  misc_feature (1)..( 3000): cDNA_ID_1822689_gDNA_ID_1620679_Annot_ID_48321 3000 nt of promoter + ATG

SEQ ID NO: 4027 - DNA, 3000 bp, Unknown
  misc_feature (1)..( 3000): cDNA_ID_1822685_gDNA_ID_1620679_Annot_ID_48323 3000 nt of promoter + ATG
tcaaactgattctctcaccctatttatatgttcaagattttaggtttttttaaagtattatatatatttatttatcgtagggttgttaccatattttcgctggtttcttcgcggataccgccggcaccggaagcatagttgagtccgatgttagcttgtgcctgtgatgctccggcaaatggtggaattgggttattgaaacccgctagttcagctaaaagtaaaaatagttcaactttgttaaatatatgaactattaaataaataataatgagacaagacgcttgaattaatattaatctgataactttgaattttcttttaaaatatatttttattagtattgttgaactccacaacaatgaattttcattccaaatataattatactcttttaataccaaagtatatgtttgttttggatcggattcaagtatactaaaatatatgattaatgtaattaagtttgactgaaattttaggaattcttctcaaagttttggaaatgtttagaattttaagattttggtggtgattttagaaagaaaatataaaatgctgtattttctaaccttgaatacttttttgaaaaaaaaaaaaagaagttcatccatatccaagtgatgttagaaaagaaaatttaaaatgctgtattttctaaagttaaccttcacttctttttttgaaaaaaataaattcatgcatatacagtttaaacattatggacaactgtctttataatttttttctgtaagaacccgatcatggtcggctatatgacaatcgaataacgtaagaaaaaatggattcagctaattaaatcaagaaaaccggattgaaaacttaccgataacgtctggaatattccgaccgttgctaaaccgaccggttggaccttgaaagtaatctataccataaggtaaatagttgaccttggccttggtgttcaaggcattgttgttaccgttgtcgaagacagagtctccaaacacgaagtaacacggcgtttgctgtccatgcaccgctggtgccaccgccgcgactgcaaacacggtggccaaaataatccacaatgccttggactctccctcgaccatttttcgcaaatcgaattatacgaaaaatgaggagagaagaaaaagcttgatgagagaagaagaaaagtgggcttattgtattatatggactagatttgtaagtctgatggttagaggggattttgcttagacaagtagaaaattatgcgactatatataggatgaggcagtgagtgaatcaagggagacttggagaactatataaattgttttgcatgaattaagaggtttttcttttaatattatttatttgaggtggacgtgttggtaatattattattttttgttaagctgaagaattgtcatgtaatttacttatgtttactaaaatatatgttacaaaatacacataggttgtttttttccaaagcatacaaataggtagagaaagctttatatatatatatatatatatatatatatatatatatatatatattatttaaggtggacgtgttggtaatatatatgacggctgtaaaattttatttgtaagaaaaatatgaaaaaggtataattaataaaccatagacaaaatctttcaaaaccaaacaagtgcataacgatcccatgcaaaaagtttggttaagaattaggatatgccagattccaccaaatgcaaatgaaacctaaccatacatgctttcaatgacatcttcaaaatgatccacaaatagtttatcgttctctgcatccactaataatttttccttcactcccaataagatattgtagtgaaattactaacttgaaaatatacttgggctaaaattcaagtttgtaaatgtatcacatattttcttaacaatatgaaatcatcaaaattaaatataatatatcaaaattcgttatagtttatctctcaacatcgtaattgtagtgtatatagatgtttattttgcaacaaagttatacaagtttaccgttgaacaaagatatgtatatacattgtggccgtgtaagatttaaaagaaaaacaaaaagaagttagttaattggttaattagaaaaagggctacaaatgccgtattgagaaggttataccgtatactcaacatatgtttaattatttgactatatacaaattaaatttgaaatccgtgtctaatacggatcaataagtcaatgtctttcattattcggtaaaataataaaaacagatttgttttgaacgagttggccactttctagtaaccataatacgatatgccttttttttgggtcaacttgtaactataaactttgatagacgacttttcatattgtcttattgatgatgtaactagttctttatatttagagatggaccagatgatattacataataggtaatgtagaaacatgtattatcgaaaatatattatatgtaagtccccaaaacaatgataatatgatataataactaaccattatccaattttaacactcaaccatttataatttgttgaccaatgataacacacaagaccttttattgaggtaactgtaataatttcattttttgggggtcaaatgttataagtctaacaagagtgtttcttacaaaaagtctttacagtgttaattatccaaacaccatactaaataaactcaagttgatcacatttttaacatgttaacatctttgtagatatgaaataagagttgacttttgaaaagagtttatcaataacaatgttacttctgaactttcatcacttgtaatggcccaatgggcttttttcaatgaatccattaatagacaaaaaccaaaaaaaaaaaaaaaaagtcgccgtcgatttgtttatcaccgactcaaccaccggtagggtttaaggtttctcatacactctccttctattgccgccgtaataatcaaatcaatcttcttcttctcctctaacccaattttggaacttgaaag

SEQ ID NO: 4028 - DNA, 3000 bp, Unknown
  misc_feature (1)..( 3000): cDNA_ID_1989449_gDNA_ID_1620679_Annot_ID_48324 3000 nt of promoter + ATG
aaactaacaccacaattattgagcacattcaaatgctgtcatttttattactcgtacgtacacatgaataaggtggaaatgtcatatttgggaaaacaccataaaacaatatgtatgtcgttcactttggtctcatataaacgctagccaaatcatacagaggtaatggtaatgtttttttatcgacggcaacgaaagtttatgctaatatgtttataaattacttttattgattaatatgattatctctgtatagttgtggacgtgtgtatataactgaccgtctaattaaagaaaaatttatcacatcacgtacctaaaagacgttcttcattaatccataattgctttagtgtataactaatcatctatttagaagttttttgttttacttttcctattgttaatgtttgaaagattagaatatatttataagaagaaatttataactttttagcaaaaaaaaaaaaaaaaaacttataacttatgaagtctttggtatgtatattaaatttgacctgatcacaagtaatgcacgtatattcacgatttgaggtacgaagcagatgaaaattgtactatttaacaaaattactaaactataccaattaccagacacataaaatctagataaagtggtcctaatttctgagaaagaatattcctgtgttcgttctttctatctctttccttttctgttgttacatttcccacacacaaaaaaaaaaaaaatctatttactgatctatgttaaataaaaatcaaaaggaaattgttttatgatttttattactttatattaatttaattgatgtaataaattattaaattaattcttggaaaattaatcaaattaacttaaatcaaacaaaatttagttaaactaataaacactttaaaataaaaagtttaatttgattaatttagtcagttatttattaaactaataaacactttaaaacaaatttagttaaactaataaacacttcagttaattattaaatatttatgagaattctaaaagattaatccttatgaaacagaggaaatatattttaagatagaaaagagatattaagaaatctcaaattaaaatacaactcatatttgacacccataagcaaaagatattataatactaaactacttatcaaagatatttcagtttattgatatgatcagaatttggtcaatttttctgtcaacaaagattggtctaaattaatgacctaaggaagcgaattaattcattaagaagactttttttctttctcaaaacttatgaaaattaacccacttctaattaatcatcaaaaagcttgaaattatttgtaaacgaagactagaaagagagaggggaaaaaggtatgacaaacagccttaaagttaaaggtaatagtaccttttgtttgttcttctttttttgcaaacaattttttcccttatttaattacgtttataaaccttaattcagattccttaaatacattgttaggactccataattagtaacggcattaggagcataaacaaaaattatgataaaagttttgatattatggaaataaccaaatatcttacctgtaaataaaataaagagatgtgaccaaatttaattgtggatttaattacattatctaacccttgaagaaactcaatgttttttgtgggattgttgtcctaaacctgaggttacatgtaatcaaaacattaatgggatttgaagtaaataaattagatttgcgccaaaaaaacaaaatctccattgattacagtgttttaatatggtcagataaaaccacagaagtggtaacgacataaaaaatcaccaccaaacataaaaccgtaagaaaagtttcgatttttattttctgcgatccaaaggtctagtgatgaattgaatttggtttttgtttttataattgaagaatgaagaaataaacagttgatgggttcttcgcttcttctcttgttgggttagtgataagcacgcctggcttctcatcattccctccaacctttctctctctaaaagacttcaattgttttatcagcttctctctctaaataaagctctcaattcaattctctctctttcacttttttttcctctgcttgcttcttctgttcatctttttgcttcgtcaaaattttgaccaaagttttgtacttttttgttgctgcaatttttgtgattagattggatctgggcttggagctgaatagcggatttgtataaggtaattgcttgaaacgtaccgaattgattcgtttttttgtttctctgagatttttcaatatctgggtcttagagtttggctgatctgattggttctctgagattttcatgtagataagtttgttttaaaagccaaagccttagtttttaattagtgagatagatttatgtagagagcatcaatgatcaatccttgagctttatcttgggttttgttatgttgtttattgaaaaatggtttgttcggtgagtatgatgattatgttcaatggaaatgttcttccttttctctcgaatttctgagttttgctttggtttcatataactttgtttgtttgtctggggaattgtgaaatttacataaccactacttccgatgtaatataaatatcagagcttttctttattgacagagattttttgacttgagatgaatgatgttgacccttgtggattctgagttgatttttgattctttctaattggtttctggtttctatttctattgatcagctgaatccaatcatggtcttttcagtagtgtatgctattggtgaaaatcaatattggtttcttcgccttgcttgtgatgccttgtctgctatcaaaatgtgtcatttgattggtttttgatagaattgatttgcatttgttgattcttgagattttaatcttagttgatgttgtctcataggttattattagtcttctctatcgttgcggcgttcataagtggagaaagtggtaaagactgcttaagt

SEQ ID NO: 4029 - DNA, 1207 bp, Unknown
  misc_feature (1)..( 1207): cDNA_ID_1822798_gDNA_ID_1620680_Annot_ID_48325 3000 nt of promoter + ATG
gaattcattgcctatcaatagccattgataacatactctataaattaaaaatactaagaattcaaaaataaactagcaattaattgtagaactaaaactagttgagtgaatcatacttttgttaataacacataattaagattgaatccgtgtgatatttgaaaacttggttggaatatcaaaattctgcatttctggcagagtactcaactccaacaaaaacaacacatgggtctcagatctctctgctgacactcccatcaattttcgcttattaaaatttatcttcatttagttaaatttgtagtattaataaaagttaacaacattcattaataccgaagattaggaacgaaaagagagacgtggaaggatataagtggtgacagagcagtcaaagacaaccgagacacgatcgaggcgtacagtcaaagcaacacacactgtcatatggtcaaacgtctagctggatcttttgcatgtagtggaccccatacttctttatttacactttttcttttttctttttcgtgccaatctaggaaataaacttactaaaaattgaaaaatatgttcttacagagaaaaaattgttgttattcttctaattaagtgggagtaatactacggatttgtttaagcaaatatgttccatttcaatagtatgaaacgagaaagagtaatgcttttgtttttccatgtatttactcattactgcaattattcttcatagtttctagaatatatagactgtaaagaaaagtgtttataaaaaacgagatttttagatttttgtttgaaaaaatagagaattgtttatagcaatgataatgatgattcaaataaaaggttaatgaagtaattaggccttgaaatgaacgtcgcacgtgaccctaacctgtcctcgtgggtatttgtagtttacttagcagctttttttacttacgtgcgggattttctttgctcatcgtctaaaagaccataatacccccttcatctatttttcttcttaatttactgagataatactttattgtttttgacaacacatcgatttcagtagcaaaaattaaagggaagacccaagagagtgctcttttaagcaacatgatatttcaatggaacacaaaatcaatatgaagatttattatttggtctaaaaatatttaaaaaaaaaacacctcaattttttttttagctaaagatg

SEQ ID NO: 4030 - DNA, 3000 bp, Unknown
  misc_feature (1)..( 3000): cDNA_ID_1822794_gDNA_ID_1620680_Annot_ID_48326 3000 nt of promoter + ATG
agtaatattaatctaacataaacaaccatagttctcttgaattttgaactacgaattttggttttaaaaaacagctgagaatttgaatatcttgagcaatctgcatctgattttgatttctgacatcctgattaaaagtggtttcagatttgattctgaaccgaagaaataggcggcttcttatttatcgttaagtttaatattaaacgttgtattgctctttaagtatctttaaaacctcgtttacttcgtgttattattcaattttgttataacaaacaaattttgatacgttgctctcttcttctttgactaaaaaaacacatgttggtacgtaggttggattttgagagctaattaaatagttaagatgatggaaatagcttatcagcctcggattgattccgagattgaatcactcgtcgagagaatcaatcctccaaggttagtaccttattaatatttttatcattatgttggatattttttttttaataaagtagtattattcttgatattactggttttgtgcgctaattagggtttgtgtagacaacgactctgacccagagtgcacacttattaaggttataaaaagctcttgataatatgctttttaattataagttcatagataatgactaattagccttaattaaacatgtggttgatatatgtaggtagatagcgcgaacaagtacgggatattactggacatggttcaagtgttagccgatcttgatctcgttatctccaaatgttacatctcatctgatggcgaatggttcatggatggtaagtcgtcatcgtcatcatcattcacatgtcatcatggtggaccatatatcacatgacacctgaaatttctctttgttagtgtttcacgtgacagaccaactcgggaataagctcaccgaccgaagccttattctctacattcaacaggtgtgagattaaaatcattagtacaataatcacctaatcatttttaaggaaaatagtataaaattaccaagtaaccgaaaaaatcattaactaagatgaccaactcttataatgtgacagcttcgtttatttatgtttctttttgggtacttttggacgtatctaattagcttcttgagtttacttgtgaaattaatacatttcatttttaatgatttttggtttttacaaattcaggcaatatgttctagtagaacgggaggtataacaaaggagatgcagagtaatctaaaacgggaggtgcaacagcgccacgtgtcaacagaacacacggcctttgagataaccggaatcaatagaccgggtctactatccgaaatatctgccgtactttccgacattggatgtcacgtgacggctgctgttgcatggacccaccacgagcgagcggctatggtgatttatctagaagacgggtttaacggtgggcccattatcgacccaataagaaaggcccaagtaaaggatcatctggatacagtcatggaggcccatcacatagttggcgatgtgtctcatgtcgtcgtgagggtcgtcgaggctaaaggagttccggtcgggtgggctcacactgagcgacgacttcacgagctaatgtacggagaaggagattacgagaattgcttcgactgcgattgtttcggagacaggtgcgcttgaatttatacgaattaatcatcaatggcaaaataaaaatgttgtttagcttcgttcgatacatgtgacaggtgcgatgctttgtggagaggaagatgcgagaggatacacgtgacaatcgaagcatgtaatggctattcaatggtgaatgttaagtgtagagacagaccaaaactacttttcgacacggtgtgtgctttgaaagagttacaattcgttgtgtttcacgccgtcgccggagctaaaggctccactgcagagcaagaatatttcataagaaagaagaacgggggcacgttagaaacggaagggcaaagagagagactaaggcattgtttggttgctgcgatttcgagacgtgcttcacaaggattgaaactcgagattcggacagagaacaagatgggtttgttgtcggatgtgactagagttgtgagagaaaacggtttatcgataacgagagctgagatgtgcacgcaaggtgagattgcggttggctcgttttatgttacggatgtgaatggtggtgagacgggtcctagtgaggttgaagcggttgtacgagaattgggaggagcggttgtgtcagcggttaaaggggttggaatgatgccgaggaggattggttcgacgagtgatagtgtggagcaggacaaagctaagtcgtctattgggagaatgttttggtctaaattagagaggttgtcaacgtctataagatcgttgtgaagtgtttgattagtggtttttgcctctctggttctcgtgattatcgatcgttgtatatatagatgaactaggactatttgcagattcaattgaaattcgtataattattggttttagatgtgatctaatgagataagattctatcaatcaaaaccgttacttatcgtcttaatttgttcgaatgaatcttaatctcacaaaccaaacattataccgtcttaattgaactggaatttgttcggtttttacaaatatgagagaccaaacattatataccgttttattcaagttgtgagagattgtaaattgtagacccaatttcggtttggtttagctattgaatttgacagctggcatggataaagaacaattactttacagtaattaacaagtcaataaaagggcattacgggaaatttaaatattgaaatgaaaatagagagatctttataaaccctaatgtgacggtaaacagtaatacattagaacactctcgaattcgaagaaaatacgtagcaaaacccttatttttgaatttcagacgaattccgatttcttaatcaaaaatccgataagagctttggatttggcggcgaataagaaaacatg

SEQ ID NO: 4031 - DNA, 3000 bp, Unknown
  misc_feature (1)..( 3000): cDNA_ID_1822786_gDNA_ID_1620680_Annot_ID_48329 3000 nt of promoter + ATG
atacaaacacattttctatgcactagtgaaaaagacaaattttatcctaataacaaaccaaacacttgtcttgcattacattagaaaagacttgtgtggtttcaatgaattgtcgacatcttacaaaaatctacatgagcggtgagagagactggacttggacatatgttgctctaacttcttagtgttgatactttttccaaagcttaaagaaatatagacattatttcatagctacaaatatacagtgatttttaagtatgaggacaaaccagagagactttgatcccatatgtttcaagcaacagtggctttgcagcagacattaatgacatcatccagagatggatgatctcccgtgccttcgtcttttcgaccgtacaataatttcttgcctctgaacacaaacgtacctccctgagaagaagacagaacaaatgatcaaaccaaaaataaaagcagatatcttgtcttgtggagaacttaacaagaaagaacctgttgcaacacactgcttctgtcttcaggagtggcttctatggtgtaattttttgttgcttctcgaatctcgctaaatcttgagaagaccttggtctgcaataatcgaggttttctcatgtttcgaggtgaaaatagtgtatacaatgagacggtaacaatgtttgaggtgagtaggttcatacgctagctgggttgaagaaagtgcggcccaaaccgaagtataaaccaagaacatcatatgcctgcatttaagaagagccctctcaaaacttcaatcaccatttcaacataaaagatatcttaaaaacaaggtatatgtttgtttgtgttaccttgcgttcaggatccgcataaagacattccatgggaaaaggtaactaaaacaaggaaacaatctagactcagtatcttggttaaacaataaagctcccataatacaaggacttctctgggaagttggaacttgctattttgatttatgctgcgcctgttggtatttctgattctatccaaaagtacactatataaagccatgaaaatgcgcttgaatggaggatgaaatcaagctaaatcttccctatatctctcaccctcttctcatgttcgagttgcagattttgcaaagaccaagcaattaacaaatcttactaaattgtatcactaaagagcttgagaataatctcacaaaactcaacccaatcttggtctgattttttaattcacaatgacaccaaacatgctcaaaacgcccattagtgatacaactaactaacggttggtcttcgtaaacatgcaatgttaaggtgagaagagggagctagacactcagagatatggagaagactcggtctgatctcatcctcgactcatggctagaaaccagagtactactaaatgcacttatcatcagagaggaaaaccactagagcatagcataacaatcaaaagcaagttcttctcttaaaaagttcaacccaatgaacaagcaaacataacgtacatccaaagaaaacatatccatgagctcagtaagttggtatatatatcgaagaaaatggagaaatcttatacccgagttgcaagtatacgagccttgtcaggagttccaactccaacagctatcaatttaacaccagccgcatcaaatctcggtttagcctctttcaaagcagtagcaagttcccaactttcatataaaaaaaataattcattatcaaaaacgttttacaacaatccttgattttgcaacaattccaagtgtttatgaatgaatcaatttaccagcaaacgcatccgaaatgcctcaagagtacaacggcagcaattccctgtgtccaaaaaaaaacactattcaaacaataatatcccaaaataatgaaaagaattcgttcttcataagcatcctaacatacatctttctgatcccagagatcactgaattgcacgcgttggcctgaagcagtaaagatagagacatcgccgagtatctcaccgatatcttctctgtaatcagtgaaggactcagtggcagctctcgcggaaaccacacgaggcctactaatcggtgaaacggaggaactgtaactggattttaatttggtgacaggaacagaagcaatcgacgatgagaaattcgatggtaactgagacaacatgggtttcgagcacagaggagaaattgtggaacaaataagcggcaatgagctcgaagatcgtagagagagaatcgccattggtgattcagaaaccaaaatcataaactcaatttggcttatggagaagacgagaagaataagaacaagagcatctagaaattaaacacgtggcgaataatggaccgagaatgtatccggcgtcgtttttagtttaaagcccatatttattttgaaagcccaattcaaatccaagtccattaaaacaaaattacgaaaattgctttcgattttctcatccaaattggttcgtcttccccataaactctcactctctagggttttaaccgtcggcgtatccgccatgagaacactgcggagaaatgttacggagaatcgtcttaccatctcccggcgtagaacggagaagaagacctcaccgaataaaacagaaaagtcagtccagatcccagttgatatcatcatcgagatactcctgagattaccggcaaaatctatagcgacatgtcgttgcgtgtcgaaactctggatctccgtaatttgccgtcaagatttcacagagctgttcttgacccgatctttgcatcgaccgcaactcttattctgctgcaaaaaagatggtaacttgttcttcttctcgtctcctcagcttcaaaatccatatgagaactcgtccgccatttctctaaagaatttctccttatgctataaaatttcgcgtcctgtcaatggcttgatctgttttaaacgcaaggaaatgaacgaaacagtgacagtgatatgtaatcccagcactggacataccttaagcttacctaaaccaatg

SEQ ID NO: 4032 - DNA, 3000 bp, Unknown
  misc_feature (1)..( 3000): cDNA_ID_1822772_gDNA_ID_1620680_Annot_ID_48333 3000 nt of promoter + ATG
ttttccctttcatcatatctttaaccagctaaaacaagtttgaagcgaattttgcatatatacagtcccaacttcgtcaattatattgaagttcgttatctttttttttttttttttttttttttttttttttttttgtatgtgtgtgtgtgtgtgtgtgaaatatcgcgattaatagtttaagaaaattcttcatcagaataatagattataatattttcaaagatttacttgttttttgattattttgattttattaaaatcatattgttgagacaatggtattatggtcatgaagaacctcaagtgttttatgtatcaattggcaaatttcagcacaagtgaatttttttcttgattattttctactgtctatacatataaaatagagaatataatataacaactttgagctataattagaatctgttggaaaaaaatgaaaaaatataacaaatatattctatcttgatttttcaaagtatagaatctaaaaaaagctatatgatattaattatccaattatatgattgcatttatgagttgatatgatatcttttggttgtttcataaaacagaatcaagaataagatgatcaataccgaaatatatggcttcatcatcaaatattatttcacatgtgattctccaatgtatcattattaagagttgttatacgaggacccatttttttcgcagcaatcaaatcaatttgagctttttaattaaaatcttcaaaaataatctgagaaaatcacagcgtctcattaattattaaaaaagtacttcaaaaaagtggatatacgattttgaaatgataacgatttcctgacgtcagaaaaaatcctataacaaacattaatgtttttttttggttagttaagagacaataatatgttacatctaccaaagaatattccagttaagttagttaatagttggagtcaaacttaaacgaacaacgtcgcctacaaatctgggggtataagttataaccaacggccaccaacatgggttttgatatcgtccacctgatttttatgttaatataactcaatttgattgattaaatattatgctcttatactaatcattctaggtccaaaactgaatcactcattgcacatcatttttatgatttttattttgaaaatctcatgtttcaagaaatatttgtgcattctactagtagcttattttaaataaagtttcgagtttatataataaacaatatgtttatttctttgatttgtatacattttaaaaaaaaaaacaggatgaagatatatacaactaaagctcaattcaactagtaggaaaattgtattctacaaaaaatttgtgtttatgtttttattatgataaccatccaaactcattatttcacccatgatcaaagtaactatatcaatatatctgcaacaatatctgactcaacatttatttttacataaactgcggaccaacacaattatgctaaactatcatcatttattctattggtattggagatcagtctacgtcagtgaataccgcataattcacatgaaactaactccaaaaccctttaaccaaaaaaaaaaaaaaactaattacaactccggttaacctgtcgataattacaagactgaaaacatcctagtcagtaaaaaacatatttgtatgtatccgatcccaccaaataaataagttgttgtcaatgatagaggaagagaaaacgaaaaaaaattgcggaccaagacatttgggactactagagtttagggagcataaatggtcctatttgacttaccctctaccgtataaataaatgtattttagccgtataaatgtatacatacgtagatgcataggtatacaggattactttagacgatttgatgtcggtatgacattacatttgactcccctagctccacttgtctctgttcatttttcttgtatgtcatttccttgttttccaattttacgtttaccaccctattttattttgttaatattttctaagtcaacgtgttgacacttaattacagaatctgataactaaagttacataaaatgctcacagtttttttcagcaaaatactcacattatacgacatataaaattttagcagtctataaatagtaattatttggcattagtattggacaagaagtagaatataaattaatgttggttcttttttctatccaacttcacacagccaattttgtagctgacatcgtgaatggacgactaaactaatcataagcatagtgattcagtttatacaacaacaacaaaaagttaattacatttgaggtttctttttaaattgctatgtttggtccctaaatgatggtcataataaggacggtccggcggtgacggaaacgcgtaaagactaatcattttagtactattaatttgtagaattattattaaatatgcttgaatcctagaaaacgatcaaataaattttggaaagaagctcaaaatgtgttatttaattttgtccctatgtagagctggtttttttatttttatttaaacataatcctaagatttattgctgtatgtgtgaatgcaataataaatagaaactcaataatagatcattcttattttcaaaaagaaacaagaactactgcaatgttttaattgtttattttgtattaaataatatagcttgttaattattggagatcgcattaaataataaaagaagttgtctcacatgtcttggagaatatttactaaaaactatggtaatgtctggacggtcaaaaaagtctctctagtttctgattctgttgtcacattttatttttgaaattaaatgtcgttagattattattatctatatatatatatatcccaacagacccattgcttctccaaccacatctcactcttcaccaacttaaaccctaattcaagatctcttcttttcgttctctccttcacccacattagtcttctctacgaccaaaatctcttgactttaaaaacagaga

SEQ ID NO: 4033 - DNA, 3000 bp, Unknown
  misc_feature (1)..( 3000): cDNA_ID_1822768_gDNA_ID_1620680_Annot_ID_48334 3000 nt of promoter + ATG
aataggcgataacattataataagttcaataatacaaactttataagagtttattgaatttttgttgggaaaattgaaaaagaagggatggcctacgatgcaaagaccaattcctgtttcctactagtgttgttgaaatctgaatacacattttgtcatgttgattagtgattacccttagcttcaaagttcaaattaactttacactaacttttccataagtaaagatattttattcatgacgatacatattttattctacaaaaacatataaacagtgcattgtacctcaataatttgaagactttatatttttccaagtgctttgacttttaactctttattaaccatcaggagacaagtcaacctttatttccctctagaagcctttggctaatttattaaacttaaaaacgaaccaattaaaagttacaattcataattatttttgtttatgattttttcactattattaataggctattcgcatgtatattcaatcgtatttcacttgttttgcaaggaactaaattataataaacaatacacccaaattgaccaacttatcttacacaaaagattaagagcatacgtttatagaagaaggtccaaaaaattgtgacgccatttaataagaggtatagtgggttttcttgttccttaatctcagctgccgtggaaaataagtgttagtagtaaatttattgaattaaattataatagttagatttgtaacatccctatcaaatctttgattaaaatttgattttgggtccatgggacaggcgtcattaggttcaattttaatactgcatgattattaagtggctacatttataaatgaattaaacaaacccatctatcaattcagtattgtcaccgtgagtttgaaactttgtcattttataagttataatccgttatattttattacaattttttctcttaaggagattaataatagataaaatcgtacctgatccagaaaagttttaatatccataaatttgttagtggtaaattttctccgagggttggcaaaattttgttcaccaaccgtaacggaatttacactcacaaatttcaatatctctaccttcttttcatctcttttggtacatatcattaactcctttccttttcaaaagacaaatgtatattaaatagcaagtgattcaccatccaccaaatgtgatcttctgattagtgatatttctttagacaatttaattgatggatttgaaaggaaaaaaactttgatatatatagtatgaagaagtttctttgtatttatccaagaactgttagttcaatcacttgcgctttgtttacgaatgattaatgacgttaactattcaaatacgatgctactctgttgttgaattcatgcgctttgttttcgtctttgatttttaataaatttacatgttcaatacaaatatcttttttattggtataacaaagaaccatgataagactgatacataaaataagatgttgtcatgttcttatttaactactatatacttatattgatcatgctcaatgggagtttgtgtatataaaaataaatttagaatttttctttgtttttttttttttgggcaaaagaatttttctttgttaattcacacatttccatcaccaaacattcgaagtatttgtctctatctcgacaacatttatatatatttttttcttttttttgaacacgactcgacaacatataatacactcctttgtactgtatactacaaaataaactactaaacaatattgactctataatatataatttatatatacatacaatacaagtctaattcaatcacttttggttcaaattggaaaaacattgaattcttctattattcttgatgaccaagtctatatcacatgtaataaaagtacacataaccggtctttctttcttattcgtaagctgccatgcaagtggggcttcaagctttcgtaaaatctctcatgtattccacattattaatcgaatttaaagtattttgcatgttatttagattagaaatgtcgttttcttaatcacactcctaaactgcggatcagatataatcaccaagattaaataatataaaaatataatcactacttgccaagacatgaatcatgaggaaagttctatagcgtgtactaacatacaataaatcatatttatgcgtatacatttactagaaccataggatcgatgaatcagatgcaactcatgcagtcatattacaatatatatttagatatgttcatcttgatctttcaacttaaaactcgttcatattcatcatttaaaaaaatatatatatgaatgtaaaaaaatggtaatttaaaattagatgagaatggggaacaaattaatcaccaaacaaaaaaaacggaatagagtaaggaagagagaaagagtcaatgagtgggggcggctaagaaaacattataagtttataacttatgagttttatgattaggaaaattataataaaacttgttgtcgaatagtaaaattataagaaaactaagatattatttctcagtcaaattataaatgatattgaatatctagattctgatgtaggagcaaagacaaaggagaaaaacattagtctccccccttctctgtcatttcttaactctactaatattttatcacataatttatcatccaattttccaattccataaagtcactttttgattcaattttattttaattccctatactttattgacatcttccatcacatgaaggactatctcctccagctattatatactctctctctctctcctttattttttctcaattcacatataattttcacctttacacacatttccatgtaagtatatataaacctcacacacgcattatcatacaccatcctcctcattctcttcatcatcaacataagagagagagaagaaaaaaagaattacaattaataagaacaagatcaagaatcaagaatcaagaaaatg

SEQ ID NO: 4034 - DNA, 3000 bp, Unknown
  misc_feature (1)..( 3000): cDNA_ID_1822764_gDNA_ID_1620680_Annot_ID_48335 3000 nt of promoter + ATG
actgcggcaacgaaggtgatattgaatggtttgctacaaactctggattcatttgggatatcgctcccaagttcggtgccttgcttgttttccccgaggttcgttggtgttgttttatttttcctgttggaaattggaaaaagaagaagcaatttgttactgattttagggatttggtatagcataggtattatggagagtctatgccttatggaagcagggaagaagcttacaagaacgctaccactttatcatatctcactactgagcaagctcttgctgattttgctgtttttgtcactgatttgaaacgcaacttgtctgcggaagcttgcccagttgtgttgtttggtggatcatatggtggaagtaagtgagcaacttttgtgttagtggaattctttttaaatgagattgtggagtaattgtgtttttgtgtttgttgttattgatgcaacagtgttagcagcatggatgaggctcaagtatcctcacattgcaataggagctttagcttcctcagctccaattcttcagtttgaagatgttgtacctcctgagacgttctatgacattgcatcaaatgatttcaaggtaatacatacttttgcttcccttagtcgattgactttatcttgtctttctttaatcatatagggaccgtgtttttgtttgtagcgtgagagtagcagctgcttcaataccattaaggactcgtgggatgcaataatagcagagggtcagaaggaaaatggccttctgcagttgacgaaaacttttcacttttgccggtaaacaaataaattggagttagtgtgcgcttgttaagtgtattgattagtaatagttcaatggattgtttctcgatttgcagggtgttgaacagtactgatgacctttcagactggctggactctgcctatagttatttggcaatggtggattatccgtatcctgctgacttcatgatgcctttgcctggacatcccattagagaggtatatttgggaagtaacactttatgagtttatacgaatattgtagaagaaatctgagaatgcattcgctagatcatttggattttcatctttacatcaacgatccggggaggctatgctttaaagatttgcttgttgcgtcaggctattgttcaaccacgtccgttaaagtctttgttcaatgtggtgtatctttctataggtctgcagaaaaattgacggtgctggtagtaatgctagcatcctagatcgcatatatgcagggataagtgtgtactacaactatactggaaatgttgactgcttcaagttggatgatgaccctcatgggttggatggatggaattggcaggtatgaaaaagtcaactgctttgtttatctttcctttttctgataatatttcagtgacgccattattcactttcaccatccgtttacaataggcatgcacggagatggtaatgcccatgtctagcaaccaagaaaacagcatgtttccaggttatggttttaattactcttcatacaaagaggaatgctggaatacattccgagttaatccaagacccaaatgggtcacaacagagttcggtggacatgtaagacatcttttgataaactcaagattctttcaatgctgtgttctgaatctttactatgtctctgtaatgtaaaaggatatagcgaccaccttgaagtcatttggaagtaacatcattttctcaaatggtctgttagatccttggagtggtggcaggtaagaatattgttccctttactcaaatcccaagagctattttacaaaacgaatctcgtaatcgtgacaaatgcttgagtttgactcgtaatatgcagtgttctcaagaacttatctgataccattgttgctctcgtcacaaaagaaggtataactaaaagcctcatcaatctctctcgtaactaatctgttttttttttttttttttttttcatttgcatagacttaaaaacgtttgatcatagtagcagtagtctacattttattgacttgatgaattatttttggtatatctatcttacaacatcatgatcataatcataatcatcatctattctctttgaaactcacaaactaagttgattctggctttttcttctttttttctcaggtgcacatcacttggatctacgaccttcaacaccagaagacccgaaatggcttgtggaccagcgggaagccgagatacggttgattcaaggatggatcgaaacttatcgagtagaaaaagaagctaaggtttctctgttaaaacgttcttggtaagagaacaatgaaaagaatcgtctcagtgtgtaactcggaatctgcaaactttgtattgcgaacacatgctttgaataaatccatgtaactatgtaaactctcaatgatcactaatcttttctactagcttaactttttcgtttttgggtaattatatatgaatacacgcaaacaaaagaagtacagaataagatttatgagtctggctgatacacccaaacacatctgtcaaggatcttaaagaatcatatcttctaaatattaattttcatcacattgtgtttttatggcagaagaaagtatgaaacatttaatggttatgagtagaaaatctaaaatttaattaccatacagtcgtgactcttgagaaaatcggaaattttaattaccatatataatcacctcgtttaaactaaattgaaaattttggtattggccgctaaaaacgaggaggaaaaggcataaaacgccgtcgtttgggcattttgactggtcgaataaaaactcttttgactaaaacgtcgacctaaaaaaagaagagagagactagacctctctacaacgcactgtcacagaactcttctttgttgtgcgagagagaaatagaaaaagtgaagagacaagcaccgtgcttttgatcggagatcggaggaatttaggttcgattctccgtaattgtgatattgggagagactatg

SEQ ID NO: 4035 - DNA, 3000 bp, Unknown
  misc_feature (1)..( 3000): cDNA_ID_1807468_gDNA_ID_1620680_Annot_ID_48336 3000 nt of promoter + ATG
tctttggtagcaaatcccagtcacttggaagcagtagatcctgttgtgataggtaaaaccagagcgaaacaatattacacgaaagacgagaacagaacaaagaacatgggtattttgatccatggggatggtagctttgccggacaaggagtggtgtatgaaactctccatcttagtgcacttcctaactactgtaccggtggaacagtgcacattgtggtgaataatcaagtggctttcacaaccgatcccagggaaggaaggtcttcacagtattgcactgatgttgcaaaggctttgagcgccccaattttccatgtcaatgcagatgacattgaagcagtagtgcatgcttgtgagcttgctgctgagtggcgccagacgttccattctgatgttgttgttgatttagtatgctaccgtcgctttgggcataacgagatagacgaaccgtcattcacacaaccaaaaatgtacaaggtctggctattatatcatccatctctgtgaaataatctaataaccaattcaagtttccatttcatacttttcttgtactttttttttgtttaaaaacggatgttacttgttggtgataggtgatacgcagtcatccctcgtcacttcaaatctaccaggagaagctcttgcaatctggacaggtaacccaagaagatattgataagattcaaaagaaagtaagctctatcctcaatgaagaatatgaggcaagtaaagattatattccacaaaaacgtgactggctggcaagtcactggactggattcaagtctccggagcagatttctaggattcgaaacaccgggtaaaaaacatttttatttcatttagtttgtcaatgccttttggccttttttcttttctttttcaatgtaacattttgctggaaaactattcccttgttcttttgcagagtgaagccagagattttgaagaatgtgggaaaggcaatctcaaccttccctgagaactttaagccacacagaggagttaaaagagtttatgaacaacgtgctcaaatgattgaatcgggagaaggcattgactggggacttggagaagcacttgcttttgctacactggttgtggaagggaaccatgttcggctaagtggtcaagatgttgaaagaggaactttcagtcatagacactcagtgcttcatgatcaagaaaccggggaggaatattgtcccctcgatcacctaatcaaaaaccaagaccctgaaatgttcactgtcagcaacaggtatgcatttttttttaatctctagagatgataaccactcttcaattgtttttacatgatctttacgttgtttgtgtatgcagctccctttcagaatttggtgttctcggtttcgaactgggttattcgatggaaaatcccaattctctggtgatatgggaagctcagtttggagactttgctaatggcgcacaagttatgtttgatcagttcataagcagtggggaagccaaatggctccgtcaaactggtctagtagttttacttcctcatggatatgatggtcagggtcctgaacattccagtggaagattggaacgtttccttcaggtatattatatgaccgatacttaccgttaagattctctccactttttgtatttgtttccctctcatttgaaaattttaactgcagatgagtgatgacaatccttacgttatccctgagatggacccaactcttcgaaagcagattcaagaatgtaattggcaagttgttaatgttactacacctgccaactatttccatgttctgcgtcggcaggtaaaatatctatttatcccaagttcgtaaaatgttgttacttaattttcgtattcttcacactcacatgcttgatatcatccatttgcagatacacagggactttcgcaagcctcttatagtgatggcccccaaaaacttgcttcgtcacaaacagtgtgtatctaatctctcggaattcgatgatgttaaaggacatcctggatttgacaagcaaggaactcgatttaaacggttgatcaaagatcaaagtggccactctgatcttgaagaaggtatcagacgtctagtcctctgctctgggaaggtataaaaaaaaagatccactttttccgtcattaactaacaaagttcccacattctgaaatttaatactttaaatgtcaatgaatcaggtctactatgagcttgacgaagagcgaaagaagtctgaaacaaaggatgtagccatttgcagagtagagcagctttgcccatttccatatgatctcatccaaagagaactaaagcgatatccaagtaggcgtcgaaaactcaagtttgtgttcaatagttttggttgattatggaattctttgaaacttttgttcttgtgtttaacagatgcagagatcgtgtggtgtcaagaagagccgatgaacatgggaggataccaatacatagccctaaggctttgcaccgcgatgaaagcactgcaaagaggaaacttcaacgacatcaaatacgttggtcgtcttccctcagctgctacagccacaggattttaccagcttcatgttaaggagcagactgatcttgtgaagaaagctcttcaacctgaccccatcacccccgtcatcccttaaaaaaacacagcttgagaggcttgagcctgtataaaaaagacacaacacaaaaataaaagattcatgagagaatctttggttaccaaagagtgtcactggaaaataaacagatgtttgctagacttacaaatttaagtttattcgatttgtttggtttgttataggatttaatcgagataaaaggaaaaaagatttaaaccgtttggtttagtatgataattcattaatttggttcaactttggattgattttggttcggtttggttttatcagtgactgtatcagcttgaggcagttgcaatcttgtaactggagagaaaaagctatcaaagttaaaagttatg

SEQ ID NO: 4036 - DNA, 3000 bp, Unknown
  misc_feature (1)..( 3000): cDNA_ID_1822760_gDNA_ID_1620680_Annot_ID_48337 3000 nt of promoter + ATG
aaatttgcaaccccaaaaaaattcaccttagttagttttttgcttagtaaatttgtttaaattatagcattcaaatacttttgaggtcttaaacatagagtcatagattggttaagccaccgacagtactattacagctggagagaaaggatgtatccatggagaaaaaggcaaacaatagcattcaaatactctttttcaaaattactaagtaaaagagttattgcttgaaactccacattgattgtgattgatagatcagctttggggaattgagtggccacaaaagaaaaaaacaaggtacattcacatctcttatttgaaagctacatgagtcttatcttaaacgtacagaagaaaaatagtaaaaaggaacttttgtcctcacttactactactactcattactgtactaactcttctctttgtatcacgtttcattacaacattcagatatcagctaattaggatgatggtttgtctaactctatttgttgctggttttgactgcaactgggtctgaacaataagggcagttcccaaacagaacatcaaatgacctgcaagaaattggatcataattgagctttagagcacaaggattgtgtgtgtttggatatgagagcgtgagagattaaggtttccacttactgtcttgttgttgtgatagaccttaaccagtctgtgaggcagaggctatggaaagacttgttgcaactgatgttttcacatgtgtaatctgttcgtgtcccacttctagctccgagctcctcatcttagattaaagtaaatgagaagttagcgaaccatcaaagcaaattactattctgaagcattgctttttcggtttaagaaatcaccggtgggtagaaactgcgcatagcaaatcccacattcaacttgttgttgatcgtcttccacttggagacctagaggctttggaagctcagtacctagaatacattcaaggttctcaggaaatgatctttcatttgacctgtatgattatcattaacccgtcattcctgctttcaacaatccatataactccatgctatataaccaacctctcgaaagagatttaaaatgggagagtagagacaaaataattttaccatcttttgcaatttcttctccataacatatgcaagttgttcatatgcgtagctgaaggcacaggaccaataaaccgggacctgtctaagcacttataactattaaaaaatgtcgacaagtaggttattgagagtgtgtgtttgtctagaaacatactctggtagggatttagggtctttgaagtcgatatgaacaatgatgatacaatcattccctgagaaaaaaatgaaccaagtagagatagataaaagtgaatttcgtcaagacagaaataaaagagtatggagacaaatggaattgaggtaaaggtattaaaccagcatcaatccggcgaatagcagaggcacgagctggttgcttgacatcaacaacacatagagatttatcgatattgtccaagacagaccaaaattcttgaagatagtccaaatgctgttaacaacaaaaacaagctgattagtgattacaaagagagaatgtagcaaagtcttagatctaccttttggaattggtgcattacatccttcaatcttgaacttgttgaccattctagtgtaaacatatatggcacatcctacatcgaagcaaaagttaattcgctacggagaatgaaaaaagcttaaggatttgacattaacaaaccgcagaaacagaaggtggtgaattaggatagtctctgttcagttgaatttctaagttgtgagctcttcccttcttatctctgtacataatcatgatgatggcacaaagctaacatgtcacatgaagatggagctacataggttgcaaagtactaatcacattaagtaagattttgaagacaaccctaaaattatggaacttacagaatgtgaaagctaaaaaacgttaaatctccacctaatctccttattggttcccatccaatttcttctatctaagaaaccaatacaacaatggttcgttgaatatgtgagagcactcgatttcagaagaagggaagggatcgatggttaaccaaacctccgagtaaactttccggtaaaacgaagaagacttggctaattcctcgcatctttcacggcctacacattctccagaaacattcatcatctacgcagatcatcttcaacctctgaaactttctgcatctcgagtaatccgagtgctatgttttgggccgataagcccaatatttgatgaatcttattatggcgcagttaataattaggaacaagtatttgagtgaggacttcgagtgttacgttgggcctaaaagcccaatatttaatgaatcttattgaggcccagtttatataagtattaaaataacaggtatatagttatccttgtagccaaacatggatttttcaaggcggtgcactttcttacttttctttccttctttctctgtctcctagaagccacttcactgggatcgtctccatctttgatccaggttcgtcttcttcgtgaatcttcctgcttaattttttttttcagttactacttttttttggttattgttaattttctctgatggaaattctccgaaattgaaagttgttaaagccaaaatatttgggaattcaaaaacatttcgatgatctgaatgaggtcagatcgctgagaaaatatgggattataggttattttcgttttaaattttctatgttttgtatgtttgcatgatatatatatatatatatatatatatatatatatatataactaagtcgttacttgattagccatttttgacttatctactttctttttatgttgttgagtattttattgtgttgtttaatggatcattttcaggttcagagattaaacaatttgaaaaatcggagactctgggattgtatggttcgttgttactgatagattacttaagctatg

SEQ ID NO: 4037 - DNA, 3000 bp, Unknown
  misc_feature (1)..( 3000): cDNA_ID_2992487_gDNA_ID_1620680_Annot_ID_48338 3000 nt of promoter + ATG
cataggcttttgatactttcatggactcgaaaatttagggtttcagagacgaccacgttaccaccgtcatgaaaccgccagtgaccgtaacatattcacctctcgcatcttcttcttcttcacggagaagcaatcgaagagaatcaatcaactagacaaaaatcggaagaagaaacacaaaccgaggttttagaaacatggcgtctaaggtaatctctgccacaatccgcagaaccctaaccaaaccacacggcactttttcccggtgtcgctacttatcaaccgccgctgctgcgacggaggtgaattacgaggatgaatcgattatgatgaaaggagttcgaatttcaggtagacctctttacttagatatgcaagcgacgactccgattgatcctagagtattcgatgcgatgaatgcttcacagatccatgagtatgggaatcctcactcgcgaacgcatctctacggctgggaagctgagaacgccgtcgagaacgcacgaaaccaggtcgcgaaactgatcgaagcttcaccgaaggagatcgtattcgtgtccggtgcaacggaggcgaacaatatggcggtgaaaggagtgatgcacttttacaaggacacgaagaaacatgtgataactacacagactgagcataagtgtgtgcttgattcgtgtaggcatttgcagcaagaaggatttgaggtaacttatttacctgtgaaaactgatggattggttgatttagagatgttgagagaagctattaggccagacacagggctagtttctattatggctgtgaacaatgagattggtgtggttcaacctatggaggagattggtatgatttgcaaagagcataatgttccgtttcatactgatgctgctcaagctattgggaagatacctgttgatgttaagaagtggaatgttgctttgatgtctatgagtgctcacaagatctatggaccgaaaggtgttggtgctttgtatgtgaggaggaggccgagaatcaggcttgagccgttgatgaatggtggaggtcaggagaggggattgcgtagtggtacgggggctacgcagcagattgttgggttcggggctgcttgtgagttggctatgaaggagatggagtatgatgagaagtggattaaggggttacaggagaggttgctgaatggggttagagagaagcttgatggtgttgtggtgaatggttcaatggatagtcgatatgtagggaatttgaatttgtcgtttgcttatgttgaaggagagagtttgttgatgggattgaaggaagttgcagtgtctagtggaagtgcttgtactagtgcgagtttggagccttcttatgtgttgagagctttgggtgtggatgaagacatggctcacacttcgattaggtttgggattggtaggtttaccacgaaggaagagattgataaagcggtcgagcttacggttaaacaagttgagaagttgagggaaatgagcccgctttatgaaatggttaaagaaggtatcgatatcaagaacattcaatggtctcaacactgattcaacagttccactcaaactgtgcgggacaagagggaatctccagtctgtggtcagccggggtatatgagagccatactgagatgtgagtatgaacgatgatatgatcctgtgttcttactatgttctgttggtaagttatctatctatattgctttctagagagaattgcatgtgagagtttcttgtgtggttttgtaataaaacagaaacaaaggttcatttctggttagattgtgatatcctttgaaattgaatgattaatttttaggtgttgtgagcttagcttttttagctacggtaatggtgaagtttgttttgtttttcttcttatttatgaaaataaaatacaattttatgtgaatattttttttattcctcttttctcactctctaaaaatgtcggcgagtctcactaagatgttgaagtaacaaaacatgaaatgagaaatgaaattaatgttcttaccttcatgttaagttgaagtagatcataattatcccatgtgatttggtaccaaagttttttttttcagatctacgtacactcgagtcgacctttgctatgaactcaaatatgatccaataaaattttatattcttctgtgttttttttttttgtattcaaatttggatagaaacaagtatttagtaggtcgtaggtgccataggtggcccttgggaaacatccaatggatacaaacctcatattataaattctctatgccaaaataattaggaccataggttatgttatgtacctcaaccatcctttgattgagacattaaattccttcacgtttgtaaaccacactttcgtatacattttcttccctaacacttcttggcactgtttcttttattaatttgatttttgaaacatatgtcaaaagaaaagaaaagaatcgaaacatttaattaattaatgtttgtaattgcacgttgtacattcattacttttataaagagactgatcaaatgatgattgataatccttttagtgtatattaggcgtgtcaatggtgtatatattatatagtgtctatatgtcataagaaacgtcataaattttatcaaaggaacaacaatttaagtctgattaatctataattctcatccttacattttcattggcatcaaatttaggtaatttttagaatatagcttaataaatgagtaggccaagaggacggctcgcaattagctgtgtggaaagctaaacgatgtctcctaccgtccacgtcagcgtcttaaatcctcaaatcccattggcaacaaaaaaaacattgtgtatataaatacatgcatacttatcactctctactcacttttacaactaactcataagtaaaacacagacagtttttagatggctaagatatattccccttcttttcccggtactctctgtctttgcatttttactctcttgacgctaatg

SEQ ID NO: 4038 - DNA, 3000 bp, Unknown
  misc_feature (1)..( 3000): cDNA_ID_1822756_gDNA_ID_1620680_Annot_ID_48340 3000 nt of promoter + ATG
catgttcaaagtgggtttcttctaatccaatttgaattttagttcttatattattcccctctaaccctaatcatatgtttctcaaacttttgatttttattcaagattcctcctaatcagttatttcttctttgtatgtagatgtagttgcaacttcagagcttttctcatctgtggtgtcgtagcgtgagagagacggatttgcagtcattgaaactctttggacattacaaagcccaataaagatggacaaatgacaagcccatttttaaattttgtctgactctcgcctatcctacatgaattctacagagacaatgcatcatcccattcggctaggtcaattttcatccctatcttgtttataatctataatcttatagataggttacttacaaaaaaggtctttaatactacttttgatttttcaaaacataatatatttctcaaagtttttgatttttaaaggtttttaactctctttatttttctatttttttcttctataaatattaaattaatatgacgttgtgaaatctaaccggattttggatcctgccatgtaaccatggtcattagcgattccacaaatccaacatgttttttcacatcttcatgtatatttagcattttttttttttttttttttttttaaaaagttttcaactcttttgttttttttaaaggttctataaatactaaattcatatgagattcaatatttagaatataaatactaaactaatacatgtggatacccaatacaaatataaacctaacagtattagttatatactaaactaatatatatatatatatttgtaatacctcaagaacctaaaattaaaataataaatccgaatatacagcggcggatccacgttatgggtgatgggggcaactgccaccagtaaaatataaataatttacgttttttaataatacagagtaagtaaagtaacagaatggtatgaaatgctcccactaaaagcaagaagtatcgggttcaaacccatttaaagacattttgcccccattaaatatttctgctgagtccgcccctgcgaatatactagattttgttttttagtaattcatataaattggatatatttgggataaaagtagccaatgttatagttttcttttaggtaatttgagtattttggttatatttgggtaaagagtagtaaccaatgtatttttgggtaatcggatatttcgattagatttagtatatatggtactctttccgtttcacaatataagttgttttagctaaaagcacgcagattaagaatatttatttttaaaaagtttaaccaatcataaaagacactgcataatagaaataattataaaacattaaaataatatataatagaaatttgaaaacaacttatattgtgaaacaaaaaatttggtccaaaataacttatattatgaaacggaagaagtatattatattctctcatccattttaaaaataaaatttgaggattttaaacaaacttgttccccctttttatggagtacttcttataatagtggctaattataagagtctaaaaacgaatttttatatgaatttagaaaaattaggatggggtttttgggaaagataaaatgttgcctataacagtacatatttaatcagacagaagtgtcttcacggcgacgaagagtgtcttccggcaattgcatactccaacgcaaacaaaaaatgaaaataaagcaaatgtcattcccgttaaataatacgtgaatgtcattcccgttgaatgctaattaaagtagagaagcctcaaaatccgatgagtcatacgtgaatgtggttctagtgtctccccaaatggcttccttccatttaattccgaagttaacttttacacttgccatcaaactttagtaatgaagaaaacattgatacaacaaaactgcgagtgtaaaaagtctcatttcactgttaaattattaattttaagagtagacattaactgcgcctaactgatgactaaagaagagttgatcaaacaaagtctacacattacctaacattctctgttctaactaaatacatccatttaagagacacttaccaacctcctactcaaagctactctaactgttgttcaattaaccatcaacataactgcaggagtaattgattaaacaacaatgaactctgacttcatcaaaaacatcgaaagactctgaagtcaagcatgttgtttttatatgtcaaccgcaaacctatgcattaaacaaccaatagaagccaaaaaaacgtacagaatctaggagaatgcaactatgattatgaaaattcacgcacactaataccactagcttacaattagagagtgaaacgttacaatacgtccacgcaaaatacgtcttattattatgataacgtacattaatattcatgttttctgtttgtgctctgcattttgcttatctgtgctaggtgaaaacaaaaaaaagaagagatttggacattttaacacacgctttgctcgcacttcacttttttcacaatcatactgttattttccttcctcttataatgaaaacttaccgataagcaaatttgtaccaaacgtatgaacgaatgatctttctagattagtcgattttaccatacattaattaaattattaggttcatctacccaactacaaaaaaagggagataacgttggcgttttcaaaaaagagtgaacactaataaaagttttctagattccttttctcaacttttctttaagctaaaagactccaaacaaacacttaagaaagaaactgtcactcaaacttaaacctacttcccatgtgaatcaaaagaaagcaaaaaaaaccagcaaatccgtccatctttaaataacaatctcaaactctttaaacgttactcaacttttttcttcttttcaaaaacccattctatgaacacaatctcacctccttcatcgtgtttcatacctctcttcccaacacgatg

SEQ ID NO: 4039 - DNA, 3000 bp, Unknown; identical to SEQ ID NO: 4038
  misc_feature (1)..( 3000): cDNA_ID_1822756_gDNA_ID_1620680_Annot_ID_164408 3000 nt of promoter + ATG

SEQ ID NO: 4040 - DNA, 3000 bp, Unknown
  misc_feature (1)..( 3000): cDNA_ID_2992487_gDNA_ID_1620680_Annot_ID_164406 3000 nt of promoter + ATG
taaagaaaaaaataaaaatagtattgggcaacttataggcccattatgtatattaacaggccagtttctcataggcttttgatactttcatggactcgaaaatttagggtttcagagacgaccacgttaccaccgtcatgaaaccgccagtgaccgtaacatattcacctctcgcatcttcttcttcttcacggagaagcaatcgaagagaatcaatcaactagacaaaaatcggaagaagaaacacaaaccgaggttttagaaacatggcgtctaaggtaatctctgccacaatccgcagaaccctaaccaaaccacacggcactttttcccggtgtcgctacttatcaaccgccgctgctgcgacggaggtgaattacgaggatgaatcgattatgatgaaaggagttcgaatttcaggtagacctctttacttagatatgcaagcgacgactccgattgatcctagagtattcgatgcgatgaatgcttcacagatccatgagtatgggaatcctcactcgcgaacgcatctctacggctgggaagctgagaacgccgtcgagaacgcacgaaaccaggtcgcgaaactgatcgaagcttcaccgaaggagatcgtattcgtgtccggtgcaacggaggcgaacaatatggcggtgaaaggagtgatgcacttttacaaggacacgaagaaacatgtgataactacacagactgagcataagtgtgtgcttgattcgtgtaggcatttgcagcaagaaggatttgaggtaacttatttacctgtgaaaactgatggattggttgatttagagatgttgagagaagctattaggccagacacagggctagtttctattatggctgtgaacaatgagattggtgtggttcaacctatggaggagattggtatgatttgcaaagagcataatgttccgtttcatactgatgctgctcaagctattgggaagatacctgttgatgttaagaagtggaatgttgctttgatgtctatgagtgctcacaagatctatggaccgaaaggtgttggtgctttgtatgtgaggaggaggccgagaatcaggcttgagccgttgatgaatggtggaggtcaggagaggggattgcgtagtggtacgggggctacgcagcagattgttgggttcggggctgcttgtgagttggctatgaaggagatggagtatgatgagaagtggattaaggggttacaggagaggttgctgaatggggttagagagaagcttgatggtgttgtggtgaatggttcaatggatagtcgatatgtagggaatttgaatttgtcgtttgcttatgttgaaggagagagtttgttgatgggattgaaggaagttgcagtgtctagtggaagtgcttgtactagtgcgagtttggagccttcttatgtgttgagagctttgggtgtggatgaagacatggctcacacttcgattaggtttgggattggtaggtttaccacgaaggaagagattgataaagcggtcgagcttacggttaaacaagttgagaagttgagggaaatgagcccgctttatgaaatggttaaagaaggtatcgatatcaagaacattcaatggtctcaacactgattcaacagttccactcaaactgtgcgggacaagagggaatctccagtctgtggtcagccggggtatatgagagccatactgagatgtgagtatgaacgatgatatgatcctgtgttcttactatgttctgttggtaagttatctatctatattgctttctagagagaattgcatgtgagagtttcttgtgtggttttgtaataaaacagaaacaaaggttcatttctggttagattgtgatatcctttgaaattgaatgattaatttttaggtgttgtgagcttagcttttttagctacggtaatggtgaagtttgttttgtttttcttcttatttatgaaaataaaatacaattttatgtgaatattttttttattcctcttttctcactctctaaaaatgtcggcgagtctcactaagatgttgaagtaacaaaacatgaaatgagaaatgaaattaatgttcttaccttcatgttaagttgaagtagatcataattatcccatgtgatttggtaccaaagttttttttttcagatctacgtacactcgagtcgacctttgctatgaactcaaatatgatccaataaaattttatattcttctgtgttttttttttttgtattcaaatttggatagaaacaagtatttagtaggtcgtaggtgccataggtggcccttgggaaacatccaatggatacaaacctcatattataaattctctatgccaaaataattaggaccataggttatgttatgtacctcaaccatcctttgattgagacattaaattccttcacgtttgtaaaccacactttcgtatacattttcttccctaacacttcttggcactgtttcttttattaatttgatttttgaaacatatgtcaaaagaaaagaaaagaatcgaaacatttaattaattaatgtttgtaattgcacgttgtacattcattacttttataaagagactgatcaaatgatgattgataatccttttagtgtatattaggcgtgtcaatggtgtatatattatatagtgtctatatgtcataagaaacgtcataaattttatcaaaggaacaacaatttaagtctgattaatctataattctcatccttacattttcattggcatcaaatttaggtaatttttagaatatagcttaataaatgagtaggccaagaggacggctcgcaattagctgtgtggaaagctaaacgatgtctcctaccgtccacgtcagcgtcttaaatcctcaaatcccattggcaacaaaaaaaacattgtgtatataaatacatgcatacttatcactctctactcacttttacaactaactcataagtaaaacacagacagtttttagatg

SEQ ID NO: 4041 - DNA, 3000 bp, Unknown
  misc_feature (1)..( 3000): cDNA_ID_2045658_gDNA_ID_1620680_Annot_ID_164405 3000 nt of promoter + ATG
ttagccgaacatggttcccttccacaaccagtgtagcaaaagcaagtgcttctccaagtccccagtcaatgccttctcccgattcaatcatttgagcacgttgttcataaactcttttaactcctctgtgtggcttaaagttctcagggaaggttgagattgcctttcccacattcttcaaaatctctggcttcactctgcaaaagaacaagggaatagttttccagcaaaatgttacattgaaaaagaaaagaaaaaaggccaaaaggcattgacaaactaaatgaaataaaaatgttttttacccggtgtttcgaatcctagaaatctgctccggagacttgaatccagtccagtgacttgccagccagtcacgtttttgtggaatataatctttacttgcctcatattcttcattgaggatagagcttactttcttttgaatcttatcaatatcttcttgggttacctgtccagattgcaagagcttctcctggtagatttgaagtgacgagggatgactgcgtatcacctatcaccaacaagtaacatccgtttttaaacaaaaaaaaagtacaagaaaagtatgaaatggaaacttgaattggttattagattatttcacagagatggatgatataatagccagaccttgtacatttttggttgtgtgaatgacggttcgtctatctcgttatgcccaaagcgacggtagcatactaaatcaacaacaacatcagaatggaacgtctggcgccactcagcagcaagctcacaagcatgcactactgcttcaatgtcatctgcattgacatggaaaattggggcgctcaaagcctttgcaacatcagtgcaatactgtgaagaccttccttccctgggatcggttgtgaaagccacttgattattcaccacaatgtgcactgttccaccggtacagtagttaggaagtgcactaagatggagagtttcatacaccactccttgtccggcaaagctaccatccccatggatcaaaatacccatgttctttgttctgttctcgtctttcgtgtaatattgtttcgctctggttttacctatcacaacaggatctactgcttccaagtgactgggatttgctaccaaagacaagtggagatgtttgcctcctctagttggacgatcataagatgtacccaagtggtatttcacatcacctgttccggtgtaaagcccaacttcatctactggcctagtaccaccgctaaactcgctgaatatttggcgtagaggttttctaacaacattacccaaaacattaagtcgacccctatggggcataccgataactatgttctctaccccgagatctgcagacctatcgaacatctccttcatgccaggaatcaaagattcagcaccttccagtccaaaccttttagccgtggtccacttagtagccaagaaattctcaaactgtgtgctccaggtaagcctatcataaataaccatccgacgctcactattgtactgtcgaggagttggggtctcgatcttgtctctcaaccagttacatttatccctatcagcaatgtgcatgtactcataccctatagtcccacagtaagcttgctcaagcctcgacagtatcgacctcagtgtttgaaccgggcggttctcagagagaaaacccgacatcctccatacacccagaaagaattcccgatcaagatcagcctcagtaaacccataaagacctggcgtgagatcctctggaatctctctcttctctagacctaaaggatcaagcttggccttcatgtggccattaacctggtaagctctaactagcaacaacaaacgcatgctttcttgaatggtttgccccgagataccaggcgatgtagaagcctgacccacaaaattcctaaaaaagttatcccacgactcatcaacactgttgggatcagcctcccaagctctttgtaactcctctagatacacactgcttgttccatctaagaagctatcagttagcttagaaagtgggacaggacgtggaacaggtgcagcagactctgcctttgatttgagtattgtagagtgaaaacatctggtttgacaaggcaaaacccttgttctagtggcatatgaaccacaacgagactgagacagtgtccttcttatggcaagctttgccacagaagaaccgattctaaaccaaaccatagcttaagtaatctatcagtaacaacgaaccatacaatcccagagtctccgatttttcaaattgtttaatctctgaacctgaaaatgatccattaaacaacacaataaaatactcaacaacataaaaagaaagtagataagtcaaaaatggctaatcaagtaacgacttagttatatatatatatatatatatatatatatatatatatatcatgcaaacatacaaaacatagaaaatttaaaacgaaaataacctataatcccatattttctcagcgatctgacctcattcagatcatcgaaatgtttttgaattcccaaatattttggctttaacaactttcaatttcggagaatttccatcagagaaaattaacaataaccaaaaaaaagtagtaactgaaaaaaaaaattaagcaggaagattcacgaagaagacgaacctggatcaaagatggagacgatcccagtgaagtggcttctaggagacagagaaagaaggaaagaaaagtaagaaagtgcaccgccttgaaaaatccatgtttggctacaaggataactatatacctgttattttaatacttatataaactgggcctcaataagattcattaaatattgggcttttaggcccaacgtaacactcgaagtcctcactcaaatacttgttcctaattattaactgcgccataataagattcatcaaatattgggcttatcggcccaaaacatagcactcggattactcgagatgcagaaagtttcagaggttgaagatgatctgcgtag

SEQ ID NO: 4042 - DNA, 3000 bp, Unknown; identical to SEQ ID NO: 4035
  misc_feature (1)..( 3000): cDNA_ID_2050510_gDNA_ID_1620680_Annot_ID_164403 3000 nt of promoter + ATG

SEQ ID NO: 4043 - DNA, 3000 bp, Unknown; identical to SEQ ID NO: 4033
  misc_feature (1)..( 3000): cDNA_ID_1822768_gDNA_ID_1620680_Annot_ID_164399 3000 nt of promoter + ATG

SEQ ID NO: 4044 - DNA, 3000 bp, Unknown; identical to SEQ ID NO: 4032
  misc_feature (1)..( 3000): cDNA_ID_1822772_gDNA_ID_1620680_Annot_ID_164396 3000 nt of promoter + ATG

SEQ ID NO: 4045 - DNA, 3000 bp, Unknown
  misc_feature (1)..( 3000): cDNA_ID_3072382_gDNA_ID_1620680_Annot_ID_164390 3000 nt of promoter + ATG
tgacagaacataactacatttcaaactccaaacttacgaaaacacacaagttttttctggaatctttcaagttttatttgatgtttcggaagaactaaattggggttttatctagtggtagacaaaaaggaaaaagatgagtacattttattgggcaatgtgttaactaataaagtttctagatataggcccatagaaaaaccaacttatataaactgtaagcccataaaggcccaaataaaccctaattttaaatccaccgacacatgtataaatgccaagccgtttcatatacgtctccactctgcaactcaggtaaaagactcttgctcctattatctcatgttccattgtttgttgatttcaatttgaaatattagtttctttcttcttcccttcattccttcaacttttataccattttcctgttatctattgatttgaaagttttaatttttaagaggcggtgatgacaaaaaacatttctcgatgctgaaacttactcgagagaccaaatcactcttgtaatctttcgtgatgcttgtttttatgcgtgtctgagcctaaaccaaaaaatctttcatttatgctttgattatcatagatcccaatttatgcgtttcttttattgcttttcaatttgtaatgcgagttttgctttattttgtccagccatggaagaagcagatcagttatgtttagctgctaaatccggcgacttgaaaaaggttcaaactttaatttactccggcgccgacgttactcactttgataacgacggtttaacgccgttaatgcacgccgctaaaatcggaaacgcagagatagtaacggcgttactcgaatccggagctccatggaacgcattatctccatcaaatctctcagcaggagatttcgccatggaagcaggacatcaagaaactttcgatcttcttctcaaaaccgggatccaatcagagctaatcttaggaacaatcgcaagaaaccaaacaaagaacgaatattctaatcaagaatatcttcaagacagagttagtttcagtgaagacaagttaatggatagtgaaagcaaaggtgtgatgatggcttgggaaaaaccattaatggaagctcacgctaaagctatttgtctcaacggtggtcacattcttaacgttggtttcggtatgggacttgtcgatacagcgattcaacgatacaatccggttaaacacacgatcattgaagctcatcctgaagtttataagcgtatgattgaatctggttggggagagaaagagaatgtgaagattgtttttggaagatggcaagatgttcttgataagcttgatgataattcttttgatgggatcttttttgatacttatggtgagtattatgaagatttaagagagtttcatcagcatcttccgaggctgttgaagcctgatggtgtttattcgtatttcaatgggttttgtggaagcaacgcgttttttcatgttgtgtattgcaatttggtgactttggagattgagaatttagggtttagcactcagttgattccattgccggttaaggattgtcttggggatgaagtttgggaaggtgtcaagcaaaagtattggcagcttgatacttattatctccctgtttgtcagtttagtgactgaagaagttttatgataccagcaattttgcgatattgtaatttttcttactcataaaaagtagattttttatccatttgaaaatagtcatagtcatccaataagaagaaaagaacagtaataagtgtataacataagatcccatagtcatgtgataggaaccaagagccagactaattctgttacaaatatcttaagaaacaaaagtactaattaaaacatgttatgcagaagcttcacgttttctacatggtctaaatatgtgaagactaagtgaccctgaaacgcttccattccttgtattgcaacgctcatcatcgtctttctctcaatattgaagtagtagacgtcgaaaggcactgtttgatagcacggcgacaacataatctcatttgtacgagtcactccaacaaagcgtaaattcagggttccaatcctatgctgccaccaagcgggtaatacgtacgtatgcttcgaccattccttcttttcagcatcttgtagaacccacaactcaatactcttactacgtccatcaacaaagcaatatctttcagaaacaagtgaagctaatttaccattgtagtttataagagttccatcatgcgctgctttaatgaactcttccatgactgtaataaatctaaacttctctgacctaacatcgaagcaaacgataatgtaatcccctgaagacaaattgatcgctggataatacaacacaccattgatgcatatctcagacattccaagaatgtgaggcatggaacattcgatgattctccatgacagttctccagttcctagtgtcagaacttgatgctcatcacttttatatgacaacaataccttgaactgtttctgaatcggttcatacacgaaaaatcttgacggcccaatactcgtcttcattggtttaggtaagcttaaggtatgtccagtgctgggattacatatcactgtcactgtttcgttcatttccttgcgtttaaaacagatcaagccattgacaggacgcgaaattttatagcataaggagaaattctttagagaaatggcggacgagttctcatatggattttgaagctgaggagacgagaagaagaacaagttaccatcttttttgcagcagaataagagttgcggtcgatgcaaagatcgggtcaagaacagctctgtgaaatcttgacggcaaattacggagatccagagtttcgacacgcaacgacatgtcgctatagattttgccggtaatctcaggagtatctcgatgatgatatcaactgggatctggactgacttttctgttttattcggtgaggtcttcttctccgttctacgccgggag

SEQ ID NO: 4046 - DNA, 3000 bp, Unknown; identical to SEQ ID NO: 4031
  misc_feature (1)..( 3000): cDNA_ID_1822786_gDNA_ID_1620680_Annot_ID_164389 3000 nt of promoter + ATG

SEQ ID NO: 4047 - DNA, 3000 bp, Unknown
  misc_feature (1)..( 3000): cDNA_ID_3072369_gDNA_ID_1620680_Annot_ID_164418 3000 nt of promoter + ATG
gcgtctcattcggatgatagtttaaggagtttggaggttgagctaaatgaacttagccggattaaaccgagaaatagtatattaaaccgaactgaagataaaccggagcagcttacccctacttcggcttggagagccgccgagaaattagctaaagtggctattatgaggaagcatttaaatcgagtcagcgatatgcacggcttggaaaacgccagattttaattttaatttccctttttttcgaaaattcgatttcaatgatttttgaatatataatggtacataatttatataaggaggataagcaataatttagtaaggtataaataatagaagtatgattattcagaaaaagacccacataggtgcatgatagcgacaagcagtagccgacgggtgtggccttttgtattgcagagagattgagaccctacattagaaggaattaattggtcttttagcatttttatcttcttcttcctttttgtaatcttcaaaaactccaaattaatgactgaatagttaaaaaaagttgtagatcaaataaatgaagtctgctttttttgtgtactatatagaattaaaagttgaggtatagtggattagagagtgtgcttgtaatgctggacttcaaaatcaaaagttaagtttatattatcatatgccgtttaacttaagaggatctataatatattatatctttccaaatgaatgatcatgattagtcatgtgatcatcattatagcctattttgttatagaaggcaccgggtttgaatgatttgaatagtgcgtggggattgtctttgttggttgttggtgaatggtttggtgggtgcaccgtggtagaaaccaggtcatgcgccgttgcaaagctttcttctcgcttaaattcattcattttatatcattaagacatttactaattatatgtagctagcgccaagttgcaatttgttttgaatgcaatgattttgtatacttttaaaatggatgaaatgattaactattgtcaaaggtccacttctcgatgtgattcactaaaatgatcagtggcagaagaatctcgaactatatatatggtcaaatcataactaaaaaaactaagctattattttttcacaaaaaaaaaaactaagctatcattcatcacgcagttacatattgcatatggacaatgttaatgtcaactaatgaaagggaaagaatctcgaactatatatggtcaaacggtttgacgcaccatacttaaaaaaatactaatcaaggtgcattacattcattgatgttacaattacttgtactaatgaactctgtgaaaatcagaataacccggtataacacactatttggagttataatggctgatccaacttttgggagattttgtcacagttgggctacagtttgtgcaatcggcaactgtaaagcccattgagaattccaaaaataatgtaaaccaattaataaagcatttacctttggcgcctgggacgaaaataagataccgaaaacaacctttactctacaaacataggtccatgtaaaataggcttaggcccaaataatgtaactctaaaacaaatctatgaatctattaatcaccaaagttatcttttacataatgtaatgggttatttaaggagagatttaataatttcgaaaatgtttggtcaactccgaaaaggtgaacgtgttaattaaaaagtcctggtactgcggcagagagagagattagcccatatgacgtggttgtgatgtgtccgaaagctgtcaacattgaaaatcaacggtccagatcagtatactgacacttggctttgtaaatttgttaattttcttctctggtcaaaagtgaaagtgttaattataattaaattttatctagttttcaagtaaccatccatttagtacagccaagattggattatctttaagtttttaagttattctaacagtctttattgatgactttgtatttgcaagagttgcaaccaccaatatcttctattacatatttacatcaaattcagagtatatgtcatccatacaaaataatacattatcgtaataaccacacaaactccgttaatccatttgttttcattggcggtggactattttaaagaagaaaaatatatttatttttttgtcagaaagtaaaatattataatggtgttgaaactgttaacaccattataatatatatataaaatctaagtcaaactactgtggggaaatttgattaggaaaacaaaaaacgtgctttaaaaactatgtttgtacgctgtacggataagatatttggaaacgacacactatatttataatccaaacatattttaaaagaattaccggactgtattagttgaaatgttattggaactgtttcttaattacatatattaaaagtattaccggactgtataatctgtattatttgaaatgttattggaattgtttcttaattacaaacgtgaagacatgaatacgacgacaagtattatacaaagttatccacacccatgtgcacgtaaagtatgcttaataagatttccaaatctatctataatcaacgtaatgtctagtcacctaattatcacaatagtggacaaatagttgcattatctacaaaatcaagattatactctctatatgagtataacgtgagtgtcatcatttaattatagaaaaaacacgattatgcaggctaattaaaacgcgttaattactgagtcaatgaacctataaaaccggcttatgctacccctcccaatctcatcacaaccattagtctctctttcagacaattttggttctttttcttttgtatttatacattcttaatcttctacaaaacaaaagaagaaagacacatttcggtactaacattgttcttcatacctctctttaaattcatatacgtgtatatactttgtttatacgtgtgtttgtgttaattgtgttgtttaatcttaatcccaagttagtagaaatg

SEQ ID NO: 4048 - DNA, 3000 bp, Unknown
  misc_feature (1)..( 3000): cDNA_ID_2050499_gDNA_ID_1620680_Annot_ID_164416 3000 nt of promoter + ATG
atgttctgaacattatatttattaccactcgtaagtcactttccatttgcaggatttacttatacctaatggtgtcagattgagtttgtgtctcttttacaacagtatcgcaccttctacatccaatagacaactaatgaaagctagaatcaatcaaaacagatttacactagaaagaaaaggatgataccacattgaaaaattgatgaatgtatgaacaggatggtaacaatttaacttagaatcgaaattttggtatgaaatcctctgaagtctgaagagttttaggtttagttgaaaattagagtactgtagtagtttgagatcctctagacgaagcagaaggttccatcaaattctatttgtttcgcgggccaacccgcaagcccgatattttatggacatatgtagagttcaagcccgccctgtgatgatgcttattggggcaagctggtgggtttgtgggccgcttgacaaaagaacattaaaaaaagacaaatttgatggacaatcatgattgttgtggttagtatacatacttttgaggatcggatcatgcaatgagtgaattcttcactttaattaaactcatcagattctctcacagtaacaactaacaaacaaaggaaacaaactcatgaaaagccatccaaggaaaaaaggaaatctttatgtgaccgttaagtgtttcttgtcaaatattatgtgaccgttaagtttatcttgtcaaatattatgtgattgtgaccgttgttaattgtgattagcaatttccttgtttcttttgaacctctttgctccccttataaataaatagatgagagacgctctcacgcagtctcaacaacgcttcttctaattcttccttgagagacaaatcaaaactctctctatttctttctttctcatcttcttccttcagagacaaatcaaaactctctctttatacataaactctgtggattccgatcgatgatgatgatccaagtagaagccgacgacgatgatccaagcaaaagccgatgcaacatccgtaagatttcagactgatcggagccgaaattaaagcatatcatcgtttcatagattgaatgataatctccttcaatccacggccgtcgtctaccgtccaaaacaaaatagatttcagttcaccggataatgatctagccaccgagatgctttcaccggagacaacgaggaactaagaggatggcgaaagaaaacacgaagacgctctcgtttgtggtttcaagtttcagaacaagcacgagtcgccgcctgagtatatcacgacttttaggtatattactttactaccctttttcttttttaataaagattatgattttgattttaaaaagaaaaaaaagattttatgtttttccgttctgatttttctgatttaaaactaatcacaaggttttcacaaatatttttttaaataaattgttttaatttttgtttttaatagattttttagtgttaaattttaaatatgtgtaaactattagatacattatcccgtccataatatgaggtctttaagaggtgttttaggtttaatatgttttgcacatataaatttttaacacttattctttttatttaaaattgtttttaaatttgtattttatgcactatttaatttttgttttgatttttaagtaatattttagataaaatgttttattttttaaaatatacataatatttttgtttttaagtgttaaattttaaatatgtgtaaactaattggacacaacatcccgtccatagtatgaggtcttttagaggtgttctaggttcaatatgttttacacatataaatttttaacacttatgtttttatttaaaaattaaattactactattttaaggttttcgattttttaactaatattttagataaaaatattttttatttttaaatatataatatttttgcttttaaatgttaaaatttaaatatgtgtaaactagttggacataacatcttgtccatagtaagaggtacttaagaggtgttctaggttcaataaattttatacatatataaattttaacacttatgattttatttaaaaatatatatattttttttaataccactattttaaggtttttgatttttaaagtaatattttaaatatatattatatttatgtttttaagtattaaaatttaaatactgtatgtgtaaactaattggacataacatcccgtcgatagtatgaggtccttaagaggtgttttaggttcaacatgttttacacataaataaatattgtaacacttatatttttattgatttgttttttaaaaatttgtatatttttaatacacattgtgttctaggttcatagtaaaaggtgattaaaaggtgttctaggttcaacatgttttacacatataaattttaaacacttataattttatttaaacatattttaaaatttatattttataccactattttaaggtttttgattttttaagtaaaattttatatttttaaatatataatattttaaaacaaaaatattaaaatttaaatatatgtaaactagttgaacataatattcggttcatagtatgaggtctttaaacacttaagaaaattaacttactatgttttttttatgtatttttgggttacttttatttaataaattatggggtcttccctctctcgaccaaaaaaaaaaaacattgtaaggtgagttttgagagtaacaataatattggggtatatttttaaaaatattgtagtggtaaataccgaatttccatatagtttctgtgtggcttatatttgtccttttatagggtgcaattttagagtaaagatagtatctaggtttaatgttaaagattctaataatgatggggcgttttcgtgttttctatttatttaagctccatttattattaccggctgttttctattttgtcgttcccggtaaattttgccggcgaagattgaaacttttccaaacg

SEQ ID NO: 4049 - DNA, 3000 bp, Unknown
  misc_feature (1)..( 3000): cDNA_ID_1822752_gDNA_ID_1620680_Annot_ID_164412 3000 nt of promoter + ATG
acttacgagtggtaataaatataatgttcagaacatgtttcctctctaattctctctgttttcccaatatttaaaatacagtttcgcaagtattgaaagtgttttaaaaagtgatcatacatagtaagagtaactcgtagagagagataagttatgggaactgactgtatcaaattagttggaccatgttttatgtccgtgatggtcggactcagaaacagagtggtgatgtgaagatgacatgtttatggtcccattttcacttttattgggtcgtgtttcacctttcaaatgaaccactagaaaattgaagcaacttttttttttcaaaccaaaggaaaaaagatgactttgttaagacctttgtcttggttttttttgcttcatcaagcgtcgctttcgcaacatgttctctctattattacatgatttcaaaacaagcaaaacatatcactgcctaattcttaactttgtgcttcagtctttccataaataatagttaactttcaaattcctaaatgtactaaaatcaactatggttgttgagctttattattcttccgtttaatcttggttcgaaagaaaaaagatatggtataatcattccattcatatacgtattactaatcatagttatctttttggtgagtaaagagatttgaatcaagattgtgtgttggtaataagaatccttatagagatgtgcatttaaggagacagaaaggaacacagcacgagacgatgcggttagagaataaacaaaacaaaaagaaacttggtaatggatacaacgtgattccatcgttaaacaactttgcttttggctttggattcttctctattttaactcttaacccaatgttatctcattatccttcatctcaatctatttttctatttacttaaatttgagttttcaagacactttttaaaaaaatgaaaaagggttagaaatagagaagagagtaagaaagaagtgtaaaatcaaataaacgaatctcattaagcacctacttcccacatctttcttaaagtttcttacataaagctcccttcacacgtgcttaccaaatcagattgtcaataattcttgctcaataatttttcgaaatttatttgaatttatctaataaaaatacattgtttgagtatgatattttgcttaagaaggttgattattctccctatcaaagtctaaaaagaagattacaaaacaattgtatggttaaattcatataaatttgtgactagtattttaatatttacatatatacaaatacttatagatgaaacgagaatgcagaaatgattatagatagatcagtgacagtgaactgtagcaaccggcaaagaaacctcgttagctggacacacgattacgatcatgcccccagtctcctctgtccagacggctgcattaataacaacgagctagagggtgttttcgtcttttcgatacttatcccaaaaccgacaatctctggtttggactcgaaggctgatttggtcaattcatagcaaccgaacgagcagtccattcaagtccaaagagctccttagtggtaaaagatgtaattacgtagatgttccatggtcaagaatgtattcagtcaaaataaatatttgaccaaaactttcggttaatttcctaccaccagcaaaattataactttttctaataattatcaatcattttcaatctcttttaattttctttttcacttttttttattaattaaagtcaattcacactatacaaaaagaaggaagtctaaatatttttttactttcatgttgcttttctaacttttatattttgctcttctcaacagattttgctggtttttgtattagaaatattattatgtttccagaaatgaattttttatatgtcgtctggattcgtatatatatattggaaagtgaaattaattcatttgatttttttctttgatatatcgaccaaatcaaataaatacgaccccattgtggcattgttaatgcaaaaaggcacaagtacaaaaaaaacataataattcactattttatttacagacacatgggcccaattcatacggcccaattaccataaacctctcttttaaagagtgggttccacagtggtaaactttttgactatccattggaatgattgcatctggaccgttcatctacattaattattgggttttttcgctttaaagcatcaattaacttattacgtataggattagattaccaataacgatctttttagcttttgtcgttttccgataaaaccatacgattaagaatatgacctcttgtatcttttgagggattttagttaatctttctacatttattttgttggatgctcatacaattatcctgtgtctctcaaaataaaacaaaaattactctatttattagtacattacacatgattatttagaaaatgtatattgtggtcatatgaaatgagaaattaaaggaaatttgtcaatacttgagaacatcaccattcaaatgtttcaagaacaacatgactccaaaacaaaataaatgaacctttccctaataatagtatattctccatcgtacaaagttctaaataatacaatattcatttcgtcaaagcatatgatgtgttggaatcagaattatctgcaaatgtttgaatttcaaatgttagtatcaggctatttttactgttttatcaaatatcgtttcttctgcaatctatcacttgattgttttatcaaatcagcactagtattattgattttgtaatttgtgtttgtctacctccaattactttttagtgttatgattagtaatgtaataaaatcacaaatctgacgtggcacctatatacaattccaaaaacaagtggaacgaatataaaacaaattcacaccttcctcatcttcttcttcgtcttcacttaccttctctctacactcacaccatctcacaaccctaatctctcccacacaagagagatagagagaaacaatg

SEQ ID NO: 4050 - DNA, 3000 bp, Unknown
  misc_feature (1)..( 3000): cDNA_ID_3072397_gDNA_ID_1620680_Annot_ID_164381 3000 nt of promoter + ATG
acaaattcatttacttttttgttctgttccgagatttcaaggttcactatcgattctgaaactcttggaacaatccagattcttggttagcaggtggggaagcattaatcatgtatttatgatacactgctccattattattacgagagagttgaaagtttcctttttgactcgtttttaaaggcaaggaagaagaaagactttgtttttaaaatgccaatgtttcagccttctaagaacggtgggtttgatgggcatatcttagatctacactcggcggttaaagacggtgttcttggcggcggagatgggaaatttctggtggttgttaccgatgagaagaagaaattggatttgaaggagatgatttctgagctggaattacctgaaataccctctgttttcatctgtcctatctctctagagccgatgcaagatccagtgaccttgtgtactggtcaaacctacgagaggtccaacattctcaaatggttcaatatagggcattgtacttgcccaacgacgatgcaagagctttgggatgatttggtcactcctaacaagactcttcaccaattgatctacacttggttttcacagaagtatgttttgatgaagaaacgatctgaagatgtgcaaggacgtgctattgagattctgggtacgttgagaaaggctaaagggaaagcaaaggttcatgctttaagcgagcttaagcaagttgtgatggctcacgctattgctaagaagactgttgttgatgaaggtggagtctttgtgatctcttctcttttaagtccttttacttctcacgctgttggatctgaggctatagctattcttgttaatcttgagcttgactctgattccaaagctggattgatgcaaccagctagggtctcgttgatggttgatatgttgaatgatggttcgattgaaactaagatcaattgtgctagattgattggaaggttggtggaggagaaaggttttagagcagagcttgtttctagtcatagtttgcttgttggattaatgagattggttaaagataggagacgaagaaacggcgtttcgcctgcgttaacgctgctcaaatcggtttctgttcataaacaagttaggaacttgttggttaggattggtgcagttcctcaattggttgatgttttgccatgtttggatgtggagtgtttagagtcagctcttttcgtgttggattcgttatgtttagaaagcgaaggcagaattgctttgaaagattcggttaacacgattccgcataccgttaggttactgatgaaggtatcagagaaatgcacaaactatgcgatatcgattctttggtcagtttgcaaattagcttctgaagaatgttcatctcttgctgttgaagttggtttggctgcaaagcttttgcttgtgatacaaagtggatgtgatccagctttgaagcaacgttcagctgagctattgaagttatgtagtctacattattcagactcaatgtttatctccaaatgtaaactcacaagaactatccaataaaagactgatcaagttttcacctttcgggtcaaaatcacacaacggatctgccccatcttgttgatgtatatagaaatgaagaagctcaaggagtatgagagtaagaaacgagtttcgatgtgttgaattctattttgcaatgttatttgaataataatagttaagtagaagtaaactgtataaatctttttgttgtggttggttcattattcagtagaagaatagattgaagaaaggaatcatttttttggcctcttgtaagttactagctgtttgtgagtcataataattggagaaattattgatctatgaatcgttttatttgacactcttataacccttagtgattcttgatagaacagtaggattagaaaacagatatgggtgggtttcagatttgtggaggggaataaaagtcttattttttgaacatgcattggtctgatttgtatgcactgtgtaaatgaatgaacaattgaaaagaaaggatgatttgacttatgaatcgtttcaacagttcactgtttgtttatctctgttttttatttaattggctatgagaatctgaacatatctcttggaaacattgtatcagtgagtgtgatgtcactgatgtgagagctcttgtctggaaataaaatctaaacacagttaccaaatctggaaaacaatttgtctcaagttagaaaaaataaaatataaataatttcccgaataggagctatcttaagatgggccttagttgaactatatgggctattatccaggtccagtaatattttgacagtcaatacaaaatgtcgtctttggctctaaattggattaagctattaagtaagataaagattacaatatttaaattagatattgatttagacggagatttcattatctatctctcaagtttgatttgcttctgctgtaacaaaaagatcacgatcgcaacttgtgtgtatgtgtgtgtgagagagagattcagatatggcttggttagctagatccatagcgaactcactcaagctcgatgaggaagatgaagatgatgataagcatctgaatcaacagccgtcggaatctgtatcggattcacagtctccacgaggcgttaaggaagacattagcgaacttaccaagaccttgagaacccaattttggggtgtagcttcgttcctctcgcaaccttcttcatctccggatcttcaggagagaaatcaaactcccgatcatccggaggaagatgaggatctaatcgctgggattaagaacgatttcgctgagattggtgggagattcaggactgggatttcgaaactatctgggaacttacctgtgtctgagttcacaaagatcgcttcgaatttcttacaattgagttcagaagatgtggatccgaaagattacgacgtaatcggagttacagaggaattagttgcgtttgtgaaggatcttgcg

SEQ ID NO: 4051 - DNA, 3000 bp, Unknown; identical to SEQ ID NO: 4049
  misc_feature (1)..( 3000): cDNA_ID_1822752_gDNA_ID_1620680_Annot_ID_48341 3000 nt of promoter + ATG

SEQ ID NO: 4052 - DNA, 3000 bp, Unknown; identical to SEQ ID NO: 4047
  misc_feature (1)..( 3000): cDNA_ID_1822744_gDNA_ID_1620680_Annot_ID_48343 3000 nt of promoter + ATG

SEQ ID NO: 4053 - DNA, 3000 bp, Unknown
  misc_feature (1)..( 3000): cDNA_ID_1822740_gDNA_ID_1620680_Annot_ID_48344 3000 nt of promoter + ATG
tacaacaaattaacatgtaaataaaatcgaaattaaactgatttcaattcatgtttgatcactcgtcttctctgattcaaaatgtcttaatgattcaatgtggtgaactggtgatattgcagctgcagctccgagagcaatggagaaatcgaagatgagagcttaaaagatggaacatgacaaagctttctaactatacaaaatatgtgcgatcttttggtggtgtttttaaatttcaaaacatcaatatctttagtttctgaatttttaaaatgaagtaagtaagactacgaatgtaaggaaatgaagaagaattaaaaatgatctatttttgttgtttgtttgttgctttagtcagtaaactggtcgttgttttatgttttgtgtttgatttggatgtgtggttgacttctacctttgagatattatttgatgtaacgtttttgttattctcttctttgcttcttctcgagaagagaagatagacaatccggttttacgatttggctttctatcattgaacatggaggttcttcttctgcatttgcaaaacaatcttaaatattaatcagtacttaaatctttgaggtggattgttaaattctaacacatttgaatgcggaagtggtaaacctacgtttttctcaatgtctatgactctattctaaatggaatatcaagattaatcagaaagaaaaaaaaatctttttataactgtcataactaaactgtgctaccaaatcattgccaccaacggatctttaaaccaacttgaataattcacctgaagaaccaaaagctacaagacaaatcaaagataaataaaagtaatttcgccgggaaaaggttttgatatcattatttcactttttaaccttccatgaaactttgtttaccttagcaagcatgggctgcgtacaaactcatgataactatatagtacaatccccaaacgaagatatcataaatttcaacgaatcagttttagatttagtgaataactatagtttaatagtatcgaataatatcgtttgagagaaaaatagtcaaagatacatgaacataaattcccatatactaatttcccatttctcattcaaggaacgtttattatttttctgttcctgaaggtggaagcatagtgcgcctctttgggtttggcaatggtggtttgcttatttgttttatgaaaattatttttgtgatatcatttattgttcatttttaataattccgttagcgttgacaaaacaatatgattaaaccccacctaaaatgaaatgttatattcaactgtccaatttttcaaagaggcgttaattaatcaattccaaggcatatattcgatcaagataattaaagactcatatagtactctcatagtttaagagaacctacgggtcgaatttaaatcactcttgttactttaaaactttaatccaaataatgtagtatatatctgtgattcttgtagctagcttcacgtgaacttaatagtatacacataaacaacaatcattggtcgtgaatctcatttaattcgtttcgctttgatgcacttattcgaatgggacatactatatacatccatataagttgataaactatatagtaatattcaatgtttttaaaattaaatatatgaaatagacttagggaatgacatgtcgaatttgtctccaaaagatatgaattgaattatgcttctcagtaatggaacgtggcaatacctttatcactcatctatatatggttgttccccaaaattatttcttcatcaaacgagaaaaataagattgtaaatgtaaatgatttgatcatctcaatgttgcattcaagaatagtatctataatatttagttataagcattaggtattaggtcaattatattcaactgagtctacgaatcgaattgcatattgcgtaaaaattcaaataaaagaagctagataaatgaatatacgtacgattacgagaatgaatgtgtgtttcttcgatttggtagaccttcaacaaacccaccgaattgatggtatccatagatttcttatcagttatcagtcatgggagagatttacgatctcatatatatggacaaaatatatcgtatcagcattattattgatttattgtttagttaagttcttttttttttggtttttcctttttttctttgaaaggtttgattagcagttttgtccggacagaccaagtatatatatacaataattgtgattgtgttaggacattcaaaatcttccatacagttttcgaattaagttggtatacaagtttttcaaatgttaaatcaaatccaactaaactagatttgttaaggatacataggatcatctctctttaatatcataatattcctctatctcctttatggaacattctatatttgtacaaccctagtgtagcctcctctgtacttgtatatatacttgtgtaaagctattcgtataatataagtcattacattcttaacatggtatcaagagcctaataagaacattgttggttgtaaatgggtatttaaaaacaaatttctccctaatggttctcttggcaggtgcaaatcaaggtttgtggcaaaagggtataatcaacaacttggccgtgattatacagacactttcagtcctgtgatcaagtcgaccaccttacgtcttgttcttgatgttgcggtaacccgatcgtggccaatccgacaattagacgtcaacaacgcctttcttcaaggcaccttgaaagaagaagtttacatggagcaacctcctgggtttattgatcccgacaatccatcattcgtttgtcgactacgtaaagcgatttacgggttaaaacaggctccgcgtgcttggtatacggaattgaagacttatctcctcaccttgggatttcaaaactcgttggctgacacttctctgtttattctgcaacgtggcaaataatttgtctatctattggtgtatgtcgacgatatactaatcatg

SEQ ID NO: 4054 - DNA, 3000 bp, Unknown
  misc_feature (1)..( 3000): cDNA_ID_1822825_gDNA_ID_1620681_Annot_ID_48346 3000 nt of promoter + ATG
atgtgatgcggatatatcaactaagctggctaagatttgtattgaagaaggcattgattttgatcaaggggcagttgatttcattgcttctaaatctgatggttcacttcgggatgctgagataatgcttgatcagttaagtttgctcggtaaaagaataacaacatctttggcctacaagcttgtaagtttacacttctttcttcatatttgtcttggaaacattagatagtttagaagtgaaagatcaacatttctttgattctgcagattggggttgtttctgatgatgaattgcttgatctgcttgatcttgccatgtcttctgatacttcaaacacggttataagggcgagggaacttatgagatccaaaatagatccaatgcagcttatttcacagctagctaatgtcattatggacatcattgctggaaactctcaagaaagtagttcagcaaccagacttcggtttcttacaaggcatacatgtaagcaccccagtgatgattactttgaatatcagcttcaaattaaaacctgatctcactctttatcatatactgttctactatatatagctgaagaagaaatgcagaaattgagaaatgcattgaagatactatctgatgctgagaaacacttgagagcatcgaaaaaccagacaacttggctcactgtggcacttttgcaacttagtaacaccgactcatcatcttttgcaacagatgaaaatggaagaaaccaaataaacaaaggtcctaattcataaattctcgtttcctttatttcatgcttctttttcgtgttgtcttggttactaactatatataacttacccttggtcatgtatctagacgttgagctctccagcacatcatcaggttgtcctggtgatgttattaaatcagatgccgagaagggtcaagagagaaactgtaatgaaacagttgaatctgtgtggaaaacggttacagatttgtgttgttctgattcactaaagagatttctgtggaaacgaggaaggttgacttcacttactgttgacaaaggtaacttatatttcccaaagatggtctgaaagttttactttggcttgtgtctcagataagtaaatgcatattcttttttcttttcaggtgtggcaatagctgagttagaattctacacacctcaacatgtagcaagagccgagaaatcatggaaattgattgcagactcgttccaatctgtgttaggatgcaacgttgagatccaaatgaatcttgttatctctgcgtgttctccaccaaagagtgctaaagcagcagcaagtcttttctttggacttttcagttgttctcgtagaatgcttcacaagtcgtatttgactacaagaaccgactctgactgcgcatctgaaaagcctgcagttacaaattctctgagaagttgccaaggaaatgtcttgagggctcgaagtgttcgttcttcagccaatgcatcatcgcgtatgagctgttccagtgatcaaggcgatgcaacttctgctatgtgtactccacacattcctccgggtgaaaaaaggtaaaacatggttcatatttattcatttcaaaagtaagttgttttgtgatttggctagctactcaagtatactctgcctctgactttgtgcaggccagaagatgacactgatgtgttgtgttggaagaagactcccctaggcaaggtaaacatctcgactatgcctaagaattcggtttcagatctctgtctgtacctttttggtgtttctaatttgtgatgatgatacatgtcttatagggtcagagcgagacacagaacagcaagagctcacggcttatcggccgagtccttccctgcagcactgcagctaattaagggagctcgatgagggtaatacccattttgtggaagtggaaccaataggttttagcaaacccattgtttaggacaatgtgacacaaaaatgtatagttgcaaaatgtgtttcaagaccatattttagattagcatatactaatcactcctttaacagacctgaattttactgtctttggacccttttattgactgagctcattatgttttcacaaattatctcattcattaaaacgaatcagaataaagtgaatacattagtcttcaacttttttgttacaaaaagtggataatgtttaattttttcaataaactgatttgaaattagaaacataatttggataaggttttagtaatttgggataagatattgacagagagatatttataaattatctggtttcactattttggtaggaaaactccaaaattaaatccataaccctaatcgatatctctcttggacaggccagcacatgtaacgagcaatcgtgaccgttgagacagtaacacgtggcaacagtccttatgatgagacctttgatgagaatcagcagcctccatttctgtaagctttttgttcctcccaaaattcccaaatccatcttcttctccaaacaatcttctctcaaacattactactattttccaggatagcttacgcagcttcagactcgggttcttcttttcgatctagcctccgtcctctttcttcttaccacggatctcgcctgctctttttccgtacgacggtctgctttgtggatagtttggctgacgacgaggcgatttgaacattaacagttactggtacttggagtttcaaacatttctccgatgttttggttttggcatttagtcacgggaatgattaattgattgattgctgtagaaatatgtgaagaatgacacgtagaagaatttgatgaaaccttgggatgcataggcttctgtattatggattggtgattttagatctccatttatgtcgtttcacatcagtgtcttgtggttttagctatatgctgttttggttttaggttgatatttattgtatggtatgtgtttgttaaaggaatgatttgatgatgtttcactgttagggtaattgccaagg

SEQ ID NO: 4055 - DNA, 3000 bp, Unknown
  misc_feature (1)..( 3000): cDNA_ID_1822821_gDNA_ID_1620681_Annot_ID_48347 3000 nt of promoter + ATG
acggtggagcggaaggatctcagcagcctcaccttattctagccaacaagctcttcctcctcactcatccagatgttccagacatcgagaaagtccagctcaagtctgaggttttggatttcatcagatcccatggttaagcagctccttttctctaatcagtgagaattagcttaatatttcttcgagattttatgttcctgatgtttcgttggtgtttttatttattttaggtatggctcctttgtacgaaaccctaattgcctcttcggtgctggatttggatcaaagcttgttagagtctatgcgggccgctaatgaagaggagcttaagaagctcgacgagaagtaagtttccttcagtttctcacttttatttggcagtgctttgaaattcgaattctcgtattagtattttgggttagattgatgtagggggactgtagcattctgggtctcaaattggattcagaattgtgtttgcaaaagtccactatgaattttgggaatctccatgttcctgtggtagctgatgtagcatgatgtcttagtattcttagggagataaccattacctaaccattggtttctgagtccatcttggcctccgctttaactttgtagaaacttctgaaccagtatgttatcagccaaagttctcttacatattcttttctttcacttttttcaggattgcagatgcagaagaaaatttgggtgaaagtgaagttcgtgaagctcatcttgctaaggctctgtatttcatcaggattagtgataaggtatgtggcatatcaaagttgatagttatggtaacttccgtggatcgtggccattaaatttttgttttgtaatcctaggagaaagctttggagcagctaaaactcactgaagggaaaactgttgctgttggacaaaaaatggacgtggtgttttatacgttacaacttgcttttttctatatggactttgatctggtatcaaagagcattgacaaagcaaaaaagtaaatgtcaatttggctgtattttgactactcttcatggatagtgcaactgaaatccttgaattaacactttccgttttcccttgccagattgtttgaagagggtggtgactgggagaggaagaaccggctaaaggtctatgaaggtttgtactgcatgtccaccagaaattttaagaaggctgccagcttattcctggattctatatcaaccttcacaacatatgaaatttttccatatgagaccttcatattctacaccgtcctgacaagcatcataactttggacagagtttcccttaagcaaaaggtatttctcaatggctcagtcttccacttagagttgtctaaacttagataaaaactttttagtatgtcgacttattaaaatgatgtatatccatgtaatttgttgaaattcttatcaagtgctactaatttgacaggtcgttgatgcacctgagatcttaaccgtgcttgggaagattccattcctttctgagtttctgaactccttgtatgagtgccagtacaaggcgtttttctcagcatttggtaagttcattacaaggaccagaggtcatacatccgaatgcatgttgcttggcttttgtctgtatgtttactaacttcattgtcggcttatgttctcagctggaatggcggtgcagataaagtatgaccgttacttgtacccgcatttccggttctacatgagggaagtcagaacagtggtgtactctcagtttttggaatcttacaaaagtgtgacagttgaagcaatggcaaaggcctttggcgtttctgtcgatttcatagaccagtaagcacaataatgaacgctcttttgtatatttatgtttgccacctctctttagaagcatacaaaaaaacgataatacaaacttaaatctgacttgaaatgtatttttttttttatccagggagttgtcgcgcttcattgctgctgggaagcttcactgtaagatagacaaggttgcaggtgttttggagacaaaccgtcctgatgcaaagaatgcactttaccaggcaacaatcaagcaaggggatttcttgctaaaccgaatccagaagctgtctcgtgtgatcgatctgtgagcatgctacatgtttctgtttcactctttcgtcaagctttgcaacttggaaactccgaacggtagaatcttaaggtctgagaaacgatatgaactttggattttgagatgaatggctgtagtttctttcatcaactctagttggtttgtcagtggtgaatttcccaagaacaaagagcaagtttaatctccaatgttcattttattcttcctcgcatatggcttttgaatctgttgttttcatcgcatctatctagtatctaagagaaaacgaccaccatacctcttacaaaataaagcttttgtttcacaaggtgtattagttgaccatatagatataccaagaaaaatgcattagtacacttcataatctgaatggttagaattgaacacaaattagatacatctaaaggacagtccttggttgaacttgtgagagatacatacacagtagttggtaacttggtattttgcagattcttcttccacggacgtctgtttagtgaattaggtgagattcttcaccatcacacttataggatttacaatttgtttcttactgtttagtaagttccttttttcctaaattttttgatatggtctggggttagtaacaagaccatcattgtaaactactttaagatttgaggagattagtaccttatcttctattgcctgcctaattataaccagtgactcacagtgagtgtgacataagacaaacggattttgtttcctttacaatttaacgaaacagtaattaacactctcgaatggattcgtagagagcagcaaactccactctgacgccatacataaacaattcttaactttatcctctcatccttatcactcttcctcaaaacttcgaaaatg

SEQ ID NO: 4056 - DNA, 3000 bp, Unknown
  misc_feature (1)..( 3000): cDNA_ID_1822814_gDNA_ID_1620681_Annot_ID_48349 3000 nt of promoter + ATG
tggcatatcttgaaggtagatgtatatcttcctctgagcttgatcacatggcttattagatgcattgtgaactgattttcatgtgtcgtacgtaagcataaattttaatttagtactaggtgatgaaatgatctggatatttttcatttggctcataccatatacttcttatgaaggttattgtccgtcaagatctgctgtaactaagtttcgagctgaagctatatgcgtcgaattcatgaagcaatggaatgtgggagtatatttttcactgaggtacgtgagtaatatcatagatgactgtcgacttgccaattttttttttggtcgggactgtcggcttaccattagattagtggtttctcagcttctctaactcaaaaatacataatttcaggtttcaggagatagctggagccttggattctgctcttacttctccttctctggttttcattcaggattcagataaagagagttcgctcaacttaattctcagacagagtgatactcttttggagtgcttacgatcgtgctggaaagaagatgttcttgttttctcggctgctgataaatttcttcgcttgaccttgcagcttctttcgaggtttgtaaaatttgactgtaatattatccacgtttactagtttcaattctaattttgattatgtgttaatggcatgtagatatagcttttgggtgtcatctgcgttgaataatagaaagagtaatgccagcccgagtcctggatgtgaatgggctgtttcagcaactgcagaagactttgtatatgtaagttacttgtttctgagatcctcttattttggacattttgggatttctgcaatttcgtgtttactaaatcagctgcagttatgttctgtgggatagcttaatctccattatgattagaatagcaagtaaaaaatgctgtggaaattaagtaaactcggaagatctgctataaatacatgaaatcagatcacatagaccatatggttgatcgtttgattttttgggattatttacatgtttccttcctggcaggttatacatgatgtaaattgtctagtctcagaagtttgcggcgattaccttggacatatatcacagtatttatcttcaagctccactgaagttcttgatgtggtgaggatcagcatagaacagggtggggtatcattagagaaagtcctacctttacttaccaagacaataattgacgtcattgttgataaatctgttgaggtaaacctttgaaaaagcattagatccgttctttaatttgtaaacttcaagatttgcttgactgccttggtgagcacctgcagaaacaatgtttcttagaatttgctgtatagctgaattaggttagagttattctccaagtctgacacatatttaactctgtaacggtaaatgctttatctcctataggacctaaggcagctcagggggataaccgctacatttaggatgactaataagccactgcctgttaggcactcaccatatgtcgttgggctattgcgtcctgtaaaggtattaattcagcttttggttgcgattttaaaaatattttatagttgcttgaccgatggattctgaagtgtggattattgctccttctcttttataacaggcttttttggagggagataaggctagaaactacttgacccaaaaaacaaaggaggagttactgcatggcagtgtcagtgaaattaccaggcggtattatgaattagctgctgatgttgttagcgtggtaagtactctgttataaacactttttgaggatttgaattgacaatataaccccagtagccaaaacaaaaaccagaatcattctttctatccctaaagatcgttttcaattttttttattttttttttactataaagatgcagagatggtgagtaatttatgtgtagtgaaaggcggtagagaatctagatatattgattgtattatgttacaggcaagaaaaacacagtcatcgcttcagaaattgcgtcaaaatgcacagagacgaggaggtgcagcatcaggtgtttctgatcaaaatgtatctgaaacagacaagatgtgtatgcagttgttccttgatattcaggtaagaccttcttcatgatgattcattgtgtgatttataaattttctctgcaaatttttgtttacaagcaagtaacataatcggataatatcttaccaggagtatggccgaaacgtttctgctttggggctgaaaccggcggatattccggagtactgttccttctggcaatgcgttgcacctgcggataggcaaaactcaattagtgtttgaggacgctcgcttccatacatacatcattgtggtatcatatatctgataataagaaatcgctgcttcttcttttctatagcttgtgtttgtttgctttaacagtgaagataagaggaagagagttttgttgaagagagagtgtttttttttttccgccgaagttgcattatgtgaggtctgagtttagtgccagctttggccatttaatcttttatgtaggactatttcatcttcagtatataacacgcaccaaagggaatgaaacttttaactcttaatttcttttgttttctcgtatataactgaaccaaagaaactatcaattgtctaaacataccaaaccgacatttaaccggtttcgaattctaaatcattggggaattgagagagatatacattgtttaacggtgtataatctgtcgaaatctgctcttagtttgttgggtttaaatatggaaacgtttttcatatttgaagaaagaaaaatcaatgagaaataacaaaaaaacgatatcgccgtcgtaatagagaaaaaaaaaaaagagtgtcgaaaccctagaggacgtggacactgttggcattcttaaaagagccacaaaccccattgtcgaacgaacacaaaaccaaaccgcagacaaagaaacaaattcgcagacaatagtcgaaaatg

SEQ ID NO: 4057 - DNA, 3000 bp, Unknown
  misc_feature (1)..( 3000): cDNA_ID_1822810_gDNA_ID_1620681_Annot_ID_48350 3000 nt of promoter + ATG
ttatctgttttaaaacaggggatttacagaagttttaagaacgattccgtaattgcatctcaattcaggtgttgcgacgacgtggtctaggatgtgaaggacttgagacgacgtggtctaggatgtgcctgaaggatctcacacttcaaagagacagtatgttttccctttgttcggtctaatgacaatggaatgcttttctaaagagttgactttgcctttctgctttaggtgtagaaaagatcattggatgggcttttggtaaccatataagcaaaaatcctgatactgatccagctaaggttactttgtctcgagagaggtaattggcagcttgtccctgtgcattactgctcttaaatatctgtctcggtgtattgagtgcgaactttggatccttgcagcatagaatttggaataggactcttacagaatgatctaaaaggttctacgagctcaaagaaggttagcaaatttcctttattaactttattaacttcctttggaattgaattgttgtttacttattttcattatggcaatggctcctattatgtaagaactgttaattttctctgtggctttcaggacattgtggtagaaaatgtgtttgagaagaggcttctaagtgatgtaattctgcccagtgacattgatgttacatttgatgacattggggcacttgagaaagtcaaagatatcttaaaggaactggttatgcttcctttacaacggcctgaacttttctgcaagggggaattaacaaaggtggttctcttctctgcattatgtttcagaaaactcccataattttttgaggtcctgcctcggatttatcacagatgtatgaaggaaataccttttatttgcgagactagctgctaatttggctttcctcaataattcttctctcctaaaatttggtagttaacgttatgcattggtggcttcttaatcagtccgctcttgttcgtctttatgcagccttgtaaaggaattcttttatttggacctcctggaactggaaagaccatgcttgcaaaagcagtggcaaaggaagctgatgcgaacttcatcaacatctcaatgtcaagcatcacatctaaggtaactgaatactctatgaaaagttctaccgatttacacacgggatctttttttcaaacttgtgttcttcttaatactgcagtggtttggtgagggtgagaagtatgtcaaagctgtcttttctttggccagtaaaatgtcccctagcgttatctttgtggacgaggtaatttttctggttaattccttgcgaatttgcttgtaatcagagcactgacagtcttacaatgttattactgttttgtaggtggacagcatgctaggccgaagagaacacccacgtgaacatgaagcctcgcggaagattaaaaatgagttcatgatgcattgggacggtcttacgactcaggaaagggaacgtgttctggtccttgcagccacaaatcggccttttgaccttgatgaggctgttattagacggttgccccgtaggtaaattataaatcgcttccttggactaagctttttttgttaaattgacatgacagttataggttgtgaaaattttgtggtattgacttctgcaggttgatggtgggactaccagatacttcaaatagagcatttatattaaaggttatacttgcaaaagaagacttgtcccctgatttggatattggtgagattgctagtatgactaatggatattctggaagtgatcttaaggtaaattcctagtaattccttaaacctttgttgtggtctgccaaaagtgatagagaaaggcaaagtaattaatgctcatattattttctcttttggtgctctcagaatctatgtgttactgctgcccaccgtccaatcaaggagatattggagaaggaaaaaagagtaaattttctttgtacagagccaagaaaactttacgttgcgtaaacttgtctatagaacaaatgtttatgatgggatattatatggtaggagcgagatgctgctctggctcaaggcaaagttcctccacctctaagtggaagttctgatctccgagctttaaacgtggaggatttcagagacgcacataagtgggtaagattcgcttatgctgtttttcttttctttttttcttttttcatatcgttttgggcttagtaaactgtaaccattgtcattggtgttgaatcaggtgtctgcgagcgtctcatcagagtctgcgactatgacagcgcttcaacaatggaacaaactccacggggaaggtggatccggaaagcagcaatcattcagcttctacacgtaggagtaggattgaatatattttagaaaccgtaactgaaatttggtcttaaaaagagctcctggttgcaagcagaatgcgttgtatataattttttcaggtgaatagaataaaacaataagtgaaataggttgaattagacgttttgtatcatatagctgcgtaattttgatacttgtttgaaattgaaccttacaacagttaatacaaaatgtttactctgcaactttttccatctatcgacctatctttgcatgatccggtttagttggttggtagaaaatatttgcagtctaatcttgccgaaccaaagattgcaagatctctcctccaccttgacttttgattacggttaagcttgttacttaacaccgtgcttagctggattatttaaggggttttccacaatagcacataactttttgggcattttatctgacttttcaaataaacaatgcatcgtatattaaccaattttgacttttacccagggtcgaccaaaccaatttatttaatcctccggtttggtaagattgatcaggcactggacacttttgccgtcacgcagttcatctctctaactcggattcggcaagcagtccacacagttgtataagtgaagcatttcccacgcagaggaagcagcgaagcgaaaaatg

SEQ ID NO: 4058 - DNA, 3000 bp, Unknown; identical to SEQ ID NO: 4057
  misc_feature (1)..( 3000): cDNA_ID_3072449_gDNA_ID_1620681_Annot_ID_164445 3000 nt of promoter + ATG

SEQ ID NO: 4059 - DNA, 3000 bp, Unknown; identical to SEQ ID NO: 4055
  misc_feature (1)..( 3000): cDNA_ID_2164564_gDNA_ID_1620681_Annot_ID_164442 3000 nt of promoter + ATG

SEQ ID NO: 4060 - DNA, 3000 bp, Unknown; identical to SEQ ID NO: 4054
  misc_feature (1)..( 3000): cDNA_ID_2164560_gDNA_ID_1620681_Annot_ID_164440 3000 nt of promoter + ATG

SEQ ID NO: 4061 - DNA, 3000 bp, Unknown
  misc_feature (1)..( 3000): cDNA_ID_2164556_gDNA_ID_1620681_Annot_ID_164439 3000 nt of promoter + ATG
tttgtcaatatcttttgctttatcgataagaaacttcaaagcaaacaatcaagttcgacatagaactctgttcaaggaagataattactttactttgatctcggcggtcatatagtgtgttccatgaacggacaaattcttcctcttccccaaaattttccaaaggttatttttggctatttacgggttgtcacaaattaaaaaggaaatgtgcaaatatttattattattctttgacttgagggttaggatactcaatatttacaacaacccctattcaaaacacagataaataaatatgaaagtgaataacatttaattgatggagtagtaggaatcaatcaaggagagagctagggccgctcatatcaacaagtcttcaccttcactccactccaccaacaagatttgatctataagataaatgtgataacgacaacgaagatttgagtaattgtagcacatgcatcccaaaactgattattgttgatgatgaagggtaaagtaggcaactctatcatgcgacgtatcctttttcttttgtttattctttttcctgtccgtaaagttcgccgagaattcgaaaaataagtaatcttatgctatccaaccatatatcatacgtggcacatttcatgctatcctctctactcattgattgaatgaacgtaattttggtgacatggaacttagaaggattccaatgtcaataaaccctatatactctgaagcaaaacataaaaactttgtttacatctccttttgaaaggtgtttaaagatttcttgatgtcatttgaaatagaactttagttccaacagtttcgaaacggtgagaaaggggatgaattattagttctaatccgcgaaagaactttctaactagagaggaatcatccctaggcatccaataaacgtaactagtaattaacggggttgaatcttcttctcatgagtccaacacttttctgccatcttgatttatatacaagaatattgttttcatttaaggtattttgggtttaccagtgcgctttcgggttacattcaaatctttgtcaccacacggacacttctctctctaatagaagaataacctacacatggccgcatattatggtttagttaatagactcgaaaacgggtcagtaggttcagctcattataacacttggccctggtgctataaaagttctatttggacctaaaattagattattatttttttgtttgcgcaaaaatattactatagattttgttcatttgcaccttggacacttgtcaagaacaggatatgctagtaacaacctaaaactaaaacctactaatagttgataaattggacaaaacaattcatcaaaaaatttccttactccacccataaagtttgatttaagaattcttcagtgcaccagcccttaattggtgtagttggaatttatcaaaagcatccttaaaatcgtactccaactacaccaagcatccttaatattgacaaaggatcttcttccatgaatgaaaaccagccctttactatctctaaccacccaagccgcaccagctagattgtttctctttgaccacgaaaaccccacattacacttaagccactgataattggtgtagttggagtacgattttccataaatattatcgtaagactctttgaataggagttcaatttgcgttgcatactaatgtgattaaatgatcaaattggtattattgtcggttgtatactctcgtaagatttgatgcatgtagagccctggtttttgggtcgaaaataaattggctcacactctatcatgctttagttttattacttttttcttatgatttcctcatttctcttctcgtctcgatttgtatagtttcttaacaataaaaatgtatatttcaacaataaaataaaattagttttccttccaaaccaaaaccattagcgattcacacttctctaaatactttttgatgcttttgtaacgtccataccaatataacatggaaaaactaaaatttgactcgaaaaactaacatggttcaatagacacactagtctaatcacaatttgaaagaggatatcagacatgcaaattgaaggatttttttttgtgggggtctggtcaaggagatgagactcaataactcatgttgaattccaaacaacaaataattgttgcatctagaattccaaataagaaataattgagatagttgaatcagaatatgttggtagaatgaacgaacacgtgagtagagtccccaaacgtggcagagaagcggaccacacgaagtcctgtttttattatttgttgccataaagaaatccaaacttgaaactgaaaccgtcgaacgaatcttaaatgaagcgaagaaggaacaccaaatagtagtcttaactctttctctctctctctctctcttactggttgggctctctgtccaaagactccacctttctctgcaaaaatctctgccctcctactctaacatgtctccccttctcctctgtcccttatctctctctattcactcaaacaacaacgaccctttttctatttttacctctcaccataataacttcccttatttaccactttaccaactacttcttcttcttcttcttcttcttctttcgacaagggattttagggtttaggattctccgcattgtacgccactctgttcaatacaccttggtattccccaatctttgacgttttgtattttcagtttgtcgtttccttatcttaaaccttatttaaatcgttcccaagttttttttgttttgtccatagcttatctgggtctctgttttttgagctctgtgattgttaaatttaataacttttctctcatatgtctctgtgttaccacattttcattgtttatcactaattgcttacattcattattaggtaagtgatgatgagtgttgaatcttgaagttttaggagatagagagaaaggtttaggattgttttgatctgttttggaaa

SEQ ID NO: 4062 - DNA, 3000 bp, Unknown
  misc_feature (1)..( 3000): cDNA_ID_3071510_gDNA_ID_1620681_Annot_ID_164438 3000 nt of promoter + ATG
aaaacacatatgttggtttagaaaaacttcaagttgcatttcttcttttagccaatcgcactatcttccgtgaaaaggtaaataatatatagctttatgacaatttcacaaaaatggttcgttagttttgacttagcattaagatttttttccagaaatctaagtattggtaaaataattctatatctactactaggtcaaaatacaattctatattatttaaaaaattgtaactgaggtaattgatcaaattaccaaaatgatgaaagagctagttaagaatttaacaatgtacaagttttagtgaaatggtcaaaactaaatatccattcttttggcccgttagcatcattaaaccaaccactcaatggagacatggaagatcaaaattcgtcaaccctagcgctttgtttctctacaaggatcaagtatggaacaacaacaaccacaagaaatcgaaatgtgctaaggtcgcatgagttcgctaggaataagtctataacatttcgttttgtcaacaaaataagattttagtatatatattatttacaattttaccagacttccattgtcaacaaatgacattattgttgttgtcgaagaaaaaacaaaggtgacactatttgctgttttactttttatttcatgaggacggaggacccatttttttaatttagtttaaaagagcaaccgtatcagttgattacggagtccagcagagaaaagcatgctcaactgtcaaaaacaacctaacaattagggaatcccgtaaaaccggcaaatcacgagggcagcattacattacattacattacatgtcccacaaatcactttccctcccatgcttttccacttccacctatcattaccaacacctattacctaaaggactttaagccagagagttttcaaatcccgtaccgtgattggtgcactatgaagtggaaaggaatacgatgaaaaacaaactgttttctcaatacattttcaccgacaccaatcatgaagcaaatagctgcaattaattttttctacgttttaagacaagaatatatattaaactacttattttcttctacatcttaattaagtagttagtattcttacaaacacttctgattatcatttttgtgttcaatatataaactcctttctatttaaaaaattccctcaacactataatatcattcagtccctatctaaaagttaggtgtccatagagatatacggatattgaaatttaaatgatatatggcggagatcatgcaaggacaattatcttcaatagaatcattacgacttattaaatgtgtgttcccgacattttattacatgattctactgttttctttctcatcatctcattccattatttgtttttctatttgtgtttctagattacttgacatgtacgttaaatcatttatcttccttttcccttgatatcccactcgaatgacatgttgctgtagtactattactatggttggaaatcttatttctctgaataataaaagtttatattcagataactgctatgatacgtaaactttccaatggttatttaattttgttttgcaattaatatatgcaactataagtaaagcctagtgaattctttggatcggagttatatgctatgtgctaataatacaaggaaccccgcaatattgatataaaatttaccaaactgtatcccacactttaaaagttgtcatcatactttatgtgaatgcaataggatccaaatcgtttggggaagattttacattttaaattcttatattccgcaagtgcccaatggtgccgcacgaattatttagtgtatcaaactattggtaggagcaattagtaaagcatatacagtgcaacaatctatttaaaagtatagaaatatctaactaaaacatattttgaagattccctcgtcctccaatcgtcttccatcatcgaaatatccctttgaagagctaagaaacttggtgggaacaaatgatgctattcgataattttcttcgattctatggtatatttggaaagattggaacataattaatatatatatcccacttgatgcataaagaatgttgtttaagaaacggagttctgaggtaactgactgacaagtgcttcgactcaaccattactacttaccaaatccacggctcttggcataccccatacacgcttagtggatatggttgaatcgctagttcccaccaccagcttctttatcttgacttaaaagagggcacgtcgatgtcttcctcccctacacgacaatgtagaacatgcatgttcaaacaatttgcaaatggaagatatattggaaatttgtgaaaggccatgaggtagatacacaattaaattcatgagttcataggtcagaacaaagctgaagcatgttctacatgcccaatcaagaaaaagtcaaacttttctcaatgccgactttactgttctaaaatgtatgaaaatacacattaatatacaattataaatacatgcaaatatatattgttataaactatataatggttacttgatatggatccttatacttaactaacttaacaccaactccctggatctataatgtatatattgggctaaacaggtcatgtggaagttatttgaaaagtacaccatatcgacctaattagattggaggctttttatttagttttttgtcaacaattagatttgagtaacggatgtaaccatattatttgttcctacctcctaggcattattatagtataaggtttttttttaactaaagatgatttaaaaaaaaaaaagtgggacctaaaccttaaaaattccaataacaaatagtatagaggtcctttttctctttatataaacccccaaaatttcctcttctctgtattctccactcaatacttatttcctctgtcttccttcgcttccctcttctctcaccacaatccgagagagagacagtactgtaatccaagtgagagagagagagaaatg

SEQ ID NO: 4063 - DNA, 3000 bp, Unknown
  misc_feature (1)..( 3000): cDNA_ID_1808608_gDNA_ID_1620681_Annot_ID_164436 3000 nt of promoter + ATG
acattgggagatgtatgcgattggtggaagtgctaatcctacaatcaatagtcaagggaacagatttttggcacccaatatcagatttagcaaagaagtgactaagcatgaggacgcgcctgagagcgagtggaagagatggaattggagatcttccggagatttgttgctaaacggtgcgttttttactccgtctggtggtgcagcctcgtctagctatgcaaaggcttcgagccttggggctaaaccgtcttctctagttggaccattgacgtctacttctggtgcactgaattgccgtaaaggttcccgttgctgattgtggcttagtggtcacacttaagtttttaccccattattatataggaaaaggcaattaaagccaccaattaagggggattaagtagtgtagtaagactttcttaatcccttgatttactcttttttttgtttgtttattcgggtaaaattgaaggagaatacaacctctggctagctgctctctaggacccttcttaaggattctctgttttaaggaatctttaaattaggttaaagtgtgggaacaagtgcagatgtgttgatcttgatattaatataaatatgattttgtgtctttatcttttactagtattattttcttatgagcattgcaatgcaaagacatagattagtcacaaaaattagtttgaagtataaatttgcgtacacacatgatggagaggttagttaaaagtgtgcccatttggcaagtcaataatggctctttgattttccaaataaaatgactttttattcggaagtttgtaatgttatgtaaaatggtaacttttgggtcaaagatgttggagccagtcaatgtttgaccaactgccgcgacttttttttcctctggccaatgcatcgattccggtaaattaaaagaaaaattacccttaaaaataggaaaagaaaatcctaggcatgacaatgagagaagagaaaagtgaagttgatagattttgaatagaaaaaagaaatactaaaattttcaaaagaaagataattggagcagtcaataccacagtagctctacttttgatgggtttgtctcatattcgtgttttgactactgtccactgattatgggatttatttaaaatttgaaagtaactaattaaacaactaaccaactttctttgtggccatgtgcacattttcttttgttaaagatggccatgtgcaacatgataatacatctaggaacgaaaggaagaagaaaactttgaaagtaacaagtggtcgcaactaatgatgtgatgtagttggtgtgattagtatgtggctggtttgatttggtcagtcagtgagtattaaatgttagtttgccaagaaagattttttttttttttggtcatactgtatatagcataaaactaggtagagaatttccttgttatgaaaaaaaaaatctttacatttgagttattggggaacgaaagaaattcctatggagcaagaaggtttaagtggccatgttatgagttgtgtgcggtcacgtgtactggtcagttaatttagttgtaacaatcgattatatttgttctattattctttatatttcagtgatgccgtaacagtaagaaattatagttaactgaaaccaacaaaaagattcagaattactggtgttattcaattatggagttaaagttaattctttaaactttagatttgttttctgatattgcttttaagaatatgtttgtatgaatttcaaaatctctgcaatatatcttggattttgattctaatgatttactcatgaaactccaaagaggtttcatttcaaatcaattaatatacaaagattttacaagacttttagttttgaacaacattggattttaatgaaatatttaaaatcttaattgaataacaccaaactttaaaatctattaagcatgatttacaaatatgagttccaataacactagattttaaagctggatttagaatcattagttgaataacattggattagtgttggatttcaattctattaaaattcattaacgaataacacccccttaaagttaactctttcaaaaccgatcataacgcacacaagcctccaccgaaatgtttgacaccataatattttactaccgagttcgcaaggctaatatgtatttccttttgtaatttttctctttattcgtattcgagaataagtggattgttcttccgaaagttagatagatcattatgaggttgttcttagagagctagaaaactcaaaacaagtttatcaagtcgatcaactctttgataaactcaacaaatagttatcattgctcattataagattgaaaatgagactttgtattgtggaaaataaaatgcttacctcaagtgaaattttaaagtttatgctatgatgtttgtgatttcgcaattatatgatttaatgatattaaataatcaaataaataataattcattaaaattcacatatggtttaaataggtctaaatgagtttatatgggtcaaaataattttgatggttctaaatgggcttcaaatttaagtgggtttatatttacatgagtgtgtgtgtttacatgtagaggggcttacccaaattaacatccaaattaacatagagtaatttccaaaatgaagtaagattaacattcaaattgtgactagaactttgatttgagttatatagactttgtgtattatttttttataatataaacttcgttttgataagtttatataaaccttgttttcgtaagagattgtgaaattttctttgcagagggacatggttattttttgtctttggttcttgtaatgagattttaactatggtaaatctaagagcccatttgaagatgatgtctcggccctccttatccttatctcgcccaccgttctaaaacccttcccttcctcttcttttctcttctccttccacttccacttcttctatctctcacaattcagcaatg

SEQ ID NO: 4064 - DNA, 3000 bp, Unknown
  misc_feature (1)..( 3000): cDNA_ID_1450335_gDNA_ID_1620681_Annot_ID_164435 3000 nt of promoter + ATG
aatctaccatgggatgtggacaatggccgtctagaacagcttttcagtgagcatggtaaagttgtggaagctagggtggtttacgaccgtgagacaggtcgttcacgtggattcgggtttgtcacaatgtctgacgtggatgaactcaacgaagccatctctgccctcgatggacaggtaccctactcttcctcatatatggttatgctaatgcagtcaacatgattttgtgatgtatctcttaatcgacctttcattgtctcttgatttacagaacttggagggtagagcaatcagagtgaatgtagcggaagagcgtcctccaaggcgtggatattaaagctgagatctagctgtgccctctctctctccctatcttgcattttgtttagacgagattcttacactcttcaacgattgtttttggctgaactctgaatgtgaaagttaagctgcttctaaagtaatttgtatcgcttgtttttgatgatctcttattcatagtttaattcctaattgttggagtttcattccctcaatcgcatcgggggatacgacacatttctgggacatgccttgtcggtgacctttagatattagcaactacgaggtttaccccaaaatcggctgagaatgaaaggcttctatagcaaagcacaagttggtcgaggcctaagggaagaagactagaaaggtggtgtcatatggtgagttagtctctgccagtctagaggttcctaaagaagaggattgggatcttcattgtgttcgtaaagggatccactattttaatctcttgattggccactctctaatccaacacttaaacaaaccacacatgaaaaataagtctaaatttaaagcttattaatatggcttacttatttggcttaagaggcctaaactcatgtgatgtatcctagaaaaattatagatatacaaaattatgtatatcacctacgtctagctgaaatcttacccaccaatgccaataaaaagtttgccggagagaatacaagaaattcgtgtacaaatatacacgctccctctttatctttctttcccttgttagctaagaacaaatgataaaaagcttacaccttttatgaaatgctctctcactctcttaccctttcacccatgcccggttcttagtactgggagtgctatggcacatgacccactatgtttttttgtaaagaaaaaatcatttatattctagctccagcttacagtcctgaacttaattgatatgactcgttgaattcactaatctgaatgaaagactcttcttcgagttctgtttgtagcaagtatgtataactccaagccaaatatgaaatcatggtttcacattattagagggtacgtaatacaaactgagacaagcaaaacatgtaatgtaacaatcaaattctaaaacatatagaattagattcaactgatgatggcagagtgaaatatgcatttaaaagacaaaacaataagcaaaaagtctcgatcgtgctcgttgagtcgctttatcaaaatatggaaatgcaacatttgttgggatacacgagattaaatggtccatatattcatgcatgtgtagcaaacagcgtaagaaataatagacgcaatatataaaaccaattaaaaagagaggaaacaaagtgtatgagaatagagcgacactgatgattcattttctaggccagatcttgtcttggaactctcttatcgcccaaccttagccttagcttctcgaccagtcattccaataatttccacacttgtctctttgcttacctctattaattatttttggatccatcgttcaacgttttataaataaaataacattatttaattttcattattgtcactatcattctgcaaaaaagtgtaaaaatgtactaatatttttcttaaacaaaatgataagaatgaagtcgtccaaaatgtgttttaacctattttagtaaacctggacaaaactgacgaaaaaaaaaaaagtaattggacaaaacaaaaatagtcatttaaaaaaattatatatcatgatatagagctacctaatgcagatacttagaaaactaagattcattattctctgataaagaaaataatcacccacgaaactactcaattataaaaaaactagtccattattaattggaatatacttaagtgtagtttttgttaacataaatggaggtgtatatatagttggtgccggcaagaaaagatggaggaaggattgtatcggtcccctaccccatgatcccgccagtaaattctttctagggcacccaaccatccacgtgtatccctcaaaccctacaacctgtaaatgtaaatccattacattacattgtatcttatttaatactgtacttacccaaaaagtttcttttaaattcaatcttaaatcatgttatagcaaacaaatctagctacacaccaacttgtggtttttagaatcttttaacttgtaatggacttttatgatgatatccatgtgaatcacacatgcatgctatgatttatcatgtgtagtaatatagtatgagaggccaatcacataaactcttaaatacaatgatattggacatgttatgttttgcatttcaaacaaaacaaagaaagaagaaatgtcgttttttgtttgtataaatccaggaataatggttttggtttttagacgcaatagagacagtatcaccattttcgttctggacaaacaaataaaattaaaattttgatacattaaaatatggttagaacttagaaaacaaatttatttaggttcataggccagtgagtctctctctctctatctctaaaagaaagagaagcaaaaaagtaaggaatgtttcctcgcaatcatcatcatcatcaccatcttcgtcttcttctttgaaacctccagcgacttcctcgtagttctctcacttatacacttactaatacagagtaacagagagagacagagtggactcttcttagagtaagatg

SEQ ID NO: 4065 - DNA, 3000 bp, Unknown
  misc_feature (1)..( 3000): cDNA_ID_2995209_gDNA_ID_1620681_Annot_ID_164434 3000 nt of promoter + ATG
cttcttctttgaaacctccagcgacttcctcgtagttctctcacttatacacttactaatacagagtaacagagagagacagagtggactcttcttagagtaagatgggaggtgtgacttcttcaatggcggcgaagttggcgttttttcctccgaatccgccgtcgtacaagctggtcagagatgaaacaacggagctttttctaatgagcccttttccccatcgagaaaatgtcgacattttgcggctgcccacgcgccgaggcaccgaaatcgtggccatgtacatcagatacccaatggccgtcaccacccttctctactctcatggaaatgctgccgacatcggtcagatgtatgagctcttcatcgagctcagtattcacctccgcgtcaatttgatggggttagtaaatctcccagatcagatttttctttctatatttagctcaggatcttgctcagaaagtcctcgccttttttggttttgctctgttttctggatttgtgcaagtagatttgaagcttctagatgcagaattttggtcttagtgttagagagaagtggactttattaagctgtggatttgtgattcacaaagcttttgaaagtttaagttgcagactcataaaatcttggatttttgctggaagagtttgtctttagggtttgtctgaatcaggatctctactgatcctttatcaaagagacaaaaagtagttttgaggttgagatgtttgagtttgattgttgacacttgacaacaagtggtcttgggcaaacattaccatttctagaaattcaagatctgttattgtttctgtttctaaaggcaagtactgaatacccaaaatgtagttctttgatgtaacaactttttggctcattcaggtataacttgggattctgggatagattggtttctcaaattagtacgctatttttttctgtcgtatcttcaagtgaacctgaaattagtagaatttacttctgtaaggttatgatttccatcttatgacattggaaaatcctctaaatatgttgtggtgtttataggtatgactattcagggtatggccaatcatcagggaaggtgagtaaccacagatcctaaagctctcttagttctgagattcaaatgttggtccatttacactgtgaacaactgaacataaatctccattttgttgcagcccacagaacaaaacacttatgctgatatcgaggctgcttacaaatgtctggaagagaattatggggctaagcaggagaacattattctctatggtcaatctgttggtagtggtccaaccgtggacctagctgctcgtttgcctcgactaagagcttccattcttcatagtccaattctttctgggcttagagttatgtatcccgttaagcgaacttattggtttgacatatacaaggtgaacataatacccttttgatttctctacatgatgttgctgataaacattcctccttcttgacaccgttttgtttgatcttcttcagaacattgacaaaattacgctggtgaggtgtcctgtcctcgtgattcatgtaagtttccgtgatcaaagattattgattggaagaattgaagttaataaagttgaacagatttgcaagatccgttcattcttgtatgaatccttgtctaataatcctcagtgttagcttaaaggtgaaagcttttcgatttgcagggaacagcggatgatgtggttgacttctctcatgggaagcagctttgggaactctgccaagagaaatatgaaccgctatggctcaaaggtggaaaccattgtgatcttgaactctttcccgaatacataggccatctcaagaagtttgtgagcgctgtggagaaatctgcatcgaaaagaaacagttctttctcaagaagaagcatggaagggtgtgaacaacctcctcgtcatagtgtagatgctccaaggaagagtaaggacggacgagaaaaaccgaggaaaagcatagacagactaaggttccagggatacaagttgagccacatagagaaaccggagaagctgaaggttccatttgaagaaatggagaggtcaaggagaagcgtggacatatacagagataagtctcagccgatggagagagcacgtaagagtgtggattggttggacagaagtcgagctaccgaatgaaaatggagggtttgatgtcaaaagattgtatttgagtgtcgttcaatttattggggtatgtgtttgtattgtagtttgtatgccaagttaaaatacaacaggaagatagatttaaacaaagtatgataacttgtctgactgtttcccacacgacacttttgactggtttttagtttatttgacaagattcgtgtgctgtcgtcttgctgttgttgttgttcatgtgcaaacttgaagtgtaatagcctgcaaacagaatctccgatctaggaaccaactaacaataatcaacaaaaactctcgatccaacctagcacagaagcttgcactcgatttgctatagtgggtggaagttgtattgtacttgtatttgtaagaactaagaaggatccatagttttttgatcaaaaagaaaaaggaaaaagaaggatcaataggcttgatgattactgattatgtagatgggtatttttattggctttcttaggcccaaacaagggatctttatgggcttttattacattggtactgtcagagtcggataagactccgaccgaattttctaaccaaagtgagtctggttcgaaaagactgcttcaatgaagccaaaactatccaataactcgaaattgactactcttttcttttgtctctgttgttgattcgcaaaggcgaagattatccatcttctcagttactcctactggaaccaaaagctcagaaccttaaaacatggagtctctatctcttcccgttctaaatcctctgttagcttctggttctaatctttttagaaaccagcactcgaggatg

SEQ ID NO: 4066 - DNA, 3000 bp, Unknown
  misc_feature (1)..( 3000): cDNA_ID_1023143_gDNA_ID_1620681_Annot_ID_164453 3000 nt of promoter + ATG
atcaatggcgtccatgtcccttcttttttttttttttttttgtgtgtttcgtttttattatttgttctgaatgaaaaacaaattgtgagtcttcggaaaaattacggcaaagaagatatatagaaaaagagagagagagggaacgtcacatggatattgaagaaccaatcacagaccgatcctccacggagttgtgccatgtcagcaaagtcaaaactatagtgggctcgcgttgctttttttgaccaaagcccattttaaacggctatggcactaggcactagctgagtaacattcccttcttgatcttggataacatcaggttttggtgagttttaaaatgattttaaaattttagtgatttcaaatgaatgaatatatagaaattgatatgatttttaaaagctttttgagattttcaatcaaaaccatagatctataacatgtacacacctttgtgttttgagtcaaaatattcctatatacacctaaccatttaaaagacaagtcaagatcaagtacaccagaataaccttgagagacgtgtacatctataaccaagaataccagatatcattggacttttaacattcatggattgtatacatagaatttgtccttttaacacaaaatcattaattctaaaagatgtggttgaatacactcctctcccttgacattggtacaatataacatttggaaattgtaacacacatcacctagctcctcaattgaaaaagttgtatagctttctttggttctcaaaggacaaacacaaactcatattaatgtctcaagtagtagtaagttggaaagtgatgaacaaaatatacattacttgcaatttattccatagattcaaaggtaggagcataccaaccaagctgatcgatgagcttcttcaacctctcttcttgtcccttggagtctccaaaagcagtggtgaaaggatacacaaaggtaaccttagtggccatacacctgtaagcaaccacatcttgcttcaccaaaaactccatcacatctctgctaaatcctcctccttctacctctgcctccacatacctccctgcaaatgcaattgtgtgtgatctttcctcaaatccttggtgggaatcatttaaaaatccaattgtggtgagaaataatttaccatagggagtatcttcaagaaccacaaacttggggttcttctgggtgctcattattgcttctttcagtttctgcgttgaacaaataatcagaaacgatgctaaattgatgaagataggaggaaatatacctcaatgggatcctgtgtatcggtttctgggatcgtcaatggaaaagagaaggaagatgaggttggattcgtcgatacacatcctgggttcgtggaagggcaaggcctaattttgctacaaaaaaaagagagtaataaagattagctttgtttagagagcagaaatcagagtgagaagaggaacaaacccattgagaagaccggtctggacgaacttggattgggtgaaaggagtggtgagtggctgagaagaggagagagaaggaatggctaaggcaggggaaaaggaagttagagagatagcaagagcaaaagagattagttttggtaaaagagagattggaggagaagtagaagagagttcttgttcttgttttgggctttgcaatgagcacaacaacttggtgcttctcggccgtggcgggaggatgagttgcaaactggcgaccaaactcatgtttgtagtttatggttactctcttctcctccaaatattattaatatataagtgtctcaaaacgctttactgaaatgaaaattaattaaaattgttttttttttttattgtatgtttgaacttttaaattttagttgactacaaattccataatgtcccgatataaaatgtgagatgtgttcttgtttgaccacaataaaaacactatgagattggtagaaaattatcaagaaatagagtttcacccaataccaatagcgtttcacctagttttcatcatcctattacaaaaattcgatggtaaattacaagcggcaaagttcaatgtaactaatgatacaccgatacacgtaacatgttcattgaatgtttcattaaaccaacaaaaaactattgactcatgccactagaaaaattaccaccgaattaaattaaagagagcgagaggcaaatgaaacgatagaaaataagacgttcaatggtcttgagagaattaaatatgtttctttatattcaccagtgtttgaacatttgcagaattgtgcagagaaaggactaaaggagaatgaacaacattttattggacaaggaaactctattttcacgatttcgcaggtatgtctttttataatattacttatttcataatattttgatatagatgattactcaaacaaaagaggtgaaaactcttgtaaattttcagtatttaacctgcaaaacagatactacttttttacttgatttatcaaaccaaagttaagacttacaaaagcaccggtgacaatccgacattgttgccatgcaaagactcaaaccaatttgaccgtcgacgcttttttagtatttcaaaaatatttttatcaattcatgaattatgattattgccaaacatcgattcagtggagactaggtttatgaattatgaccgtagaacatatgaaaactgtgtaaaactattgtataatttatgtattaaattttgtattaatcaactgatatgcggtcggaccggatccaaccggcgatcgaaacataccatttatattttttctttttctattttactagaaataaaataaatagaaacctccgttgcttttttggcaaacactgtgagagagttgaccaaaatcgacccagtgggaggactaggtttatcgaaagctccagttttcatagataaatccagtaaaattatacacgcaaattctagtttcttagagcaaagctttgttgaattgatagcttgaatttggga

SEQ ID NO: 4067 - DNA, 3000 bp, Unknown; identical to SEQ ID NO: 3126
  misc_feature (1)..( 3000): cDNA_ID_4262337_gDNA_ID_1620681_Annot_ID_164451 3000 nt of promoter + ATG

SEQ ID NO: 4068 - DNA, 3000 bp, Unknown
  misc_feature (1)..( 3000): cDNA_ID_1822802_gDNA_ID_1620681_Annot_ID_48352 3000 nt of promoter + ATG
tcctgttggtcctcaggtgaaatcgtagaagcaagatcttctactttcaggggagaatgtcgggccatatattgaaacatgatctgcaagatggattgtaaatgcttgagtcaatttcataagcatgattctcccaaaattcgtatgccatatgcaaggagagagagtaccgaccttggaatagctatcagcaaaggctcgggctcgatttgatacaccgatatattgcaaatccgccttctcaaatctaccatccacacatttcagccctccatcgccaatggcaaagcgaataagacttcctgaagacagccctgactgtaatatccaacatggcacgaaccacacatttagcaaattaacacagtgcgaaatcatctttacaatctgttattatgggtacatggagtctataacaaacagagcagtactaagctagagggctctgttggtcctagaaagaactcaaagaagctattactaagcaatatcactaacttacgagtacatagagtctataacaaacatagacacagtatagatactaccactgagtatgaagcaaccagtgatattatacagtaacattcataaaacagaggatacaagatctgtccactttctaatataatcatcattcatcataagaaatatagatatgttcttcaattttcaatttttccaaatgctgatcatataatcttggtttaaaggctgatcaggatatataaaccactccattatattctgaacagacctgttttacaaaatctgcatttaagcaactgaatggtacaggtggatcatcagatgttacaagttttccttcttcttgcaactccaagacaatctgtttttacaagatacagagagaatatatgttaagactttgtaaatgggagtgtaatactaaacactttgtatgaaaaaccatgagctgtaaaagtctgtcaaaatccacttacatgttgttggtttggaacttctccattgttatcagtatcgatgacatactgactacagctctcatccttccatatcaacaccagaggagtatttccagtatgataatgtgcatgtctgcaataattacatgaactttagtgggaaagagtcaaagaaaaatactagaccaatgagatattgatatcatgatactaccactgagtatgaagcaaccagtgatattataaagtaacattcataaaacagagaatacaagatctgtcctcgttctaatataatcatcattcatcataaccaatggttttgatacgaaattgttaagtctgaagaacttttttaacgaaaggttccccggttatcgaccctactgcccaaactaaaaccctataccatcataaccaaatgcattccctaatatcccttcaaaccattcagctctaaactaacgacttaaggtcctttgctgagatggcaaaactacaactaactacataactcctaggctagttgcaataatcctgcactagaaaacaactgattcgctactccaaaccttaaggcacccaaactttttgcaagtgcagacagcaggagaaggaaagatgggaatcacagtaaacttaaaggcaccttacaagtaggcgagatgaaatgatgcacttacttgttataaaataacaatccatccctgacataaggtaatgatcctgtataagctgagtgaagtccgctttggtcgcagttgtaaaaaggaactacactgaacctgaacttgtggtagacggaaggcggatcacaagcaccggtctcagcaagtttcgattgcaaccaaaagaacctgaactctgatgtgcattcataaagcgagtaacctctccaacaaaccatatcaatcacatagtatgtttgatccgactgcataaaaaaacagtaacaaatcacctcttagtaagatcaaaactgagggtaaacccgataaatcagtgaaaatgaagaatcttttacctcgtgaaagatacagtctagtatagagtacgagtttgcagggccagaagcgccttttttcctcgcaccaccaggtaatgcagaagggaaaagatgcaaagtggacccatttcgtactctactaacagttgttccatcagatgaaactacaaaacatcttttcccagctggtcttgctaacacatacctaaaaaaccaaccaattctcataatcagccatttatgaaggaagagaagcagcaacaacggattaagaatgagaaagaagcagtaccaatcttggcttaaattatcagggacgtcgatcatccattcaggtaacattagctgctttgcgaaccacttgcgtgcctcaggtcctctgagcctcgaagcttgacgaacgtcaaagctactcgattccgattcggttcctacaagctcaggcacggcttcagatagtatctctgggtcgacatcgggagaggaggattggagcgagattaaggaagaggcgaggtttcgggctcgctgctgagcatcactgcgatgctgagtctgacgaataagagaaagctctcggcgtttctgttgatcggagataggtcgtcgcttgaaaggacggcgaatttcatgaggcgccatttttggaagaagagttcgagcaactacgttctattggtcggacccttaaggactggttcgacctaaaaacgctctgagagactctagctttggaatttggatggttgtgcggttcaaaattaaaaccaggtgtgggtaaaactgaaccggatcggtttggttttggttgttaagtacaaaattcgattcctaataatactaaacggtttggtttaggtatggttcattaatcaaagtttctctataattttttcccaccgagaaaggcctatatatacaccaatttacataagctctctcatttcttgttacgttctctcaaaattcatctctcgcattgattcttcaactctcaaagaatcgcaaatcttgctcttgaaataatcggaagaaagaagagtcatg

SEQ ID NO: 4069 - DNA, 3000 bp, Unknown
  misc_feature (1)..( 3000): cDNA_ID_1823766_gDNA_ID_1620682_Annot_ID_48355 3000 nt of promoter + ATG
gcggcttcggatccgaattacaggttcgttagaggtggtgagagaagaagctggacggctctcagaatgaattcgccggaaattgggtttggcgcagcagaaaagaacggtggctgttgaagcaatcgccatggctgagatttttctccaatttccaattcccaagttctggtttaattttaaaccggtttgctgttgaaccgtcttttatcattttcacaaacaaaattaaactaatcggtttattaacaaattctggtttttctaattacttcccatctttgaagttgaagagaaaaatataaagacaaaatggagattagtacattaaaaatctcaaattctgtattgaattatttatattacaagaagaattttccaattatttgtagtacatatatatatgtataatcaaaatgtggagtgaaacaaaatcaaaatgttaaaatgtgttactcttttccttagaccagatcaaaacgagagtgaaccccatcaatgacattaccaccgtctgcaaaacaaaacaaaaatctctataatcatcatcaataaaagattatgctatgtcaaaaggatatgagacttacagatatagcaggaggaatccccacaagaggatcttgaaagaacttagtagcaagcgctagagccaaaaggctactctgcattcctgatatattcacaaacacatttctcttctcaaatctttaaaccaaattgtactttcttgataagattttccaataccataaagagttagtaccagtttcataggacaatgttctttgcatggctttagcgtctggagcgtttctaaagacagaaccggtaaggaagtatccagcgaggaaagctgagagatgaaacattgttactagtaacaatatggtggctccaaatggagacatgaccgagtttatgttcaatgcgagtggtgctccaacgcagcaagctgtgtcgagaaccgatagaatcgggagaaatggtcggattgcatttgatacttttgggaacaacctgtaaaagaagaaacaaaaaggagataaaaatggttatacttagagaaacaacttgtggttatttctagttgtaggcttgtagctatatctctcacttgtttagtagcaatcctgcagcgattggtgcgattacaacctgaagaatgctggatatcattccttttacatcaacgggtagtttcttcccaatgagcaggagtgatagcatcggtgtgacaagaaccgcagtagcggttgatagagatgtcatgacgatgctaagaggtgccaatgctggatcagttaggaatgtcgcatagtttgacaactgagctccactaacacatgataccaacatgattccagcacctgagagattgagaaagattggttaatgtgagagataggttaagagtcttgaatgatgagagacagggagcttttaccaattggagttgggagttggaaaagagaaacagcagctaggccaaagatgaaacctaggacaggctttacgagatattgtccaacataaccgaggaggatagcttttggtcttttgaaagcttcaagaaagtctttctcgtttgaattgataccaaccgcaaacatcaaaaaacctaaagcgggcacaaagtacctaaaataacaggagagtaaagaagagctttttagcaaacctcatgtctacaattcaaagtcttagatcaatttgaccttgttccaatgggaagaacctcgacgtaaaccaagtgaaagaaggaggatagataagagctaatattgtactcgccaacactacatgaggaagaattgagtttgctttcttcattctatccactatagaaggcttctcaataacctgcaagccacttactagattcatgttggttctcggaagtaacataaaattcttaacaactgaaatcatcagcaaacgaagaacaaagtagcaaaactgtgatccagggatgatttttagctaatcagattcaaaagtaggataattaacaagtcttcaatagtgcaaaatcacattttgacattaaagatgacacattttgagaagactattcaaacccaacataacatagaatggaaaaggaaagatcccatagcgcacaccttgaatggatcagctccaggatccaaacccatctccgagaaattatcagatgcatatctacgccacaaattcctcgatccgccaactgtgtatatagtaggttgaagaaaaccatgagagaagaaagtgtaaattttgcaggtacccaacaagcataaacgcctgaggatcgatgagagtaagatgaacaaaccttgagagattgggtcgatgcgaagtggagaactcagagaagtgttcgagaagatgttgggcgggaaaacttgaatccgttgactgcgataaacagctcgtggtagaagacgaagtgttgactttaggtgcagggtctctattggagttgtgatcacgctcattttttttctttggactttgtgatctttcagattcttcagaagaagtggcgaaactctgagagttctgggaaatggaagaaagagggagagattcagagaatctgggacccgagaatctgtcgcatcatcaacctaacaaaacccgacccgacccagttagagtttaagtttctggaaatggcccactgggctttaagataatgtatatttcaaattatgattttcttattttaaaactgatatttggaatataatgtgttgtgtagtgagaaagacgcaattaatatacttaagttagggtaataaaaaaatcggtacaagactacaaagcaaagacacaaatcaaggagaaaacttccacaaattgtctctctttctttcctacacaccaatttgttttgtgattctttcgattgcattcttctttttcgaattcccgatcactggattttcccgtttaaccggaaaatccagtggattagattttacccagtgttatctttttggattggattcg

SEQ ID NO: 4070 - DNA, 3000 bp, Unknown
  misc_feature (1)..( 3000): cDNA_ID_1809214_gDNA_ID_1620682_Annot_ID_48358 3000 nt of promoter + ATG
gaaaccatattcgaaggtaaaatcttacttggtgcatttgacagtgttggttttgccgccgctggagattgacagaattgttccaaagaaggaggtgttttccgttccacaattcggacaaggaccctgtgaaacaagaaacattcataaaaaggctctttgatgtttttcttttgcaatcttgagtaatggtaatggttcttaccttcaagatcaagaagtccttgatgatcaatttggtgattgataaagccagatatacaatcacaggcacagcagcgaaccaagtgaatatgaaactgtatggttctggaagctccatgatgtatgtgatctcaaaacctgtaatgtcgtccaggaagaaaaagctgcaagtacagaattgaatgaataaacaaagacgaaatatgggtttcatatgatttggatgtttgaatagaaaactcggtatagagactcacagtccgagagcaacaacggttgctggaacattcaacaataacattttgaaataatctacagcgagatcactatacacctacatttgaggaagttcataaagactgaaaattagtatctatctataatctaatattaacaatgaatcttatgttctatttacctttttactacggagactgcatcttggaccctcgctcacaatgtcgctaccatcaatctacatggatacagaaagaatcataaacttgaagcttaaaccaatcttataagggtatgtctattttcactgaagcataaaaagtgaatggaaacctttagtttgagtttgagcttatcatattcttcatcattcaagattggatttccagaaacataagccatggaagcttccaagaatctttgttcatcggaacctgtgtttcatattaccaataaaagatttaggactttgcaccaaagaaaccaaaacaaagaaatgaaatttagtcccatagttgatgattacttagcatcacaacactgcttccttcccacattaactcttctttaaggttatcaaactcttcattagacatgatcgctttgccatcataatagaaagactgtaatcaaaagacaaaagcaattctcaggctcttgaagattagatatatatcatgttttggcaactataaaaaaaatggtttattgtagcgtttacttgcaacgcttggagaaactcttgttccatttcaccaattgttttcttctcagccttgttgatgctacaatagggcaaaacattgctatcgacgttgtctcctcctactggaccttaaggaagacaaaaagactgtaattgagaacttcatagcaaatctaaagttgataccttacttatgcaacctaatagttacacaacttctgacattgcaaaactttagtacagagttaaccactaaatagtcaacaaagtccaatacaaacaaatatactataccaaagttatagccattgaatcaatcaaacccttcaaagaattgaactttaacaggattcgagtctggatactacaagttagtgacttaaaaacataaattttcagagctagagacgttgaattaaaataatatatcctaaatttcaaaaggctcaaactttggaaacccaattgtgaacaaattcgaatccaaatggctttgtaaacagaaaactaaggcggagtgttcgaaatcgagactaaagtggccaaatcaagacctgattgctctgttgtggctttagcaggcaacaagaagactcttcttctcaaagaaatcgattttccagggctgagctgagtccattgagtcctcgaagacggcgacggaggagaaggagagaaagaagaggaaggtttgcgagaaacggcggagaaaagtcgaggacttgtcaaactaaacaacatcttgctacccattttcccttagagatagaaaagggagctcctttttttcctctgtttttttcagtaagtatgaacctgtggttgaagatgtgtttactgtgagcttctcaggtttcttctgatttttttttttttttttttttttggttttattataaatttggagggaagaaattaggagataagagaagtgtggagataaattcctaggcagatttctcttattttttccttcctctcatcctcataatcagaatatccacgtcagcattaaatatccggttttcttaaacaaaacaaaaacttaaaatagagaaaagacataattttaggctttgattatacaataaaaaaaatactgtgagatgagtaagaagatttttttttcgaaacatggtgattttttaaaaaaatttgacatgtagtatgtgtagttgaattcagctgataatatactttagtacaaaccattaaaataaaaatgagttccaaattttaaaaaacaaacaagataaataatttagttttccaaaagaattattgatccacatacaattgtctatttgaaattgaaaaccagtcaaattgtttttttagtaattgatttccaaactacaaaaagaaaatgtggttagtagaagaactagtagaggtgaacacgtggagacacgcttaaagcacgcgacgaagaacacgttgatagcgattatgggtttaattctattgggccttttctgggagtctagacccaagcccatatagtagtaatctttttgaccaatcagtcaacccaaccatcctctcccgttgaccgtgaagtgagtcacgcacttacctcacaacaatagcactaaccaccggtagctctacaatgtctcttagttcggtaacaaactcttctaactaaaagtatagtaaaaactttgctatataagaaagagtctttgcacatttcatttacttgcaaccaattacaaaaaagagtgtaagaagaaaaacaaaacaaatccattttttttattactctgttttttcccctgtttttaagtttatttacttcttactctgttttctgctctgttttagctttaaacagaagactaaagaagatg

SEQ ID NO: 4071 - DNA, 3000 bp, Unknown
  misc_feature (1)..( 3000): cDNA_ID_2990417_gDNA_ID_1620682_Annot_ID_48359 3000 nt of promoter + ATG
catacaagttatttaaaaaattccaaacaaaaaaaagaattgcatatgtaccttttccgaggaaataaaatttgtgataagtttagttcgcatatctatttatattgctttgaacgtgaaaggtatacagccaattaatcataccaaattaaaccaaattttcaagaacatgaacaatgtacagtaccaaattactaacaaattttcaaccattttgatacttgcgttttttctgtagattattatttggataattatactaaaaatataatttatcatgttggatgtggtagatggttgtttacttgtttagacaggagagaagaaggagattgagccataccattaagtagtggagttaagcccaaatatataattgggttaaaaaggccataccattagtaaacaatcgattccgaagttgatccataccaatagcacacaatcaatttggccataccatttgttgagttcagtgactgctttgaaagaaggcacactaatgctttcgtagatacaaaagttaactaattcaggggaatcaaagtttggtttgcatgtagtttgtttgggttttatttttatattttattttagaactttgtttctttaaattaaagtttgcttgttaagctccgcaatattcactataaaaggcacaaacacatcaaattcatgagaaagacacaaacacattataaaagaaactcgcacatagagtttcaaaaataagagtaaacacagaaacttaatcatttttctcggataccaattcctcttgttccttcccaaacaacttatgctcaatatgttgagcaaaagtccgtggaggaaacttagccggagactcaacactcaccatctccggcaacggcttaagaacaatcttatcctttgggggttcacaaaacacagcccaagaaatcctaaccttctccttattcaccaacccacgatgaagtatactcttatacttcccattactaagaatctccaaagtatccccaatgtgcatcacaatcgaatcaggaacacattttgcagtgacccatttgccctcgtagaaaagctgcaaacccggaaccatgttgtgtagaatgaaagttaaagcgcttacatcggtgtgagcttccacaccgagtgctagctcaggctgaggacattttggatagtaatttatcttcatttgtagaagaagctcttctaaaccaccaacttctttctctagacggtcaggctctaaacctagaccgacagagagagccttgaagactttagtcgctagcaaacgaagacacttcgcgtactcactcgttgcttctctacaatcatcgaaaaacgttaataaaagattctaaaaccaaaacaagattttgttttctttagtaaaacaattcaaagcttacatgtaatcacttggtgtcttaggccaaattgatagatctctcttctcttcaggatacgcaagatgaaagaagtaatcttcccattccaattgtccactcgcgttgttagccaatttacttccatagccttgaatctttccagtggcttgatcgtttgcatacttctccttctcttccacagacaaactgaaaaactcttctccggctttcttgacacgctccattagatcagctggtattccatggttgatcaaatgcatcactccccaatccaaagatgcctttttcagctcctcaatacaattctcacggatcttttcatcgtctgactcgatgttctttagatcgattgtgggaacttgaggaccgtcttctttcttctcttctaggaaaacatcgttgatgctctcgagctcttcttttggacgaatatattcttttggaatcgatatgattccgctttttgctagactctcaactctttcaaccgcaaccatcttctttagtcttctgtttaaagctaaaacagagcagaaaacagagtaagaagtaaataaacttaaaaacaggggaaaaaacagagtaataaaaaaaatggatttgttttgtttttcttcttacactcttttttgtaattggttgcaagtaaatgaaatgtgcaaagactctttcttatatagcaaagtttttactatacttttagttagaagagtttgttaccgaactaagagacattgtagagctaccggtggttagtgctattgttgtgaggtaagtgcgtgactcacttcacggtcaacgggagaggatggttgggttgactgattggtcaaaaagattactactatatgggcttgggtctagactcccagaaaaggcccaatagaattaaacccataatcgctatcaacgtgttcttcgtcgcgtgctttaagcgtgtctccacgtgttcacctctactagttcttctactaaccacattttctttttgtagtttggaaatcaattactaaaaaaacaatttgactggttttcaatttcaaatagacaattgtatgtggatcaataattcttttggaaaactaaattatttatcttgtttgttttttaaaatttggaactcatttttattttaatggtttgtactaaagtatattatcagctgaattcaactacacatactacatgtcaaatttttttaaaaaatcaccatgtttcgaaaaaaaaatcttcttactcatctcacagtattttttttattgtataatcaaagcctaaaattatgtcttttctctattttaagtttttgttttgtttaagaaaaccggatatttaatgctgacgtggatattctgattatgaggatgagaggaaggaaaaaataagagaaatctgcctaggaatttatctccacacttctcttatctcctaatttcttccctccaaatttataataaaaccaaaaaaaaaaaaaaaaaaaaaaatcagaagaaacctgagaagctcacagtaaacacatcttcaaccacaggttcatacttactgaaaaaaacagaggaaaaaaaggagctcccttttctatctctaagggaaa

SEQ ID NO: 4072 - DNA, 3000 bp, Unknown
  misc_feature (1)..( 3000): cDNA_ID_1822914_gDNA_ID_1620682_Annot_ID_48361 3000 nt of promoter + ATG
tagcacgccaatgtctctctcttttttagtctaaaaattgattacaatttttttttatgaattttaattaacacagaaagtgtaatcatgatcatcatcttcccatgcctctatcatcattgatccaattttctcctccactactgaacctattaattgcttttacgttgatttaaaaattttaaaacctctacgttagaacggtcatatgcttatttaacaattagatcatgtcttctataaaggtaaaagagaaatctgacaaatgaagtgtaagtgtttataatgtttgtgtcccaaaacacacatcccccacaaaagtaaaaacaccatcaaaactttctttctttcctcttatcttcacttcctcttgtaaaccctagattctcttgttcctcttatggattcattctctttttgtatcatcatcatgatacttctcttatcattccaccaatctaagtctcaattgattcaatctacacatcttcttgatctcatgatcagagattacaccattagaaactttaagctcaatttcaacacaggcgtcactcagaaaatctatctcccttctaatttctctggtatcgatattgacacggtcaagttaaggtgtgggagtttgagaagatatggcgcaaaaattggagagtttcacatcggttcaggccttacggtggagccatgtccggagagagtcatgctaattagacaaaactttggttcgaattggtcttcaatctactctactggttataacttatccggttacaattacaagctcgtgtcaccggttcttggtttgttggcttataatgctaaccctgacggtgtggccaggaacccttacgaggttaatgttgtaggtaccgatcaaaacccaatcttaatcgatttcttgatcaacaaggcaactaataacactagccctaaccctacgaagaagaactcgtcagtcttgtgtgcgtgttttacaagcaacagtaacacaacgtttagcgagcaagtctcgccgtatgtgtgtaaaggtacaagacaagggcattacgctctcgtgatgaagacagaagctcaaaaagatgatcatgaaggtggtggtagtagtggtggagtggtggcatcatcgacggaggtgaatggtggcaacggaggaggaaagttgagccgttggaaagtggcggtggggagtgtgatagggtcagggattggagcaattctgctgggaatgttagtggtggcgatgttggtgaaggggaagaagaaagcaatgagagaagaaatggagagaagagcttatgaagaagaagctcttcaggtgtcaatggtgggtcatgttagagctcctactgctcctggaactagaactcttcctagaatttccgatgataggtataataaaaacactcatttgaatagtaattatccataattatcatttgttttctgatttttcttctttttgtgttaattgagtatcttaagataaatagttttgtagaaatagtttcaatggcttcaaaatgaaatttcatccatttttttttagtttttggttaaacggctataatcgttagttttctttttactaaaagtaaagacttttacagaatggagaattttctcttttttattttctataaaatggtcagtgaaattatgcaaaaaaatttaaaaaaatcagagagtccccccaactttcatactgtaagctttatttttttcttttcattttgatttattaatctctttttccaactttttaattaaatgtatatttctgatttagtgaagaaaatatacttttatcagtattgtgactagttaacagaattttccacctacacatcaacaagcatcttctccagtaagctattgttaatgcgaagtacggaaatataaacaaatcaccaccttcattgcaacttgcaatcaatttttactcattttagtaaggttttgtttttctttttctttcagttttttgtgatttagtttaagaaaaaataaaataaaatatagatataatttgatcaatttcttatagttgacagaaaaaaaatcttataactattgtcttttgttatatttgattggattattttttgaatatttttttggtaaattttcttttatatctttgatatttaagttttggtttatactttgtatctcaattctgtaagatatgaaactaagatttttttttttctaagattttagactttagcttattaagaaaattaaaattaatttcttataactgtataagtgtatttttctaaaatttcattgaaccatttttgactagtatatatctttttggaaaaatttctagaacatctttattatttaagtttttaggtctgtacttttgtgtctcacaattctcttagatatgaaattaaaaaaccaattaaatacaaatcagatctaatttttaatatataaaatcagcatgttttggcttgatttgtccatagatctataacatttatcaactatttttatatattgtcaacgcctgccatctaagattcttctacaagatcactagagtgttttaactgcttttagtaaaaaatgccaaaaacagacattaatccataactatttaggcccatcttcaagcccattaaaccttttcctcttaatccaacgattaagattgaatcagaagcttaaacctcacggtcctcacctgaatcacaccgcttaacttcacatgtcgttttctgtttttccttagatttcccgggaaaaaggaaataattaaaaaaaattggcaaaaaggtaaaaaagttaagttaaaaaaaccaaactacaataaaaaggacaaagagatgtttcaacaacacttcaacaaaaaagccttttgttcaatctgaagaaaaaaaaagagtcaacaaaaaaaaaaaaccaatggaagaagaagatcctacagcaagcaatgtgataacgaattcgaattcttcatctatgagaaacctatcgccggcg

SEQ ID NO: 4073 - DNA, 3000 bp, Unknown
  misc_feature (1)..( 3000): cDNA_ID_1808716_gDNA_ID_1620682_Annot_ID_48362 3000 nt of promoter + ATG
aaaccgggaaagtaaactgtttgaagttacacagtttacctcatcaaagaccttggcgtatagggacaaggcaatgggagcgctgtaaataccagcacatccgcaggatgattcttttctactccgttcatgtggagcactatctgtgccgaggaagaacttcttgcttccactagttacagctttgacaatggcttctcctgtacaatgaagtaaaagcaatgatcttccgaaagctgctgaaaaaatgaaatattaatgttcaaaaggaaagtgaagaacatactatgtatttctcttttgagaacgggaagacagtagttgtgaggttgtaatccaccttggaaaagggcgttcctgttgagaaggagatgttgtggtgtgactgttgcacccacagaccctataatcaacaaaatgttatgagctatgcagattaacaaaaaccaaaagacaagaaatgaaaataagatagtaacaaaaccttctttgcaagattcaacaaaattcacagcatccatggttgtgatgtgttccatcactactttcagctgcggaaggcgttggattagaggctgcagaactgtctcaatgaagattttctcgcggtcaaagacatcgatactcggatctgtgacctccccatgaacctaatcaaaacattcctcagacaagacaaagacaaaaatacaagtctatgtggtgtatgatttatttaccagcaaaggcatgttttgtttgaccatctcttctagtaccggtaagcattttccaaagagatccgtgacaccatcttgagagttggttgttgctccggcagggtacagcttcaccgcataaaccacaccactttcccctaataacaagatcatatatgcataaactgaacattagcaagtagaatctcaatcagaaagatgaaaatgtatctgattagtttgcaacaagatggagaaagcacaggtacttacttgcaagcctgatctcttcaggtagagttttgtcagtcaaataaagtgtcataagtggatcaaagctactctcagatggcaaagctttcatgataaatttccggtaaataatggcagctgcagtggaggtgacaggaggcttcagattcggcatcacaatcgctctcttaaaattactcgcactgcacataattacatacaccattaaccatcatgtacagcacaagcatcaacgccagcacaagattgtgattgaggaattcatacataacaaacaatggttccacaagaaacaccaatagcaaacaaaaaagtggctgcaaaacaaagtaaagcaaggaaagaaaagaaagattgcaggatgtttataagacctgtggggaacaacagcatgaagaagatcaccgtcacggagatgaagatgccaatcatcaggttgagtgattgtgagctccattcttactgctctcgtcttcactttctcagaagatctgtcaaacttcaacttctgagatccaaatccctacataaagaataaaatagttgactttaacagacgcataggaggaattaaataaaattaaaactggatcacgtggattgaactaaacaagaataagactcaaagagtggtggaggtagagtacatacactataaggagagaccaaagtctttatcatctgaaagctgctcaaggctttgcaagaattcacctgttccaaagcaaatgacaagtagactcagattctataacatgaccttaaaaaattgactctgttctaaagtattagcaggcactaaaactattcaatcatcatcaaaagatttcgcattcctttggttcaatgtttctccaaacgaaatttagtatccagattaatcaaatttctatacacacaaatgggtatcagcaaaatccaaagaaatcaaattatccaaacaataaaccacaaaatggcgaaactggtaaacacctagaaaccaaaatcgaaaacttgaacttgtttaggtaagcaatacgaacctggataaacgaaatgcacaacagggatgcttacaacacaaacaaaacgaaccccaaaaagagtgatttgaggaagagattgaaggagaaagaagaagaaaaaacagtactcgtgttttgttgtttacaagatacgacgtcgcttaacgtaaaagaagaagaaaaaaataaaagctctgtaacaggccagcccaattttagcccgatatttttaatggacctggacctgatcacaaatttcagccctttttaacatccttatggatcaacatgggactctctgactcctccggttccatcaatacctgcgtttgttgtccttgttcacgacgattcaagcgaagaagcctctcgagtttcacaggtctaataactaaaccgagtaatcgagtcgaatgacattaaattgaaccgaaactaaaccgtattgctttaggttcgactgacaactacagtacgtgagttaggttcggttagagccgaatctgtgtctctttgtcgcaacgagatggctaaagttatccaaaaagacggttagagccagttgttagccccaccatgacgacacatggggaagctcatgcaaagattagagaacacgtggcactctctcgtgttcagaaaaattccaaaagagtgttcagatttgggcacggaagtgtgaaacgtgaagcaacaatcccttttaaacacaagaaccaactcaatacgcatcacaaagaaccctaaattcctggaagatctcaaaaggaaaattcaaaaccaaagcttcaagcaatcatcaagcaaaggaaaagctcaaattttgggtcttttatatatttatttcttaaagttacaatctttttgattgtggtttcagtgtacgaacacgcaagaactcgcgtgaaaaaattgtatccaagcttcgtgaaaggagtctctctgtatttagtggcgttttgttctgttgttatttctgaaatattgaagcttttgatttgggtttcaagagagcagagatg

SEQ ID NO: 4074 - DNA, 3000 bp, Unknown
  misc_feature (1)..( 3000): cDNA_ID_3072509_gDNA_ID_1620682_Annot_ID_48363 3000 nt of promoter + ATG
tggtgatgattctcatgaatatcttcatatttctaaactattcttatttgggatattagtataactttaaattggtgatgattctcatgaatgttttgatatattaaaatatatatgttcattaaacaacaatttattcatctttatgtttgcattgcagtagtactataccagtctgtcacctttaatattagctaatctgtaagaaatttacattttgatcttgtggatgagatacaatacaagtatacaactatgataaagacttcagagtagacacaaaataccatttgaaactttaaaatctgtatttaacctacaaataatcattattttcctataccacattatgtacaccaaaccaaaccaatatttagatccaccaaaaggaaagtcctgccatttccttttcactttgtacaaactaccaaaagaaaaacttgtaatttgatatttagtcactagagtttctccggatttggagtagcaattccctcagtctgagtcccagagtaaccatttacaccttcattactaagactatgagaccatggaatcgagctaacggttggaaaacaacaactacactcgtccgcacaccgagcctcgggaagagtctcagtcttgtgaccatcaggcgaaacagcttcccaaagcggaccccaacactcgactttgttgaactcattgacattagaatggaaatagacccaaacaagagcttcttgtagctcaggatagttgttcaacaagttcccatctccatgcacaaaagccttcaacacctgtatatatcaaaacaataaacattttgttttacatgaaaccaataaaaagtttcttatgaatttgggaacttaccacaggtagttctttgcaaaagatgaaatatcgaaactttgcaaagagatctaaaaggaaatggccaccgcttatgtgacaatgaacgtgaagcgacattttccctttcactttcttccattctgccacaacttcatcccggtatagcctatttgcccatccttgcaactataaaaaacatttctatacatatcagcctctaaagtgttaagagattctggtgaatatagacacatacataggttaaaacaatcatacataagcctctaatatttgctccaaataatcaaatacataaacattctactcctataaacagagccatgtagatatgttaagaccagagagagaggtgtttttacctgagagttgtttatggattgagaaatagctaaggttagtttagctgtaatgtcactgtgagtgagtgtgtaagtcctagggagcgttgaaggatgcttcttctcatcaacccctaagaagagtactttcaatttggatgattcgaaaatcgccggtccaaacaaccttgcaacctgcaccgatcccaaaagtttcaagttccatcaataaagacagaggcatagatatatccataactgagacacataaaacaaagatatgtcaaaatgattaagagaacaaatccttacgggaacaatcgattggttcttcttcttggatcttctattgttgaagaagagtgagctgctgctgctactgttactccgtttgtctgaataagctggtttcagcttcgttggtaacaacataatcgccgacaaactacacatctctgctctcttgaaacccaaatcaaaagcttcaatatttcagaaataacaacagaacaaaacgccactaaatacagagagactcctttcacgaagcttggatacaattttttcacgcgagttcttgcgtgttcgtacactgaaaccacaatcaaaaagattgtaactttaagaaataaatatataaaagacccaaaatttgagcttttcctttgcttgatgattgcttgaagctttggttttgaattttccttttgagatcttccaggaatttagggttctttgtgatgcgtattgagttggttcttgtgtttaaaagggattgttgcttcacgtttcacacttccgtgcccaaatctgaacactcttttggaatttttctgaacacgagagagtgccacgtgttctctaatctttgcatgagcttccccatgtgtcgtcatggtggggctaacaactggctctaaccgtctttttggataactttagccatctcgttgcgacaaagagacacagattcggctctaaccgaacctaactcacgtactgtagttgtcagtcgaacctaaagcaatacggtttagtttcggttcaatttaatgtcattcgactcgattactcggtttagttattagacctgtgaaactcgagaggcttcttcgcttgaatcgtcgtgaacaaggacaacaaacgcaggtattgatggaaccggaggagtcagagagtcccatgttgatccataaggatgttaaaaagggctgaaatttgtgatcaggtccaggtccattaaaaatatcgggctaaaattgggctggcctgttacagagcttttatttttttcttcttcttttacgttaagcgacgtcgtatcttgtaaacaacaaaacacgagtactgttttttcttcttctttctccttcaatctcttcctcaaatcactctttttggggttcgttttgtttgtgttgtaagcatccctgttgtgcatttcgtttatccaggttcgtattgcttacctaaacaagttcaagttttcgattttggtttctaggtgtttaccagtttcgccattttgtggtttattgtttggataatttgatttctttggattttgctgatacccatttgtgtgtatagaaatttgattaatctggatactaaatttcgtttggagaaacattgaaccaaaggaatgcgaaatcttttgatgatgattgaatagttttagtgcctgctaatactttagaacagagtcaattttttaaggtcatgttatagaatctgagtctacttgtcatttgctttggaacaggtgaattcttgcaaagccttgagcagctttcag

SEQ ID NO: 4075 - DNA, 3000 bp, Unknown
  misc_feature (1)..( 3000): cDNA_ID_1822903_gDNA_ID_1620682_Annot_ID_48365 3000 nt of promoter + ATG
acgaacgaatctaatccccaatttcacaatgtatcatcatcatcaacaccaaaagagctaaaagatctcaagatactaacacatacatttccctaatttcgttcgctaatcgaagttcacaaaccatagcgagagtaaaatcgggaggagaatagaagatgtacgtacaaatggcgatgagaggacatggtccattcttatcctggagaatgatattgcacctttgtccacgatacaaaatcttcttcgtcttgtaaaagatttcgtccggaggaggacgagagttatcgatcgccattaaagaagaaggttcacgacgatgagaatcgcttgttgagatctaaccgtctgcgaaatcggagaagacacactttgctgaaatttctcaagaagtgtgtcaaggaagcaagaaaagtgagcatgggactggcttttataagcagcattgagtgacgagaaacaaaattgattttgacgaaaccgtaattagtatggttttagtaaaccgggtttgttatgacggtcaaagctggtcccgtattggtggctctattcaagcgtgtaaataaaattcaacatttgacccttatgttacgcctacccttatgtaggcgaatctttcaactgttagtgaataaaaactctaatcatggattttagagaccaatcaaatatttatcagcggagctcatgtaccataatattataatagaataaaacttttatgacatatataaacggtaatagtaaattagttaaaacgttatgctaaagatcatataacatcgaaaaagcagtatagcaagatcgtttgaagttttatctataagaaaagatcgatggaattattttaagattttagttcagatgtttcacgcagaatttatttgtattgggtagtgacttcacaaatagcataaaggaaccagcttacgtaagagaatattttggtttgaattttcaaattacatataggtagaaatattcaaatatatgaagacgaccattgatagattttggatattagataattggatgtaaataactactccttttaggctaacctacacttgctttttcgtcaactatgggaagatgttatagtatatcattacattgattctcacgtaggtttttttttctatatttttgtagggaaatgcaaattaacaaagcattttagtacgttcatttagtgaaagggatgtggtcctctcctagcgtgcgacacctgttccaagatatgtaagaataaacaaatgttattgtaacgtattattgtgaaaagcatccaatagtggataaccacttgcttatgccaaagattataagatatttaaatcgaggaaacgaataaagtaaaaaagctagaaggtggtggttataaattacaagaaacgtatcaaacaagaggcgaagatgacatatattgacatgtgaaattgaaaacatatacaagtacgtgttactgttttatttgtgcgaaggtcgttgttataataaatttttattgtacggacgggttatttatcacacgattaaagttctcttcttttatttatcgcataaagttctgcttcttctgtggaaaatataaaacgagttttgtttcaacttcttctctaaatcaagagactattataagaagtaaaacagcaattgttaatattgtatctcctgatcagatatatatagacttaaatatgcacataagtgactgaaataaatttgtatccatttttgtgtcgaagtcttttaatttcttaaaatagataacaagatcggatggtgcacgtttgaagagaagcgaagatcggacggtgtgtcctaactacttattttgtccgatatgagctggcaacggacaaggatgcttgatgtcctcaggtggcactagtgaaacccactttgacggacaccggatctgtaggttgtcggttaatatggacacgtgccaagatctcccccattacctacataatatatatctccttcacttaattatgtttaagatgtaagtttgcatttactccaacaatataaattaattaacccatacctagactagatataccaaaaatatcatgtaaaattaagaaaaatatgatacgaatatatatatatatatatatattttttcttacgattgtacaaagttagataaattatgggtttattggttataggcttttagagtaacatataatattttaaaaaaaaactgattatgcaattaaattcgaaaacgaaataatatatagcatgattcttttccttgtcacacttcattatagattattcttcccccgtcaacaattattgcacttacatattttattactattatagattggccttgaatttgcattagaatttttaccaaaagaagaaagaaattacgtaatgcaatttctaaaaataaaagtgatgtactactaggcaggtctaggtttatatagactatccgtagccataagagaaaatggcaaatttaatatataatgcaaaaaagaataaggctatgatgtcaaattatcaatcaaaaacacttagtttttttctttctttctttctctcccctccttcatcataaatctagggctttccaagaatctctatcacaccctcttcccaaaatctcgcctatttttcctctctccactcacttatagaagatagattatacacatagagagacacatcaatccaaagctcatacttacaaatagggtaaatctcgaattccatcttctgtttgtggttgatccatattctatttacagagaaaaataaattcaaatccatatcttcttttatgttcttggtcacttttgtagttggagtatgtctcttcttttatgttcttgatctgaaccattatccatatatatagttctaatttctggttactattcgttttatttggttgaataaatacttgtctcttgtgtgattttacacagaatatttatataaagaataaactagaagtaaaggatg

SEQ ID NO: 4076 - DNA, 3000 bp, Unknown; identical to SEQ ID NO: 4069
  misc_feature (1)..( 3000): cDNA_ID_2051015_gDNA_ID_1620682_Annot_ID_164478 3000 nt of promoter + ATG

SEQ ID NO: 4077 - DNA, 3000 bp, Unknown
  misc_feature (1)..( 3000): cDNA_ID_1822899_gDNA_ID_1620682_Annot_ID_48366 3000 nt of promoter + ATG
atgaatctacttattacggtgaaaattggacccgattagcccctctagtcgaatcggatccaaaaattgatcagtgcaaatcgttttttcacaagtaaataaacaaaaaagggacatacctagagctagagaactcatagagtttggatcttggagagaagataaccaaagcaacttcagcatcacaaaggaccgataattcgaaggctttcttcaagagtccatttcttctcttcgaaaacgtcacttgcctgcttgttgcgttctctatcctcttcatctccgttttgcccctcaccatcctttacttctagtttattctttatataaatattctgtgtaaaatcacacaagagacaagtatttattcaaccaaataaaacgaatagtaaccagaaattagaactatatatatggataatggttcagatcaagaacataaaagaagagacatactccaactacaaaagtgaccaagaacataaaagaagatatggatttgaatttatttttctctgtaaatagaatatggatcaaccacaaacagaagatggaattcgagatttaccctatttgtaagtatgagctttggattgatgtgtctctctatgtgtataatctatcttctataagtgagtggagagaggaaaaataggcgagattttgggaagagggtgtgatagagattcttggaaagccctagatttatgatgaaggaggggagagaaagaaagaaagaaaaaaactaagtgtttttgattgataatttgacatcatagccttattcttttttgcattatatattaaatttgccattttctcttatggctacggatagtctatataaacctagacctgcctagtagtacatcacttttatttttagaaattgcattacgtaatttctttcttcttttggtaaaaattctaatgcaaattcaaggccaatctataatagtaataaaatatgtaagtgcaataattgttgacgggggaagaataatctataatgaagtgtgacaaggaaaagaatcatgctatatattatttcgttttcgaatttaattgcataatcagtttttttttaaaatattatatgttactctaaaagcctataaccaataaacccataatttatctaactttgtacaatcgtaagaaaaaatatatatatatatatatatattcgtatcatatttttcttaattttacatgatatttttggtatatctagtctaggtatgggttaattaatttatattgttggagtaaatgcaaacttacatcttaaacataattaagtgaaggagatatatattatgtaggtaatgggggagatcttggcacgtgtccatattaaccgacaacctacagatccggtgtccgtcaaagtgggtttcactagtgccacctgaggacatcaagcatccttgtccgttgccagctcatatcggacaaaataagtagttaggacacaccgtccgatcttcgcttctcttcaaacgtgcaccatccgatcttgttatctattttaagaaattaaaagacttcgacacaaaaatggatacaaatttatttcagtcacttatgtgcatatttaagtctatatatatctgatcaggagatacaatattaacaattgctgttttacttcttataatagtctcttgatttagagaagaagttgaaacaaaactcgttttatattttccacagaagaagcagaactttatgcgataaataaaagaagagaactttaatcgtgtgataaataacccgtccgtacaataaaaatttattataacaacgaccttcgcacaaataaaacagtaacacgtacttgtatatgttttcaatttcacatgtcaatatatgtcatcttcgcctcttgtttgatacgtttcttgtaatttataaccaccaccttctagcttttttactttattcgtttcctcgatttaaatatcttataatctttggcataagcaagtggttatccactattggatgcttttcacaataatacgttacaataacatttgtttattcttacatatcttggaacaggtgtcgcacgctaggagaggaccacatccctttcactaaatgaacgtactaaaatgctttgttaatttgcatttccctacaaaaatatagaaaaaaaaacctacgtgagaatcaatgtaatgatatactataacatcttcccatagttgacgaaaaagcaagtgtaggttagcctaaaaggagtagttatttacatccaattatctaatatccaaaatctatcaatggtcgtcttcatatatttgaatatttctacctatatgtaatttgaaaattcaaaccaaaatattctcttacgtaagctggttcctttatgctatttgtgaagtcactacccaatacaaataaattctgcgtgaaacatctgaactaaaatcttaaaataattccatcgatcttttcttatagataaaacttcaaacgatcttgctatactgctttttcgatgttatatgatctttagcataacgttttaactaatttactattaccgtttatatatgtcataaaagttttattctattataatattatggtacatgagctccgctgataaatatttgattggtctctaaaatccatgattagagtttttattcactaacagttgaaagattcgcctacataagggtaggcgtaacataagggtcaaatgttgaattttatttacacgcttgaatagagccaccaatacgggaccagctttgaccgtcataacaaacccggtttactaaaaccatactaattacggtttcgtcaaaatcaattttgtttctcgtcactcaatgctgcttataaaagccagtcccatgctcacttttcttgcttccttgacacacttcttgagaaatttcagcaaagtgtgtcttctccgatttcgcagacggttagatctcaacaagcgattctcatcgtcgtgaaccttcttcttta

SEQ ID NO: 4078 - DNA, 3000 bp, Unknown
  misc_feature (1)..( 3000): cDNA_ID_1822895_gDNA_ID_1620682_Annot_ID_48367 3000 nt of promoter + ATG
tagatgtgtgattgtgataagtgtaaagaacattaatgattaaagtgtaatgtaaacacaagaatgagaaagatattgaccaagtccaaggcgcgtcgccctcgaggttctacgtctacgtgcatgaaaaatgccatccactttcatcaacatatatagccccatttgacataaacaaatagaactttctgttattagagattgtatctcaatcatcgtttcctggttattcatatttaaatgtattattaatacggtaaacgagcataaatttgactgcgtgttgtaactaaatttgaatcactcagatatcataaacaaatgggacaagaaagagagaaaaattagggcaagcacttttatcttcttctccggtggacccttttagtggccattggtcaataaacatctggccgtttaaaattcataaaccaatattgatttttttttataacaacacttaatagcaacatattttacaattctcattacgactactactcaaatcgaaataatatatgtaagacccataaaatagagaagtcaactctgtttaatcatcaacgtaagtgagcctataatattcttttcatacattattgttatttatttattttgattgattgactaatgactactattcaatattcacaacgaaattgaagtctaaaacaaaattgattcaactattgaagagaagcaaaatttggtatgagttccctttcctcctaaaaacaacaacttttcttttgattgaccattcatttatattacaacaacaatactttttttaaggacccaaatattcacttttttaatctcattgacttcatatgtccacacaactcacaagtcttaccttttctccagacaaaacacagaggaataggagagagagagagaggtagagaaaaagatgaattcacacttcatacaagaagcttcagaagcttgcttcaatggctgctgttcatcaccattctcatcccattccatgtctgagaaaccagaagagctcgagttctcagtaaccacaacaggaacttctttcctgaccagaaacaccaaattcaccagccaagaatctctccctcgtctccgtacatctttctacgatctcatcacagcttttccagattacttgcagacgaatcaagccgatcatctccgttctacagagtaccaaaacctctcatcatcctctcacgtctttggtcaacaacaacccttgttctcttactctcagtttcgagaaatatccgaatcagaatccgatttgaatcattctctcttaaccttgtcttgcaagcaagtaagctctggtaaagaactgttatcattcgaagaagaatctcggtttcagtcaaggataaggaaaagaatcacgagttttatgaatctcgaagaatctgaatatcacatgattctaactcaagaccgttcctctgctttcaagattgtagcagaactttactctttcaaaacaaatcccaatcttctcacagtgtacaactacgaagacgaagcagttgaagaaatgatcagaatctcagagaaaaagggtataaaaccccaatcagccgagttttcatggccgagcactgagattctatcggagaaactgaagaggagaatcactagaagtaagagaagaggtaaaagaggactctttgtgtttccacttcaatctctggtcacaggagcttcgtattcttactcatggatgagtttagctcgcgaaagcgaatggcacgtgttgcttgatacctctgctttaggttctaaagacatggaaactttagggctttctctgttccaaccagatttcctcatctgttcttttacagaggttttaggtcaagatgatccttctggtttcggttgcttgttcgttaagaaatctagctctacagctttgtcagaggaaccaacgaatccggagaatctcacggcagtaaaagcagagccatcttggaaatggaaaacagagtatcaagcaggatataacgagattacccctgtggaccacgaggaccacaaggcagcttctacttctagctctgagatagttgaaatcgaatcatcggttaaacaagataaagcaatgattgagtttcaaggattagatcacgcagattctctaggactaatactaatcagtagaaggtcaaagtcgttgactttatggttactacgagccttgaggactctgcaacatccaggctatcatcaaacagagatgcctctggtcaaactctacggaccaaagacaaaaccaagccgaggaccgtcgatttctttcaacattttcgattggcaaggcgaaaaagtcgatcctttgatggtggagaggcttgcagagagggaaaagattggtttacgatgcgcttatttgcataagtttaggattggaaacaagagaagaagtgatgaagctgtgagcttgagattgtcagtggtgactgttaggttaggagggtttatgacgaattttgaggatgtttttaaggtttgggagtttgtgtcgaggtttttggatgctgattttgttgagaaagagaagtggagaatgaaagctcttgacaaaaacaaatgattggtgttaatttgtgaaccatataatctcaatccgcattggttcagttttttttaccattttcggattttgattcggtttagttcggttagttttacattgtggttcgattttaggcagtagctaaattattctttgctgtaaacctgcttaaacaaaaacgggcctttttcaaaaacataatgggcttttaaaatcatacacgagcccagtggataccgcgaaagaacatctctagagggtttaggattcttcactacgattctgcaaatggtaactacagtctacaagtaaagtgtgaatcaacgaatgagattttgaaattagaagtgactgaaactgtgtaagacctagaaaatgtgcatcttcaattagcgggaactctcaaaatttcgaaatcaatg

SEQ ID NO: 4079 - DNA, 3000 bp, Unknown
  misc_feature (1)..( 3000): cDNA_ID_2993682_gDNA_ID_1620682_Annot_ID_48370 3000 nt of promoter + ATG
aaactgaatttggcatcaagaggtgtagtatcacatattgaagaagatagacaagtttgaatattagcttcacgaaaaagaaaagaaaaaagatagatataagtattatgcaaagttattaaataattttgtttctttttcaatatttttcaatctttcttttctaaatgtaaaacataagtaaatgtttttacatgatttgtctcctttcctagtatagaatctaatctacaatctgaagaagatggtatggcctagtatccctttttggttttggcatacctgaagcgtaatgtcatgtggtgtaatgctttactctaattacccttactctactcttttgttttacaacttagatgactctctagttagataatctaatcttgtaagtggtaaaagtgtgtgtcaaactttgaaagtggatgttcttccactgttgtatcgtttacaactgctgtttttaattaaaagggtaatacttatgagaaaaaaaaagaatctaatctacataatcgtgtgttgctagctcgtccatttactaattgtctgatgggaatatagatgaaaccgaggttatggcatgggatttcacgggagacgtattcttctttcttcacattatttgtcggattgagcatgtgttatgacatgagtaaacgaatcagagcatcttcaagacaattagggtgtgtcactttgaagattttccagacgttcaaatatgatttagaccatacgactaattttattaattttggtcaaaacaaatagaaagatttagtgaaccgtgtctcatgaaagatttgcggttttaataaacgatctttatagcgagcccaacgctctatggtgtggaagctcataacttatgcttgagtttttctcaagttcttaagaagaccaatattgatttatatatcaaaatgaattctataataaatgttttattctctaaaaagtattttcattttgtttttggtccattcatttttgaaaaataatcgtttcaagcatatatacctttctaatcccaacaaatatagacatcaattcatgaccatatggtccatgagtttcttactttcttgttgtcatgtcgtcattcttagacatctcttttattttattataagtggcagaaaagaaagaagaacatctctggttactactcttttttttttttttttacaatttataagaattatatgtgccattggttttcacgtggtcggtcttgtatgcaccagggtgcatgaatgggaaacgtggtcccgtgcggcacgggccgtgcctccattatggcattatgtaaaactaaggatgatgatctataaacctcaaaaatcaagttctcttgtgcatgcaacaagtgtcaaatactttatgtgattttcacacgaactttcctgtccatataaagtagtacgaaatacaagagcaaaactaattatagagcaaaacatacatgtatggcattaatttcacaaccctgaagacatatatgcatatgtgtgtttgagttgatttacattttctcaagaattcacacgtataatattggatttgaattcgaaaaatgatgtgatcaaacgcgtctgacagaataaaatgtgatacaattaacttctctggctcgtataacaacggtcctactccaattaatgtagttactggccagtggtgccgaggtacataattaaataaattcatatatgtaaactatttggtttcataaaccacctttgaaagattttagtgggtcctcaattataaagtttagttgaaaatctcttatttctaaattaggcgagaaaataatacaataatacaacagttttagtaaagtatctcacacagtagcccctattatatcatcacgtggacaatttgctaacgtgaccatccaatgagtaaaacatatcatcactctatacgttcgctttcggctttccaataaatttaggggacctaataagactgtcggaaaccatttgtgttatgtagaactataattaagcatatgtgatatgtttggaagtatacaatagtcagtgtgtaaaaactagttgtaatgatatttttgcagagaccaaaacaatttcgaaccaaactgaactagactttttattacatttgtttacgcaaagaaattaacggtattaaattaaaagaagaaaaataaacaaaatcgtttttaattactgttggtaacttttagtcgatgactttttgtaaactaatgtaattaatgaacagtattaaattaatttaatttttaagtttgaaagttgctatattgtaacacaaaaaatctgaaatggagtcgaggagaataaaaaagattctggaatcaggagattgattcctttctctcccacttttgattttagaaaaatggtgattagctatctgctcatatccatctccgaaaaaattggtgcttctcatttcaaaaccacattatccgctttgactcaccaccaaatcaaccaacgattaccatttttcgaatccaatctttcaaaatgtatttcttctagtgttacggcgatttctgggaatgatcatttaccattttttccgactgaatcgatcggagaattccaatcctatatataccgagcttttgcggttttcgaaggtgcgatttcgaagtttcgtactatttcttatatatcctcaacgtaattgattgacattagtatgattaatgatatgattagtgattgaatcagttcttatttatatatgatatgaaaataactattgtttgatcgctataagatttgttttttggtttattgagcagttcagagatattttgacagttgacaaagtttaggtagggcctgtgtgagtgtgaagatgcaagaagatttttgttggcatttaagaattgtgaggaaatatcaatagcacttatatatgttagtgtgtgttgttgatgatttttttcaaaagtggtgaactttcatattactggtgaatcaaatagttgga

SEQ ID NO: 4080 - DNA, 3000 bp, Unknown
  misc_feature (1)..( 3000): cDNA_ID_1822875_gDNA_ID_1620682_Annot_ID_48372 3000 nt of promoter + ATG
aaacaaatataaataacatgataaaaaaattataatttacgtatttcagagattttatatttatatttttagaaatgattagggtttccaagtcaaattttcgatcaattttctaagttacaacttactgttactttgtatatgaacgaaagagaattgatttccttttggactaaaattgttgtcaagtgtttattatgttttgattatgttttatttatgtgaaatttcagagtattttttcattgtatcttgaatatcaaatatcattaacaaattatgtgaaaattaatttacgtcgacttaaaattaggttaaggtaatcttgacaaggaaaaagggcaaggttatcgaggaatctaatagtgttttggttaaaattaacaaatttttttcattaacacaattgtgttcctaattctcatcacactgtctataacgtattttcctataatcagtattaccgcatatacttaatggttgttcatccatatgcattctagaaacaatatcttcatatgatcaaagtaattaaacaacaatatcttgtgagacaaaagatgtcatatagtcaaaaatgttcaaaaatctataatatccttggcatagaatgaatcaaccccataaagatcctaagtaataggaggaatcctaatagtctaatttattcattctcatgcatgtaactttaactaaacaaacctttgtgtcctgtcgcttgataacttctgtttatatgagattaaccattatccgataagctaagagtaaataaagtactctatactattcaatagcttaatttaatacacttaacgtctatatatgtatatagaacctgtcgtgggatctaagacagtaagacatcaatcatcgtattatcttataaaaaaattacttaaatgctcgtgcttcatttggtatatcttttaagtcttaagtttgcaaacattgaaacaatcatctgtgtggatgctatttggtttggaatatatttaacataaacccaaaaaaggcttacatgccttttgaatcatttgataggattctaatgactttctttagtcttaagccgagttcttaagggcaaaaattcgtttatagattattgtcttgagaacaaaaaaaatccataaccaactttttgtacttcatatcaatgattttgaaagaactctgtaatattcatatcaaatgatatgcataggaacatgaaggaattgtcagacttgttagtcttatggaaagcggcatggtggaaattggaagacattttatcgtttaaatacaattggtttttcaataagtaataaatatcagatactggtgacaaaaaaggtcaaaacatttttaccatattttatttcgttgtattaaattgtgttggtagtaattgggaaaagataagataaaatgacaaaaagaaagctccaaaacactcaaaacaaaccattaatcaataatcatgcagaaaaataaagcacaacataagatgggcttggtcaatggatgagtcttgccaataaaagagataacgttcttttgcctagcaaggctaataatatagagcccaattttgatagctagcccaacagatatcttccactaatttcagcgttataatcaatcattttttgtagtgatcgaacctgttaaagatctagaactgaaagtagtattacttaaataataaaaattacattattcgatttcaaatagcaaatttatttcttttgaaaagtacaattaaatctgaaagacgtgcacacgtggtggtagtgttaatgatgattaggcaaaatctgcatggaagccgcaagaatctctcgtccactttcttatttacaaggtcaactcgaggtctttattccccccgttttgaacccataaacaaagctaactgtttcttatttgtaaacttttagtttttcattttgcagtttatcttaaatttatgacaccattattgacattttatgtggagaccaaaactgtgttttttaaataaaaaaaaaaatcttttcaaacacagcattcaatgatgcacattcaaatccaacatgatttactcggcttcttctctgtcggtttaatttttgaaattccatattgatgatttaaaaagaatatctatgacctaaaaaaaaaaaaactagaactagaaggcataaaaaggtgaaagccgtgagttattattatgaagtaactattaggcaatcatacctttagtcccttggtactaactcgggtttgaaaaagcatctactagttaagaaagcatattgaaaattttgaaatgcatgtgattcttaattaatatttgtcttgttaatacctttatgttgcatgtatttcaataattttgtaattattagacttgtgaaaacattttccccatacggaacacctcataccaaatcgataatgtgtgttatctcaaggatagtaatcaatcatttggattctatttaatctttatgaaactcataataactgatcctcttgtcacgtcgctaccacaccttcttcttcttttttgtctatattttgtattttacttataaacattgatacaattataactttaatttcctatagcttgtatatagtatatatcaatttaactttctcattacttcatttttgttgttgttgtgtatatttattatttagtaatagtctatcctcgcaaattttaaaaattcaataggagtatatgacctctgtcacctattcaaaatccatcgaacctccgaataaaataataattaacaaacgtaattcaaatccaaaagattaaggaactaaatataatatgatcactaattattacagccatatagaaccttcttcttcctaactcttcttatatacgtactaaacgtaacactctctctatatctctatctctcaatatatctcacacatcagacatcactcatatctttagattcacattaatgcttttcaactaaatcctcttcgtttgattctccgatg

SEQ ID NO: 4081 - DNA, 3000 bp, Unknown
  misc_feature (1)..( 3000): cDNA_ID_1822867_gDNA_ID_1620682_Annot_ID_48374 3000 nt of promoter + ATG
tgaagatattattgatcaaaactgatttattttgtctggtacgagtaacttctagaaacaattcataacagagagaactaattatacatacctcctttttgcactccgtcaaagtcatcgcattgtaatcaccatcgaagtaaaccttaatagcaacatcctggtccaaatagattggactagttagttatccatgtgcaactaatactagaatcatccttattttatcttaaattacagaaaactcaccgatccattccaaactccacgatgaaccgcagcaaatgaacctgtgagaaaatgtaacgcatcagaaatacttgtaatctgatttaaacagcaatgacacagatctgaattgaatttgcatatctaaaacgtgaaaacgagtgtaagactttggtaaatgaaatacacctcttccgacctcctccccaagttgtagatcttcccatcgtatctcacatgacgaatcagtaactaatctattattcctttggttgacaggactttgttgcctaccgctgttgactcctagaattggcaagggatcaacactaagacgagtattccaagcatcttctatctcaccatttaggtccgacatttttgttccccgcatgccagacaccaaaccactctctagtcctctgggaggtttactttgtcccaggttcccaatatactgaaagcgatctccattatgtatcaaaccctcagctccatttccatagacatctgaaattctaacttcagccctttttggttttccattgccattgtctctgaaagccgtgcaggtaactgcattagaagccttagaactacctccactgccacatgctgacttattgataccgtttcttaagataggctcattatcttcggttccttggctgccagtaatcttcctttgcagcttccccaaaaacttatccgcctacactagtgtatatgcagatttagcttataacatgagacaataatcgttctaagaaatgtcaatgagaagtgtcttgtttaaggagccaacgaagacttaccagtgagccatacttctcgaaagttgtggaggcaacaaccggaacattttcatctcggctcctcgaattatgatttccattgaaggaatcatctccatttctctgtggtagaagcttcgacgccttcttggtttgtgcagaaaacagcaaaacaaacaatcattcatgttgcacacgaattattatataaaaaaaagtactgagaaacttcgaacattcatgatgtgagatctaccaggtttgaagcaacagctgatgaatattgtgggacaactggaacctgtgatgctgcagcgatctgaggcctcgggaggtgccactgatgttttctcaagtttgattcatgtctattattactacgagcttgttgttgatgctcattacttagtggatgcatcctattgaaaagggttgcatcgctcgagacagtaacaacaccaaccagctcaccgttttcatacacagggcttttagtcaccaaagccataaatagttcaccagttttcttctgaaacggaaactgaccagtccaagtctctccacggcacaccctattcctgataccagtaagggaattacggtattcttcggttacaagcacatcaatagttctgtagccaacaacttcctcagcataccaatggtacagattctcagcagaacgactcctgaataataataaaagaatctctccactcagaaacaaatagtaaatgtccacttgcatatacaatgaatcgctatatataactttgtttaactacttaaacacacaattcaatgaaacagtacttagaagaactataagctcctgatctacaaacaccatagatgaagaagaagaacttatcaagctcaccagaatgtaatttctccagacgcagctgatgttacatgaatcgcgtgtcccattgaatccatcaaagtccgatacgcactatcagcgaaatagaatcctgaaacagctctctcccaagtcgccgtcggattatcccaggaatccgccgcctccgcttccacctctacctcagcctctttctccgtgtccgtctccaatcccgtcgccgattccttaccggttcgactctcctcctgaagcaataagtcatcaacatcctcccttagtctcgcttgactcgtctccatcctctgacaccactccaccaaaacctggtagagactcgattccgagttgtttccggccatcgtaatcgccggtgactctgtttgagcagtcgcatcaagatccgactctgatgaaaattcacaaattaaaaatataatttaaaacgttggcattccctcattgtttattatttttcagctgcttcttaaatcactcgtgacgccataattaacaaaccccagctattataaacactacgacgcattagcttacgccacgtgtgtttgttactaataggatgctgccacttgtagaattgccgatgtaattgaaggttgaagaagattgagagataatagacgaatttgtcacgatttaaaagtggtgattgacgaaattaacctcaatataatacccattcttgttgccgccattgccaaatgggcctgagtttgatggtgtttttatacctccaacggtatttgtcaagaagaaaataaaatacacgtctcttcaatgttcacattcacattcctctaaaagtaatgtgcccaataaactcaaagttcaagttgattgaagaacaataacaataaattatagttgaatttaaatgtaatcaattattagtagtatacttcaaatcattgtagaataatactctccataaggtttcttagaggaagcaaagtttaattggagtcacaaagctagttttgtttcaatttatctaaagatttactttgtttctgggacacaaactgaaagccaacccttttttttggacaaaaacgacaattcttatattacaaacggccgaaagagaacatg

SEQ ID NO: 4082 - DNA, 3000 bp, Unknown
  misc_feature (1)..( 3000): cDNA_ID_1822863_gDNA_ID_1620682_Annot_ID_48375 3000 nt of promoter + ATG
atcagggtcatcgtcatcatcatcatcatcatcctcagacagtgagctaggtgctgcgaatctacacatataaaaacaatttcttgggacattgtctaggaaacacagaagacaaactgatagactacaaaacagaacaaactaaccttccatttgaggctcgggaaccctgctgtactggaatagaaaccatttcagaagcttctctttctgaggatgaagccttccaaccttcactgcgcaacacttctcgctcagctgactgcactgtgacagattttgttacgtcatcaccagtctccattttggaggcctcaatagcagctcgaataatttgttcttctatatcattgtaatgttgcatattattttctgcagaaccaacaggtacagcatgcctactttgtccggttggagcagactgattatcatcatcacttacttcatctataatgaccgcctcttgggcagctggaccgtgagcttgagctgtctcggtcacatcctcaatagtaggagcatcattagattgacctgatggcccattgctgtctttaacctctataggtatctccctggcctcccttggatgactaacaaatgggggacgcgacataacaggatcattatcaaatagacttctcccaaagtttggatcacgaagcgggaacgggtccgttgttctagcttcagagaggactggagtcacaccatcatctatatccattgcatcatatgaattttgatctccatgagtaaagtatgcattcacagctctattgaggttcccacgatactcctgcaataatgatagcatgtaagttttggcaaacacgaggaacaccagccacacacaaaaaaaaaacttacaagttataatgatgctgagacaatagaataatgactaaaagataagaatgcacaaaggacacaataaaaagttctctaaacccaaactaaaattgtacacaagatgagttctgaaaaaaaattcattgacttcaataactaacttaaaccccacatgaatatctctaaaataccaaaaatccagaccaaaatccaaaaaagaacaaaacttttcacaactaatttcacaatgagcaggtataaactcgtttagatatcaatgaacaattaacaaaaccaataagcatgagaattctgtaagaagtccacataaaaactcaatcagataatcggataaactaaaattcaacacaattaactccaattgcgacctaaacgcatcaagatgagcttaacaacgatataacaaaagcgtagaggagatataattcgatgatccaacgaacaaccacttgagcgattcgagaaacttccaaaaatacttcaatcaaaaacaaaataacatctaaacaatagaaggaagacggaaaaaacccagggaagtgtaattgaatcacctcgagcttacgaacggcgacggcattggaagagccggtgatggtcatgaaggtgtcaatagcttcctgagtaggtgtcgccattagaaaagagaaagcttgagagaagtttttcgtcggagatttgtgtttggagctggagtgaaggaggaggcaagaattaatatatgttgtaaatcacaaaaattgcagtgaagaaaggaattggatcggtgactcttaagatttttaaagccttttttagggtctttcttcttttccattttttttaattctccttttttatttggtgtggattttcttaaactttattttctttattctttttgtatattttcggtgatattcaagatattattttcagagaacttgagataatatatggagtgtcctaatctgaataactaaataaataattattcagttgaaattggattttttttttcagagtctttatattttataaactggaattcgagtcaaattcagagtggattaaacttatctttttagtttttactagccaagaactttttgacctttttttttaacatgatattaattgttatagtgtatatacattaaaagttagataatttttaatgtacaaaaaaaaagttacataatttattttttttcacaccaattacatattttatttgtcaatttgacagtaaatatggaaataagccttaaaatgtaaaggcttttcggtccaacaacgaaaaaccaaaaccaaacccaaaactaaaatatccaaagatatcctcactttatgatcatcccaatcttccctctatatagtgcctttaaaggagctgtcatgttctctttcggccgtttgtaatataagaattgtcgtttttgtccaaaaaaaagggttggctttcagtttgtgtcccagaaacaaagtaaatctttagataaattgaaacaaaactagctttgtgactccaattaaactttgcttcctctaagaaaccttatggagagtattattctacaatgatttgaagtatactactaataattgattacatttaaattcaactataatttattgttattgttcttcaatcaacttgaactttgagtttattgggcacattacttttagaggaatgtgaatgtgaacattgaagagacgtgtattttattttcttcttgacaaataccgttggaggtataaaaacaccatcaaactcaggcccatttggcaatggcggcaacaagaatgggtattatattgaggttaatttcgtcaatcaccacttttaaatcgtgacaaattcgtctattatctctcaatcttcttcaaccttcaattacatcggcaattctacaagtggcagcatcctattagtaacaaacacacgtggcgtaagctaatgcgtcgtagtgtttataatagctggggtttgttaattatggcgtcacgagtgatttaagaagcagctgaaaaataataaacaatgagggaatgccaacgttttaaattatatttttaatttgtgaattttcatcagagtcggatcttgatgcgactgctcaaacagagtcaccggcgattacg

SEQ ID NO: 4083 - DNA, 3000 bp, Unknown
  misc_feature (1)..( 3000): cDNA_ID_1822859_gDNA_ID_1620682_Annot_ID_48376 3000 nt of promoter + ATG
agcatcttgaaattgacgcagtcacaaaagcataattaaaaaaaaaaggatacaaagatgggtctattataccgagtatgtattgtgcatgcatgtgacgtgggtgaagggaacttctcttatagaagtattgaaaaaggagaaattttgggggattgaaaatatttgtctgtttgtctggttaggtcagaacaaatcacatcgagctgcatagtaatatttcgtttacaacacatggttgtgacctctagacaaataaactttttaacagttttcgctgttttgccttgcatgtatttcgtagtatttcaatttatatgtaactatatttcaattgaaacatctttaccatattattttcttttttgatgccaatttctttaccatgtgtttgctcttgtgttatttatgtgtgattgattgattgaccgtgtcgattacccaagcggaatcttgtaaagggatactccgtcaccgtaatacagtgacagcatatttaatttaaaataatataaagtcattgtaggatggaaaagtaatttctatgatattttcttccgaacattataaaatttattttgtcagaagtagagcagattaaagtttcgaagatggatactttcacttttttcttgtaagatattgattaggtatgattgaggctcatgatacgaaataatgtcagtgttgaactactaatttgttatgcttgaaatgcttttttataggtcagtaggtttttttattttatttttaggcatatttattctggtttagtttagttagttggtttctaaattttccttacgactaaaaaatctaatcccaaaaccaaacgaaaacaagaaataataaatcgaacaatatttttaataacaaatagaatatatatatatatatatatatatattatatcaaattattccaagatagagtttttcagttcattcctagttcctactcatatattcttaatttctattatctcaagattttatcttgtcctcatatctacgaattgtatgaaagggtttaataaccataatctattgcattgtcctatctacgtacaccataatcgcttgtgttggtggatctatagtaatctaaacaattttttatttccatggcgtgaaagtttgagccaacaactaacgatattaatcgtacaaatgagtttcatatttttttttgcaatctcatttcaaaaagtgaaaccaaaatttggatgcttctaattaaccataagattttttattaggtgcacctaatcttgttaataaattataatcttctttgattagttatgctcctatccagatttcatgcttcaactctatgattgatcaacttgcattattactgtaccataaatactttgccaacgaatgttagttgtgggggaaacaacaattccgctggtaattttgactgaattaaaaaattagagatagaatgcaaggagacacgtacgaacgagttcatacacgagaagcagttgaccagagtcaacaaacctgtaaaaagctaaagaaccaccgtccactcgcagtctactatatacgactaactaagattcatgcaggctcaagtttttgtacttgtatgacacgtggctagatcgtaacggccgtttagactgatgtctcttcgtctctccgagtctttgtcctgtctttttctcattgcatgagacataccgaagattccagtggattaattgtcggtccatttcttttttcctttttactactgacttcgagttagattctctaaagtagtacacgtgaaccataggattcgtttatgattacataaaacctttgttagtagtgtttgttcatttcttaattctggttatacatttgaaacatatgcaaatttatcactcgacttattaatcctaagttcgtaactaagttctttttggttaattagcttatatacttctcaagatttctgattctgacttatgctataaagtatatcttcgataagttgagtcgcatctctctcctcggaaaatattcttgtattttggacaaatttctcgtgtattgttttgatatttttgtggtcatgttgttttgtgaattagtatataagtagataaactacgtagttttcattcgtacaactatataaccaatcgtattcgacgaaataaatagtcagaaaatattctatttgttatgcaataatatctcactatacagtccaaaatattaacctccatataaatctgatagtaacaacaaacaattttttctctttgtcctataacatacataatacatttatgtttgaaagacaagagaagaacaaaaacaagaacccacaaatgtcaaaatagtgaaagaattggattccgacttcgatttcccattacacaaaacgacgtagcaacggacggcgctagctattacgttaagagacgaaaaacggagtagggaccaacaaaaaaacgtgatcatggatggattattaacgatagacattggattacggcgatggacccataaaactgacgtcatccgttatggggtccgtagtgtggtcctctaaaaagtattgacgctttttgtcatctctctgttctttaggactcgtcacaaattttacttcctcagattcacatgaccaaatcatgtaaccattttccaaataaaatctttacatttagatttagattcagaggaattgaattagcctcatcataatgtatgatactacatactacactagtgacacggaaattacacgacgaaaataaacaatgtgaagaataacgaaatttcccgggaaaagagagatagagagtgagacacacgcgcgagtgatgcgtgtggtagtaaatagaacactgtttgatgatactgctgcgactacttaactcttattacaaagctctctttttgttgtctctctcttgctctctctgcaaaactccggcgagaagagaacgttgtcgtttcattcgtatcaaagtcttcatcagca

SEQ ID NO: 4084 - DNA, 3000 bp, Unknown; identical to SEQ ID NO: 3550
  misc_feature (1)..( 3000): cDNA_ID_1822829_gDNA_ID_1620682_Annot_ID_164517 3000 nt of promoter + ATG

SEQ ID NO: 4085 - DNA, 3000 bp, Unknown; identical to SEQ ID NO: 3549
  misc_feature (1)..( 3000): cDNA_ID_1822833_gDNA_ID_1620682_Annot_ID_164516 3000 nt of promoter + ATG

SEQ ID NO: 4086 - DNA, 3000 bp, Unknown
  misc_feature (1)..( 3000): cDNA_ID_3072480_gDNA_ID_1620682_Annot_ID_164511 3000 nt of promoter + ATG
tgattttcattctttcggctgttgaatatgccccggccctcactcttgtagtacaatctttttatcggtacacactgagttacgtcactgtcgatgtcaatatccattatggtggttttaaatcatgagaaagaatcgaggttaatatcagtcgattagtatgaaaatcgaactgatttacaaagataaaagattggaattaaaaaaggctcttgatctattttctagcttgttttctagaaagaagtgaccctggtctatacgacctccttagtcaatccatgcaaatcataacgtccccatctcgatgtctaccaatttaacgtttcctttttaatttgttagatatgcccgttttattttgacttgctcaaactgtatagggccatcacgagctaaactgatgtgacttgggcctggtgagagtcatgaagctccggaatgttgtagctcgatgttacctatataagctttctttatgggccttgaataggccgagttcaaatgtgagaatccaacaccaacagccacttagaacaacttttcaagattgtgtatcatctacctcttcggccatattaagaatatgtgtagttgggcttcggtgagacttatgagttgggcttgccatgacaatcccagatgttacttttctcttaatccctaggaagaaaatcttttggtaacttcaaatcattataagcgcaaatagctagctactatgtctgatgcatttagttactttgtgctgaggattggggtctttaatgtgaaatcgaaagtttagggtttctcgtggatattagaaaacgttaaggttggaatataaaggaaaagattaactgaaagagtctgcatagcacactccagcttaattccgtatcgttttaggatttctgacttcactctttgacggctatatattaatgtgattttccattatgtcaaatgttaattattattttttagataagttttcgtgaaagttgaaacggtgtgacttgtgagtgacgaatgtataggaagaaactgtggaggtgggttccgtttaaggctttggtggtgtggagattagaagtcatggccgccatttttgagtcacgcacgtgtccacctaccttaccttcttataacttattcattcatgtgttcgataaaatatatttgatattaatttaaacatacaacatagaagtgcacaattacaagagttttttttgtttttctatttttgtcgctacaagagtttttagtttttacttacgttacgtatatgcaaacgcaagcaattctgcatctatttgtttttcaatggcagccataattgatatcaaataaataaattactaatgccacatgtttttttagcacagcttcataattcataggagtatcgatatgtaacacaataatggatcttgtagtaaaatttgaatagagtcaattaaaaaaaaaaaaaaagatagagtcaatctgtgcgatataatgaaattagaacgaagctcgaattttaagattttaaattataacaaaactcaaatgtgttataacattcaaaaaaaaaaaaaaaaaaaaacttaacacaataattagtttttctcattttgagaaaaccaaattctcgaaagtatgtgaaaaataccatggaatttgaaggattttgtagattaccaaatagtaaacaaaatttctaaacttgttttactatgattttgtcacgaatacaaaatcaaactcagatagagaaattaggtgatatatagccataattgtgtttactactaaaaatacagttatttctaaaaataaggtaaatgaccaccatggtaccatactattccatgaacaatatagacaaatagccttccattgttataattgggatattgtcaaatccatcccgtatctatatatattattatacacaagtagaacttttgatggtgattcattatctaccattcacatgtttttgtatcattaaattgttgattataaaagcaggatttgattccacctactaagaagtaggaaatataaaaacataacgccaattttcgttcatcagaaccaagatttttttgtcgacacaatcaaaccaaatagataatgatactgttttttatagtagtatatatatttcttttcctatagagtattttatctgaggtcatgtggttggttagtgacacacttttcattattttacgttctaaattaaatatcgtaaagttaaacctcgtttaaagtatactataaagaatagaaatatcattaattcattatacacactataaagttaacctttgtttaaactactaataaactggttatttaaaaaactattagggttaaatttgtgagaaatggaaaagtaagaggcaaaaaacgaaagaatcttttattacaatgattattaattttatcaactttcttttatagacagctcagctccactgatcggctcatgctccactgatcaactttctttcatttttttatcagtttctcatttctctctcagtcgcatataaatttgaaacgccgattcgtttttgctctttaagctttcttcttgatttcgacggtgtctctcaatctccgtcaagcttgacgaatttcaggtgtgatttgcttctcttcttcttcgctttctggacttgtggattttggtttttgattgatttgttctgcttttttttttttggttgaatcttcgctttttctcatgatttttttttggctgttgcatgattttggttttgttagagtcgaatttttgcagatttttgctttgatttgatttttgttgttgttgttgtttctggtttggtgatacacgaattttgatttgttcttccagatgatagttcaattctgtggtagctgctgattctaattatgtgatatatgttattagaattgagaaaaatgcagttatttgtgatttctcatagcttatgatgaattgttataattgcaggagctatatataccatg

SEQ ID NO: 4087 - DNA, 3000 bp, Unknown; identical to SEQ ID NO: 4083
  misc_feature (1)..( 3000): cDNA_ID_3072490_gDNA_ID_1620682_Annot_ID_164505 3000 nt of promoter + ATG

SEQ ID NO: 4088 - DNA, 3000 bp, Unknown; identical to SEQ ID NO: 4082
  misc_feature (1)..( 3000): cDNA_ID_1822863_gDNA_ID_1620682_Annot_ID_164504 3000 nt of promoter + ATG

SEQ ID NO: 4089 - DNA, 3000 bp, Unknown
  misc_feature (1)..( 3000): cDNA_ID_2993682_gDNA_ID_1620682_Annot_ID_164496 3000 nt of promoter + ATG
tatccctttttggttttggcatacctgaagcgtaatgtcatgtggtgtaatgctttactctaattacccttactctactcttttgttttacaacttagatgactctctagttagataatctaatcttgtaagtggtaaaagtgtgtgtcaaactttgaaagtggatgttcttccactgttgtatcgtttacaactgctgtttttaattaaaagggtaatacttatgagaaaaaaaaagaatctaatctacataatcgtgtgttgctagctcgtccatttactaattgtctgatgggaatatagatgaaaccgaggttatggcatgggatttcacgggagacgtattcttctttcttcacattatttgtcggattgagcatgtgttatgacatgagtaaacgaatcagagcatcttcaagacaattagggtgtgtcactttgaagattttccagacgttcaaatatgatttagaccatacgactaattttattaattttggtcaaaacaaatagaaagatttagtgaaccgtgtctcatgaaagatttgcggttttaataaacgatctttatagcgagcccaacgctctatggtgtggaagctcataacttatgcttgagtttttctcaagttcttaagaagaccaatattgatttatatatcaaaatgaattctataataaatgttttattctctaaaaagtattttcattttgtttttggtccattcatttttgaaaaataatcgtttcaagcatatatacctttctaatcccaacaaatatagacatcaattcatgaccatatggtccatgagtttcttactttcttgttgtcatgtcgtcattcttagacatctcttttattttattataagtggcagaaaagaaagaagaacatctctggttactactcttttttttttttttttacaatttataagaattatatgtgccattggttttcacgtggtcggtcttgtatgcaccagggtgcatgaatgggaaacgtggtcccgtgcggcacgggccgtgcctccattatggcattatgtaaaactaaggatgatgatctataaacctcaaaaatcaagttctcttgtgcatgcaacaagtgtcaaatactttatgtgattttcacacgaactttcctgtccatataaagtagtacgaaatacaagagcaaaactaattatagagcaaaacatacatgtatggcattaatttcacaaccctgaagacatatatgcatatgtgtgtttgagttgatttacattttctcaagaattcacacgtataatattggatttgaattcgaaaaatgatgtgatcaaacgcgtctgacagaataaaatgtgatacaattaacttctctggctcgtataacaacggtcctactccaattaatgtagttactggccagtggtgccgaggtacataattaaataaattcatatatgtaaactatttggtttcataaaccacctttgaaagattttagtgggtcctcaattataaagtttagttgaaaatctcttatttctaaattaggcgagaaaataatacaataatacaacagttttagtaaagtatctcacacagtagcccctattatatcatcacgtggacaatttgctaacgtgaccatccaatgagtaaaacatatcatcactctatacgttcgctttcggctttccaataaatttaggggacctaataagactgtcggaaaccatttgtgttatgtagaactataattaagcatatgtgatatgtttggaagtatacaatagtcagtgtgtaaaaactagttgtaatgatatttttgcagagaccaaaacaatttcgaaccaaactgaactagactttttattacatttgtttacgcaaagaaattaacggtattaaattaaaagaagaaaaataaacaaaatcgtttttaattactgttggtaacttttagtcgatgactttttgtaaactaatgtaattaatgaacagtattaaattaatttaatttttaagtttgaaagttgctatattgtaacacaaaaaatctgaaatggagtcgaggagaataaaaaagattctggaatcaggagattgattcctttctctcccacttttgattttagaaaaatggtgattagctatctgctcatatccatctccgaaaaaattggtgcttctcatttcaaaaccacattatccgctttgactcaccaccaaatcaaccaacgattaccatttttcgaatccaatctttcaaaatgtatttcttctagtgttacggcgatttctgggaatgatcatttaccattttttccgactgaatcgatcggagaattccaatcctatatataccgagcttttgcggttttcgaaggtgcgatttcgaagtttcgtactatttcttatatatcctcaacgtaattgattgacattagtatgattaatgatatgattagtgattgaatcagttcttatttatatatgatatgaaaataactattgtttgatcgctataagatttgttttttggtttattgagcagttcagagatattttgacagttgacaaagtttaggtagggcctgtgtgagtgtgaagatgcaagaagatttttgttggcatttaagaattgtgaggaaatatcaatagcacttatatatgttagtgtgtgttgttgatgatttttttcaaaagtggtgaactttcatattactggtgaatcaaatagttggaatggcagatagtagaggaatcatgattataaatgttgttccactattagaccacactgtgctgaatgtattcctttcttgctttgttctttctctaggcacaaggttttgtctgctgaaactgggatgttgaagttattctgctaaccattcttagtgctgtcaagctttggactgtcttcaagagttctaaggactacaggaacctcgagctatgggctctgataaaaattctgctcgttttctacataacctcaag

SEQ ID NO: 4090 - DNA, 3000 bp, Unknown; identical to SEQ ID NO: 4074
  misc_feature (1)..( 3000): cDNA_ID_3072509_gDNA_ID_1620682_Annot_ID_164489 3000 nt of promoter + ATG

SEQ ID NO: 4091 - DNA, 3000 bp, Unknown; identical to SEQ ID NO: 4073
  misc_feature (1)..( 3000): cDNA_ID_1808716_gDNA_ID_1620682_Annot_ID_164487 3000 nt of promoter + ATG

SEQ ID NO: 4092 - DNA, 3000 bp, Unknown; identical to SEQ ID NO: 4071
  misc_feature (1)..( 3000): cDNA_ID_3091511_gDNA_ID_1620682_Annot_ID_164483 3000 nt of promoter + ATG

SEQ ID NO: 4093 - DNA, 3000 bp, Unknown; identical to SEQ ID NO: 4070
  misc_feature (1)..( 3000): cDNA_ID_1809214_gDNA_ID_1620682_Annot_ID_164482 3000 nt of promoter + ATG

SEQ ID NO: 4094 - DNA, 3000 bp, Unknown
  misc_feature (1)..( 3000): cDNA_ID_1822847_gDNA_ID_1620682_Annot_ID_48379 3000 nt of promoter + ATG
aattgaaaaccatgggatcttcttgaattatatctaatctcataatattcttcatgctgcagcaattcttggctggaaaacttccctgtctccctggtgaactgccttcatataatgattgggaaaaccatctgacaacaatattcccagaggttaatcatctgcctcaagagtctttcaatcagcctatgactttcatttccctgtcttatgttgaagtctgacaacgttccataacactaggttcggttgaagagatacttggagatgagaggtgctgatggaggtccctggaggaggctgtgtgccctgccagctttctgggtaactacatctattagcacatatatatttcgtgcttaatgagaatgtttcaaaaagtattgactgttgttttgattttatctacaaatttcaggtgggtttattatatgatgatgatagtctccaagctatcctggatctgacagctgactggactccagcagagagagagatgctaaggaacaaagtaataacaagacgcaccacatttacattttcttattccacagttagaaaacatcttgtaataaactaatacttgatttccaacaggtcccagttactggcttaaagactccttttagggatggtttgttaaagcatgtcgctgaagatgtcctgaaactcgcaaaggtgtgtttgtatgaaccctcttagaaacttcgagccagctttctatcccgtctggtccagcttctaactattggacttattttctctttgtttctcaggatggtttagagcgcagaggctacaaggaagccggtttcttgaacgcagtcgatgaagtggtcagaacaggtaaatgaagtttcctaatgcataattgaattccacaccgacattttgtttgataacctggtggtgaaatttggttttgaaatgacaggagttacgcctgcggagaagctcttggagatgtacaatggagaatggggacaaagcgtagatcccgtgttcgaagagctgctgtactaagaaaatgggacgtgaacaaaaggtgtctataaacctttgggtgtgagtttatgctatctgaagaattcgagtctccggaataaggatttttttttttgttgtaatcggattttaaaaactgattttgttttagaaattcgaagcattgaaaagcagaagaaaaattgtatgtactaaacgatttcggtgtgggaaatcgtttgggagggtgtgtttggatcttgaataaattacccatttttcttgtcacaaatttgtctacatttaacgaaataactcaaaactgatttcaaggcaaaggcgacggatgggataatctaggctgtgtagtggaaagttttgatgtttagtaatttggcaatgtatgtttttttctaaatgggagagcatcttcgatgtagacatttacgagcttttcctttaataggttttggctagtgaagaacactgctttcataattgaatccaccagactccgcgtaaactaaactgattacaacacgatgatcctggccgtcggtaattatcgtaaaacaagaagatagtggcacttaggtgacaggataatatgtaaaccctaccaaggcgtccctacaaaatgatgagtgatgactgatgagagtgagaaaaaccgagtctccacagtccacacactgccttacctaattaatatacccacctttcattcatgtatgttacgtcaacgtttttatgtccgttaaaactgtaatctacataagagatcataatttttaaaatctccatgtatttcgttgatactttaatttggcacgtttctagtttttgagatcaaatgtttttaatctgcttctagtcttatttttcctaaaccttaaactgtaaaccaattgctttttcacataaccttgcttgttttcaattttaaaatttaagtccaatatttgaaacaacctaacaaatgtcgtctatggcaaccaaaaaaaaataaaaaatcaaaacaatttgctaaaaaggaaattgattaaaattgatttctttcatttaaattggaatttaatatattaggtaaacatgtaaacgcaatcgcaatttttatgagagacttcgggccggttcgtttaagtgtcgctgcgactataactagcgactggctttaaaaacgactgagttttgtttgtttttattgttttttttttaagttcgaatatgtcgtatagatctgtaaaataattcaaatgtggctttgtcccatagattggttttgattatgcaatcatctatcacaacagtggaacattatgcaatcatttattgtctatcaaattaattatggttatgaaatatgaaggatcttacatcttaaaaagtgttaattatgatcgcatgccatttagattctttcaaaaattcagtttgaaagtggaaagcgcgccaaaatttgcagaaatcaaaaatccgttaaaaaacgttaccaaaaaaatattttaaaacgggccaaaatatttcaaatgtggattccatagattggttttgattatgcaatcatgtattacaacagtgggttgaaatcacttctcctacctgatcattagcttcaaaagtgccttggctacagtaataggatttttcatgtatatgaaaatattagttcaaatgggagacaatcttttgaattggtatagaggttgtcaggttgatcaatgattcaggggaagagtgatgacaaatactaagaaatgatccaggaggttgtcatccgttttcctattaatagaattggataaaaacttatttgacttctaaatatttattaggttgaacattttctcagatatactatgaaaacagtcaaacaaaggatagtcaaatttgcatccgtgcaaaatatttattgtgtagaaaattagaaagcaactctttaattagtttcttcactagcctaaatatatttccccttctcactgtttctacttttgattgatttacttataaatg

SEQ ID NO: 4095 - DNA, 3000 bp, Unknown; identical to SEQ ID NO: 4086
  misc_feature (1)..( 3000): cDNA_ID_1822843_gDNA_ID_1620682_Annot_ID_48380 3000 nt of promoter + ATG

SEQ ID NO: 4096 - DNA, 3000 bp, Unknown; identical to SEQ ID NO: 3549
  misc_feature (1)..( 3000): cDNA_ID_1822833_gDNA_ID_1620682_Annot_ID_48383 3000 nt of promoter + ATG

SEQ ID NO: 4097 - DNA, 3000 bp, Unknown; identical to SEQ ID NO: 3550
  misc_feature (1)..( 3000): cDNA_ID_1822829_gDNA_ID_1620682_Annot_ID_48384 3000 nt of promoter + ATG

SEQ ID NO: 4098 - DNA, 3000 bp, Unknown
  misc_feature (1)..( 3000): cDNA_ID_1822984_gDNA_ID_1620683_Annot_ID_48388 3000 nt of promoter + ATG
acaaagcaacaataccaattctagaacctattcgttagtgagatcattccaagtaagtgcatatgctaaggacatatatttcagagaaacagcttcaagactcattgtgcagtaaggcgatactagactctctaaactaatacaacaatattttacataatagaaactccaaatcgcttcaatttggccttagacaactaactaaaaaggcatacaaacagaagttaattcaagaatgatataaaaacatacctttttccatttggcaatcagactgcgatctgcatagccctggtccaagcagaattcatagagctctttagatatttcttcccttcggtaataaaggtcatatacataccgactcctctgatgagaaactttgaagattggccataaagtttcacactttctcttaccatcatgtgaatcagtctcagctgcacaaggaacacgatagttagagcaaaatcacgggaaaaagaaacaagcaaaagcatatgttattgagatataacaaaatctttatatgaaactaaccttctctcatcttggcatcaagctctcgaagagtaggctcgatcaactcccatccttctgggtacttgactcggttagttttaacctttggcattttctacacaacgcaaattcacaacgttaaacaaaggaacaaattaagcaaaatgggatactttcaccaaaacgagagattctaagactttcatagttccaaagagattctcaattaagcaattgaaacaacaagcaaggacgcttccggaaaattagggtttctgcgtcaaggctacatccaatacaacgcagagggttgatccaaacataaatccagaacagtctagataaagtttcagtaatagaaggtgaacaattagggtttatcaatctctgtgttttgggatagaaggggaaaatttagggttaagaaccgaaacaaaaggagggtgccgaagcaagattggtatgagacagaaattgaagaagcttacctttggacaggacgagggaagttggagaaggagagatcgcggcgcaggacaaaggaagaagaaccaacgtcgtcgaagaagcctctttagggttgtgttcggaaatcggtataacgagtggtttatcttgggccgctcttacgaataaaaatattcttttactgttatctttaaattggataagacattttaaaaaaattacataaaagtttttctgatgacgaagtttagcacaattttcaggaatcctgtagtgattttgtatttccattttgaatagaagacggatgcttacaaactacaaagtttagtagaacgtggaagtaacaaaacctataggattcaacttggcataaatgcaaatagaaaatccccaaaatattggaactttataacatcaaacatctttagctttcgacattgtctgcaactaagcaattatttggcaagacggaataaacagcttcaagaaaaagaccagtgcaaccttagtctgctactgcatatgggcagtgactgatacattgagaaaccaaaagcatataaaaaagaaggaaaaatcaagaagctgcttattcctttttgccgattccattcgacatgttgtagattcctgttccctgtatttagccaaacgtttcttccatagttagatgatgaacaaagttaaagaaagctgaagcaatattgatgtaagtaacaagttctaaagggtgacattcaacttcaaaccattgtgaacagacacaatcagcaaggaaatgaacaaaccattagtaaaataaggaagaacagacacaaagacaaaacaggatggcgagaacgaatacatggttttgaaaaatcagcaaggaaatgaacttacaatcatgtagagagaacttgcagccaaggcaataggaatagcaacagaagtgatcttgtccattggtcctttcaagtaagtgtgcctttggatgctctggaacaatctctgtttctccagaagcttctctcgtggcctaaatggagtttcagtcaacatgatctgcaattccatagccacacaataaccattatcgttcaagtcatttatatagaagaacatactgattagacaaaccatttgaccaatatatgagataacaacacattttataaacaataacatactgataaaacaaaccatttgataaagtatacgtagtattcaaatcaagacactaaattgacagcgattacattcaaattattcttgttttctgtcgttcatcaaaagggcaatgataaagccacataatcagggctggatctgagtgactgcaaaatatccaattaggatttctacatcgcagagatcaaatcaacgcaattaaaaaactttacggtgaaatcccgattaaattaggtcaaatttcaacaatctaacggaaacaaattaggtttatcattctctgaaatttgagattgacacaaaccttttaaaaaatggacaaaattaacgattaccaacgaaagaacccgattgatgcgaaatcaaaatcgatctacgaggaaaaatctcagaagcttacctgagagaaattaatcgacgagataaggaattttgagagggagagataatcgcagcgtaggtcgatgacgaagaacaacaaaatacaaaaggcgatgaactagtcttcttagggttgggtttatcgaatgttatcaattgggccgggccgaattagatccagggtaaacctattaattccagttatataccaaaccggaacgtaccgtctttaaaatttcaattttgtgttctgaaccggccgttcttcttaacctgttgcgttcttcttcgcctcctctctccctttgcatcgtctccgtctctttctcttatttttttcccgtttaaatctcaaagagaacccagaagcttggtataaaagaggcgggaaatttctcacgtgtgttgcaatagaaagcaaaacccctagtttttttctgggcgaagaagaagatg

SEQ ID NO: 4099 - DNA, 3000 bp, Unknown
  misc_feature (1)..( 3000): cDNA_ID_1822980_gDNA_ID_1620683_Annot_ID_48390 3000 nt of promoter + ATG
ttgacgcagaaaccctaattttccggaagcgtccttgcttgttgtttcaattgcttaattgagaatctctttggaactatgaaagtcttagaatctctcgttttggtgaaagtatcccattttgcttaatttgttcctttgtttaacgttgtgaatttgcgttgtgtagaaaatgccaaaggttaaaactaaccgagtcaagtacccagaaggatgggagttgatcgagcctactcttcgagagcttgatgccaagatgagagaaggttagtttcatataaagattttgttatatctcaataacatatgcttttgcttgtttctttttcccgtgattttgctctaactatcgtgttccttgtgcagctgagactgattcacatgatggtaagagaaagtgtgaaactttatggccaatcttcaaagtttctcatcagaggagtcggtatgtatatgacctttattaccgaagggaagaaatatctaaagagctctatgaattctgcttggaccagggctatgcagatcgcagtctgattgccaaatggaaaaaggtatgtttttatatcattcttgaattaacttctgtttgtatgcctttttagttagttgtctaaggccaaattgaagcgatttggagtttctattatgtaaaatattgttgtattagtttagagagtctagtatcgccttactgcacaatgagtcttgaagctgtttctctgaaatatatgtccttagcatatgcacttacttggaatgatctcactaacgaataggttctagaattggtattgttgctttgtttggtgaagaaataagatttctggtaattatacttcgaacaaagtgcattgcctccacgatttgccaaattttggatagttctaacttctaaccatactcccacatcttaatgatggtcactcatgaatcgtttattaacaaactcctccctgtcaattctgttgcatcttctctttgtaggttatactatccagacatatacctagatttcacttttgttttctttcattgaactaagattttgtcatttatacgtgtctctatactttgtgttaagtaactctaaaaactctctgttttgtgttttgcagtcgggatacgaacgtttatgctgcttgcgctgcatacagccaagagaccacaactatggaacaacatgtgtatgccgtgttcccaaacacttgcgtgaagagaaagtggtcgaatgcgttcactgcggctgtcaaggatgcgcgagtggcgattaaattcaacatagctttattcgctatctctgactgtttgttacaatcttgtcacttgttaaatctggattatgtattattccataaaggctaaaaaccctgactaaaaatctccttgctcttacttatcaactctgggtggtattgcaaataaaaagaacgttccggtttggtatatagttgaaacttgaaagtagaaagacgtttcccggtttggtatcttactgaattaaaagagtgttttactattcccaaaagtgtcaatttctctaaattcgtgagatttgcagcaagtttatcatgacgccgtgagttatgttttggtcaaccggtgatagaacaagatattattgaagcagaaataattattaattcttgtatttatctagacgaaacttgattgcttgatccaaggaaattgttttgacttcaaaattgtattggttctcactacagttgacctgcccctatgtttccatgtggaacaagattcttcgtcttggtcatatggattagtattatttatttctaatcttatcgtgtaatgcatgtatgatgtatgttctaaacaagatgtccaccaaggtccaaaacgagaagagatgcccattacgctcgctctagatgctttgtgaaactcgatggactttcttctctttaaactcacataacatacatacatgatccaaaatccatgatcgttctttttttttttgggttcatttttcatggtttattggaagcacaaaagaaaccaaaaataggatcacagttcttggacatcgtttaatacaaaactagaggaagtaaacattaaaaaaaaaacttgaaaaattaggggaggctaaatcattttcttgacgcgcttgtaataggaggagcaattgtggtaagtggttggtgtgaattagaacccaattatcaactaagtcgagttttgtttaaaaccaataaatttcatatacaagtttgaaactgaacatataactttttctttatatatcataattttgagtataacggatataacattttacttaaatgagaaagtactattgaattatccagaagacgtgatccgatggaaaaattcgtatcacacatgatcttttctttttatggcacaccagattttgtttacatttataattcgatttcatctttttcttagaaaaaatggtcaaagaatgcagctggtgaccaactagtgaccatacaacaagaacaaaatctcatggactctatttaaggtttccataatttaatttaccgtatcacatttccagctaattacacaaaaccgtcgataaataattgtttatagaaagaaataaatacaagaaaaacgtcaaaggatagctactataagtaaggcagactttaggaacccaaaattctgttattaatttacaaaaactaaagagtttttcacttttcagtttctcttcttaccattcactctaaaaaaacagagtctttataaaaccgatctcagattctgaatctgaatcagaatctggatcaacataattttctaacaaaaaaaatggcttcgggtggtggtgacgatgggcttcgtcggcgaggctgttcatgcacaaaagacgatttcttaccggaagaatcgttccaaagcatggggaattacctaaaagcccttaaagaaacaccgagtcggttcatggatcgtattatgactcggtcactagactccgacgagattaacgag

SEQ ID NO: 4100 - DNA, 3000 bp, Unknown
  misc_feature (1)..( 3000): cDNA_ID_1822977_gDNA_ID_1620683_Annot_ID_48391 3000 nt of promoter + ATG
tttttgtcccatgttttgggagtcactagtggttatgagtcctttttttatatatcagttgcataattcacctcaatacaacgaccaataaaatattctgttgatgtacaaagagtcaaccatacgatatgcttttagtaatacttctaaactcaacattaattaaaaatgtagttattgtcttacttgtaaattatttaggttaaaaccaaaaaaaaaaaaactatttaggtttaaaatgtgtaaatgaataagatcagcttctttattacaaaaattactatagaacaaatattgaattttcaactctcgtagcgtgacggaatctctggggtcaactagttgacatctgacttatgagggtcgttcacactatctagtatcaatctactatttatcctccgtttttttccttttaaatttgatagtagctacaatactatcaaatcacaaattaaacaatcgaatgatttgattattatcttagagttgcaaaatatttgttgccatttattagattgttagctacttttaaaattgtatttaaaactttgtaatttcacaattttagtcatggggtctacctagaagacttttacatacagacaaagaaattaagctaaacagatgattacttacgtcaatgaccttatatacgtaagtcccaactatataagtcaagcttgtaaattgcctttattgacagttcaaaagtaaattaatttaatatagtattactactcaaaaatatatttttcattttcgaaataacttgtagtgaaatcccactagagattatgtttgggtcctagaaagtagaaagtggagtcattttcaaaattattttttacttccaagttgtttcgaactcaaattgaatattatcgtaaatagaaactcaaacgcatacattacttcgcccacaattatttgtaaaaacattatgtaatttctttcatatttactatttaatttacataaccattgagtcaatgtttaggcggttcttttgcctacttaagagtggagctcggcgacttcatggccttcatcgccgcgggaaacataatcctcgaatacgttgtcggtggagctgccgtggctcgatcgtggacctcttacttcgccactctcttaaaccataaacctgaagacttccgcatcatagttcacaaactcggcgaagactatagccacttagatccaatagccgtcggcgtttgcgccatcatttgtgttttagctgtcgttggcacaaaaggctcctcaagattcaattacattgcttctataatccacatggtcgtgattctctttgttatcatcgccggatttactaaagccgatgtgaaaaactacagcgatttcactccttacggcgttagaggagtgtttaaatccgccgcggttcttttctttgcctatattggatttgatgcggtttcaacgatggctgaggagacaaagaatccagggagagatattcctattggtcttgttggatcgatggtggttactacggtttgttattgtctcatggcggttacgttgtgtcttatgcagccgtatcaacagattgatccggacgcgccattctcggttgcgttttctgccgttggatgggattgggctaagtacattgtcgcctttggggctcttaaaggtatgccaaagattttggccttcattatttatttgcgtttgcgtttacatttagtatagtctaaaatctatactaatctttgaaatgtttaggtatgacgacggttttgttagttggggccattggtcaagctaggtacatgacacacatagcccgagcccatatgatgcctccatggctagctcaagtcaacgcaaagaccggaacaccaattaacgcgaccgtggtaatgcttgccgcgacagctctcatagcattcttcacaaaactgaaaattttagccgatctcttgtctgtttccacacttttcatcttcatgttcgttgctgtggctcttctcgttagaagatattacgtcaccggagaaacatcgacccgtgaccgtaacaagtttttagtgttcttaggtttgattcttgcgtcctctaccgcgactgctgtttattgggctttggaagaagaaggttggattgggtattgcattacggttcctatatggtttctgtctacggttgccatgaagtttcttgtaccgcaagctagggctccgaaaatttggggtgttcctttggttccgtggttgccttctgcttccatcgctattaatatcttccttcttggttccatcgatacaaaatcgttcgttaggtttgcaatctggacaggtattctgctcatatattacgtcttgtttgggttgcacgcaacgtatgatacagctaaggcgacgttgaaggagaagcaggcattgcagaaagctgaggaaggtggtgttgttgctgataattcttgttctgcaacttaagctcactagttggttttaatatattgttaaagtgtttggctttggattcgggtttattaatagttgtcagattcttcgtttggttaattagtgttctgatctcaagaattgtaatgtctttggtttgtttagattttcaatatgttaatagattttcttcacatttgcatcaaacatgataattaaggtctggtttaatccttctcaagtaaaatagatgtgtgacaaaagtatgtcgtatttgaaaccaaaaatcaacttattcgagttaccaacgttttaatttatgaattcacaagatacttttttccatttaatttgtttatgagtaagttgattaatttgtgggttaggcccatcatgaagtaaacctattaacctagtattgtttgcggggaaagttagggcaatttgtggatttcttatttaagacagaacaaagaagaaaacaaactctgtatttttttctccatcgccagtaaaccctgcgttctctctcgctcgcttgtgtgtgatagagagggagagaaga

SEQ ID NO: 4101 - DNA, 3000 bp, Unknown
  misc_feature (1)..( 3000): cDNA_ID_1822967_gDNA_ID_1620683_Annot_ID_48394 3000 nt of promoter + ATG
aagtcagtggattcatctgtaattaataaccaggtaaataatgtatctcttactgtttgagcttgcaatagaaatgttccttattctctgcattaggccggtttacatttttccattacatttttggggtacaggagcttaagtttgacgctgacagtgcaacgtacttcctggactcctttcccaagaactttgacattggaaaatatacttttgtatttaaggtattgcacttctttggttttactacacccaagacttcatataaatgtatgatgacaacatgataagcttcgttttctgcagattgtgctggatgaatcagcacatgagaaagtatacataactgaagctcaaacaaaagtgcctatagctgccacaggagctattagcattgaaaatgcagaaattgctgtacttgacagtgacattggaagcgttgaatctcagaaaaagtatgtcacctgtattgttgatgaacaacttccttttttgcttattttgattgattgctaattgcttaaccatttttcttaggaaacttgtaccattattgcttacaatatatatttcaaactttttgttgttgtgcttagtgtcttctttttgtttattggttctctctgtaacatttgtaggctagatttaactaaagatggagcggtatcattatcagcaaaccaccttcaaaagctacgcctgtcattccagttaactactccacttggcaatgcgtttaagccacaccaggtttgttcattcttgatttttcgcttcatcaatggttatattctgttctattcactttcttgacttgcttacttccatgcaggcatttttcaagctgaaacatgagtcacaggtcgagcatatctttctcgtgaaaacttctggaaagaagtctgaattagttctagttaagttccttcaacttcatttaaaattgcttttgcaaaaaaagtttaatgatcaagtttggtgaaattaatgacgtcctaaatacaatattaatggttaatgttattttcttaccttcaggattttcttggattggttgagaagctctactacctctctggtaaatatgagatacagctaaccattggagatgcttctatggtaagtactttactttcaggtccaatgcagttgatgatttatgtcttctgagatttgaacagtgttattttcctttctcttttcccaggagaactctttactgagtaatattggtcacattgaactagacctaccagagcgtccagagaaggcgactcgtcctcctctacagtctactgagccttactcaagatatgggccaaaagctgaaatatcacacatattcaggattcctgaaaagcttccagcaaagcagctctcactagttttcttgggtgttatcgttctcccattcatcggtttcctgattggggtcagtctccctttgcttgtaaatagtatccgaaaaacatcatcacatttctttcactactcatatatattttttatgtttcagcttacgcggttgggagtgaacataaagagcttcccatcgtcgactggatctgcaatatccgctttacttttccactgcggaattggagctgttttgcttctatatgtgctattctggttgaaggcaagttttcataaccgattattgtttgtttgatctacagttgaatcattgcatcaaatcacaatttctttgttttgtttgtttgcattctacagttgaatcattgcatcaaatcacaatttctttgttttgtttgtttgcattctacagttggatctattcacgactctcaaggcactttctttgttgggagtgtttctgttgttcgtgggacacagaacactatctcaacttgcatcagcatcaaacaagttgaaatctgcttgaagaagaagaactcactatgaaggatctttttttggtttatgcgtattttcagttttgtagtattgcttatagattatggtgatagacaaattcaaaagaagttcagagtttacatactctctcagtttagtcttaaaaagtaatcaagagtctctttccttagcttttttgttgaaccaaatcaactaagataatgattagctcatgattagatcacatgagtttcttaattattcacactttatgagtgtttgtggaaagttaaaaggtctaacaaaattttgaaataggctggccataaaatcgaaatgaaattttatatataaaatcaaaccgaatttcattctagtcaaaatagaaataaatgctgataaaaatgtagaaattactttgggtagaaacgagtcaacgaaggaaatgtatttggtatttgacccttaacatggcaatggcaacgttacaacttttttttttttttttttttcttgcatcgttacaacttcacaaaactttacagttgattggaaaattaaattttagaagaaaaagcacgtagttgtcttttcagacaattatttgttcatcttgaatttgtgtcccaagaacatatctctctctctctctctcctcaccttggtaagaacgtccaatccaatctataaatctccttgatggaatttccgtacatattacttgttcctttctgatctcttcttcatcggttttatgtttcatcgagtttgaatatttctttgtaagtcttttcctgtcggttatgttttcgtcgttgaaatggtttcaggaattaacaaagatcagatttttggcctttttttctcttctaaatttgaatttcgattttgggaacacgaatcgatgatgctgatgatctacaaatgggtattgaaaacgatttgttcatggttattctgcggtcgtggtttccccaaaaaagtttggtttttaaatttgcaaagcagagtttgatctctcatttaacaataccatgttctaaccatattgtgcgtgatgggtgatttctttggtctgtgaaggattctctgtttgatgattgctagttctttagaagagca

SEQ ID NO: 4102 - DNA, 3000 bp, Unknown
  misc_feature (1)..( 3000): cDNA_ID_1822925_gDNA_ID_1620683_Annot_ID_164552 3000 nt of promoter + ATG
taactccaaaacagagcatcttgaagtaaaatgccaaagcttgattcaacaaaccatttcgaacaaaactgctgataatcgaattccatggcctgatgctactacgccttaaatctagtctgtaaaacattttaccacaatctgaaaagctaccacacattgcatacatccccaagatcctctcatcggtatagctatcaccggaaatgctgtttacgattagaaaggcgtgaacttgcttaccttgtcgaagaagatttgggttagagcaagcttgtagaagtaaactaagtcgacgagggatagtttcttcgagaaatcgagacgaatttctcaatggaagggattttttgtacggagcgattgctggcgcgaagcgcttagcgactgaggagatactcatagtctttttggtgaaatagagaaatgagaagcaaacattcaaagattagttgatctcttcaccggggactcactaagtcagcgagttgccgacgacggcgacggagaagtaaccgggaaaatggcgcggggaattagggcagacgaagactacaaacacacgtgcaaaacataaacatgggcctctttgagtatttaggcccaatttaagtaaaatcgctgccacatcaaaccaagcttggtttaagtattggttgttttcggttagtctattttctttttgattcggttttgaaccttgtttcaccatggtggagatctccaatataattttttacttaattttcataattcgtattttatgagaatggaattcaatatagtgtagaagtattaaaataaaccaatgagcttccacgaatagatccatttagtttgtctaaagtaaacaatgttagcttaaaccctgaaatagatggaaagttttgttgtaacttgtaagacactagattaaaaatgtacaattttgattttcaacagagttatttaatactattggacaatctatagtgaaattaaagctagaaatgttttattcaaattcaattcgttattttgtagtttcaatgaaagagttgatccattttataattcaccctaatactttggtgttgtcatttataaatgaaactgaattaagaactgtacgaatagactttatgttgttgtttgctaaatcaccatgcaaacaaagctaacgcatactcaagaaattgccattacttggtgaaaacgtgaaacataaattcagattcacgaatttgagtctaaagtactcaagaacaaaaaccaagaataataatttacaagaaaaatgcagaaattaaaatgcttaaccaagcttggcaagaacttcgttcaaagcagagactgtctcagcatagtacttctcagcctgcgaaggactcttcttcttcgccgcataatccagctgccggagaatcaatcataaacaaactttcgatcagacaaacaagaaacattacaaaatcttgatagatggtgatcgaagttagatgagaaacttacattgtcgatggtatcgaagagcttggtggtgagatccttgagtgacttcttctcatccttgggtttggaggaaatgattgtgttaagatcataacgaagataagaagccttggaacgaagatcgttttgaacatatggccaagctttcctgtcgatcaatggcttcacatttatgatatcctttgcagattctttggctctagctgcagcttctgttggtggcaatggctgtaagtaaaacctgtctttcaatgccaatgcaaagtctcttgcttggtctgagttatctgtcccagctgctcaccaaacaaaacaaattgttgtcacctcataaaacataaaacaatgtgtaagtgttatatatctaccgtcgtatgtcatatagagatcgagttaagtgtgtttataccagaaaaatcgatataagaactaactcgaacacatgtttgcttgcttattatgaactctaacccaaatccgaatgaaacattcatacacatgcttgattattatggagtctcttatattcttatacaaaaacatccacatttaaagactacattttatggttttttcatctacataacttaaatcacgtttaaattcctaatctcattaacaatgagaatgaatatcatattggaagattagtttgttagttaacttacgaaggccaccggaaggagctggaggagggccaactttgatcgaaatagcatcggcgaggacagcctgaacaaacgagccaccagctaaaccagcagcaacaagcccaatcacggaccggcgagaagtctcctcactctgctgagctctgacgacaagtctagacctttgagccaccgccactcttccagagccattcagacggctggagccattgatctttaagcttccttcaagaaccgccggagatgcaccgtgtaatccacccatcgaagccattttgtttttctttctcaagacgaaaattgaagccgatgattattggttatgcttatatgattggttggtttcattctccgacacagagcgccttatctgtactttagataacttggatatggttgtagccactcatataaaaccacgtgtcatttttgtccgccttaaagccacgtggcaagattatttaaacatttgggccgaattgtaggcccaaagttagcccatatgtttaaatactttattgattgataacgttatgataattccagaagtccgccacatctaatttcaaaatcgttcgaatttcgaaactacaggctcctgcttcagtcacacacttacacacacacaaaaatccccaaattaggaaaaagtaagaatcctagtttctcgacttcgattgagaaggttttcgatttgattctctaagatcttgagaatcaatcggagattttattgtcggtaacccgaatttagggagaagactaccattttgggatttttatgcacttgacgagcgaaaggagaagaaatttgtagcaattttgagtctcggagatg

SEQ ID NO: 4103 - DNA, 3000 bp, Unknown
  misc_feature (1)..( 3000): cDNA_ID_1822947_gDNA_ID_1620683_Annot_ID_164546 3000 nt of promoter + ATG
aatattctgcattagctgcgccgcggaatgatttttttatgaaacaaacctttttattgttatatatccaaacaatcatcattttttagtagttgttgtcagattttttcaatagaaaatgggatttagaccaactgatgattttggtcggtttttgtcgggagaaataatcgaaaaccattaaccaactcatggttccgaaaaaaaaaacccatcaaccaactcattagaagacataagttgcttttcaaaacaatatataaacattatactacgagtctgcgaacgtttatatctgaaaactttcaaacaattaacacgcctatacataactggaatcaaactaaccattttacatttacaatatcttagttatatctcttttttttttgtccaaaagagattatgtatcataacttttttcatatgtgtgttcaattaagaatttttgaataacctttaccaaaaaaaaagaaaagaattttctcaaataaaattttagtttactcagaacctctaaaaacaagctaggtacgatctagaaacatatagtacacactatttgtgtataatacataactacagtactatatggtgagaaaagaaaggaagagtcacgagaaaactgtctgtttggcaaatgagggataatggaagggaagaagaagtactcggacatgccaggctagctagctatatataaatacacacgtatataaattatcttgtgatcagtgtgtactaatgtgtgctggaatctgtacacattcttatatgtacatatgtatttgcatgcatgtggttgtcttacacatctttatgcattgtttcagcttctgtgcgtgtttgtgtatgtgtgaccacataccgttgttacttttcatagttggcgttctcttgataagtcactgttagtgtggcaatttgacaataaaatctaaaatgttattaattataacaccccaattcaatatatatatatatacacatataagaaaatgtatgtggaaagttcaaactataatccatgagataatagaaatatagatccgaattttattatggttttacagtgatctaatatattgtagacaaaaatggtttagaaaacacttgaatgcaaatgcctaaaaaggctaaaacacatgcatcaccgatcattttgctaaaatttcagttgaaaataagatgcaatactttatttttaaaaaataaaattagagatgaattttttttgtattaattttttttaataacttttgatccttaatctctttgaaaaaaacaaaacaaaacaaaacatgtataatccctttattaccgtctggtatttatatattagactgaccggattgtggtatagtcttccaaatgtccaatactttctagaccgagctaatccaaccggatgataaagtgaatagagttcatcattcaaatgtcaaatgaactatagtctatatacatagatgcatgcatataaagagtatccaaaaagagaaataatatagaagactcaaaattggaaaaagggtcccatgttcctaacaggtaggagatatctctatcatagagaaacaatggatcgtacacgtacacgtacatctcctctcaacctgattcatacccatttttccttctctactcgtccttgatttagtctcttgggacccttctccattatatctcacatgtctctcaaacttcctgccatttcacctccttacatgtcaatttgcttcgatcaccttaattatattatgggcatgttataatgttcttatcttctaatttgtttcacagctcaacaatggagaaatttgcttcggaatcagaggcattagcatatatgttggcagaggttcttgcagaaaaatctggacaaaattcaagtttcttcaaagaaaactgtgtgagaaatacatgttatctaaggatgaaccgatatccaccttgtcccaaaccatcggaggtgtacggattaatgccacacacggacagtgatttcctcacaatcttgtatcaagatcaagtcggaggactccaacttatcaaagacaatagatggatcgctgttaaacctaatcctaaagctctcattatcaatattggtgacttatttcaggtaattgagcttttattatgtcattctaccattaccattatatcattatccggagcttacaaattagtttggtattttatgttttgatatggtttggaaggatttaaacaatttgttcatacgcatgcatgatcaataattaaaaatgtggatttcttataaagataacatctaaggcaatgtattaaaaatgtctttaaattactagattgtacttatatatgtgtttggttaggcatggagcaatggcatgtacaaaagtgttgaacaccgtgtgatgacgaacccaaaggtggagagattctcaacggcttattttatgtgtccatcatacgacgccgttatagagtgttcaagtgatcgtcctgcttatagaaatttcagcttcagagaattcagacaacaagttcaagaagatgttaagaagtttggttttaaagttggccttcctaggttccttaatcacgtctactaatttatacacccaaatttttatttttcctttataatttattttaggttttatgatttatttgaattgtttttggtttgattttttccatataatttatttttcatgtttttccttaagaaatatattgttcctcattatcaaatttaattaaaatcgattagaaaaccaattttaagttacagaggaaaaaactgaactttattaattttgaattgtacattgcaaaaaaaaaaaaaaaactcaatccgataaaaagagaaaaaaaaactaatgaaaaatatttggcatttggttttattttatgttataaaaaaatgtcagaagatattagacgaagggtcacgataaataattagaaacaaaaagaattaaaaaaaaaaaaaaaaaaaagaataaagaa

SEQ ID NO: 4104 - DNA, 3000 bp, Unknown
  misc_feature (1)..( 3000): cDNA_ID_1822951_gDNA_ID_1620683_Annot_ID_164545 3000 nt of
ataacgatgtttctgaaataccctttagcttctcagtcacagccgtcgtcgaggaggtggagcttcctgtgattgacgtcagccgtttgattgatggagccgaggaggagagagagaaatgtaaggaagcgattgcgagagcttcgagggagtggggattttttcaagtgataaaccatggaatatcaatggatgtgttggagaagatgagacaagagcaaattagggtctttagagagccttttgacaagaaaagtaagtcggagaaattttccgccgggagttaccggtggggaacgccgtcagccacttctatccggcagctttcttggtcagaagcttttcatgttcccatgacagatatttctgacaacaaggactttactactctcaggtacacaaatattgttatcaattacatttttttagaattaatttacttattaaacttaattatttgaaaaaatatgtggagaattatcccaataacaagatgtaaattaaaatacaactttacctttcttttggttaagttaccttctaaacaactagtgttttgaggattagtaagtaaattttaatgacatatataatgatacaactatagtattaattaatatcaagtttttgactataagtaacactatttgcaaagaaaattaattaattagtcaaagattagacatgggagacaaacacagtttttaattcagtatatggtggttttgaagcatataatagagtgttgtcatttatatttaattaataatagttttggatattttagaaatttaatcctagaaaataaagttgttgggcattgggtcaaagatttattccccatatctcatgcgtttctatgttttccatttttaatactatttttgaatacgtctaattttgggatagcaagttggcatgtgaaatacaatgaataaataaacaatattaagacttttcaaacaaaaataaaatattatgtatttggaaaatatataagaaataaatcttaacgtagattttttttgtttgttaaagaacaatcttaagatagttaattaaactctagctaactttttttaagatacctctaatgttgttatttattctttgattcttcgtattcgtaggaacttcgtcaacttcaaattctttaacatgctagaaaatataatggacttcttagaattaatattctgcattagctgcgccgcggaatgatttttttatgaaacaaacctttttattgttatatatccaaacaatcatcattttttagtagttgttgtcagattttttcaatagaaaatgggatttagaccaactgatgattttggtcggtttttgtcgggagaaataatcgaaaaccattaaccaactcatggttccgaaaaaaaaaacccatcaaccaactcattagaagacataagttgcttttcaaaacaatatataaacattatactacgagtctgcgaacgtttatatctgaaaactttcaaacaattaacacgcctatacataactggaatcaaactaaccattttacatttacaatatcttagttatatctcttttttttttgtccaaaagagattatgtatcataacttttttcatatgtgtgttcaattaagaatttttgaataacctttaccaaaaaaaaagaaaagaattttctcaaataaaattttagtttactcagaacctctaaaaacaagctaggtacgatctagaaacatatagtacacactatttgtgtataatacataactacagtactatatggtgagaaaagaaaggaagagtcacgagaaaactgtctgtttggcaaatgagggataatggaagggaagaagaagtactcggacatgccaggctagctagctatatataaatacacacgtatataaattatcttgtgatcagtgtgtactaatgtgtgctggaatctgtacacattcttatatgtacatatgtatttgcatgcatgtggttgtcttacacatctttatgcattgtttcagcttctgtgcgtgtttgtgtatgtgtgaccacataccgttgttacttttcatagttggcgttctcttgataagtcactgttagtgtggcaatttgacaataaaatctaaaatgttattaattataacaccccaattcaatatatatatatatacacatataagaaaatgtatgtggaaagttcaaactataatccatgagataatagaaatatagatccgaattttattatggttttacagtgatctaatatattgtagacaaaaatggtttagaaaacacttgaatgcaaatgcctaaaaaggctaaaacacatgcatcaccgatcattttgctaaaatttcagttgaaaataagatgcaatactttatttttaaaaaataaaattagagatgaattttttttgtattaattttttttaataacttttgatccttaatctctttgaaaaaaacaaaacaaaacaaaacatgtataatccctttattaccgtctggtatttatatattagactgaccggattgtggtatagtcttccaaatgtccaatactttctagaccgagctaatccaaccggatgataaagtgaatagagttcatcattcaaatgtcaaatgaactatagtctatatacatagatgcatgcatataaagagtatccaaaaagagaaataatatagaagactcaaaattggaaaaagggtcccatgttcctaacaggtaggagatatctctatcatagagaaacaatggatcgtacacgtacacgtacatctcctctcaacctgattcatacccatttttccttctctactcgtccttgatttagtctcttgggacccttctccattatatctcacatgtctctcaaacttcctgccatttcacctccttacatgtcaatttgcttcgatcaccttaattatattatgggcatgttataatgttcttatcttctaatttgtttcacagctcaaca

SEQ ID NO: 4105 - DNA, 3000 bp, Unknown
  misc_feature (1)..( 3000): cDNA_ID_3072550_gDNA_ID_1620683_Annot_ID_164544 3000 nt of promoter + ATG
aataaatgaaagaaaaaagaaacataacattattaattggaggcctactggagaagtcgcgagatcgaaacaggatggcccactattgagtattgactctctagagttgtcaattgaaataagttttttttttttcctttttggtgtcgacaaaaccaattaaaataatttcaagtggtccttctcaaaattttgggtaatttgactatgttagaaaattaaaattaatacaacatttgcattaaaaaggaaatgcggcagtttgaactacaatttgcagtatttataaaactaagaaaattttgtaattcgttgattcattgtatatatatactatatagtcttgttcagtcaaacaaaaagtttattcgttgacaaaaaagaagtgatctaaagattctgattagttatatatgttactgttgaaatagttaatttcttggattaagtttattattagatttatatagtattagctcaagatttgtagataatataagtttgagttaattcatataatatatgaactcagctaagctagctcatgagatttttaacaaaaaaaaaaaaagctagctcatgagatatacactaataaattgagtttaggtgagcgaatttggtcattctaacacccttctcttgaagcaatgtataattacacagaatagtgtttgtgaagtagctctatacgtcatactacacgtattatagaaaaaaactcacaaaaagatattgtaggattaagataaagcgagagaaagaacccagaaaaactaaagtcatataaagtaattatactgaatatgatctgtggactaatcggcaaagtgccttcctaggcttagctagttaaatcatcactttcttgaatcactattttctttagttatccacgtctaagaaaaaagcgtcggtaatcccttaggcacgtttccttttgggaatggatgcaagcagcaaattgctcaaagatctttatttatttttatgacaggaagattctgcataaaaacctgaaatgattttcaaagtctataaaatttctaatattattaccatttaaaagtatatgttagactcaagttgccaaaaaaaaaaaaaaaaaaaaacgttaaagacataaaatatgagaatgaagtgttgttggtgctaaataaataggaaacaaaaaaaaaaaaaaacgagttgaggaaatgcatgcattggaataaatattcattggatgataacttcaatattatatttttggtagagttttaaaagtatatttcattataacaatttaaataattttttaaacatatgcatgacggatgttttccctatatatatatatatatatatatatatatatatatatatatattctttttaataactaattcatacgtataagaaaaaaaaacaagtgaaacatattccatattgtgtcacaactcacaacatttggagctgagccagacttaacatgttgatgttccgttcacgatcttatctcttttaccttcttttcgtgaagttgaaaacaaagcaacattttttttttgttaaggaacaaagcaacatttggataaaatgttactagcaaagcaatatttataagaattctgtaacgctttgagttatccattaccattagtaaatttacacttattttagtagagaattacaatgggtcggtatgcatcctatctttatcaaagttaatgcaattaaatttgattttttttagtattaccaccatgtttgtataattcgaagtactacgtacatgcatgcattcactgcatttgtcaaagacacagacgcaaaaaaaaaaaatgtaaacggtttcaacttttgaatgttgtttggtttcgggtttgtatatatatatatatagatgggttactatttactaaatatggtaaaaagctcatgctttcgttggtgtacaacaaataataaactaattacctcagtgaaataatacacatataatataaataaataattatgtaaacatcgacagtgcatataatgagaaagcaaagtaaaagtcgtcgtggttctttttcttggaccccaagcttctcttgcttccataagttctcttattttactaccgcttttaaactaatacgtaccaaacaatgcaacataatgtttcttttattattgggtcttatccagcgaaggaaaaggtactgattagtctgattattaataattgattacaataataaagctaaatatatactgtatattattatagtagtaataacagtacaacatagaagcaagtgaaaaacatgagaaacgaaggacggtgtccagacaagcaaatattcaaacctttgaaaatgaaacaacatcatgttctccaagacagccccaacttaatttattctaataataccaaattcattaatccccattatcgtatcttgtccaccatagatatacaaatatacacattacccatatcgcatttttctaaaatctttttgtatttaatttctacatctgttacaaatatttgacaggtgaattttgatcttagagaatcaaataaaaaaataacattacgatcttaagagtacaaatactttgattagtaaactatcccatttccaactactaattagttgctactcttatttttaacccccccatatacttatttagacgttgcaaaagaatgtgatgaatatacaaatgatgactactcattaaattgtactcccaattaatggtgagtaattaacaatgtcgatgggcggcaaacaatatattttttctttcaaatatttgttttttttttaattgtcaacatggtatgctaaaaatcaaaatgttaacaaattgcactcgtatgtaaatgcatatgcatataggtggacgtgtatataaatgtaagaaatgtgtctctcctcacaacacgtattttgataaccttcacttcccataattctctctaactcatcactctttttcttcttctgcatagatcttctc

SEQ ID NO: 4106 - DNA, 3000 bp, Unknown
  misc_feature (1)..( 3000): cDNA_ID_3072552_gDNA_ID_1620683_Annot_ID_164543 3000 nt of promoter + ATG
aaggcgaagaaggcattcaagaaggcgatattatgacagttcaagcttggatcactctgaaacgtcccaatggactcataggcgctattcctcactcaccttactttcctttccacaaagaggaaaacttttgggttcttcttgcggattcaaaccatgtctggttctttcagaaggttaaattcatggatgaagctggagctatagccgctgcatcaaacactattactgaaacaatggaacctttaggagcaagcgtcaaggaaacaaatgatgcagttaaagaagctgttgagaaggttaaaagtgggtcaagattggtaatggggagactcttagcacctggagaaggtacttataacttgacttgcttctgcctaagcgatacttggatcggttgtgaccaaaagacatcactgaaagtcgaggttttgaaaagaacccgtgatgtggagggtgagaatgcagaagaaggattagaggaagaggatgatgagattgaagaggaggattacgaaagcgaatacagtgaggacgaggaagataagaagagagggtcaaagaagaaagtaaacaaggaatcgagttctgaagagtcaggatcagatgaagagtaaaagaacaaaaagtagttaacgttgatctgaaattattgtctgaaattatacaataatttttgttttcagagcttacacagtcgtactaaaagattttacagtatttaatctttttgctgagtttaatactctttttagttgactcttcaaatctataccttgttttgactcttaagctcagatagttcaaaacttttctggtcatgttttcgtcagaaacccaagctcagccccagaaagcttctttgaagaaccttggccgtctatctattttccttatagatgattcaacggtagatacgatctcaaaagctcatgaagagtccaaatgatcaagactgggttctctagaagtaatctgtccttgacttccacccaaaagttctttttcatcttcttcctcttcactgagatcctcaccatcttcttcttcactctcaatctcattgtcaatcttatcttcgtcgctgcttaaaccaccttcaccttcgcttagctcattcagctgctttgccttgaccttaacacgtcttcctttgatgtatctaaactcccactgtggtggaggatatttcttcatcagtttctcgtacttatccttcatctctagtttcacaaacacttttccaaccatagacacaatcgcaacattcggtttcactccaagctcctccatgtcagcaaagacctaagaaaacactcaatagtttcatacatcaacttctctgatagaatctctgccagttgcaaatacttagtaagaaagattttttaagtgtacctcgaagagcttttggtgcatatctctcttgtaatatatagagatcattttgttgaagaactttctaggagttccttctaaatgttccatgaacaatttgttccacaattcctcagcttcgtcaaggcgattatcttctgctaaagcatttagtaatgagaagtaagttcccattgttcttccttggcctttactcagcatccattttgtcacctaacaaaatccataaacattattctacattcatctaactaaaaaaagaaacacagctcttactgcttaataaacaagcatacctgaataatcttcttccattctttttcatcttcaagtataactaatgccttcttaactataacaagagggaactctaattcccaagcaatgaaggaatcaagcgctccataaacttcttctttaacattcgacaatccttttatctgcagattaacaatactcactaactctaaaagagattgcagaacacaaaaacatatgaagagagcattacacaagcaatcattttggcagctttagagatagttccaatcctcttccttgttttccatacacgaggagaccgaggtcttggacctctcgccgcacaaacctgaaagattattgaattcgaagacaacatgtgaaattttgaaaccaagagactgtcgaaatgtttagttaaagaaggtataagaaacataaatacgaaccacaacattgttaggctttttggtgaagagcttagttgatgattcccttgtttgaagaagaagataaggtaatgaatatctcaagcttagcatcctgaaaaaaatcaattcagagaagaagaagaagaagaagaagaagaagaagaacccagaaatcttaaagctttctccttttcagccactagagatatctagtgaattcaatttacaattgtgtaagttttctagagaatcgaaacacatattgttcaacttacctgtgctttcttcttcttcgttctcactctgtctgataatttgcgcttctctgtgtcctccaagttccctctgatgtctgattctcatccaaaacatacgaaatgcgtttatggaagtaacggataaggcccattaactagtaaagttaaataggcccattaactagtaaagttaaataggcccattaacctgaaaattttgacccgtcgtctgtattcttcatctctttcctcttcgccatcgattctctgagctggaaacgaattctctctctctcagcttatagatacccaaattaaggtaattttactcttcttcgtgattcttcttcgattaggttttggtttgaatctcgaatcgatgattttcgaactgatttgctcttgaaaatcatgtggttctgctccatgttaaattgagatccgaaattttagaatattagaatgacttgtgaaatgttagtatgatacaaaaaccatatctttccttcttttgcttcttcaacataagggtcttttgcttagttttgctgtaaattccttatgggtttttagcagagaaataaaagatctgatttttaacatccattacaagcgattcagattttgcttttttcttgcagaagaagtgaaag

SEQ ID NO: 4107 - DNA, 3000 bp, Unknown
  misc_feature (1)..( 3000): cDNA_ID_3072555_gDNA_ID_1620683_Annot_ID_164540 3000 nt of promoter + ATG
atcgcacgacaatgctcttatagaagatagcatcatcaacattgcagatggtaaagtgaagcaagaggttcaaatcaagcttcagaatgttgaatctggtgaactagaactagaaatggagtggctacctcttgagcaataaataatcaactatataatagggtcattatatataaccaaacaaattttattactgtattcattattttaacattcccccttggttcttgtttgacaaatttttgaaactttgatctcattgaaaactttctttcgtactttgttgttgtaatgttcttttggcagattagatatttgtataactcatatgattatatgttttgactcatgttcttcaaaagatttcatttgaaacctaagataagacgcttataggttactaaatcaggtttcaaacccaatctcaacatttcatcatgggatctcatagctttcttcatctccttcacacgacacaacccttgaatcataattgtaaaactcttgctgttcactgaatttatctctttcatgtactcaaacactacaactgcttcttccaccatctctttttgcctcatcataagccgatcaagaaccgcgttataagcattcacatctaaacttcctttcattttctttatcttttcatgtagtaccagtgctttctctagtttcccgcttctgcagtaacgttccatcaacaatccacatgcaaaagaatcgaaataaacctccatttccataaccgaatcaagaagcttctctgcggatttccatcttcttttcctacacatagatgctaaaacttctgatagcttgtgtgtacaaggaacaaaaccgcgctttataacatctacaagcaattcctcttcttcctctgagctattatcatctctgcaaagggcatttgcgaattcgatatagcaactctcatcaagtacagtaatacctttccgacaaatcattcgatatacatcaacagcttcttttgttctcttctttcttgacagtgcttttaacatacaaccgtatgtcgaatcccacaatctcactgtttcaccattgcaggctttacggaaaagcatctcagaggcaaacgttttccccatatcgcaaagtctttcaatgattttatcattcacagccgaatcacctaaagtaacaaactttttctccaccatcaaacagagaaccttatcaatgaactcagcatctcctaatctacatgcatcatctaatacgcaaccgtaagaacaaaaactcaactctagtttcttgtcatccatctcatgaattaaactaaacacagcatcaaactctccatttctgctataacattccacaagattagtgtaaatcttgcagctttcaacacctgtttccatcaatttaaaaacactcttggatctcccttgttcgcataaaatctgagcaatcaaatcccaagtcaactcatcagagacaatcccgtttcgaaccatggcactatacaaacacaaagccactctaaactggttttctttaaccagagaaccaagaagagagttataagcactttgagaaggtgaaagtctcaatcttctcataaaaccaaacacttccaaaccattatgatgactaccctttaaggcataatactcaagcactaagctaagcgagacagacagtgaaacttcaccttcaaaccaccgatgcatttctccaacaactaaagacacagaattggtttcaaccagaggacgcaagagcatttctgctcgttccaagagacctgattcagcagcaacttcaattactcgacaatgagacttaagatccggctcgaaccgaagatgggttttggcaaaatcgaagaaatcaagagtggttttagggcattttcgagtttcacggaggatctggaggaatacaggtgaagtaagtgttgaccttgggagcttggatttaacatattggagatgagtgatccagttacgacgttgtaagagaattgaagatatttctgtggctactcggaacagagtctgttgggttttccaatcggaagcagaggatgttgatggagtcgctgaagtcgagaatcgtttgaagaatccaacacttgtgtggataagaaccatttaggtgcttcaccaattcaaaaatctgtcctcttttttctaacaaaccccaaaatcgattcttcaaccaaaattcatcctcaaagcccaaagggtttaaggaaagttgatcaagaacaacaaaagatgaaaacttgcctgaatcttagcattgacgttcagagtgtgagttatcctctgcaggtcagtgcacagaggctcagctgcgcaagcgcttcattacccggagatcttctgcctaattcagtcaacgtcattactcaatttatcttaacagtatccaaaacgcggcgtatatgtctcattatcatcgttacgtgtcgtcttttcattcgctgtaatgattcatcaccttctcttcttcataaacctcacttcttcttcttcttcttcttcttcttcttcttcttcttcttcagtttcgcaattcgattcctaaagtcagcagttttgtttcttcagtttcttctcaaaccgatacttgatcaaggtaaaatatttcttgcttctctctcgttttgaatggtatgcaatcgaaatccaattttttcctgaattttcctttcattcgtacgttgttctttgtaaattagacaaatttttgtcttctcttgatctccttcacgtttgttctgatgtgattttaaatcgatttgtaaatcaaaatttacttctgattaatcatgttaggcctgaaatttgaaaaaatgtgaggcaaactttaatctcaatgtctgataatgcaagcataacagagcaattttgttttatgtagaatctctgattgaaagggctctttaaaataagaagaagggtctaaaagatggcagaatcagaagagaatagcgttttgtttcccattttcattttgacaatg

SEQ ID NO: 4108 - DNA, 3000 bp, Unknown
  misc_feature (1)..( 3000): cDNA_ID_1822963_gDNA_ID_1620683_Annot_ID_164539 3000 nt of promoter + ATG
ctcgatgtcttgaacatcggtttctgacaaactcacaacctctctgagcagtttagaacgttctgccaagctcagttcttgaaacttttggaatgatttaacctgcaacgctatcgatttagcgatagattcattgaaatgagggagttgcaagaaaggagcaatgtcttctgaagatgacttccttgcactaagaggaacagcctgcaatcaaacaactataattaggctgaaaaatcttttttttttttggcaaatgtaaagttggaaacatcttaatacctgaacaatgcattgagatagctccattactccaagtgcaggacgtaaccatccacgcccttgttcattgcggggtataacggccatctgtaagaaactcacaatatcatatagtttcgcgttgaaatttccctatgcttaagcttgaaacctttttcacatcttatgtaaaattaggagattcaagtcatcatcaactttgtaataacctttattttatgcaaaaaaaataaagactatataagaccttaatcaaatcttcaagcaggcgaggtgcaaactctagcacatgcctgaaatcacgttgcagagtcggagacaggactgatgattcacgagttaactgtttctgtatcaaaagctcagtctgttgcagagaaaaatgaacgggaaaaaaagttagcactttcaagattctatccaatacttttgtgttactcatgtattaaaaaaacaccaaccttgatagttgcaggatgctttttccaaaacttagcttcctcttgcttcaacttcttaggatccaaatttagctcgcttttgacagacataaagagtttctgcagagattcatcatcggatttacgaactgaaatctctgcgtattcagctgctctgatgaaaatatccataactttgcttggagttaaagagggttgcaataactcgaaatatgcttgacgagtttgaagcttaacgtgattcccagtatactttgatgatctccagagatagattgaagcgatcactagtggcaaaagaatacataaaccaactgtacacaacaataatatcccaccagattctccattcatgtttaaaataaattgaggaagagcaattcccattgtataaccctgcatcaatcacatttacaaatatttcaattatcatttggagacggcaaagcccataatatgctacaaaaacatgagaatatggcctcaattgtttcaaacactcctttagatttgcatttgaaattgcgagcacaatttacaaagaagtctcaattttcatttgaggaaaaaacactattctaacatgtaagtgtaaaaacaaacaaacaatggaggttatatagtcattacctgtctaccatccggatgaccgtacttctcaaagttttcgcgggataacggatcagtcaaagcttggtaagctttagctatggactccacaaaatatttattggcctctgtaccattacaatacacaaataagcaatactaagaacacataacaatgtatcaaaagggaggaaataaacgattatcaaggaagaggaccaggaagcatttcgacctggatcaggatttttatcaggatggtattgaatagagagtcttctatatgctttcttgatttctgaatctgaagcaccaggttccaaaccgagtataccgaatggctcaaagagttgactctataatatttacccaagataatgaataagcaaatgaagcaatcttggactaagcttgaagagataattattagttattacctcacggctcatgttcttagtatgataaatcaagaagatcattacaatccaaagtaggacaactgtcaagttgctacaagaagtgaagctagagatctgcagaagacaaaatcaaacaagttcaagaggtaagaacatcatacagttaaatcaatcattattcggaaagagttagtgtgggggaaaaagaaaaactaacactttgagaaatggatctcttgtacttccctgaacgatcacactcaagacattgacaatgtatactccgttgtttcttagaaaaagcgcggcttagcttcacaaatgtataaggaaccaatggaattgccatcattgtcaaaatgaaaatgggaaacaaaacgctattctcttctgattctgccatcttttagacccttcttcttattttaaagagccctttcaatcagagattctacataaaacaaaattgctctgttatgcttgcattatcagacattgagattaaagtttgcctcacattttttcaaatttcaggcctaacatgattaatcagaagtaaattttgatttacaaatcgatttaaaatcacatcagaacaaacgtgaaggagatcaagagaagacaaaaatttgtctaatttacaaagaacaacgtacgaatgaaaggaaaattcaggaaaaaattggatttcgattgcataccattcaaaacgagagagaagcaagaaatattttaccttgatcaagtatcggtttgagaagaaactgaagaaacaaaactgctgactttaggaatcgaattgcgaaactgaagaagaagaagaagaagaagaagaagaagaagaagaagaagtgaggtttatgaagaagagaaggtgatgaatcattacagcgaatgaaaagacgacacgtaacgatgataatgagacatatacgccgcgttttggatactgttaagataaattgagtaatgacgttgactgaattaggcagaagatctccgggtaatgaagcgcttgcgcagctgagcctctgtgcactgacctgcagaggataactcacactctgaacgtcaatgctaagattcaggcaagttttcatcttttgttgttcttgatcaactttccttaaaccctttgggctttgaggatgaattttggttgaagaatcgattttggggtttgttagaaaaaagaggacagatttttgaattggtgaagcacctaaatg

SEQ ID NO: 4109 - DNA, 3000 bp, Unknown
  misc_feature (1)..( 3000): cDNA_ID_3072567_gDNA_ID_1620683_Annot_ID_164534 3000 nt of promoter + ATG
ctcataccaatcttgcttcggcaccctccttttgtttcggttcttaaccctaaattttccccttctatcccaaaacacagagattgataaaccctaattgttcaccttctattactgaaactttatctagactgttctggatttatgtttggatcaaccctctgcgttgtattggatgtagccttgacgcagaaaccctaattttccggaagcgtccttgcttgttgtttcaattgcttaattgagaatctctttggaactatgaaagtcttagaatctctcgttttggtgaaagtatcccattttgcttaatttgttcctttgtttaacgttgtgaatttgcgttgtgtagaaaatgccaaaggttaaaactaaccgagtcaagtacccagaaggatgggagttgatcgagcctactcttcgagagcttgatgccaagatgagagaaggttagtttcatataaagattttgttatatctcaataacatatgcttttgcttgtttctttttcccgtgattttgctctaactatcgtgttccttgtgcagctgagactgattcacatgatggtaagagaaagtgtgaaactttatggccaatcttcaaagtttctcatcagaggagtcggtatgtatatgacctttattaccgaagggaagaaatatctaaagagctctatgaattctgcttggaccagggctatgcagatcgcagtctgattgccaaatggaaaaaggtatgtttttatatcattcttgaattaacttctgtttgtatgcctttttagttagttgtctaaggccaaattgaagcgatttggagtttctattatgtaaaatattgttgtattagtttagagagtctagtatcgccttactgcacaatgagtcttgaagctgtttctctgaaatatatgtccttagcatatgcacttacttggaatgatctcactaacgaataggttctagaattggtattgttgctttgtttggtgaagaaataagatttctggtaattatacttcgaacaaagtgcattgcctccacgatttgccaaattttggatagttctaacttctaaccatactcccacatcttaatgatggtcactcatgaatcgtttattaacaaactcctccctgtcaattctgttgcatcttctctttgtaggttatactatccagacatatacctagatttcacttttgttttctttcattgaactaagattttgtcatttatacgtgtctctatactttgtgttaagtaactctaaaaactctctgttttgtgttttgcagtcgggatacgaacgtttatgctgcttgcgctgcatacagccaagagaccacaactatggaacaacatgtgtatgccgtgttcccaaacacttgcgtgaagagaaagtggtcgaatgcgttcactgcggctgtcaaggatgcgcgagtggcgattaaattcaacatagctttattcgctatctctgactgtttgttacaatcttgtcacttgttaaatctggattatgtattattccataaaggctaaaaaccctgactaaaaatctccttgctcttacttatcaactctgggtggtattgcaaataaaaagaacgttccggtttggtatatagttgaaacttgaaagtagaaagacgtttcccggtttggtatcttactgaattaaaagagtgttttactattcccaaaagtgtcaatttctctaaattcgtgagatttgcagcaagtttatcatgacgccgtgagttatgttttggtcaaccggtgatagaacaagatattattgaagcagaaataattattaattcttgtatttatctagacgaaacttgattgcttgatccaaggaaattgttttgacttcaaaattgtattggttctcactacagttgacctgcccctatgtttccatgtggaacaagattcttcgtcttggtcatatggattagtattatttatttctaatcttatcgtgtaatgcatgtatgatgtatgttctaaacaagatgtccaccaaggtccaaaacgagaagagatgcccattacgctcgctctagatgctttgtgaaactcgatggactttcttctctttaaactcacataacatacatacatgatccaaaatccatgatcgttctttttttttttgggttcatttttcatggtttattggaagcacaaaagaaaccaaaaataggatcacagttcttggacatcgtttaatacaaaactagaggaagtaaacattaaaaaaaaaacttgaaaaattaggggaggctaaatcattttcttgacgcgcttgtaataggaggagcaattgtggtaagtggttggtgtgaattagaacccaattatcaactaagtcgagttttgtttaaaaccaataaatttcatatacaagtttgaaactgaacatataactttttctttatatatcataattttgagtataacggatataacattttacttaaatgagaaagtactattgaattatccagaagacgtgatccgatggaaaaattcgtatcacacatgatcttttctttttatggcacaccagattttgtttacatttataattcgatttcatctttttcttagaaaaaatggtcaaagaatgcagctggtgaccaactagtgaccatacaacaagaacaaaatctcatggactctatttaaggtttccataatttaatttaccgtatcacatttccagctaattacacaaaaccgtcgataaataattgtttatagaaagaaataaatacaagaaaaacgtcaaaggatagctactataagtaaggcagactttaggaacccaaaattctgttattaatttacaaaaactaaagagtttttcacttttcagtttctcttcttaccattcactctaaaaaaacagagtctttataaaaccgatctcagattctgaatctgaatcagaatctggatcaacataattttctaacaaaaaaa

SEQ ID NO: 4110 - DNA, 3000 bp, Unknown
  misc_feature (1)..( 3000): cDNA_ID_1444629_gDNA_ID_1620683_Annot_ID_164553 3000 nt of promoter + ATG
aagtaggataggctattacagttgcttcatgtcgtcctccatcgtctggtaacaagggacgcactcggcagaagacacgtatatttccttttaattcctgaatttacagcttctcttagctcagatcaagacagccacatatataagggaaaaaaaaatagtttcttacaagaatagtgttatgaagcttcttccgcaataactctccctcacacagttgatgctccatgtctgcaagccggtcttgtagttcgcacagtagatgcttctgctcctcaaactctgtcctagtaagagatactgatgcatctgccatctgtattcacagttataaatatctatcaaattagctatttgaaatcaagagcatctgaaggtcatgtacatcattaacttccgagataaaattgatcctcctggtaccttttgcctttcattggcgattgctaattgctgctctaacatatttaaacgctccttctgcaacgaacatgtctcctgcagggtaaaactaaatatgagacaggaatgcgaaaaatgcacaactttgaactgacatccaatactaaaacaaaaaaagtactaacctccaacgatcctgattttgctgtcaagatgtctagctcttgcgatgactttccgacattctcctggtacttcctgatctcctcagacagcttctgtgactgtacaacttggcgatcacggtcatcccggacttgttggagctcattccgaagattagtaacttccgaaagcaatgaatccttctgttttatagcgtcatcttgcaacaccttgatcacaaaaaaaggaagaggaacaagttaagaagaaatgagaccaattaaagttagcacgcgacagtaaggccagtggtagagaagaaaaacttactctgcttgaagatagttgatcctgcagcgacttgctgtgtcccctaagtgtactaagattctccaggatgcttgacttctctttttcagcacgtgtgagtgcagctcgaactgtttcaagatcagtctgaagtttgctgttatattgttgcaaacttgtgttgtactcttgcagccttttgtacatatcctcaagtgacgtcacctataaacacaaaacaatttccatattaactaacagatcatgtggaactaacacgagaaacagaaatgaaacacctaagaaaacaccagaagacatatgttatataccttctgcttggcagccattttctcttccttaactttatcaagttcttctccgagagaagcctgcactttttcagctgcaactctagcttctttttctcttctatgacattcaatggcgtcctagtgttcaataagtaagaggaaagcaaagtcaagtaatgaatttcattaaaagaaaacattcacaattagaaaaaccaggcaccaaaacccttgcctgtgtactagactcctcctttgcaagcttttcatgtagtgacactacattctcttccaactttgagatagtggcctgtagctcttcctcttttgtcctagcctccaactctataagagtcaaaaagttagggactaccaccaaatgagtgaataacttgtttcatgtaaaaaaatcgcaagaagaaaataacctttgtggttgtatttttgttctgaagattccaaagaaaccttcaaattttccttctcttggacatgggtttcatcagcttgttggaaccattttacacaaaccttcagcctcttgataatatccgtcatttgctcaatcttagcctgcagggacagagacaaaaaaaaactccttctgagtgaaaccataaatgaaaacatctacaatgcttagagcacagagcaagtgtaactcaatcaatataccttagtatcaaactttccagcttttgctctctcactgagcaacgccaatatttcatcttttgtaaagtcaactttaccacattcttcaatgctccctacatcgctgttcatcgtgacatcttgtttattcacagccgaaaaagcttgtcttctcccagtacctccttgcgtttccactttccttcgcttgtcaaatgaaatgccaccgagaccctcctttttctgaaattgaatcaaaagccacagatttttcatcagtttcataacaaaaccaatatccagctacaagaaatgtagaatcccagaacccacgaccactctaaattctattgataacacccatcagagtaagaaatgcaaagccgatgaagataacaccttaataaattcatctggtaagctcacaaacaaaacccaaaatgcgaaattaataattcgaccagtcctagggtttttctcaaacccatcctccagaacactcaaaagtgacgacgaaatgtagtggaaaagcatgaaaaagggagcttacggcgtttggactgcgaggaggacgattctggttgcgagaagccatctccgagactcaaaattgctacaaatttcttctcctttcgctcgtcaagtgcataaaaatcccaaaatggtagtcttctccctaaattcgggttaccgacaataaaatctccgattgattctcaagatcttagagaatcaaatcgaaaaccttctcaatcgaagtcgagaaactaggattcttactttttcctaatttggggatttttgtgtgtgtgtaagtgtgtgactgaagcaggagcctgtagtttcgaaattcgaacgattttgaaattagatgtggcggacttctggaattatcataacgttatcaatcaataaagtatttaaacatatgggctaactttgggcctacaattcggcccaaatgtttaaataatcttgccacgtggctttaaggcggacaaaaatgacacgtggttttatatgagtggctacaaccatatccaagttatctaaagtacagataaggcgctctgtgtcggagaatgaaaccaaccaatcatataagcataaccaataatcatcggcttcaattttcgtcttgagaaagaaaaacaaa

SEQ ID NO: 4111 - DNA, 3000 bp, Unknown; identical to SEQ ID NO: 4098
  misc_feature (1)..( 3000): cDNA_ID_1822984_gDNA_ID_1620683_Annot_ID_164532 3000 nt of promoter + ATG

SEQ ID NO: 4112 - DNA, 3000 bp, Unknown; identical to SEQ ID NO: 4108
  misc_feature (1)..( 3000): cDNA_ID_1822963_gDNA_ID_1620683_Annot_ID_48395 3000 nt of promoter + ATG

SEQ ID NO: 4113 - DNA, 3000 bp, Unknown; identical to SEQ ID NO: 4107
  misc_feature (1)..( 3000): cDNA_ID_1822959_gDNA_ID_1620683_Annot_ID_48396 3000 nt of promoter + ATG

SEQ ID NO: 4114 - DNA, 3000 bp, Unknown; identical to SEQ ID NO: 4105
  misc_feature (1)..( 3000): cDNA_ID_1822951_gDNA_ID_1620683_Annot_ID_48398 3000 nt of promoter + ATG

SEQ ID NO: 4115 - DNA, 3000 bp, Unknown; identical to SEQ ID NO: 4103
  misc_feature (1)..( 3000): cDNA_ID_1822947_gDNA_ID_1620683_Annot_ID_48399 3000 nt of promoter + ATG

SEQ ID NO: 4116 - DNA, 3000 bp, Unknown; identical to SEQ ID NO: 4102
  misc_feature (1)..( 3000): cDNA_ID_1822925_gDNA_ID_1620683_Annot_ID_48405 3000 nt of promoter + ATG

SEQ ID NO: 4117 - DNA, 3000 bp, Unknown; identical to SEQ ID NO: 4110
  misc_feature (1)..( 3000): cDNA_ID_1444629_gDNA_ID_1620683_Annot_ID_48406 3000 nt of promoter + ATG

SEQ ID NO: 4118 - DNA, 3000 bp, Unknown
  misc_feature (1)..( 3000): cDNA_ID_1025683_gDNA_ID_1620685_Annot_ID_48435 3000 nt of promoter + ATG
tcaagcttcttcatgttgtgttctttgttgctaaatcttaacaaatagccacatatatttttatcttgttgagtatattaattatgaagattgttggcaaagaaaacttaatatactttctatgagagtaaaacaaaacacaaatttttgaagctcaaagagactatttgtttagactataagtcatgaaatatggagttttgtttatggtttcttgtggtgtcatgtttctaattctaagccatgttgaaggtaacttgtttccttattttgtgttatcaactgttttgtatatatattttcatagtcttaacattttatttttgtggttgataacacaacagaggttgaagccatgaagaagtttgggtgcaacactacacacccttttcctggaaaatgtggaaataatggaaagagttcttgggtaagtgacatgaaaaagcttccaagcgcaccaaaaaatcgtgatatacgttgcgaatgttctgaccgtccaagtttagctaggggtatgcctggcgagcgtgtatgtagatgtgattatgattgttaagtcttataatatttccataactaatagaacatgacgtgctttaaaataaaataaaaaagtttttgccaaagtagattgcttgttattctaaaatacatatgattgtgagttaatagctctccattctacaaaaaaatgttcattttaatgtgacttttttctaatatacccttaatccaaacctatttttctttgaattttagtcattattgtataattaatcacttattatatatataaaggacatatttgtattatttagtggctttattaatttgtgagaggtgtcaaaatgatattttttttgtaaaagtggagtacaagcactttgtttctcttatgagataacgtatgtggccaatgacagtatcaaaacatgtaaacatcatttattatgaacgaattacacatctgattaagtctcttatagaagtcaaatcaacctaattggattcagtatatatacatatgatggaatatatagcgagagtcaaagagatagaagaaagctttgtagataggagaagctcagacacattgtgacatgatgagtaaacaagagactaacctaacaaacaatttaaacaaaaaaagaaatcttaaattacggaaattaaggaatatgtagaaattgagatgataatgttatgtaagcaaagtacgcagcttttttgttttcaaatctcgtgatggcttgtgttttatttccttaccattgttaagttgttttagttagaagcagggtttggccttatgacgaggaaaagtatttgtacacgctcagaaaaaatatcaactagttttttaatacatttgaaaaaaaactaatggtacaaaaaaggttattaccgaatcatatcacattttgaatcctttatggattaccgatgaaaaattcaataatccgtcgattttttttttagcgtcacgagaacaatggcttatctttagtaaactactaactaccattgagtttttaatggaattaagtgggttgtaagcagtcgtccattgatttgttctccatgcatagggttagaaaatcatataaaaaatttgggagactaatttattcgataaaattttaattttagtattcatattaaaactaatacttttaaactttttataaatttttatatattattaatattcaaatttttataaatcatggaactataggatccaattttagtaacatcataaacttatacaaaaaatttgtacgttgttgtaaaaaaagtggtacaaaaaaaaaaaaaaaatgagagttgccaaggtggtacctatggtaaagggttaccaatcaaacactagtgtttgttttatcgttttcaatatattaacacagaaaaataattataaaagctacattaggatttataagggatttaaaatccctcaagtatcggcagatttatttgataaccttcaattatattattaataagaaaaccttaactaagatttaagtgattaaaaattttaagtactagtcggtctatttaaaacttctaaactattaaccgaaaacacactcgtctatagtatcgtcaaaattctaaacatctgttatcaaataattattattatattttgatttataaaaaatgatgtgtatattttttagacataagaaaatgtcgtgtttgttttataatagcattaaagcgtgatacaatagattgcaaaactgaaacgattaaccaatataattaagatatcgcatcatagtgcgtaaaaaatgaaaataagtcatttatagtattactaatactgtattagtaactaaatgagtttgaaataaaataaatgcacgataatagatgatgggttttttacacgtttttggaattttaaatcgagattagcaattttaatatttttatgttttacgtatggtacagggttaccaatcaaacttcaaacactagtgtttgtcttatcgttttctatatattaacacagaaaattaattatcaaaactaccttagtatttataatgcaaattctttttttttggtttagggatttagattatcctataattgttctaatttattatacgagtccaaatccttaaaagtttaaaatgcaaatggttgacacttaaaaagtcttttttaggggattttctccttttgtttttgtaataatttgcattttcaattttggtataatgaatttgtattttcaatttgaaaatttaataaaataagttatcctttactattttaatgaatacaaaaatttataaaattaaaattaaaagaaaaaatgaaatgatttttaaaagagttgtttttaagattaaaaccaaaaacaaaacctagagacgacctatatataagctttagggttttcttctctctgtacccttaaactccgttaccctaaacctcaagccgtcgtctccaaagttccccctcagagacgaaaaaatg

SEQ ID NO: 4119 - DNA, 3000 bp, Unknown
  misc_feature (1)..( 3000): cDNA_ID_1817398_gDNA_ID_1620685_Annot_ID_164585 3000 nt of promoter + ATG
ttttcatactccacgtaaaagagatatgttcgaggcatacatcaaatattataatcaatcatcgtgctaacttatactacaacaaaatattaatataaatttactatccaatcttacgaattcgtgcaaaaatcatctaatttttttgccacaatggcaagaaactattaaattttgatgacgtggacacgcacatgtaaaaaacgtggatgtcaagtcataatgttaacaaactgttttttttttcatttccttcaattctggtttttgttttttaaaagttgtgtataaacataaataaatatatatatttatttatatatttccaatggattctccaaaactcttatactcactttcagcatattcttccatcgtgaaaccttaccaaaaaactaatattaaatttctatggtcgtgagtatgcttaaaatgtacctactatttatgtgtagtggtttataaaatctaatattattggaaacattttaaccattgaatttttgatgacttaaatttttttttagataatttaattcgttaaaaatgtaaagatccaaataacatggtgttaagtgtccctactaaaaaattaaaagtggtgttaagtgagacttaacaacaaatcatacaaatttcagaattcacctaaaatcattaaagtcatccaaaaactcattaaaactcaaactgatttaaaatataagattaaatgttttattctatatcacttagaaaactgaaaataaaataaaattgtttgttaacactatgatgtatcattcacgtcgtttcacacatggtctacattatctattatagtttcttgccaccatgacaagaaatgtataattttgcacaaaatcataaatttagatggtaaattttaattaacgatttgttcacgtatgaattagtattcatacttatattttaattgaacttgtcgctttagttgaggtaagaaaatactataatagtaatgaaatctcaccaaataacaatcaaaaatttatttcaatcacataagatcttgtcaaaatccaccaaatcatcatgcgtgtttttcaacatctctccaaatcttctaaaaattactaatccaatacaccgcctaactaatgtatttggtaataactcttgatatgtacaactaatttacgtgttctccaccataggttatatctgttaactagttacgtacgtcgaccaaaaacatattactttatcgtggttttatcgttgaattattcactttcatgttgggatatcaagatttgaatctttcaatcatgattttaattatagttgtcaaatgtcatatcaaaaatatctattttcttatagtttttaactgattagtatgagtttcgatttggaatatttcagatatgaacatacaactaaggaacaaaatattgatattagtttcctatatctttttatttattttaaatacaatagcagatcacatgtatatattttaactcaatagttacgtcgaccaaaaacatataactttaaatatcgtggtttcattgttgatttattcactttcaggttgggacatcggaatttgaatttttcaatacgaattttaaacatagttaaatattttcttatagttcttacttcttaacgattagtatgagtttagatttggaatattttaaatatgaacatatagttaaggaacgaaaggcgatcacatgtttgtagttcacctaagtattgtagttataatctcatccagtacctggagcagttgagctaatctttagattaagcttgggcaaaaaatccggactaaaatacttgaaccgaaaccgatccaaaaaatcggtttgggacgagtacggatattacctatttactttattgagtcttgaattgtcgtacccgtgagtatagggtaaaatccaacccgaacctgatactcgaacatgtatccgcttacccgaaattacatatacttattcatagatttatatatataaaatcttattttatatttaatatttgaactaaatacatttatatccaaatatctaaaaataattaccaaaaactaaatacatttgtaaatacttaagactaaatatttttatacgcaagatacttataagttttttggatattgggacaaaatttcggttatgtgggtaaaattcagatatttgggtaaaatattcaggtatttagataaaattttagatatttggctataaaatacctgaatctcaaagatacccatttttttggtatttagcggttctaaaattatatatccgaaccgacccgaaccccattggatccaaaccgaaacaaaacagaaattttagatttatcttattgggtcctaaacttttctacccaaaaaattcttatccgatcgaattttacccgaatattccgacccacatacctgaatgcccaaccgtactttagggaattacatccgatgcacaaaagaactaacaattttgtactatcattaacaccacccatttgcaactccgaaagacgatcacatattgtagatttaaaatgcaatcttaatcacattttcactaaaagttttccttaacgtatttggtgggcatgatttaacagctcaatttggcaggtcaacgaatcaaccgtgctttaaacgttgtaatgtttttcaacttaagataagactcgaaatcaattaaaaaaacaaacaaaaatcatagtcattgtttttctttgttaattcatatacactcatacaaaacattgacaacttatctattgtttaatctaaataatacaattatgtacaagtgttactttagtaatactgccgtccatataacggcacaaaacggagaatgacgtcaccattgttgatgtcacacctccatgtaacttctgttataaacgcattaaacgttacacttgtgtatattatatagatctctgtccctttatatttcatcttttgacattacaaaattacattaccaaacacattaa

SEQ ID NO: 4120 - DNA, 3000 bp, Unknown
  misc_feature (1)..( 3000): cDNA_ID_4254981_gDNA_ID_1620685_Annot_ID_164581 3000 nt of promoter + ATG
cgaatgcatgcattgacgtttcagatgactgtgtcttttcgataacttaatgaaattgattttttcacaagataatttctaaacctaaacaaatctatcatttttgaattttcgtttaacattaaactcacatctaattacttcacaatacttaatggggttgaccgatatcaagtgttgtttcgaatttctaacttgtgtttatgttttttttttctgtttttaaagtttcagtcattggccaattgtgtttcttccgttgatcagtttgttttcatctcaaataatcaagcctatggcaaggtaatattcaaatctttcatttctacaaagaaaatcagagtattatcaatacatatatccgtttctcaataaatatcatttcacataattaataaagtatataaaaaatatctcgtaaaaagcaattattcttggtattgtatttattatttttatatttgtttagaattggattggaattatgtattttctatggaaattcatattgaaatctaaacaatactagtcattttaaaacagaaaaataatttgaaaggagtagtagcaattaagattgccagtgcactggttattggtattagttaaatattttagaccaccgaccgcatttaaagaagtagttaatatgtataagacaaaataagaaacaattattgaaaacaaaaacaaaaaagaaaagaccattaactctagattcacattgtgacatggtatttaatgaaaagaccattaactctagaccgcgttattgaagatataaggtaaaactacaaaaaatataacaaattgaaggagcctttaaataattaggcaaatgttatatcttgcgttcctgcctccgggcatgatgtgctaaacatttgtctaccaactcttgctttcacttgcattgataaaccaaatacgaccaatttaaacacatgaacctcaaccttaatgttggcctaagagtctcctaattgaatgatccaagattgaagtaatcaaaaaaggcagtacacctatttcaatgacaaggcatttgtatgaaattggttagtatattttttttctagacgagaatatttaaaaacgtaacgtacgcaatatgacgtcaaaagaaacaacgcagcatttatgaaacgatattgtattgttgtgcttggttaaccaagtgacattaatacattaattcgtttttatgtacgtttataagatttcgtttttaaacgcaccaaaaatatataaaaccatctttgcaatgaaggaactgcttactacactgctcgcttgtccaacaaaggttttttaattgatctttcgggaaacttatgattccaatggcggttttatcgaatggtcaccggattttgttgaattcatcatattttgtcaaaacaaaattcagatcttagaaaaatttataacattgatttgtaaaaagtgtataagatagtcctttgggattaccttatcgttcaatggaccataaaaatagctcgtttaggttccattactttccatcggagtaaatacattagtccaaataattcgttttcgtaaatatataagcctaaataattgtgtccaccaatttgtatgttggtgtgttttcacttgcacactggtaaactaaagacaaccaattctaacgcatggatattggggtcgtttagctaagggacaaaatttgataaataatgaacttagagacaattagtttttctatctttgtaaaaagacaaataaagtaaataaatagatatgaagttgaaaaagttcaaaaaaaaaacagcctcagcttttgccttgcgtgatagaacgagttcacggacatgcaacgagcaagagcgagttgacatgcatttaataacggctagactaacttaatcgcacacagatattaacaaattgtctgcttgtataatattgaccttttagtgctttatatatgtgttttcacgtgtacacattctagaatcgtataatatctgtttgtatgttaaaacttctccaatctgaaaaaaaaaacaataattaatagtctagccgttactaatatgcatgttaactcgttcttttttgttgtatgtgtattatttcacatgacaagctttaacctttaaaatgcactcaactcgttccttgcacaaaaagtcaattgaatatacgtattgtcccatacgcaaggcaaaaaagcagagataattattatttttttaaatattttccaacgtcaaatctattttttttgtcaatataccttaaaaagaaaaaaaactaattgtctctaagttaattatttattaaattttgtctcttaacttaacgacccagaaagcctccttggttcaatggttgatcaagggttcattaatacttatatactaagaggtttggagtttgaatcccagctactgcaatttattaatagatttgcagattaattgaggcaagtgtgcaggagatctacaacgatgtacaattatagccgttcgccaggattatacgcagagaagatatttttggtatccatcaagcgcatggagaagaagaatgaggtgtcgtatatcgtggatctaataagggaaagaaattatgcataataaaattgtctatgtaacaactctcgtaatctgtaatagaaaaaaaaaaactaaacgacctagatattcatgcgttaaaattggttgtttttttagttatcaatggaaaacacaccacatcagaattggtggacttgggctaatatatttatgaaaacaaatagtttggggctaatgtattatctaatgggctaattaataaaacttaaacgaactatttctaaggcccattaaacgatagggtaagcccaaatcactatcttacgcccctctttatattcatcgccactgaaactgagaaaagggttagtttcgctgcgctgtttcaagggttttcgtttttatcttttcctccgaagaagaagataagaggttgaagaagaagaagatg

SEQ ID NO: 4121 - DNA, 3000 bp, Unknown; identical to SEQ ID NO: 4118
  misc_feature (1)..( 3000): cDNA_ID_1025683_gDNA_ID_1620685_Annot_ID_164574 3000 nt of

SEQ ID NO: 4122 - DNA, 3000 bp, Unknown; identical to SEQ ID NO: 3725
  misc_feature (1)..( 3000): cDNA_ID_2050676_gDNA_ID_1620685_Annot_ID_164564 3000 nt of promoter + ATG

SEQ ID NO: 4123 - DNA, 3000 bp, Unknown
  misc_feature (1)..( 3000): cDNA_ID_1823072_gDNA_ID_1620685_Annot_ID_48436 3000 nt of promoter + ATG
ctatgatgcgatatcttaattatattggttaatcgtttcagttttgcaatctattgtatcacgctttaatgctattataaaacaaacacgacattttcttatgtctaaaaaatatacacatcattttttataaatcaaaatataataataattatttgataacagatgtttagaattttgacgatactatagacgagtgtgttttcggttaatagtttagaagttttaaatagaccgactagtacttaaaatttttaatcacttaaatcttagttaaggttttcttattaataatataattgaaggttatcaaataaatctgccgatacttgagggattttaaatcccttataaatcctaatgtagcttttataattatttttctgtgttaatatattgaaaacgataaaacaaacactagtgtttgattggtaaccctttaccataggtaccaccttggcaactctcattttttttttttttttgtaccactttttttacaacaacgtacaaattttttgtataagtttatgatgttactaaaattggatcctatagttccatgatttataaaaatttgaatattaataatatataaaaatttataaaaagtttaaaagtattagttttaatatgaatactaaaattaaaattttatcgaataaattagtctcccaaattttttatatgattttctaaccctatgcatggagaacaaatcaatggacgactgcttacaacccacttaattccattaaaaactcaatggtagttagtagtttactaaagataagccattgttctcgtgacgctaaaaaaaaaatcgacggattattgaatttttcatcggtaatccataaaggattcaaaatgtgatatgattcggtaataaccttttttgtaccattagttttttttcaaatgtattaaaaaactagttgatattttttctgagcgtgtacaaatacttttcctcgtcataaggccaaaccctgcttctaactaaaacaacttaacaatggtaaggaaataaaacacaagccatcacgagatttgaaaacaaaaaagctgcgtactttgcttacataacattatcatctcaatttctacatattccttaatttccgtaatttaagatttctttttttgtttaaattgtttgttaggttagtctcttgtttactcatcatgtcacaatgtgtctgagcttctcctatctacaaagctttcttctatctctttgactctcgctatatattccatcatatgtatatatactgaatccaattaggttgatttgacttctataagagacttaatcagatgtgtaattcgttcataataaatgatgtttacatgttttgatactgtcattggccacatacgttatctcataagagaaacaaagtgcttgtactccacttttacaaaaaaaatatcattttgacacctctcacaaattaataaagccactaaataatacaaatatgtcctttatatatataataagtgattaattatacaataatgactaaaattcaaagaaaaataggtttggattaagggtatattagaaaaaagtcacattaaaatgaacatttttttgtagaatggagagctattaactcacaatcatatgtattttagaataacaagcaatctactttggcaaaaacttttttattttattttaaagcacgtcatgttctattagttatggaaatattataagacttaacaatcataatcacatctacatacacgctcgccaggcatacccctagctaaacttggacggtcagaacattcgcaacgtatatcacgattttttggtgcgcttggaagctttttcatgtcacttacccaagaactctttccattatttccacattttccaggaaaagggtgtgtagtgttgcacccaaacttcttcatggcttcaacctctgttgtgttatcaaccacaaaaataaaatgttaagactatgaaaatatatatacaaaacagttgataacacaaaataaggaaacaagttaccttcaacatggcttagaattagaaacatgacaccacaagaaaccataaacaaaactccatatttcatgacttatagtctaaacaaatagtctctttgagcttcaaaaatttgtgttttgttttactctcatagaaagtatattaagttttctttgccaacaatcttcataattaatatactcaacaagataaaaatatatgtggctatttgttaagatttagcaacaaagaacacaacatgaagaagcttgaggaagaagaaatgccaactcagcaaaggggacacgtcaacagcaggaccacaagacaaagaaggagccgttagcgccaaccagggttatgagtcgcacgactaaagcattcttgtcttggtttggtaaagttgcacgcgggttaagcccaatccaaattggtggaaggtgacaaatttggaggcagcttggagacagctgtagaggagcttgtagaggcaaaccaagaaggatccagaagggaacctaggttaaaacctctaagtccatttaagctgaaggtggtgcttagagacagagttagaaacgtagagacattcattagagagtaaacttgtagtgagtgttcttagggaaacaatgagtgagagagagtgaatcatattggttctgtaaggggctgagagggtgagagatctctttgtaaaactcaaaggttatagtggattccgggaaagatttcccggcccagacgtagcaccgttggtgtgaactgggttaacaatctgtttgtgtgctctgtgttgttatgtttcactttcagtcacaagtcttcttatctcaaagttctgttcttgttcgatttcaagtttcttagacatcaagtcttgaaacccttagtctgtatttggtctaaacactacaaagtggtatcagaacgaaggttctttgtattggcggttcagtaaggttcttacaaacaaagaagcc

SEQ ID NO: 4124 - DNA, 3000 bp, Unknown; identical to SEQ ID NO: 4120
  misc_feature (1)..( 3000): cDNA_ID_4254981_gDNA_ID_1620685_Annot_ID_48438 3000 nt of promoter + ATG

SEQ ID NO: 4125 - DNA, 3000 bp, Unknown; identical to SEQ ID NO: 4119
  misc_feature (1)..( 3000): cDNA_ID_1817398_gDNA_ID_1620685_Annot_ID_48440 3000 nt of promoter + ATG

SEQ ID NO: 4126 - DNA, 3000 bp, Unknown
  misc_feature (1)..( 3000): cDNA_ID_1817405_gDNA_ID_1620685_Annot_ID_48442 3000 nt of promoter + ATG
gaggctgtgaatcaggagaggattttaactcctctcactgcaacaaaaagctcataggagccaagtacttcatcaatgcttttcttgcgacacacgaaagcttcaactccagtgagtcacttgacttcatttctccgagaggctacaatggtcatggaacacacgtggcaaccatagcgggcggttcatacgtgcctaatacaagctacaagggcttagctggagggactgtgagaggtggggcaccacgtgctcgcatagcagtgtacaagacttgttggtatcttgatttagacatagcggcttgctcatccgctgacatcttgaaagcaatggacgaggcaatccatgatggtgttgatgttctctctctttctctaggctttgaacctctgtatccagaaaccgatgttcgagatgggatagctactggtgcattccatgcagtcttaaagggtattacagttgtttgtgccgctggtaatgcgggtcctgcggctcagactgttggtaacacggctccttggattttgacagtggctgcaactactttagaccggtcctttgttacacctatgacacttgggaacaataaagtgatattggtaacaacaagatatatacaccataatgttttcacaacataatgtttaatgatctgtgtcttattgtgagtttggtaactgtattacagggtcaagcaatatacacaggtacagaagttggctttactagcttggtttatccagagaatccagggaacagcaatgaaagtttttctgggtaatatcgaatcttgaactataagaagaagattgatacactatattcacccttgttcttgtaatgcagtacatgtgagcgtcttctcatcaactctaaccgtacaatggcagggaaagtcgtgttatgtttcacagaatcaccttacagtatttctgtaacaagggctgcacattatgtgaagagagcgggtggtctcggtgttatcatcgcaggacaaccaggaaacgttctcagaccatgtctagatgatttcccttgtgttgctgttgactacgagctagggacctatatacttttttacatacgttccaatgggtatgaaaacatagactaacatcttcaccacttagacaagtaagaaaataagaaacatgttgttttatggtagatcacctgttgtgaagatacaaccttctaggacacttattggacaaccagttggtacaaaggtagcaagtttttcatcaagagggcctaatccaatttcagcagcgatcctcaaagttagtcaaaatctttacatgttctgttttgatcagactcaagaaattatcttgccttagaagttatcaatcatatgaatgcagccggatatagcagcaccgggagtgagcatattagcggctacaaccactaatacaactttcaacgaccgagggttcattttcttgtcagggacatcaatggcgactcctactatttcaggaattgttgcacttctcaaagctctgcatcctgattggtctcctgctgccattagatcagctattgtcactacaggtgcttatcttcttcattcaatatagattagacaaatcaagaacatactgatcttgataatcgtttttactctgtgtagcttggagaacagatccatttggagagcagatatttgcagaagggtcacctaggaagccagctgatccattcgactatggtggaggccttgtgaatccagagaaagctacaaaaccaggtcttgtatatgacttgggactcgaagactatgttctctacatgtgttctgttggttacaacgagacttcaatctctcagcttgtcggtaaaggaactgtctgttcgtatcccaaaccatctgttcttgatttcaacttgccttctatcacaattccaaatctcaaagaagaagtcactcttcccagaaccctcactaacgttggaccacttgagtcggtctatagagtagcggtggagccaccgttgggcacccaagtgaccgtgacgccggaaacgctagtgttcaactcaacgaccaaaagggtctcttttaaagtcagtgtctcgaccacacacaaaatcaacacaggttactactttggaagcttgacttggagtgactctctgcataatgtcaccattcctctctctgtgagaactcaacttctgccctactactacgatgagaattgaacaaacaaataaacaaacactaaccatttgtgacttatgatgagtttgtactgatgaaagcatatacattgataaacccaatcataaacaaatacaaaagtatgtgatgatgatgattgagtgaaaagtagctagctcgtaaataatcacatctttccgaaaaggaatatcaatatttttccatgtatcaacaataaagaaattagtttagtgttcataatctgaccatttctaatccagacaggttcacttctctaagatacttctttagtcttcttatttcataacacaacttttaatctctggtagagaactattcagagtagcttgatatttaccatccaatattaattagtagaagaactattcagagttaatatttaaaattcgagattaagagtaatttagccaagaaaatattctagtgttcttaacctaattagttttattctcagtagagaattattcaaagtttcttaatatttttaaattcaatatttgaattacttttaacttagatacaactctagtgttgttatgttgatcacttctaatctcattagagaactattcacagctgcttaatattgaaaatccaatgtttaaaataatatagattttcaatttgaactatgtcaaggatgaaacattgaatctcaaaaacaaagcaaccgacatggttgtagaaagagtcctcgaacgttagaccttatataaagcctttgcttcattgacaatcttaaacatcgaaacatttatctctttcttctttcaaacgagaaa

SEQ ID NO: 4127 - DNA, 3000 bp, Unknown
  misc_feature (1)..( 3000): cDNA_ID_1817409_gDNA_ID_1620685_Annot_ID_48443 3000 nt of promoter + ATG
gtagaaaactatttagagttgccttattatatagaactagatgattacccgcgctacgccgaggttttttcggattttttgtattatttaatttaaatttaatttttatttatctaatcattcactcatgcaataaacaattacttttagtattaaaaatatttttttctaacaacattctcaacaatgcatcatacatataattcataaacaacgtttgtcttaaaccaatttaagagagggtagtgttggattctagaaacctaagaatttgatgatagagctccttacgtatgcttcagcctcagtgatttattatataaatgtcataagagaatataaatatcaatttaagagaataacttattcaaatcattaagtaattcacgactattatacattcatactttgagtttggattacaaaaaaaaaatcttcgagtatgagaaaactattaaaataattttattgaaaaatcatataaataaaaataaatttagtaatagtataattaaatatgtaaaataaaattaaataagaaatatatcattaacctataaattagaagttgaagagcttacattaattatttaatagacacatgtcaaatgctaaagtgatgatgtgtcaatcatacggagagagttgaccaactttcatatatatgattcagtattacaagaaattaaaccaagaaactactttaatgttaacaattcagaattaatacttaaaattcaatgtatgcagtaatttggccaataaactattctagtgttccgaatttgatcatttttaatctcaatattgaactatatagctttaatgtatttttgttaaaaattaaaaaaaaacttttaaatttgataaacccaatcagaaacagaaacaaaaacagaaaatattgatgatgataattgagtcaaaagtagctggtaaatttatcacatctttcccaaaagggaaatctatataacttcaatatacaaactataaagtaatttagcaaagaaactagtttaatgtcataatctgaccaattattatttaggtagttacgtttatagtcatttcttcaagatacttctctagttttcttatgtcttatcacgaattgtaatctctgatagagaattattcagagttgcttaacatttaccatcgaatattaattagaagaattttaggcaagactactcatagttaatatttaaattcaatatagcacacctattgtttctactatgttgagtaattttttcaaataaataacagaacattttttttgagaaaatttcatagaaaatctaaaatattaccacacaatacataaacaatatttttaaataaaagtttataaatttgacgtttcttatataaaaaaatgaatttgaagaacatatagacatggtacttgtagtaacgaaagtgtggtttgattaaatcagatttaatctatttttatttatatcatgtattgtgaaatgattctcccatgaattaatgttgtattttataagctagggatcagtttttaatataattattttagtaggttgtgataaaaaaaaattgtgtatattattttaattatattatatgtggtagatttgttacttgttagtattgctgaggcggatggaatctcggttagatgggttcgatttcgatttccaacctaaacattgctaaacatttttcttttatttaggtaaatgaaggtcaaatatggcatttctaaaccaagcaataaccacagtctaagttgaccaaaaataataaaaagttaaatgtctctagcgatgtcgtttggttgagaattgtattcttctcctctctctcgtcgtgacgcttagggatttggttcttctgcttcttagcattataaattaatttagcaagaaaaactacttatgtgttcttaatctgaccaattctaatctattgtaggtatgaagtcattttcccatgatatttctctattctttcttaacattcgtatttatctatgaactatttaaagttgccttattatatagaactcagtattacaagaaatttagccaagaaactaatttaatattaattattcaaaattaatacttaaaattcagtgtatggagtaagttagctaataaactattctagtgttctgaatttgatcattttttatctcaatatcgaactatatagctttaatgtatttttggtgaaaattaaaaaacaaacttttaaacttgataaacccaatcagaaacagaaacaaaaacaaaaactattaatgatgatgattgagtcaaaagtagctggtaaataatcacatctttcccaaaagggaaatcaatataacttcaatgtaaacattatttgagctctaattaattcggatgacaaaaaaaaaaaaattagcaaagaaactagtttattagtgttcataatctaaccaattctagcctaggtaggttatgtttatagtcatttctccaagatacttctctagtcttcttgtaatctctgatagagaattattcagagttgcttaatatttaccattcaatattaattagaagaattattaagactactcaaagttaataattaaattcaatgtttgaagtaatttagccaaacaaatattatagtgttcttaacctaatcagttttattctcggtagagaattattcaaagttgcttactatttttaaattagtgcttgaattaatttaacttacatacaactatagtgttcttattttgatcagttctaatcttattagagaacaactcaaagctgcttaatattgaaaatccaatgtttgaaataattatagattttttaatttgaattatgtcaagattgaaacattgactctcaaaaacaaagcaacccacatggttgtagaaagagtcctcgaacgttagaccttatataaagcctttgcttcattgacaatcttaaacatcgaaacatttatctctttatcatttcaagagggaaa

SEQ ID NO: 4128 - DNA, 3000 bp, Unknown
  misc_feature (1)..( 3000): cDNA_ID_2993783_gDNA_ID_1620685_Annot_ID_48444 3000 nt of promoter + ATG
atttcatttcccctagagaccttgatggtcatggcacacatgtttccaccattgcgggtggttctttcgtgcccaatataagctacaagggcttagctggagggactgtcagaggcggggcacctcgtgctcatatagcaatgtacaaggcttgttggtatctggatgatgatgacacaacgacttgttcatctgctgacatcttgaaagctatggacgaggctatgcatgatggtgttgatgttctgtcaatctctttaggctccagcgttcctctatatggtgaaactgatattcgcgatgggataactactggagcgttccatgcagtcttaaagggtatcactgttgtttgttccggtggtaactctggcccagattctcttaccgtgacaaacacagctccttggatcatcacagtggctgcaactactctggaccggtcctttgccacacctcttacacttgggaataataaagtgatattggtaacaacaagatatacgctctttattaattgttctactcagtactcagattacatctgtgtcttattgtgagtctgttcactatattgcagggtcaagcaatgtacacaggtccaggacttggcttcactagcttggtttatcctgagaatccagggaatagcaacgaaagtttttctgggtaatttttatatttctagtttcttgatgttcatcaaatcttgcaatgtgaagaagatcaattctctgacatcaccatggttcctgtaatgcagtacttgtgaggagcttttattcaattctaatcgtacaatggaggggaaagttgtgttgtgtttcacaacatcaccttacggcggtgctgtattaagcgctgcgcgttatgtgaagagagcaggtggtcttggcgtaatcatcgcaagacacccgggttacgctatccagccatgtctagatgatttcccttgtgttgctgttgactgggagcttgggactgatatacttctctacacacggtccagtgggtatgaaaatatatcttcaccactcaggattttaaggaaatatatctgagactaagtttcacacttgtggtttacagatcgcctgtggtgaagatacaaccttctaaaacacttgtaggacaaccagttggtacaaaagtggcaacgttctcatcaagagggcctaattcgatcgcccctgcgattctcaaagtacagaatccttgctttgtcttttcttttcagacccattaaatgatcttgcctaaggttttatcaatcatatgaatgcagccggatatagcagcaccgggagtgagcatattggcagctacaaccaacaccactttcagcgaccaagggttcattatgttgtctggaacatcaatggcagctcctgcaatttcaggagttgctgcacttctcaaagctctgcaccgtgattggtctcctgctgccattagatcagccattgtcactacaggttcttatcttctcatcaaatgtaactaggacaaaacaagaacatactaatctctataagcgtcttttactctggctgcagcttggaaaacagatccatttggagagcagatatttgctgaagggtcacctccgaagctagctgatccgttcgactatggtggaggccttgtaaatccagagaaatctgcaaatccaggtcttgtatatgacatgggcctcgaagactatgttctctacatgtgctctgttggttacaacgagacatcaatctctcagcttatcggtaaaacaacagtctgttcaaatccgaaaccatctgttcttgatttcaacttgccttccatcacaatcccaaacctcaaagacgaagtgactatcacaagaactgtcactaacgttggacctctcaactcagtctatagagtaacggtcgagccacctttgggttttcaagtgactgtgacaccggagacgctagtattcaactctacgaccaaaaaagtctattttaaagttaaagtctcaaccacacacaaaaccaatacaggttactactttggaagcttgacatggagtgactctctgcacaatgtcaccattcctttgtctgtgaggacgcaaatcctgcagaactattatgatgaaaattaaacttataaaaatgactaaccatttgtgtgcttatacttatctacttatattctatacatgtatgtattgaactccttgactctttgtaaactttaattaaagaagggaaaattcccaaatattatctcagttgcctcaacatttgctaagaaacttataatttgacaaagctcggagattgtcgcagagactttttctgaaatcaactttgaccaaacttttaacacaagagatttgttctgttttctatagagccaaagaatcagcatggagcttgccaagtaaagctctaaacttagctaaagaatctttcttttctttggtcaaaactcatactgattccagctttattacacttcaagtttaatttttttttggtcagaaatagcaaaacaagcttgtatgagcatgaacacttgagtttattatggtctaggagagtcaacccaatccttttgcagcatattacaaagtaaatctctcgattggtctgtggattgatgtgtttgttccatccattgcttgctatgtttaccattaattgttgatataagtcataatctattgatcggtgtgtttgctccatcatttgtaataaactagagtttagttgaataatcaacagagtttgatatattcttcagattaatatgtgtggattttatattctgacgatgatgaaaatttggagattcaaacaagcaaaattcagaacaattccaaggaatagaaacattcttggtcaaactctgcttgagtagacatctatataaatgcttaagcttctcgatattagactccaaaatatacattacatctctttctttgtggcttgagattgaaaaatggttaaccctttttttcttggaatg

SEQ ID NO: 4129 - DNA, 263 bp, Unknown
  misc_feature (1)..( 263): cDNA_ID_1823138_gDNA_ID_1620686_Annot_ID_48445 3000 nt of promoter + ATG
gcaatcgtcggaaagttttggactttacaccaacgccaaagcgagttcttgtttctctgtttgcttctctaggaccaatcagtttccatttacagatgcgtactattcacctgtcagagctctgagatttgtctttttgcatctctctgaatatttctcttttctcagatccattgacctcatccacatacataaagtttaggtatttttaaaagggttcaattctggggtttaccggaatttcatcatctttgaagaccatg

SEQ ID NO: 4130 - DNA, 3000 bp, Unknown
  misc_feature (1)..( 3000): cDNA_ID_1823131_gDNA_ID_1620686_Annot_ID_48447 3000 nt of promoter + ATG
ttatgaaaacattattaggatatatcagttttatgaaaaaaggttttccaattgttaatcccaataataaatcatttaaaaaaatttagaaagaaaatgctgagttagaaacaaaaggaaaaggaagcacaaatggagtaaaaatgtatgaaaataaaaagataagataatgaaattttgggattagatagagatgatggagggagaaagttttgagaagcagcaagaaaggaaaggtgtcactgttgtacttggtacctctatcttaccctaatcgctggaccaacttgtctcttaataaaagtggtttttgtgtctaatctgactttgcttactctctaatcactctatctctctcagtgctaatcaagataatcataccttttttagctgttaccacttttctagtaaaggaaattgtagttacttcaattatataaatttcaatagaaaacccatcaaacttaactagttgggaacatgcatggtaggatacttattttgtctaatgctttgtattttacttatattttacggtttattacatatggatacaatattttataattcaaatcaatgatggatagtattaatatttataacaagttcatatacacattcatgtacagttatggtgttatcacacaaccgaactgagtagtttattgacttgtaatagtgtcgctactttacctttttccaaaaataatgcatgtgtgaggagttgtcgacgatgatgaaaaaatgacttatgatattcttacgaaataaatctcactaaaatttgaggtttttttttttttttttgtcgtaaaatttgaggtattaacccaacatatttggatgatgcaaataaaaactttgaaagtaacaacgttaaatagcataagacattcgttttttcactaagcaaaacagtcgtgttgtacaatttaaggtaacaaaaccgtaaaaactgaaacacatatcaagagattatttgacattttcgaactgtgttacgttcttgactccagtattcacatctagacgagacgttactgtttattgtaaccaataatgtatatatgtttggtattcttatataagtttcttattgtttttttgcattgccaaagtgttttatgtgtctcagtgatcaacatcataatttgtatcaaagtcactgatatctttcttctcaaatctagtactgcataatataattttttcttagtaaatgtgctacaattttataattgttaaacttagcgtcactcatgagtcatgaaagctgatgaccaaaatcatacaggatataatatatgttgggaagaaaagagatctggagcaacacctactaagttcgctgattagttttctaatagttacttttaagtattactaataaactattacttcctctgtagtcaacgaaataagtgtagttaactttcatttgatttcttaaaatataaactttcattatttgatttaattcttttggcctaccacaagcttttgggtgtgtacatgtgggtgcatgtatttaaatatgtaacacttgtttttttatattcataaaatgggaaatgctgtacttgcttattaattactcactatttacatattccaactttgaaatattgttgattggtgaaaaaggtacttcataataatttaactaaattgtaccatcatatattcgtctaagaaaaactcaatcttttatcattgttgatttcacacacaattccaaatttgacacgagttatataacatgatacccatattcaacaaaccactagactctatatttatctttagttttaaaaatttgtcctcaatattaaaattaaggggttggttatatatatcaagaaaaataaaaagattccatgaggtggctttaatagttctgattaaaggtgttaattaattaacaagatgaataaaaggttccatttaagagtaaagtatatgataacagtgtgggggatgatattggttcaccttaataaagcgattgcaataattttatgtataactaacgaaaagtttataccgtttgattaagaaaatgagaaggtcatgtccctctctctctctctttctcttgtatttaaatcaaaagcaatctctaaccatatccaaaatcccccctaattccgggttttctttttataacaagtattaatttggacttggttcccacttatgtttcttctttttttttgccaaccacttatgtctcttttttataatcctaaacttttcatatgttttttgaaatgtcccatctagattcagttagtggattttactcaacttgtaatacgattctactacataagatgagtgaaagagttaacatgcgcttatttttaaggttgaaaatcgcaatgtacactctctagaattatagtataaaaataaaaaaaaatctaattcagatttttgattgttacaggctaacagcaaaattaatatggatttaaaagattaatactggaaaataataataattaaaagagttttaattaaaacttcccccccccccccccctcaatcccacgattaattaaaaaaggaaaccaccgaataaccgtaattactataatgacgtggcacttagatttcgaatagccgctgtaataaatattaaaaacgttttgtcattttcctttttctcttctcaaagaaaaaaataatcactctctctttttttttttttaattcacagacagaatcaaaacttgtgtagaccgagaatccatctctcacaaaccccaaaccaaaaaaaaatcaaaaaaaaaaatcaagaacaaatcgaaatctcaactctgtgaaaacctcgtccttgttcttcttctgcttctcccattccttcgatttttgcttcaatggatgtttgatttgctctctgactgcgtttggtgagcaacaagtccgtcttagtgtttatgttttgttttcttgcctgatttttcttctttcttctctatttggttgctgtctcaa

SEQ ID NO: 4131 - DNA, 3000 bp, Unknown
  misc_feature (1)..( 3000): cDNA_ID_2150159_gDNA_ID_1620686_Annot_ID_164604 3000 nt of promoter + ATG
atatacacattcatgtacagttatggtgttatcacacaaccgaactgagtagtttattgacttgtaatagtgtcgctactttacctttttccaaaaataatgcatgtgtgaggagttgtcgacgatgatgaaaaaatgacttatgatattcttacgaaataaatctcactaaaatttgaggtttttttttttttttttgtcgtaaaatttgaggtattaacccaacatatttggatgatgcaaataaaaactttgaaagtaacaacgttaaatagcataagacattcgttttttcactaagcaaaacagtcgtgttgtacaatttaaggtaacaaaaccgtaaaaactgaaacacatatcaagagattatttgacattttcgaactgtgttacgttcttgactccagtattcacatctagacgagacgttactgtttattgtaaccaataatgtatatatgtttggtattcttatataagtttcttattgtttttttgcattgccaaagtgttttatgtgtctcagtgatcaacatcataatttgtatcaaagtcactgatatctttcttctcaaatctagtactgcataatataattttttcttagtaaatgtgctacaattttataattgttaaacttagcgtcactcatgagtcatgaaagctgatgaccaaaatcatacaggatataatatatgttgggaagaaaagagatctggagcaacacctactaagttcgctgattagttttctaatagttacttttaagtattactaataaactattacttcctctgtagtcaacgaaataagtgtagttaactttcatttgatttcttaaaatataaactttcattatttgatttaattcttttggcctaccacaagcttttgggtgtgtacatgtgggtgcatgtatttaaatatgtaacacttgtttttttatattcataaaatgggaaatgctgtacttgcttattaattactcactatttacatattccaactttgaaatattgttgattggtgaaaaaggtacttcataataatttaactaaattgtaccatcatatattcgtctaagaaaaactcaatcttttatcattgttgatttcacacacaattccaaatttgacacgagttatataacatgatacccatattcaacaaaccactagactctatatttatctttagttttaaaaatttgtcctcaatattaaaattaaggggttggttatatatatcaagaaaaataaaaagattccatgaggtggctttaatagttctgattaaaggtgttaattaattaacaagatgaataaaaggttccatttaagagtaaagtatatgataacagtgtgggggatgatattggttcaccttaataaagcgattgcaataattttatgtataactaacgaaaagtttataccgtttgattaagaaaatgagaaggtcatgtccctctctctctctctttctcttgtatttaaatcaaaagcaatctctaaccatatccaaaatcccccctaattccgggttttctttttataacaagtattaatttggacttggttcccacttatgtttcttctttttttttgccaaccacttatgtctcttttttataatcctaaacttttcatatgttttttgaaatgtcccatctagattcagttagtggattttactcaacttgtaatacgattctactacataagatgagtgaaagagttaacatgcgcttatttttaaggttgaaaatcgcaatgtacactctctagaattatagtataaaaataaaaaaaaatctaattcagatttttgattgttacaggctaacagcaaaattaatatggatttaaaagattaatactggaaaataataataattaaaagagttttaattaaaacttcccccccccccccccctcaatcccacgattaattaaaaaaggaaaccaccgaataaccgtaattactataatgacgtggcacttagatttcgaatagccgctgtaataaatattaaaaacgttttgtcattttcctttttctcttctcaaagaaaaaaataatcactctctctttttttttttttaattcacagacagaatcaaaacttgtgtagaccgagaatccatctctcacaaaccccaaaccaaaaaaaaatcaaaaaaaaaaatcaagaacaaatcgaaatctcaactctgtgaaaacctcgtccttgttcttcttctgcttctcccattccttcgatttttgcttcaatggatgtttgatttgctctctgactgcgtttggtgagcaacaagtccgtcttagtgtttatgttttgttttcttgcctgatttttcttctttcttctctatttggttgctgtctcaaatggcggatgttcttatgaatctgtggaacttatctacttgtctgttttcatttcatggttttgagtgtcggtagatcgaaactacaactgtcacttaccgattcactagtgagctcactaccactagatttagttttttgtctgcattagatttgcttccactcccaggtttgatttgcgtttctccgatttgtttacttagatcgattcagtaatcacaagttaggttttttctttctgttttttttttttcctgtgtggatatttgctctcgttgatcctgtggtgtaggcagaaaatgttgattagatgatttgaaaaaacctgacttatagggattatcttcggatccatatacaccattatgagtagactatgtatatgtattggataaacaagtgcttctatgttcaacactataaaaatgtagcttcaatattcgtcactgacaatgctgattgatgtatagctcatttcagaaacactagaaaaagctctgatttaagtgaatgctattttaggtatactctacaatacggttttattagtggtgtgctaattccttttctgtctcttctatattttgttgatttgtagtttactatact

SEQ ID NO: 4132 - DNA, 3000 bp, Unknown
  misc_feature (1)..( 3000): cDNA_ID_1808734_gDNA_ID_1620686_Annot_ID_48448 3000 nt of promoter + ATG
aatgagataatttaaactcaccgacgcggtttcgtcttttcttcaagtgaaaaagtgaaaaccgatgttaaggatcatgcattcaaaagagatgtatagaaatataccggatatgttgtatccatagttcacgtagattcataactactatataagttgttaaggatcaatcatgatatctgactagatcaatcacatatcaatcactccacgatatcttcttctatttatgtaaagtagattatgtaattagatctatcacatatattcctccttttgtactcaataaagattctctctttgaatataaacatttataaaaatctttttttttacaatatgtaacagtttattttattaaagtttttggttatttattatcattaaatttaataattcacatagattcatatctatataagtctcatcttaaaataatactaaaatttattttgtttacttacaattacgataggaatcaaacgaaaagatcatttttacatgaaaaaaaaactgtaaataacgtgaagaagagaagaaatataaaatcaacgtaataatgatcgagtgtttttaacaataccctttgttggaaggtgtttaaacttttgttttctttcttttgaattcttttcaagattctattaaatcatgtggatgtatatatgtgcttcagttcagagacagactttgtactaaatcaaggtaaaatatgtaattatgcggcataatatgccttacttgcttgtaagttataacatatggattccttttgtgcttaaatgcatatgtttgcttgtcatatgaggcatattactacacttccttgctaatcttttttgagtttccttaattctctttcatgttcattgtgcttttgtcctgtcatgtattagctagctatgtgttcttgttattcattcttgctaaaattacgaacacaatttagtaagaagcgttgttgctctttcttccaattcccggcagcttacttccaaactctccctttttggctaatggaatctctacgatcaaattgcaaaactctcatcaatgtgagcgacccggagaaccaaattgatttctttccaagtagatcaaacatattagaccatagtaacaaatgattgacataatgttcaatctttcagagcataaactgtttcggatgctgcaacagagaaaggcgtttagttgtggaagtcgatgagccatcaaagggactcaaaatccaaggaaagatagtgaagaaagatagtgcttcatcagatgacttctggagcacaagtacgtgtgatatggaccacaatataacgattcagtcccaatcttcaaacccgccttttgatccccaatgcagcacaagcaactctaccgaatttgtaaaccatggtaacttttgaatgttctaacttctaaggcctaggttgttttggatgccaaaaacttatgttatgaagcaagcagtatttattactcattcagttattctatacactaaaagatacactactacttattcatttccttccataaaaggacttattttgtggaaccacacgagacaacaatggcgtgaatgcttaaccagacaacaatgtctagttccagaacctgcaataaggtgacaaccacaaacagttacgaatattgaacgaactatttttatgtttatataggattggtctactgaattcgtcaatgttaaaatgaaactttgaattcatatgatttcagctggaactcgacgtatgatagcttattgagcacaaacaagctttttcctcaaccaatacctcttaaggtgatttgatttggttaattagttgttttctgctaatcataactcttaattttaattaacttacagcagaagattctttatcccccttagaacattttcatatcaggatttgaatctagtatatatcattgttgctaggaaagttttttttaaattgatgatgatattggtacaggagatggtgcatttccttgttgatgtttgggaggaagaaggcttgtacatatgattcattaaaaaaatatttttatactatataaagaaagcagaaaaacacagtttaattgcttttttcaagttccatatcatttttagtgtatatttattgcccttttataaatgaaattaggaaatttggatcaccttatggtcaatttctttatttttttagttataccacatttatactactgatgatgaaaatcgattttttgtatcgtgaacacttattaactggttttatcttgaataataaaacttccatagttattccgttattgttaggtcattgtaaaaaatcatcagcaattagtcattaaatatactatcaaagcttgtcagtcatttctcatcaattctagcaaaattattcgatatatccaaatccaaatgtcttggtttggtcatgactcatgaccgtggaaataagttcaagaatgcaaaaagtaacttatttgtgggacagaatcaaattctttgatccagttacttacgtctttccgtagccaatcaaattgaaatattttctttaggggtattcgattatggtggtcctgaagcctataacaattgttttccgataagatttgatatatataaataagggaacaatccccaaaaatgatatctagttaagatagtcgtagaatttacagaaaaggctacttatgtttttggcctgataatgcaaatactttcaaaatgttttatttgctaactagcttttagtttcgttctcgtatctaaagttagagattaacttactattcttgtattacgataacgttttgaatgaacatgtaatgatgcaagggtgtaaccaaaaatgataaaactttggggtcaatttgataatattgactaatagtgtggggcttgacaagaaccggaaactccatgatatttttgcagtctaaatatcttttcatctctcttctcttcctccactgaaatattccccacaagaactaacaatg

SEQ ID NO: 4133 - DNA, 3000 bp, Unknown
  misc_feature (1)..( 3000): cDNA_ID_1823127_gDNA_ID_1620686_Annot_ID_48449 3000 nt of promoter + ATG
catctgaagaagctcttgtaatcggtttagcaacacgaggagtagcagcagagacggttcgagccgtggttaccacccttggaacagacggtttctgggcggcgcgtaggttaaggtccagtgaagacgcgcttctcattatcattgttagttcttgtggggaatatttcagtggaggaagagaagagagatgaaaagatatttagactgcaaaaatatcatggagtttccggttcttgtcaagccccacactattagtcaatattatcaaattgaccccaaagttttatcatttttggttacacccttgcatcattacatgttcattcaaaacgttatcgtaatacaagaatagtaagttaatctctaactttagatacgagaacgaaactaaaagctagttagcaaataaaacattttgaaagtatttgcattatcaggccaaaaacataagtagccttttctgtaaattctacgactatcttaactagatatcatttttggggattgttcccttatttatatatatcaaatcttatcggaaaacaattgttataggcttcaggaccaccataatcgaatacccctaaagaaaatatttcaatttgattggctacggaaagacgtaagtaactggatcaaagaatttgattctgtcccacaaataagttactttttgcattcttgaacttatttccacggtcatgagtcatgaccaaaccaagacatttggatttggatatatcgaataattttgctagaattgatgagaaatgactgacaagctttgatagtatatttaatgactaattgctgatgattttttacaatgacctaacaataacggaataactatggaagttttattattcaagataaaaccagttaataagtgttcacgatacaaaaaatcgattttcatcatcagtagtataaatgtggtataactaaaaaaataaagaaattgaccataaggtgatccaaatttcctaatttcatttataaaagggcaataaatatacactaaaaatgatatggaacttgaaaaaagcaattaaactgtgtttttctgctttctttatatagtataaaaatatttttttaatgaatcatatgtacaagccttcttcctcccaaacatcaacaaggaaatgcaccatctcctgtaccaatatcatcatcaatttaaaaaaaactttcctagcaacaatgatatatactagattcaaatcctgatatgaaaatgttctaagggggataaagaatcttctgctgtaagttaattaaaattaagagttatgattagcagaaaacaactaattaaccaaatcaaatcaccttaagaggtattggttgaggaaaaagcttgtttgtgctcaataagctatcatacgtcgagttccagctgaaatcatatgaattcaaagtttcattttaacattgacgaattcagtagaccaatcctatataaacataaaaatagttcgttcaatattcgtaactgtttgtggttgtcaccttattgcaggttctggaactagacattgttgtctggttaagcattcacgccattgttgtctcgtgtggttccacaaaataagtccttttatggaaggaaatgaataagtagtagtgtatcttttagtgtatagaataactgaatgagtaataaatactgcttgcttcataacataagtttttggcatccaaaacaacctaggccttagaagttagaacattcaaaagttaccatggtttacaaattcggtagagttgcttgtgctgcattggggatcaaaaggcgggtttgaagattgggactgaatcgttatattgtggtccatatcacacgtacttgtgctccagaagtcatctgatgaagcactatctttcttcactatctttccttggattttgagtccctttgatggctcatcgacttccacaactaaacgcctttctctgttgcagcatccgaaacagtttatgctctgaaagattgaacattatgtcaatcatttgttactatggtctaatatgtttgatctacttggaaagaaatcaatttggttctccgggtcgctcacattgatgagagttttgcaatttgatcgtagagattccattagccaaaaagggagagtttggaagtaagctgccgggaattggaagaaagagcaacaacgcttcttactaaattgtgttcgtaattttagcaagaatgaataacaagaacacatagctagctaatacatgacaggacaaaagcacaatgaacatgaaagagaattaaggaaactcaaaaaagattagcaaggaagtgtagtaatatgcctcatatgacaagcaaacatatgcatttaagcacaaaaggaatccatatgttataacttacaagcaagtaaggcatattatgccgcataattacatattttaccttgatttagtacaaagtctgtctctgaactgaagcacatatatacatccacatgatttaatagaatcttgaaaagaattcaaaagaaagaaaacaaaagtttaaacaccttccaacaaagggtattgttaaaaacactcgatcattattacgttgattttatatttcttctcttcttcacgttatttacagtttttttttcatgtaaaaatgatcttttcgtttgattcctatcgtaattgtaagtaaacaaaataaattttagtattattttaagatgagacttatatagatatgaatctatgtgaattattaaatttaatgataataaataaccaaaaactttaataaaataaactgttacatattgtaaaaaaaaagatttttataaatgtttatattcaaagagagaatctttattgagtacaaaaggaggaatatatgtgatagatctaattacataatctactttacataaatagaagaagatatcgtggagtgattgatatgtgattgatctagtcagatatcatgattgatccttaacaacttatatagtagtt

SEQ ID NO: 4134 - DNA, 3000 bp, Unknown
  misc_feature (1)..( 3000): cDNA_ID_1823108_gDNA_ID_1620686_Annot_ID_48455 3000 nt of promoter + ATG
aaaaagaagctgaatcacttcaccagggcaaaaggaaaggaccagatttgcttgaaaacagagggctgagaagtaatggaatttcagatgctgcatcagaacagatttctgataggcaacctgatattgtcgatgatcatcctagtaaatctaggtctagtttcttttctctctacgcctcatttattggttatttctctcttattcaatatgaagtcagtcttattttaaagttaatgtgcaggagccggagcttgagtcctaagaggacagtgagtaagagcacgagtgttagtcctcggaggagtcagagtaagagcccgagttcaagtcctagatggaatgggggcagaagtcctgctaaaggtagccgccaagtgaagaacttgacaaacagtagaagagaaagcccagggagtgaggaaaagggcaggcatgtcagaaggagccctaccaaaagtgttagtagaagtccggtgcgggtgaaaaaggaaagagatattagtagaagtccttcaaagagtttaagcagaagtccactgaggagccccaaaagggtcatcagcagaagtccagtgagaggtaggattgccagaagccctagccggagtcctgtaagatctgcatctcgtggaagccttgggaggggcccactaagaagatcgtcaagaagatcacctagcagaagtccagttcgatcttctagaagaagcctgagccggagtcctattcaattatctagaagaagtctgagccggagtcccactcgattgtctaggagaagcctaagccggagtcccattcgatcacctaggaagagtgtgagcaggagtccagtccgatcatctaggaagagtgtgagcagaagtccggttcgttcatccaggagacgtatcagcaggagtccagtccgatcatctaggaagagtgtgagcaggagtcctattcgattgtccagaagaagtatcagcaggagtcctattcgattgtccaggagaagtatcagcaggagtcctgttagaggaagaagaagaattagcagaagtccagttccggcaaggagaaggagtgtgcggcctagatctcctcctcctgaccgcagaagaagtttgtcaagaagtgcttctcctaatgggcgcataaggagagggagaggatttagccaaagattctcatacgcccgtcgatacagaactagtccatctcctgatcgatctccttatcgctttagtgataggagtgaccgtgacaggtgaatagcccacacataatataactccccctttctgttacacactctcgtactgaaccgtcttttttataacgtcttctctgtagatttagaagtcgcagaaggttctcgccaagtcggttcagaagcccactaagaggaagaacacctccaaggtacttatcctctttagtacattgtttcagctgattctttacatctaaaagtttcatgaatatggaactaaaattggtgatccaaaagaattattcttgatttcacaactcgaaagtatgctcaggtatagaagaagaagccgctcagtatcgcctggtctctgttatcgcaaccggcggtacagccgcagccctatccgtagccgatctccaccttacagaaagagaaggtcaccatccgctagccacagcctgagtccatcgaggtcaagatcaagatcaaagtcatattcaaaatctcccattgggacggggaaagcaagatcagtgtcaagatcaccatccaaggcaaggtctccatcgaagtcggattcgacatcctcggataatagcccaggtgggaaaaagggattagtagcctatgattaatgaataatgattacccttaagttaagtgtttgttctttttactgagaagagatggtaaagagagtaagtagtttacttctgtaaaacataagcattgtcttttgcgtatgtttgtttgattatgctccaagattgttaaaaatttctgttgatgtttgccgacattttttctttgttgccatttgccgacaaatgttaacttccattattcgttgcggagttggttttggtccaataattaaactttcataaaattaagcataactaaatgtgacgtttgtcaccaaactttagaacaacgacatcgtaatttatttatttggataatcaatataatttacgatttcttcctacatatatatcatatcactataccaccgtcattatcactatcactaaatataaaaatgttaaaatgatttcttaatggaattttttttgttaaaagtttattgacacaaaaaatgaattaaaactcagaaatctgtatactgaattaaaacttgtaaatataacaacaaaatgggattaaaaaaagaagtggcatccatttaaaaattatttgcgaattcgcccgtaacttcttaagctaacaattagaacctaatcaacactagttattttgagtccaccgacaggtgatagcaaataaaaaagaacaggctggtaccagagccaacaacaacgtggcttcttcttttttttttttaatataatcaaacaatcatactttgtcctatctctttcttgcaataagattttgccacgtcacatactaagaagctggcgcgtctagtggggaagccagaacggctcactttaaaaagtagagagatgataacttgagccgaatagagccgagctgagctaaaacggtgggagaggaagaggctactactaccgtcaccatctccggtaaaataatgtacttgtcatttaaaaattaagaaaaaacacatcactctgcgataaaataggcaaaagcagatttgaagaagaagcagcttgagatatcaaatagagagagagagtgacagaggagtgtgtgaacatccttttttagtagatttgggttttcgagatgccgtattgaatcggctacgaatttcccaattttgaattttgtgaatctctctctttctctgtgtgtcggtggctgcgatg

SEQ ID NO: 4135 - DNA, 3000 bp, Unknown
  misc_feature (1)..( 3000): cDNA_ID_1823104_gDNA_ID_1620686_Annot_ID_48456 3000 nt of promoter + ATG
ttttcttcctcattgctttcctgatctctgcagctttatcccactcttctttctctgcatagatgttatacatctgaacgtaagaacctgacagttccggtttcatttccattgcaagctcagccacttttgctcccattttcacattcccgtgcagcctacaagacccgagcatgctctgaagcatcgactctcctggtcctccaggaacctcactcataagctcttctgcttctttcaatctcccagctcggccaagcatatcaaccatacatgagtaatgctcatgagacggctcaagattgtagacttcgatcatcatgttgaaaatctcatagcccttgtctaccattccttttctattacaagctgttaacacagagagaaaagtgactaggtctggtgctacgttttctttaatcatcttgtggaacaagttcatcacggtttcaaaatcaccgtggcttgaataggctgatattatcgatgtccaaacaaattggttcttttgagacatctcgttaaagactttctcagattcatcaatgttcccacgcttggcgtacatatcaagaagcgcgcttgaaacaacaggacaactattcaaacccaatttcagtaaatgagcatggcaacgctgaccttgctttacagatatatcctctgcaaaagctattgcattcaagacacttccgaaagtgtattcattcggcattgtttctgctgctgcggataagaacatcttgagagcttcatgagagaatccattttgtgcaaatccagatatcatagcattccaggatataatctcccggaaagttatatcctcaaaagccttcttggcatcttccagagcctcaaacttggcatacaatgtgatgaaactgttgcctacagatggttctgaaacaaagcctgtcttgatgcatagcccatgaattttaagcccttctttgatttgctcattgcacttcacggcattgattaatccaacaaaagtgacctcgttagggtaaactccatcaaaccgcatattaaggaagatggacacagcatcgtctttattcgaggaaatcattgttgtccaagagacaacattccgctcactcatttggtgaaacactgatttcacagcttccaaaaccccacacttggagtaccttgacatcaaaatattaccaacttctaaaagtgattcataacctctttttatgcacaaaccatgaatttgcctggccagcttcaagtcagtttcgtgacaacaggtagtaatcacgctagtaaaagacacgtgatcaagctccacaccttctcgcatcatgtccctaaagataaccactgcttcaaacccgaaagtgccttcttgagaaagtcctgacaataaagagttccatgaaatcatatccttaaacgacatttcatcaaaaactctccgagctcctctgaaacttccagaccgcgaatacattgtaataaacgagtttccaacgacaagatcagactccagtccggttttcaccacagttgactgcaactgcaatcctaaaagaaatccttcagagcccacacagaagctaagagcagtggaataagtgaatgcgtcaaaaactactccagcagatttcatcctaacaacaaaattcagagcaatttgattgtcatcaaacccagagagtatagtgttccaagaaacaacatcaggatcaaccagattctcaaatatgcacaaagcattgtcaaagcgaccggctttacggtacatacccattactgcgtttgaaacacaaacaaaggaagtgaacccagaagttgtggaaaacccgtggatttggcagccgcgtttcaagtctccacgacatgctttaagcgcaagacaaagagtaacttcgtccatatgacgaccaaaataacccagctggagattttccttgaagatcgaaagagctcgtgccggagaatttctccgtaaggattcactgattgaatggttaatggaagttgtcgcatttctttgggaacttccatcgaacagcttgtgagcaattctataaggagagtaaaatctctgaaaaagaaatgattttgagcgattacagtgtagatagttcagaagggtcatgagaagcaaactagtcggattctaattcgacaacaagtgtacttatatcggagaagaagagaggttttagcttctgagggaaatggtgatgaacagagagagagagattttcagagcaaaagagagttttgagggtaaacttgtaaataacgattgagttagagggcaatacggagaagctggtgttttgttcctttttaagcttccgctaggtttttctcctgctcagtcgtttttattctgtggctctgcgtgcgtattctcaggtaaaactctagcgattttccgacctgaatcttctttgtttctcttcagatgattgcactctcttgctggattttgatgttgaagcatcattttccactaatatgtacacttcactgatatgatcgttttagtgtatttgatggcctaagaattttcgtgaatttatttaccgtgaaacgtctaggtctatgctagtgctgagaagttgtgggcatgagattctatagaaattgtaagtttggatggatttgcttgacgattaatctccgtacacattgtttatttgatctttgtacattgttgagctcataaaaatctcatttttgcaacgacattgtcattaattgatgggtctagaagttttatagtttggaaggtcattattagacactgactgttgggtggtttaccagtttgcagctactgtgaagtatcctgtagtgtgggttttagttcttcagtgctctaataatttatgtctccgaagcgctattcttcaggactatttagatttctgagtctcctttgtgttttctgtgcattctctggatttttcaggtcataatttctggagatccacaggtcataatttctgaagctatacctaaaacatg

SEQ ID NO: 4136 - DNA, 3000 bp, Unknown
  misc_feature (1)..( 3000): cDNA_ID_1807922_gDNA_ID_1620686_Annot_ID_48458 3000 nt of promoter + ATG
tatatcctggaatgctatgatatctggatttgcacaaaatggattctctcatgaagctctcaagatgttcttatccgcagcagcagaaacaatgccgaatgaatacactttcggaagtgtcttgaatgcaatagcttttgcagaggatatatctgtaaagcaaggtcagcgttgccatgctcatttactgaaattgggtttgaatagttgtcctgttgtttcaagcgcgcttcttgatatgtacgccaagcgtgggaacattgatgaatctgagaaagtctttaacgagatgtctcaaaagaaccaatttgtttggacatcgataatatcagcctattcaagccacggtgattttgaaaccgtgatgaacttgttccacaagatgattaaagaaaacgtagcaccagacctagtcacttttctctctgtgttaacagcttgtaatagaaaaggaatggtagacaagggctatgagattttcaacatgatgatcgaagtctacaatcttgagccgtctcatgagcattactcatgtatggttgatatgcttggccgagctgggagattgaaagaagcagaagagcttatgagtgaggttcctggaggaccaggagagtcgatgcttcagagcatgctcgggtcttgtaggctgcacgggaatgtgaaaatgggagcaaaagtggctgagcttgcaatggaaatgaaaccggaactgtcaggttcttacgttcagatgtataacatctatgcagagaaagaagagtgggataaagctgcagagatcaggaaagcaatgaggaagaaaaacgtaagtaaagaagctggattcagttggatcgatgttggtgacactgaagggtctttaacgatgcaaggtttctcttcaggggataagtctcatccaaaatctgatgagatttatagaatggtggaaattattggattggagatgaatttggaggggaaagttgcagtttaggactcttactcaaagttctaaagagttgtagttatagatcaaaaattagaaatgttagctatagatttacatgaactcactgagtgtatgattacttttatttttgcacctacatacgtgcacattgattttgtaaggaccatggtaaaccggtaaagcatggttctctgattttgaccttattgaccggttcgattgattaatccaacgctacgatcaaaatagacgactctaacttttctaggtcaaccgtaaaatatatatactttaatttctacaaatagtatcttgaaactattaaactatttattaggttcgaatttggttggtattattcccaatccaaaggctaaaatcaaaaaaaaaaaaaaaagtcaaaataacaatggattttaactacaaaaagtttcaagtttatgggccatttcaagtttgaaacttttgttgttttttctatctaacgaactcaaaaagagaatatgatggctttaaggtatgagtttggtgttgtactcttactcacgtctctttacatttatcattgtataacaaaataagattttaatagtaactttgaaatgattcttaagcaacttaaaaagcgagagaagagaatgtttacgtcgtcgataacctcataatgcggattattcttcctaacacgttaccctctacgtaccccacttgataagccagtttacactttcccttccaatttactttttctaataaaatacttttgtcttccgtcgtcaaacaaacaaatgtatgacttaataagttctatcaaaatgaacgttcatatactcagctgattataattgacgcaacttaaaaaaaacagaatgaagactcatatattgtaacatggcttgtatcaactataaataatatttgtctagaataaagactccgatggtggttgaaacttcaaactaaaccacccaggacacagcttaacgtatcattataaattaaagataggatagtaccatactagttagtaatttgactatttattaactacacaaatttttaacagatttagaacttgagtgttatacatattgaaagtacctgtaacttgattttatcaaatcagattttaagtacttattaaaggctgaagcatatgaaaatataaatcaatttatatatgacttgttgaagcttttaaattaaggagcgtatcaaaaaacttaaaacacacaattaacgcgcgtgtccacgctctaagcaaagcgagtgaaacatattaatttacacaatcgaaccgtcattaatgttatgggttgtctcctatttctggtttaaaagagatattaacttaaatcccacgtcaccaaatattaaaaataaaataaaaataaacaaattatataaatttcttaacgcacaatttgttgttttccataattccatttacccgaaaccctaatccccaatttctctttcaagttttcgatcacgatctctggaaaattaagagagaaattcaaaaacttcgggagttcaaagtctcattcagacattccagaaggtgatctcttgtttcagtttttctccctttttgttgattgtttcaatattggtgttttatccttcgatctctatgaaagttgtttcaattggatcgagattcttcgctgtttattgattttacgatacccttttcaatcgtttggaagtttttttggtttgtcctaattcgaattattcttgctgtctgaagaatctgtttggaagtaaatttggattaatcttgcttagcttgtatctcctgtgattgatcgcgattacgttggttcttctttctgtttacgcataattttactgattcatctaaattttgttgcggctttcttatgatctgtgttccagagtttgtggattattacatcaaactatatgtttttagagttgtttgttttattaagaatgtatgatcttctgctttggatgtttgctcacatatggatatttctcttttgcaggtattctagtcgactgagtaaacaatc

SEQ ID NO: 4137 - DNA, 3000 bp, Unknown
  misc_feature (1)..( 3000): cDNA_ID_1015447_gDNA_ID_1620686_Annot_ID_48460 3000 nt of promoter + ATG
acacagagttatacgtccatcttcatacaattaaaatcttttaactgaacctaactttattcagactacttaactcatacatgacacctataaacattttgtgtttactaatatttttccttttccaaattttatccaaaaaaacaattaatttcttcttagtattttagaccactttcattctagatatactggtagtggtgacatgcatgggagaattgaccacttggccattaactctagacacacatattagacatggaagctgcttaatggaacattttagatacaattgtcaaaacaaaaaataacatattagcaacaattgcatgttagagataaataatgcattatttgatacacaatttatacttatacaatgcatgtgtatgtatttataagcacacgcaatatgttttttagtacaataatttgtgcaataaaagcaccgctaagagagtcggtggcatttgcagtgatccatcaattctgacgctgcagagacaaaattcgattattctttaaattttaaatatcatatattgctctacattaaattatatatgttcatggatcagatttacgattgacgacgagcgaaggataacaatcctttacaaagtattttattgtctatttatgtttaattttctcatactctccttttttccatacaatttgacatagtcttctatagaaattaattttgacactcgagaaaattttctgtaattgatacatgcatttattcacattatgctaaaagtccgaccacatttatatctaagactataagtatactataatgtaaaaaagccaattatgtttcatcgtttaatttatatagtaatggttggttagttattttattgtaatatttcaaaaaagtcccaatatgcttagatagtttgtgattatgttggtcatgttcatctatggtttttttagtttggtttaagaatatcgatgattatttcccgacaaaggtgcagactaaatctaagaaagcacatgatgataaaagttggaaaaagactagttaaattaatttagatcgaagtcggaccattatttgtttaaactttaaactattgaagtaaacaaagagtccgcatggttttataatttatacttcacacttgggattgttggggcatgtgtgatgcgtttaacgattctaacagtatatgaaattatattttttggtcttgttatttgtctaaaaacctatatttttctcgtaagaatattgtaagagttatttttcgaaaatttaaataatgattcgatcaacactttttctcattttatcaaacccctttgattgaatagaccgctaaaacaatttgcttgattggtctttcttacaacgactaagttacaaatgtgactgaaagttaccgatcaaacccatgaaaaaaacttgagcccatataccttgctatggatttggcacacagaccaagctttcgaagcaactgtttggttgattcggaattgttttctgataataaataatatttatattattcgttatgtgtttgtgataggataactcggaacataagcaactttaacttgtggcgatgcgagaaccaatgtgaaataggcatgtgagagaccacattgtcccacagcttttgtcctcttcacccccgcaattatattaccattaattaatcacatagttatcgttttccaaatcgtaatatacatatcgtagttgttcatctttaatctattttcggtaatctaacaaaaagaaagatatctcgtagtgaaaatacgaatatcagtgctttttatgcaacaattatgacattaggtatcgttactcaaagttaaatgaatacaatctagacgacgcttaaaaaacgaatagatgatggaatcacgacttaacactagaattaccatggaatataggcaatttgcgaatttattcaaccaaaccaaaaatcgacagtgttatttagtcaaaccttctaagaaaaagtgacccatttccaaggaacgatgaataaaaaaaccggaccaatgttgttccgacataagtcactagtggcaaagtcataatttagacaaaggaaaggggcctttcttgcacaattttgcatataagagctctctctcctcctcgttctattccactcccactaaacattccttctctcgctcactcttctccaatccttattttattttttgaaagtttaaaattttatacaacatatcaatttggggtagaaaaattcgaaagaaatgaaagagatgggagtgatagtgcttcttctccttcactcgttcttctacgttgccttttgcttcaatgatggtaaatccctcgttctttatcttttccgtagaaatctcgcattttcgtatcttgtctatatactagccaaaccaacaaaagaaactcgtagtgagttccaacaatattctagtatttaagaaattcgtgttataaaaatttgtacagcttcttataacttgtgtgtccaaaattttgtttgtcgtcaaaataattcatttatattgcaccacaaatcatgaagaatgacctattagcttgacgaacatgttgaacactacgccgagacagatctgtaaatgcacatggtgtttagtcaatcgttttcaataaatgtgtcactaaattaccctcaccttcccatctgtaactaacctttttaatcatttaaatatttcatacttccaactttttattcaattattatacactgatcacttgtttattcatatacagatctaaaatagcaagattgagaatttgtttacctagaatcactgtcaattttaggtgactagatgcagttgaagttcaaatattattgtcagcaaatcactatcgtttaaatcaaatttcacaacaaatccctaactagttttgtttttgtaacttgattacattaacaaaacaaaacaggactactaccaaacggtgacttcgaactcggtccacgacattcggacatg

SEQ ID NO: 4138 - DNA, 3000 bp, Unknown
  misc_feature (1)..( 3000): cDNA_ID_1808192_gDNA_ID_1620686_Annot_ID_48462 3000 nt of promoter + ATG
tgcttgtcttttatcaaaaaaaaaaaacatatacatgttaaaaatagtaagattataactaatctttccattaacatttctttctttttgactcttcggatgctcttctagccaggctctagccctctctaataatataactgatgactgtcacaatataattgatcatacatttgaattagagaaatataccgattagcagcatgatatttaaccaaatctgttggagtaagttgaatatgactcagcagttagcctaaaagtttttaagatatatacaacaataattaaaggcgaaaagggtgatataaaatatagctgaacagagtttaacatatcttatactgggaaaatcatgtgtataattatatatacaaacgtatggaaacttgtcgaatgagtccgtcttctaaaaaaaacaaatctcctgcaattaaagatgggttttcactattgtaactgtcgtagagaaagaaaaataattgatggtattgttgtctacaacaagttttttttttttttttgttgttgttgttgtctacaacaacaaactctatttaattcagttttaaacttttttttcaaataatttttgttttcttctgtccgttaattgataaactttaatttatgtaaataaattagttgaaactttaattttttttgtagtatatattttccattgccatcaaaattctgtagtgtatattagcgcgaaagatgagcattatatatcagattggttagttaacgtgtccaatatgcactccactaaggcactaatttagtttgtaattgatgtatcaagaacattttttaaaaaaaagatcaagaacattataatagcatatccttgccacaaacatatatgggtacatggacagctttgaacagcactgacctaatttaattacacacaaatttatttgactctcatactaattaccaaacgtcgatttctgaaataaatcatttaaatttcaaatcttaattttatttcgtttttgttaaccaaatagtataacaagtacagtatcaaaagtttcaagtttccttagaatgacctaatcactattcgatgtaccaacgtatctactaaacataatatgcatgcaatggcattattgcattttttgcacattttacaatttctttctgttagtgactaacaaaatggtgtaactgtttagtatttacctcatctcaatgatgatctggtccacatgctgccaccatgtgacccttactccagaatattcccagtctccaaaatccttcgtggagaaaatgcggaatattctactaaaccgaatcctttcattttattttattttttcctactcttttctgattatatttaagatccgatcaacttttcatatgggcgatcgagaaaacatctatttaatttgtagaactgtaaaagtgatataaaacccatgcatgtgtccatggtttgatagacatctgaatatatatcgaaaatgtgatataattctataaccacatttgccaatccttcttaccaaactaaaactaaaagtatgtataccatttcattttgttgtaatttttggtatctgaaaactgattatatttttttaacaaaccgataaactgataccgttaatatttatattagagcaattttttttcaaaatataatcagatcgaatcaattgaaataaggaagatcatattttccggcatattttcttaaaataagttctaactttcagctaatttcctccgatccaatagttgttttggtggcaggacaaggagtccccgagtacgcacgagccgggataaggcgtttaggacaaaagagacacgtgtatggctatcttccacgtagatgtctttgtccgcgtctaattattggcacgtgggtcctagtatccaagatcaggacgattctagcgagtcgcaagtgcttttcatgattaatcatattattatataccttttttcatgatcaatacgcatcttctttaacgaaaattaaataaaaacaagcaacagaaaaagtttcttaatcctgtggacgatcgattcaaccatacaaaataaattctatgtcaaggaacataaacatttttttttttgcatgaaaccggttaaatcatcaagaaaaatatgagaacttgtttcttaaatggtatataccgtccttgagtttcatttaaattttttgtgatggatattgtaaaaagtagtttgtaagcttgctaataatgcatccaaaaaggatatgtgacatgattaacaaaatttgatacaattgatttgtgataatgaaaacaaaaatacaactaaaagctccataaaccttgccttaagataatgacaacgaaaataaaagctagtttactgtctcggttgattggttgatcccaagttctcctttatcttagagcaaccataccactagacaaacgagaattaatttttttactaaaaatggttcaaaaaaggtttatttagtggctctaattgtttcgttaatctaaactatacacgctttatctagttttcagataatcttatttcaaattaagaattaagaaaatagtatagagataaatctaattgttaaaaatggattatagtacatactaattatttgttaaaaaaaaagcatcgagtatatccgaatctgtggtccgaagttgggacaagctgacataagatctagctgtctttagccatcagatccgacttagttcccaatcatatactgacacgtcatcttcttccaaactcaaaacagagcatcgaagcactctttcgcggcgccttgtatctgttttttctcccacctctcaggcgggtccctaaccccttatccgggtcttacttaagccttcaatttttctgactatatatatcccttccacttatttctattttcttcatcgaaacaaaaaataattaagagagaaaaaaacaaaaaacattttccatctctctctctctctctctcgcctgcttcaagaa

SEQ ID NO: 4139 - DNA, 631 bp, Unknown
  misc_feature (1)..( 631): cDNA_ID_2106659_gDNA_ID_1620686_Annot_ID_164627 3000 nt of promoter + ATG
atacaaattgcataccaagcagaaccgttttgtcctaaaccaatcatcacactagacgacgtcgtttcacgtgtgatatttaggtggctgtcccgttcctggaacccggagctttttttgttgtgatatatcccgtaaaaccctaaacatagtcacttcatcgtctcctccactgtatcattcaatctctgtcttccttctttttagcgacctcgtctccaaagctcacaaattttctacctttccggtgagtgttactctgttctcgtttcctcgcttgtctctttctgggtttttagtttccgaaagattttcctttcaaaatccgtttttgaatgcgaattccctctgctgtatctattatatttagtaatttgatgtattgtttggttggtatgagctgataaagttcaacacgtttgttgttcacttttgggaaaatttgcgataaaacaaggatttttttacaattttgacatatatatatatatatatatatatatatatatatatatatatttgagacgagaatatttgttcagatatctactgagtaaaattagtggtctctctgtttattgcgttcatgtgacatttggaatttttgagtctaggagtagagagaaagatg

SEQ ID NO: 4140 - DNA, 3000 bp, Unknown; identical to SEQ ID NO: 4138
  misc_feature (1)..( 3000): cDNA_ID_1808192_gDNA_ID_1620686_Annot_ID_164622 3000 nt of promoter + ATG

SEQ ID NO: 4141 - DNA, 3000 bp, Unknown
  misc_feature (1)..( 3000): cDNA_ID_1015447_gDNA_ID_1620686_Annot_ID_164618 3000 nt of promoter + ATG
ccatatcgttctcgcaaaggagcagtggagaaaaagatgatcgcgtgtctcctccattcatacacaaaggcagcagtcagtgttaatctgcattccccaagacgcaagtcttgatctttttggggctgtcttgtccttttcttctatgtcttctccgttatttcgctcccatgcaaacaatttcttatcatcactctttttctatcaacattctctctactctttcctgagtaaactatttacaattttctttctttttgttaccatataaataaatttcccatacaagtaaattaattagttctgaataacagatgtgagattgtaatttataacaattggctctcaaacttgataggtagttaaataattgtagtataataaatagttgatgttttaaacatatataaaaataatctaaaacaactatgatgtatatgacattgccgttgcccgttggcaccacaagtcaaggttgtgatttcataagttacattaaatagtttggctacagatttgaattctactaaactaaacattagtaattttgcaaatcaagaaagacgatatatagtcaaatgtcgtttagtggtccactttcccatgcatgtatggctaaatctttttaatagtaatgtggatccagggttaacatcaagccaaagttacatggctgtgtggccccggttttatggccgaaaatcataaatttaggtttaaccaccaagtcaaaacacacagagttatacgtccatcttcatacaattaaaatcttttaactgaacctaactttattcagactacttaactcatacatgacacctataaacattttgtgtttactaatatttttccttttccaaattttatccaaaaaaacaattaatttcttcttagtattttagaccactttcattctagatatactggtagtggtgacatgcatgggagaattgaccacttggccattaactctagacacacatattagacatggaagctgcttaatggaacattttagatacaattgtcaaaacaaaaaataacatattagcaacaattgcatgttagagataaataatgcattatttgatacacaatttatacttatacaatgcatgtgtatgtatttataagcacacgcaatatgttttttagtacaataatttgtgcaataaaagcaccgctaagagagtcggtggcatttgcagtgatccatcaattctgacgctgcagagacaaaattcgattattctttaaattttaaatatcatatattgctctacattaaattatatatgttcatggatcagatttacgattgacgacgagcgaaggataacaatcctttacaaagtattttattgtctatttatgtttaattttctcatactctccttttttccatacaatttgacatagtcttctatagaaattaattttgacactcgagaaaattttctgtaattgatacatgcatttattcacattatgctaaaagtccgaccacatttatatctaagactataagtatactataatgtaaaaaagccaattatgtttcatcgtttaatttatatagtaatggttggttagttattttattgtaatatttcaaaaaagtcccaatatgcttagatagtttgtgattatgttggtcatgttcatctatggtttttttagtttggtttaagaatatcgatgattatttcccgacaaaggtgcagactaaatctaagaaagcacatgatgataaaagttggaaaaagactagttaaattaatttagatcgaagtcggaccattatttgtttaaactttaaactattgaagtaaacaaagagtccgcatggttttataatttatacttcacacttgggattgttggggcatgtgtgatgcgtttaacgattctaacagtatatgaaattatattttttggtcttgttatttgtctaaaaacctatatttttctcgtaagaatattgtaagagttatttttcgaaaatttaaataatgattcgatcaacactttttctcattttatcaaacccctttgattgaatagaccgctaaaacaatttgcttgattggtctttcttacaacgactaagttacaaatgtgactgaaagttaccgatcaaacccatgaaaaaaacttgagcccatataccttgctatggatttggcacacagaccaagctttcgaagcaactgtttggttgattcggaattgttttctgataataaataatatttatattattcgttatgtgtttgtgataggataactcggaacataagcaactttaacttgtggcgatgcgagaaccaatgtgaaataggcatgtgagagaccacattgtcccacagcttttgtcctcttcacccccgcaattatattaccattaattaatcacatagttatcgttttccaaatcgtaatatacatatcgtagttgttcatctttaatctattttcggtaatctaacaaaaagaaagatatctcgtagtgaaaatacgaatatcagtgctttttatgcaacaattatgacattaggtatcgttactcaaagttaaatgaatacaatctagacgacgcttaaaaaacgaatagatgatggaatcacgacttaacactagaattaccatggaatataggcaatttgcgaatttattcaaccaaaccaaaaatcgacagtgttatttagtcaaaccttctaagaaaaagtgacccatttccaaggaacgatgaataaaaaaaccggaccaatgttgttccgacataagtcactagtggcaaagtcataatttagacaaaggaaaggggcctttcttgcacaattttgcatataagagctctctctcctcctcgttctattccactcccactaaacattccttctctcgctcactcttctccaatccttattttattttttgaaagtttaaaattttatacaacatatcaatttggggtagaaaaattcgaaagaaatg

SEQ ID NO: 4142 - DNA, 3000 bp, Unknown; identical to SEQ ID NO: 4136
  misc_feature (1)..( 3000): cDNA_ID_3072644_gDNA_ID_1620686_Annot_ID_164616 3000 nt of promoter + ATG

SEQ ID NO: 4143 - DNA, 3000 bp, Unknown; identical to SEQ ID NO: 4135
  misc_feature (1)..( 3000): cDNA_ID_3072648_gDNA_ID_1620686_Annot_ID_164614 3000 nt of promoter + ATG

SEQ ID NO: 4144 - DNA, 3000 bp, Unknown; identical to SEQ ID NO: 4134
  misc_feature (1)..( 3000): cDNA_ID_1823108_gDNA_ID_1620686_Annot_ID_164613 3000 nt of promoter + ATG

SEQ ID NO: 4145 - DNA, 3000 bp, Unknown
  misc_feature (1)..( 3000): cDNA_ID_3070637_gDNA_ID_1620686_Annot_ID_164608 3000 nt of promoter + ATG
aagattgccgtgaagctatctcctcgttaatgtttgcagcctctggattttccgagttgcctgagctgcgtgaattgaggcaaatgtttcacgaaaaatacacagattcacttgcattgtttgtcaaccaggaggtaaagagtttttctagtgtattcatttatttgtaagactcatcttgaaatcttatacggttaagttaaccacctgcttgtttcttgtacagcttgttgagaatatgtcatccaagcccttttctatggagaagaaagtgaagttaatggaagatgttgcattggagttctctattcgttgggattctaaagatttcgagaagaggattgtgagacagaatagtatttcagtaatggtatgacaatgactcatttgttttagggaacaactaaactgaaatatttggatagtgattgaattctgatttctttcttggacgtgaacaggagaccccaaaaagcaccaacgacaagtataagcctgtagacagaaacatggccttgccaaaaagagaagagtttgaaggttctgaaaatggggttagcttgaacagaaaaacggctgaggcatcagaaagaagagatcctttgtttcaatctgataaagaaagttatcagaatggtctcagaggaaatcagcgtgggctaacatataaagaaaggtcagagaatgttcttcacgcctctagatcggaaagcaaagacaataaggccgaaaggaaagagttttatctgcattctaagcaaaaccctgctagagaaaaacatcagcctatttttaacgaaggtgacactatagtgatgaaggtcaactatgggaatctcggtcaagggaatggacatcgacctggtgtagttgatgcgcataagaaaaccgagtttgttgcctcagaaaggaaagagttttattcgcaatctaagcaagaaccttctagagaaagacatcaacctatttttaatgatggtgacactattgtaatgaaggtcaagcatgagaaccacgttcaagggaatggacataaaaatggtgtagttgatctgcataagaaaatagaggttaatgcttcagagaaacttaagtctagcagcagcaaaagagctgacaagttagttatcggctttaaacaagagagtttctttcaagggtacaaacatgagaaaaatgaagagcatgcacatcagaaagtggaagatagtacctcaagacctccgaagccaaatagcaagtcaaagagagcggaatctatcaatccaggttcgagacatcataatgatcgggagagtaaagaaaatgcagttcttgtgggaaagagcaccgaagaagatccatctggtgataatgttaagggtggagaatacgaatatgatcatgcaaatccagcaaggaaagttgaggagcgagaaacagagagaatgaaatcacccttctacaaatcccttccacctccgtatgttaaaaaatctattgctaaagcaaggcatgaaaaagctgaagctttagataatccaaaggctcgttttgatggtgaagaaggaaatcatccagacaatggtaaaaatgtttatggggcagagagacgaaatggagcaggtcatcatgaagtgaatgacatagacaatgcatctctgaaacggcaaactaacagaagaaagcacattgtagaatcgggaggtgatgatcacataagtagccgaagaagggaaaactcaaggaaaggccttcaagtcttaattgacgaggatgagaaagacagtgaggagaagatgatggataaacttctgatgcattacagtaaaaaaccttcaagctatgaaaaggacaatgtgcaagaagaatccaaaagcagacgtacccatcttaaaaaaggtgaatctgatgaagagatgatgattcatcagccggctcggtcacggtctctacccgctgaacagttggccgggccatctgaacctgcaaaaacatttgcccgtgcagcctcgtttcagccagaacgttccagtgaagctaagcacgttcaccccaagttaccaaactatgacgatttggctgccagatttgcagagctaaaaggaaggtaaatatatgaacagttgatgcctagaaagatagaattaatgagattaaatagcctgttacacattttcttacttcttgatatagtacttgtccgatattgccccatgtatgtggtgcttgttataatagttgaaattggaagagtgacgcattgttacggagtacggaccccaagagttgttgatcatctccttgtttttggatcatcttatgtaaccatttgaaaacaaggatctgtttagaaaaagggaaagtggttaccacacagtttattactagcgagttatttgatgttaccatgatttttgcattaggtcctgaccagcactaacttacaagctagtagctaccatatacaagatataaatttacttctaaattaccatgaagtgtttaagttgatcttactgagaatattttgagtttttttttttaaatctgaacatgataataaacaaaaactattaaagggaaaagtcaacgagaaccctttttaaacgaaaaaaaaaaggtcaacgtgaactgcagagtgagcttagatgttcccaaattcgttcataaaccctaaattcaattttcccgatttatccccagcaattgtgtgatatcttctcaattctcatctttatcttcctccttacacagtaaaaaaaatacgttgtctgattactacttacactttttctcaaatctatcgctacgattccttctctcataaagcctcccaaaatcaatcatagacaatctcattaacagttttgtgttgatctctaactccatcgtcttaggagtaattaagtgaaagaacccaaattcgtttgtcatagaaaccacaatttcgagggatccacgcactttcacagtttgctacactttcaaaacaagccctggtctttgaaattggtgaaa

SEQ ID NO: 4146 - DNA, 3000 bp, Unknown; identical to SEQ ID NO: 4132
  misc_feature (1)..( 3000): cDNA_ID_1808734_gDNA_ID_1620686_Annot_ID_164605 3000 nt of promoter + ATG

SEQ ID NO: 4147 - DNA, 3000 bp, Unknown
  misc_feature (1)..( 3000): cDNA_ID_1823088_gDNA_ID_1620686_Annot_ID_48464 3000 nt of promoter + ATG
atgtaatggaccaatgctaacgtcaacattcatcatatcaatacacttatttatgtttgtcttgattttgatgagggagatctaccaaaataaaaggtgatactggtttttcaacacatcatacgataaaattttatgtataggcaaaagtgcagaaattgatgtcttctatcatatatgcgagttcttagtagctatgatgaaattttgtgtatggccaaaagtgcataaattgatgtattctatgatatatgcgagttcttagtagctttgtgtaaagagtgttcttcgtaatgatagtattacatagacgacgagttccaatactccaacaaaacttattagaaccggaataacaagagaaaaaaataataattataattcgcaataaagaaggtccaatcctcaaaagaattgtaaaaactaagatgatgatgatgatgatttttcaacgaatatcattatcgacccaagaattaatcatatggagaagttttgtatgagctatgtgaatactaccagtacgcattaccatgatcataaattcataattaaacacaaacaaggactaatacgagacgggagaaatatataaaggtacaacaaacataatagaaaggtacattaatattaaaactcaattgtggagaaactgatactctcacaaattatatgaccagagataaaccctaaaccatggaacttatcataatcacaagaaccaagcctagagaaatcactcccggagcaacggaaccggccaaattgcgaacagctgcggcgggccctggagccggcgcaagaacttctgaatgggagggatccactcccggagtaggcgctggcgatgacaaagccttatggaccggaataggcgctggcgataacaaagccttacggaccggagacgctgagggggaaggggaaggagagggatgacgaggagtgtggctgtggtgtccggtagacatgaccgttacggctagcttttgacctttgagacaggatccggagttgccgctgacgaagaagaatgggtctgagcggctaagtaggaagagagagtcaccgtctgagagggaagtcaaagggtgagtcgtgttgcatgtgttgtactctttttcactcacctccaacactgaatcttttcccttcacgtacttaaaatctagcaaaatcaacaattgatataatcatgcattaatgacacatatctgtggccaaatagaagagaagagagagacttacaaagagtgtcgttgacttgaaaccggtttcggtgagaccaatgagaataatcctcggaaggagtaaggacccaaccatctctcccaccaacatagaacttgtgcccatttgataactctatactaaaccccaaacccatcaacatcacaatcatcaagtaaacatcagtcattttgacaaaaaccatcaatatccgaaccaaaactttaattaacaccaactttctactctcttatagcttaactctcattaatttggtgtggtttgggtgcttgcttgtatgtgtatttatggtgaaagtagacaagagatttatagccgttgggtgaagcgtttggctgtgcatcgatatgtagagaaaatgccaattaagtagaagcgtttcgttcttgctcatctctttcttttgttacacgtttcgacatgcaatagacttaacggctatctacacaatattactagtcaggtctttaactactcatcatcattcatcaagtacaacttaaaatttcattttttaaaattcaaactttaataacgtattgtcttattttacactattagcaggagatcagggatgacaattatgaattgtttttactttttagaggtattatgcaagttacatttcaaatatttaatagtcagtagttagtcaccaaaaggttaaatttgtgcataaaacatagcaaacataaagtgtatatgcaataaatgaaaagtttatcgtgattgtaatttttttttttttttaagattccgatatccaaaaatgttattctagcaacaaatggtttgactgagctactttagtaattcttcgtcaatagaattgaaattgatcgacaaatatacttattcgatcaagaaattcgaatatatcttatatttcaaagacatacttacgaaagaaacttttccatcactttttcataaaaaaatcgaatatatatcttatatcttaacgacatacttccgatccatagagatcgtcttattatatttttccttacaattcaacattttggtgattaagattttttactatacctaaaataagttttttaattacaattcaacattccttactataccttaccaccaaaatgttgaattgtaataataacactcttttaggtatagtaaggaatctttacaaaagaattcaacattctttgattttttcacaaaaattagtaccctttcgtaaccaaaatttcgagataaatttttgaaacttaactttaacaaaaaagatagttttgaaacttaaaacagcttatggtattttggaaacaaacccaataatttaggaaactttcataatatgaaactttacaattaaatgttgacccaaaacaaaatgactcgtcaaagatactatattacccctatagatattattattttttaactccatgcgtttagagttttcgtcaaacgaatctaatttcattaagaaatgtttgtggcttatagtaagaaatcggtatgaaaattgtattacgtggcgaataagattacaaggagggaaattagttgcagaaggggcaaaagcgtaaaattacatagaaaccagaaaggtcacacacacccaagtttatagagagcaaacgaacgaattctcgggaggagaccaacccatgtgtacacgctacttctctcaacaataacaaatcacacgcaccattaatacttcctcgacaacggaacgtgaacgcctttttttcactttcaaattcatcgatcggt

SEQ ID NO: 4148 - DNA, 3000 bp, Unknown
  misc_feature (1)..( 3000): cDNA_ID_1823084_gDNA_ID_1620686_Annot_ID_48465 3000 nt of promoter + ATG
gtaatgaagtatgtaagattagtttttgtggtgcacttctgtctcatctgctagatttcatagtatttctgttgtccatgtctcacagatattatggtggcaatgagtacattgatcagttggagacgctttgccagaaccgggctttggcagccttccgcttagattctacgaaatggggggttaatgttcagccgttatctggttcacctgcaaactttgctgtctacactgcgatacttagccctcatgatcggatcatggtaaagaacttttgcactcttcatctccgctttacttgtgtgcttgatatagattgaatataatggcttgttttatacgattagggtttggatttacctcacggtggtcatctgtcgcatgggttcatgaccgctaaaaggcgtgtatctggaacttcaatatactttgagtccatgccttatcgacttgatgaatcaacaggtaatgcatttcttatgagaagggtctctgaaactacttttgtatgaggctatttcctgatgtctgaatatttgaacaggcattgttgactacgatatgctcgagaaaactgctacacttttcagaccaaagcttattatcgcaggagctagtgcatacagccgagattttgactatcctcgcatgaggaaggtagaaacacaacctgatccttgaaaacacctttcatgtttctgtctacttttggctttcaaatataaatctgttatttcattttcctcacaatttgtatgaatttctgaagatcgcagactcagttggtgcttttctgatgatggatatggctcatatcagtgggcttgtggctgcttctgtggtagctgacccttttgagtattgtgatattgttacaacaacaactcacaaggtatgtatgttccgaaatatgaaacatgatttccatttgtatttagacaaaaagcgtttccagattatctgttagtaacacacttttaccttactagtctttgagaggtccgagaggtggcatgatcttcttcaggaaggatccaattaatggggttgatcttgaatctgccgtgaacaatgctgtcttccctggtttgcaggttgagatattcaccattatttttagctctcttagataattcttctcccaacgtgattaaaagttgtctgaattgtatatttgaagggtggccctcataaccacacaattggaggattagcagtctgcttgaaacacgcacaatcaccggaattcaaggcgtaccagaaaagagtacccacccttttacttgatcattaagttcttctgcaccggataaagtttgtaaattttgcttctaacaagaatcttttgctgcttgtttaggttgtgtctaactgtagagctctagctaaccgattggttgaactcgggtttaagctagtttctggtggcagcgataaccacttggttctcgtcgatcttagacccatggtaagtttacaaactgtattaatggcttgaataaatcaacttttttcttaaaccagaaaatcacttatgataatgcggtgtcagtctaacatttttgttgtggttagggtatggatggtgcgcgggttgagaaaatcttagacatggcatctattactctcaacaagaactctgtccctggtgagttcgtcctcctactctcggtcttcttcttcccatttgaaaagtcaattctgagagaagccctcttactcttttacaaaacagaaatgaagtcgataagtagaacttgtagaacacaactgttaaagaaatgcttaattgttgttatagcaaaatcatcaattgctatatttatatgtttgattcccctagagtagtgaaattgagacagtgttgttgtgtatgtgaaatggtgaaacaggggacaaaagtgcgttggtaccagggggaataaggataggatcccccgcgatgacgacaagaggactgtcagagaaagactttgtagtagtggctgacttcatcaaggaaggtgtggagataacaatggaagccaagaaagccgcgccgggttcaaagcttcaagatttcaacaagttcgtgacatctcctgagtttccattgaaagagagagtgaagagtctaaaggagagagtggaaaccttcacatctcgttttcccattcctggcgtttaagctataaacacacacagatatgctcttgttgtaccttaattattcacctttttcatctgtcttttagggtttttacttgcttgtgtcccaagtttaaagttacagttgaatcgagagaaattattttcaaaaataaatttatttgtggaacaatgattcgtctatgttcccaaatctcaatcaatatttagtataatcagttgttgtgaaagaaaaaaataataataatttgaaaaattgtttttagcgaagagagcaaatatttcgcgggatgtggcgaatatatctcacccaatctttctctttcatgcgttttttttgttgccttctccaaatattcatctctgcctcctctcagggatagactctctctctctctctctttctttctaaaactaaaacaaaagaaagagagagatcccaaattcaacgataacagattttatctgctttttttttttgtttcgtttcttctccctcgctccccaccggattatatatctcaccggaaatcggatctctcacgttggtcgatttttctattacggcggcggccatcgctttcttcttctcctccaggtgcgtgcgatcttactttcttccttgagactttggtttacgcatgcacctctgtgtctctgtctgtacgtacgtcattgatttcatttcggattttctcctttgtttgatcgatttgtatagttaaacaacattaatatggaaactcaagtgtttttaggctttgattcttctacctttccattataatcatctctgttgttaatttcattgcatggatccacacacaggaggccttcattggtattgctatg

SEQ ID NO: 4149 - DNA, 945 bp, Unknown
  misc_feature (1)..( 945): cDNA_ID_1839258_gDNA_ID_1620686_Annot_ID_48466 3000 nt of promoter + ATG
atacaaattgcataccaagcagaaccgttttgtcctaaaccaatcatcacactagacgacgtcgtttcacgtgtgatatttaggtggctgtcccgttcctggaacccggagctttttttgttgtgatatatcccgtaaaaccctaaacatagtcacttcatcgtctcctccactgtatcattcaatctctgtcttccttctttttagcgacctcgtctccaaagctcacaaattttctacctttccggtgagtgttactctgttctcgtttcctcgcttgtctctttctgggtttttagtttccgaaagattttcctttcaaaatccgtttttgaatgcgaattccctctgctgtatctattatatttagtaatttgatgtattgtttggttggtatgagctgataaagttcaacacgtttgttgttcacttttgggaaaatttgcgataaaacaaggatttttttacaattttgacatatatatatatatatatatatatatatatatatatatatatttgagacgagaatatttgttcagatatctactgagtaaaattagtggtctctctgtttattgcgttcatgtgacatttggaatttttgagtctaggagtagagagaaagatgcaagcttgttgtggtggtaattcgatggcttctcttcagcaacctggacgggttcaaggatctgtctttcccccaattatgcctccagtgaccaaattttctcagcagttgaagttcaatatttcaaaacctttccgttcttcatttctgaaaagaaacctggtctctgaaatgagagcatcttcagtctcgctacctaatgtcgagataagcagtaagatagtttaagtttcatttccttgattatgttgatgatgtgaaagatatttttacttgtttcatgcgtggttttgatttctttttactttttgatg

SEQ ID NO: 4150 - DNA, 1335 bp, Unknown
  misc_feature (1)..( 1335): cDNA_ID_3043238_gDNA_ID_1620687_Annot_ID_48467 3000 nt of promoter + ATG
gaattcaccgtcaagtctccgacggtgtcgtggtacatcaagaaagcagctggagtcgataaaggaagcacacgcccgggtcatttgtcggtgacgacgctatcggtgagacacgtgtacgagatcgcgaaggtgaagcagacggatccgttttgtcagtatatgccgttggaatcgatttgcaaatccatcattggtactgctaattctatgggtatcaagatcgttcaggatttggagtgattttagggtttctgatgaaagagtggaatcaatttgcttctggtaaacgtctttgctttgagtagtaaagtataaaccatgaatgaatttcacagattgttttgtgttttggtgttacttccattgtgttgtttgtttcaatggataattgagctccaaaagctttccaaaatcaaaatagatattgagtttgtttaactttgatcgtttgaataatttggacagtaaagacattgcattgttgttgttgtggatgtagaaattgttcgtatgagcaaagtattctaaagtttggtcctttaacttgatatatcagattccatggaagaagttttcctctgtaaattcgattttttcagagaattgtgtgttcatagctcagtgatttgaaggaacaatgggggtggtctgaaatggcaagacataagtaggatcttaaggaaacaacaatctcaaattaacaaaactgaaagcttttgaattgagttgcttgaatcttcttctgcaatatgttttcaagtgtcacagctttgtttgtagttgtatgtttggagaaactagaacttttcttgtgtttcattggagattagtttggagtctgtaatcgagccccaagcttatgagttatgactatcaagctcgatgaaatgtccagctcgaactagttgcttttgtgaccggatctttaaaatttgccgtctgtctatggaagtttttgaaattttggtaccatatcgaatgtttttggtcaagcaagacattgacttggcccttgggaaacaataagacagagacacctgaccggagcaaagggcaaaatagagaaatagggaaaaaaagtttaaatcgggaaaatctgaagcaacgagattgattaaaaaaatcacagaaaagagcaaaaagtggagagggtcttacgtttcagggccacacgcaatctgagtgccattcctctctttgtctttctctctctctttctctgttctaagaaagggaagctctttgtctttgtttgggtccttgccaagatccaatttttacgatcaaaatcgacccggtggaattcagacacgtcttttagatagagatatg

SEQ ID NO: 4151 - DNA, 3000 bp, Unknown
  misc_feature (1)..( 3000): cDNA_ID_1823210_gDNA_ID_1620687_Annot_ID_48470 3000 nt of promoter + ATG
agaggaagcagcatggtggaggttcttctggaaataataatggtgagtctgaggtagagactgaagttgaagcattgaatgagaagagagtagtgaggccagagagtcttcttggtcttccagatggaaatagcaacaataatgggttagggacaacaacagcaacaactactgctcctaggcctgaagatctttgctttcagagccctgagattagctcagaccttcacttgctagatgttctatcaaacccaagtaagtaacaaagatacctttttagttcacacgtaactgaaaaaaacagagacattggctttgaagaaatagtcaagtaagttgtgtctgtctcagataatttcttgtgatttgtgtttgtaggggatgagcatcttgttggaaagatgggactggcggaaagttacaacctttatgatcatgttgaagattatggcatgtcaggctgattgaatacaagctgaggaaacttctaattatcagagagatcaatgaaatggatttggtagtcagtcataagcagtattagacttttgtttttcttaaattgtttctttcagggcttattaaagaaacaagtagtttatcttattaatcattttcagagaaacatttacatggattgttgaatcgtcttgtgatgcttgctttgataatttctgcattcagaacgatttttacatccttaaatgaattatactgtaagaaataaaaaaattccaagagaaaaacatttcaattcaaacctctccagagttgaaaacatgcaagtctaacaaagttttgtaatggcctttctctatttcttcctcattcacattgtgtaagaccagagtctgtataaccaaatcctcccaatcaatttcagatcctttcttccttttcttcttgctatgttcaagctccaaagacaacgcaccttcactaacattgtcagaaggatgttgtattgcattaatccgcaacttagctgccttaatcttttctcttcgtctttcaactgcaacgcaaccctttatgtaagaaggaggcaaagcttcaagccctacatctttctccaacaagtctttgagcaaaagccttttactcaattccgatttccctttccaccaattttcagttgacaccattccaaaaacagatctcctttgccacatactctgactacttccctgacttcttttcgcaagagtcccaccacaaactcgatcctcaaattcattatactttgtagacaactgattctccgatatattatcatcatagttacataaactaagctgacgttcaccttctacatcaaaataccgagacatagtatcttgacgagcatcatcatcataacaatacatagattctttgcttaggcagtccatcactaaatcctccacacaaaatccatcagttctaactaattctttcccagtcccttgttttctctttttcatggacttggcttccattaaagcaaacaaagttcctgaatgtttcaaaacattcttcacagtaacatctttcgcccaaggcaaacccacctcttcagcaaccttcacaagcttctcagataactctttataccgcgttttacaagtagtcaacgaaacactagcatctttcgccaaatcatcaatctttaccttcacaccattcacttgaacaacaaacgccaaaacagccacaaccaaaggcattggtctcctccccgtcgacaaaaaccatttcaacgcacaattcatcaggaaagtcccttgctttattatcttctccttcttatccctatcaacatcagtcaatctcggtgaattagtaaccgtcttggtaaacaaacccacaagatcaaactctcgcaattccaaatctagatgatccacaacacgcttaatcataggccctaactgatgcaaatcacatccaacttcataagcaacctcttccatagacaaaacacctttcccttcttctcttaccacagcataacaacaagctccaatcaaaatagggaaccactcaccttgtccaaattccccatcagtaagcttactaatcatactcttaatcacttcagttttattaccaagattcaatctttctgttgtctcctcaattaaattgttggcttcatagatcttcttgtctttataatcaagaacagagcctctaccaatggtgcctactcgtatatatgtaccttgaggtcctcttatgccgccaagttgtgcctcataattatcatactctcgtaatgtcccacatccaccgcaatacgaattccccgtgtcttcgtcgcgttcaaagttgcttccattgcatctcttgcaacgcatgattcaaaccgaaagcttcacactttaaattacgggtttttttttccgacaagcagaagaatgagattcggatcgccggcgaatcgagaagtactggagagagaaatcaaaactaattaagatttgacctttccttaaaaataagctaggtttttatattgtcgagatgaaaacggcatgatgttaatatgaataaaacaaaaacgccagggtgttttatttaggacgccacacagtttgtattattttctctcttttggctttttgttgtctcctccaccatagtgccgtcttttatctctttaccggtaagagaagccggtttcagatttgatcaattcgaagaattgtggctttcgttcgttgggtgaatccttgcttcgtcctttttgatagattgctactgtgttttcgaggaagttgtgtggagatagttagagagatttatgagatttcaagaggggttattataacgcacgcatggtgttcgacggaaagccgcagagaagttttgttgctatccgatttgactgagactcaaagtttgaaaattgttacttgggtattgagaaagctaaccttgggcaggttcgtatatgagttgggagtaaaacgacggtgatacatttgactgtttttcaactaaactagctttgaaatg

SEQ ID NO: 4152 - DNA, 3000 bp, Unknown
  misc_feature (1)..( 3000): cDNA_ID_1807575_gDNA_ID_1620687_Annot_ID_48472 3000 nt of promoter + ATG
aatagaatgggttgtatgtgaaagcaacaaccaaagttagacccatcctgaatatatcattcctctgatacggtctctttaactttgtgggtttttttttttttccttgaatagcttttgttttatatattattggatttctcaactttatttatccactttgaattgataactacaactctacaagctacagccatcctaacgaaaactgaaatatcttattctccttttaaagtgaaacgttgttctcgttcaccatcaagaaggataatatatacaacaagatcaagataagtaatactagtgaaacggtttctgtaatgacattagaaaaaccgagacaccaaaaaacgtgaaaactttaacagagattcggttattagtgcgaagttcgatatttgatcaaaatcaacacatttgtaacgtctagatggtgagtaaacagcagcacacaatgacacacaaacaaaaaaaacactaatccattatacaacaattgatcctaccgtcaacctggtgggctgagatgggctgttaggagataataaatataggcctggataaatcattttttaagtactggtgcaataagtaagttgtcttcactttgagttcaagttttgttcatactgaagcttttttctttttcttttcacaatcctactatatatatacgtttttaagtaagattcaccgtatatatttattttctttggtagggaaagattcagcgtataataataattagcagtggtcaacagggtaaaaaacaacagtaagtagatttgtaaaccgggattaagaatatagatttcaatgataggaaacagagaagaaagcataaaataaggatagaagacaagagaagctataggtacaccaaactctccaatctaaaagaagaatccaaagaaagctgggccaaagagaatccaatgggttataatatggctcatcactaagtcagtcatgtaattaagattatgtatatatatatggacaaatttgtatgcaactattttcatctatatttaaattccttatcatttggtcgattgataatgcttacgtaaataatgtcttgttctggatatttccgtttgtgtctctatattgtcccggtggttgaatgttctactcctagacataaactagaaaataatcatctaatgtataattttaaaaataaatgattattatactggtaaattttttaaattaatgagctttgttagtaaaaaatctcaacttaattaatcaaaaaatcatctaatgtaaattattcttttctgtaatatatatatatatatatatatatatataattcaagtattagaatatttaaattttgtgagtattaatctaattttcctatcatctaatgacaataaataaaatgtatctatatttgtgtgaatatggactttttggtatttagatagactgcttctgcttggtctcgatacttgacttagggtcgcacatgcaaacctcattattttcttccataatgttgacaattaaaaaaattaccgaaacgaaaacactttccggaaaaaacgatgaggcgttatatcatttaaagaaaaaacgacgatactaattaaataaacaaaagttccgataatttttacgtataggttacgaagacaatgacttgaatagaattgtgaagcaagtataaatttcaagttttggctgaaaaattaaagtaataatttgtgtattagtgtaaaaaaaaaagtcacagaattaagtagaagagctaattatttacacgttccgacaaaacactactacgcccccgactacgatacggcatgagtcatgaccacatattatatttttctttatcttcatgtttttgtcgaccatggtcacatttcattgtttggcctggttattcgacagagatcaattttattggcaattaatgagtcagattagatcatattaaaatctaagtgcgcccgtggaacatgggcggcggacaccgaccacctacaaattctactgtttaaacgacacgtggaaactatttattttctttttgggtcgccgctccttaacttataagtcctgactggcccaacaattttttttttctttttggtttttcttaaaggtttcttattgaattagatgatagggattgcaaaagacggtgaagctaatactcttctatagaataattgagaaaaatataacctagaatgtgtcagaaaagttagatcgcaaccaaaatttatcaatcaacggaatgtcagttaatcggtcaggaaaagaggcaattaaaagtgtttatttattttgccacaagtgctctttatcgcatttttaaaaagttgtataccaccattttgactgttgacccaaaaatataacacaaattggactaaaaaagcataaggaaaaaacttttcggtgtaaacaaaatacataacttgaagaatggatattgaaaagaaaaaagtaattcagtttcttgaaaagtaccaaccaacgactataaaaaaaaactaacaatctacttcattgatacgatcaaactagctgttaatatttgtatcaagtcgattgcatccagacatgttatttccataaaataaaatagcaacggctctctccaactataaatcaaataacatttagattatggtaatgtaaatattcagatatggaagtagccgtttaaccgtatgtgaaatctcaaacggtcaatttccaaattaggaactaaaataaccgttggttaaatagtttcctttaacgattgtcaaagaatcattaccgtcttcttatttgtcttttcctttgtaatgaaactatatattataatttcaatatagaacaaaagaataacataaattaagttttttttgtccttttctgcctttacctttccttctactcccgaaaaagcactgactttgctctgtttccttcgttcacacagagaaagagagaaatcttctgagcgaaattctgacaaaagagatg

SEQ ID NO: 4153 - DNA, 3000 bp, Unknown
  misc_feature (1)..( 3000): cDNA_ID_1957076_gDNA_ID_1620687_Annot_ID_48475 3000 nt of promoter + ATG
aagcctatttgttcacaattaggtaatcttaactcattcactttacatagtccattgctatttttgtgccattgttgtcaaaatttgacagtcttggagtcaataagacagtaacactatataatctacaattcgattcaagagacctaattctaaaaaaaatcaatctgttatgtgaaaaatataacagcaccaaaaatttttaaaacaaaaacgttccgaataatgaatgagtcaaaactggcgttacctggaaagacagagaagagtaggaaaccgaggaagcgagtgattaaaccggaacacaaagatacaacgccacgtgccaaaaaccgacccttccgagatctccggtcgccggaaatcttccgaacgaaacagaggcttcgctttcttctctacataacagcttttgctcttgaaccagaactctctctcaatctccaccgattcatagacatgcaaactcctcaccatctctgcattaacaaaacccatagaaacaaaataaaaaccatttttcaatccgacccgagtcattccgacccgattcgagattctagtcagagttttgacttacctttgcggatgacgctctggaaaacggcgagtgaggttaaggaatgtgccatgtccgaagaagaccaagagtcgcaaaagcagaagcccaagattttaacataaaaaagttttattaatatatttttctttttttccttttttagtgtgaaaaatctgcagaagaatccaaggttttatgtacttgaagcgtttgtcattaagtgaaaaggctccaagaaaagtaggttaaaattttacccttggtccaccatcgaaattaccaaaaaggcagaatattccggaacgcacgtgtaggcaagcggagcgtgcgagggtagttatgtaaaattaacagtgggaagcgggttgcaccgaaccaagcccatgtagctaaacactcacacgcgcgacgcatgtctgaaaagtggtaattgaattttgtttagaatgattctacagaggttgaatttggtaaatgaatcagaggaatattaagcatttgagcataatttccaatttggtcagattatgatatatgtaaatatgtccatgattcattttctgtttttgggttctctttgttcatttattaagtcatgggctgaagttttcatattttaagtcatgggctgagttctcaaggactaaaactggtattgatattatgatctgttaaaagccaattcatttaaggtgttcaaaatctaaactgaataattgcgttaaattaagccggacatgtttcaatcaaaagtcaatagaatgtgtcaaaatactctgggtacttgggtagtattagtaacattaacttacaaggatttttctctatataaaaatacagagtactagttttgattttatctgagtgagaactttctaataaaactctaatcgaaaacaattaatattttgtataaaatggagtgtagaacctaaatattttgtattgcttggatatatagttttttttcttcttaacatggatatataagttctatttcgtacatatttcccctaattttaatgttgaattttggaaaacttttgttggatagtgacatgaagaccctaattttaatcataacattttggaaaacttgattgggtgagtgatatggaggtgatgttaacgtatgtttggtatcaatagttggtccaattaggcccaaagagtcaaaaaaggtgcccaagtgttgtcaaaagagaaaacaattaagaatagggcaaagcttggccagcaagatttagtggtcatttcctagaaacgtgtccaagaatttataaagatgggttgtcttataaatacatatcgttcacgtaattacctgagatcaaatcttaatcatatcattcatcgtatatagactccaaacacgtttttcaaactcctatgatcatgtgttctctctttgcctccgtctttgattgctttgttccaaaatcagactcaaagattagctcaactgatgagagtgacttgaaagtcctgtcctcaaagaaaccaaaaagcaaatccccgagagctccgattatggtgtcttactttcccgccggttcaaacctttcgcgtctataagtgccaaatagaagagaagagaagatgaagtattgggatgttgattttgatataaacgaaagaagtttttggttgtagacatgttgtatgcgcaggctttaattttatgttttatttaattatgtacaaatagaccatttagattgatagcatcatatatatgctttgtatttaagaccaaataaaagattaatgtttatatacatgcgtaaaaatgttaagagcttagttagtatcattttcaaaaactgattgtcacttgagcttttatttttcttatttttttaattaagaaaagttgtggccctcaaaaagttacatggaatcggaacaggaaaaaaaaaatgtcgaaaactgattaatctaggcaacgttatcgcattttcatatcttacaaatccctttttcaattcagatttggtagaaatgcaaggagagttccatagtgtatatgtaaaatttgtataaaacgtctagaagaattacaatgctgaatttgttggaagctctgtttttctctgcttagacgtttccaacgtgttttgggtttctctgatcactgtaaagcctaaaccacaagagaagaaaaaccacgaagctttgggctttaaggcctttttgggccctagccacaataatggaagcctatcaagaaaagacaagacaagacaataagacagaagaggacaagtgtttaaagtggaagttatctttctcacgtggtctaaagaaaggttaaaaaaaaagagggaaaaaaaaaagaagatgagagaaagcaaagtgttgaagactttttagaaagcagaaaaaaaagcagagagtgtattcaaagtcggaaagaaaccctaaagaagaggattatg

SEQ ID NO: 4154 - DNA, 3000 bp, Unknown
  misc_feature (1)..( 3000): cDNA_ID_1823186_gDNA_ID_1620687_Annot_ID_48479 3000 nt of promoter + ATG
ggtatgaaatgattttagagtctttattgtttcattctctttgaattaattcttgaaaggttttgtgtataatactgtttcttttgtaattctagataaatattttcattctatatatatttttttaaagtctatgtttacagagttgatattggtaaaaagtttgagaaagtttcatacaaaaagaggataatgatgtcgtttttcaaagattggtgaacatttgatggctctgagaagaatattttattgccaattgctattttcagatttaattatagtgggatttggacaaagtattatcttcatttcaatcatttagatcctgacaaaggtttccttttatgatcttacacattcatttttcctctgcattatttgcatgcactggaagttgtatgttttttgtttactattcattttgatgttgaatatttatataaatttatttgtactttttcacattgttgcagattaaaatggtgttaagaaataaaagttaatattaggtcctttaacaagatcttccttttcttcattgttgcaaaacattactaattcaaagaatcaacataatgtgttagataaatatatcaaatatgaaatatgaaaataataactatactatgtgttatagtaaattattaaatagtatgaaaaaatctttcacttgggtttgtcctcttcctcttcatcttttggtggagatttattaagatcgaacttggcaatacatccagattcagtcgcttcctctacttgctccacaggttccacattcaaatcaatacctgaacctctcccaccttcagatcctggcgcatcaccaccaccactgccagaaaaatcaccggaacttcttcctcctaccgctacaccaccagaacttcctcctccgacagtggcaatagtaaaagcagatcttagcccgggaatcacaaacctttcagcccccgcagagaatgtaggaggaggaagaaacccttgatagtttctatctctatgagccctcatatgcccaaacactgccttccacgaaccgaaacctcttccacagatatgacaaaccggtggtcctttcggtggatgagtcaattcctttgctttcttcttcggctttttcgcttctccttcacccaaaccatccccttcgtcatcggtttgcgtagatatccttggtctactctttttcttcccaccactcccacttccctcattcattcctttcataaccgcttcctctgccgcagccaaaatcaaccccgccgcaagaaccgcttgctcattcaaacgcgctttttctgcatcttcctcaacgacactactactctctccaaatattctactgctgatattcaaagcagggaggccgagaacaatttctctcatattggtttcttcatcgctccattgctcatcagattcctctttctcttcctcagtaacatccactttcgttttctctgggttcggattactcatactattttcgcactttagtctagggattgatgtttcaaaacgacattgaattagcccttatataaagttttctctgaaccatggcggttatgacagttaattcctctcccgccttttcgtttgaagatttgcatccgtcgtttgtgattggtccgtcctaaactctgatattacgtaaatttgggcttaatatcgtataaagcccattactagcccataagttattcgtacttggtaggttggttcaagagtttttcttgttttctgtttgtaatcgtttctcgtgcgtttttggtcatcgagattgcaagagtcgttgcaactgcactaatactattatgcatgtgacatccgacaatgacgtgacttgtaaacttttgttttgacatattttttctttatttattattacaataacattatcattttttttttttgggtggaaacattatcatttttattagccattctttatttattctatatgtttttactatttaaaatttaaacattgatgtataccggtaaacatagttttcaatgtcagaaggaagctcttgaagctatgtaataaatcacaaatacaacaaattgcaacaccaaaaaaaactaatgtaaccattgatgtgtgatatatgatatagcgaagccgcaactgtcttaaatattattttgaataatatctacacactagactctaactaaacgtttaacagttttctaaaaatgcagatataaaaagttatctaaaatatttcacatatttgaataagaaattagaaacacaatcaccttttgaccattctaaggaaattcaattacaataactatgaccagaatcatctagcctaatttttgatattctctaaattaaatatttttaaaaagcttgaccaaaaaaaaagaaatggcaagaacacttactacagagtcagcataattctcggtaacaataattcttaggaaagagagcaattcttagctctgtagtaaaacacagattaataagctaagattaagattaaagaatcaatatgttgactttaagatcttagagccgcgccttacggaggctctggctagtggtaacgagccttctttgtctgaaaaaggcaacaaaaaaaacacaaaaaaggaataataaatttgaaatgagaaagagagagccaccacacacaccacatggccaaaaaagttaccgttgggtttagacagacttagaaacaaatcgtttccttcatgatccaacggtcatcttaatcacctagccgttgctatttccttcaataataaaaaaaaataaaataaaaaaaggtagcaactttaattttaattgatttgatttaatttctctctctcgcttatttcatccccttctctgactcctactgattcattcaattgcatcagacgtatacacagagtcacagagagaagagagatccttcttcgtttgatgctcttcttcttcttctagattcttctccaggagcactatcaaatcgagtaaaataaaca

SEQ ID NO: 4155 - DNA, 3000 bp, Unknown
  misc_feature (1)..( 3000): cDNA_ID_1010997_gDNA_ID_1620687_Annot_ID_164663 3000 nt of promoter + ATG
caatactttggatttctgaaaagccagtttccaatttagatttcctggaccggtttaactatagttttagtcttttagacaagatcataacaaaaccgaaccgttatatatagtaaagtactcagtaaacaaaaaatgcatctttcttcttcctcttcataaacaaaactaaacatgatagttgcattatcccgtacatgatttctttctatgtatatagcagtagtggaagttattggcttcagatcaatggccctttactgtgtctgattgcttcaaaacgtgcagccaaaatatcatagtcaggcagttttgggtgaacctggtgaccgctcgagtcctgtctggactcaccggactgaggagcctgaggcggtgctcggtttggcgggagagaagaaacacgaccctgtgatggttcatctggctctgtctcttcctcgtagtagtctgactcatcaaacttgatctcagaagttgcaggaggaggaactgatcgagggttgtagctgtgtctcctcctcattgtttcttttgcttctgcttcggtattggtatactcttcctcgtagtcagattcattaatacccggattgttgtagctgtgtctcctacccattcctctgttttctgcaccaggttttgcgtaataggaacttgtttcggagtctcgtgattgtcttcttgaacctggatgatgatgatgatgatccatgtactgtgaatccttctggtgtgttgaatgatcagaagatacagagaactccttgttgctgctgtctcttctggtagctaataaggaggctacttgtgctgctgcaactgcctgtttggctaattctgtagctgcttccgctgctgactcggtgtcatgataatgcgtgttgatgctcatgctactagtcgatctgatgagcaaaacaacaataagacttcattgtttcagatcccttatttcaagctaacgactggaatggatacataccttggcactgctttggtaggatcaataggctcgttgatagctgcacgattaactggtaagcttgaagcgctaacaaacttacgtggcccgtcctgcaagaagaacacagcttctaagattctgattttgaataatgaaagaggaagttgagaggggagattaagagacatactatgctttcttcttgaggtttgagaagttcttgctctgtctctgtagtatcccaatcaacctggaattcctttgcaatttccttcatgattttcagtttgtattctccaccgggatttctaaccgaaagcttatcaatcaactacaaacgcacaagaaagaagaaaacaagttcgatttcatcttgcatctaaaaacgaatcacagttcaagttagactaatcagaaacatgaatgatttagttaccatccggttaacaccgcagctaggacgcaaatcagtagcagcagatacaaaatctttcccatatttcttcgcaaagatgtctctaagatctccaagctcaggaatttcagagcatctaggcgcagcaaaaatcaaactagcaataccttccttaagatccacaggacattgcctaaaagaaagccaaacacatacacatataagaagccaaactgaagcaaagcaaagagacaaatgaaaactgatagtagatatgaacatacttttgcttagtgatgatagtgagacgagaaacaataagttcacagaaaagctcaatgatttcgtttgctgcctgaatgttctgttcccttatcacatgctcaacctaaatttgtcaaaaaaagcaaaatcttcattgaattgaacgatccagggaaaactctaacaaagtgaaccaggaaagtgaaatactctgattcgagcagtggcatcttgaccggattgaagaagaacagcgatgtcacgcctcatttgcttcaccacaactaatctcttgttccttataagctttatacgagccacagccatcttcgccgccgttttgctttttgccgattgaaaaaaaaacagactttaatcagatacttacatcttagaaaagcccagatcggaaatttctcaaacacagatcaaagtttttgtttttttctacaaaattaagaaactgagaatacccagaactaagaagcatcaacacactaaaaaaacctaactttttccaacttcccaaaatcaaacacggaaaaaacattcaatacaagatttttcttcgcagtgtagcagattgagtgaatttaggaatctaagaagcatcaaatcaaataaaattgagtaccatttagaggagttaaagccacgacggaagagagaaagactaaacttcatgagcttcttggtctgcgcagaagctacttcggccgccgtcattttcttttcaccacagcgtctctgacacagaagaagaaagagatgtagaagaagacgaaggctagtgtgtgcgagtgtgtatgtaacggtccgctgaaattaggaaagtaacgctcttttagaggtcccacaagaacacaccgacttatgatagctggacttggaccatgtcaaaatatagccgttgtatcttacacacgttgccaaaaacccaacgagcagcatcctaagcaacaccgtggcttgttgattgattacataatgggcttagatgggctttggtaatgggcttcttttgagtcaaactaactttttaaaaacttttatcaatacagcgaataatttgaagatcttctcattaatagtagaaatcttattaggtaacaattgtcaattggattgtcgaccatattaggagatttgatcttatcttatctcattatcgatatcattttaattttcaccacaaagcaacaatttgatattaatcttcctaaattagtacactttctctgtcctataaaaaacgttatacaacattgtctatatcacatcgttttcttcaccaactctttctagtaagtctaaaaaagttatcaagaagaaacataatctttctacgacgatg

SEQ ID NO: 4156 - DNA, 3000 bp, Unknown
  misc_feature (1)..( 3000): cDNA_ID_1807632_gDNA_ID_1620687_Annot_ID_164656 3000 nt of promoter + ATG
tttttcttcttttcagaatgaataatgtttaacaatgtatcaaaatctttctccatcaattggaaaaacaagtttgttaacaaacaaagagctttgttatttgtttgaagtgattatgattgatgatgaaaaccgccttaaagaagctgcaggtgatctcatgttctctttttaatgtctcctttccctgcaactccctgaaactgaagatcctgttttaacaaaaaagcaaaattcaattcagatcccaaactatactcagatatataaatacacagttcactgtaggaattaagaaagtaagttaccatttggtattgtctctctataagcaacagctacattttgaaagaactctctggtagcatctgcatattcaatcaactagcatattggcacactacgaaagcctgagcaatggagaacaaaatcagaatactattttcacaatcaagactcaccatgctccattgtcatagatggatcttgctcatcaacaaacccgatgagttttgctggatttccagccaccatgcttcagaaacgcccgagagaaaatgtcaatttgagcaatgttcaaacaaaaaagctcaacgagattgatatttagatgcatgtcagtggtttcatacctatgcgaaggaacatcctttaacacaagcgaaccagcagctaccattgctccagcgcctatcttaatgttaccaagtatagtcacacatgctccaagaagagcaccgtcgcctatatttggatggcggtcaccggtttctttcccagttcctcctaatgtcacaccctgtaacatgaaaatataagctagcatttataacatcaacagttctttatagttttggagaaatgaagttagagaacggatttgtacatgcaaaattgagacacggtcgcctatcacagcagtctcacctatgaccacaccagttccatgatccaacaatattcctttcccaattcttgcagctgagcaaaaaaaacagaaaccaaagttattcagatgctagatgtaaaagcatagacaagctattagctatgaatctaaaatctttaccgggatgaatatcgattccaaaaacctgagagaaaccattgacatggatcagaggttaacgttgtacaccaagactataacagtaaccaaagaagttgtagaagttactcttacctcgcttactcggctttgcagtgccaatgctaatagttttcttccttgcttccacaacttatgtgctactctatacgcctgcagtgcaagatagccctgtggaacaaactattctggtaaaatacacatgaaaactcacttagcaatcattttatatcggtgtaagagatgttattgtctttaaatcagcaactatgatggttaagagactaccttcagatgtaaaatagccgaactatacgatagacaagcaggatctctgtctttgaatgccttcaatggaccaaaaaaaaaaaacattacactgcagtcacattctcagacaataatatcagtgtcaaaaggaagattcaccgatacgagatagcgtttttacctgaacatcaagacgaatcgagctttgaatacctctgtcatgtaccataacgttgcaaaatatatccataagctgagttgccaacaaggtagggttttggagacggttagctagaacaaaactcaatgcttgctctaaacagtcatgcgacaagatactagcatacaagaagctactcaaaaccggctcctcttctgcctgtaaaacacacaacaatattcaccattaaaggaacataaacacacacaaactctgttccttaacttgtccttcgtgtagttaatgaaaaattgacgctgaaaaagtagacgggtgagagaaatacgtaacagcaagaaaaatttaaaagctttaatcaagtagttaaagagacagagaaagcatttagtgagaattcgaccccacggttttgtcggattgatataaaaggtacacaagaatgtcattatcataacctttcaatgtagaaaatcgaagttgattaacaatatcaaagtttctgtctttgttgaattgaagtcacatatatgaaaaacgtataaatcaataataagaatatgattatggagcataaggagaaaacctcaagcttagcttcttctcttatagaatcccaaattgggtcataactagaattggtaaaatccagcaaaaccgggtcggccacgggattaagggttcctctagcgtaaaccgggaaaatcctctcgaaaggaaactcgtcaccggtctctccatcgtctctggcagaaaagttccgggagacaatcattggaagagaagacaaagatgacgaggaagaaaaatcacgattctcgccgtttatacaagccatgaccaaaaagagtgaagctattggtgaagagtgtagagaagatgataaaaaaaaggttaatgataaggaaactgagaaacccttttaaacacagtgattgattgtgttggaatcgaagtagcgacagtcaaaaagataaaagaaaaaaaaaagtaaaactgaagtcttgtgtttctgtcctcactgttttggaatgtttcatgcgaaatcagatgtggtctctctctctctgctcttgtttgtaatgcgtgtgaccgtgattcagtccaagttcttaataccaccaccattgcaagagaatccaaaactatttggaagtatcctttatctatattactttaaacgtaccacacacgaagtggacgtgaactttaggctacaataaaacatttctttatattatcataaaacaattttcatttttttacaaaatattattttagaaattacaaaaaaatgattgaacaaaataattttttttggaataaagctgattggccaaagaaataaaataaaactgacaaaggcataaacgctgcatgtaaatcgccgaaaacgaaatcgaccttcgttgctctgaaaccctaaaagaagctaaatctagca

SEQ ID NO: 4157 - DNA, 3000 bp, Unknown; identical to SEQ ID NO: 4154
  misc_feature (1)..( 3000): cDNA_ID_1823186_gDNA_ID_1620687_Annot_ID_164653 3000 nt of promoter + ATG

SEQ ID NO: 4158 - DNA, 3000 bp, Unknown
  misc_feature (1)..( 3000): cDNA_ID_3072688_gDNA_ID_1620687_Annot_ID_164651 3000 nt of promoter + ATG
aatcactcgcttcctcggtttcctactcttctctgtctttccaggtaacgccagttttgactcattcattattcggaacgtttttgttttaaaaatttttggtgctgttatatttttcacataacagattgattttttttagaattaggtctcttgaatcgaattgtagattatatagtgttactgtcttattgactccaagactgtcaaattttgacaacaatggcacaaaaatagcaatggactatgtaaagtgaatgagttaagattacctaattgtgaacaaataggcttgtaacaataacacattgtagtgttgcatagaattcgatcttctgttatctctgtattcggtaaaagaaattcatagatgttctaaaacttaacattttactaaaaaaaaagcacattgtagtgttacttgagttgtgagcatttttagcaaccaaacatgtttttgctctttttattgatagaaatcccaaactggaggacatccctaatttagccaacgagctcaagtttatctccgagttaaaaccatcaaagatttatgaagaagaacaatgcagtagcagtacagagggatattataactctgatctgcctaaaccacgaaagctcgttctgaaacaagatcttaactgccttcctgattcagaaaccgaatccgaggaatctgtaaacgaaaaaaccgaacattcggaatttgaaaacgataaaactgaacagtcggaatcaggtaaatctctttcttcaaatgtcaatagacttgccttccagataatatataactctaggccagttttaagctctcttttttttggtacaaggtccagttttaagcattttggtgattaatttcgggttattgtaaaaacacagatgctaagactgagattttgaagaagaagaagaggacaccatcgagacatgttgctgaactatccttagaagagctttcaaaatactttgacctcactatcgtggaagcttctcggaatctcaaggtcggtctcactgttttgaaaaagaaatgcagagagtttgggattccacggtggcctcataggaagatcaaatctctcgactgtctcatccacgatcttcaggtcttctctctctctctctctctttatcaatcctaatacatcaattcactgaaagaagcattgatttgttttggtattgattagagggaagcagagaagcagcaggaaaagaatgaagcagcagcaatggcggtagctaagaaacaggagaaactggagacagagaagagaaatatagtgaagagaccattcatggagatagggatagaaaccaaaaaattcagacaagaaaacttcaagaaaagacacagggcttctagagccaagaagaatcaagaatctcttgtcacttcctcttccacttaaagactttaggtcctttaacagtaacatcggatatattagttagttaggggtttctgtgaagcgttttggtatttagaaatgttagttacaagtctaacagatgatgctaagccatgtttgtttttggtataagaagttccaagaagagaggaactcttgtatcatgattttttgtggtcggatatcagaattgaatcttttattttttcttagtgcaattaggtagcaattaagatcgaatttctttatataatggtgaaagatcaaacccaaatcatggtttaggaactgatccaaattaacccatccatagtcaagaaaaactttcaaaagtgtgatgaccagttttgtttaaggctattggttatgtgtgttcttgagtggtcccagctcgtgctttgaaaatctacgacgactctgtccacacgacgaagaccatcaattaacgtgtatcgtacaaagaagttcgaagtctacaagtgtgtatacgtgtgtgtgtgatcctacgtcaatatttacgaaaatgagaaaatgtttttctttgtttcattttccatgcaactggcattttgtacgtggtcaagtatcattttgaagtcattttcagtgtttttgatcaaaaattttttttgttattttttggtgaagatcattttttttgttttaatattaaaaaagaaataacaatactttattttctgatctaaaaggcctatatatatatatttgaccaaacaaaaaaagatctatatattatatgatcatttaaaaatgaaaagtatgatgttttgaaaaaaggccaacttacgaacatctctgacaaagtgaagaaatttttttctcttacgcattcatataaagaaaaatatattctaattttgccattggagaattttggtgtttctaattgtgaaacagctctatagactatagtagaagtcgaatgactttcatatttgtggaaatgaatgagaaatttccataaagacacaaacgtccaagcactgtgactgagaggatgacttttaagcattttgctggcacaagcaaaagtctttttacttcctaacggtttcacatctctactattttttgaatgatgtggacagtgattaaaaaaaaacatgtgaaataaaattacaaataattcaaagatttccaaagtaaaaacaaaattctcaattatttttttcagatcacacgatcataaatagatagaaaaggctcttaggctatgattcttctttttggtcccatcttcttggcattttcgtttgtttttttttaatttcttttaaatgagaaagaaatgcataaaaaatgaaaaggtagaccaaaacccttcttcggttcacgctagcaacccccaattttcctccctttattttattttgttatctaaattaagtcaaaattattttgcaacccatcgttgcctctttcaatagttctaaactcgagcaataaaaactcaaataaaccaactgacttgagatccatatccactagctcttgtctgaattggtaaaacaagaagaagaagaagaagaagaagaagaaagagaaggctcattagaaattg

SEQ ID NO: 4159 - DNA, 3000 bp, Unknown; identical to SEQ ID NO: 4153
  misc_feature (1)..( 3000): cDNA_ID_1957076_gDNA_ID_1620687_Annot_ID_164648 3000 nt of promoter + ATG

SEQ ID NO: 4160 - DNA, 3000 bp, Unknown
  misc_feature (1)..( 3000): cDNA_ID_2140509_gDNA_ID_1620687_Annot_ID_164646 3000 nt of promoter + ATG
ttagtatcgtcgttttttctttaaatgatataacgcctcatcgttttttccggaaagtgttttcgtttcggtaatttttttaattgtcaacattatggaagaaaataatgaggtttgcatgtgcgaccctaagtcaagtatcgagaccaagcagaagcagtctatctaaataccaaaaagtccatattcacacaaatatagatacattttatttattgtcattagatgataggaaaattagattaatactcacaaaatttaaatattctaatacttgaattatatatatatatatatatatatatatattacagaaaagaataatttacattagatgattttttgattaattaagttgagattttttactaacaaagctcattaatttaaaaaatttaccagtataataatcatttatttttaaaattatacattagatgattattttctagtttatgtctaggagtagaacattcaaccaccgggacaatatagagacacaaacggaaatatccagaacaagacattatttacgtaagcattatcaatcgaccaaatgataaggaatttaaatatagatgaaaatagttgcatacaaatttgtccatatatatatacataatcttaattacatgactgacttagtgatgagccatattataacccattggattctctttggcccagctttctttggattcttcttttagattggagagtttggtgtacctatagcttctcttgtcttctatccttattttatgctttcttctctgtttcctatcattgaaatctatattcttaatcccggtttacaaatctacttactgttgttttttaccctgttgaccactgctaattattattatacgctgaatctttccctaccaaagaaaataaatatatacggtgaatcttacttaaaaacgtatatatatagtaggattgtgaaaagaaaaagaaaaaagcttcagtatgaacaaaacttgaactcaaagtgaagacaacttacttattgcaccagtacttaaaaaatgatttatccaggcctatatttattatctcctaacagcccatctcagcccaccaggttgacggtaggatcaattgttgtataatggattagtgttttttttgtttgtgtgtcattgtgtgctgctgtttactcaccatctagacgttacaaatgtgttgattttgatcaaatatcgaacttcgcactaataaccgaatctctgttaaagttttcacgttttttggtgtctcggtttttctaatgtcattacagaaaccgtttcactagtattacttatcttgatcttgttgtatatattatccttcttgatggtgaacgagaacaacgtttcactttaaaaggagaataagatatttcagttttcgttaggatggctgtagcttgtagagttgtagttatcaattcaaagtggataaataaagttgagaaatccaataatatataaaacaaaagctattcaaggaaaaaaaaaaaaacccacaaagttaaagagaccgtatcagaggaatgatatattcaggatgggtctaactttggttgttgctttcacatacaacccattctattacgctaagaatcgcaatagaaaatggcaattgcaaaatatatatttttagcttttatcaaaaagacaacaaatactaatgtttatgagtttttcttgtattttcatttatttatagatcaaaatagtcggtggtcagagcactcaaagaaaaaggcagcgtcatctcacaccgtccatctacatatcggacgtctctcgtgagaccacgttaaaaagggcagatcagatcaccaacttcatcttagagggacccctataacagattagcacttgccacgtgtactctattgacttgttttccacaacctgattcacataaaagagaaaagagtagaatatctatcaatttagctgatcttcttaccaaaaacaaaaaaatatgattaatctgatcattataaacacacaaaaacattgaatctttgttagatgcgaaaataatttttttttaattaattagattaaagtttctatgtaaatttttaattaatctggcctattgagctttcactctactcaaaaagagacctgcaaaagctccaagtcatgtgttggttggatgagttaataaggaccattgtcctacatatgtactcttatcgcatggattaagatttatgtggtagtaaattattttatttttgatcaatagaatatccgcgacgctagagttttatcagaattcaaaaatacttttaattagtggatatttagatttcatttgcaggttaattacaaatttccgactagaatacaacaattttaattcgttttaaaatgtttattatagtttagatattattttgtcacgaatactatatatatgccacctatgtgttaaaattttcataaattaccaagaaaaagtatgattttgtccttttgaaatgaaaatcaatcaaaaaatttatatacacatttgaatatctaatgaattttagttgaaattttggaaagacacaattcagtaataaaatgtgtatttctttgattttttttgttttgtgtggtcaaattcgttggaaatacttaaaaatgtgttgaaaattgaaatgattaatcttaattacatcacatgaatattgactaaaatgaaataatagtatatgatatgttgccataaatgttatgatgaattaactttataattttcgccgtttataataaaccgtcaaatcaaaggaaccgttacttctcaacactcacttcttcttcttcttcttcttctttttcttcttctttttctttctatctctctctatcttctctctaatgtccgaggaattgaaccagtgatttggtgatctcaaagactctcaaaaatttcgtgtttgatctttgtctattttcatttgttcgcttcgggttataagttaacttcaccgttggataaaag

SEQ ID NO: 4161 - DNA, 3000 bp, Unknown
  misc_feature (1)..( 3000): cDNA_ID_1807575_gDNA_ID_1620687_Annot_ID_164645 3000 nt of promoter + ATG
agaatgggttgtatgtgaaagcaacaaccaaagttagacccatcctgaatatatcattcctctgatacggtctctttaactttgtgggtttttttttttttccttgaatagcttttgttttatatattattggatttctcaactttatttatccactttgaattgataactacaactctacaagctacagccatcctaacgaaaactgaaatatcttattctccttttaaagtgaaacgttgttctcgttcaccatcaagaaggataatatatacaacaagatcaagataagtaatactagtgaaacggtttctgtaatgacattagaaaaaccgagacaccaaaaaacgtgaaaactttaacagagattcggttattagtgcgaagttcgatatttgatcaaaatcaacacatttgtaacgtctagatggtgagtaaacagcagcacacaatgacacacaaacaaaaaaaacactaatccattatacaacaattgatcctaccgtcaacctggtgggctgagatgggctgttaggagataataaatataggcctggataaatcattttttaagtactggtgcaataagtaagttgtcttcactttgagttcaagttttgttcatactgaagcttttttctttttcttttcacaatcctactatatatatacgtttttaagtaagattcaccgtatatatttattttctttggtagggaaagattcagcgtataataataattagcagtggtcaacagggtaaaaaacaacagtaagtagatttgtaaaccgggattaagaatatagatttcaatgataggaaacagagaagaaagcataaaataaggatagaagacaagagaagctataggtacaccaaactctccaatctaaaagaagaatccaaagaaagctgggccaaagagaatccaatgggttataatatggctcatcactaagtcagtcatgtaattaagattatgtatatatatatggacaaatttgtatgcaactattttcatctatatttaaattccttatcatttggtcgattgataatgcttacgtaaataatgtcttgttctggatatttccgtttgtgtctctatattgtcccggtggttgaatgttctactcctagacataaactagaaaataatcatctaatgtataattttaaaaataaatgattattatactggtaaattttttaaattaatgagctttgttagtaaaaaatctcaacttaattaatcaaaaaatcatctaatgtaaattattcttttctgtaatatatatatatatatatatatatatataattcaagtattagaatatttaaattttgtgagtattaatctaattttcctatcatctaatgacaataaataaaatgtatctatatttgtgtgaatatggactttttggtatttagatagactgcttctgcttggtctcgatacttgacttagggtcgcacatgcaaacctcattattttcttccataatgttgacaattaaaaaaattaccgaaacgaaaacactttccggaaaaaacgatgaggcgttatatcatttaaagaaaaaacgacgatactaattaaataaacaaaagttccgataatttttacgtataggttacgaagacaatgacttgaatagaattgtgaagcaagtataaatttcaagttttggctgaaaaattaaagtaataatttgtgtattagtgtaaaaaaaaaagtcacagaattaagtagaagagctaattatttacacgttccgacaaaacactactacgcccccgactacgatacggcatgagtcatgaccacatattatatttttctttatcttcatgtttttgtcgaccatggtcacatttcattgtttggcctggttattcgacagagatcaattttattggcaattaatgagtcagattagatcatattaaaatctaagtgcgcccgtggaacatgggcggcggacaccgaccacctacaaattctactgtttaaacgacacgtggaaactatttattttctttttgggtcgccgctccttaacttataagtcctgactggcccaacaattttttttttctttttggtttttcttaaaggtttcttattgaattagatgatagggattgcaaaagacggtgaagctaatactcttctatagaataattgagaaaaatataacctagaatgtgtcagaaaagttagatcgcaaccaaaatttatcaatcaacggaatgtcagttaatcggtcaggaaaagaggcaattaaaagtgtttatttattttgccacaagtgctctttatcgcatttttaaaaagttgtataccaccattttgactgttgacccaaaaatataacacaaattggactaaaaaagcataaggaaaaaacttttcggtgtaaacaaaatacataacttgaagaatggatattgaaaagaaaaaagtaattcagtttcttgaaaagtaccaaccaacgactataaaaaaaaactaacaatctacttcattgatacgatcaaactagctgttaatatttgtatcaagtcgattgcatccagacatgttatttccataaaataaaatagcaacggctctctccaactataaatcaaataacatttagattatggtaatgtaaatattcagatatggaagtagccgtttaaccgtatgtgaaatctcaaacggtcaatttccaaattaggaactaaaataaccgttggttaaatagtttcctttaacgattgtcaaagaatcattaccgtcttcttatttgtcttttcctttgtaatgaaactatatattataatttcaatatagaacaaaagaataacataaattaagttttttttgtccttttctgcctttacctttccttctactcccgaaaaagcactgactttgctctgtttccttcgttcacacagagaaagagagaaatcttctgagcgaaattctgacaaaagagatgatg

SEQ ID NO: 4162 - DNA, 1335 bp, Unknown; identical to SEQ ID NO: 4150
  misc_feature (1)..( 1335): cDNA_ID_3043238_gDNA_ID_1620687_Annot_ID_164639 3000 nt of promoter + ATG

SEQ ID NO: 4163 - DNA, 52 bp, Unknown
  misc_feature (1)..( 52): cDNA_ID_2140554_gDNA_ID_1620687_Annot_ID_164669 3000 nt of promoter + ATG
ttctggttttacttgagagagtttttcaattctgatctgctgttttgcgatg

SEQ ID NO: 4164 - DNA, 3000 bp, Unknown; identical to SEQ ID NO: 3912
  misc_feature (1)..( 3000): cDNA_ID_2999332_gDNA_ID_1620687_Annot_ID_164668 3000 nt of promoter + ATG

SEQ ID NO: 4165 - DNA, 3000 bp, Unknown; identical to SEQ ID NO: 3936
  misc_feature (1)..( 3000): cDNA_ID_1011433_gDNA_ID_1620687_Annot_ID_164667 3000 nt of promoter + ATG

SEQ ID NO: 4166 - DNA, 3000 bp, Unknown; identical to SEQ ID NO: 3911
  misc_feature (1)..( 3000): cDNA_ID_3093332_gDNA_ID_1620687_Annot_ID_164666 3000 nt of promoter + ATG

SEQ ID NO: 4167 - DNA, 3000 bp, Unknown
  misc_feature (1)..( 3000): cDNA_ID_3072668_gDNA_ID_1620687_Annot_ID_164665 3000 nt of promoter + ATG
atcttgtattgaatgttttttccgtgtttgattttgggaagttggaaaaagttaggtttttttagtgtgttgatgcttcttagttctgggtattctcagtttcttaattttgtagaaaaaaacaaaaactttgatctgtgtttgagaaatttccgatctgggcttttctaagatgtaagtatctgattaaagtctgtttttttttcaatcggcaaaaagcaaaacggcggcgaagatggctgtggctcgtataaagcttataaggaacaagagattagttgtggtgaagcaaatgaggcgtgacatcgctgttcttcttcaatccggtcaagatgccactgctcgaatcagagtatttcactttcctggttcactttgttagagttttccctggatcgttcaattcaatgaagattttgctttttttgacaaatttaggttgagcatgtgataagggaacagaacattcaggcagcaaacgaaatcattgagcttttctgtgaacttattgtttctcgtctcactatcatcactaagcaaaagtatgttcatatctactatcagttttcatttgtctctttgctttgcttcagtttggcttcttatatgtgtatgtgtttggctttcttttaggcaatgtcctgtggatcttaaggaaggtattgctagtttgatttttgctgcgcctagatgctctgaaattcctgagcttggagatcttagagacatctttgcgaagaaatatgggaaagattttgtatctgctgctactgatttgcgtcctagctgcggtgttaaccggatggtaactaaatcattcatgtttctgattagtctaacttgaactgtgattcgtttttagatgcaagatgaaatcgaacttgttttcttctttcttgtgcgtttgtagttgattgataagctttcggttagaaatcccggtggagaatacaaactgaaaatcatgaaggaaattgcaaaggaattccaggttgattgggatactacagagacagagcaagaacttctcaaacctcaagaagaaagcatagtatgtctcttaatctcccctctcaacttcctctttcattattcaaaatcagaatcttagaagctgtgttcttcttgcaggacgggccacgtaagtttgttagcgcttcaagcttaccagttaatcgtgcagctatcaacgagcctattgatcctaccaaagcagtgccaaggtatgtatccattccagtcgttagcttgaaataagggatctgaaacaatgaagtcttattgttgttttgctcatcagatcgactagtagcatgagcatcaacacgcattatcatgacaccgagtcagcagcggaagcagctacagaattagccaaacaggcagttgcagcagcacaagtagcctccttattagctaccagaagagacagcagcaacaaggagttctctgtatcttctgatcattcaacacaccagaaggattcacagtacatggatcatcatcatcatcatccaggttcaagaagacaatcacgagactccgaaacaagttcctattacgcaaaacctggtgcagaaaacagaggaatgggtaggagacacagctacaacaatccgggtattaatgaatctgactacgaggaagagtataccaataccgaagcagaagcaaaagaaacaatgaggaggagacacagctacaaccctcgatcagttcctcctcctgcaacttctgagatcaagtttgatgagtcagactactacgaggaagagacagagccagatgaaccatcacagggtcgtgtttcttctctcccgccaaaccgagcaccgcctcaggctcctcagtccggtgagtccagacaggactcgagcggtcaccaggttcacccaaaactgcctgactatgatattttggctgcacgttttgaagcaatcagacacagtaaagggccattgatctgaagccaataacttccactactgctatatacatagaaagaaatcatgtacgggataatgcaactatcatgtttagttttgtttatgaagaggaagaagaaagatgcattttttgtttactgagtactttactatatataacggttcggttttgttatgatcttgtctaaaagactaaaactatagttaaaccggtccaggaaatctaaattggaaactggcttttcagaaatccaaagtattgtatagattcagtgcaaaactgtaaccggaacaattagttattaatcttcatactagggaatgcttatctaatttaatggtgctgcaagagtggagacgaaagtagaattcggacaaaaatcagaaaccaagatgaagatttcatggacattatacttcacaggggacaaatctgtgccttaaacttaactggcgcaatttggtggattagtttatcacagctcagcctcgttgaattcacaccttcaactccaatggactactactacgaatatgatagttgcaaagacaagagattcgtggagtattgtgaatttgtggagatctatgcattattaatcaactttgcgcaaaggaagcttatatcgagaggaccattggttttaaggtttttattagatggaagaggatttggcaaattgggttgaggttagttccttggaagacaaggctctcattgtagcaaaatcttttatttcatttaatgtcatttataatttattaacaaaaattggccgaactaaattaagaaaactttatataaatattaatatatatataatgtcattggtataaaagagacttttattaagaaggaaaataaattataaacttcaaaaagtgcatcttaacatttaattttttttccacttattgacacttttttggtctatatagaaatttggactagacaataaataaaaatattcaccaataaactaatcttagtcaagtcaagaagtgaaaattaattgttaacaatactttcctatataaagggtattgatatatt

SEQ ID NO: 4168 - DNA, 3000 bp, Unknown
  misc_feature (1)..( 3000): cDNA_ID_2140539_gDNA_ID_1620687_Annot_ID_164664 3000 nt of promoter + ATG
tagactcgaggacaatagtccgtgacagtctctctggtctcaccgagctttacagatgtttaagtgaagatctcttcaagtcttcttctgaaactcaacaagcccttcttaatggtgatggtttgatggaagagcttcttgaagtatcactgaaatacttagaggtttgtggaggagctaaggacgcagcttcgaggatcaagaagattgttgtcgagcttcagtctgctttgagaaggagcaagaaaggaggtgagtttagcctcgagagtgacgtggatgcttatgtggcgtctaggaaagagatcaagcaggagatcaagaagtatatggtaatgtcgaaagagacagatgcgtctttggagagtgtttggtgtgatggcgatgatcaagagatgagtgctttagttagagtgatgcaagagacgagtgtaatgacttgtttcgtcttacgctcggtcttctcgttcttgtcgtcgcctaaagggttaaagactaagaatcatcatcaccacaaaggttgggggattgttatgaagcttgtgaagaaaggaatagaacatcatcaccaggagaaaagagattacgagacgggattttcttgtctcgtgcttgaagctatggaatctgagcttgggaagctcgttgtgatgatgacaagggaagatcaagaagaagagaaaaagattagtgaagaagtatctgagagggttcaatgtgcattggttagatccgaaggtgtagaggcagccatggaagagcttgaagagggacttgaaggattgttcaaggtaatgatacaagctagagtctctcttcttaacatcctctccacttaaaatggatcagattcgaatttcttggtctggattggaaataagttagttgctacttgaccagtcgattggttttaaaatcttggtttggtttttgtttgtttgttcttgtatgttgtgagagagagtttaaacatgcgtccatgttttagaggatgtgtgtttgttgtaagtgtgtaacccgttcaggtgtgaaaaactcttgtaaagttttatgtacgtaagcatctttattgcacaaataaaagaggtgtcttttaacaatattttaaaaaatttaaacaacaaaatattaatagttaaatatgaaaggtctttaattttaagacatctttttcaaaaatgtttccacaaagacacttaagacacagtgtctaaaatttaaggacacacaaacattataatgttatatacttttatatatattaattttattcgtgggaagaccctctctaatgatgtgggatggagatgacctaaatatctattattttaccacgtagaacgataaatttaaggagagaaagacgaaatgcaaaagcactaactttaatgtttagaataggataaattactgaatagtattattttttcgtaagaaaagcaatttagctatatagcatagcgttgaagtaaataattaatcaaatgtcacaattttctcaaaatgaaaaaccaaaaagaaatgggctaaaattaaagaggcaaaagtaatcatattaaaatgtcatccaaaaattacataaacaaacaaaatcatccattgatatcgagaatgtcatgaattttgctggtagacttttgacaaacctttcttagaattgataatgacaggaacttttgttaaatgacccaacttaacattttattttcttattttccttagaaaattagtcgataaatctttcactttcttttgaaataatgaaccattaaaaatagaattcagtggctaaaaatgggattgagagtgagcgccacatacggtggcagtacttcgaaagaatttatttgtcttagtttgattcacacaattctcacttaagtaggaaaccatattaaacactagtacttttacaatttagttggaggcgttaggacaaacgcaataacagcctgtaccaaaacataattctttgcattttggcgtacaaaaactaagctcattttgcttaatcgatagtggagcttcatgatgcacagatgcttcactagtggttagagattgaagattaggacaaacgcaataacaacttgtagcaaaacataactctttgcattctggcgtacaaaaaccaactccattttgtttaaccaatattgaagctttaagattcagagaagttttttcagataagagacgtttcgcctcagcaatctgaactgtcacggataccatcactacaagatataaatgtagtaaacattagtaacacaatacaattctttataaccatatcattatactacaaaaacattaattttaccagtaaaagctaaaaggatgatgaaagcagacttggatgaaaattttcccatcgtcgtagaaagattatgtttcttcttgataacttttttagacttactagaaagagttggtgaagaaaacgatgtgatatagacaatgttgtataacgttttttataggacagagaaagtgtactaatttaggaagattaatatcaaattgttgctttgtggtgaaaattaaaatgatatcgataatgagataagataagatcaaatctcctaatatggtcgacaatccaattgacaattgttacctaataagatttctactattaatgagaagatcttcaaattattcgctgtattgataaaagtttttaaaaagttagtttgactcaaaagaagcccattaccaaagcccatctaagcccattatgtaatcaatcaacaagccacggtgttgcttaggatgctgctcgttgggtttttggcaacgtgtgtaagatacaacggctatattttgacatggtccaagtccagctatcataagtcggtgtgttcttgtgggacctctaaaagagcgttactttcctaatttcagcggaccgttacatacacactcgcacacactagccttcgtcttcttctacatctctttcttcttctgtgtcagagacgctgtggtgaaaagaaa

SEQ ID NO: 4169 - DNA, 3 bp, Unknown
  misc_feature (1)..( 3): cDNA_ID_3093287_gDNA_ID_1620687_Annot_ID_164638 3000 nt of promoter + ATG
gaa

SEQ ID NO: 4170 - DNA, 3000 bp, Unknown; identical to SEQ ID NO: 4156
  misc_feature (1)..( 3000): cDNA_ID_1807632_gDNA_ID_1620687_Annot_ID_48482 3000 nt of promoter + ATG

SEQ ID NO: 4171 - DNA, 3000 bp, Unknown
  misc_feature (1)..( 3000): cDNA_ID_1823172_gDNA_ID_1620687_Annot_ID_48485 3000 nt of promoter + ATG
aacactaccgtacctagtacttatacattcaatagattttcatcatcgccatttcacgatggtacacatcaaatcaatccacttttctaatcttttttttttttttgttacgtgtttattctaacatttttttttatgtgttttagaaaaccatattggatatttcgatcttgataaattttctctgttttggtattgtatacggcaaaaattacaacgtactcaattttgatgccaaaggagatggtcaaactgatgattcagaggtaaaatatgttttgactttattttctctctacccaaaatatgtgactttttgataaatacatttttcttgtaatcaattagtactattttggctattaatatttttaaaaataattatgttaaaaaggcttttctacaagcatggactgctgcatgtggcggagacggggacataaaaacacttcttataccttccggcaaaacatttttacttcaacctactgtgtttcaaggcccatgtaaatctagttcgataaaagttcaggtaagtttatgttatatatatagacctatcttattcatcatatatatatagacgactaatccacaaatgtatatgatgaataagtttatgtttaattaagaaaatcaatcaaatttgtattttctcatttgaagttggatggcaccatcgttgcacctagtgacaaattcgcatggtcggaccccatctcccgaatgtggatcaaattttcaactgtgtctggcctaataatcgttggttcgggaaccattgatagtcgtggttcatctttttgggaggtgacaatttgatatatcataatttatattaattttaaaatataattttgttcattgcaatatcaaaatcactgagattttttttttttttttgcagcttaatctgaaagcttctcaacgacctacagtgagtatatctattaattttactatacattttttggaaattttgtttctgaattctgattatgattgcttttaatttattattaaataaaccactttttgtaggcattacatatcagcaaatgtgacaaccttaggataaacgggataacatcgattgatagtccaaaaaatcatatatcaatcaaaacatgtaatactgttgcaatatcaaatataaatctttttgcacctgagacaagtcccaatacagatgggattgatataagtgactcgactaatatcaacatatttgactctacaattcaaactggtgcgtacttatctataaatcgctcatgcattttatcaacacatgaatactacaccaaacgaactataaattattcaactactaagttttactatagctccaacttttatgtatttgttaatttataatattttttagactatgaaatatagcatagtaaaaatcatttgaatttcaatgactaaattttcaggtgacgattgtatagcaatcaatagtggaagttctaatattaacatcactggaatcaattgtggacctggtcatgggataaggtaattcataattttaagcttacttgcacataaaaaagatatgacataatttattaaaattattatcggaaaacagtgtggggagtttaggagcaggtggagcagaagctaaagtgagtgatgttcaagtgacacattgcactttcaatcagacgacgaatggagctagaatcaagacatggctggtattttctttctttcttttatactacgtcttatagttacactaatattaatcattcaaaatgtgttacatgtattgttacttttgaatttagggtggacaaggatatgcaagaaacataagttttacggacatcacactcgttaacacaaaaaatccaattataatcgaccaacattatatagataaaggacgtcttacagaggtaaatacttttttaataatttataaatacaaatatatttatattaatactaattttgaaagtatcattaaattgtgaaaatatatgattgcatgtgtttatgttcaacaggaatcagcagtagctattagtaatgtaaaatttgtcgattttcgcggaacatcgtcaaataaaaatgctataacgcttaaatgtagcgaaactacacattgtgtagacgtcgttatggatggaattgatattaccatggcaaatggaggaaagcctaaagttaattgtcaatatgttgatggagagtccagtgacactgatttgatgcgagactgctttaaaaataacactagttcttgattgagaatgtacatcaatagtcaaaagtttacccacgttttcaatttctactgtcgtgaaatgatatttgaatgtcaattttttttattaattgttattactcatcacagaatgtctgtatgaaatcacacaatagaaatcaattgatgtctttcaaacggttgatttacagtcacagaatttgctgccttggcaatcaaaactaaatacttctgttttgttatatcattttttgtcttttaaggaagagaaaaacgagaaatatttaatcgcaactaacctgaagattcctccaattgtttacgcaactcttacttttaattttattaaagcctttgtaacataagacaagctagccttggttctttgaagcaggacacatttttagatctctctaaaccaaaattatatttatcgtgacacacacaaaaaacagttggtatcgaaacaaacgaacaagaaactgaatttaaaaattaagttgcgagacaaagttgtatagatgcataagaagaagacaagaaggaacatgagttccaagagtcactgaccataactgatgaatttattcatgttagaaacaaacagatcagattaagtgacccatgttcttcacacatgttcccacattgtttaacccgaggatcgctctgtttgtgagcttctttgcaatatatatagaaaccctcaagaaccctaatagagcatctcaatccaattaagagttctgaaaaaa

SEQ ID NO: 4172 - DNA, 3000 bp, Unknown
  misc_feature (1)..( 3000): cDNA_ID_1823154_gDNA_ID_1620687_Annot_ID_48490 3000 nt of promoter + ATG
gtgctttagttagagtgatgcaagagacgagtgtaatgacttgtttcgtcttacgctcggtcttctcgttcttgtcgtcgcctaaagggttaaagactaagaatcatcatcaccacaaaggttgggggattgttatgaagcttgtgaagaaaggaatagaacatcatcaccaggagaaaagagattacgagacgggattttcttgtctcgtgcttgaagctatggaatctgagcttgggaagctcgttgtgatgatgacaagggaagatcaagaagaagagaaaaagattagtgaagaagtatctgagagggttcaatgtgcattggttagatccgaaggtgtagaggcagccatggaagagcttgaagagggacttgaaggattgttcaaggtaatgatacaagctagagtctctcttcttaacatcctctccacttaaaatggatcagattcgaatttcttggtctggattggaaataagttagttgctacttgaccagtcgattggttttaaaatcttggtttggtttttgtttgtttgttcttgtatgttgtgagagagagtttaaacatgcgtccatgttttagaggatgtgtgtttgttgtaagtgtgtaacccgttcaggtgtgaaaaactcttgtaaagttttatgtacgtaagcatctttattgcacaaataaaagaggtgtcttttaacaatattttaaaaaatttaaacaacaaaatattaatagttaaatatgaaaggtctttaattttaagacatctttttcaaaaatgtttccacaaagacacttaagacacagtgtctaaaatttaaggacacacaaacattataatgttatatacttttatatatattaattttattcgtgggaagaccctctctaatgatgtgggatggagatgacctaaatatctattattttaccacgtagaacgataaatttaaggagagaaagacgaaatgcaaaagcactaactttaatgtttagaataggataaattactgaatagtattattttttcgtaagaaaagcaatttagctatatagcatagcgttgaagtaaataattaatcaaatgtcacaattttctcaaaatgaaaaaccaaaaagaaatgggctaaaattaaagaggcaaaagtaatcatattaaaatgtcatccaaaaattacataaacaaacaaaatcatccattgatatcgagaatgtcatgaattttgctggtagacttttgacaaacctttcttagaattgataatgacaggaacttttgttaaatgacccaacttaacattttattttcttattttccttagaaaattagtcgataaatctttcactttcttttgaaataatgaaccattaaaaatagaattcagtggctaaaaatgggattgagagtgagcgccacatacggtggcagtacttcgaaagaatttatttgtcttagtttgattcacacaattctcacttaagtaggaaaccatattaaacactagtacttttacaatttagttggaggcgttaggacaaacgcaataacagcctgtaccaaaacataattctttgcattttggcgtacaaaaactaagctcattttgcttaatcgatagtggagcttcatgatgcacagatgcttcactagtggttagagattgaagattaggacaaacgcaataacaacttgtagcaaaacataactctttgcattctggcgtacaaaaaccaactccattttgtttaaccaatattgaagctttaagattcagagaagttttttcagataagagacgtttcgcctcagcaatctgaactgtcacggataccatcactacaagatataaatgtagtaaacattagtaacacaatacaattctttataaccatatcattatactacaaaaacattaattttaccagtaaaagctaaaaggatgatgaaagcagacttggatgaaaattttcccatcgtcgtagaaagattatgtttcttcttgataacttttttagacttactagaaagagttggtgaagaaaacgatgtgatatagacaatgttgtataacgttttttataggacagagaaagtgtactaatttaggaagattaatatcaaattgttgctttgtggtgaaaattaaaatgatatcgataatgagataagataagatcaaatctcctaatatggtcgacaatccaattgacaattgttacctaataagatttctactattaatgagaagatcttcaaattattcgctgtattgataaaagtttttaaaaagttagtttgactcaaaagaagcccattaccaaagcccatctaagcccattatgtaatcaatcaacaagccacggtgttgcttaggatgctgctcgttgggtttttggcaacgtgtgtaagatacaacggctatattttgacatggtccaagtccagctatcataagtcggtgtgttcttgtgggacctctaaaagagcgttactttcctaatttcagcggaccgttacatacacactcgcacacactagccttcgtcttcttctacatctctttcttcttctgtgtcagagacgctgtggtgaaaagaaaatgacggcggccgaagtagcttctgcgcagaccaagaagctcatgaagtttagtctttctctcttccgtcgtggctttaactcctctaaatggtactcaattttatttgatttgatgcttcttagattcctaaattcactcaatctgctacactgcgaagaaaaatcttgtattgaatgttttttccgtgtttgattttgggaagttggaaaaagttaggtttttttagtgtgttgatgcttcttagttctgggtattctcagtttcttaattttgtagaaaaaaacaaaaactttgatctgtgtttgagaaatttccgatctgggcttttctaagatgtaagtatctgattaaagtctgtttttttttcaatcggcaaaaagcaaaacggcggcgaag

SEQ ID NO: 4173 - DNA, 3000 bp, Unknown; identical to SEQ ID NO: 3911
  misc_feature (1)..( 3000): cDNA_ID_3093332_gDNA_ID_1620687_Annot_ID_48492 3000 nt of promoter + ATG

SEQ ID NO: 4174 - DNA, 3000 bp, Unknown; identical to SEQ ID NO: 3912
  misc_feature (1)..( 3000): cDNA_ID_2999332_gDNA_ID_1620687_Annot_ID_48494 3000 nt of promoter + ATG

SEQ ID NO: 4175 - DNA, 52 bp, Unknown; identical to SEQ ID NO: 4163
  misc_feature (1)..( 52): cDNA_ID_1823142_gDNA_ID_1620687_Annot_ID_48495 3000 nt of promoter + ATG

SEQ ID NO: 4176 - DNA, 3000 bp, Unknown
  misc_feature (1)..( 3000): cDNA_ID_2993363_gDNA_ID_1620689_Annot_ID_48522 3000 nt of promoter + ATG
tccaatagttcaatcttttgatcgtcgttttgactgagttaattagagctagatcttagtcaatggctcatgttacatttattttcacagatccagaagaaaaaaaaattctgtctaagtaccagctaggctggttattggatagtgttagcgatccaagacactgatggaggcaaatcattgtaatgggctcatagttgctgttaatggatctggtgcttctcaaatatttcatttggttgcagtctaacacaagtttgcgttagagtgttagtggcaaaagctgaaagtttcaagcccttatggtgcaagattgatttatgccacagatcaaatgttgtggaagcggtgcgcattgcatcctttgtggatcaaaccattctctttgttcgaagaagtgtaaagaatgtgtcaagaattttggcagcagagacgtgactagtaactttgtagctaagttcatttcttttaggaacattaaagttggcccaagatttatttacttgtaggattttgttggcgttttgccatatcagctttatctttacctttttatggatgtttccatcttaaaaagtacaagatccaagtttctctctatgtagaaagatgagcttgaaattgatttcttatccaaaaggtgaaccatatatagacacatacactagactctttgctcaaggtccgtggctaagggggattttaaatttaccatttttgctagtatttaaaccatgagtctcagtctcaccattattttaacaatttgatcagcaaacatatagaagaacaatttcagagctccaaggctacatgaatttgcatcaagactccaaataattggttccagtttcagagctctgctctagatgaaaacaatgatctctaattaactcctttcattttgggtttcataatgacaataaatatgacaatgctttaaacaaaaaaaacatgtaaagtaataaatgaaaatgagcttggcagagtaattaacgcattattattagggagttgtaacgtacacgaatttgcgttaggcgaaaagagaatagtggacataaaactttgtcacatgctttgccatcacgcccatcaccttataaccatcgactctgaccaaaattattattttaaattttgtatttataaacaaaaactttgatgttgaagacgtctatattgatctcatttggcagaaattgtgaaggtaaagaaacaaagtagaaataaattgtgagaatgaggagcataatagtatcactacagctaaaccaggattaaaactagaaatgatttcaatttttagaaacgatatgatagagtggcaaattaactcttgaaaaaatactccatatgtttcacaaacaatgtcgttttgacactttactaaacttatacggtaccaaaaccgtgaaaataacgtcaatcatcatcaatcatttagagagaaattaaataaactattgtgtatataattgaattaaattaaatgaactaatacatgtatccaatatgatcatgaactgtactgtccctagttgagttccgttttatttcatcattaaaaacccaataacgaaagaggaattaaaaacatatatacggtgaacacgcatgcaagaaatttgtgcaataggtttacacttagcaggaaaagaggaacaaaaaacaattagttataataactgataactgaaataagtttatgacaactgaaaacaaaataaaataaaaactaacggcaaaatctaacattgacgacgttgtaaggaatgggtgctgaaatgtttttatacagacatttcaaccgcacggcatctccatattactacgtactagtccagtcaatcagtattctcacacgtgaaaaacgacactttgcgttttcacatctagataagattgccttttctttagatcaaattttcattttaccattaatcaagctataaaagtgaacatatttacaatatttacgatgatatgttatatatttagttcgttacatcatctaataagtttgcaatttcattttccaaacgggtaactagtaaatgttcaattcaatttctgtcaaattatacatgcgaattaggaaatgaagtttgtttatcttttctgcatgtgaaagtattatttgtttatcttagtgaacttggattgtgggatacattcattatccatccaaaatatgggattttttctgcttgactatttattattagtttgcttgtatatcctaaagtataggcatggaatcggcgtatttgattttgattccttttaaaccaataccttttacgatcttttcttattcatttccttgtttcttaagtcaagtttcagatacatacctaaacacaattgtggatcgttatggagtatttttacaaatttacgacaatatatatgcgtaagaccagaggacctataggtatgggtttcttaggaaaccgatataaattgatatagattatagaactacatacaaacataggttttacacattgtttattagttttaagaaaaaacaataaaatcatttaaaagaagtagtgatttgatattttttttgttttgctgtaaatgaaccagaaaggtcttatttaaggaaatatattaaaacttctacattaaataacagtttataaaccttcacagatagaatcatagaaaagaaggaaaaaaaaagtgtggtggttaggaaaaaatatacgatgtgaaatgtttaactacaacttgctatatcgaaaacctttacttgtaagtccgtaatcatcgaaacttaattcttgttagagaaaataaaaacagtgcagccaaattaccctaaaattacgtgaaacatctcatgacatgacattacgtacccaacttaacttccatgcaatatctataaataccctcatgagtcacatttcatgcaaaatcaagaaactctcaaaacccatttcaaaagagaaacacttctttaaaaagttttattaataaataatg

SEQ ID NO: 4177 - DNA, 3000 bp, Unknown
  misc_feature (1)..( 3000): cDNA_ID_4257546_gDNA_ID_1620689_Annot_ID_164699 3000 nt of promoter + ATG
atcttgtttaaatctggagttgatttttcaatatccgttagtccgaataattacgaataaatagaacgtgatttcaagaaaatcgttgattagtagcaatcttagaagcaaagctagaacgtgatttggtgatttgttttacaagttacctaattttagccatatggaccgcacatgaatgatgggcggtctcaaagcaatatttccaaaatggtcttttaataattggtctttttttccatttctgcgtaacactttcgtttgacgttttgtttaaatttatttttcagataattagtatacacttgctgttacattagctagctagccttcgactttatgcttttaggttggactcaccataccgtttaataatagtttcaaatcattatatatatatatatatatatctttttcctgtcaaaaaatattaaatctatcaagaaagtgaaattaggttgtagcttagttaccaccaaccccgcttccgcatggtcgttaaaccttatgatctttctaatttatatcttaaatataaatcggcaaaacatcaacaacccattagatatgtccctcaaactttgaaaacgattatccaaataaattatttattaaaacaagtgaataatacttctatataaatgggtttaagcctccttcattaaacacatctcacaactcactaatctctagctaaccatggcatttctagtagagaaacaactcttcaaagccctcttctcattcttcttattagttttactcttctccgataccgtcttatctttccgaaaaacaatcgaccagaaaaaaccctgcaaacacttctcgttctatttccatgacatcctctacgatggcgacaatgtagcaaacgcaacctccgccgccatcgtgagccctccaggactaggaaacttcaagttcggtaagtttgtgatctttgatgggcccataacaatggacaagaactatctctcaaaacccgtggctcgcgcacaaggcttctatttctatgacatgaagatggacttcaattcgtggttttcctacacgttggtgtttaactcaacggaacacaaagggacattgaacataatgggtgctgatttgatgatggagccaacaagagatctatcggtcgttggtgggacaggtgacttcttcatggctcgtgggatcgctaccttcgtgactgatttatttcaaggggctaagtatttccgagttaagatggatattaagctctatgaatgttactaagtagctaagaatgtgtgttttgtttgaaaattttatgttgacacagagaaatgtgtttacaataattaagttttttttttgccttttcttttgctgttgtctttttgtttatctataattattatgtgatttatttcaaggggataagtatttccgagttaagatggatattaagctctatgaatgttactaactagcgaataatatttgttttgtttgaaaattggtatgtacacagagataatgtgttactaataagtagtgtttttttttgtggcctttttatttggtgttgtctttttgtttatcaatagtcaattatttctgtcaaagaaatatatttttgggatgtctcttcttcattagataagaagatatatatgtttcttcttcattagatcccaagtacttgcaatcccattttatcaggccgatctaagctggaccaagtagaataatatataggtccattaatgatccatcttgccgaaagtggttgctaactttttttcaactggtcagtggaattgtgtataatccgttattttttttgtctttctctatttggggtatgggctatgaatttaagggaattcgtaatctctatatgaattttgaaggggttctcttgattttatggattcatagtataatggcccaacggcaagggcagatatagtgtggggatatcaacgctttgaacagaaatggtatggtttcaagataagtgaaagcttaagtatcagataaacattgattagctttcgcatatagtaaacaaatacaatgtcaaagtttgtacttatgataaagaccaaaccattttgttactaatgtatattccgagaaaatataacaaattaggagattcttaattaaaatatatatggtaaattaaaacatgttaactcgatgttaatatatgattcgattgttcataaagctctcattcggtgtcgtaacttgattgtattcatcttataagatgcaattatgtcaacaatgatcgatgaatggtccatactcgatataccaatattaaaatataaaggaaatcaataccaaactatataataactacggactatactctagacacaaaattgtcattttccaatcccaataacataattaaaataaatctcaaagatagtatgggcaatagatttccacccttttacattattttaggtctcgaaaattgttatggtttgacagaccaaatcataaacgtagttcggccaatcatttcaaaccaaatccgaactactaaatgcatcaccatgctatgaaatggatctcattctatttatataatttttaaaaaaaattcaaagtctcgtatgaaatcaaaaatggtaaacaatcatagaaaatttcttccatttcttggtaaaaatatatttttatgtcataattatcttctaaaggatgttgtggcaactacccacattaataacgtggtggtcgaaaatcagcctaccaattaaagtacacatttttatgacgagttgatgacccatcagtgcccattaaataatacgtacgttaaaaaagatgaagaaaagaagattctagcatgcactatcaaatgataaaaagaaacggtaaaaactatgtttttaactgtcagattcactatataaaccacggcgacgacaagtggtatctcatcaaccaaaacaaaacataaaaaacaagtggaagctttaaaacgagagggagagagcaaaaatg

SEQ ID NO: 4178 - DNA, 3000 bp, Unknown
  misc_feature (1)..( 3000): cDNA_ID_4257564_gDNA_ID_1620689_Annot_ID_164697 3000 nt of promoter + ATG
agagatagacgatgagaccaaaacgttgacgttaagaggacttgagggtcacgtgatggagcagctcaaagtgtacgacgtcgtctaccaattcattcccaaatctgaggatacctgcatcggcaaaatcactttaatatgggagaagcgcaacgatgattccccagaaccaagcgggtacatgaaattcgtcaagagcttggttgctgacatgggaaaccacgttagcaaaacttaatcatcattcccacagtcgtcgtcgtcatcatcatcatcatcatcatcactatctcgatttataagttatgatgttttcagtataataaatggggtcttgtggatcgttaatttctatgtgtaaaccgtttggttctgtatgatgcttcgatatattgttatgttcatgatcatatgtcgggttcgatataatgattcttaagattaatttactacacatttcagattttcagtgtttatctataatttatgacttttcatatacggattactaaacatctaatggtgttagttaacgatctagtataggtggactaggcaaaattctgaataacagttaagtaaataacacgagtacgtatattatggtcatactcacgtacagggcggccatgagggaagccgggagaaacaaatgtatgtggactccaaaattttccaaaagagaattatttcaaatagatctccgaaaaagatatttttatgaaaaagacccccaaaatttaaaagtgtttatgataactttaaaaaaatattttactattttggccttaattttctaggaaccagtcatactcatgtatatactaaattttaacccgcgattcactgcagaataatttattattaaagttagtttctataaaagtttgtaaattatatatatttataaaatatttatatttatagtttttaatttttattaagtaatgtatatcagaattccacgaaacaattgttaatatacttaggatttaacatgtattaaaacggtatgttaatattattttaaaattttataaatattgattcaaatccatttgacacataatcttgttccaaaataagacctatcccgtaattttttaatttttcccgcaatttgtttttcacctcaattgaactgttatgcccctaatcttgatgacgaattgtctacacaatttcattgtgatagaattctgatattacaaattgccgaaagaccctaaataatctatcgatttaataagttttccatttttctctcaaaataaaggccttcgtattgaaaaaaaatgacaagtgcatcgtttatgcaaaatatttgcttgtttttttctaataatatattctgatatttaaaattcctaaacatggaggaaacgaaccataagaaacggcatctataaatatttatatatttatttatacatgtttatgaaacataaaattttacaaaattcactaaaaattgtaaaacatagaactacaaagttttcactacataacaaattaagtaccccgcttgatctagtataattgtataaattatgttgtaaatgtgcctgattgtaaaattttgagttgacgaccataaacgtggtaccaccagagagatcacccaaaatcggactttgcagtttcatcattataaaattgtaacgtatatatgcgttcaatgattgatgttacaggatccctggaccatgcagatgagtttatttgttttacggaaaatgcaactactctgatgcattcgagatctattattgcttgcttcttaccgaattcaaatacttgaccccactaatccgataaggctaattaatatgtgtctcaccctcatgagttattgccgatcctaacaaatttggaatcctgaaaagaaaaataaaagagtgtttctttcaactagtaataaagcttattttaaaagacgttaactttatccttctaaatagagtcttagaagtataagagagcatgattaatgtcccatataagcattatcaacggctggttccgagtctgaagacaaactatgagcttagaattagaacttcctgagttataaaaattatttttctttttttttgcatgttttaaattgtttttttgtagtgtaaaaacagtagttttttcccagaagataagtaaattagggtttgtttatctgcttccaattctatggctaattaatttggatactaattaaagcgttaacagagaggacgtatgtatttcttaattagactccaagtttttcttggcccatttggatcaaaagaccaattgtatgggcccataaatgacctattctgattactagagattgagtaaacggctccactttttttttatgagcctgtctcatgatctctcattctctcttcaaatctctatcccatatatgtatgtttattagtttgaatttcatttaaaatctaattttaaagtttaaaatgttagtaaaattatttggtgattgattatagtgttagtcaaattattttataatttaaaatgccatccagtaaaattttgaaagtaaaaaaatgtgattttccatatatattattatataccaacattatttgtcctcgcgatcattatgtatggggcattattataccgtatttttcctcgcgattaatatgtatggggcatgaatcatgaaccgtgattatcttctaaaggatgctgtgccaactacccacgtaaataacgtggtccaacattaaatataacaatttaattgaaagctcttcaacaaaaaagttaaaaaacaacacacatctatcattaaatagtgtttgagttaaaaaagaaacagagaagattttaggtatgcactatcaaatgatttaaagaaacggtagaaaccttgtttttaaccgtcacggtccctatataaacctatgagctagcgacgacaagtattcagtataatcaatcagaaaacaagtagaaactttaaaacgagagagagagaaagaaatg

SEQ ID NO: 4179 - DNA, 3000 bp, Unknown
  misc_feature (1)..( 3000): cDNA_ID_1807740_gDNA_ID_1620689_Annot_ID_164695 3000 nt of promoter + ATG
atatatgttacagtactatagttccactgggtttcttactcaggaatctgtttggaagtctttagatattataacgatgttccatgtttcgtcatggatctagttccagagctatgtaaatagatcgatactctgaatctccatcattgttgtataggtcgattgcgttggctgctgatcctggaagccttccaagttttaaatatatggctttatttggttgcggagcattacttcttagaggtgctggttgtactataaatgatctgcttgatcaggacatagatacaaaggtcagtttgtttttaagctatcttatggtatggtgataaagtgatgtcaaatttatatatccctttagtatgttggtttaggaaacatgttttgtgtaactatggtttctgtaaccatggtgggaaagtgttattgctttgacatctggaactggtcttgatttttctatgttggatcaatttacgacaacatttccagtcatatctctgttttgggtaatagcttatctgcatgttctgatgacttcgttcaaaaagtgaaagacttcaggtgttagatatggtgaaggtggaatatgtttttcgattgaaatatgtgtttagtagttagggtagatacacagcattcatgtaactggattcattcttccataaacaaagatgggttgcttgtatgtaaagctcaagattttgtatggttgttttgttttagattatgttgtcttacaaatttcttttatatccaggttgatcgtacaaaactaagacctatcgccagtggtcttttgacaccatttcaagggattggatttctcgggctgcagttgcttttaggcttagggattcttctccaacttaacaattacaggtttgtttggattttttacttgccctaaagtcgcgtatttgcaagtgtttgtttaaaaattcacatacacatatggttcacccttatgtagttggcccaaattctgaagatatgttctcaggtcttgtctttagttttgtgatcaaattcttttctacttgagctcatttcagtatgtatattctgcagccgtgttttaggggcttcatctttgttacttgtcttttcctacccacttatgaagaggtttacattttgggtaatttaaatctattctggcttctcaaagttagacattatatattttctgattttcttatgattgattcgtttttataattgcagcctcaagcctttttaggtttgaccataaactggggagcattgttaggatggactgcagttaaaggaagcatagcaccatctattgtactccctctctatctctccggagtctgctggacccttgtttatgatactatttatgcacatcaggtatattcactttttattttttagcttcaaaatctatttgattatgaccagtagcaaagtagttaatctcaatgtgtgcatattgcttgctttgttttctttttctagcttcaccaccacagatttctttttcagcttttgtttcatgtctcatgcaaatgcatccatttcgatgttcgacttttgtcaatcataaagaagaaaattaccctgatctcccaccttttccatctgatttctatactttaagtgaagagttagccccataaaagtcttcccgtttgcaacagaagtgagaaaagaaagttacctttgtggcccattgaaaatgaaatagtatatgccacaagctacgaacccaaaatttcagctcaagttcagtttttatgcaagtaattttgagatattctaggttaaatcattttttttccatggactaatgtctaatatattgtgtctccaggacaaagaagatgatgtaaaagttggtgttaagtcaacagcccttagattcggtgataatacaaagctttggttaactggatttggcacagcatccataggttttcttgcactttctggattcagtgcagatctcggtactcaataaactttacaaggactcatttgtgattcctaattccatttactgtcttttgattctttttgtttctcgctctaatgattaagggtggcaatattacgcatcactggccgctgcatcaggacagttaggatggcaaatagggacagctgacttatcatctggtgctgactgcagtagaaagtatgaaaatttgggtttatcttttgtactctttcacaatccaattatgtgatttgccttggaaaacctaatagtgtttttatatctgtacagatttgtgtcgaacaagtggtttggtgctattatatttagtggagttgtacttggaagaagttttcaataaagactctctctctgtcaacgaatgaggatgaagctgtagtgtgaggaacctatatatgaagaattgaagtagacttttgagacacactgtaagtgaaacagaggacatggtcttgctacaaagtgggtctccttcaggattgaaatgatcaaggagccattgccagaaaagctgaaacttaactcttttagattagtgactagttactactggttcttgtaaaagaagctattgttgttgtttgggatccatgtcttttcttccaggaggtagtttggctgtatgtatacaatgatcatgaccttctggtcaaacaagaggctttacttttggcttttatagttgacatacgcaatatcattgattttgtaacctaaaggatgttaataacttttcctttttcaatctcaaattgcaaaagattaacattgaattagccgtgtgattgattggagaagtggaaacaactaatatgcagaagatttccacatccactaatttatcttccaatgggacaaatacttttgtttatacgcggttcaactacgtaccaataaaaacacgccacgtggtcatcgtgtctgatctcagacattaaaaagccataagaatcggagatacaatctttctctctcgattgactttattgactgagagaaagcttttgacaatg

SEQ ID NO: 4180 - DNA, 3000 bp, Unknown
  misc_feature (1)..( 3000): cDNA_ID_3072738_gDNA_ID_1620689_Annot_ID_164694 3000 nt of promoter + ATG
ccgtcggatcgtcaggctccggaacaggcggatctcgttccaccacatctactcagcagaatggtcggatcttaggtcggccgatggaggaagtacggagaacctatgagtttggtcgtgagcttggtcgtggccagtttggtgtcacgtacctcgtaactcacaaagagacgaaacaacaggtcgcttgcaagtcaatccctacgcgccgccttgttcacaaagacgacattgaagatgttcgccgtgaagtccagattatgcaccatctcagcggtcaccggtaaatctctttttttgtatctcactggaaaatgcttctttgacattttccgaaatcgaatctgaaacgccttttgttggaatattggtgaatatttagacataggattcgttttctatattaatgaatggtttgcatcatatgtggatgaaaagtttggtggtcctatgttaaactcttgaaaaagtttccctttttgcatatttatatttacctgagtttcaaattggtgagttgattataggaacatagtggacttgaagggagcctacgaggacagacactctgtgaatctgataatggagttgtgtgaaggaggggaattgttcgataggatcatttctaaaggtctttactcagagagagctgctgcggatttgtgtaggcagatggtgatggttgtgcatagttgtcattctatgggtgtaatgcaccgagacttgaagcccgaaaactttctctttcttagtaaagatgagaactcaccattgaaagctacagactttggtctctctgtcttcttcaagccaggtttgaacagcctctatccttccctatttgatttctatagacaatttatccctctaatgaagttgatccattaatgcaggtgataagtttaaggatcttgttggaagtgcatactatgttgccccagaagttctaaaacggaactatggaccagaggctgatatctggagtgctggtgtgattctatacatccttctcagtggtgttccgcctttctggggaggtattgtcttgatcttatttgagaagagaatttggtttcactgtttaaatgttggactggaatgtatagtcacgttctttctgttgtgcagaaaatgaaacggggatctttgatgccattcttcaagggcaacttgatttttcagctgatccatggccagcactatcagatggtgccaaagatcttgtgaggaaaatgttaaaatatgaccctaaagatcggcttacagctgcggaagtgctaagtaagacccctttataacatgttttgatgaataaattgatgaaaacaccttcttttatccaattttaataacgttttgatacatacgcagatcatccgtggattagagaagatggggaggcatcagacaaaccgcttgacaatgcggtgttatccaggatgaaacaattccgggcgatgaacaaactaaaaaaaatggccctgaaggtaattaaaacactgattgaaacagtcttaccatcactattgtagtttatgtagtcttcttgttctaaagccaatctttggttttcgttttgcaatttcaggttatcgctgagaacctttctgaagaagaaatcattggtcttaaagagatgttcaaatctctagacactgataacaatggaatagtcaccttggaggaattgagaaccggtctcccaaaacttggttcaaagatctctgaagctgaaataaggcagttaatggaagcagtaagtctatcacaatccactactttgatgtcaaagcaataatgcttatgatgctttgtttcttttaggctgatatggatggagatggatcaattgattacttggagtttatatcagccacaatgcatatgaacagaatcgaacgtgaggatcacttgtacaccgcattccagttctttgacaatgacaacagcgggtaaaacattgttctttagctctctatttctttctttaacaagctataaataaagtctcactctttgatcttgatttgtgatattagctacataacaatggaagagctagagctagccatgaagaaatacaacatgggtgatgataaatccatcaaagagatcattgctgaagtagacaccgatcgtgtaagtatacgtaaatctctggtttcgtccaattcatacatctgtaagtatacgtgtaagtttaacactctcttctcatctttgtattcgaatctttaggacggaaaaatcaactacgaagaatttgtagcgatgatgaagaagggaaatccagaattggtgccaaaccgacgcagaatgtgagagatcttttgatgttgtttgtttgtttttggttatcactttactcaaactttgtgtttctgttacaatcaattattttgtttcctgcaatctctttttatcaacacaacataaaaaatactttgagatcagaaagccatttgcaggtttggttaatgacttatgagagattcaatatataataattacaggttgattcttgcatgatttgaagctgaaattcacttaaaaaattatagaatgataatcttaacccttacaaacaaatttgagattatatctaatcaaggcaataaaaaaataagcaaggtgcagtaggagggattagaagtttcaaatccgatttttatacatgaaaaatgacgaaatctaataatcttggtgacattttctcacagagaaatcggacaactaaaatgagtaaaaaaaattaaaagaacgaataaaaaatcaactgagatatatataaaaaaaaaactggaagaagaagaaggaccgcgagctttggatcgaatttgttaaatttttcttctctcgataataaaaacaacaaatgatcgttgatcgtttttctctagattcgattccgattccaaagaactagtctccggcgtgtaatctctgatcgttgaagatccaagctacgccgcatcttactcgccggcggcttgaatcatg

SEQ ID NO: 4181 - DNA, 3000 bp, Unknown
  misc_feature (1)..( 3000): cDNA_ID_3072747_gDNA_ID_1620689_Annot_ID_164688 3000 nt of promoter + ATG
caagactatcaaaaagaaaatgataaatattgcatgggtggttgacaaaattcaccaaaccgtagcagtaagagcatgcactaaacccacataaccgtttggcgttttggatataaacacattgtcaaaccactcaagcgttccccaaatttccccattttggtgtttttcaatcgcaatttccgcacaccaaatctttttttccctatcaacaaacatatactcctcccaagaaatcgccatttttccaccatgatccgccaatttaacatttgaatgagaagtaggcaaactaggcaatcttcccaagcccttcaaaattgtccatgctctattcttgaggtcataccaacgtatctccccctcacagtaacggtagaacacgttctctaccacacaataagatgatgatgacgacagactccatccattattcatacatatgtctgcctctctccatttacctttatgcatcttgtaagtcacatctttttcatcagacttcacatagacggttccttgataacttacgcttaagtactcagagcctttgcatatctcctcgctagggatctgtagaaactcccaagtttgagtcttcgtatcaaaaatctccatccagttcattgtatcgagattgtcgcagcctcccgtaacatatattctcccatcaagagtacaagcagatggaaacacacggcccacccgcatgcttggagcttcatgccatgtgtgagaacgagagttcataatcataacgctagacaaagcgttataagtctttgatccagtggcatatatcgaaacgtttttattctttgatccaccgccaatggcatatacatcaggaccaaccactacaacacccggcagggatggggaggtaaaactgggagatgaaatcggaaccaaaacgtttttggagctatgtggtctgtggcacagaatgaaccaatgtagtagttcagaatcggtacggagtcgtaagcacgcgtaaagacaactctcggttcggcctaagaggattcgggtttggtaaagctccgttgaagcaagaagagagcgaaatgttttggagactaatgagagagttggataatgtaatcttgagatgcgagctaagcagtttaataccaaatcatcaggaagcattagaaaacttcttctagttcttttaatcgggggctcttctccatattccatggttgttgatcactttttttctcttaaggtttaaggttgcttgttaagtaagaagatttctataacaaaaacgtatattctgtttcgttctttgtgtgctctttctgttacaacgatatatatatcaagttacttaccctaacagatccataactttatgtgttttcctatatttgttatgtttatccaattatataaaaaatgcataacaaagttaactattatcttccgataaattcgtgagattttatgcaggtgataatgttcaataatccaatcagacacgtaatacttttttccaaagctaaataggagaagaaatctatcaaaataggatatatttttttaggccgcctatgatcatctatatatatgaacaacccacaccttgttttaacaaacaaaatcaaactttttcacaacaaggcaaaacaaaaaccctaaaagcctctcagctgctctcttcgacaatggtgaatacttgtaggaccagcttcatcatcatcatgatcctcttgctcttcatcaatcagtctgctctttcttcttctgcacgcgtccgtcatctagaaggtcgagatcatcttcctcaccaccggacacttagtgagaaggagaaagctgataaggaacgtctcagtttcatatttagaacgatcgaggctgacatcaatctggaggaagatgtttctctccgtcttccccaatttgctcgatataataggcttcataattcctatttcagttactgaatctactagggctttgaatttgttccattaaggttcattacttcgattgatactcaatgaatcatgtaatctttatattttttagactttttatcatgacttttgtaaactcttcttcaatttaattgatatattattccagaatagtataaaaataagaaagcctcttttttttttttttttttttaatattgacattcttacgctctacgtctaacttttatgtaccctttgatgtaatgcgtcacaattaattttcgtgaatcttttggattgctgatgtgataatcaatttatgtagcataccgaatgaaacagattacacatgccatttaaaagtatgaaccattgaacaccaaaatcggttggtaaatatactaaattgttgtgttttgtatatatagtttatcaatctttatccataagcgttatcaacaaaatatgggtacctctttttaatagacgtgctcagggcataagattaagactaattgcatgatccgtaatttgcgttcttaattaataaggtttatcatcttgcaggtagatctaactcatgagtatataatttaatttatttgctcaagattgaacatgaacattattgtggtgttacaaagagagatagtacgaggtaaaactatcatagaaagtgattcaagtttcttagggactataaaccaacttgtataattgaagatccaaatataaaaaggctctgatccaatttcaacagtcaaaaatcttattataaatggaccatcttacgttgacaaacgtatcttatgtgatcaccttgataagaggaaacccacgttctaccatgtagggtttcgagatacattaatatttccattcttttcttatctcgatactattatatataatacttaccacgtgaaatatcaaatcaatataaaaaaaaacgtagaaacttttactatataatctcactagtagcaatgagggtaaaatcacgcaaaaacaatcatctctctataaaaataaaagaagttggttagttccaacgctagagttaagaaat

SEQ ID NO: 4182 - DNA, 3000 bp, Unknown
  misc_feature (1)..( 3000): cDNA_ID_2050738_gDNA_ID_1620689_Annot_ID_164686 3000 nt of promoter + ATG
atttagatcgtgtaacgcgagccagcccgttcgccatcctgggacaatccatcctttcgatatggacccgagtgtaatcactggtactatcgaggagaatttccccattggaacaaatggattactcccgaatacggaccatctatatacttcatccgaaacgaccattatcccgagttcccgtgccaatgtagcgagctgggattcatctttcaagtaaatattagggccttggttgctaaaataatgttatctattagattgtaaaatttaaattttgtaaattttttatctaatatagtgcaaattgtaaacgaaataaatgtgtattgctttgctggttacgtttacaacgtttgaaatatatatttcttataaaattaagtcaaagatgtagtcttttaatttaaagaaaaaaccatgtcaatataaacgtaaacacaaactaaaagatctcaagtctagatcatctagccaatcatgtgaatatatacttctccaagagtactaatacgtacgtaaatacctgcttaagatgagcctcagtgtagtagttcccattgggattgtgggggttgattataaatatcgcaaaagtgttctcgtctaccatctctctaacgctgttgaaatcgatctcaaagtctctttcagggatgaactcataccttcggacctcaaggtgtttgtagatagagtggaccatgtcccatgggaagcctggcctcggaagcaagatgttggctttcggtttagccagaatactaaccgcgagctcgattgcttgtttgcatccaacagtcatatatacgtcatctcccgttagcttattgtcaagatctcggtttagatattccgccacagcactgatcatatatacaagcgtagagttaagatgcaaaatatggataccctgactggacattaactttatttatgtatatattaccgtttggcaaccgggaggccaatacttggagcataggcgtttcccgtaccgcaaaggacagccttaacaaccgccttttcggcggtatggctggtctctgcctcttcacttagtggaggcaaaataggctttccttgagggtcacacagactgaagatttcagaagagtaagtgcctagggaggcttgggcggccttttcggctgcatcactgccactgaactgccaatctacgcatccttggctagccatatttcttaactctagcgttggaactaaccaacttcttttatttttatagagagatgattgtttttgcgtgattttaccctcattgctactagtgagattatatagtaaaagtttctacgtttttttttatattgatttgatatttcacgtggtaagtattatatataatagtatcgagataagaaaagaatggaaatattaatgtatctcgaaaccctacatggtagaacgtgggtttcctcttatcaaggtgatcacataagatacgtttgtcaacgtaagatggtccatttataataagatttttgactgttgaaattggatcagagcctttttatatttggatcttcaattatacaagttggtttatagtccctaagaaacttgaatcactttctatgatagttttacctcgtactatctctctttgtaacaccacaataatgttcatgttcaatcttgagcaaataaattaaattatatactcatgagttagatctacctgcaagatgataaaccttattaattaagaacgcaaattacggatcatgcaattagtcttaatcttatgccctgagcacgtctattaaaaagaggtacccatattttgttgataacgcttatggataaagattgataaactatatatacaaaacacaacaatttagtatatttaccaaccgattttggtgttcaatggttcatacttttaaatggcatgtgtaatctgtttcattcggtatgctacataaattgattatcacatcagcaatccaaaagattcacgaaaattaattgtgacgcattacatcaaagggtacataaaagttagacgtagagcgtaagaatgtcaatattaaaaaaaaaaaaaaaaaaaagaggctttcttatttttatactattctggaataatatatcaattaaattgaagaagagtttacaaaagtcatgataaaaagtctaaaaaatataaagattacatgattcattgagtatcaatcgaagtaatgaaccttaatggaacaaattcaaagccctagtagattcagtaactgaaataggaattatgaagcctattatatcgagcaaattggggaagacggagagaaacatcttcctccagattgatgtcagcctcgatcgttctaaatatgaaactgagacgttccttatcagctttctccttctcactaagtgtccggtggtgaggaagatgatctcgaccttctagatgacggacgcgtgcagaagaagaaagagcagactgattgatgaagagcaagaggatcatgatgatgatgaagctggtcctacaagtattcaccattgtcgaagagagcagctgagaggcttttagggtttttgttttgccttgttgtgaaaaagtttgattttgtttgttaaaacaaggtgtgggttgttcatatatatagatgatcataggcggcctaaaaaaatatatcctattttgatagatttcttctcctatttagctttggaaaaaagtattacgtgtctgattggattattgaacattatcacctgcataaaatctcacgaatttatcggaagataatagttaactttgttatgcattttttatataattggataaacataacaaatataggaaaacacataaagttatggatctgttagggtaagtaacttgatatatatatcgttgtaacagaaagagcacacaaagaacgaaacagaatatacgtttttgttatagaaatcttcttacttaacaagcaaccttaaaccttaagagaaaaaaagtgatcaacaaccatg

SEQ ID NO: 4183 - DNA, 3000 bp, Unknown
  misc_feature (1)..( 3000): cDNA_ID_3593727_gDNA_ID_1620689_Annot_ID_164685 3000 nt of promoter + ATG
tacaacgtcgtcaatgttagattttgccgttagtttttattttattttgttttcagttgtcataaacttatttcagttatcagttattataactaattgttttttgttcctcttttcctgctaagtgtaaacctattgcacaaatttcttgcatgcgtgttcaccgtatatatgtttttaattcctctttcgttattgggtttttaatgatgaaataaaacggaactcaactagggacagtacagttcatgatcatattggatacatgtattagttcatttaatttaattcaattatatacacaatagtttatttaatttctctctaaatgattgatgatgattgacgttattttcacggttttggtaccgtataagtttagtaaagtgtcaaaacgacattgtttgtgaaacatatggagtattttttcaagagttaatttgccactctatcatatcgtttctaaaaattgaaatcatttctagttttaatcctggtttagctgtagtgatactattatgctcctcattctcacaatttatttctactttgtttctttaccttcacaatttctgccaaatgagatcaatatagacgtcttcaacatcaaagtttttgtttataaatacaaaatttaaaataataattttggtcagagtcgatggttataaggtgatgggcgtgatggcaaagcatgtgacaaagttttatgtccactattctcttttcgcctaacgcaaattcgtgtacgttacaactccctaataataatgcgttaattactctgccaagctcattttcatttattactttacatgttttttttgtttaaagcattgtcatatttattgtcattatgaaacccaaaatgaaaggagttaattagagatcattgttttcatctagagcagagctctgaaactggaaccaattatttggagtcttgatgcaaattcatgtagccttggagctctgaaattgttcttctatatgtttgctgatcaaattgttaaaataatggtgagactgagactcatggtttaaatactagcaaaaatggtaaatttaaaatcccccttagccacggaccttgagcaaagagtctagtgtatgtgtctatatatggttcaccttttggataagaaatcaatttcaagctcatctttctacatagagagaaacttggatcttgtactttttaagatggaaacatccataaaaaggtaaagataaagctgatatggcaaaacgccaacaaaatcctacaagtaaataaatcttgggccaactttaatgttcctaaaagaaatgaacttagctacaaagttactagtcacgtctctgctgccaaaattcttgacacattctttacacttcttcgaacaaagagaatggtttgatccacaaaggatgcaatgcgcaccgcttccacaacatttgatctgtggcataaatcaatcttgcaccataagggcttgaaactttcagcttttgccactaacactctaacgcaaacttgtgttagactgcaaccaaatgaaatatttgagaagcaccagatccattaacagcaactatgagcccattacaatgatttgcctccatcagtgtcttggatcgctaacactatccaataaccagcctagctggtacttagacagaatttttttttcttctggatctgtgaaaataaatgtaacatgagccattgactaagatctagctctaattaactcagtcaaaacgacgatcaaaagattgaactattggaaatggaaggggccgcgcgaacgcaggcccccaaggcaacaaataatgacgcaggatctcccacttggggtgacctttggcttagcgcacctcaagtgcaggaagccaccagcctaggccacggatcttcatgatcacccgtaaaccccgtccaggtaagtaatttgcaatcctcgaccatcttctttatttatactatgctacacacgagtgcccatcctcaaacttccgatgagggagcatcaacattatctcgtatctactataggcaggctttcgttgtttgattagcccaagttttatttcttgataggccgcaatgtctatattccggtccaaatcaaacccaacagattttttttttgtcggctatttgtcacagatttctttttatatacgaggaacaaggttaattatattgaactaaacattaaaaaaaaaaaagaattttacagatgcaggttgatatttaacgttattgtgggtcaactcaactcataagcaaagttgatatgatactatttaaattgacttcaccacatccacttgacactaataaattgacttctccatccctatccacacatatttgaatcttccaataaggttccacgaaactgctaggaaaacaatattttctaaggcaatagtcccactttggttaatcataaaattgtcaaatccactatgtaatttgtgatccataataaattaaaccagttattcatcatctaagtcagacactattttaactctagaaaacttgacaaagtacatgaaatgtttttgaagtgaagtaacaaaattccaacatgtacaaaatatatatttttttttttaaacgaaaatatatacactagagacctcacctatttttcttaataatatcaaatctcacatatttgatgtacacacaaaattaaatttatagaaaatgaaatatattattttagaaaaataaggagaaactttgtggaaaaaatagaaaaatatttaaattattgtttttataaattttattttgggttcgaactcttcaactccctgaacacaagtcgcataaaacgaaggaacaatctagaagaagaacgataacatccaatctctctttatattccttccttccattgtggcaataagtaacaaaccttgccctctacttcattccctccttgttttgatttcatcgtctttgttagctctcctctgtttttttttcttagtcaatcg

SEQ ID NO: 4184 - DNA, 3000 bp, Unknown; identical to SEQ ID NO: 4176
  misc_feature (1)..( 3000): cDNA_ID_2993363_gDNA_ID_1620689_Annot_ID_164683 3000 nt of promoter + ATG

SEQ ID NO: 4185 - DNA, 1587 bp, Unknown
  misc_feature (1)..( 1587): cDNA_ID_1808099_gDNA_ID_1620689_Annot_ID_164724 3000 nt of promoter + ATG
ttcgggcatacaaacatcttcacgcaagaaactatattgaacatacacttgaacttcatttgtagggattaatgggtttaataaccaggaaatgatatttgaattttagaatcctgaagactaaatagtttctgtgcacattatactctatactcaacatagtagtagtacctagaactttacaattttagcagagctctctaacaaatttaactagatagatagatgataactattgaactacacagttcaataacatacatcatgcaattaaaacaaccctaatgactacaataaagaaagagcacaggtaatacctggagagaaatcaagttctgatcagttacaggtaagccgcccaaatccaaaagagacaattttttaagtgaagcaagaagagaaattccaacttcagtgacacctgtctgtgaaatccacaactttttcagatttacaacagattggaggtgcttcataccagcatccgtaaccttgaaacatcttgaaaggtccaactctgtcaaacttgttaatcctgaaaatccaatatcacatattaaacacttaaatttctcttaaacttccattccaaaactcggagtatatcactcaacatacctgtgataggccagagggtggaactgttgattctctggcaatctgaaagatttagagtaattagattaacgaagcctccaatgtaagccatccattctgcgttaactgagcttttgcctcggagatctatattctctacagaatatttgaatcctctgcacagaaaagagtcttgtttagttgtgtgatacagatacaatagttcagtgtccatgcaatcattgcattttccgcaacgatgtaccaagaccaacacaattctacagctaaacacttcaggaataattatttcaacatgaatacagaaaaaaaaaaaattctaatcaaatttaaaaactaagatcccaagcgatcactcaatatctcaaatcgaagcatatatatatatatatagctcagcatttcgagatcagaaatcagattcatattagaaacgatcagaactatgtaaggaagtgaagagtttactcgagtaacgaagggaaaagaagccgctttttgaggaggcgacggaggagagcatcagcaaggtgaggaggcagactctcaagactacgccgctgaagtcgccatcgttccaccgcatctccgctcttacaagcttcctttaagcatagacgcaccaaaggactctccatctccaatctccaaatcgctgaaatctctgatcttagctccaaatttcacaaaccgatccaacctttatataataagaataaaaaccctaaataaaatagaaaatcaaagaattaaaaaaatccgccaaaaacaaaaaacaaaaagttgttcatccttattgggccactaaagcccaaacgtttctagcttatatggcccgttgattcacgtgtatcagcacgtgccttcttctattgaacgttgtcgagtgtcgactatatcatactaatcttagctccaattctgcagattttactctcatcctaaataaacctctcttcatcgaaaatg

SEQ ID NO: 4186 - DNA, 3000 bp, Unknown
  misc_feature (1)..( 3000): cDNA_ID_1823302_gDNA_ID_1620689_Annot_ID_164723 3000 nt of promoter + ATG
agataattaatttatttatttataattttccctccattggttttgtagataagaaactaaagttaggctatttaatgcgtatatctatttatgtacctcaataatttgaattagtgaggaaagagttaaagttgaaggataataagtttattttaagtgtgaaaatgtcgaatatgtgttgactatatcaaagggattgaaagcaatgtttttccgtacatgagttttttttaaattgtttggcattttcctactttactaatttattgctgtttttagcgagtccaattggctactgatatttggcatagcaaattatatttttttttcattctactaaaaatactgtgcagcgttgacacacacacacaaaatactgttgcgtaattagaaataaatgcgatacttaatgccgtaaagtttacagatcatacaaaaaaaatcttcttggttttgtaatgaagcaatgcagaaataatatgtcaacttacgtcattatcttgtgagctgattcaaagatttcaagagttatgttttggatgcaaatatgtcaaattacataatttcagctgattctatgaagtgtaaatacaaatttagggtgcaaagtgccaagattcattttataaggatgaatgatgaatgagatccaaataataataataatacaatgaatgaatgacgcaaaagagagtgacgccattataaaaattaaaatatcatttggagtactaaaactagaaaacaaaaaagaatgataaaagggaaaatccacgcggagagaggtttgaaatgtcttcggtccaatcctgtccttttgaatattgattttctttttgatttttcttgctttttattaatcaacaaatctgttttttggaattacgttttttctacgttgaagtgattttttttccttttgtaaaaggcctacgttgaagtaaaattacataaataaatgtatgttatgaatatcgacccaaaaaacaaattatttctacactatactttgcgcaaatcaaatctatcgaaaacgattttggtaatcccattcccatgagtgagttttgacccaaaacaaatttaaaaaagtaaccatttcattagtaaaacggtaaatatggttcataaaccttttagtggttattggtcctgtacactacactcgtgtgtgtcaacttcagctatgagatttttgctgtaactttttggataacggttcaattattacaaaggttatttcttacgtatgagaggtccaaattacaattgaataatatttgatgacatacaaagttaaaaaggattaatcataagaaatgaatgttggaatggaatgcatctatcgatctgactactttagatagcttgatgttggacttagtcagcaaagaccttatcatactcttgttgtattgtatatatcgtatcacacagtgactggttttttctacttttctctttggaacatatcaatcattatgtataaataaattttgtccaaattaatggccatttgtctcaaccataaataaatatttattcacacacctatatgactatttgagataattccatggtgacttggtcagcaaaaaccttgtcatactcttggtgtattatcacataactttgtagattatattcttatggaacatatcatatatatttgtccaaattaaacccatttgtattattttcccctctcgagtttaatatttcttatttagaaacagttaacaacttgacatagctcacataatcactcacagactatatatgtataagcaactaccattttaaatattatttagttatattgttagactgcaactattatttattttctttgccaaacaaatttatattttttcatgttaatacaatattatatcttgaacaaatgtatgcttaaatatattgacacaaaacaaaaacatataggggtttttaggaagaaattttgtacagattaattaatcctcatcagatttttattttatatcttatttttagaagtgtatgattttaaaactagaacaatcaaatcttagtaaatttcattcaacataatttttatgttattgctaatctattgaatgttaataagaattgtattataccaaattaccaatatgtgttttgatacttgtacttaaaacagaatgtggaatatcctttcccttattaatgatattaaacatcattacaattcatagttatagcaatgaaatattatccatagaaaggttgttgcataatgcatactagtaaagcatcaaccaacatattttgaaaatattcttaatcaaataaaaaacatatattggaaattctttaacagtagaaaaaaacatataataatagagaatcttaatcacatgtacaaagtcgtagttttgaaagtgtacattgaaagagacagttgtataaccctttgttgtctaattatataattaacccactatagttaaataaatgataaacttggttacaactacattaacaaaattgaaatgttgaattggtcagcctttgaccttatactctttcactaccaccaccccacttatcaattacactctggccctatacttccttataccaaagacttttcttcaatttgaaagttttgtctctcttttaaaaagaaataaaataattatttatggtttggtcatttggtcaaattttcaaacactgaaaatccaatgcctttatataccaaaccaacactcatccatttttatcaccaatcctataacactctcattctcatcatatcattcttcaatctatataacccattcttaattatactcaacacacattatatttttctgatcatatcattctttcagtccatctatataaccaattcttgatttatacttaaaacacacattatacatctttctcatcatagtttgtatcaatttcctagagtaaactacctaaaggaaaaaaaaaatctattttgggaatcatatactaaaaatg

SEQ ID NO: 4187 - DNA, 3000 bp, Unknown
  misc_feature (1)..( 3000): cDNA_ID_1032427_gDNA_ID_1620689_Annot_ID_164717 3000 nt of promoter + ATG
caattagttatctcaaaaatatctctaaaatttataaccttgtgagaagctaaggttattgtctcacgaagcaagcagtgttcgacctagatggatggtaatcgtttctatcttgtggctctattccaatggtttactatttttcctaaataccactttgttttcaatccgaaatttataccacgttacaaaaaaaactttcatagagacttagagagtgtgttgtttgataaacctttcgtgtattttttttttttttttaattattattttaaaactctacgtaaacaattttaatcgccatttctgagaaaactcaaaagcaataaccgatgtaattgataaaataaaaataaaaaataacattaaaaagattgaaaatacagaggagatgcagggaaaagagctgacgacacgtaggctagagccgcaactactcgagaaagagcattgtcgtgtcgctttcgttaaatactactgtactatctttttctctgcccgtaaggttggttcagaggctactacatttctcaggccttttttttttggttctatataaaacgtgaacttaatttcatgagaaattaaatatttccgacaatctcaaaaattacccatgcaacttgctgattataatattttacgaggaagaaaatagatatcgaaatgctttcaaacattaattacgtacacaattcaatgacgtacggctattataagaatctagatgcataactatatagtaatatgtagatacgaaaaaatgcgaagtatttaatactttgggcccctcttcccaaaatgttcatgtgaatttcgtgattattcatgcatactcatcaatagacaatatgtaatgtccattctataaaatactacattttaatcttcgagctatagaagtatttcaagaatcatcaagataaagagaacaattaagaactcaatcaaattaaggaaaaaaaataaacagtttgcagtgattcactaaattgataattcaaatcttgtgtgggttcaaacttcaaatattgggccggggggtattaaagaggtttgttgcatttatatttcgtttattcaaaaaacaaaaatagtaaacaatcacatgacttttccagtgccctttcctaaattcgtaaggcttggcttcaagatggtcatggcccatagatgtatgcatatacacaatcatacatatactatataatgtattggtgtcccctcatgcaaagattttgtttgtcacaaaattccagagctcttttacaagatttatgccaaaagataaatggggacctttcatgagagatcttctccatgattttctaattatagtactttataatatatcatgataaacaaatctttgtgacacattcaagtattcaacagtctgatacttggtagagaagtagaaaatttagaaggtaagaaagaaagaacatggtaaaagcaattctaaccattcacgtcatgagttatatgatctagctaacgttctctaactgtgtattaacgaccataactacgatgacgcgtctcagatatgaaaatggtacggctttaggatcccgtggtccatcgaatcttgaccgtccacttgggtgggggcgtaatacctgttgggccattggataagcttttgtggaatggtggaaatgaaaccaagtgtttcttagatcttaagagttattgccaaaaaccaatttgtgaaccggatcaaaccaggattctgttatatgtaccggtcggtcaacgactgtcttggccaaaacccaaaaggacatggtttcaaactttcaacggatgtttgacttcttactggtaaatcctttccgtatgcattatgccttattccgtatttattccgtattttagtttggtctatcatcagccattatatgtctttcacgtcctgatgacatattgatcttgactgagatttagcagagatgtacatacgatagttttgaaatgttttaagaatgaattctgcattaatttttcgttaagatacaaagttttacacaatacattatctaaacccatgattcaatatagaattagttttactcaaccgacattctaatataatcaaaaatttgatgtgtggtcggatagtgtacatatttacatggtcaagataagcatacaaaccgtacaaattagaggcattaacatatatagagaatgtggatagtaaaaatacatgtggaatagaaagtgagtgagacagtgtctcatgaaaagtggcagagacacattaataaatacattaaaagaaggaccaacaaagaaattaaatgatgtctaattcatcttcatatttcacgtaccatttctcgtgccattcccatgcacttaacatgtttgctctgcttctccctttcaattttactgaactaaccttccaactaccttttcggttatcttctccataatgtaacaatctaatttgagtgtgaatattgtaccatataggtgttataacgttactagttttgtgacgatggtcacggctttaataacatcataaatatccccgagattttgtgtgtgttcctctataagaattggtgatcatgtagcgagtactaatcagcttttgatcaaagttaatgttgttaatatgtgatggtttgtgtaatcaacgtttcaatattatgtacaattatttaaattattgtgtttcttctatactacatcgtcattcattaatttttttgacgatctatcatctaccaaccatccacgactataattgtatgtatatcaaatattgttctgatagtcaaaacattatgggctaattaagaagtttgaacaagagttaaagaaagcttaaaagggctttgatgaatgaactcagatgggctttatggcccattaaagattttgttcttttttgagtcgtcgcccccgagatcgtgggtgatccgtctcactggaaacatctttgtctctctgagaaacccctctttagggtttataccttca

SEQ ID NO: 4188 - DNA, 3000 bp, Unknown
  misc_feature (1)..( 3000): cDNA_ID_2050748_gDNA_ID_1620689_Annot_ID_164715 3000 nt of promoter + ATG
tatatgaaaatgataatcctaagcggcgtggtctaacccacacatttctcttgcgatccagtgaaaaaaaaataaaagtttcgattatcacgtaaaatttacattgtgaaatatatcgagtttctatgaacttatcgttgtctcaagaactgatgattaatgattgtgtaatgattattatttcgtggaccaacaaatttttcattatcttaataattagtgcctattattatactgatttatttccggaaacgaaattttatttgtttcgaaatgagacatatgaaaataatgttatgggattcctgaattacgtggctcgaagtaaattttgctcatctagggtttgatgcttaattatactgtagtgatttagaataatctatttcacatttttcactcagctctattgtctgagaaattttataccacatttattacaactatatatatttatcaacttaaatctaaaatctatacatcaatgttgtccggaatataacatatacataatacatgatgaattatagtattatactatagttgtttgttatgcatgtattattcaaagattcgaaattagtgatactatatatatgtacatcagtacatggtcgagagtttgttagatgatattcactgcaaatctacactaaatattcatgtgaaaataattttacaaaacgcaggtagagtgttacatgttaaacgagtacgcttaaactagtgcgtacattgcagagtaaagaagttggacaaaaactgcatagcataaaggaagcaaataaaaaatgaagggaaagacaagacataacaaacgggtacatggttcacataccctgcgatcagattgtttcgttctttggtaatgtagcatgggcttccaatatcttctctatgcaaattatattattatatcagtacgtttttaaacatttctgtaatcaaaactcaaaaataataattcaatatatatgaaaactagttgtacgaaatacaaagtgttacccgatcgtgtcaaaatcaaaaacatttcaatcatgattaggaaacttaactcaaccatacgttacataggaaagtagatgctgcatagttgaccattggtcaaagtgtttaacacttttaaagatttttaacttaatagagaaagtaaatttttattctctaattaattagaaatgccaaatatgcttgtctttaaaaattgtcagtaaattaaagtcactctgttattatacattttatagtcacataaaatctgcaagcaaataacagaaaattatcaagtactcctaatcataattaagaagtagtaatacaatgattccaaaaaaaattactgtacttttttttaatgtgtgtgtgtggcgcaacgtcctagattgttgtctgccacgttagccagcaccagctgtaataactaaaaagtggcaaggttatgactggtaaaggttaaaacagtaaagaactacgagccgtaacggtctcttgtctttcttctttttcacaacgcaacttgcttaggtgaaagtacgatactatccctgtggtgaaaaagagaacttcgcacggaggttatgagattaatcacctgctgttaattataaattattggttctggtcaaaagtaagactggaccgtgtctccggtgtcacgtgacctgaatctccaattacgaggaaattttaaaaaatgattatagaagtaattagtattagtaatacatatgtttttctctttgtcagctgccccatggaaaggcacgtcccagccgttggattggacccaattctgtaattacacgtgtcgatatctcaatcgtttgacttatgcggcattttggttttgccaagctcgttttttccggctataattagtttttgctaaaaatcagtcaaaaattaagatttcattctaattttaaaaagacaaatttccttggtcggcactaatatctaattatcgaccattaatgtcatgattcttatttgcgttacaataattactgtcgacacttgttgtagttcttagtttttgttttttatctagttttgtctctaaatttcaatttcaattaagtgtacatttggactgtaacaagcatagttttgacaattgtctttcattcatttcatcatttgacatcaccaatgaaaagttaaaaatctcttaacactaattatgaaatgtctttcatattcttgtacatatatataaaacactaaactcaaagtgtttagcaaataaaaaagaatttagatacaaatgaatcttgtccacctcccttaaacagaaagaaatatctttgtcaaaagttttttttataagatattcgaaaattaaattaaataccaaaaaagaaagaaaggagtaaacactaataatatgagacgtttcaaagatcctataaaatagtcactctctaccattacatgtgctctgccgcttttaaatctctcatcttcttcctcgtgtcactctttctctcacactctgcaaaaacattttcttgtctctcctctgcccaaattttttttctttccaggaatatttcctagaaaaacccaagcaaagctttaaccccttcctcctccaaaagtagcatcttcctctttttctatttctcctttcctcttcttatctctctctcgtttgtgaacgattccttaagaatataaccaaaagcccttttctcctttcttcaactttccgggaaaaatcttcacgcagcaaggtttctctctcggctctcgcagtgtttttcgtgccttttgttctttctataaaaaaaaaattcgcgtcctttaagaaaactttttccacctagagaagaagaagagtatcactcttgttgttcaagtttctctctttaataaaaaatccatctttattctttgtcttctttcctttttgctttccctaatctctatgttataaacacacagagagaaacaaagtcacagtctcgagtcaaaaacagagaatacgaaagaaaa

SEQ ID NO: 4189 - DNA, 3000 bp, Unknown
  misc_feature (1)..( 3000): cDNA_ID_1823325_gDNA_ID_1620689_Annot_ID_164711 3000 nt of promoter + ATG
tcttttcatttcagcatgattaaattgctattgctcttgtttcagctttgagtttcatctgagagtctcattggcattagatgggaacctaacactgatatcacgagtcagaaacatcaattcaaagccttttagcttttccattgcttaccacacttacttctccatttccgatattaggtgaaacaccgaatttagcctctactagtctctgctgtcacataatataacgtagaactcaatacattctcttttcttttggtatttatcagtgaagttagacttgaagggctggaaactcttgactatcttgataatatgcatgatagagagcggttcacagagcaaggcgatgcattaacctttgaatcagagatcgatagagtgtacctaaattctaaagacgtggttgccattttcgaccatgagagaaaacgcacattcctcatcaagaaagaaggtctacctgatgtcggtaagatccaaataccgaaaaccttaaccgccctttttaccaagaatccagtttttaacagtattagattctcggtttgttgcagtggtatggaatccatgggagaagaaagcgagagcattgacggatttgggagatgatgagtatagacacatgttgtgtgtggatggagcagccattgagaaacccatcaccttgaaaccgggtgaagaatggaccgggaaattacatctctcgcttgttctttccacctaaaacccggtaccggttatcacaaactctgtgtctttcattatcttgtcttgtgggctattttttttgttttagtctatagaacatcacagtgtgtgtgattcgtcggtatcaaaaatccgaaatattaaaaggaaacctgagatttgaaaaggtcacccatttttaggaagtgactagatctcctggttttgtgcgagatttaacttgtgtatgaagacaatgttatatactatattgaagtttgtacttatttgatgaaatcttcaataatactagattttaacccgcggtatatcgcggggacaatttatttttttaagttagtatatataaaagtttacaaattatatctatctataaaatatttttattttatagtttacaattgttattaagtaacgtcctatcaaatccgtcccgccaacctgtcccgtaaaaaaaactcattgatctcatttatgatatgtttatgaatcattgtttaaatattttgtaattttgtagtaattaaatgctatcaaatatttgtgcggtttgatgattataatcgaattgttatagtcatgtagaaaaacaatatcaaaaataataattttgtagtaattcaatgatattaaatatattggaagttttattttagtaactaatcgtgtagttaatgtagagagatttcgggaagattttcaaatatttaattcaaaaattttatttttaattatcaaaacaaacattaaaatccagtggcagctattgtaaataaatctcaactacaaaatttatttcacaaaatggctgcaaaaatgtatatgtagatttaaagctttcttgttctcatggttgacaattcttgaataaaccatttctgagaccataagctaatttttttgggtacatatttcaagtataggaacaaaactatagtataaaataatctttatagattcaaatgctttaatggccttatactcattgcctctcaatgtggtaagatggtgtaaaatcatcataataatcatgaaagatttgaaaattattggtctattatgatgcactataaattctataattgcgtcggtcaaatatttaatacaccgaagaaatagtaatattataaaaagagaatatttattgatgccaaaaagaaaccaagaattttattaaaatggtagaagtcgatatgctttaaatgccttgagcttcattatgacaagtactacaaaacaaaaaaaaacgtatttgcctaatacatttggtaagttaaataatttccttcttaacataattaattactatatcgttctttttgttagcgttgaccaattaaacaaccggttatgtatatctcggttcagaaaacttaaccggtttaacaaatagctaatgttccgattaatttacattacttcagaacgaatcgaactttgtaaaacgaagatcgattacaaattgaaagatacagccttaatttggcattaaaaagttcaatggtccccggttcggtattaaataaccgggtacgtacagactcaccggtcaccaacctgtaaaccgtataaagaaacaatagagtcgcatcagtatcttccctcgtcactttcacccactttaatatgccaaaaaataagaacaaaattatatccgttgcttgaaaatcacaagctcttcttaacttcacaagtgcttcaatggcggttcttcacattatcttcactgcgtaattgaagaagttgttctctcttcctcttaatttcgagttgtgttcttaaaaaactccagagctgattcgattctcgagaagaaactaagccgacaataaagttcagatctggaaaaaagcgaggttaccaattctttatttttaataaatttaatctcgtagtagagttagggttctacttttcgacaattttaattaccagaaattctagggtttatgtgagtttaaattaaagcttcgtcattttcgaagcttaaagttactcactttttatgtctcccactcctgttgtattttaaaatctccagtggtcacatagaacaacttcaagattccacttttgcttttataatcagcagtcttctagaaatctgtaatcttttcgcttttttggtaccttttattttaaattaaagttcacaaattttcaccatttatatgtccatcatcatcatcaccacaatcaaattgagctaaattggtttttgattgttgtttttctccagctccagattacaaaaagaaacagctcgtttttttcactttcaaaaaa

SEQ ID NO: 4190 - DNA, 3000 bp, Unknown
  misc_feature (1)..( 3000): cDNA_ID_1025117_gDNA_ID_1620689_Annot_ID_164710 3000 nt of promoter + ATG
agtaggttgtcacacacaatcttcccaccgtgagacgctgcaacggattaagataacaaatacaactcctcctgagctgcaacgaaattccattcatacctatactttatatagaccgttctagtcaccaagcacacaaattctattattcagcattgctcctcttttctaaaaggaactagcttctaggactttctcacaatatataaaccagatgaccaaaattcgaaaataactatagctatgatctttaactaaaagccacagatagtcaataaacggttaacagttagtatgggccagctcatttaaacgagaaacccgaagggttcaagcctcaaggcctttgacacattttttttgtgtgtgtttgctaagtccaaaaacaaataaaaagcgtctttgacaaaataaaattttacatatttttgaagttgatggatttttcatttttccatacatttggtatttggatataccaaaaacaactttaaaaaaccaatttaattaaggtggtcgttttcaaaatattattatacacatgtttgatgtctctgtgtcttttatattctttttcaattgcaaaataggagttcgggttgcatgattacaaatgaattatcagcaaatccatcttattcaatcgttttccaatcctaaaatgcaaatttctctggaagtttagaagattgtaacgtgaaaagaacagagttagattatgaatccggaccatccggtctattgacatattttgatcgccagttgttgtgcacttgactttttaaatattcagattattgcatgaacgatgaatcattcctttgatataattaaagaaactaatgattacataaaacaacacgaccaacggcgtcgcagagggacgcaattgacgaattaaagatatcataggtcggcataaaatgacaagaacaatctgataataccttaattttccacgtttcaatagaattttataaagaaaaacatagatcaatcgttagctatctaaaatttaggaaataacatgtgtggactatatttaaagtatagagagacctcaatccatttgtttatcaagtaaattggcgaaatttgttagtatttaacattcgatggaactgattccttatcctaaaatgacggattaaatttcagttttcgtgaaaacccaaacatagtggtcaggtggaaataccacaagttttcatatcatttatatatcaattgaacatttcttattctacatattggatcaataagattctgcactttcaaattagtgatgatcaaaagaacgctacattacacataagtaggtatcgtccctttaacaactcgtaaaaaggggacatctacaagactactagctagtaaaaactgagaaaataagctatatttgatcatgaaacaaagtgccatgcaagtactaatgtttgggctaaacttattagatcatggaaacaagtcccaccagaccacttagacatgataaattgataagcttttcttactctacccgatgaatcttgttcttgtcttacataaatttaccaaaggtttcttatactcgtaaactttatacattaattttttggtatagagtgaaagttaaaacaccgacacggtatggtataaaccaataatacgaatgttttatataatcatgtttgagaaacgcttatcttctttttattaagttcaataactttaaatatatagtcgctgtctcttttggattatttgcttgcgcagacttctttgtttgattattctctctgttgaaacaccttttcgtttagtgattattcttttaatgtgtactagtatagtagtatgcatgttattcatctgctgaatatatcgaaaaggttaaagaaacagttgacacaattatcgactacaataagacttgcgaccaagtttataataaaattataaaatgaatttaattagtaattaacgataattttagtagttaattaattttccctccaaatatgaacaggtagttaattccgttaatcatggtggcatgtcaagatctaacccatccccacacctttcatcacaaccagctgtcctcctgccatcatcttatttgttctttggctttttcttctttttttttttttttttttgcaactagatttatcatttttcaattttattaagccagccaataagattgaagaaaaaaaaacttaaccactgaaaataaattaaaaagaattcgacactgttttttgacaaacaaaacttgatatttacggttaaattcataacgtcaagtgaatatttgatcatttttgagacgaaaatagatatttaggtttagtagttccaaacgcaagttttattatgggattatttcatggcgttatagagtttggtgactttggtctttaatattaacctaatgaatttcagaaaatatttatctaacaacttgatagattacggagtgaggaattaatcaagtaaacaattacatattaaaataccatttgcagtcttttattaaaacctgttgaatctttagcaacttttctacatattgcccaatttttctgacttgtgtctttttaaatatctcttccgtgtcaaaaatagtttgtgtgttcttgattatacgtaaattcatctgggcatctcttaattttttctaatcgttaaccttaattacaacctcacgatctgtcttaatcgtgtcttaatcgtgtttttactttatcctctttttattgcaacattagagagttttgtgtgttgcagctttatcggtgtgtaagaaaaagacttataagcaagcagttgaagtggtggttgaggtttcggtttcatttccacgagatctctttggctttcttgttgagatctttccacaagaaagtttagttgttttcttcttcctgtgatttcttcgcctaattttttctggatttaaaaacacgagaagtcaaggtgaaatattatcgaagtctctgaatctgtttttga

SEQ ID NO: 4191 - DNA, 3000 bp, Unknown
  misc_feature (1)..( 3000): cDNA_ID_1823332_gDNA_ID_1620689_Annot_ID_164701 3000 nt of promoter + ATG
gtaacaggtgtgcacactatacacaaccaaagcgttagataaagagtatagtaccacgatttatatttacgataatatatacttttgtacatttagacaaattgcaatgataattttgtctatatatcataaattcaaacatctaaacagacttaatcgcttgctgaatgctgatcgcgaacgctaacatatcatatgagtcatatcccaaacttgtggatatactaatggtttatgttaatgtaactgtatgttaaaacattaatcagcaatgtatgattttataagagattcgaaaagaatctgacaatagtttgtgtgtcattataattatttccgttcaaagaactaaattttgtaagtggtccaataatcaaaaaacattttttatatgttcaatcaaccgagcattgacattaacttagtaaacgataatacactgaatttgtaatctgactttacaagtatgattgatgattttttaattatcgatgaacatttcaaatatattattattatgttgggagaaagaatggttttgttgttttgaaacataaatgcttttatttcaaactaatatcatattccctgtttagttaggttactaattcatatagatttttttttttaacttttggattaatttttgacaaaggtctggatacaactcagttataaagattgaatggaagtctaactttatggcacgtgtatataacgaatatagtgatatcatatactgtatatgagtcatatgacaacttcataatgtaaaattatccaaattgactatacacaattattcaatcgctaaagaaaagaacattgaaaaatttaatatataatttaaatgtattactactctaaactctgcattgaaaaattttagaacgtaatttagtatataaaataaatgtattactattctaagataattagttaattagttttgagatgtaaagtttcgtcaagtgtcaacgagcttcatagattttgcgctgtatattattatgtctagcttaaaaatttgctgtatattattatgtctagcttaaaaatttactgtttgggaaaaatatgaaagtctcctctacctgagtttgttttaaccttctttttaaaattatcaaatccaaacatgtgaaattttttggttcagtcaggtacccaatgattcatttttaacaattagaagttggaatatatttgacttaaatttctctagttaaaacatgtgatctgtcatattaattgcactgttgaatgttaatcgaatttggatatgtattcactctttgttatcccatatggcgggttgaatcacctgtcaaactaatattttcaatctaatgtcttattcattcctttgtacaactgagaccttaattccattttacttaatttatatagggatacgtgtatatagaaaaggtggatcggtgttttatttcaagagttttagtcatacagatatactttttgtgcatatacgagatatatggttgtatttctgtgtttaagagcaagcaaaattcgatcaagaagcttaatttggtcaaccttacgttactagaaaggtatgtgatggtggcgaaccgacgataaccgataagagagagagagagataatatacatttgaggtctattttacgaaagagtctaatttgactgtttatttgctttcttcttttttggtggcctgaaatatgaataccaagatagaaaaaaagactaattttggcttatcctacaagtggcaactggcaagtatacaaataagacttgtatttttatctgaacatactgtcaaatttctatgtcatctcatatactaatgttatataattatatgttatacacataatattagttaaaaatagaagtcttaaaaataaatttcgttatactcatcatatcaactaattatcgattctatgaatatgttgggttaaattttgatggtaggagagaagacgaatatcagatgttgacatgtgaacgaatcgacgtcaatgagaacatgcatacgatgaaatgagtgtgtaaatccaatatttgataagtgaataagaattatgtgattaatgggaattggaatcaaggagctcaaattagaactatcaagactagttgtttgaccataccaaaatatggtaaaataagactaatagtatgtgaaatcttagatcttgtggcctaaaggaattactagtgatagtgaaactacattattgcttgagctaataaaccaatataatttaaaacaatgtaccactcacatatcccataccgaaaacaagtagataattagatatttatatattactagtttccaaataccgtccaaattgggaagcatttctcaccaatttcttaaagaaatcagtttgctagttgccaaccctagcctcaagaatcaagataatgtttacttgttttatttatattagaaaaaaaaaacagaagaagaaatcattcccgcgcaaataaggacattattggtatttcgttgacttgcagcctataaaaagacccctagtaacggcctgatactgcatccgcttcttactcaaacactttatcctcaacctcaagtctctctttaaaacccaaaaatattccaacttcacgaacataaatcatcaactacattaaatcaatcgatttagatcggataatcatctccgtcccgatataatctgcgttttcagatattaatccgtgagtatcgcctctttacctatcgaaatctcgtgtattgatctgatctgtttggtttcaaggaaaaaataacgtaatcaagaaaattattgactaatgactaatcataattttgtttttgttaaaggcctgatcatagttttactctgtaattaatgtatcatgataatgtttgataaatgaatcaaaagtcttaaatcgcttcacgtgctattttaacttaccacaatgactaattctcgtggcatattcatcatttgtcagatctttaaagcatg

SEQ ID NO: 4192 - DNA, 3000 bp, Unknown; identical to SEQ ID NO: 4183
  misc_feature (1)..( 3000): cDNA_ID_3593727_gDNA_ID_1620689_Annot_ID_48523 3000 nt of promoter + ATG

SEQ ID NO: 4193 - DNA, 3000 bp, Unknown
  misc_feature (1)..( 3000): cDNA_ID_2027089_gDNA_ID_1620689_Annot_ID_48526 3000 nt of promoter + ATG
tcttgcttccgaggccaggcttcccatgggacatggtccactctatctacaaacaccttgaggtccgaaggtatgagttcatccctgaaagagactttgagatcgatttcaacagcgttagagagatggtagacgagaacacttttgcgatatttataatcaacccccacaatcccaatgggaactactacactgaggctcatcttaagcaggtatttacgtacgtattagtactcttggagaagtatatattcacatgattggctagatgatctagacttgagatcttttagtttgtgtttacgtttatattgacatggttttttctttaaattaaaagactacatctttgacttaattttataagaaatatatatttcaaacgttgtaaacgtaaccagcaaagcaatacacatttatttcgtttacaatttgcactatattagataaaaaatttacaaaatttaaattttacaatctaatagataacattattttagcaaccaaggccctaatatttacttgaaagatgaatcccagctcgctacattggcacgggaactcgggataatggtcgtttcggatgaagtatatagatggtccgtattcgggagtaatccatttgttccaatggggaaattctcctcgatagtaccagtgattacactcgggtccatatcgaaaggatggattgtcccaggatggcgaacgggctggctcgcgttacacgatctaaatggtgtctttagatccacaaaggtcccggtcactttttttgttttgtttaatatcgatatacgtgatatgcatcgttttcctatatactattatatttgattaactgtaaatgaaaaaattcatttcaattaggcttatctagttttatatggacaggtcttaaaagctgcgaaagaatttctggagattacttccaaaccaccaactgtcatccaggtttggatcattattggtttactctcgtaaatgaaaaaaatacaaaaatcgataatccatttattattgtcaattgttatagtctatggccaattcactatcataatcttatgatataggcggctattcccacaatcttggagaaaactcctcaagattttttcgagaagagggggatttttctaaaagacaaagtggattttggatattctaagctcaagaacataccaactctcacctgctacatgaaacctgaatcatgcaccttcttatgggtattctatcctataatcattacatgtctagtctactataacttttcttttaatgtattagtttgaaacaaacttctcattgtggataatccgcatagcgcagaccaagctggacccattgcattttgtagacattgaagacgatcacgacttctgcaggaagcttgctaaggaagaaaatctcgttgttttaccaggtaatataatcattatccctctctagagttttcagaagattgagatttaagttttagggaactatgatttaaggaaaaatatattcgattgtttttttttttaacttgtaatataaagaaatgtagactaagacatgtaatctagtggttcgtcattgagttacaacctaactttaacacgattaaacgcatgttgttggattggtaggaattgcatttggtcagaataactggttgaggcattctatcgacatggagactccaagattggaggatgcatttgaaagattaaagagcttctgtgaacgccattccgttatagttgaagcttcttcactcaaagacgtcaatggcgtcaactaaagggtcaatataaatttctttgccttaagtcttttacatatgctataataataaatgtgtgttttattgatatgagatcaatcatgaacacttttgtatctgtaacaaataaaattggtgaatttatcaccatgtcgtgtaatgttttctcatagtttgcaatatttcgatcgatgtatttctacttttcgaaacataagataaataatttattttcattaggtatagctagactggtgtgaaaataccatgggagcacaagaacatctatattgacctccttaattagccattcaaatacatttggtcatgtcttatatatggctcaaaagcatgttgaatcggattcgtactgaatagccaggagtacttcctaacccgaactaaccggcaacaccgatcgactagattgagattctaattaagaaaatgttagcgtgcaactttgataagtttgataagctttttatctacttttttttgttcagtttagatcataatgaaggaaaaattgattcctaccattggatattttgtctttagtaacaatatttttaggtttacttaattacataattagtcttgtatgttgatctgatagttttctcaataataaaatttagtattaactattacgtcacattaaaatatacttgttttaaaattaaatataaatttatgcatgacacggataaccttgtaaagataataacaacgagtaaatcatgaaatcgtacgttactatttatattttaaaatgggcaaaacataacaaaaaaccatgggtggttttcctcctctcgtcggtcgaagacagagacaaaaaatatttaaatacgtaagaatctttgcttcttcttgatgctgatgagtgatgagtaatcgacagagttattttgtttcttttgtataataaaggagattgcgactctacaagagagggctaatatagcatgcattaagatcaatcatacagtttacttaaacaagatttaagatcaccgaaggctcgagattcgagatacattattttctttttgtcttctatgttgatgttaatatcccacgtgagatatcaaatgtttagaacaatgtgaaaaccattggcaaaaaaatgaaaagtggttgggaattttcactatatattcgacttcgtagcaatgagagttagtcacccaaaaacaaaatctaatagagaaaaataagtagat

SEQ ID NO: 4194 - DNA, 3000 bp, Unknown; identical to SEQ ID NO: 4180
  misc_feature (1)..( 3000): cDNA_ID_1823340_gDNA_ID_1620689_Annot_ID_48530 3000 nt of promoter + ATG

SEQ ID NO: 4195 - DNA, 3000 bp, Unknown; identical to SEQ ID NO: 4179
  misc_feature (1)..( 3000): cDNA_ID_1807740_gDNA_ID_1620689_Annot_ID_48531 3000 nt of promoter + ATG

SEQ ID NO: 4196 - DNA, 3000 bp, Unknown; identical to SEQ ID NO: 4178
  misc_feature (1)..( 3000): cDNA_ID_4257564_gDNA_ID_1620689_Annot_ID_48533 3000 nt of promoter + ATG

SEQ ID NO: 4197 - DNA, 3000 bp, Unknown; identical to SEQ ID NO: 4177
  misc_feature (1)..( 3000): cDNA_ID_4257546_gDNA_ID_1620689_Annot_ID_48534 3000 nt of promoter + ATG

SEQ ID NO: 4198 - DNA, 3000 bp, Unknown; identical to SEQ ID NO: 4191
  misc_feature (1)..( 3000): cDNA_ID_1823332_gDNA_ID_1620689_Annot_ID_48536 3000 nt of promoter + ATG

SEQ ID NO: 4199 - DNA, 3000 bp, Unknown
  misc_feature (1)..( 3000): cDNA_ID_1823329_gDNA_ID_1620689_Annot_ID_48538 3000 nt of promoter + ATG
tacgaacgtggttagaaaccaactgttcatcaaacagttgcaattggtgtaacagttgttttggatgatttgggaaattggtttaaacagttgtagaatcatgcattttgataatgaggtaattaagcaccttttctccggaacggcatggtcatttgttgcctaaacgattaccaatataaaaaaaggacacataatcataaaaactagtagcatatggagacagcaataatttggtgatataagaaaacatacgacagatataagcaatcaaacatgtcgtctattctttggtgcgctctctaaaattcaaaatagttaagtattatagtatcgactttaaaattctgttcttttacaatcacaagattaccacttataatcaaaatggtaatcttgaggatttgtgatttaactattggtgttacttgtcattggtgtgtcatcacctgaattcataaaatttctattgtatgttattgacaaaacaaattattgtatattgaagtcttttatcttttttttttatcttctttttattgttataaaacatgatgtctttaaaattttactaatagtgattctcatatttaatcaaatcagtagtgatcgttagaaaaatgattatgaattttgtatttgtaagaatataaataatttggtgctataataagatattagcgtaaaacatgatgttatttgcaaatcatagcgatatatctaattaactctcttttatattttggtcaatctaattaaatttcttttttctaattatggagttataattatgaaatttgtaaggtaaatagaggtgatacaaaggattccaatacctttattggacatatagggttgtcccatgatttgactctgtccttctacagctgtcttaattaaatcttatgcaattttattcagtatctgctaattttctatccttcaaatataaataatatatgtgtgtgtgttttaaattgaattttacatataaaacaaagagatattgatagaaaaagtggagcatggaagaaaaaaacagaagtgggaaacaaaactgcagagattccatgggtctcttgttaacttgcttcagtcttcttgtagtcttcccatcatcatatcagctgtgtcactgattttttttctgtttcctgaaaaaattgaaaatttctaagtttataaagcttactgacatcatatgatagttcaatggtaaatgaataattttattttatttttttatcaaggttggtttgttataaagggaatttaaataacaaaaaaataactaacattataaagttccactcgatctttcattcatgataacaaagatttcttctgctaaaactattttgttttcgttttgtctagaaaaatatttattctctttaggttcaccatatttacttaagatataatatgaacatgtttgttgaattctcagaatatttacatactaaataaatagttttatttggtgtaaaatgtttgttgtatattaagcatggttcaatatgttactgctgtccagaacttaaaattctgcttcaactcgatagattttgtgaatttgtgattaaatatcgttaatcgagttctctctaaccaaattttgcaagatctacaataaataaagaaagacaactaaaaaagcaagacctacaacacaatatgttgcattttaaaaataattacaaaggaataatcgaagggtggtttcaatttgggtatagaaggtgagtacctttttgttgtggtgaaatggaaacacacaactcatggctaagcagagactctctctcttacctgttttttattttattttgtttgattattttattccaaaagagtgaatcctcagttttccacatcatttgatatgaccattcagttaatttttttatatttctactttcttacatttatacactcaccaacctccaatctactttcaggaagaaaaaatgtagcattagtgagttcatcacttgttatacaattctttcttctcaaatattcaatttcattacaaaaattcataattagtcttactttcttgaaaattttccaaatcaaaatttataatttccttttcagtattggcgtcaaggattataggaaaggcaaggaattaagtttttcagtataaacgactaaagtcactaaataatcatcaaaaaataaaatcaaattcatatattgggccagtttaggcccattaatatagagttggatatatgctccatttattttcacttgtgggctcaatattttggtctgtgtacatttgttttggcaactaaaacttagttttatgagattttttttgttaatgataatataatcagctttaatactcacagtgccttagacaaattcaaatccaattcaatgttgattactattattttcttgtcaagtctaaaagtgctaaattgaactcttataatatgtaaactgctgtaatgaaaatttatccaatccttttaagtttatgttttaggatttatagagataaaatgatgagaaagcaacgcatgcatagaaaaaaacactaaagagttgactcttttttctctttttgacttttgagtaacgagttcatgccgctgattgcgctctttcttcccttccctaaataattatctctacttttcaaaattaaaagtttcaattataaatttgcttcttttttttcattttatcccaatttcattcgaaaacaaaacttgtctataacgtcttatagtacgtaattagtttataaatcaaagaaagcaaaactataatattaatatctaatttcgatatgttagaagattctaatccttaacgacactagattcatttaatcgagttataatatataatacatgcatcatcatctatttacttatggtcctacatttacttgcctttttcacttctttacacaacctcgaactctaacgaacattttcccaaagacagaaaaaaaaaacactaaagagaaac

SEQ ID NO: 4200 - DNA, 3000 bp, Unknown; identical to SEQ ID NO: 4190
  misc_feature (1)..( 3000): cDNA_ID_1025117_gDNA_ID_1620689_Annot_ID_48539 3000 nt of promoter + ATG

SEQ ID NO: 4201 - DNA, 3000 bp, Unknown; identical to SEQ ID NO: 4189
  misc_feature (1)..( 3000): cDNA_ID_1823325_gDNA_ID_1620689_Annot_ID_48540 3000 nt of promoter + ATG

SEQ ID NO: 4202 - DNA, 3000 bp, Unknown; identical to SEQ ID NO: 4186
  misc_feature (1)..( 3000): cDNA_ID_1823302_gDNA_ID_1620689_Annot_ID_48547 3000 nt of promoter + ATG

SEQ ID NO: 4203 - DNA, 1587 bp, Unknown; identical to SEQ ID NO: 4185
  misc_feature (1)..( 1587): cDNA_ID_1808099_gDNA_ID_1620689_Annot_ID_48548 3000 nt of promoter + ATG

SEQ ID NO: 4204 - DNA, 3000 bp, Unknown
  misc_feature (1)..( 3000): cDNA_ID_1841114_gDNA_ID_1620691_Annot_ID_48581 3000 nt of promoter + ATG
ttacaatttacgatgaataatcttggtgactggtggcttatgctattcttacaaatggccagcaccaagtcaaaatatatatcttctcgaggaattctacgaggcgactcaacccgatatatccatatgtttttagtatatgcaccgaagttttgatccaaatgccttaaaaggccgagtttcgaaaaatgattttggaactccgaatatcataaaactgtcaatgatagcttattcttttgttgggcaacgaaggaggaaactaatgcactaatgaacattattattacaacttataagtgagattcggagtcaaaatgtcaaatttggaaaaatgttgaagaggaagaggatttaaagaccattttcagcagttctattaatgtaatctacaaaaaatttatatattatttacaaaaaaatgtaattttatcgaaattgtttctattggaaatcgatcgaaaataataaaatatgatataaaaatatattacttctttcagtatatgagaagtatttattaaaatttttaaatgtgataacataccggtaaaactatttttcaaaacagaaaaagacaacacaattatttgaaaaacgtgaaaatttggtatttcatttctttttgtaagcaaaccatgacgtataaaagaaagaattcattctaggttttaatatattttaggaataatctcaccggtcatcatacaagtttagcagaagaataatctcaccggtttcattatgtagtatgtcaccatgtcgacaccacaataggagtatatatatgatatgactccaaaagaattgttatttaattaagaaagtattataagacaatacttttcgttgtatttgcggaggtaggtgggtttccaattatacaggtctaaaaatcgaggttggtgaagcttactttacaacaaaagtcctcctctattattctaccacatggaaaaaattcaccaaaacgtgatttacacatactctcactttattctaatatttaatatttttgtattcatattttacgtagatcgtttaattttctacatgtcgaataaataaataaacactattaaattgactttaacgttcaaacttaaaagtttacttttaccagccttttttctttactgagtaaatattacctgaaaaagacatttttctaacttcagtattctgtgtgtttacgaagaaaatgaagatcttcgtcacatcacatgttgacctcagatctgccaataccactaggcactacgttactatttaatgaccacataatcaaatcttaaattgaaaagacgattttgaccctcaccgactcacatgcatacaaaaccacctactctcctctccaaaccccatgatcatgccattctctagcaaatattaaatacttaatattctttgatcaaccgagggcacgatgcaataataataaataaatttgttaaccataacaactcctcaatcgtgtagttagttaattagtatgtccacgaaaaaaggtttcaaagggaggctaccaactatttcttgtttataaaaatgtgtgtttaatggctcttttcatatgctaaattataaaatttgtgacagagaatatctaagactttagtggaataacaaacttattttttctcattagaaactgagagtatcgaaaaataacaatttgtacacatttcatttggcattttcaacataagcaaaatgggcgaaagagttggatatgttctctaactataatgtgatgttaatttggatatggtatcgattaagtgatctagtcaggatgctaagcaaagaccaccaatttcttataatgttgggataatgaatagtgaggcaaagtgatgctgtagttacacatatgatgagttgtcactgaaattataacataaacataaacaaggatatagtcttatagagggtacggttacacatatgatgagttgtcattgaaaattataacgtaaacataaacaaggatatagtcatatagagggtacggtgacttcgtgattcttagtgatgattgatgaatatgaactaagattcatccgcaagtaactttaaaatcagattactatgaaaatacaattttaattttgcgttatccgttttcaagtgtttcgtttaagaccgtataaagttttatttagcttggagatatgtgagagactatttttatccgcaaaattcatatgtttaaattcatcgtgaatacttcctttgtgaaaaagctttaaaaaatacattattaacatttaaggggttaatcacataatattgaagcggataaattgttgaaatcttcacaacatagatgaaaattttgtggtcgacaatgttgacgttggtttaattacctttgcattgttaacacataatacatcttatttacaccagatgtacgaccatttgagttttgaaaggttaaactatgaaaaactatagagtttcttattaaaatgtaattactcctatctaaaacactgggctgaatcaagatcatgggccctcaaagccctttttccaattttaattcctccgatttatagggatttatacagttttttttttttttttggaatcaatagattatatttttgtttgtaattactttttattttctaccaacaaattcaatttctgatgtcaaaaaaataaaaataatccgagagagagatttacccaacacaaccttaaatgcaattgggccttaagtatccatctaatcataattaattaagggaaacaaatattggtaagagggtaaaatagtcaaaacacactaagcttgttctcctaccacacacacctaaccaactaacaccaaaattagcaaaggaggacaaatccgtaatttaccccattttctactcctcttttaaacccaaccgcctctcttcccacttctcactctctgatctcagatctctccctccctctttctccgatctcagatccattcaacaatctacaaagaagatg

SEQ ID NO: 4205 - DNA, 3000 bp, Unknown
  misc_feature (1)..( 3000): cDNA_ID_2050886_gDNA_ID_1620691_Annot_ID_48582 3000 nt of promoter + ATG
gtcaatttaatagtgtttatttatttattcgacatgtagaaaattaaacgatctacgtaaaatatgaatacaaaaatattaaatattagaataaagtgagagtatgtgtaaatcacgttttggtgaattttttccatgtggtagaataatagaggaggacttttgttgtaaagtaagcttcaccaacctcgatttttagacctgtataattggaaacccacctacctccgcaaatacaacgaaaagtattgtcttataatactttcttaattaaataacaattcttttggagtcatatcatatatatactcctattgtggtgtcgacatggtgacatactacataatgaaaccggtgagattattcttctgctaaacttgtatgatgaccggtgagattattcctaaaatatattaaaacctagaatgaattctttcttttatacgtcatggtttgcttacaaaaagaaatgaaataccaaattttcacgtttttcaaataattgtgttgtctttttctgttttgaaaaatagttttaccggtatgttatcacatttaaaaattttaataaatacttctcatatactgaaagaagtaatatatttttatatcatattttattattttcgatcgatttccaatagaaacaatttcgataaaattacatttttttgtaaataatatataaattttttgtagattacattaatagaactgctgaaaatggtctttaaatcctcttcctcttcaacatttttccaaatttgacattttgactccgaatctcacttataagttgtaataataatgttcattagtgcattagtttcctccttcgttgcccaacaaaagaataagctatcattgacagttttatgatattcggagttccaaaatcatttttcgaaactcggccttttaaggcatttggatcaaaacttcggtgcatatactaaaaacatatggatatatcgggttgagtcgcctcgtagaattcctcgagaagatatatattttgacttggtgctggccatttgtaagaatagcataagccaccagtcaccaagattattcatcgtaaattgtaacaaactcaccattatttggagagcccaaagatactactcaatcttcttaccataaacttttgtcactgtcttataagctataagattactggtctacttaactcagaaatatttatgtcctttgtagccaaaagctacactgaaattgacacaactcgagtgttgtccttttctggtcgattgaatagaatcgaatgtcttaatccagtaccctccagcttttatttcgtgtaatttattttccaaacctaccactaccagtttcataactctcgaataaatttatcaaatagtcttttgagtgctcaaagtcttgggataataaatggtcagtgctatgtatcacccggatgtgaaacattatgggtggagatagactattataaatttattgaaatatacgattgttactcgtttaatagcaaaagtagtacaatgtatatagtttctatcgagaacaagatctatttaaaattcgaaaagtacatttaaaattcataaacatataaagatagtaacatgttagatctgcatagtaccaccaaaacaagaaaaaagaaacgcacatcgccacataattgctatgattctcactgtcggctgctttgaaatattacgattcttttggtaaatcacacaacataatataattacaataaatatatatatactaaagtataattaatataattaataccacattgtttaattctgttttgatcttttaagatcagtcagatccaccgacgttcctacacgcgcaggtccagatccaaacagcacacacacacacacaatgccactagtgtaaatgcttggtggctattgcatttgcacctattgatactctttcttcaaaaacaagttattgtttttattttcaacccaactttaatacggattcatactgggatttaggtgttaaatctgataatttaggtttgaataagttgtatatttgtttctttgattaaaaaaagaacctatatatatacaaaaataaataaaaagttctagatttcaattttccgtatatagcgggttgaattgtctattttaatatgaaaattgacggatcttataaacaaaatgttctgaaatatgtaaaaggatttagccaaagttaaccaaaaaaaaaaaacaaacagaaaagtcacattcacatgtcgtggtagatctaaggcattaatttagaaatatgtcgttacaataagcggagaacatgggacgtttctcgtggtccaatcagacgaacgagatctcataaattaaatgacttcagacgagggaattcatggcagaatgataatgcaacttaagtgactttagagtgaaaatgatacgagaacaatgcataatccatatgaccgttgagtgagtgataccattagcgcgatacaagcgggactataaactgatctagattgtttttcttgggaaaaaatgttacaaattttaaatatgtagtttgaattgttaaaccaagattcaacagaaatataccgtaaataaacaacagttgataatagtcatcgaaaagatatcaactgattcttcacttgggctactgtgacggcccgttagggttctcaatataagtcaataactacgatctacgattcactgaaacaaataaaacacagccacgtgtccaccctcccacatcaccgtccgatctaacccacgacaagcttacaacacgggtcataccgctcgtgcagcgtgttccgtcatccacgggattacaacttctaccagatccaccaaaccctcaaaacaatctgaaccgttcatttcattttgacctcatctatatattctctgtcactccctttctcttctcctcgcacacacttctctctctctctctctctgcctcctttcggattcaaatctcagatctagctcaacc

SEQ ID NO: 4206 - DNA, 3000 bp, Unknown
  misc_feature (1)..( 3000): cDNA_ID_1823521_gDNA_ID_1620691_Annot_ID_48584 3000 nt of promoter + ATG
ttgatatgtttaatattagtggtcttaaaaaataataaattaaagatttaacccgtattaaaacggtagattaattatattttacatttttattaatgttgattcaaaaacctgtcactccaaatccgtcttgccaaaaagtcatttattttattaatattaattttattaatgatatgactccgaattataatctaaacattttagctaataacataggagtacaccatatttatttaataagagaatgtatcatatgacccgaatgcatttttacccaaatccaccaaaaaagtcttgcaaaaatactatagagataagaaacgatagtcggttttgataggtataatattagcaaatatattagttagcttaaattagttaaaaaaatacaaattgaaaaggtatattatactttattcgaatatagtatcaaaacttatataacacagagatttgataattttttaattgttgaatacttttttttgtgctaatttttatgtgattaagatttaattgattttgtatataaaatatgaaattgttttacgaacttatttgtttataatttggtaacagatagatatttgagtattcaatatattttgcttcagtttatgaaatctttgatgacccgtctttagatccaataagccctataatctagattaacctgcagtataccgcaagtaggcttatattttagttaagctaaaaacttttattgtaaagatgatttaaaaaatatgatattattttatttgattttaaatgtatagtaaactgtgagttgtatatgttttgttgatattatctatattgtttagtgtttaagattatacacttgtagtttgattgttaatttaagagtttcacatgtagtataccatcttgtattaatatcgatctaaacccgttcaattctaggattttccggcttgtattaaaaattgaatcacatcatacacataaaaaaatctaatatgttattaattattatagtatataagattataaattttcaatataatatgtatgaaattgaatataaatatttcaaattatgacccgttactcagtagaatgtttttttaaatctatttttcacctttataatatttttcatgtattgaacagtttatattcgtttttaaaaattcaaattatggcatatgcgaaaaaactctaattatttttttataatgatgatattatttttcgcaaaaatagaatcatataaagatgagaagtgaactataataattaataaaaaattaatatgataatttagatatcaaatctaatttgttgactttaataggttacttttttggaaattaataatgtatttcgtttttctaattaaattaaattagtgaaaatttagatatcaaatcttatatgtttattttgattggttattatttttgaaaattaataatgtatttcgtttttttaattaaatttaattaattaaattagtatttgactttttaatctttaaagagataaattaatttactttttaatctttaaagagataaattaatttactctttaaaattttatttctaatggcatacctatgtaattacttacaaaaattaaggttatatttaaaatgtacttcccaaataatatagtaggattttctatctcacaaaaaataaaaaaagtgtctatttctctaacttttcaaaaaactacctagtttgcaaattatttttgaaaaagtgtctatttttccaagaagccctttatataatctagtttggatgaaaaaatgagaaagaaaaaaccaaactcatatctattgtgagcgtgatacaactcttatttggagctactcttagttttttggcatttggaagaagcgattgagaaaaaaacgtttgatgcgtatgtatgtttatttggtgaaactaagtatggtaaaaatagagaaaaaaatttatctaacaaaaaaggagaggcttaggtatggttccttggagaaagcattcccataatcgtggcagctttgaggaggtggaaagacaaaaaaacggttatggactctttcttatgcccccaaatataatagctgcttttactttgttatagtttgtttgttttaccataaaaagaagtgaaggaaaggatattaatagcatacttcggagctctaacttttgccatctccgcgttgctctttaccttattcaaactcgagcagcaccgtctgcattttgagggtgaaggcgtatatcataaggatttgaaataaattggacaatgaaatgatggttactttcttttcattgtttaggattccttaacttataatctccaaaacttgggactagcatgtctttctttgtttttcttttttgatgtttttgacagaagatatgatggtgacagtatgagagagacctagatgttgtgaatgaagacacaagacaggatcaaagaagtccggctacgaagtcggagtataagtatggatgtcagatgaagtaaaaccattttggtaaagatgacagaccccattttatgtactatctatatggtcaattctaacaagtcactcactcaaattcatgaaatatacaatgcaaaaaagaaagtcccgtcgaaccctttgatgggtgttccatcgatattcggttaaccgttggcacttgaattctttgctatacgaaaagtttggttcaatttcttccggttcattaaagttaccggttaatattcgttaaaccgggacagcttgacttgacctaagaagagccctagtatcgtttttcatgtttcggtttctacgaagtatttgcaaatcgttctctcttctcactgaaacccctaaattcgggtcttggatttactcgtaaaatcacaaagtttatatttgtgttgtgattttgtgaattgtgtatcaaacctttctctcttaggtaatcgtgttgttaataatattaactctcttcgtctcgtgctgtgcacagtgcatagaagatg

SEQ ID NO: 4207 - DNA, 3000 bp, Unknown
  misc_feature (1)..( 3000): cDNA_ID_1823517_gDNA_ID_1620691_Annot_ID_48585 3000 nt of promoter + ATG
ctctttttattaatcaatatattttgatgaaaatcttccggatagcatatttagctttcgaaactattctcgacccttactcgtattcttccgttataaatgtattaagtaatggtttatatttaggaaaaatgtcatatttagcttttgatgtttagatcacttgttaatgtacaagatcaaagacataaaaattctattattattttggagacagtttttattttattacaaaattcaaaaatatgttttgaaataaacagttttctctatagttttatttctatgttgtaattcaatcaaaacaaccatctcagatatataatctccactttgttcattttgatatagtttttttttcaagtagatgtgctaaatctccaaaaacaaatatattttgttatctgttgcgttcttcatgattatgtggaaagtggtttatcaaatgttagattatgtatgtggctttgttctttcttgttatgttatgtatgtgtccttcataattatgtggaaattgttttttgttgttgatgatttggtgactggttgaatttgaccattttgtcattttgtgaactatgcttaacggccaacgcaatggggatattgaggtggttttctctaagcggctatcaaagacattcagacagaaagaattggagtatatttggatgccactaacgaggctatatggttcgaaaagagtaatcgtctcctttgataggatacaaagtgtttggtcatactttttttccgttcacttgtatatctatctaaaaacccgattgcattacaaaatttctttgggcggtacatgggactatttgtcagcttagataacccaaaggaagatatcgaattattaatctaaagaatatccgaaaattcgaaataaatttacatatccaaaatattagctatatttagttacaaaatttataccacaaactacaaaataacaaaaatatcttaaataacctaggcttccaaaattttgtagttatatttgataaatttatacatttttttttttttgcaaaatataaccaaattttagtataatcaaaatgtttattatttttttgtttttttcttccaaacaccaatccaaattcgacagctatttgaattgaatagtcataaaatctgaatatataataaactcttctatccaaattatccaaatccaaaaatattcaaactaaatcctattcaaaatctgaatgcctaggcatagttatatacttatatacagtaaacggatttatttcggcgggtatggttcagacagagacttcacacccgtgggccgacgtggaattactcgaccaaggcttcactaaaaatgaatatgtgctactaaaacgcaccgtttcttagtttaattcaaacggcgtcttattgcttctcactctcccaatctcgattctcagactcaagacactctggaagaaccctaaagcattttcctcaatcgttattggggttttacgaattcgacatctgtttctgactccgccgggtaagtgattatttctctccgttgaacctaccttgaaactgaaaaattctcttttgattactccgttctttcactcgatatcagaagtttttttcctgtttcattttttctgtgtttatgacgaagtcctttctctcctttgatttgtctatcgaggtcatggtcttgtttttttctctgaaacccatttgggagttttcagatttttagttgaatcgagaaatttgatcttcaatttcctgaaattttgtgtaaaggtcccatttttaatgcctagtgcttgctttttccagtggtttacccaaatgcttgaaatgatataagttaagctccggtcatttgcgtcgtttatgttttttacgttaacccttttggggaattgcgtctttgggcgacaaagtcttcaacttttctggatttctgttgaaatattatctttctgtctcatttatttcattgctactttaagtgtttgaattgatgcttgtcgtatctctgattgtgtaaagtttgtctcgaagtcattatatttagagtttgtcttatctctgcttgtgtataatgtttgtcttatcttctgattgtttgtcttgttttataattgaacattcttttagtgtaatttgtcttagtgcttcttcatctgagtgtgcgagaggaagctagcttatgatccatgtacttcagatttaagttctttgtacagaagactcggtaaaatccctgaggccgagtctctctaatttttgaacttttttagagcacttgagctatttctagctttctactgtgaatgttgtttgtgaaatttttggtgtttgagcttagatagattttgagttttaattgtttgcactttggctatgtgatatctcctgagttcgtggattggtcatgttagctctgtcgttattattctttgatcatataattcatctgattggtggagtgttcttattatccactgattcatttgttgaaaaaatgaagttggttgaaaaaaatggagaaattgatgcgattcttgagttttgttatgccaattactgtgaaaagtttgttgattgttgttggaattgatgtgaaatatgtgtgctttgggaattttatgctacaattgtgaacagatgtatcaaactccgttgcattgaaaatctctgtttgggcatgtctcgttgtagtatacagttcccaggattctgacataatgtttcaactcatgacatttcttaatttgtgtaatctaatggtcgttttgactacataatgaatgcagatggctagatgggatcagattttctccttacctgtgcaaaatcctaccttgccagaattttcttctaccgatcttgtctggtcaaaggttgaaggttaccgggacaatatagataggttagccctcatcccatatactagggtggatgattttgtaagaggtgaatgctcgaataaagattgtcctacaagtttccatg

SEQ ID NO: 4208 - DNA, 3000 bp, Unknown
  misc_feature (1)..( 3000): cDNA_ID_1823513_gDNA_ID_1620691_Annot_ID_48586 3000 nt of promoter + ATG
ggagatgggtcgtcgggaaatcgagaaaagttgtcatctttcgtgaattcagaggatgttgatttctgggtaacgtcgggaattgagaaagcggtttcgtctgtgtcggtgaagagagcagagtagtcgaaacagaggagaacgaaacagaggataaagaagagtggaacaacgaaccagacattgttatgattgttgttgttgttggtccgaaacttccccgtcgtgatggagatgggtttctccatctgagaataattcttgggtcgcatcaaaaaaaggagagagaaggatcaaaaaataaaaaaggggaagatttgtttgttgagaagttaaaggaagattagtgtgaccatgaaattggggagaagaagagtgagagagttagagtgacacatggatgtgttcgagatactcaaagtgaagcgtttacgttgtcggcaaattaaattaggggagattcagtttcacatgggtcagtcaataaagaccttctctttactctcggctccacctaattatagtactctattaatggtaatttaaattgaatataaatgttagattatactataattactaaaataaatgttgtattctctctgttttagattagttgatgtttaatatttttacataaattaaaaaaatatataatttttctgttttatctctaattaatgtattattaaatttgatatcatcaattaatcagctaaaataataaggataaaattgaaaaatctgtttaaaaacatgcattaaaaacataaaacaacaactaatttaaaaagaattaatttataaaacgataattaattgaaacggaggaagtataatttaagtatgatgattttagttttaagattttacaaatttgttttagtggatttatttggatagagaaaaatacagaaatagcgaaaaattttaattggagagcaaaagttaaataccatttcacatatttgattgtgattaataagagctcaattgatgatatctaaagcttttgtacacacaaaaggggaaaaagaaaagcacttttgctaggaaaaaactacattaaatgggtacaaatctttattgttttgtgctaaattttgagtatgttgtttaatctttcttgctttagtttcggctttccctctttgtatatgctttgttttgcctttgctttcctctttgttttgtgctaaattttgtatatgctttgtttctgagatcatctcgttgatcgccgacattcataattttttatatataatctatgacacgaagaaaaaaaatgggtacaaatctcagtcgaatcattctcatatttgaatatattagttctgtgaaccgattgacatatctgatagtgactagtaggctagctagtgattactgatgtagtatgcaaattgaccaaaagatgagatttaaagcttagtttggcaaaaataaattaaattggtacaattatcactcgaatcgtatatattgttgacgtcaatcggtttcttactaaatgactaaatttttaagcgtttagtatacagtctgagtctatatagtatataaaaacattaattgaaaagaaatggatgatttgtttcattcacatatttatgatttctatataccgtattgttttaaagatacacataatcattctcatatttatgatttctatataccgtattgttttaaagatacacataatcattctcatatttatgatttctatataccgtatatgaggaaacaatacattaacgttgaatttgttgacgatgcgcgatcgtatggaacgtagaaaatacttctgtagtattgagtcttttgagatgatagtcaacgtaggagattactttagatttcaaccaccattgatctcggcgaatattatgaaatttatatgaccaccgacgaaatttcaacggagtcgattatagacatgtcaattaggattaaagcaaactctaaaacagacttacataaatatgttcaaaacaatttggacttttcgaggtaagtccggccaggttcggatcagcccaaaaaatccttaaaaatatattttaatcttttttttgatcttttaaaatatattttaattttgtttttttgatattttagtttaattgggagattttggtttaagaattatttttagtagatttgaaaacctaaacctaattttataattgtgttttactatgaatctgaaaagcaaattttgggctctactactcagttcaaagtgatatgactttatattttagttggtacgagtttaaatcatttatttgattgagtcgttttatatttagatttttttcgtaactatgcaattttttttaaaaaacttacatatattataaattataagttattttttcttttaaaagaaaatccaaaaatatcaacaaaaaccctgtaaaagattggtcggactataaaatataggttcggaattttaacgggacgaaccaaactagattcaaatagttgattttgcgggtttggggcgagccgggcctcacatgcctagggttatggttttaatatgatgtaacaccgtttatggtttttgaatataaattcgtcgatttgcaccaaaacttttttaatcggtttggttcgatttttatctatagtgggctaagttcttaaaagcccagacttgtgtttttttttttcgtaactatagatcgatcacttaaaactaaattaaactgaacatgtttattatttattatacacgtagttcgaaacagcacttagagacttttcacctttccactactgacctgaaaaagttgaaaccctaaaactggagtgaagacacagtagatacgatcggaaaattccatggagatttaagcatctcaatctcgatctcgctccgtttgatctgattaggtacatatttctgtcattttgatgtctttcacgttggaagatttattcgattcttcatttcagttcgatgtttgctaggcagataacatg

SEQ ID NO: 4209 - DNA, 3000 bp, Unknown
  misc_feature (1)..( 3000): cDNA_ID_1823507_gDNA_ID_1620691_Annot_ID_48588 3000 nt of promoter + ATG
gtcatcctcaacaccttctcaagcgtctcacgcatgttccaagttatactgatggaaaatgttgtttgtgtggaagcaaacttcataacttgttttatcactgttctatttgcaattttagcgtggatgtcaactgtgaaaaaaatccaccctctttcactctttttcaccctaaagctcatgagcataagctcactcttatgccgcaacgaagttttgtatgcagcgcttgtggaatggatgacgatccaaatccttacgtatgtcctcagtgtaatttcatgattcacagaagttgtattgatataccacgcgttattaagatctatcgtcatgatcaccatatttgttacaataactttcttgacgctggagattggaaatgtggaatatgtcataaaaagataaactggacatgtggggcttattcttgttcggaatgtccagatcttgtcatgcacttgagatgtgccacaagattcgggatatggaatgggattgaacttgaaggcatatcaaaaaatactctaaaagtcaaatcatacgaggagatcgaagaaggggtaataaagcattttagtcacgaccatactttaaagtttaaagaagggagtgatggtaacggtgaatgcatacagtgcacaatatgcacttatcccatattttctaatccattttatagttgcatggagtgtgatgatttcatccttcataaaaaatgtgtggatctcccaaaaaagaaaatagattctttctacaagatgtcgacctcgctaatcacaaattatcagggtaatgcagaaaacatttgcaatgcttgtcaaaacatctatcaaggtttttcttacttaagtgatgatggaaacactttattggatgtgcgatgtggttctatttccgagccttttttccatgaaagtcatcctcattcgttatacgtcagctacttaacaggcggccgattttgtaatgcttgtagagaaaaagcaacaatggttttgagttgtgaggaatgtgaatttgttttagacattaaatgctctactctgccaaacattgttaaacacgaaaatgataaagatcatttgttgtctctatgttatggagaaaacaaatgtgagcaatgctggtgcgagatgtgtgaggagacaataaatccaaagaaatggttttattcatgtgatcattgtggcattgcttttcacatcagatgcacacttggagacttcatatggtttaaaccggaaaaaaaatctgaatcatccaccaattgtgtgattcttaataatcgtgcaagtcggccattttgttattcttgtaattctcgctgtaaatacccatccatcttgtttttctatgggaaaacattgtgttctttgcaatgtttccaacaaaaagtttatgcaatcctggcataaatcttatttattttctcaaatattttatgataaaaaacaaattagattatgtgttgcatgttaatactatatatattttaagcatcaagtatattaaaaaaaaatttatgtgcaatttggaattcaattcgatttaggttggatttctttttatttctttgttatacttttggtttagaaataatagtattcaaaacaaaatataatatactttaagtttcgatatgtattcaaatctaatcaaatactaaattttataccacgtcgtgcacatgatgattttcttttgaaacaatttgtgaattttgataagggtttattggtaacgagtgtttacttgttgctgtaagaactttttttttgttttttccacaaaagttggattttattgaactgaaccaatcaatatgggctaatataaacaaaagccgtataactataattttacaagaattaattaaagcccaacatgagcctaaacataaccctaatgaagaggaaaatacaaaaagcctccatcactaacacgtgtttcaattagaacaaacagagagcttccatcacagaccgactttaaccttgccgttcaccaccgattccggtgacaagagtcatcgtcgatattaatttgttcagtaaattttgtggtttttcaccgtttaacaaaatcggagcccataagaggataacagctaaagggaattgatagtatgcttcagttcttctacttcttctctttaattaaaattgcaaatcactgggataattaaaaaacctttcccaattaaaaaaccaaacactcaaaagataaatcagtgaaaacaattgattagtgaaatttactaaattgcaatcaccaatgagaaatcccatgaaattatttaaagcaaacaaatatggaagccgactaaaagatgttaacgaaaccatctatgtcagttgataagctggacatcactgcgtgggaagccaatagattccagacggaagccgaccaaagatgttaaagaaaccatccatgtcagaagagaagccggaaatcacggctgaggaagccagttgattccggacggaagccaactatcttggctaacagagtcataagatgctggataaaagcccgagtcatacgagacggcgatttactgaaaaattcagtcggtagaaacagagttcatctctgtaaaagatatgtaggaaaaaagagagaactttttgttttgctgtaaagaactttggatgcaaatgtttttactatttgtgaaactattattttatatttatagccaaatttaattttttaactaaacaaaaattatgccgtccatatagtatcctgtaaattaagttttagattattaattttgttaattattgataaaaaaaactcaaataatgtcatattttctcttaattcaaaagttaattgtgtataatttgattggttcccccaaaagaaaaattgattggtttagtgaaccgataaatccaatctcgtaccgaccggttcaatgggttttgtatttgctcctctgtgctctggcctctacactttggatagctgccgccgaagttttgtgca

SEQ ID NO: 4210 - DNA, 3000 bp, Unknown
  misc_feature (1)..( 3000): cDNA_ID_3072763_gDNA_ID_1620691_Annot_ID_48591 3000 nt of promoter + ATG
aagtctctttatatctatatcttaattcaaaacacatccatatacactttggttacaacttgcaagaaatctgtttcaatttcttaatgtacaactaaaccctctttagcaaaagtagaattattaaacgaatattgtttcttgtcacatactttatatagagacatataaatagaaacatatatgtagataacaacgacacaagtcacaatcgtgcttactcacgtattacgtatagccaaaagtttcctactcatatatatcacaagtgtgcttgcgtttgagatatactcagagacgtgtagcttcactaattccacatactcagagagaaatggcaaccgaaaccgtattagccacggcggtgagcaatggcaaaagcaaaggatgttgcaagtccggtccaggttacgcgacgcctctcgccgccatggccggtccacgggaaaagctcatctatgtcactgccctttactccggtaaacatttcattttctcatcttcaacttatatataaataaatatattttttttgttaaacattttcaacttatatttttattcaacaatttcttgctattttgagactaaaaaaaaaatctgacttaatcttatacttttaacgtttaaagaatctttgttagatcccatggaatctcaattgaatcacataacaatgttaagtttcatggacttgtaactcaagtcccttggcaatagttggcttaaatccgtttaatcttataaaaccggactacgtactagtactaggtaatgttttgagagcttttgctttatttgattgtgttaatttaggaacggggcgagacaaaccggactacttggcaacggtggatgtggatccaagctcacccacattttcaagcgtcattcacagactaaaaatgccatatataggagatgagcttcaccacactggttggaactcttgcagctcttgccatggtgatgcttctgctgatagacgttaccttgtcttaccaggcttaatgtaagatccttacattgaccctctcacatttcttgatgatgaattgactaaaaatatgtttctttcttgtttgaatgaagttctggtcgcatctatgcaatcgacacaaagaccgacccaaaggctccgtctttgtacaaggttgtagagcctaaggagattgctgaaaagacaggattagcatttccacatacatctcattgcctagcttcaggggatatgttggtgtcatgccttggggacaaagaaggaaacgccaaagggaacgggtttcttttgctagactctgacttcaatgtcaaaagcaggtgggacaaaccaggacatggtcctttgtttggttatgatttttggtaccaacctcggttcaagaccatgatcagcacttcttggggtgcacctaaagccttctccaaaggtttcaatctccagcatgttgcggatggcttgtatggaagtcatttgcatatttatcaatggcctgaaggtgaaatgaaacagataattgaccttggaaataccggtctcttacctcttgaggtaacattacaccaacataaatgttgatgatctgtgttagtaaccaagtatgtaagcttattgggtttttgttgttatgtggttgcagatcagattcttgcatgatccttctaaagatacagggtatgttgggagtgctttgtctagtaatatgataaggtttttcaagaacagtgatgacacgtggagccatgaggcaagtgaagtttctaaatctttttcttttgtcttatctcaaatctatgattaacttgtgatttaaactggtgttgttttaggttgttatatcggttaaaccgttgaaagtcgaaaactggatacttccagaaatgccggggcttatcaccgacttcttgatctccctcgatgaccggtttttctactttgtgaactggcttcatggagacattcgtcagtacaacatcgaagaccctaaaaacccggtcttaaccggacaaatatgggtcggaggattactacaaaagggtagtccttataaggctgttggagaagatggtaatacttaccaattcgatgttcctcagatcaaggtttgtaaccaaaatataatcttttggagcgttttaaccaaagtttaaacaatttgcattctattgaaactgtcttggtgatttcaggggaagtctctaagagcaggacctcagatgatccaactaagcctagatgggaaaagattatatgcgacaaactcgctatttagcgcatgggaccgtcagttttacccggaaatcatggagaaaggctcacacataattcaaatcgatgttgatacagacaaaggtggtctcactctaaaccctgacttctttgtggactttggtgatgaaccagacggtcctgcactagctcacgagatgagatatcccggcggagactgcacttccgatatctggatctgattttggctccctaagagtgtaagctggatttgtggctagattcgtgatcaagacaattaaagttgttcttactcctttgtggcttattccgtgataataaaactttctatttatgttgtgtgtctctatctttcgagtaaccgaattgaaccgatcaaaaccgggtcgaattatggatcatcaactcaaaaacacgtcagatacagtgtacgtggacacatggaccagatttgttatcttcttcttgttattttgttaatggacaagatctggttaattgtttatgttatctattttgtgcatggagacgtattttaattcgaaatacatctcaattaacttactataattttcagtaatgtgattcattaatttaattacaaggactaatcaagttcactcgcaaatagccaaaagcttgtcactgtgtgtttgcgatatactttaaagagagagacgtgtagcttaacgactaccatatacacacaattcaatatttgacttcacatagagagagatagagagatg

SEQ ID NO: 4211 - DNA, 3000 bp, Unknown
  misc_feature (1)..( 3000): cDNA_ID_1823503_gDNA_ID_1620691_Annot_ID_48592 3000 nt of promoter + ATG
gtttacaaaattgaattttattactgtattactgttgcaaacaatcaattaagttattatttgcatttatttaaatttttatgtataagaagaataactaaatcagtgatacataaataaatttattattattcatgaaatatttaatgataaataaaattaataaataaaataatagagaataagtagatttattacattgaattgtttacgaattaaataactgaaatgttgttttcaaatttgttaatttcaatacatatatagaaaaagtgtaaactaatttagatattagcgttaccataataactctagaagcccttaagcaacaacagctgatgaatgcttatccctcactatcttcatcagctccagctctgcgccaggaatcgaaccctaaccactgctaaagccctccatgcccacatcgtcaagctcgggatcgttcaatgttgccctttggccaacacacttgtcaatgtctatgggaaatgcggtgctgcttctcatgctctccaggtgttcgacgaaatgcctcatagagatcacatcgcctgggcctcggttctcacagctcttaatcaagccaatctctctggtaagacactatcagtattttcttcagtgggttcgagctctgggttgcgtcctgatgattttgtgttctcggctcttgttaaggcttgtgctaacttaggatctattgatcacgggaggcaagttcattgccattttatagtctctgagtatgctaatgatgaagttgttaagtcttcactggttgatatgtatgctaaatgtggattgcttaatagtgctaaagcagttttcgattctataagagtgaaaaacaccatttcatggactgcaatggtatctggatatgctaaaagcggaagaaaggaagaagctttggagctttttaggatattaccagtcaagaatttgtattcttggactgcgttgatctctggttttgtacagagtgggaaagggcttgaagctttttctgttttcactgaaatgaggagagaaagagttgacattttggatcctttagttctttcgagcatcgttggcgcttgtgctaatttggcagcttctatagcggggaggcaggttcatgggttggttatagctctaggatttgattcttgtgtgtttattagtaacgcccttatcgatatgtacgctaaatgcagcgatgttatagctgcaaaggatattttcagtaggatgcgtcacagagatgtagtttcatggacatcgcttatagttggaatggctcagcacgggcaggctgagaaggcattagcgttgtatgatgacatggtttctcacggtgtaaagcccaatgaggtcacatttgttgggttgatatatgcgtgtagccatgtcggttttgttgagaaaggccgtgagcttttccaatcaatgactaaggactatggaattcgcccatctttgcagcattatacatgcttattggatcttctcggtcgctctggactccttgatgaggctgagaacttaattcatacaatgccgtttcctccagatgaaccaacatgggctgctttacttagcgcttgcaagcgccagggacgaggtcagatgggtataagaatcgctgatcatctcgtaagcagctttaaactgaaagatccatcgacttatatacttttatcaaacatctatgcaagtgcttctttgtggggaaaagtatcagaagcaagaaggaaactaggagaaatggaagttagaaaggatccagggcacagtagcgtcgaggtacggaaagaaaccgaagtgttttacgcaggagaaacatctcatcctctaaaagaagacatttttcgattgcttaagaagctagaggaagaaatgaggataagaaatggttatgttcctgatactagttggatcctacacgacatggatgagcaagagaaagaaaagcttttgttttggcatagcgaacgatccgctgttgcatacggattgcttaaagctgttccgggaactcctatacggattgtgaaaaatctaagggtttgtggagattgtcatgttgttctgaaacatataagtgagattacagaaagagagattatagttagagatgcgactagatatcatcattttaagggaggaaaatgttcctgcaatgacttctggtaagcttcttctctattgtaacattttatttatgaaaattgttgagatttttacatttttttaatagtatagtaactacggtcacgcaaaatcgatttttatcctcaataaagaaacaataaagtgggtgagttaattcatatgcgttgtagataacaacaaaagagtcactgttttaatagcactcactcactcaccaactcacggattaagtaacatgtttgtttattcaaatttcacttaccaactcacaagtcatgactatagtaacaacaacacgtgcatggacttatgctaataatgaatgatatgaataaaataatgaaaatgtttgtgttgaacaatttttcacgattagtaatttcaaattttttttctaattatatattttagcatgctatagataattgcggaagtaagttttgaattcgtgaaatttgaggaatgttataaaatataaaaccaaaaccaaaaatgtaccaacaaagtctctttatatctatatcttaattcaaaacacatccatatacactttggttacaacttgcaagaaatctgtttcaatttcttaatgtacaactaaaccctctttagcaaaagtagaattattaaacgaatattgtttcttgtcacatactttatatagagacatataaatagaaacatatatgtagataacaacgacacaagtcacaatcgtgcttactcacgtattacgtatagccaaaagtttcctactcatatatatcacaagtgtgcttgcgtttgagatatactcagagacgtgtagcttcactaattccacatactcagagagaaatg

SEQ ID NO: 4212 - DNA, 3000 bp, Unknown
  misc_feature (1)..( 3000): cDNA_ID_1823495_gDNA_ID_1620691_Annot_ID_48595 3000 nt of promoter + ATG
aaggtcgtaggtaataccaccgagctgctcctggatgatattgaaattacgaccgttggtccagtcgtaccaaaggtcgatcatcgagagatcgccggagtaattcatgaacattagcgcgtggaactggtgtggccatggcgtcggcaccggctcatccgcggcggcgattttcacgccggcggttatataaatgaagataacgattactatgagtggtcgtctaaaagccatgtgtatcagtgtggtactgaagttttggttcgtgcacggaagataaattaaaatactatatagtatacagttcttttaaattctacataaattgttatcatcgaaacatacattttagtccattagtctactaaactcattattgatgtataatctctcaatctacaatcagaaatgtatttgcaaaattaacaatattggggaaagtgtttcttggttcaatttgaaccatccaaccaacaatccttttaaaatcatagcacaaaagaactatgagagtttcaaaaagaaaatcaaaagccaaaacaaagcttttcttgcatgactcaataaacctacactacaccatactcttacttataaacctcatctccaatgccacaccattccatcttaaaatcacattctgatcatcaccaacacattgcaaaccaaaccagacacaaacacaaagacatgtctcttcttgctttcttcctcttcaccatccttgtcttttcaagtaagtcatcttaataatgcatcatgtttacattttctttacgtaatctcccatattgaacatggttttcttggttttacaggttcatgttgttccgcaactcggttccaagggcacaggtacatgcagaggaaaacaatgctagatttggctagcaagattggtatcaactatggaagaagaggaaacaacctcccatctccatatcaatccatcaacttcatcaaatctatcaaagctggtcatgtcaagctctatgacgccgatccagagagtctcacactcctctctcaaaccaatctctacgtcaccataaccgtccctaaccaccaaatcaccgccctcagctctaaccaaaccatagctgacgaatgggtcagaactaacatcctcccttactatccacaaacacaaatccgttttgtccttgtcggaaacgaaatcctcagctacaattctgggaatgtctctgtgaatcttgtaccggcgatgcgcaaaatcgttaactcactcagattacatgggattcacaacatcaaagttgggacacctctagctatggattctctccggtcgtcgtttcctccatcgaacggaacattccgggaagaaatcaccggaccggtgatgttaccgttgctgaagtttctcaacggaacaaactcttacttcttccttaatgttcatccttacttccgttggtcaagaaaccccatgaacaccagtttggattttgctctgttccaaggacactcaacctataccgatcctcaaaccggtttggtttaccgtaatcttctagaccaaatgttggattcggttctcttcgccatgaccaaactcggttatccacatatgcgcctcgcgatctctgaaaccggatggcctaatttcggtgacatcgacgaaaccggagccaacattctcaacgcagctacctataaccgtaatctgatcaagaagatgagcgcaagtcctccaatcggtacaccatcaagacccggtttaccaataccgacatttgttttctccttattcaacgaaaaccagaaatccggttcggggacacagagacattggggaatcttgcatcccgacggttcaccaatctacgacgtagatttcaccggtcaaacacccttaaccggtttcaacccgttacctaaaccgacgaacaacgttccttacaaaggtcaagtgtggtgcgtaccagtcgaaggagccaacgagactgagcttgaagaaacattgaggatggcttgtgcccaaagcaacaccacttgtgcagctttagctcctgggagagaatgttacgaaccagtctccatttattggcatgcaagctacgcgcttaattcgtactgggctcagtttcgtaaccaaagcattcaatgtttcttcaatggattggctcatgagacaacaaccaaccctggtgagccattctttgtagtttccaaatttagaccaaaataaccttttcgtatagtcactaacaaagattttttacaggaaatgatcgttgcaagtttccgagcgttactctgtgaggaggacttgaggaagaagacacatgattaaagctggattattcgtataactcaatattgttccttatcttttttttattataccttttctgcttcaagtttcgctatgttgagaaaaaaaattcaaataattaataaatagtaatttttttcccttacaaagctgattattattacattctctaatcaacaacaaaattatctatcacaaactgtaacagctacaaaaacgtaaatgggtgggagatttactttgccctaaagctgcaaaaaaatcaagaactttaataattttaagaatttttagattttctgacataaacacaaacccaaattagctaagaattaatgtaaagaccataattggatcatcagcaccaaatgtcgtatattctcatgtgattccattgagtaacactaaagttttcgtacgagattatgagcaaaaagacaaaaaaataataataataaattaaaacacataaattttttaattgaatgtatatataaaaaaatctcctccggtgagcttcttctggaaccagtgaagatcaaaatcaagacaacgacatggttactacgtttgcttcgagatctcattctctctctgttccatttcttctataaagacagtcctcatcttcatcttatctgcaaatgcaaattcgtctgaaacctgattattccttcttcatcgcctcttcctcaacgatg

SEQ ID NO: 4213 - DNA, 3000 bp, Unknown
  misc_feature (1)..( 3000): cDNA_ID_1823491_gDNA_ID_1620691_Annot_ID_48596 3000 nt of promoter + ATG
actgccactgatcaccaccggtgacctcccgtcgtttcttcaaccttcgaaggcattaccgtcagctcttgtgactctaagagaacatatcgaagctctcgaaacggaatcaaaccctaagattcttgttaacacattctctgctttggaacacgatgctttaacctctgttgagaaactcaagatgatcccaatcggaccgttggtttcttcctccgagggtaaaaccgatcttttcaaatcttccgacgaggattacacgaaatggttagactcgaagctcgagagatcagtgatttacatttccttaggcacacacgccgatgatttaccagagaaacacatggaagcgcttactcacggcgtgttagctacaaacagaccgtttttatggatcgtgagggagaaaaatccagaagagaagaagaagaatcggtttcttgaattgatcagaggaagtgatcgaggattggtggtgggatggtgttctcagacagctgttttggcgcattgtgctgtgggatgttttgtgactcattgtggttggaattcgacgttggagagtttagagagtggtgttccggtggttgcgtttccgcagtttgctgatcagtgtacaacggcgaagcttgtggaggatacgtggaggattggagtgaaggtgaaggttggggaggaaggagatgtggatggggaggagattagaaggtgtttggagaaggtgatgagtggtggagaagaggcggaggagatgagagagaatgcagagaagtggaaggcgatggctgttgatgcggcagcggaaggtggaccgtcggatttgaatcttaaaggttttgtggacgaggatgagtagtgggttttaagtttttgaagttaaagaatgtgcatcttaccttgttcaaataaagagaacaaacagagaagaaggtctcgtttattcactcttgtactcctcctgattggtcatctagaagaaaagaaggtctcgttaattaacattacaaagcagccttttctttgtatcctttaaattcactcaaagctccctttgtagacaaactcttcttctctttgttgaaacaataaaccggtgcttgccatttctcatcctctaggaccgcacctacctcgtatgtcattatatgagcctccctccctgcaacagttatatgtcagatgaattttgctagaaaaaaccattagacagatcgaagacaatgggcatgttgatggtatcaatcacctgtatagaatatccattgcacgggtctcttggtttcaacatcttcatagtaccatataaagtctaccttctcccatacattgcagagaaacccactcacgttctgttgaccaaggtacttggctccatctagccagtttggtcgcagtattccaaccttatgtgacataaaattccaagaatattcagcaagttactatttacaaaagcattccaggttcatacaggaccaatctaagtgaacttgctactataaaaacgaaaaaccaagccttagtaaacatgtgaagtcactcactgaaccctcttgaataatcatctgttgatcctacaagtttctactctgcaaaggtattccaagagaccagaccaggtcatgtaccctactactaccgaatcctaatctcctgatcctggttaaggattttgtaaagtattgttacttaacgagcatatcaaagtcaccagagtgattaggtagcttcagtcttcccataagatgcaaagcacaaagagtattggtaacaatcaaaatgtacaccctgcctgctacagttaacaaggaaatactacaaattactggaattttttaaaaagaaagaccaagtgagagtgaagtagtaagaaacaagagagaacttcagactaaatctgcagagagctccattttcatcaaatgaagatttgtgaaatcacctgactttaacaaaaccgagaactctcctactctcctaagatatttcaatttcctactcaaaatgaaaaactcaaaccttacacaatgactatcctataaaccagacactataactaaggtcattgttgcttcaaattggagcaatctctggttttctaactctcattcccagtgaattcacacaaagcaattaacaaagttaaccaaatcccaaattcgaatttggttccctattctacagcctaaccgtattctgagatctgtaacagagtcatgaacagaaaataccaacctcgagctgaccggagcggcacgattttgactcgtcgagcgtgtaaaagaaggaagtaccattgttccattcaaggtcgtaggtaataccaccgagctgctcctggatgatattgaaattacgaccgttggtccagtcgtaccaaaggtcgatcatcgagagatcgccggagtaattcatgaacattagcgcgtggaactggtgtggccatggcgtcggcaccggctcatccgcggcggcgattttcacgccggcggttatataaatgaagataacgattactatgagtggtcgtctaaaagccatgtgtatcagtgtggtactgaagttttggttcgtgcacggaagataaattaaaatactatatagtatacagttcttttaaattctacataaattgttatcatcgaaacatacattttagtccattagtctactaaactcattattgatgtataatctctcaatctacaatcagaaatgtatttgcaaaattaacaatattggggaaagtgtttcttggttcaatttgaaccatccaaccaacaatccttttaaaatcatagcacaaaagaactatgagagtttcaaaaagaaaatcaaaagccaaaacaaagcttttcttgcatgactcaataaacctacactacaccatactcttacttataaacctcatctccaatgccacaccattccatcttaaaatcacattctgatcatcaccaacacattgcaaaccaaaccagacacaaacacaaagacatg

SEQ ID NO: 4214 - DNA, 3000 bp, Unknown
  misc_feature (1)..( 3000): cDNA_ID_2993367_gDNA_ID_1620691_Annot_ID_48601 3000 nt of promoter + ATG
atttaaaatatttttaatgtaatcatgaatttatacatatacatatacggatgccgtgttaattccgaaattccatgaatctgcatgcatttcgagttttgtaagacaggacaaagaactcgttagtttaataatttaaatttgttatgagtttgtgacttgagagacggaccacaccaccttatccattactcttgttaatttatactggcaacaactatctatattttcttatttattagtcaggattcaggaaccatacttgaataccaaaatgtgttgcctctttaaatggccacattcaaacaaaatccaccggtcatgcatgaatttttttaaaattctctagtcaatactccgaaattcaatatacaattttcattttttcgatcgataatgtcaattcaaaatttgagggtgaaaaaatttttaacctacaatctatccaatggcctctcatttccagagcatatgattttttcttaaatgcaatgttatgtttttttgtgtgtgtacttcataccgtataaacggaaaacctaaaggccggagaagctgaatatatctgttttaaaaaacctaaaaaatactactccacaataattattgacgtataaacgaaaaaaaataaagaagtcaaacgctcttttgttgtttttatttgaggtacatatatgcggactaaccagaacctacaaaatcataaaattagacactaaaactttgaaaatgagttggtggaaaatatcacgatttaagaatcgaacacaaatctcttttggtatcataaaagtaacaagaacatattctctgaataaaaaacttggtctaatatagtttaatgaaacggcactttgtctattgtctatactaatcatataaattatagatatattcgacagattaattataagaaaacttatgttaccgtaaacccgtaaaaaaacaattgtgtaatcggaattaattggatttcattgtatttgcatgccatgccatgcccgcatgccggctggaatagatagagatcgaagagtccgttaggtcacagtcacacgtgaaggaggtacgagggaagtgacacgtcggatgtagcactaaatctaagacataagataacacaaagtacaaagggagaagagtggccatttccatgccagcttgtctcactcccattcttgcttttgttttttctttttcatgtcgtccactttctcatttccaatactagaaacaaaaacgagcattattgatcttttaaattgttacaaaatagtatatgggttaccttgtcgttttctcctaattatttcggtaattaatagtttaactatgccacaccataaacgatagaaaagtgggaaagctagctaatataataaactggtgtggcctccttaaaaaaacaaaaaggtaacttatgtgattacttttaaaaagtttccagagtgtaatactttctctaagtttttttcattaatattatcaaaatcctgaaatcttaaaattaggttgagaaatgttcctataactttaggaaaataaaataaaatctaatttaatgttatagtgattcttactaattgttttgttaagcaaattcaattacggataactgatccacagaggagaaacctagtttacaaacgtttgtcaatttgcccaaaaaaaaaggccgaatagtctatttaagaatataacctatatgagactaaaaaaacagaaaatttactaaatctttttgataaactatactaaacttgaaaagcatggggaagttctccaatcataaatattagtaaccctttatgatttctcgtttttgtcctgcaaactattattatatacagaacaatatggatttgattggtttcaatagacgatccttgtatattacatagaatagttttctagttccattacaatttccaaatgatttgttacaaagctacaagattattcgaaataggatttcatccataagagagaatggtgtggtcgacgctacaatgttgatttattggttgtggtttgcatcttggggatgtcaaatcctaagtttcaagttcttgtaaaaacgttttcaggtttctttaatatattttaatattaatgtaaaaagaaaagatatagcttttgtacaaaaaaatttgtttaatcactatgtaggaggatgcgatcaaattcatggaatgatgtattattagcttttctatcctcactctaaaaacaatactatagtgagttaaataatttgatcatttcaatgtagattaaaattttattaaaagaagaaaaatttaaaagcctataacaaaataaaaaaggaggctcgaggtatgatgggtgtagcagaagagctggcaacagctatcgactgagtgattacgaactcagtactcagtgttctcagctcacacactctttttttgttctctttcttttggacagctttcattttctcttttcttttttctattttgtttcaaaattccatccatattaaaataggcctgatcatgagaataaaggaaatactaatgatgagtttctcaataatgcaataagatgcaattattatgagctatttactattgaaaatgagcaaataaatgtcaaaacacaatctggttaagttagagcaactccattgtataggattcatgtagtttctaagaaaacaaaatgtattaatattttacttttacatccaaaaaaccaacttatatgagtaatagaaacgatcctaatattaggaattttagagattttctctcatctgtttcttaacttttcaatatttttattttttaaaattgtatgagtttctactaagaaactactgctggagttggtcttagcttcccaatgcttctccacctatatatatgcatatctccttcttaaaactcatctcacaccaaaacacaaagctctcatcttcttttagtttccaaactcacccccacaactttcatttctatcaaccaaacccaaatg

SEQ ID NO: 4215 - DNA, 3000 bp, Unknown
  misc_feature (1)..( 3000): cDNA_ID_3072817_gDNA_ID_1620691_Annot_ID_164808 3000 nt of promoter + ATG
ttcaatactgtgatatactttgaatctaccagaaatggtcctggtttttaatttaaataggacttggtcttatggatgtcttttaatttggttaaccaatctttcttcattaggctgcccttgagtattctctataacttgcgacaaagtagacataacactctttaagttctaaaaaccactttctattttcggatctcgaaaaatcatttatcgttttgtgctgcaaatcagtgttatatatgagcttggcaaattaaaatgacatatacgtatagaaatgaattgataatactaaatattatttgttttcttcttttaacttcagccatactaactttcactaaatttcttaagagcatacagaagtttctcctcggtatattggtggttctatattccccgcaacgtgaatggaaaatgaaggttctattttggctatatgataatcatgccattagctgacccgaaactaatgtgttacaataaaaccaaattatataaatagaagaacatgtttcctggctccttattgcacaaaagagaacatgaacaactctttttatattaccatgatagtcctatgtgttttggcctttgtgttagttttaattgagagctgtgcgggcaaaatggtagatgagatgatattctcttgtgtctgctgtggtggtcctggctgctgtggtgatagaggagaaggacctgttggtggtggtattgacaatgaaccggtgaatgtagtagtggtggtggtggagccaggcagccagcggcggaagatgtggtgacggtcaaggatgctacttcagtttttctttttttactttattatacttagattctggtactatatatattatgggtatagataatttacactaaagttttatttccgttatttaaaattcgtgttttatttaatctctaattttctgtttccaagtcgaattcctctgtactaattatacggccttttaattttacaatatgaatagccattttctactaacacattcttaccttttagaggtgttaattttaaggtaagtttcttctctacaattacgtaatatcattcaaatctgttcatgctgacaaaagttaggtacttttgtgtatatttctcgatcattgacattgtctactacgctaatatctaaggaaagtggcatcgattctacttgcttgtaaaacatacatcgcgatgtaagtcaaattctctaataatgtaagaaacgaagtgagaaagaaagataaatccaaaaaatttacttgcaaatcaatagagatccaaaccaactgcgcatgcgttagtcaattgatatattgtatataatagaacaaatacaatttttgtttttataaatgtataaccaaaaacgtaagagcaatactatcgaaataaatacgtactgcatattacacgataataatagaaagagatttgatgtttgatcacttggaagtaaaatggagatagagaaacacaaagagcaatacgaccggaaacatcaagatcattggaagagatggtgcagtcaccggtcccatcatcaacggaacaaacagtaacattagtgcaacgacaacaatcgccaaaaccgaacccatcccgaatccatactcattcgccattttcgtctacttttcgataggagtagtgatcaattctgtgttagtgtctctaattggagaagttatatatacacagattcagacatcaaatctacggttgtgtcgtttccccgagaagtagaagacaacgtttcgtgtactaatgcatgaaacacaaaaactggcgagacctttcacgttaataaccacctcaaaacgctgcgtttcggtttatttgttgctgccacgtgttttaaaaacagcataccctaaacgcatcgtttcgtgtcgcaatcaactattcaactgttactgtatattttattaaaaacgcagcgttttagttaacaaaattcgtgtcgctatttctacactgccacgtgtttcaaaatgtcgcgttctgcatttgttgctatcacgtgtttaataaatttacctaaacgctgcgtttcgttaatcaatcgactttttgaacattcgcgatctccaaaaattttgagttttttttttggaaatcccgcccaaatattttgaaattgaaactctaataaatttgtcggcttgtggagttgcggtagtgatatcctccatttatcgttttgtgctttttcttcaaaaatcaaaagcttttatttttcccccaaacttttttttcaaaatcctaaatcattttaccctacgattttgcagatgtcagcttcaacgaatcgccgccggctaaaagatataaacaccggcgccggtgaaaatccatcatctggtaaaaaaccattgaggtctgtaactccacttccgatctcaagcaaaaattcaaatcccgctcttcagaaatcattatccagcaaagagaatccgaatccgaagcttagtcaccgctcatttggatcgactcagaagccagtgctccggcctgtaccgcgcattgataagtccgccgtgagtggcgagggtcgggttacgcgatccacgtcatctggtttgcgaggtaggagttctagtccatctgatttgattagggttttctcggatttgagaaagagaaatgaatctagggttattggggaaaagggtgaatcgggtcaggataagaagtctgggctcaagagttctggattcaaacagggtacgagtgaaattaaggttgagccaagtagtgtttgtgagaaagcagatgaaggaagtagttgtccagtgaattcaagcaaatttgaaggttctagtgtggcgagaaattcaatttctgatccaaaggcacatgctttagttggttctggagagaaatctactgttgctttgaaatctgatagtaagattgaaaagactgggaaagggactagtgtagctttaagaaggaagtctttggataatgttgggaaggcaatg

SEQ ID NO: 4216 - DNA, 3000 bp, Unknown
  misc_feature (1)..( 3000): cDNA_ID_3072827_gDNA_ID_1620691_Annot_ID_164804 3000 nt of promoter + ATG
aaaacaaacaatccggcaagaatactaggaagacaaacataatacgaaaacagcaaagcctgtagttataataactctgccaaaactcaaaagtacactcaaccgaaaaataacttaatagaagtgacttattgtaatagatagcacatgcttataaagagattcaagcagtccaacccgttaggaagttgtggaacctttgatttgagctaaattcttcttgacaaggatccagaaaccagggcggtcataatccccttacacagtcactactggccttgtcgaccctgaccatcattgtacccaccaccataaccttgtgacgggtcagatcgccaagatccatcaccataaccacctcccatgtagccaccactaccagggttgtttgaaccgccaccactaggacgccctccaaccacaccatatgcagcttgatttccataaccagaatcacttccactgtaccctccataaccgtagccttggttactatagccagatggtgactgcgtaggaggagctgcaccaggaactccatatccactatgagcagcaccactcccatagcctgggttcccataaccactagaagctggagtgtcccatgagtttctcggagcaactccagtactacttccatagccagcacctggaatgttcgttgctccatatccagcagtagcaccagcgccataacctccagcagaaccagtgtaacctccataggcaccatacccggcaccattactaccatttccatagccagcgccataaccagaagaaccataagatggtaaaccatttccaacactttgatgctgcaaaaacctattggaatccatacgtccatcataactgctttcattgccaccataaccctggtaaccaccagagccaccaccacccattgatcgtccaccacctccaggattggcatctttaggaagagcacgctttacttcaacttgtttaccgctcaaatcatggaaagtcttgtgcaaaacactgtctaccgcatcttcagagtcgaaggaaacaaatccaaacccacgaggacggttggtagcctggtcatacatgattgcaacatcagtcacagggccataaacttcaaagtactggcgaaactcttcatcagtcaaagtaggtggcaagcctccaacaaagatcttcttggttttattgtaagcatcacctccagaacttctagatgtattaagattcccagttcttccagagacttgctgctcctctcttgacatggctctcttcacatcaacctaaacattaaccaaaatcaataaagctcataataaacttccaagaatcatactttacccaaatcgagaacataacgcaacagaaaatatatacatctgtttttccttatcctaataaaccaaaccaagctctcttttctaatactatactcaatcacttcatagagtgtacgattaacatatatcgagtaccctataatacctcttatacaagttaaaaccaatcctagaatctaagaaacactaaggcgaatttgccaaccaaacaaaattctatatttactctcgttctcaatcaacacagcaaaacgcaaaaaggataaaactttaacacaattagagaaatggagctataagagaacaataataacctctctggtatcaatgctgtgtttctcttgaagaaccctatcgagaacagaaggatccgagaagataacgaacccaaaacccctaggtcgacctgtgagcttgtctctcatcacaatagcctgagaaacctctccatagttggtgaaatgttctctcagcttatcttcatcagtttcccatgaaataccaccgacaaaaagctttccttgatccgaatccatgaatttatattccactatcttacttctgacccagaatcacaaatccacctcaatctacgaaaccgtgaaaaccgactgcagaaacttccagaaattacgaaaaggctttagcttttccaatggctgtagccgatttgagaggaggaagaggaagaagacagcgaacgaatatttctattggtttggtattgatattcgcgaaggtacgaatctgtcagcagataaataaatcaacggtctagatcctttctaatattattaacggttcagatctgtttcccgttttcttgtaacagagatgcttacttatgggcttaagtccagcccaatagaagtataaataatgggctacaaagaccgacgatggtttcactcgtgtgttttctattccacacgtgccagcaaatcctacaagaacgacaaaaaaatctttcgtgctgtgacaatctctgtgccagatgtgcactttgttgtcgaaaattccaaactccacattacagctttattagtacttgtaataattaacctcatatgtttaagtttaattaatctcttaattacctcgtatatattttaaaataattaaaacaatagcctataaacgacaattaacgtgcacgatctccactaaaaaaccttaattgaatttttgagttttttttcgaaattttttaagagactttggtcaatgtcagctttcactgaaaaaactttggaattagtaataatgattaatgattatacatgacaataccaattaattaatttccataatgaaatgtgaagacgttaaatgtaaaaagcggcaaaaatgtggggctaatttataaagtttgtttatatatttttaaatataaaaacagtttcaggcttcaacaacgaaaaagccgtttttctattactttgctttattttcttctctttctctgtgtttttctttcttcgatctcactgtctttcttctggaacagctcgatcttttgatttagggtttttttagttacatttcttgttctatctgaatctctttcgttggttaggttttattcgatttttgactatttgtgagaaatatggaagaatgagaagaagaagaaggtgatttgtttgatttttttctaatg

SEQ ID NO: 4217 - DNA, 3000 bp, Unknown
  misc_feature (1)..( 3000): cDNA_ID_3090020_gDNA_ID_1620691_Annot_ID_164801 3000 nt of promoter + ATG
catcaacatgaatcacacagagacgataggcctataatcttgctcacgatgccgctcaactcctttacgatagatctaggcctaaaaatatgcttcaattgtactttaagcgtttaactttctcacgatctctctacagcaccttgacaatgaagacaagagctatagaaaatggaaccattgtgaccttagcctgaagattctacactacgtcactaccgttggcattttttttttttttttttcgatgccttctccgatcatcttaatcaggggagagaccgagagaccgagagaaccgagaactggcgacttggacttcttcactggttacacgaatgtagacatatacgatttggttcggtttaacgtcggctccaatttcgttcaacgaaataaaaaaaaagaacctccttttcgggtttttgttttgtttgctatatttccattttttttgggatttactctttgcttttaatgtactgtagtataacacgattacattaaagaacatattgagatctatctttatagatctaagttggaaaacaaagaattcacaaacactagattacaaaacacttgttttttagttttttcctaatcaaattaaaagttaaaaccactgcttttggttataggctttcaataatctttctcttgcacccgtatgcagtggcaaattcggaaaagacaaaagaaaaaaaaaatctaagaataacatattgaaagaggcacataggatttcaatgatagcatgggaaagcaaatacacgtgcaagagccatgttaattaagtaggaactagtagataggggttggcggaggccagtaagggaaactaacgttctttagtggccttacactagtgtaaaaggtagagcaagtttcggtggtgagatcataaacaccaaagttattgccaacaaaatagatgcagttaggctcgagtccacacgacgtactagccgggatgcagaaagcctcactatgtccaagaaaaatgcaaagatctccaatgtgttctgtgtagatcatagtcttcttcttttcgtcagaagcctcatttgctctaaacaccatgaacttttttgttacgtgcatgggtgtattgtcgcaaaggtcctccacgtcctccacgaacctgcaaagacatgatagaaccaatacgattctcaagccaaaaaaccaccaacgaaatgaagatatattgtaaatatgttatgagagatgtctagttaattagatactataccacttgacgaggaaaagttggccggtgggtgactccacaaggtgatctgtcttggaacatgaactcactcccgccaactgcttaaacaccgactctggaagattttcataatccaagtcgatgaagctgggttgcccattctcctgcctagagttgaaatgatcatcaccctccttagagttgagatccaagtagcacaagtagttgcctccgtaacttggaatgtagaacctttgatctctcttggagaacatgaggctagataaagggtttatacactgagacatgaatttcatgttgatccatttagagctgccaaaaggcctgcaaagactaacccgagatcccgataatttgacacccactacccaatctttatcttgaacaggtatagaggacatggctaggttatggattttggtaccggtgggtacagaaggtaaatgaatggtcaagttttctagtttgggattggaggtctcataagtgatcacaggttgatggtcgctgcttctgtacgaaagatagaattttaatccatcacgtaaaaatccgacagtcatcgcctcaatgacctccttctcgagtttcttgtccttaatagtgacttttgttgcctttccctttgaagaatcgtcgtcgtatactattacgcgaccatccgaagaagaattttggatgttagtgatgtattcaatcaataaaaacgggtaggctggttcagacgacaagagttgagtcactttagtctcgtcatccgaatcccacccgcttgtgtgagaagttgtagatgagaacatacgaacaacatttttgtgtctctgccatatatatgttcaagtagtcagagacgatatcaataacaagaagaagttaaagaaaaatgaatttattacttagaagcttaagaggaagtttttgcagacagagggtttaaagactcggctgattataagctgtgccattgttgaacttctttaagtgttttcgtctcttgtataatctgtgtcattattgtacttaatactaataagaatatccttgctcagcaagtacaagacataaatgagaatatttagaaattccataaatagctcgttaaaatcttattataatttttgtttttttctgtggaatttgttgttcaatatttgttcccaaaaattgttttattcataaaatctaaaatcatttcctaaaatcaatgcatacaaattactctatattctacccttttttttttaatttttcgatatgtttttaattgaaacagaaaacttttcatgcaaccacgttcgattttttttttttttctttagcttaatgggcttatgggcttctacgttctagaaatttcctactacacaaaatatctttcgttttatccaaattccaaaacagtaataagattataagaacaataaatatcttatccagtaactaacgaacgtatatcccaattattgtgaacatcaccaccgtcagatcacgcccttatcattcatgaccgtcagatcctcatattttacatcacacgtggccgtgactctttaccggataaccggattgtctcttctttaaaaccgtgcccaagcgactcgtgagtgagactcgctctaagacccagtttgactcgttgatcaacgaaaggtaacgacaaaactctgatttccgatttcattactatgaatcgattcgaatttctgagtttctgactttgtttcagtgtgagtttgaggtgaaag

SEQ ID NO: 4218 - DNA, 3000 bp, Unknown
  misc_feature (1)..( 3000): cDNA_ID_2040829_gDNA_ID_1620691_Annot_ID_164798 3000 nt of promoter + ATG
ggaaggagacaacgatacaggcctacaagagcctaaaaggtgtttctttgtggaattgatgagcataggttgggaattattaaaaaaaaaaaactgagcctcgataattagcatatgaatttgtaaattcgcttgtgtccccaattcactttctttgtttcgtttgcagagaagcaaaagcagagtttgattcggaaaaaaagcagtgttttgtgtaaccaccaatcagtaaaacctagtgtttgtgaagtccttgtttttttacccttttttaatcaccaaaaagaatataaaagtaaacccaaaaggcccaaacaatgtacaaaatcccaaaaaatggaaatatatcacaaaaacaaaaagcgaaaaggagtttccttttttttcgtgggcctctgcgttgaacaaaattggagtaggaaaaggaaacacaaatctgaggagtcctctctataaatactaaacaaatagaagcaaaggtaaaacacaaacacttccattcgtaatttagggttcccacaaattccttgtttctctcgctctcttacacacaggaaacaatggagactgcaacgaggactcaccaacagagaaaactgatctcatctttcctcgatatcaccgttaaccaaactgtggaaatcgcaacacagttccttgaggcaacaacctggaaccttgaagatgcgatcaacctctttctcatcgctcggagaaaccctcatcatcaccatggagaagaactagtccctcttcctttaccttcgaagaagaatactctctacgactacgatcctttcatgtctcacaacacttcggtcgcagtatgtcctgaagagatctgggacgacgagtcgacatctgaggaatccgattctaggttgtcttctttgtaccgtcctcctccaagtctgtttttccacggttcgtttgaagatgcgaaagcaacgtcctctagagaggatctatggttgcttgttaacctccagtccacgaccgagtttgcttctcacttacttaaccgagatttatggccacacgacgctgtttttcaagccatcaagtccagcttcatcttgttgtaggtctatgatgataccagcgaaggtcagaaaatatctactttctacaagatcgactctgttcctcctgtggtgcttctcatcgatcccatcactggccagaagatgcgtatgtggagcggtgtgattgaacctcagggctttctcgaggatttgatgaagtacatggattctggtcctcacgaacacgttgcatctctgacaagcaacaaacgtatgaaaacagagaagatctcctgttcaagtaacaacgctgatgatcaagacatggctactttctggggaaacgctattgaagaagaaaagactgtaatcaaatctggaaaggaggagacttttacgtctgatcgcgttgtggctccttcttgggggccagaatttgaagacataatgactttatccgaacatgaggaggaaacttgtttgtcatgcgacctgcttgagtttccggttttgacagaagagcctaaagcagactgtgatagaagcgttgtgtgcagtatttgtgttcgatttccagatgggagaagaaagcagaggaagtttctcaagagcgaaccgattcagcttctctggtctttctgttattctcacatggaggaatccgagaaaaaggagttcaagcttgtgcaggcgattcctggtgcttccaagactctggattatggagctaaggccacgtttgttcaatctgggatcgctaattcgatgatttcagttacttgggagtgaagatttcgatatgttgttgcttctttatattatcttgaagttatattgaagaaacccttaaattctggagattaattctagactacttttgttttgtttgtcaattggagtattaagttcaaatatacaattcttacaacacagatcacttatccgctttactgttcttttactaatatagagctaacacagtgaagaagttatattctgcaactaaaactctccaaccataactgttgaaaactgctgatccgaatatttgaagattacaacataatcacaaatcgcattaccaatatatcttaacataaacctatttatcataacttcataagattcaggtacaataagattcataacattggtttcttaagttcacaatgatgaattgaatatatgtttggacagcattaacttgccactggattcaaagaagactgtcctaagtggatgcagggttatgattggtcaaattgctagtagtggcctaactaagaagctgatgataaagagaaacatgtgggctaaggttcgtggtgtggctatgatgaacccagtggagcatcctcatggaggaaggtaaccatctacacattagtgtcttgcactgaaacttaatagttaaatgtaaaagtcaaggttttaactcttaaccgtattaaaccgggtccaatttgttcgaaccatataaaatcgtattaaccgtataaaacagaggagtttagctccagattcacatgcttatctcagagaatcatacctctggtgctcgccgatttgatcagtgatcacagaatcatgtctctggtggtcaccgatttgaggtaatcaaaattacctctctttttttttttactcaaacattagaaaaaactttaatttgcacatctcttatttgggaagtatatttaaacatatctaattttaaaaatattacatagaatgatattaataaacaacataagtaatttaattataaaaatgtatatatagatgtcattcaaaataattgttgtatgtatttttctagtctttctttctcataaaatctcttaaaagattattttcttatagaaaacaatttaataaataaataatctggtatttagctccaaattcacatgcttatctcagagaatcattcttttggtgctcgccgatttgatcagttgagcacaaaatcatg

SEQ ID NO: 4219 - DNA, 3000 bp, Unknown
  misc_feature (1)..( 3000): cDNA_ID_3072839_gDNA_ID_1620691_Annot_ID_164797 3000 nt of promoter + ATG
cccaagtacttgtttgttttctctcagaacaaagcaacaatggggcactttttctcagcgaataaccgacagagagcgataacaacaaggctacagcttgacgaagagattgttctctttcgtcaagatcaactaatctcgtctttcctcgagatcgctgtcgatcagaccgccgaaaccgcaagatattgttacagacgacagattggaatattgatcaagccgtaaacctctttctcaccaacaacgcgatgtatcgggaggttgtggactcgacgacatcaggaacttctgatgattcagactcgagatcgtctttctcgtttcctcctccttcatatatacttcacgagggtttgtttgaatatgcgaaatatgtttccattgaaaagaatctatggttggtagtgaatctccagtccaggacagagttaggttctcatatacttaatcgagatgtatgggcgaacgacgcggtttcgagaaccattgagtcccacttcatcgtatggcaggtctatgatgatacaaacgaaggtcagaaaatctctagtttctacaagatcgaagctcctcctcctgtggtgtttgtaatcaatcccatcactggccagaagatgcatatgtggagcggcgtgattgaagctgagagtattgtcgaggatttgatgatgttttgggacgctggtcctcacgaaaacattgcttctctgacaaggaacaggcgcacggaaactgcggagacttgtttgtcaagctacaacttctatgaaacccctgctccttcctggggtgaagagtttgaagaggaggataattggtcgtcaagaagcaacaataatcaagtcgtggctcctacttgggagaaagaacttgaagaacaagacgagtgggagatttggtcgtcacgcagtgacactgatgacttcgtgcctccttttatgggggacgaatatgaagatccggatgaagtaaaggaggaggagatatgtttagtgttcccggttttgacagaagagccaaaaggagactgtgatcgaagcgttgtgtgtagtctctgcgttcgatttccagatgggagaagaaagcagaggaagtttctcaagagcgaaccgattcagcttctttggtcattctgttattctcacattgatgaatctgagaaaaaggcattcaagctggtgcaggcgattcccggtgcttcaaagactctagattgtgaagctgacgccacgttcgaccaatctgggcttgctaattcgctgatctcggttacttgggaatgaagctttcaaggtttaggttaacctgtaaccaaaaataggggtttgagttttatcaaatttggtgttgacttagttccttctttattccatcgtagtgcattgtgaagaaaacaagtacctttctagtattatatatattcttttgtgtttcgaatatcatgttcaaatatgcgattagatcaacacacatcactcttctaaatcactttagtggttcgataaattaagatatatcttggcctcgaaatcgcaaaatgcatcagaaatctttcatttttgatgcgaatagtcaattgctaactcacgttagtgtactccttcacattctgttttagagcaaaatatcaattttatagcagacaagaccacacaatacggcttgaatagtcactagtttacggattttagcaccattcaaaattgaacatgtagactaaattaaacttatttctgtttcatgttaggggttagaaagatttaagttaactatggagttttgagctaatttgactaagaatcttatgaaacatgaaaaagacaagcgacttgtttggcccaatgatttgtatggaggaccaatgattttaaattttaagtatcagagaaatcatcaatatatagttcattatattttcagacgatttagatttcagtggatatggttctatttattttatcaatataaatagtttctttttttcaaatgttcaaagaacttcattataaagtacaaaacaaccttaacaaaataataaaaaaaattacatcgttcgcacatataagttttgaatgtatgttgtggcgaaatcggactagactaattttggatggacaataatgtgccctaaaccaattttatttttatgtttgaagtggtccgcaacaactttcttctattttttttaatccatactaatacaaactttaatttatcaatgttaaataaaaagtggtataatctccaaactagtttttccacctcaaccgccgtaaccatttaagtttttctacttcaaccgccgcaaccatttaaacttataaagagatacgatagcatccaccaaaagcgtatcactcgctccctcatataagtagcctctttgacaagaagatatttgaaagcatctcaactcttttatccatcacgcctacccaactatcctctttgagagtgctgatttttgggaagttctcatttttgtatagatatgtttctctttcttttttcttaggtgcaaaatattattctcttaaaaacaatttttgaaatttctttcctcttagaaataacctttgtttgttgaaaacaatcacattccaaaacatagaaaataatcttctataagaaatatatataaatttgttgcttctaaagagtgttgtctgagatcacaaatctctgtggacacgctacaattttaacatttgtggttgtaaagaatagagagcttcacgaaaaaaacaaaaatcaaaggggtctttttatcataatgaataactttagggtctaaatttaatttccttacaaaactttttgccgttttgtcctggaaaattgtactgaactgaatccgacatgttggtgagatccaacgaattataaaattatcaaaaagaggcaaaattaaaaaagaaggtcgtgtgaccagagaatcacaaacacagagagattcatcatcgaatcataaagctctgttttcaagaagaaaatatg

SEQ ID NO: 4220 - DNA, 3000 bp, Unknown
  misc_feature (1)..( 3000): cDNA_ID_3072843_gDNA_ID_1620691_Annot_ID_164796 3000 nt of promoter + ATG
tgatgagacgacaatcattagtggagctcttgatttgactgagaaggtgtgtgcttgactttctagaattcctgaaccatggcttgatctgtgtagaaatatggtgaaagttatttatgcaaaagtggtatttggtttgacagactgcacaagaagccatgacaccaattgagtctaccttctccttggatgtaaattcaaaattggattggtgagtttagttctcaactgtcagtggtataaaatattttatctgttgtctcaatgattctgaaaagtcctgcatggcagttgtttcggcaactattttctgacatgtatcttatactgctgtctgtgtaattaatctcttagggaagctatggggaagattctggcacgaggccatagccgcgttcctgtctactctgggaatccgaaaaacgttatcggacttctcttggtaatgttgctgactcttattttgcatgtttcaatggtggcttatcatgtttctgcaaactctaatcaagaaattgttctgttttctaggtgaagagtcttcttacagttcgccctgaaacagagacccttgtcagcgcagtttgtatacgccggattccaaggttctgccattaccattttaacctccagtctttactattatgtagaatgaagtttcgtattattgatgttataatgtttgaatagggttccagctgatatgcctctctatgatatactgaatgagtttcaaaagggaagcagtcacatggctgcagttgtgaaggttaaggggaaaagcaaagtcccaccttcaactttgcttgaagaacacactgatgaaagcaatgactccgacttgactgcacctttgttactaaaacgagagggaaaccatgacaatgtcattgtcacaatcgacaaggctaatggacaatctttctttcaaaacaacgagagtggacctcacgggttttcacatacttcagaggctatcgaggatggtgaggtaattggtatcatcactttagaagatgtctttgaagaacttttgcaagaagagattgtggatgaaactgatgaatatgttgacgtacataaaaggttcggctaaatactctctatggcatcacatatcaccttgtcatatcatcactgagaatttccgcgtttgcaggattcgagtagcagcagcagcggctgcttcatcaatagcgagagctccttcaagccggaagttgcttgcgcaaaagggaactgtgagttaacactcttttgtttctttgttgtttatgcaagagagaaagttagaattgttgaaacttgtatttgcagggaggacaaaataagcaagggcagacgaataaagttcctggtcaggaacaagataaaatgcttggaactattaccgagccgattcgaagaaacaactgatgttgtgttcttgcttaaggaggcaaaaactctgttgcggtataaagaaagaaaacaaagaataaattataagatccaggttcttctgtatactttgatccatcacataaattatatatatataaaaatataaaaagtcagcagaagcaatggttcaacccgatttttgaagatgctttgtttccttgtattatacaaaatacctacaatttgtaatttactccgtaacttgattcttttttcctttttgttcactcaatttttcgtagaatgcagtagtaatagttagctatatggtcacatactgttgtggccgctattttgtaattgcacttttgaaacaatggatcaaaagtttctccatccatcgctaatctttgatacaccggtgattcggtgaccggtggcttttgacaaagtcttttagacaaggataattcatcgatggctttgtcaactttcgtgtctcatgttaacttcctttttattagacaacaaaatttttgcaatgatttgatttggtcgaactagaccaaatattagtcaaacttaatcctttttaacgggatggtaacgggatggtaagtttgattaacgttagatccaatttatcctagttaacgcaaaagttgcttaataatgtacttcaaagaaataaaatttggacgtttcccaaaagaattttttttgggacaaaacaaataagtgagagaaatttagactttattttttttcctttaaatcacaatatcaaaatcttacaccattaagttgtgaatgactcaatataacatataatctagttgtttgtattagtgtcgtcattgtgttacaatgcagatttcaaactcgagtccttgagttacaatgcagatttcaaactcaaaatagtaaaggttgtacaaaaaaactcgcacaacaaccgatgcattagactagtggtttaagtgcaaagattggatccatgtgtttcttacaagtgcaaacgttagatccatgtggtttaagtgtagtccatgtgctccctagggaaagtgttgaactaatgttttttttttttttttcgtctgaactaatggttttattgcagggatattagaccaatgtactcgattgatagaagagatgctttacgccgatgtatttgatatcagcacaagccggttccgggtcatgaggaactagggcccaaggcccaaacccctccatgttaaaaaacaaaaaacaaaaaatctcgtagatgacagcacaatcacacatttgaaatatacaattccgatattcgctaaagggtgtttgtcagattgtataagatccattccgtacaagaagatcctgcaccaggaccaccagaaaaaaaagaaagtaaaggggtggatttgaaaaatataaaacatattggggaccaatgttaaaaaacaaaaccaaatatttgctgtatatgctaagaattcaaaattgtacaaaacccagaccccattaggtcgatgagagagatataaaaaacaacaaaattagacgagaaaatatctaagaaaggcgtcggaaaattgcaaacagatagatatagagacgacgaagatg

SEQ ID NO: 4221 - DNA, 3000 bp, Unknown
  misc_feature (1)..( 3000): cDNA_ID_3072847_gDNA_ID_1620691_Annot_ID_164791 3000 nt of promoter + ATG
agaaattggataaattagttggagtaccagttattaatgttcatatatggttagtgaaaccgttatctcccttgttttcttttggccattatgtgagaatcgagattacatgcaggtcttaactgctgtgaactaatattgcaggtttgatcgaaaactgaagaacacatatgatcacctactctttagcaggtgaatttcttatttatgcagttttgaggaattatgtcttatagaatacttagttggatacagtgttggaaaaaaagaatacaagtgttttgtcttgaatcagcaacagttaaggcttgttcttggttaaacatttgttgtatattcaacaatcttgttttgttgttttttgcagaagtaaccttctgagcgtgtatgccgacatgtccttaacttgtaaggtaagaacgcggcttgtttttctaaacgtgttcctccacttgtttatctatcataaattggtgctctgtggatcttctcataatttttgatggcttatcttgattccgaatctgattcaacaaagcgttttctttctatgataaactgtaggaatattacgatcctaaccggtcaatgctggagctagtatttgcaccagcagaggaatggatatcacggactgattctgacatcatagatgcaacaatgaaagaacttgagaaactcttccctgatgaaatctcagctgaccaaagcaaagctaaaattctgaagtaccatgtcgttaagactccaaggttagtgaagttgtaccatttatttagcttcaaatgagggaccaggctttacattgataaattcaacatctttctctattgttgcatgatcagatctgtgtacaagaccatcccaaactgtgaaccatgtcgtcctctacaaagatcacctattgaaggattctacttagctggagattacacaaaacagaagtacttagcttccatggaaggcgctgtcctctctggcaaattctgctctcagtctattgttcaggtaaacacaagcttgccattcaaatagttaaccagtaaccttgttctctgtttcttgttggaatatatcgccaataaccggtcggtttacctgattttgtctcactattatactgttccggttatgtagagaaattgctaaagtcagaatttactggttatacaggattacgagctactggctgcgtctggaccaagaaagttgtcggaggcaacagtatcatcatcatgagaagaggacaaaacttaaagatgatttgcttgtaagcattattatttgtgtataaatctcattgcaatccaaacttaaccttactctcttcagtaaatgaatctcacagatttgacatctcacgtttctgtcaattttataatttttaaaaagtaattactgtcgaccttttgtaatcatagtgatttatcattatgtctctctttttaaaaccttttctggtacaaattataaaaggtcgatcatcattgattgatcaaggggtaaaaacaaatgttcatgaacaattaaaagaaacagaaaaaaaggaagacgattgttttcaaccacaaaaattccatttgttttgttgttgaaggctatagctagctagggccggtaaggtctaaaaaggtctcttgcaagccacgtgagcggcgacctgaaatagcttttggcttgagtagtggatacagcaggtggtgtgatatgtacatcatacatacagtacaaaagacatcaaatatcttttgttttttttggtaatatacaaatgtgtaacagttgattatatatatatatataaataatcaattcaaatgattgaatttacaaaatttattaaaatatttaaaatcttaattgagtaacaatagtaaactttaaatctttgaaatgtgatttatacatatcatataaaaaaaaagaattaaaatatattatgacttgatttaaaatctattaaaatcatgatttacagaaacacctcaaagataaagataaacactttacccaaaaaaaagaagaagataaagataaacatattaatcaaatatccaatttaaaaaggaagttaatagttatgttacatggaaacggaaacagaaacgaaacaggaaacaatttttttttttaaattaaggaatgaaaatttttggaaacgtatatagatattcaaaacataaatatcaaataatttaactaaattctgaaaaataaagattaaaaggcttaatatcaaatatatagacaatcatttttattagtttcatcaaaattcatatataaagcacctaaaatctgattcgttgggaggaaaacttaaaacccgaatctctcaaaattaggtaaatcttaatatttctaaattttaattataagtttccaaagtaaaattcagaaaatgtttatcgcgtttccatcgtgtttacaaacataaaatttaaaaaacgcttttttttgtgagtttccatatatttcaattctgaaacgggaatgaagtacggagagagtttccatgcaagatagttaatagtctctaaccccaattataattccattcacgggatccgaatatctattactcaagatcttagaaagaatcctaaaaatcagttattaatttgttggattttgtttagtgagataatggtaacaacaatcagttggtaacaaacaaaagtcaccaaatgatatgattaaaggaattttgttggtcatgagaattagcaatgagccaatgataataatccgtacaaatatacgaatgtatctactaactaatataatattgggccccacccaccagatcgtcgtttagtttggttaagtgagtgttgtttgtagtagtgggctttttgcttcgcttcttcgttttccaaaatctctctctctctcacattcattgcttttaaattaaaactccccaaaaactgaaactgttactacttctctccttccttctctaaaaacctaaaaaaaaaaccccaacacacacacatg

SEQ ID NO: 4222 - DNA, 3000 bp, Unknown
  misc_feature (1)..( 3000): cDNA_ID_3072859_gDNA_ID_1620691_Annot_ID_164786 3000 nt of promoter + ATG
tagaaagtacacaaaccatctccaattagaaacctaaccaattctagcaactacacaatctttcaattggggtgaattcaaagatatgattcaacattacttaattagaaattttgtctcgataatacctaatttctgagaaaagggtgaaattaccttgacacctgagtctgaaaacccagattccgtcgcagtctccgcactaagtttccgtttaagaggattagacggcggcggacgcggaggcaacggattcttcattctcatcgacctatggtcaggcgtcgacgtgttccgatctagaggtggagcattttctttggcggatcttaatttgcgtggaggcttcgatttcgagatactagggtttggcgagtgtggctctccgccgtcgcgtaagatagcgtttcttggtaacgtaaagtgcttcttcatctccgccgtgaaatctacaattagaaacccaaagtagaagaaagagggaaagtaaatcgaatctgcgcttctacgagagcgtcagtgaaaccctagtgtttgggcaaagaaaagaggaagaagaacgagagaagagaagagagagagagccgttaaagagcgagaattttgaatttgtttttgtcagatcttgtgaagtgttgacgattcgcatcacatgaatttctaaattattttatttaaaaagaaatgaattttatgtgatcgtgactttatggccgtaggatgaatccaacggagggaatgagcaacaaaaaaagaaaaggcccacgtgtgtgtttaatggtgtgtgttttagtctttagacgtgtggtagtaatactgccgcacgggttttttaagatccaccgcgcgtaaaaatccaatccatccgctatggagcgggtatgggtttaaaacttttgacccgttacgaagcatggctcgcgagtaatcgtatcgtgggttgcagatttagtggttgtcattgggcagcagtagtactcatttctatcttcaactatattatatgtctttgactgtgaataaatgtagttcgaacgacaaaatcatcaaagcagtaaattagtcaatagcacagattttttttttttgggttaaaagtcaatagcacagatgcgaccacatttagtcatttacttacaatttagtcttaccaacgacatgaagagctaatatgagtgtcaaaaaatacaaaattcgatggtagcgatgagcaatctcttcaaaattgaagtaagtgattcttatgtcataaaattcattgaatactagacaattcattgaagatgatgcaatttaaaaattaaaaataaaaaaattcatacatgataaagcatgaattgaaattcttcatgcaatttaaaaaaaaaataaaaaaattcatacatgataaagcatgaattgaaactaatgtcaggtcctccggacttgggagcgtgtgctaaactgctaataatatcaagagagtaaacaaaaccacttgcaaattttataaaatctgccaaagattagcagattatgctgataacttggtacaatagtaggcaaaatcttattctactataaaatcttctcaagtcttcacaactattcaccatgtacttgaagtcgaaagaatgttctcatatatatatatatattttgttacgaatgttctcatatatagtatgccaataaaaccacaaaatttgtctgacacaagatagagtatcatgcttagtcaaaatatgtaaatattctcctaaagttcacaactacttgcacactttcattaagtatgctgctatgtttacatattatacaaataaaatcgtaaattttgttagaaacgtggcaaactagcataaataaataatctaaggcttctagtaatctttgcattacaacttgcataatttccataagatctattggatattgtaaaatctgccaataaaaccacgtatcttttaagaaaacacaggagactaaccaaaataaatccaaccgtattataattctctaaattttacacattgactcacgaacatttataaaatctgccatattcgaaaaatttgtcaacaacatccctataatgtttgagagacatgaaaaattagcaaaacatatgctaaatgtgctagtaatccctaatgtacgtttacataattttttttttgaccgattttaattagagctcaaaagaatcatccatgaaaaatgtacgtttacataacattttccatactttgtaaaatccgtcaatgttggataaacaatgttatgaaaaacattcaagtctacaaaacaaaacctaagtttctatggcttataattaatcccatagttttttaatcatgttagatttgttaaaattttgctagcgttgatgattttcttgtattctaaaattttaattttttgaaaaaaattaattcgagaaattttttcactaaaaagacaatgttttttttttttaatttaaaacttaaatctaactcttctttttgtcaaatatagattcttattattcttaccttttaaaatttatcttatttccttcttttttttaaaagagatttacaataaataagtaatattgaccaaagatatagaacacaccaaaaaagaggcaaagatatagaaaacatactatttagattttttataaattttggtagatatcttagattattctagcaaatctcctttaattgttttttttaacagcaaatctcctttaattacatcaaatccgtaaaggttgaaaaaaaaaataacaatagaattttagtaatgaattaattaccaatacttgacccaaacccgaacctaaacaccagatccatcgtcatcatccatccaatcaaattgactcatcgtgttgtgacctcccagtgattaagccgcgactcctcctaactcgtaatccctcacgtctctgagaattctcagtttcttcagtttcattgcaattcaattcccgatctgatccgttcctgcttagatcggagcaaaaca

SEQ ID NO: 4223 - DNA, 3000 bp, Unknown
  misc_feature (1)..( 3000): cDNA_ID_3072863_gDNA_ID_1620691_Annot_ID_164785 3000 nt of promoter + ATG
catgcacgtatcgagaacaaacacaaacacaggtggtggaggcacacgagacggatcaggaggcaacgtgtactcaacagtagtgtactggggataaagctcaccagggagattaatctcagagatcgaatggtaatgagaagggaaatgattcctatgatagcaaaaaggacagacccagttcatagcggcgaaatcaacacgagcgaaggcgttgagaagagctttacaagtcttgcaatcgagaggagcataagggagatcaaggataagggggtgacgacggatcggtgaaattgaagcggcgagaggaatcacacacttgcttgcttcaaccttagtgcgaggccaaaggttccaagtcatacgaactccatcaataccttcccaatccatctcctccactttcgccttatccgccatctccgccattgttttgctccgatctaagcaggaacggatcagatcgggaattgaattgcaatgaaactgaagaaactgagaattctcagagacgtgagggattacgagttaggaggagtcgcggcttaatcactgggaggtcacaacacgatgagtcaatttgattggatggatgatgacgatggatctggtgtttaggttcgggtttgggtcaagtattggtaattaattcattactaaaattctattgttattttttttttcaacctttacggatttgatgtaattaaaggagatttgctgttaaaaaaaacaattaaaggagatttgctagaataatctaagatatctaccaaaatttataaaaaatctaaatagtatgttttctatatctttgcctcttttttggtgtgttctatatctttggtcaatattacttatttattgtaaatctcttttaaaaaaaagaaggaaataagataaattttaaaaggtaagaataataagaatctatatttgacaaaaagaagagttagatttaagttttaaattaaaaaaaaaaaacattgtctttttagtgaaaaaatttctcgaattaatttttttcaaaaaattaaaattttagaatacaagaaaatcatcaacgctagcaaaattttaacaaatctaacatgattaaaaaactatgggattaattataagccatagaaacttaggttttgttttgtagacttgaatgtttttcataacattgtttatccaacattgacggattttacaaagtatggaaaatgttatgtaaacgtacatttttcatggatgattcttttgagctctaattaaaatcggtcaaaaaaaaaattatgtaaacgtacattagggattactagcacatttagcatatgttttgctaatttttcatgtctctcaaacattatagggatgttgttgacaaatttttcgaatatggcagattttataaatgttcgtgagtcaatgtgtaaaatttagagaattataatacggttggatttattttggttagtctcctgtgttttcttaaaagatacgtggttttattggcagattttacaatatccaatagatcttatggaaattatgcaagttgtaatgcaaagattactagaagccttagattatttatttatgctagtttgccacgtttctaacaaaatttacgattttatttgtataatatgtaaacatagcagcatacttaatgaaagtgtgcaagtagttgtgaactttaggagaatatttacatattttgactaagcatgatactctatcttgtgtcagacaaattttgtggttttattggcatactatatatgagaacattcgtaacaaaatatatatatatatatgagaacattctttcgacttcaagtacatggtgaatagttgtgaagacttgagaagattttatagtagaataagattttgcctactattgtaccaagttatcagcataatctgctaatctttggcagattttataaaatttgcaagtggttttgtttactctcttgatattattagcagtttagcacacgctcccaagtccggaggacctgacattagtttcaattcatgctttatcatgtatgaatttttttattttttttttaaattgcatgaagaatttcaattcatgctttatcatgtatgaatttttttatttttaatttttaaattgcatcatcttcaatgaattgtctagtattcaatgaattttatgacataagaatcacttacttcaattttgaagagattgctcatcgctaccatcgaattttgtattttttgacactcatattagctcttcatgtcgttggtaagactaaattgtaagtaaatgactaaatgtggtcgcatctgtgctattgacttttaacccaaaaaaaaaaaatctgtgctattgactaatttactgctttgatgattttgtcgttcgaactacatttattcacagtcaaagacatataatatagttgaagatagaaatgagtactactgctgcccaatgacaaccactaaatctgcaacccacgatacgattactcgcgagccatgcttcgtaacgggtcaaaagttttaaacccatacccgctccatagcggatggattggatttttacgcgcggtggatcttaaaaaacccgtgcggcagtattactaccacacgtctaaagactaaaacacacaccattaaacacacacgtgggccttttctttttttgttgctcattccctccgttggattcatcctacggccataaagtcacgatcacataaaattcatttctttttaaataaaataatttagaaattcatgtgatgcgaatcgtcaacacttcacaagatctgacaaaaacaaattcaaaattctcgctctttaacggctctctctctcttctcttctctcgttcttcttcctcttttctttgcccaaacactagggtttcactgacgctctcgtagaagcgcagattcgatttactttccctctttcttctactttgggtttctaattgtagatttcacggcggagatg

SEQ ID NO: 4224 - DNA, 3000 bp, Unknown; identical to SEQ ID NO: 4214
  misc_feature (1)..( 3000): cDNA_ID_2993367_gDNA_ID_1620691_Annot_ID_164781 3000 nt of promoter + ATG

SEQ ID NO: 4225 - DNA, 3000 bp, Unknown
  misc_feature (1)..( 3000): cDNA_ID_2040893_gDNA_ID_1620691_Annot_ID_164777 3000 nt of promoter + ATG
cttacaagaccggtggatgagaaaagtcttatgtgacgaccgacgagtaacagccacgagtagaaagatgattaggaatatttcagtctgtttttgatcagttctcaacctccacaagaccgcaaccaaccaccatggtaaggaaatgattgttgtcttttcttttaaaaaatattagttattttagttttttttttttatgattgctaatttaatacagacacaaaactgagaatttgatctcttttaacagtttgttacttcacagtgaccatttgagaagttgcatccactgtccatccattctcatactgttaatcaaaaaataaaacaattatcgatgaatcaaattttgtcatgtttttgtaataaagtgctagtatgtatagtggagttcttaaagaatcttacaaaaagttattggtgggctatgctttttaggatatgacactaaagtaaagaaggctagcctaagaactcacactttcttctttactcttcttccctacaattacgatcgccaaaaaccctaaatttctaaaaactgcttttatctccaagtaagtttcaatattgatcttctgctctttttatttgttcaagctagcatgttgtttgatctttagcttttcggttggttttcaggaagttgaaaaagatggatcttagtggttgtagagatataatcagtagtttaccagaagccattagttgccatatcctatccttccttcccactaaagaagctgcttccacttcggttctttcgaaaaaatggcggtatctctttgcttttgtccctaatcttgatttagatgaatctgtttatctgaatcctgagaatgagacggaagtttcttcaagttttatggattttgtggatagagtgttggcattgcaaggcaattctccattacataagttctctctaaagatcggagatggcgttgaaccagaccgtatcattccttggataaataatgtgttggaacgcggtgtatccgatcttgatctacacgtgtatatggaaacggaatttgtgtttccttcagagatgttcttgagcaagacactggttaggctgaagctaatgctatatcctctcttggaatttgaagatgtttatctcccgaagcttaagacgctttatattgactcatgctattttgaaaagtatggtattgggcttaccaagcttctttctggttgtcccatacttgaggatttagttcttgatgatataccttggtgcacttgggattttgcctcggtgtctgtcccaactctcaagagactaacgtttagcacgcaagtgcgagatgagtttccaaagagtgtgtctattgatactccgaatcttgtctacttgaagtttactgacactgttgcaggcaagtatccgaaagtgaatttcgattcgcttgttgaagctcatatcgatcttagattgttacagggccatcaaggttatggtgaaaatgatatggttggcaatgcaacagattttataatgcgtatatgcaatgtgaagactctctatctatcttccaacactcttcaggtttgttttcatcatgaaaaacaacttgtaatctttttaacattgttcaaggatttgagttagtgattgcaattgagtgatgataatctagttgttgtggttgtgtttcaggtacttacttacagttgtgatgctataccaatattcaacaacctgactcatttaaccatcgagagtaatcccgaagtaggatggcagtcattgccaggtttgctcaagaattctccaaatcttgaaactcttatcttccaagtaagaaacaaaacccttggaaagcatttgttgactcaatttttcaaagtttaagaatatttcactatgtatgtttcagggcctcatccacaaagccaccgataaatgtggagacgtgtgcttgtgcaaacctcgtgaggagattcgcagttgcttagcatcaagtccggtgaaggttataaagatactgaaatttggtgaaatcagtgatgacatggagaagcagagagagcagatcaagtatttcttggagacaatgccgaatcttgagaagatgattttgtactacaatacaacaagtgttgaagatgtaactgaagtttcaagccgacttcagaggctagtttctaaattagcttcatcgacgtgcattgtccaactaatctctgataacctcagcttgtcatctactgtatcgacaaatgggctcctctgtttctaaagggtacctcttcggtttgaagatgaacctctttatctcagagatgattaccaaagcttagggagtaccctagcttgtcgtcactaaaataatcttctcttgtttctgcctaattatgttctaaagacgtgttatttaggctttgtccttattgacttgcaatgttaacttcagttttttcttgttacagttggtctgttgtgtaaaatgatcttgtaagagtaattggtaggagtaagcagacaacaaaagctgaaacatcccttttgtgtaaagatctgcaacaaaaccgaattaacattttatctaatcaaacaaataaaacaattatcgctaaatcaaattatgtcaagtaatgtttttgtaagatgctagtatatctgattaaatatattattttatctaatggagctcaaaatatcttccaaaatcttacaaaatcttttagccttttaggacaagacactaaaaaaaggctagcctaggaagtaggaactcacactttcttcttcactcttgcctacaaatacaatcgccaaaaaccctaaatttctacaatagttgagtcattttggtgagctatcttcactttagcctacaaatacaagtaagtttcaatatcgatctttttattttttcaagctagcgtgtttgtttgtttgtttgattcttagcttctcggttggaacacgtagaggaagattgaatcggtctcgtgtctttggttttcaggttgttgaaaagg

SEQ ID NO: 4226 - DNA, 3000 bp, Unknown; identical to SEQ ID NO: 4204
  misc_feature (1)..( 3000): cDNA_ID_3072785_gDNA_ID_1620691_Annot_ID_164749 3000 nt of promoter + ATG

SEQ ID NO: 4227 - DNA, 3000 bp, Unknown
  misc_feature (1)..( 3000): cDNA_ID_1823471_gDNA_ID_1620691_Annot_ID_48602 3000 nt of promoter + ATG
acgagttcttaaacaaatttgttataaataaatttaatatataagtaccattaaatatgttaagtaacatattaatgatattaataaaccattttaatattgcataaagttttacaaccattgtcatcatatcctctttttctataggtgttactagctctcatctcaaggtctccaccatactctttaattaaccggctattatttattttaatagtaacacatttgttcaaaataacactagatgttttacggatggtgattttaagatgtttagatatttataacagaaagtcaggtcgatccaacattctttcatgccctacacaaataaacatattatggcctgtaatttttgtttttacaaattcacaaatcatagtaataaagaaaagatcatactaaaccttaaataataaaacagtttttaaattcattagcagtttgtaaaaagagaaaaaagaaaagaaaaaattatatccatttttttttggtaagggataggggacaaagtcccttaccgtttgttaagaaaacttaaaagaaattagaaaggaacgattcaagttttagttataaaaaaacttcaaaaaaatatatcatttaaatatagctctagttacatttttacctgtaaaatcactcatcaattagtcaagtttttcacacaaaaatcattcgatcatgtctagttgcctacaaacaagtaaaccaaaaatcgcatgccctttacctacgaatgactaatataatttaaaattgcaaactaattagatttaaagcaaagttgcaaaattaaagtccagacacaaaacctagagagacttcagactttttctttagtaatcaaactcgattttgcaagtttagtattttacgttttttaaaaccaaatttttaccaaacaaaattcattaactagacgtaaatttagctaaaaaccacaaaatataatgaaaggaagctaaaaaaaaatatatatatatatataatgaaagcctatattattttttattttatcataaaaggcttataaaagttttttgtaaaacatgttctattaactttgatgtcctaagccataacttctcttgattttgtggtgggccagacctaaaacattaaaaatatgatattatatataaaaatatgatatcagaaaaataaaactattaatttgtaaacaaaacttaactgacattttactttctttcatataatatatgaacgtttttaactatgtacatgaaaataaaacataacttaaaattagaaaactacattaaaacgagatctatataatttttggccgtcgaaacgatcgtctaaacgttatccagagaacctagatgaccgtctagactgtttttaagaacatatgacaatgttttataaacataagtatatttgtcataatgtttaacataatagttttgaaaagagagaacaaagtgcaacactgttgttatataatacaattttttattaactattgaaaatatgagatttccatgggatattgcacaaaagctaaattgcaattcataagattaataaaaatctttatgtacaatgtatcacaccatttctgtcagttttaaaatattagttttagaaaataaatgaggatctaatacttttttttttctttttcataatgagtcaattttattgttatggaggatcaaatctcagtgttaaaaaagggtaacaattcataatattaattaaaatctttcagtaaaatgtatcacaccatttttgtcagctctaaaatgttagttttagaaaataaatgagaatacgatttttttttttttgtctttttgataatgagtcaactttatgtttatgaaagatagaatttcaatgttataaaggggtaacaatttataagattaattaaaaaaattatctacaatgtatcacaccatatctgctagctcgaaaatgacagttttagaaaataaatgagaatagaatatcatttttcttctttttcatagtggatcaactttatgtttatggaggataaaatctcaatgttaaaaaggggtaacaaatcataagattaattaatatgtttatatacaatgtatcacaccatttctgccagatctaaaatgacagttttggaaaataatgaaaatataatatcattttttgtctttttcataatgagtcaactttatgtttatagaacataaaatctcaatgtgaaaaagggtaagaaaatcttctatataaattggtcaaactttctttcaattcaaatcattattttttattaataaatgaaaatataatattttttcaaaatgagtccactttatgtttatggaggatataatctcattgtttaaaagggtaaaaaatctcttctatataaatttggtcaaagtttatttcaatcttcaacaaaaatctttatttttctatgatttaatggaaatatgggatttatgatattctctaaaagctaagtttcaactaatataaaaataaaaaagctaaattacagctcatcacattaaatgaaattgtaatggacagtgtatcacaagatttttgccagtcttaaacgttctaaaatttcaggcgttttttttgttctatttataaatatcaaagttttagcttcataatccattcatagtcctctgctcttgttttactactcttactaaaagtttttttaaaaaagaaaagtcttagctactagcttgctccatttataatcccttcactcaactttcttgttttactactctcactaaacgtaagtttttctgtatcatttatctaaattttattgtcaatatcaaactagatttgaaggatttcaattgaaagtcttatgatatttaattgttacgtcgatataatctatgtgatgtagaaacactcatttggagtggtttaattacatatattgcaaattacttatttaaagtgcatgctaatgatttagataattttgtttcaaaattaggtcttttc

SEQ ID NO: 4228 - DNA, 3000 bp, Unknown; identical to SEQ ID NO: 4223
  misc_feature (1)..( 3000): cDNA_ID_1823467_gDNA_ID_1620691_Annot_ID_48603 3000 nt of promoter + ATG

SEQ ID NO: 4229 - DNA, 3000 bp, Unknown
  misc_feature (1)..( 3000): cDNA_ID_3072859_gDNA_ID_1620691_Annot_ID_48604 3000 nt of promoter + ATG
cacaaaccatctccaattagaaacctaaccaattctagcaactacacaatctttcaattggggtgaattcaaagatatgattcaacattacttaattagaaattttgtctcgataatacctaatttctgagaaaagggtgaaattaccttgacacctgagtctgaaaacccagattccgtcgcagtctccgcactaagtttccgtttaagaggattagacggcggcggacgcggaggcaacggattcttcattctcatcgacctatggtcaggcgtcgacgtgttccgatctagaggtggagcattttctttggcggatcttaatttgcgtggaggcttcgatttcgagatactagggtttggcgagtgtggctctccgccgtcgcgtaagatagcgtttcttggtaacgtaaagtgcttcttcatctccgccgtgaaatctacaattagaaacccaaagtagaagaaagagggaaagtaaatcgaatctgcgcttctacgagagcgtcagtgaaaccctagtgtttgggcaaagaaaagaggaagaagaacgagagaagagaagagagagagagccgttaaagagcgagaattttgaatttgtttttgtcagatcttgtgaagtgttgacgattcgcatcacatgaatttctaaattattttatttaaaaagaaatgaattttatgtgatcgtgactttatggccgtaggatgaatccaacggagggaatgagcaacaaaaaaagaaaaggcccacgtgtgtgtttaatggtgtgtgttttagtctttagacgtgtggtagtaatactgccgcacgggttttttaagatccaccgcgcgtaaaaatccaatccatccgctatggagcgggtatgggtttaaaacttttgacccgttacgaagcatggctcgcgagtaatcgtatcgtgggttgcagatttagtggttgtcattgggcagcagtagtactcatttctatcttcaactatattatatgtctttgactgtgaataaatgtagttcgaacgacaaaatcatcaaagcagtaaattagtcaatagcacagattttttttttttgggttaaaagtcaatagcacagatgcgaccacatttagtcatttacttacaatttagtcttaccaacgacatgaagagctaatatgagtgtcaaaaaatacaaaattcgatggtagcgatgagcaatctcttcaaaattgaagtaagtgattcttatgtcataaaattcattgaatactagacaattcattgaagatgatgcaatttaaaaattaaaaataaaaaaattcatacatgataaagcatgaattgaaattcttcatgcaatttaaaaaaaaaataaaaaaattcatacatgataaagcatgaattgaaactaatgtcaggtcctccggacttgggagcgtgtgctaaactgctaataatatcaagagagtaaacaaaaccacttgcaaattttataaaatctgccaaagattagcagattatgctgataacttggtacaatagtaggcaaaatcttattctactataaaatcttctcaagtcttcacaactattcaccatgtacttgaagtcgaaagaatgttctcatatatatatatatattttgttacgaatgttctcatatatagtatgccaataaaaccacaaaatttgtctgacacaagatagagtatcatgcttagtcaaaatatgtaaatattctcctaaagttcacaactacttgcacactttcattaagtatgctgctatgtttacatattatacaaataaaatcgtaaattttgttagaaacgtggcaaactagcataaataaataatctaaggcttctagtaatctttgcattacaacttgcataatttccataagatctattggatattgtaaaatctgccaataaaaccacgtatcttttaagaaaacacaggagactaaccaaaataaatccaaccgtattataattctctaaattttacacattgactcacgaacatttataaaatctgccatattcgaaaaatttgtcaacaacatccctataatgtttgagagacatgaaaaattagcaaaacatatgctaaatgtgctagtaatccctaatgtacgtttacataattttttttttgaccgattttaattagagctcaaaagaatcatccatgaaaaatgtacgtttacataacattttccatactttgtaaaatccgtcaatgttggataaacaatgttatgaaaaacattcaagtctacaaaacaaaacctaagtttctatggcttataattaatcccatagttttttaatcatgttagatttgttaaaattttgctagcgttgatgattttcttgtattctaaaattttaattttttgaaaaaaattaattcgagaaattttttcactaaaaagacaatgttttttttttttaatttaaaacttaaatctaactcttctttttgtcaaatatagattcttattattcttaccttttaaaatttatcttatttccttcttttttttaaaagagatttacaataaataagtaatattgaccaaagatatagaacacaccaaaaaagaggcaaagatatagaaaacatactatttagattttttataaattttggtagatatcttagattattctagcaaatctcctttaattgttttttttaacagcaaatctcctttaattacatcaaatccgtaaaggttgaaaaaaaaaataacaatagaattttagtaatgaattaattaccaatacttgacccaaacccgaacctaaacaccagatccatcgtcatcatccatccaatcaaattgactcatcgtgttgtgacctcccagtgattaagccgcgactcctcctaactcgtaatccctcacgtctctgagaattctcagtttcttcagtttcattgcaattcaattcccgatctgatccgttcctgcttagatcggagcaaaacaatggcggag

SEQ ID NO: 4230 - DNA, 3000 bp, Unknown
  misc_feature (1)..( 3000): cDNA_ID_1823455_gDNA_ID_1620691_Annot_ID_48606 3000 nt of promoter + ATG
tctgacttgcatggcgtaacgcataatctttccacaataaatctgcaggaggtagactgatccaatcatgggtaaagagattcacaatatagagatcacaccatcgatctcccataaggagccaacttccatgagttgccctacaaacactctttgtaaattcctcaccaaaatcttgcgttttgtaaactttatctttttcctcgggattcaacaacgtgcatgaattgttgttgttgtctcgggggaatcaaatcagccaatggatgtgtttttgggcacgacttgtctggaagcagagtaccaagaggaacacacggatttagctcgggaagctccgaccaggtatgagacgtatgagaagtagggttatgcttattctccatggcaaattggagagaacaagggaaatctcaaaatgagaatagggttgttacgatttggtgaagaattagggttacgcttttaatatagtcaacgagaagaaaaatttgcttgttttgggattttaagaagttattgggccattaacatatctaagcccacttaaacaattgtttttggtgacttagctagaaccgacgaagaagaagatgaagtagcaattagagagaaaaagacaaggacaagaagaaagttgtgctgtcgcaaccaaactaagggtgtatatatgtgtgtgtggtaagtagaaaaactactaaggtatgcttgtatgtatcatgttgtgtaaaaggaatccgagttatcatgttccaaacgtttttgtgtttcatcaaacaagtagacacaaaacagagagtgaggtatataagaattcgcaataaaagattattctgaaataattcaaaaaaatgttccttccggtatatcaaatcccatgatctacaaccctaataacaaaaagttaactttgaaaagagcttatctttatcctattaaacaccaagtatattctacatcaaaagcttacttaagcatatcagtttgtgtataagcacaagacatttttaacttatccataacaattgaaactttgtaacccttttgaccacccagctactcttttggatgatgaccctctgcagacagctgagactgtagtctccaggccatgtttaaatgtcttatttgctgaggcaatcaaaagtcccttgctttccactaacagcgaggtgaaacatgccgtagtagctaaagactgttttcaaagtcggaccagacaccacaacttttccatgtacacaattagctgtggtctgagcctcattaccaaaatctagatgtaagtttcaagagcttttggtgcggttttgatctttaccattctggtaatctttcacatgtacaaccagaagacgctgaaatctccatcccatctttcatattgagctacacccgggaaccttagaaatctgtttctccttcatccactgcctcagactctcagcttcatcaaaccgacctgcagctgaatatagaccggccaacgttacatagtagctagcttttctcggcttaagttgaatcagctccctcgccactctttccccaacttctacatttccatacaccttgcacccactcaacaccgcacccataacagcctcatcaggtttcacgggcatatcttccagaaacttctctgcttcctccagaagacctgctcgagacatacaatccgccacactagcatagtgtttcagttcaggaactatattatattcctgcattagtctgaaatacagccaagatttttccacaagaccgccatgggcacaggctgataagacaccaagaaaagtgacagcattgggttcaattccttccttaagcatctcatcaaagagtttaaaagacattaccacgtctccatccaaaccataccccaaaataagcgagctccaagagatcacatctcgtctcgacatatttacaaatacagtgtgcgcatagtccagtatcgagcactttacatacatatctgttatagcattgccgagattcaagcccaagcaggagcatctcctgatacaccatccatggacgctcttcccgtgcttcaacgctccaagttgtccacaagccataagtaaactcaccatcaccactgaatccagcgcaaatccagaataccccatttctctgaacatggctaaacccaacatagcttctccttgctgaacatacccaccaaacatagctgtataaagaacagagtctctcacaggcatatcgtcgaacaacttacgtgcatgtaaaagtttccccatatctacatacattatcactaaagccgaactaacaaacaaacttgagctaaacccaagtttcaaacacagaacatgaatcaaatctccagatttcgcttccctagacgcagagcaagctcgtagaataagaggaagcgtaaaatcatccggtctaacacaagactctcgccacatacgaagaaacaaatcaattgacttggaagcaaaacccgatctagagaactcaccgatgattatattccaagagaaaatgttgcgataaggcatgtgccagaagacagaaagcgaagtaggaaagagatggttcagcttggaataagcgaggacgagcttggagctgagcacaacgttggaatagagaaatgtacgaagaaggtgagcgtggagatggcgtagatgtttagcgtttggagaatgatgtagaagcgagaagagatcaggaggattctgtgtagttactgataaagctcgagctttcaagaacattgcgaatagactcttcgtaggagacgagtacaaggaagaggaagatggtaagtgcatcgcatcacaaaatccagagaatagtggaagatgctttatgatttaatccaaaactttattttatgattttatatcaaattttaaaataaggaactcttaaaagtaatataactgtaaaatcatttttgttgggacgccatttctaaaagttcgaaatttcccagtctctctctttcgcgctctcaca

SEQ ID NO: 4231 - DNA, 3000 bp, Unknown
  misc_feature (1)..( 3000): cDNA_ID_1823451_gDNA_ID_1620691_Annot_ID_48607 3000 nt of promoter + ATG
tgagccaatgataataatccgtacaaatatacgaatgtatctactaactaatataatattgggccccacccaccagatcgtcgtttagtttggttaagtgagtgttgtttgtagtagtgggctttttgcttcgcttcttcgttttccaaaatctctctctctctcacattcattgcttttaaattaaaactccccaaaaactgaaactgttactacttctctccttccttctctaaaaacctaaaaaaaaaaccccaacacacacacatggattctcaggaccactgcagcaactctccaggttcttccctaatcattatcaatgtctttagggtttccttctttaagtcccaattttgcatctttcttcctccaatgtcgtcacattatcgggtctagttcggtttttacttgtgtgttaatctcttgtcgggtctagttagaatgatttcttcatgtgttttttttttgtgtgtaacttttgtagcaataatggtttcttcctttttgtcttgtaatggtctatttgattaatgtttcttcagattacgactggtttcgctttctgaatttttttatttttttttaatctttagaaaagtctttgttagaaaaaatatcaatttttgagaatatggacactgaggattttgtgaacccttgttatataggaggaggtaagaaccatgtctgtactaaatgtggttggagttattcaaatccacatcctagtgctaaaaaccgtcgtgctcacaagaaaatctgtggaaccatcaaaggatttgagatctttgactctgaaatgaagaaagagaatcttgatttgccggaagaacactctttggatgatgagcaaaaaccaccaaccccaagtaagaacaatttgtgctttggatggataaagtttctttctttccttgattctaatgttataatgtatgcttaatgatgaggttaggtccaacagttgtcgaaaaatctgctccaacagttgtcgaaaaagctgctaatgagagaattggggatgtttctgaagaggatgtgtttactgatgctgtttgtgagttttcgagatctgattctttcaaggaagagacagctacaaacttcccggcaaagggtactgagaatcccggtgagttaccttccgatgctaatgtgtttgataggttttcttcatcaagtaatagaatctcaaacctgtagagtatagttcaaagggaaactatttagttcactgactcatctgtttgtcacattgctcggttttattcccatttggctttcatgtttttgtgtgatgtgtctgctttatttcaactatatagttgatgaatatggaacttctcaggtgaaactcagcagtgcaacaattcatctacggcctgtgagatgaaaagttctgaagtggttcaagacagctgtgaagttccacctgtggaagttgaatcagcttcagagaatcgacaaggtgcacagcattctactgaaggacactctatgtcatctgaaactgtgattgagtcatcacaggaagctcaggtcattgacggtggtgataccatatcaaatgatagattagagacagaatgcaaagggaagttaacgaaagaatctcaatctaagttagcatctgcattaggaaagagagaggatacttcagattcatcgtggaacgatgaagtgatttactcagatgtggagggtccctatggtttttcatcagaagcaactagtatgactcatcctgatgaagctagctgtatagtcagtgaggatgttccagtccatacttctccagtaaaagctgatgcaactcaggttatcagtgccagtaaatctgttcctgatgatatgccttttgttgagaatgctgatgtctatttgcatggaatcaaaggctttgaagaatttgaagtgagtcattctgtgaatccttttcttcctgagacatctaagggagaagaatgtgaaatagatacacttactgaggcagagaatttaggaattaagcctgaaggcttaagtattggctcagaggtttcttcatcagacaagcttctcgctggagacaaaactgaacctcaaggccaaaccgatttggttgcggtcaaggaatttcccagtgcagagaacatactgatatctaagattaactctgaagatatcggaatgaaagctgaagagggtaaatcatcattagggaatgcacaaactgttgaatcagaaaccttgagagtttctctacctgctgtagattctgtagttgttgactcaaatgctgatatgagcagtgcagcgaacaaaactggtttagttgatctcgctggtaatgaaagtgaacttatgcaagcaaatgttgtagctgagaaggggaacaaaccaaaagacactttgagttctgaatcctcttgttatgcttctcctgtgtctgttgtatttgagggatctgatgcaagtgatcagatcaaaagttcaacagaaacatccaaagactccgccctccaaatcagcgctgaaagtaaagatgaagtttgcagagagagtaacaacggaaggcttgtggaggaaagcagtttcataaacgaaccaaataaaacggaatatcctataagccattttggatcaacaggcactgcacctgacactgttaatacagctaatcagacgtcactggaaatcggaaggacagaattcaatagagttgttggtggcttgggggtaattcaagcaaatgaggtcgacggtaatgtcaaagcacacaacaattatgctgaggtcccagtgacaatagaatcaaacgatcatcgagattttgggagattgcagaatctttcagaagctcacattagatctctggtttctagtccgctagtcactagaaataatacatctaatgcttctgaatctaacttgggaccagtttcaggtacttatcctatacatcttgtatgagcgaaaaaacaaaactctcttcaagatataacactcattaaaatg

SEQ ID NO: 4232 - DNA, 3000 bp, Unknown; identical to SEQ ID NO: 4221
  misc_feature (1)..( 3000): cDNA_ID_1823447_gDNA_ID_1620691_Annot_ID_48608 3000 nt of promoter + ATG

SEQ ID NO: 4233 - DNA, 3000 bp, Unknown
  misc_feature (1)..( 3000): cDNA_ID_1823443_gDNA_ID_1620691_Annot_ID_48609 3000 nt of promoter + ATG
agaggaattgagatagccatactttgcagaagcagcagctagtttcgatttaatggcttccggaagcgaggatgcttcaggtgattttggactttgagatgaacgagatggagaagggccaggagagattctgatgacagatacaagaaaagatgaagatatattacatatggtttaggtaagttctaaacaatttaaaggcttgaccaattctccaagaagtagctgcataataaagagacatggtctagaattccagagccatctaaattatttatcagtagacgataatcccagtaactaagcgaaacaggaagtataagagcatctgcattgtgcagctcaagcaaatggaaaccatacaaatcatgaaagctggttatagagacagcacaagcaaatggaaagcgaataaatcatgaaagctcgttatcaataaaccagacttgattatgtgtatgtcaatacctggatccgttattgctatctgcaggaatggaagaatgaccagagacgggagatggagtcattgagccaggacttggacaagggtttgagttttgatgttcaacatgggaaatagcagagagacgataaagattgaccaaatcagtaggatgaatcgtagtgggatcgctggacgaaacaagactagaggatatttgaccatcccttctgcgaagcaaacaacgtctatgtgcagcttcagtaagatgcctcaagaattgttcatcaaagctgctaaactgtgattcctcctggaaacattatcaagtcaactactataacttaaaactcctaaattttaataaatcacactggagactttgtcgaacctcctcagagtgaaaatcgtcatgagagtgatgaatagagattggagaggatgaagatatattcctggttttcaaaagtctttccttttccacagcagctaaaagctcttggctacaaaacaaaggaaccaataatactatcaagacctaactatgagcaaagtatcatgagaacaaaatctttctttctccttaaagatggatgagagtacctagcagggtctctcaaaacaaacaattgccagcaaataggacactctttgcttctctgtgacctgtgtaataataaaccccaatgacaaatcaatcagtgatagagatatgaagagaagattcaagtccaaagaaagataaaaaagatcacagattcatgtttgcaagtaccattcaatgatgcactgaaggtgatattcatgtttgcagctggtgacctgagaaaaccatcggaaagctttagatatcggagaagaaacaacaatagaagatgtttatgttagatccaataggaccaaaatgagaaagcgagaggatcaatcaaacatgttcaacgatggttcaagaacaagtgatcgagttaatcaaacgatctcgttattaatctgagtcaaaatatcgcaaggcacaaaatccgattatcccagatttcaagtaaaagcgaaataaaagcgagaaggagatcgttaaaccccgaagagcttatagacaaaaacaaaaagagagaggattaaaagaatctgacagtggaaggatcctggagggtgaaaggctcgagacagatgctacaagcatcatcggtattattatcatcatcggaagctacgacgagcgcggaggaagaagaagacgaagaaccaatggcgggattaaaaggggagttgtcggataagttgaaagcagatgtataagtgaaattagacattgttgttgaagcgaagatggaaagaagaagaagaaggagaagcttgatgattgagattttgagatttaagaggttgaagaagaagaagaagaagaagaagaagaagaggtgtgagattgatttgtttgatcaaaaaaaaaaaagaagagaaaaggggaagagaagactgacaagtcaaagcaaaggaaaagtcaaaaaagagaaaatgcaaggaggaggagtatttggtttttatatttaaaatttgttacacaacttattatgattgggctttgtttaagtccactagttttagattctaaaacatacttcgtcatcagacaatggacccaattcctgggctaaattatgtgggcaaactaagcggaatcggatatccaaaccgaaccgacccgagaagagatttggaggaaatgcaatgggaacagaagttgatgcgttggagcatataacagaacttgagatatcaccactctctcaccgaataaacaagccactggttgtacaaatgtgtgtattccacaaagtttcgatcggattcggatggctccgttaaatataaggtgggttagggtatacttgggaatcacgagaaggaagatcatgattataacgaataagataacacagaattcatatctatttgacaccaactccaccaaaattatttatttttattttgtcgtagttactttggtgggcaaaaacatattagctgagaggtcaatttctttttcccctaaaccaaattacgttgagatgcatggtctctctctactcaattaaccaaataaggaaaagaatcatatggtcatcaattcgtaaatcaaaattttaatttgtgtggtatttaatccatctacatgtttcgtaagcaacaaaagagcttggtctgaaaaccaaacaagaccatatgggcactcgaatactccattttgttatcggctacttccactagcctcctccttcgctgcgtctcctgtttctctacttcacgattactcgctaggtaaaagataagatactaaacaactactatagcccctttaattcaagtccgtttttttttgttcttcttcttttcaattatgtgttaaagatacaaacttttgtctgatttgcttccaccggtttcacctaagatactcaattttcttactttttgtgtgttttgtaattctaattcttttatagcttcaatttttagattcattgaagcagttgtgagttaagttggagaaaatg

SEQ ID NO: 4234 - DNA, 3000 bp, Unknown; identical to SEQ ID NO: 4213
  misc_feature (1)..( 3000): cDNA_ID_1823491_gDNA_ID_1620691_Annot_ID_164773 3000 nt of promoter + ATG

SEQ ID NO: 4235 - DNA, 3000 bp, Unknown; identical to SEQ ID NO: 4212
  misc_feature (1)..( 3000): cDNA_ID_3072879_gDNA_ID_1620691_Annot_ID_164772 3000 nt of promoter + ATG

SEQ ID NO: 4236 - DNA, 3000 bp, Unknown; identical to SEQ ID NO: 4211
  misc_feature (1)..( 3000): cDNA_ID_3089922_gDNA_ID_1620691_Annot_ID_164766 3000 nt of promoter + ATG

SEQ ID NO: 4237 - DNA, 3000 bp, Unknown; identical to SEQ ID NO: 4210
  misc_feature (1)..( 3000): cDNA_ID_3072763_gDNA_ID_1620691_Annot_ID_164765 3000 nt of promoter + ATG

SEQ ID NO: 4238 - DNA, 3000 bp, Unknown; identical to SEQ ID NO: 4209
  misc_feature (1)..( 3000): cDNA_ID_3089926_gDNA_ID_1620691_Annot_ID_164761 3000 nt of promoter + ATG

SEQ ID NO: 4239 - DNA, 3000 bp, Unknown; identical to SEQ ID NO: 4208
  misc_feature (1)..( 3000): cDNA_ID_1823513_gDNA_ID_1620691_Annot_ID_164757 3000 nt of promoter + ATG

SEQ ID NO: 4240 - DNA, 3000 bp, Unknown
  misc_feature (1)..( 3000): cDNA_ID_2040933_gDNA_ID_1620691_Annot_ID_164754 3000 nt of promoter + ATG
cctagctagcgagtatttccaagatttgaatgagcaaaatctaacgttgagcacacaaactgagaagcaacatctacggggtctcagaaaacttgattcgagggaggattcgacttcataactatgatgaagaggctcctacaaaaagtaaactgaaagaagccgttgtggtgacattgtgtcttccctacaacgtgaatgagacatccaaggacacttgctttggtctgaaagccgcaacagctgtcaagtaatacgaggaatgtcttgtcctcagctctgttccctggatttcttaaactatagacttgttgaatagatcatgaaagccactaatgagagtgtctctgtcgacttttctatgctggagatggaactatcgaactgtaaattggataattatgatttaatacaactgtctaggaaaatgattgtattcaaataactttttttttctcaaataaattatggaataaattgaatactaaaagtccttgtaatgtttcctacccaaaaaagtacgtgtaatgtttataagacgattaaagaaaattaaccaaccatatagaaaactgccaatgtcaatggagactccactctccatagaccataacacatttataacacgtaaagtagataatttataactgttataagagaatatataatccatatttaaatagatttttaatttgttattctgataatagagaatacatattttaatttttttgtaatcataaaaaattaatacatataaaatgatgaattaattaattagtaatgaatacattattcgtatccttggataaggaagactcttgagatttgacgacactaacgtagcagcaacaacagttagcgcgacgaagacaaacacctcctaagttgttatttctaggattgcaataatcattgcatgtcccgtcgtctgtacatgctattcctgagtaacattgcatggtttgtcctgtttggttcaattgttatttgtttataaattagtatcacttgtgcaccatttatgcttctattccagttcaattaattttattaatatttttctatattaaagatacaatttctttgttttttataactaaaatgtcactaatacaactattcaaattttagaccaatcaattaaacatatttttgccaaccataaatttaaactaaacactctaaatggaaaccgaagacaggggagaaatgtttacaaacgaaaccaaacaaatccaaacaataagcaaactatattaaataaagtcaaataatttataatgtaaacataatattttaacatgttacccaaatttcatcaaattttgttagaataaaatctcagtttgaattctcaccatgatattatagaaaaataaagataattttttttgcatttaagaaaatttaaccccaaataaataagcaaaatagtttatccttgaaaatgaaaaatatgtattaccagaaatcatggggagaaggataagagcaaagaccatcaccgatacaagagataaattattcttgaatcccatttcgctagaggatgcaacaagtattagttagaatatactcactttaattagaagatataaagaataatgagcctatagaaaagtaagattcaaatcaacattagaagaagtaagatatctaataagaacaatagcaaaaatagatacatcgataaaaactaatatcttacaaatattaagtaatattgatcttgaaaatttatttctacactggttgataagaaatcgttgtcttctcctatataaaattgtgaatgtcttaggaatttatacatatttagaacctaatttaggaaattcagaaatttgattttaataataaaaaccattgatttctttttaagacttccagattattattattatttttttattttattttttggtaaaccttcgcaactatttttgatgcatgcatacatttgtgttaccaaattaaaatacataaataatgtcaataatgaaatttttcaaagctagcaagatttaaagctgttgacttaactcacattcaagaagaaaaactatattcttagcacatttacataattaataatgtctaacaatgaatttttcaaagctagctagatttaaagctatcctctcaacatacatttaagaagaaaaactatattattagcacatttacataataatgtattttttcaaagctagctagatttaaagctattttcttaacatatatgtaagaagaaaatatatattcttagcccatacaacaataaaatcttcaaagctagctagattcaaagctattctcttaacataccaattaagaagtataactatattcttagcacatttacataaagatgcacaacaataaatttttcaaagctagctatagatttaaagctattctcttaacatacatttgagaagaaaaactatattcttagcacatttacataaagatgtacaacaataattttttcaaagctagctatagatttaaagctattctcttaacatacatttaagaagaaaaactatattcttaacagactttttacattttaatgttctcaagtagacaatagataaatgtatatactattttttttcttttgtggctttaaccaagaaacaacaaagacattagcaccatgtttcccattcaaacgtcttctacgatggattttgatatgtaatagatttttccattatgtgtacttcttttctgtttttaccttttagtttgaatttgtcattctagaaatatagaaataatactttaatacacataaatttccaaggaaaaaaatacattttaaaataaatggttatgacttatgcgactaatcattatcttcaaaaattacacaaattctatccttcgaaaccctaactcttctacttcgccttatactttctacggcagccgaattcgaccaactccatcaacgcacaaaattcttcaatacaaacctgaccaatg

SEQ ID NO: 4241 - DNA, 3000 bp, Unknown; identical to SEQ ID NO: 4205
  misc_feature (1)..( 3000): cDNA_ID_2050886_gDNA_ID_1620691_Annot_ID_164750 3000 nt of promoter + ATG

SEQ ID NO: 4242 - DNA, 3000 bp, Unknown
  misc_feature (1)..( 3000): cDNA_ID_1823441_gDNA_ID_1620691_Annot_ID_48610 3000 nt of promoter + ATG
ttcttcctgacgtctaaattagatggagatacttcatatcctcaaacattcatcagttctttgattactattaaatgtcaaaatctataattagcttgaattgatcaatacaaataaatacatgcatcatagttactaacctcacttttttactcaattacatcatactttgttttacattcaacaagtgtgtgcacattaatccaattttatcaaaccaaatacatggcgccactaactaatagttcaaccactgttttcatcagatagtttaaaagtttaattacttgaagcagtaatattataacagctgactagcaagtaagaatatgcgataagtttattctctcaccatttaagggtgctggtaggacatctgggaagtcaaatctactaaattctccaggtttacttggcatagcaaaaatcatggagtgttccttccactgcaaccgatcattgatcccaagttctccaaataaattctgcacattcggataagcaccgacttccaacaagaacatgaagagagtatcagtaacgaaaagtaataacagggaaaacaagatacaatataatttaaccagtgttttgcaactttcttcaaattgatggtagagctgataagatatatgtaacaaatatattgggggagcaacagagagggtatgagttttggacttacagaaaatatgtaaaccagtctcataccagtccccatcttcatccttccatgcagctatctggaggaagacaaatatcacatcataaatatcgctctccaataagataggtaaattgttaaaacggaacaaacaagaacctaacctaagaaccagagaacacaataacaacttaacaaaatatatatccaaaagatatcttccagtaaactactctatatttgattcacattaagcctagaaactggaaagggttgtgcggtgtgtagcacaagactgaagacattagaacataataaaaaacaaattgggcagtacaagactaatacaacaaacaggacagatacattgggtacctaggagctgtaacactctaaacactagttataccttgtagtctcacaaacataattggtacagcctttgggaatcagcaaatcatataagaatgagaaatgcaaacaacaataagtaattcggaaagtgagaccaatcaaagtacctttccaccaagaacatctcttgcttcaagcaacagaggtttgtggcctgcatcagccaggtactttgcagttgacaatccagccaatcctgcaattatttgagagccaaaagaacttcatcacatgaacattaattccatcagatcccaaacaaagcagtaagaaatgaagttgtagacataccagcaccagcaattacaactttcaaaggcttagcaggacgaggagcactacggaaggatgcagataaactagcagcttccaagaaattgacagtgttctctagctctggccttggaatatccacacaaactacctgcaatttcctctctttaatcaaaattacacttatacactagatgaaatttcgagaactccaagttaaaaaccagaaaggtagatacctgcaaaggaccagcagtactcctcctccttgttcttgtcttaagcgcttgagaagtgggaaccctaaagctatgtcccattagttcacaacctccagatgaaagtgcctccaaaaacccgttttgataaggcaaattcgccgcagaaacattcccaaacacaaccattttctccaacttaactcacaactgcttcaatgaatctaaaaattgaagctataaaagaattagaattacaaaacacacaaaaagtaagaaaattgagtatcttaggtgaaaccggtggaagcaaatcagacaaaagtttgtatctttaacacataattgaaaagaagaagaacaaaaaaaaacggacttgaattaaaggggctatagtagttgtttagtatcttatcttttacctagcgagtaatcgtgaagtagagaaacaggagacgcagcgaaggaggaggctagtggaagtagccgataacaaaatggagtattcgagtgcccatatggtcttgtttggttttcagaccaagctcttttgttgcttacgaaacatgtagatggattaaataccacacaaattaaaattttgatttacgaattgatgaccatatgattcttttccttatttggttaattgagtagagagagaccatgcatctcaacgtaatttggtttaggggaaaaagaaattgacctctcagctaatatgtttttgcccaccaaagtaactacgacaaaataaaaataaataattttggtggagttggtgtcaaatagatatgaattctgtgttatcttattcgttataatcatgatcttccttctcgtgattcccaagtataccctaacccaccttatatttaacggagccatccgaatccgatcgaaactttgtggaatacacacatttgtacaaccagtggcttgtttattcggtgagagagtggtgatatctcaagttctgttatatgctccaacgcatcaacttctgttcccattgcatttcctccaaatctcttctcgggtcggttcggtttggatatccgattccgcttagtttgcccacataatttagcccaggaattgggtccattgtctgatgacgaagtatgttttagaatctaaaactagtggacttaaacaaagcccaatcataataagttgtgtaacaaattttaaatataaaaaccaaatactcctcctccttgcattttctcttttttgacttttcctttgctttgacttgtcagtcttctcttccccttttctcttcttttttttttttgatcaaacaaatcaatctcacacctcttcttcttcttcttcttcttcttcttcttcaacctcttaaatctcaaaatctcaatcatcaagcttctccttcttcttcttctttccatcttcgcttcaacaaca

SEQ ID NO: 4243 - DNA, 3000 bp, Unknown; identical to SEQ ID NO: 4220
  misc_feature (1)..( 3000): cDNA_ID_1807149_gDNA_ID_1620691_Annot_ID_48611 3000 nt of promoter + ATG

SEQ ID NO: 4244 - DNA, 3000 bp, Unknown; identical to SEQ ID NO: 4219
  misc_feature (1)..( 3000): cDNA_ID_1823437_gDNA_ID_1620691_Annot_ID_48612 3000 nt of promoter + ATG

SEQ ID NO: 4245 - DNA, 3000 bp, Unknown
  misc_feature (1)..( 3000): cDNA_ID_1823433_gDNA_ID_1620691_Annot_ID_48613 3000 nt of promoter + ATG
ttcttagattttttttttcttttgtcttttccgaatttgccactgcatacgggtgcaagagaaagattattgaaagcctataaccaaaagcagtggttttaacttttaatttgattaggaaaaaactaaaaaacaagtgttttgtaatctagtgtttgtgaattctttgttttccaacttagatctataaagatagatctcaatatgttctttaatgtaatcgtgttatactacagtacattaaaagcaaagagtaaatcccaaaaaaaatggaaatatagcaaacaaaacaaaaacccgaaaaggaggttctttttttttatttcgttgaacgaaattggagccgacgttaaaccgaaccaaatcgtatatgtctacattcgtgtaaccagtgaagaagtccaagtcgccagttctcggttctctcggtctctcggtctctcccctgattaagatgatcggagaaggcatcgaaaaaaaaaaaaaaaaaatgccaacggtagtgacgtagtgtagaatcttcaggctaaggtcacaatggttccattttctatagctcttgtcttcattgtcaaggtgctgtagagagatcgtgagaaagttaaacgcttaaagtacaattgaagcatatttttaggcctagatctatcgtaaaggagttgagcggcatcgtgagcaagattataggcctatcgtctctgtgtgattcatgttgatgaaaaagatccaaagggctttcagcatgagattcaaggcttggtagagattgatgtacataaaattatggttttggggtttgtttttgacgtttgaaccatgtaatcgtgttttcttctatgaaatttaagattttatattattttatttataattattgattgttgaaaataacacaattctttatgaaaacatatattgtaatatgatacaacaattattatagctattattgtaaatgatacaaatcatttaaatcatttattaaaactgatattaatcttaacattggttatttacaattgacaaatacatatatatattattttatttttgacagaaatatttaacatcacttactataaccaaaaaaaataagtatgcccggataataagcagtggccgatgcagaggtttgacaaggaggtcagttgaccctcataaattttcaaaaattcattatctgtcattagcaataattttaatgaccccaacttaggataaattttgaccccagtacaaaattattgttgcaatatgaaagaaaaaatagtacaaatatttgaaagttgtatttttactaaaagtttagacccataatttaccttaaataaaaaaatattaacctaatattattttaatttttacaaaacacaaaaataaaaatatttttttttaatgtatgattttatattaaaaaaatatattttagaccccataacagaaagttctagctttgccactgttaataagtatgccgtgattttaggaatgattttagattttatgaataaaacaatataacatatgacaatagattttatttcggaacaaatattgaacaacaacaaaatccgttatttttacttcctgaaaaataaaacaagaatcggatttatttattttttcgatgataaagagcaatttatgtgccttgtgtgataaattctaaatattctctaaatattgtatgttcattgttatcttgtacttggtgagcacgtatattctcagtattaagtctaacatacagattcgggacacgaaacacacaaaaaatttagggtttcagcaatggcacatctgataatcagccgagtctttaaactcagtggcggaggcagaatagttaatcatgggggtcaaaaaaaattctaagccaaatgcaaaagaaagatttgagaaaaaaaaatgacaatataatcacaaatgatagttttttaaaaaaacaagataatatgagaaagaatttttttttgataaagtaaacactaaaactaaagttggcgataactttggtgtttacgatctcaccaccaaaatttgcactaccttctacacagaagacgaagtttcaataagaaacttggacttcccttactggcctcctccaattcctcactactagctcctaattaattaaccttgctcttgccgtgtgtttgctttctcatgctattagtgaaatcctatgtttctttttcagtatacgttttttcttcgattccataaaatatggtaacctttaaattttcatacagtcctcctaatgtgtgtggtatactatatggagtgaaaccgatcgagaaacctctctgatgtgaagtatatatcagaacaatacactgaattgcatgactcatgaaaacttagggtctctctcatccaaaggtataaaccaggacaaataccacaagctcaaactcgaatattttggtacggaaggagacaacgatacaggcctacaagagcctaaaaggtgtttctttgtggaattgatgagcataggttgggaattattaaaaaaaaaaaactgagcctcgataattagcatatgaatttgtaaattcgcttgtgtccccaattcactttctttgtttcgtttgcagagaagcaaaagcagagtttgattcggaaaaaaagcagtgttttgtgtaaccaccaatcagtaaaacctagtgtttgtgaagtccttgtttttttacccttttttaatcaccaaaaagaatataaaagtaaacccaaaaggcccaaacaatgtacaaaatcccaaaaaatggaaatatatcacaaaaacaaaaagcgaaaaggagtttccttttttttcgtgggcctctgcgttgaacaaaattggagtaggaaaaggaaacacaaatctgaggagtcctctctataaatactaaacaaatagaagcaaaggtaaaacacaaacacttccattcgtaatttagggttcccacaaattccttgtttctctcgctctcttacacacaggaaacaatg

SEQ ID NO: 4246 - DNA, 3000 bp, Unknown
  misc_feature (1)..( 3000): cDNA_ID_1823417_gDNA_ID_1620691_Annot_ID_48617 3000 nt of promoter + ATG
ggcaaaggaggtggaatcgctgccggggaagtggtggttttggaggtgccattggtaaaggtggaggcattttcggccacggaataggcaaaggcggtggttttggaggtggcattagtaaaggtggaggctttggtggtggaatcggcaaaggtggtgggattggaggcggcattggaaaaggtaaaggatggggctttggcggcggaataggcaaaggtggtggtattggaggcggcattggaaaaggtaaaggatggggctttggtgttggctggtttggacaccactgagctaaatgagaagaagattgtagttgcattgcatggatgtctcacgtaaacaagttggttaaagcaactacttctgaataaattaaattagctttcacgtatttgtaactttgagtttcacagctcaagataagctttgtactgttgagtttccactagtttctatctataattatgagaatttggtatcctaatatccatcattacggatcaaaccccgtaatcccaaaagatattttaacaatgtggctctgccttgtgctatcacagtgtgtgcctatctatgtttgtttcaatctcacccctcacaaaagaacctagtagctcacatactgataacaccttgcctcttcgttcttcaagtgattacctcaactcggagtaggagcagaccttgaattcaacctcgatgagtcgttgccccacctaagaactcaagcagcccttgataagtcctgtacaaacacacgacgcaaaatgattatgcctttttctcaaagctacctctcactattttctacaccttcttcttaatggtaccactaacgttaccaactacctctactttctactcaaaccatacattcagcaatttgactctcacctccatcgagttctgctctcaccatctgctttcttaacaagtaccctgaagcattattccctgcttaagttatatccatcagggccaaaacaaaataacacaatcaaaacaaacaatccggcaagaatactaggaagacaaacataatacgaaaacagcaaagcctgtagttataataactctgccaaaactcaaaagtacactcaaccgaaaaataacttaatagaagtgacttattgtaatagatagcacatgcttataaagagattcaagcagtccaacccgttaggaagttgtggaacctttgatttgagctaaattcttcttgacaaggatccagaaaccagggcggtcataatccccttacacagtcactactggccttgtcgaccctgaccatcattgtacccaccaccataaccttgtgacgggtcagatcgccaagatccatcaccataaccacctcccatgtagccaccactaccagggttgtttgaaccgccaccactaggacgccctccaaccacaccatatgcagcttgatttccataaccagaatcacttccactgtaccctccataaccgtagccttggttactatagccagatggtgactgcgtaggaggagctgcaccaggaactccatatccactatgagcagcaccactcccatagcctgggttcccataaccactagaagctggagtgtcccatgagtttctcggagcaactccagtactacttccatagccagcacctggaatgttcgttgctccatatccagcagtagcaccagcgccataacctccagcagaaccagtgtaacctccataggcaccatacccggcaccattactaccatttccatagccagcgccataaccagaagaaccataagatggtaaaccatttccaacactttgatgctgcaaaaacctattggaatccatacgtccatcataactgctttcattgccaccataaccctggtaaccaccagagccaccaccacccattgatcgtccaccacctccaggattggcatctttaggaagagcacgctttacttcaacttgtttaccgctcaaatcatggaaagtcttgtgcaaaacactgtctaccgcatcttcagagtcgaaggaaacaaatccaaacccacgaggacggttggtagcctggtcatacatgattgcaacatcagtcacagggccataaacttcaaagtactggcgaaactcttcatcagtcaaagtaggtggcaagcctccaacaaagatcttcttggttttattgtaagcatcacctccagaacttctagatgtattaagattcccagttcttccagagacttgctgctcctctcttgacatggctctcttcacatcaacctaaacattaaccaaaatcaataaagctcataataaacttccaagaatcatactttacccaaatcgagaacataacgcaacagaaaatatatacatctgtttttccttatcctaataaaccaaaccaagctctcttttctaatactatactcaatcacttcatagagtgtacgattaacatatatcgagtaccctataatacctcttatacaagttaaaaccaatcctagaatctaagaaacactaaggcgaatttgccaaccaaacaaaattctatatttactctcgttctcaatcaacacagcaaaacgcaaaaaggataaaactttaacacaattagagaaatggagctataagagaacaataataacctctctggtatcaatgctgtgtttctcttgaagaaccctatcgagaacagaaggatccgagaagataacgaacccaaaacccctaggtcgacctgtgagcttgtctctcatcacaatagcctgagaaacctctccatagttggtgaaatgttctctcagcttatcttcatcagtttcccatgaaataccaccgacaaaaagctttccttgatccgaatccatgaatttatattccactatcttacttctgacccagaatcacaaatccacctcaatctacgaaaccgtgaaaaccgactgcagaaacttccagaaattacgaaaaggctttagcttttccaatg

SEQ ID NO: 4247 - DNA, 3000 bp, Unknown
  misc_feature (1)..( 3000): cDNA_ID_1823413_gDNA_ID_1620691_Annot_ID_48618 3000 nt of promoter + ATG
cgtttgccatgttgtagatcatttagacacaggagagtcagctaaatagacaacaaacccgaccaaagaatatttcattcggttcttagcaactattctcctctccactggtaaagaaaaaggggctcacaagataagtaaatcctcaattgcttacaaaattcagttctatagtaaacacttccatacagtttcatgcaacactggaaatgaaaacgctcttattaagtagttcaacaaatgaaagacttaaaggaaccttgtgacagcacccattgaacgaccccataagccaatcagggagacattcccatccgtgcgcaaatactcaaccacagccttcagatcatctttctgcaaccaccaacgtcacgtttaacagtaataaaagaagtgactgctctcacaattcaggattatgacttatgaaggcagcgactgtgagggaaggaaaaatcattgacaacctaatcaaggacactcaaaggcacctaagtctaccatgaaatagagcatcaaaaactctaaatcatttggaaatctttcttcagaaagataacaataccttcatagaccaaatgaagcatcataggtgtattggttatagtgggatagaattccaataaaccacgagacattcaatctaacaaatatcaatcgagaagcagatatattgacttaagacagcttgtttactccaaacaacgataagtttaggccataacagctgaagggaagaagaggaatattttgagaaaagatcaaaggaggacatacttcgttccaacccaaagtgacatgctccccgccagagagaccggatcccgaaaagtcaagcgtgaaaatcgtgatgtttgaaggaagtaatacgatcgcagcttcactggcatcagctctacatccactgaataagaatgaatccattaatgaatagtatactaaaagaaacattaagctattatgataattggaaaactttagtaatgttggcaaccatatcagttgtttcatttcaatgcatggttgtcatagtatcctaccagctattgcatcgattgaaggatgagttaactagtttatttcaccagtacagctcaaatcacgttttattaaaataaaagttacgattacctgttgccatggcagtatattacacaaggtagaggcctatcttcaggacgctcaactggcatgtaatgactacactgaaggatatctcctctgatgtttttaacctgtcacaatataagttcttctatagtcttaggtgaacaaagcacaactaaaaccttgagatcctaaaggcagtccaaggctggaaaataaggaactcacgctgatcaacagtgaacaactgatgaaatctacattgacattgaatcacaacatgtttgcttggattctctagtcaggagttcacaacaacaacagaagaaaaaaagctttacctctaaatctttcctctggtaccatctccctttaagcaagaactcttgttccaagagatcatgttctggattgtattcagctctacatcaaaacaccagttatattcaaccgtagatgaaacaaactaattaaaacaaattggatttgaaagaggaacagggttttcttgaggaaatgcaaccctaaatcctagtatatattacttcatctatataaaaatccaaaatcaactcaagaacaagaaccaaaatttcaaaactcaaatctaaaaatctaaactttgtgtgaaacccaattctacaacctagtaaagagaaatagaaagatgaaactgaaaactaaattccagaatcagtaagtaatttttttcaattttctgagagaatcatcaccttggaggtcgaatgacgaagttaacaagctgctccattagaaaaaaatcaaacaaatcaccttcttcttcttctcattcttccatatttctcacaaatagtcaaaaatcgaataaaacctaaccaacgaaagagattcagatagaacaagaaatgtaactaaaaaaaccctaaatcaaaagatcgagctgttccagaagaaagacagtgagatcgaagaaagaaaaacacagagaaagagaagaaaataaagcaaagtaatagaaaaacggctttttcgttgttgaagcctgaaactgtttttatatttaaaaatatataaacaaactttataaattagccccacatttttgccgctttttacatttaacgtcttcacatttcattatggaaattaattaattggtattgtcatgtataatcattaatcattattactaattccaaagttttttcagtgaaagctgacattgaccaaagtctcttaaaaaatttcgaaaaaaaactcaaaaattcaattaaggttttttagtggagatcgtgcacgttaattgtcgtttataggctattgttttaattattttaaaatatatacgaggtaattaagagattaattaaacttaaacatatgaggttaattattacaagtactaataaagctgtaatgtggagtttggaattttcgacaacaaagtgcacatctggcacagagattgtcacagcacgaaagatttttttgtcgttcttgtaggatttgctggcacgtgtggaatagaaaacacacgagtgaaaccatcgtcggtctttgtagcccattatttatacttctattgggctggacttaagcccataagtaagcatctctgttacaagaaaacgggaaacagatctgaaccgttaataatattagaaaggatctagaccgttgatttatttatctgctgacagattcgtaccttcgcgaatatcaataccaaaccaatagaaatattcgttcgctgtcttcttcctcttcctcctctcaaatcggctacagccattggaaaagctaaagccttttcgtaatttctggaagtttctgcagtcggttttcacggtttcgtagattgaggtggatttgtgattctgggtcagaagtaagatagtggaatataaattc

SEQ ID NO: 4248 - DNA, 684 bp, Unknown
  misc_feature (1)..( 684): cDNA_ID_1823409_gDNA_ID_1620691_Annot_ID_48619 3000 nt of promoter + ATG
gttgtttcatctatctacttttttttgttttgtttggtacctgtcctgcttcaatactgtgatatactttgaatctaccagaaatggtcctggtttttaatttaaataggacttggtcttatggatgtcttttaatttggttaaccaatctttcttcattaggctgcccttgagtattctctataacttgcgacaaagtagacataacactctttaagttctaaaaaccactttctattttcggatctcgaaaaatcatttatcgttttgtgctgcaaatcagtgttatatatgagcttggcaaattaaaatgacatatacgtatagaaatgaattgataatactaaatattatttgttttcttcttttaacttcagccatactaactttcactaaatttcttaagagcatacagaagtttctcctcggtatattggtggttctatattccccgcaacgtgaatggaaaatgaaggttctattttggctatatgataatcatgccattagctgacccgaaactaatgtgttacaataaaaccaaattatataaatagaagaacatgtttcctggctccttattgcacaaaagagaacatgaacaactctttttatattaccatgatagtcctatgtgttttggcctttgtgttagttttaattgagagctgtgcgggcaaaatg

SEQ ID NO: 4249 - DNA, 3000 bp, Unknown
  misc_feature (1)..( 3000): cDNA_ID_4257458_gDNA_ID_1620692_Annot_ID_48620 3000 nt of promoter + ATG
cccaataactgttttgttttctaatttatatttcgaatgactgacaataaaaacgttatcttttatatttcgaatccttgttattttttcttctcagttctcactcacgttgaatcgtaccttcatatccatttaaaaaaactatatatatattttggtttatcctatttatcgttacattgattcaacaatattttcatatgccaataattcttcccatgcaggctatgcagcacaaattttgatattggggaccaaaaataagtaagactattttagtatttgtctctatgcatgatgatgcaatgtaaagttggaaacaaggcattgcgtatattttttaagtaagaatcattcttaatcaccaataacaataatttaactatagataaaaaaagaagttaccatcaaaataattaactaaaagacaaaagaagaagaaaatttttgccgttgaaaaagaaaagaagaagaaaaactaaactttgacaaaccaaaaaaagaaatgaacgaaaggaaaagagaagagaaacagagagtaaaggatcaagatcaaaattgaaaattagaaacttgcttttgttattttcttgtggtccacccaaaaacgtgattaaggtatattctagtttcttaattcagcgggggatcaggatagcattttaaattaaatgaaaatatgataatttatccttaaacagttagtcaggtggttgcttatatgaacacttgatgtgcttgtttatatgtgtgatagtaccatacaatgtcgtaatacaaaagtgcttgagttatcttttaaaaattggtttataaaaataaaataaaaaatttaccatacaacctcgtatgcatgcgcatattgtaatttttatttgaccaaattatttaatgtaaaaaatgagaatattgaaatggaaaatcaacttaaaaggataaccagaaagatgaaagaataattaggaaaggaaagaaaaaacgagatacgaaaaaggtaaaaagcttttatgtatgtactaacaatgtacaagttataatgtatgtatatttgtttagttttatgctaggtgcatcataacttgtatacagagctgttagtataaattccccaccgttttcatttatacaacgtgaagtgttttcatttatacaaaaaagaaaaagaatgaaacttggcctttcaggtctgtgtgctagctaattttccctaattttatgctgagtttctagttattatttcgtaactagagttttcatactatcgaaattcggttaattttgttgtttaaggtttttaattaaggcttcatttgtaaatgtagaacaacaatggatgatctcgaaagaagacttggagatatcaggacttcggtctgcgagagcaatgtgtttctcttaactattggggcggtaacacttccttgcagtttgttaagcttttggaaaatacttaaactctaaaactttgattacaaaataaacaattaaagaaaaattaaaaattaaaaactttctaatgtaaggtgcttgaactttgattacaaaataaaaaactttgttttgattaatcaaataaatgagttggctttgctatccattaaaacaactatgtttgaaaaactcgattacgtgaatttaatgaatggttttgcaggcaaaaatctaattagagctataattaaaaatataatttttttattttttcttttttttttgcttacaaaatgcttataaaattaaaaatattctataaagttttaatataatttttatatactattattatttgtgattatgcaaaaaaaatagaatgcataaatattttatttatatataggacattcctacatggcgttttgtttgtcctatatcttatacatttcatcgtcgtgtttcgcatcacggaagaatatgatatagcaggtgggtttactcaggcgtcatttgttttactctatgaaataaccccttcaaattggctgctggcgcctctaatactaggtgccataattataacatgttacaaggttcttctaattgaaggtgtgtcgcccaatcgtgaacttctgccgacagggtcggggcaactgacgggagaagtggggaaaggttaatgaaagaaaaggagttaactagaatgttgtaatagaaaatacactgatatttactatagcataccgagatacgactttcttgtatatatataaccaaaaatacactacaatgttgtaatagaaaacttatccattctgttatgtatctttgacgttggttaattgattttcacatcaagacgaaatgttatgtttttgactaataaaatctttatcagtagcatgcatcatttgggctttatgatctcgaaatattgtgtaatttaagtcacgtgtttttcaaaatttaagatttacattagtatttgattatagagtagaaaatttttgaaggtaatcaaacttaatatttatggaccaaaattcaaaaaataaattataataataggctaatttccgtcttaaattttataaatgaaacgaaatcagtcatgcaaatatatatgctttggcctttgtaattgttatttatcatctgtcggcaaaataagcggaataatcaaagagctagaattagacgataaatctttttcactgatcaaatcattagcatacgttcgtaaaccttcaaattaaagaaaaattcaccaagccctaaaatttcagtttttttttttgacgaatgtggttggtttagatcgcacgagtcacgagaccaaaactaacgaagatacgttgtcgttttggtttccacaaagtactcacgcgcattcagcagcgcgtgattggcaattcctgaatatcttcagatcacaggccctgataatttctcttctccgacagagagagagagaagcagatcgtatcatcacgagacgaccatcggaataacagagaaagagagaaaaagagagagagagagagagagagagagagagagaggatg

SEQ ID NO: 4250 - DNA, 1727 bp, Unknown
  misc_feature (1)..( 1727): cDNA_ID_1023707_gDNA_ID_1620692_Annot_ID_164840 3000 nt of promoter + ATG
agcagatggatcaagttttctctcatctcgctactgatttccctcgtgctcacttctttagggttcgtcgtctctgttcgaattttatctctttcaattggtttttgactttgattggttttatttatcttcttaggtagaagctgaggaacatcctgagatatctgaggcttattctgttgctcttgtgccgtatttcgtcttcttcaaggtaaactttaggcatattgattctttgtttggttgcaattttttggcttattgacaaagcttgaatctttgtcactgcactgaatccttttcttattgaaggatggcaaaactgtggatacacttgaaggggcagatccatcaagtttagctaataaagttggcaaagttgctggttctattactcctgcaagcttagggttggctgcagggccaacgattcttgaaactgttaagaagaatgcgaaagcttctggacaagaccgagctcagcctgtatctaccgctgatgctctcaagaatcgtttggaaaaactcaccctgttatgttattcatgaatggtactcctgaagagcctcgatttttaatatctattgagtactttctttatagttggaattcttgtggatatatatcaggtagctacttggagcaaacatgttgctaaagttgacctgctactgttgtttgaagaacacgtgctatgtcttgtcgttgaaggaattatgttcatatgggaagaacataagcctactggaaagtttacccctagctctattgttaacccagatacttgagcctccatatcacaaacatctagttaaggtttgtgtagtaagaacaagaaaaacaacacgtgttcccaattcccatataaatgaccattatacttctatcaacccaattaatcacagtccggagactagttgattaaaaaatcagctaatactaatttggtggtttcaataaacatcttaaatactccataattaaactagattaaagtgggaaaaatcgtcatgagtagttgtaaaatcgatttcatttaagagtatagaaattcgtcatgagtggttggttcatgagttctctctcttactcatattagagtaagaaatcaaacacttataatcattcaaaattcaacaactctcatctcaaaaccatatatttaggtaaagttatatgcatacattttgcattttaattttaaaacagattatttggcgcgtaatgataaaattatgtgtataaaaattatttaactaatcgatctaacaaccacatatgagtaaagtagttaacattgtactactacaccaaattatagtgtgttggttagattagatacacaaactcactttctcaaatcaataacattatgaatctatgataaccttaatttaaaaagagtctataatgccatgattttacaatcgtacttttttcttttgggctgaacttttaatcatatattatttgaaagatgtgattattataatattaaagggaattaaaatcatgtaagagaaacccaataaagtagcttgaagaagaaaaagacaagctttattatacacttacccagaaaaacaaaaaacaaaaaactgataatatctctctctctctctctcgttgagtgtgtccatgaaataatactctgccagagacagagagaaagactgtaacggaggatgtggtggcgaagtggccacactgacacactggtttcatg

SEQ ID NO: 4251 - DNA, 3000 bp, Unknown
  misc_feature (1)..( 3000): cDNA_ID_2170085_gDNA_ID_1620692_Annot_ID_164839 3000 nt of promoter + ATG
atgctacttaaggttggccttgtcttctttttttacaaatcttaagtggctggctttcatgtctttcaaaattttgcaactctgaataaactcttaagggtattgtttggtaaatttggaagaagatataataatctctgctctttttcaatggctgtgacgtttgccctaaatttttaataattgattatgctttgtagttaaagatggctctgttacagcagcagcagcaaaatcaacagcagggtggtgggaatccaccacagccacagccgcagccacaaccacttaatcagcttgcccttacaaatccgcaaccacagagttcaaatcacagtattcatcaacaagagaaattgggaggtggtggtagtattacgatggatggtagcatttcaaattcttttcgaggaaacgaacaggtctgtttataaattcctgtttcttttcctagttcatgtttcaatgatctgttgcatacgtttttagtttctggtgagtctgaggttggttcctaaacttgttttgcattttactgaaggtattgaagaatcagagtgggaggaaaagaaagcaaccggtttcgtcttctggaccagctaatagttcaggaacagctaacactgcgggaccatcaccaagctcagcaccttctacaccttcaactcatactcctggagatgtgatctctatgcctaatctgccgcacagtggtggttcctccaaatcaatgatgatgtttggcactgaaggaactgggactcttacatctccatcaaatcagttggtgggtttccttaaactgttgatgggaatgaataatggtttctgtaatcaatatgaattagtagcgttaattattggctattttgcaggctgatatggatcgatttgtggaagatggatcacttgacgacaatgttgagtcttttttatcccaggaggatggtgatcaacgggacgctgttacacggtgtatggatgttagtaaaggtgtgtgttttagtctcacttaacattattcgacaataacacggtgaacttttcttcagtaatccaacagtatttctcaatcactacaatgatggctctgcactaggttttacgtttactgaagtgaattcagtacgtgcgagcacaaccaaagttacctgttgccacttctcatcggatggaaaaatgcttgctagtgctggacatgacaaaaaggtaagccagaaatcatcattaggtgttctagcgttctgaaacttagagagcctcttggtttggttcattttgcaggctgtactatggtacacagacactatgaagccaaagacgaccctagaggagcacacagctatgataacagatatccgttttagtcctagccagcttcgccttgcgacttcttcgtttgacaagactgtcagggtttgggatgctgataatgtaaagtgaaagttgatccatacactatgttgttttatctctgcatgaatataattttttccgacattgtgattgcttaagagtttgtgaatctactttgcagaaaggttattcccttcgtactttcatgggacattcttctatggttacatcacttgacttccatcccatcaaggatgatcttatatgttcctgtgacaatgataacgaaataaggtactggagtatcaacaatggaagttgcacaagagtgtacaaggtagatttttttctcttgaaagccaatagttcaacattatttacgtgcttaatttagcaattagatacatataatttcacttttgtctttccacagggtggttccacccagataaggttccaaccacgtgttggaaagtatcttgcggcttcatcagcaaatcttgtcaatgtactagatgtagaaacacaagctattcgacactctttacaggtttagtgttcaaacttttcaaacacgatgtttctgatagatacttattttgtaatatgtaccagcaaaagagagcaactaaaaaaatagcaaaagagagcaactaaaaaaacggttgactaattcgtttgtgtaggggcatgctaatccgataaactcggtttgctgggatccctctggtgacttcctggcatctgttagtgaagatatggtaaaagtatggacgctggggacaggtagtgaaggagaatgtgttcatgagctaagctgcaacgggaacaaattccagtcatgtgttttccatccggcttacccctcgctgctcgtaattggttgctaccaggtaaagttgaaatcattacaatatctgtttaaaaaagtttgtgaagaaagtaatgcaaaaatcccaaatttactcctaaacttgtgtgtgtatgcatgcagtctttagaactatggaacatgtcagagaacaagacgatgacattaccagctcacgaagggctaattacatctttggctgtttcaactgcaactggattggttgcatcagctagtcatgataagctagtgaaactgtggaagtgaaaactatgagagaggaaaagagacgtttgttgtttaggtattattagtaatcatggttttttttttaacttgtagtgttctctctcggccattatctcgatctcaagatagttttccagatgttgaacaaatgttgttgtatgatctgacgaaattgggatcttgagaaattgtgaacaactcttgttgtaatctttactagtccttttggctcagctttaatttactggcactcttcttcacttagtttgggttggtttggtattttatgtttgaacgtttcaataactctttagcttttcgaaacgcttgaaaattgaaatgtgagagccaatccaataatacagttgcatcttatttcaaaactacaaaagtataaaactaaacgcaaacgtgatagttgaaaacgcaaacgtgaaagttgtaaacgcaaacgtgatcctaaacgcaatgtcgaagtgaaagtcgtgatggctccgtcgtatctgaaatcgtggtaattggtg

SEQ ID NO: 4252 - DNA, 3000 bp, Unknown; identical to SEQ ID NO: 4249
  misc_feature (1)..( 3000): cDNA_ID_4257458_gDNA_ID_1620692_Annot_ID_164833 3000 nt of promoter + ATG

SEQ ID NO: 4253 - DNA, 3000 bp, Unknown
  misc_feature (1)..( 3000): cDNA_ID_2106659_gDNA_ID_1620692_Annot_ID_164832 3000 nt of promoter + ATG
gaattagacgataaatctttttcactgatcaaatcattagcatacgttcgtaaaccttcaaattaaagaaaaattcaccaagccctaaaatttcagtttttttttttgacgaatgtggttggtttagatcgcacgagtcacgagaccaaaactaacgaagatacgttgtcgttttggtttccacaaagtactcacgcgcattcagcagcgcgtgattggcaattcctgaatatcttcagatcacaggccctgataatttctcttctccgacagagagagagagaagcagatcgtatcatcacgagacgaccatcggaataacagagaaagagagaaaaagagagagagagagagagagagagagagagagaggatgtctggtgtggttgctcttggtcatgcgagctcgtggggcgcagcgctggtaaggatctcgccgtatactttctccgcaatcggaatcgccatctcgatcggtgtctcagtcctcggtgccgcctggtaaatcgaatcttattcttcttcgtccccgcagattaaagcattgacctttttcatcatctttttttggtttgtcttattcaggggaatttacattacgggaagtagtttgatcggtgcggctatagaagctcctcgtattacttcgaagaatctcatcaggttcgttaaaagtttcaagcttttttaattctagttttgttcctttggttgatcaattagtggctttaaggaactgtgtagattccatgtcttgttctgaatagcaatgagaattcatcgctgagtagcttgattcatttggatatttcaatgccacatctctgcaagagtagattgtcacattatgatacaagttgttgacctgggattcaggaggtagaaatttagaattctcaaggactcatctggttggtagggctagtaactttggatcgtgaaggctctggctttgcggattcaagcactggatgtaatgataatgaagtgtcttttgtctttccacgtatttcagcagaaacatatatctaccatcgagatagctaaatgttaaattaggggatatagatttaaagtttgtgtttacgttatttgtggtgccttcctattccgctccttcattcttgggccggagtcacttaagtaaacactcaacacagtcattgctattatatcccatgggtctacggggtagatttaaggaatgcttaacagggagtagctgtgtatgcaatttgatttgttgttacagagctacaggcttggagttagatgctctgcaacatcagtgtcaacagtgtcattaccacacaccatttcttaaccatattgagtagagcatttggctgtaaaggcactagtacttaggaatgcttaagtaggaaacagttgtgtttgcattctacattttctactttgttaacacttaacagagctttaggctcaagattagatgcaaaaagtatacaatgacgaagcatttcttgttcttttaaactgtcccagtgtcatcttttgcgaagctgttgctatatatggagttattgttgcaatcatactgcaaacaaagttggagagtgtcccatcttcaaagatgtatgatgctgagtctcttagagctggatatgcaatctttgcatctggaattatagttggattcgccaaccttgtatgcgggtctgtatctacccttttctccttccttacagttttggtttttggattccattgtcagatatgcaaccgaggtccacatttctcttgcaggttatgtgtaggaatcattggaagcagttgtgcattgtccgatgctcagaactccacactttttgtaaagattcttgtgatcgagatattcgggagtgctctcgggttgtttggagttattgtgggaattattatgtctgcacaagcgacatggccaacgaaatagatatatatatatccggtctgtatatgttgtggtctacttgcaaatctggaaaaacatggcttcttgattatcttcattgttatatcgttccaatgtctagacgaaaatcttgtgtgaaaactgagaaccacttttggatccccaattttttgtatttgtttaaaacttttgaataagtccttttggagaacatcttcatgtttgtattctcttataatcaaagacaaagagtttgtatatgatttgttaaaactgaactagtcattttatcaagtctgtttcctctatatactgtagttatgttttatcttttttttttctttctcaagttatgatttatctcaagcaattatgttgttgatacaaatggtcttgcctctttggccacaccctgtgtagtgctgtacccaacaaaaccaatgaaagaattcgatctatacaaattgcataccaagcagaaccgttttgtcctaaaccaatcatcacactagacgacgtcgtttcacgtgtgatatttaggtggctgtcccgttcctggaacccggagctttttttgttgtgatatatcccgtaaaaccctaaacatagtcacttcatcgtctcctccactgtatcattcaatctctgtcttccttctttttagcgacctcgtctccaaagctcacaaattttctacctttccggtgagtgttactctgttctcgtttcctcgcttgtctctttctgggtttttagtttccgaaagattttcctttcaaaatccgtttttgaatgcgaattccctctgctgtatctattatatttagtaatttgatgtattgtttggttggtatgagctgataaagttcaacacgtttgttgttcacttttgggaaaatttgcgataaaacaaggatttttttacaattttgacatatatatatatatatatatatatatatatatatatatatatttgagacgagaatatttgttcagatatctactgagtaaaattagtggtctctctgtttattgcgttcatgtgacatttggaatttttgagtctaggagtagagagaaagatg

SEQ ID NO: 4254 - DNA, 3000 bp, Unknown
  misc_feature (1)..( 3000): cDNA_ID_1823536_gDNA_ID_1620692_Annot_ID_48622 3000 nt of promoter + ATG
ctctcagattgctatgcccactttttcttcccttcttagtatcttccaccatttataatggccaacaatactagctcctatttcatttcgaaatttttgaacttttgaatcatcattcaattttgactataatttatgcaaatttattgcaaccactaaaattgttagaaaactcaacacccagtgctagtataaagagattatatatacaagggtttatatttctcttaataactagatattaattaactaatccattctaaattttgtgttaattgcactagctagtaaaacttaagctagcttaaaactcaacctcacgcttgacttgctgctgtgtacttcatagctgacatatagccttagcacttgtggtcggatagctaaaatgttatattaggtttttaccttaagaatatgtaaaattgtattgaaatatttttataacaaattgtagtgaaaaaaaacaacaacaaatttgatggtcgtaaagatatgacctcaattctagaacaaaaataaactaagtggctaaaaagaaaacaaaaatgaatggtcttattctgttgttaatcctctaaatctctaaaacaattaggtctgccaaaaaaaaaaaaaaaaaaaaaaaaaaaacaattaggtctgccattttgataatcctctaaataaatgtgggctcaattcctaccaaaacatgaaataattatgggcttaattgtccgtatggcccagttaccttataacttcccccccccctccccatggcccagttacctttcttattcagctatttcagagtcttttttaaaaaaaataaaaataaattaatttgagtctttgcgctgacttttgcttcctcgtgattttttttttttttttttcctcatgattctttctcttgcgcaaattcttcctccattgttacaggatcaaatttggatgacaattttaaaatcgttgcacataaacgtctcatttccatttatgtttaccatttttctttttttttaaatcaacagataagaattgtagtatgggtactggtagtggtgtgaggtctacgcatatacttgaattgtctcaagtctcaacaataaagagctctggaaccgacattttggtaatgtcagcaacattacatccaatcatattgttatattcatataaatagtattctcagcaacacctatgaaatgtacaactacaaactgattcaagaatactcaataatataacgactgtattcaatattccaaatataattcagcttgtatattaacattttaataaaaaaaaattggacgccactacaaaaataataatcatctttatcactacaatttgttagagactttcttgcgtatcaaattagatatacgaaaattttcaaggcaaacatgtaaggtagggtaatcacaaattattttcctacacaatgaatctagtgaatatatattataaagatgagggttttgttacatgctcaaagatcttggcgaccgcaaattgagaatttcttgttccaggtctggcagctttctgtgtgtttgtagcctagtaggggtcagctcttagaatcgtagttgtgatgaaaacagaattgtcgtagttgtcatgaaaacagaattgactaattaaaaactcttgatagtttcaaattcttttagaaccaacctccaaaaatcatgccgttcgttgattcatttcgttaccgaatttgattttatgcaaggccttggtcttatggacctgagatttaatgttgggcctcacatcaaacgacttttcaagatggattagtaaaaacagaagcacatattttttgctttaagaacttaaattactctgtttttgtatggatctttagaaaacctcaattgttttccaaaagtagcctaaaaagactttaagctcacgaacttaagtcacatggatttttgtaaataattaaacgatttaataaaactaatgaaatgataggaaaatgaccgatatacacaattgatttaaacaattgaattcgagtagttatgattttgataaaatgaaaaaggactgtttgttccctctatgatcctaaaaatgtcataaaaatgaaaaaggaaatatgaatttgataagatttacagcgaacaagacaaattggaaaaaaaggaaagaatgaatatacagatacgttaaaatgaaaaagatatttacgtcaatctattgattattaaaaggttaattttgtcattaaaagcaaaagtgctttgccaaaggcgtgctacgtcacgtaaattatacaacactatgagggctttttggtaattttacaggaataaagctaacctcataatatatcttctgcaattccgtccacccaaaacaactgacatggaaactactttttaagtttgatacaataaaataaatatacttatccggtcaacatttttattctgatgaagtaaaaatattactaaaataacgaaaaacacgttttctccaaatgaaaaaaacgaaatttacactgaaatgtttttttttgtaaaaaaaagatgtacttattcttttagtacattaataaattagaataaaaattttaattgattaaatcgctagttgctattaatcagaagagctgagctacttctaatgcttttttacagagagatgctttcttcttctttctctcgaactttctctctctaaatattttgtttcgttttctctctctctctctatttactttcgttctctctattttttttgtttggtttagcttatttgtgaagtgttaaatcttcttcagtttctggggaaattaggtggggaggtgaaaaagggggaaatataattgaaattgggttctctctgctgtgcaataataatttctgagaggattgtgaagaagcgcttttatgtaagaagatatctcattattagttatttacatgagaatctgacattcttaacaactgtctgtggggttagttttgtccaaagaactatacagag

SEQ ID NO: 4255 - DNA, 3000 bp, Unknown
  misc_feature (1)..( 3000): cDNA_ID_1823565_gDNA_ID_1620693_Annot_ID_48625 3000 nt of promoter + ATG
acagaccctctaccagagcaggaacatgagtatcccgcaccagctgcttctgacaaggtcatagattttaacttgtatcaagattttcttgtttagagtcacatgttttagttacctaacagtatggttctgtatacaggcggcattgtcaaagcggagattgtctttgatctttatatgtattccggtcagtccaggtcgtagtaggctgatatggacgttcccgaggaattttggtgtatttattgataagattgtccctagatgggtgtttcacattggtcaaaatacgattctagactcagatttgcacctccttcatgtagaggtaattccaaatctatctagtacacacattgttctgagtagaggctgatcaatgtaccagactgatttgtatcttgtaatggaatgtgtgtaggagcggaagatactggagagaggccctgaaaactggcaaaaagcttgctttatcccaacaaaatcagacgctaatgtggttacattcaggagatggtttaacaagtacagcgaggctcgagtcgattggagaggaaagtttgatccatttcttcttcctcctacgcctccccgagaacagctcttcgacaggttatttatctcgcttgtgaggtttaatgaaaagtagtgctaaacatcctaatgataaaagttgcgtgttccaggtattggtcgcatgttgagaactgcagcagctgcaagaaagctcacaaatatctcaatgcgctagaggtgatcttacaaatcgcatccgttgctatgatcggagtcatggcggtgttgaagcaaacgacaatgtcgaatgtggctagaattgcagtgcttgtggcggctgttttaagttttgcagcttcaaagtggctatcacacttcatctacaagacattccattaccatgactacaaccatgctgttgtttgaaatgtatattggtgtttgtacttcgtatatatactcatcggatgtattcagtccacatggtgttgtacataacagttatacagaaactaattcttgaatctataccgtttactaacattctagatgattcatttactgaagaaatggcctcatgagcattttctgagtctattttatcctcccgaacaaatttatcggtttaaatgatctgctcggtaagatatttgttttatgataatgtttttgtttttgtcaatagtatcatcatcatctaacaacgatgtgtatcttatgatacaaaatcgaaatgggcctggccgtaactggtgaactgactgggcttggtcgacatgaagtctttttttttttttttttgacatgcacaaataataatagtcaatggaaaatgtcatcatcatctgtttgggttaaagacaaaggttttaaatgatgaagcagagtcaataaatacaaaaggatgaagacataaataagaatgctggaccactggactatgaagtttccgtagaaacgcaattataaaaagatcttctctatgactcttctacctatattcatttcatttgcatacgtaacctaattcgcatcttttttgccttctagaagccttgtaaaaaacagtatacggaatcacctatttttggaaacgacagcattccattttggtacctaatttccatttttatccgagcttatagttggattaagcaattttcctaacttacatattcattttaatgacttccagctatcttaggaagtttgattttcttgaccacttgagttcaaaatgtagagttttgtttgagccttcgacttttgtttttgagtatgagaaagtttgcttcttatttttccggaatctcttttcaatatagtagtaataattaagggatagatgtcaaaatggagggttaataagcctattgcatatattctctgttgtttaagacttttaaattaattaccaagtgaccaaactaaatacattgaccaaaatgcaatttgcttttttcgtataattatgttatacagtattataaaatatcacatttttagataaaaaatatattttcatcaaaaaaaaaaagctgaaaatatcattataaaagtagtattattgcacatgaaatttaataccgggaaaacatgtaaacaaaaattggtcataaatgtaagatataatatcagtcactagaaaagtattggatcccataacgtaataacaattttcatgtgattttctttctatcagtcactgaaaagtattggatcccataacgtaataaaaaaattcatgtgattttctctctaccaaacattattttttgggggtaaaatctctaccagaccttcacaaccgtaccctaataaatacgtgtatcttttgactgaaaagggaaagcatctaagaaagacaccacgtcgtcatatcaggaagactttctcttttaagtttatttggatgcttcggatagtctttcattcttatggattgttgatatagcaacgtggttcctcatgaaccaccgattagccctcacctacgttatctactccgaagacaaaacgtacataaattaatacaagcaaaatagacacaaccattaatgatatttcgttagttacataattagaggtaatcgggtgcgttacgttacgaattaaatctgcaatcttataagacataaacaaaaccaacacattagatttcttgtccagaaattgagacatgtatatacttgtggatctagtgcatggattggtggaaagtcatcgtcaaataatatttaaggatttttcattgaagaattattagagtccacgagtatatattttaattatcattagcttccacgaggatttttttcttttattttaaagaaagagaaaatgcatgattcatgattcaacggtttgttatataaaccaaccattaagtccgcaacaaaccttgactcagagaggcagagagagagagagagagagatatagaagagaagtgagtggcgtttggttaatcattttcagaagatg

SEQ ID NO: 4256 - DNA, 3000 bp, Unknown
  misc_feature (1)..( 3000): cDNA_ID_1823561_gDNA_ID_1620693_Annot_ID_48626 3000 nt of promoter + ATG
tcttcagttgtctcctgttgtttctttctgggattgtattgtccgcaccatgaggtattcctatataccagagtgggtgtagttcttgagttcctctacaacatcatcgagtttagtgcagttttttagttagaaatttatagtcaagcaataatggatcacacggtgtgcaagcaagttcagccagtcgttaggaaagcgaagaagaagcatggtaaagatgaatttgatcgtatcaaacaagctgagaagaaaaagagacgtttggagaaagctcttgctacttctgcagccatccgggctgagcttgaaaagaagaagcagaagagattggaagaacaacaaaggttagatgaagaaggagctgcaattgcagaagctgttgctctgcacgtcctactgggcgaagattctgatgattcatctcgagtcaagtttggtgaagaaaagggtttcacaatggatctgtttagagatgaaagaactaactacgttcctcgccaaagctgtgctagctatgcggttcaagggattgggtttgtgtcaaatggctatggactaggagatagtaactggtcgccattcacgaggaggggtgcttgggataacaacatgggaatatcagctgatttgattgctgctcaggctgtctcggcgctacagatatctgaaaatgctgatgggaacgcctttgtgttcaatgggatgttccggggatgacagatgccacgactcgtcctcattcggtttttaaaataaacatttgccttctgcttgctttggtgtcaatgctctgtttttttctcttgacgttagaccttatactctgttttcgttcgctgtaatattaaagacgcattttgagttgtatctattatacatgttgaagtctcttcatactgcattgttgcttatcttatatcacattcttttaacaaaccctctaataggtgtgcaatgcatatgctaagacttgcttggtctttgccagtaacgtgttgaaaatatcttcttaacaaaatcacacgttctgctgtgaaaaggggaaaaaaaaagagaggtgtgttcgaatcgtgatacaaagtaatggatacaaacgaataaattttggataggtggatatacagtaagtgaatacattggggtggatcagtacagttgctactgaaatagtagaacatcagagtcacggttctgctttttctgattggtgattgtatgatttgtatcttcctctttgttccctatctctgtacttgtggagggtttggcagtgttaagtatacctttcaaccaactaccttgcaatctaaagctcccattgtctgaattgttgagagttcctggccgctgtggagagccactggagccatttgaaccattggttatgtttgaggtaacattcgaaaggaagcgataagccactttactggctgaaacaagttcagttttggcttgctttacctgcaaaagtcacagttcacaaggacttaacatccacatgcattcaggtgtaaaaaaagaaacagcgtgggcagagcaaaatgagagagaacccacccgcattgctgtgtttcctgctacttccaaggctgtgtcgccagcatgagcaaaacgattcacccaacctgttaagagacagaacccaagccgtcacataacataaacacacacacaaaccctgattcccacaataatggttttacctgggatctttggcacaccaaggcggtcacataatacatcgcagaagtgattgcaatttttggacagcaaatcataagtgtgtcctggccattccctgctgagctcacgcaagatctgatttaccatgaagattgtacaatctgtcttcccaagaacaattttctcacgatatgtgtacattggattcttgccactaggacagctgaacacaccagttccttgttcacaatacccataagaccattcatcgtttccatatacctgcacaaagttcatacaagattctattcaatcactcttccctgcgaatcaatagcaacatgtaaacctaaagttcatcgcacccataatcccataacacgtttctaaaattacttgaagaaccgagtattgagatcctcagtacagacgaaaagggagcttaagctcaagatcttacagagacctttacgaccatatgccattagattagagcctcacagataaaaccaaaaatatcattccttcaaattcttcatttccacatacagacacacaaacaacaactcaaaagagagacatcatcgatacatgtgcagatgtagattgatagactaaagacgaagaagatcgaggcagtggagtagtagtacctgaatagcgctgtggaatataccgccaagaccgatcccgtctttgaagaacctattgatctgaactatggtgttgttagtcttctctgatccactgttcgtcacatcgtatatgtgcagaacaacctccgccattgattctatctttaccaagaaacacgaaccctaatttactacgaaattgagctcgcagattctctctatagtagcttcagagaagaaggaaacctatagaatcgtaccaaatccacttttcttcaacaaatccaaattctctaatctactagatctctaagaaaccactgcacgaaactcttgtttttagattttgatctaaagctgaggtattttgagtttgtttatcttctcccaaacttttcaatctcagacgtgggagattgaagaaactgatgctgtggtgtctggaaaggacccttataccctcactttgccgacgccggtttcacactcaaccgacactttctctttcaattaaccggtttagttttcattaaaccagaaaaatgattatcaattggtttaaatacatcctgagatattttaatttgaaccgttggattataaatttgtcaaaagagattggtaaagaagactttcatttgcttcgtctctccggttgttaccaccacacaacgccatg

SEQ ID NO: 4257 - DNA, 3000 bp, Unknown
  misc_feature (1)..( 3000): cDNA_ID_2999608_gDNA_ID_1620693_Annot_ID_48627 3000 nt of promoter + ATG
caagcccagtcagttcaccagttacggccaggcccatttcgattttgtatcataagatacacatcgttgttagatgatgatgatactattgacaaaaacaaaaacattatcataaaacaaatatcttaccgagcagatcatttaaaccgataaatttgttcgggaggataaaatagactcagaaaatgctcatgaggccatttcttcagtaaatgaatcatctagaatgttagtaaacggtatagattcaagaattagtttctgtataactgttatgtacaacaccatgtggactgaatacatccgatgagtatatatacgaagtacaaacaccaatatacatttcaaacaacagcatggttgtagtcatggtaatggaatgtcttgtagatgaagtgtgatagccactttgaagctgcaaaacttaaaacagccgccacaagcactgcaattctagccacattcgacattgtcgtttgcttcaacaccgccatgactccgatcatagcaacggatgcgatttgtaagatcacctctagcgcattgagatatttgtgagctttcttgcagctgctgcagttctcaacatgcgaccaatacctggaacacgcaacttttatcattaggatgtttagcactacttttcattaaacctcacaagcgagataaataacctgtcgaagagctgttctcggggaggcgtaggaggaagaagaaatggatcaaactttcctctccaatcgactcgagcctcgctgtacttgttaaaccatctcctgaatgtaaccacattagcgtctgattttgttgggataaagcaagctttttgccagttttcagggcctctctccagtatcttccgctcctacacacattccattacaagatacaaatcagtctggtacattgatcagcctctactcagaacaatgtgtgtactagatagatttggaattacctctacatgaaggaggtgcaaatctgagtctagaatcgtattttgaccaatgtgaaacacccatctagggacaatcttatcaataaatacaccaaaattcctcgggaacgtccatatcagcctactacgacctggactgaccggaatacatataaagatcaaagacaatctccgctttgacaatgccgcctgtatacagaaccatactgttaggtaactaaaacatgtgactctaaacaagaaaatcttgatacaagttaaaatctatgaccttgtcagaagcagctggtgcgggatactcatgttcctgctctggtagagggtctgtggaagagcgatacacacatggtgcaataaaattagaataaccccattcttgttttgaaaagaaccctttgttgtctagttttttaacgttgatttcgagtggtttccccccttctctgtcaatcttctctgcaagaagaatctgaaggttggtaaaaggattaaaacaactatttgaaatacaaattatgtatttgccttttggtttaggaaaccgcatcagtccataatgtgcataaggaacatgagccgggtccatgaggttttccaccaagacatcgtacctgaaagatttcagatttacacaaaaacatcaacggagaattaccacacatagttgaaatgatgtaaaagccaatagatacccgtaaggaatatcacgattccccatcaacttagtgaatgatgggtcttctaactctggaatgtaaggaggcttgttggtttcaataatgtttttgtactttggatcactgtttggccaaaaccaaatgatctcatgctgcacagtactcgggtaaacagctacacaagcttgcttgaaagtgtggacctgatttgcattaccaaaataatcattgatacaaccaaagactttgactttatgttccatataaaccatatgctaaaccaatctaaaacaaacaaatcatcatcaatagctataaaaatttaccggaggaccatcaggaggagcttgaggaatgagtttacagtcaccggaaccattaaagcaccatccatgataaacacattgcaacctcccccattgatcaatccttccatcagacaaaggagcaagacgatgaggacacgtgtcatccatcactttccattgcttctcgttcctatcccaccaaacaaccaaatcaatccccataactttcttcccatgaggaaccttcttgtcaagatcgcaaattggcatcactgggtaccaattagcgtaccaatcgaacttatccgacccgggttcgaatagggcttcaggttccggtggagaattcgttgacgtagcggctgatgatgatggtggtgatgatactgcggttgtgaatcgacttgatttgcgggtgataagggaattaggagaaatgggtaggcttggattggagaaggaacatctgaaacgaggtttcgtattgagaattcggagcgatggaagagcgcatgcagcaagagcagcttccatggcgttgtgtggtggtaacaaccggagagacgaagcaaatgaaagtcttctttaccaatctcttttgacaaatttataatccaacggttcaaattaaaatatctcaggatgtatttaaaccaattgataatcatttttctggtttaatgaaaactaaaccggttaattgaaagagaaagtgtcggttgagtgtgaaaccggcgtcggcaaagtgagggtataagggtcctttccagacaccacagcatcagtttcttcaatctcccacgtctgagattgaaaagtttgggagaagataaacaaactcaaaatacctcagctttagatcaaaatctaaaaacaagagtttcgtgcagtggtttcttagagatctagtagattagagaatttggatttgttgaagaaaagtggatttggtacgattctataggtttccttcttctctgaagctactatagagagaatctgcgagctcaatttcgtagtaaattagggttcgtgtttcttggtaaagatagaatca

SEQ ID NO: 4258 - DNA, 3000 bp, Unknown
  misc_feature (1)..( 3000): cDNA_ID_1823557_gDNA_ID_1620693_Annot_ID_48628 3000 nt of promoter + ATG
tcgggcagctgaatacaccagttcctagttcacaatacccgtaagaccattcatcgtttccatatacctgcacaaaggtcataaaatattctattcaatcactcttccctgcgaatcaatagtcatctacaagacacaaaaaaataacaaaaccatgaacaagaataatcaaatgatattgcatagatatacagacctaagaacatagaatgattagcactaacttgaaaacctaaattctggtagttttgttggaatacaccaaattgtcacgactcaaatgggaaagtggtatatgcaattatatttgcccaggtcaaagatcacagaagtaaacgtaagccatcattggatttaacaagtctccagagagcacttggtcaatatatcgcaatcattatcatatggaaagttaccaaaagtactaggaaacacaagatcctgagcaaaagagagacttcagctccagacctttaggaccataaaccattaaactaaagcctcacatatcaaaagaaaagtatcatgccgtcaacttcttaatttccacatacatacacagaaacaaaaaccaaatctacataaagtagaccaaaaccaagcttagacatcatcgataattgtacataaatgtagattcatagaatatagacgaagagtagtacctgaatagcgctgtggaatataccgccaagaccgatcccgtctttgaagaacctattgatctgaacaatggtgttgttagtcttctccgatccactgttcgtcacatcgtatatatgcagaacaacctccgtcattgattctatatttaccaagcaacacgaaccctaatttcctaccaaaaagagctcgcagattctctctatatagagcttttggtgaagaaggaaacctaaagactcgtaccaaatccacttctccgtttaacgaatccaacaactactagatctccccgaaaagaaatctaaaggcacaagattagacttatctttcttcttccgatttctcaatttcagacgtaggagatgaagaagaaactggtgcggcggtggtggtggtggtggggatccactgaaatgacaattttaccctcgcttttcctgcggaattgctactttacgtgtcccttgttaattccttttgtttacaacttaagcacgcgtttagattatgaatttatggtaacaaattatattagtatgaacgttgttcgcagttgattaaacgggtcaactactgaaccttttttctttcatttaactaacatttctttagctagacaagtgtccttaccaaaacaaatcaaaaatactagtaaagcatctctataacaaaataatgacttaagtaatctgacacaaccaaggaagatgattcatgactattaaaaaatggggtaaacaaaaaaaaaagagggtaatcaattgaccgattcttccgataattttcgaaaatgcaaaacggacacaagtctggttttcgttagccatctgattcgtctcgaattagtccatccattcatacaccaaatttataattttgcttctatgtaaaaaagtcaatcataaaaacttaatgacttcttttttatggtacatacatattgggccaattgggcctaggcccagtacaacagatgggattcaggaaataaattaggaccaaagaaattcgaccaagttttttgttatatcaaaagtgtattcaaagtctcattttggtggatgaatcttgaatgggatgctcaaagcacaaacaaagcttagtcaagttgataaactttgaatgcaaattaagctcttatattttattgtaatgtaaggtaacatgacacttgtacatattcgtgaaaggctcaaattttctttcttacatgataaatattgcaaagttggaaccggaagtcgacaaaaaaaaaagttggaaccggaaacatctcaaaacagttatcgggggatctaacggctgctaatagccctcattaggacccacaaaatactgggagtagacgaagtcgcaccggccaagtctccaaagtcccaattgaaaacttacacttgaaaaaaaagtcagacatcattcgacacgtgtccccatttcattagaagtcgcgctgcgtttctttctctgtactagttataattccttctattatcctctctctctcgtcttcttcgtctgctcttcttttttatctctcgaaattcctctctctttctctctgcatcaaaacagcaactttacttctgcgtttttgtttatctctctgtattatccgattaatttaaaggagttctttgaaggcagctgcttctatgccatattgccgaggtttggatctaaatttcatcatcatctttgtttctccgtttatcttcaatttccctttatcttttcaatataattgacttatttcgttaaaagtctttttgattagcttcctcggatcttatgcttattcatggatcttagacctacataatggattaaatccgattgtttctcttattgttcttgttgaattgaggttaattttgatctgaaaattagtttctgcggcagatctggtgtctgtatttgtgtaatttgtatccattagtcttaattgagttattagctgaggattaagagagatcctgaaatttgccgtggaattaactctttctgtggatggatggataccctttgtattcttcaactttgctcctactctgggaaattagggtttgagtaatcattaggttttactctttggctgttgttgactatcttcaatctaattggtggctgattttgtttgacttctttaggacttttggtgtctttcgaggtcattagaacaattgtgtctgcttggttggtggtctatctacaactgttagcttttacaagtttgaatgctattgttttggctttcagattttgatgttatggatttctgtgttactactcctctgcaacttgaaactaatcaagtaattgtcaatgcagaaaatg

SEQ ID NO: 4259 - DNA, 3000 bp, Unknown
  misc_feature (1)..( 3000): cDNA_ID_1382080_gDNA_ID_1620693_Annot_ID_48629 3000 nt of promoter + ATG
catctgtcatccccggaacatcccattgaacacaaaggcgttcccatcagcattttcagatatctgtagcgccgagacagcctgagcagcaatcaaatcagctgatattcccatgttgttatcccaagcacccctcctcgtgaatggcgaccagttactatctcctagtccatagccatttgacacaaacccaatcccttgaaccgcatagctagcacagctttggcgaggaacgtagttagttctttcatctctaaacagatccattgtgaaacccttttcttcaccaaacttgactcgagatgaatcatcagaatcttcgcccagtaggacgtgcagagcaacagcttctgcaattgcagctccttcttcatctaacctttgttgttcttccaatctcttctgcttcttcttttcaagctcagcccggatggctgcagaagtagcaagagctttctccaaacgtctctttttcttctcagcttgtttgatacgatcaaattcatctttaccatgcttcttcttcgctttcctaacgactggctgaacttgcttgcacaccgtgtgatccattattgcttgactataaatttctaactaaaaaactgcactaaactcgatgatgttgtagaggaactcaagaactacacccactctggtatataggaatacctcatggtgcggacaatacaatcccagaaagaaacaacaggagacaactgaagagagaggttataagaattcgcagacttattcttcgaaatcattcgtccaacattcccgcaccccttagactcgcccattttctgcattgacaattacttgattagtttcaagttgcagaggagtagtaacacagaaatccataacatcaaaatctgaaagccaaaacaatagcattcaaacttgtaaaagctaacagttgtagatagaccaccaaccaagcagacacaattgttctaatgacctcgaaagacaccaaaagtcctaaagaagtcaaacaaaatcagccaccaattagattgaagatagtcaacaacagccaaagagtaaaacctaatgattactcaaaccctaatttcccagagtaggagcaaagttgaagaatacaaagggtatccatccatccacagaaagagttaattccacggcaaatttcaggatctctcttaatcctcagctaataactcaattaagactaatggatacaaattacacaaatacagacaccagatctgccgcagaaactaattttcagatcaaaattaacctcaattcaacaagaacaataagagaaacaatcggatttaatccattatgtaggtctaagatccatgaataagcataagatccgaggaagctaatcaaaaagacttttaacgaaataagtcaattatattgaaaagataaagggaaattgaagataaacggagaaacaaagatgatgatgaaatttagatccaaacctcggcaatatggcatagaagcagctgccttcaaagaactcctttaaattaatcggataatacagagagataaacaaaaacgcagaagtaaagttgctgttttgatgcagagagaaagagagaggaatttcgagagataaaaaagaagagcagacgaagaagacgagagagagaggataatagaaggaattataactagtacagagaaagaaacgcagcgcgacttctaatgaaatggggacacgtgtcgaatgatgtctgacttttttttcaagtgtaagttttcaattgggactttggagacttggccggtgcgacttcgtctactcccagtattttgtgggtcctaatgagggctattagcagccgttagatcccccgataactgttttgagatgtttccggttccaacttttttttttgtcgacttccggttccaactttgcaatatttatcatgtaagaaagaaaatttgagcctttcacgaatatgtacaagtgtcatgttaccttacattacaataaaatataagagcttaatttgcattcaaagtttatcaacttgactaagctttgtttgtgctttgagcatcccattcaagattcatccaccaaaatgagactttgaatacacttttgatataacaaaaaacttggtcgaatttctttggtcctaatttatttcctgaatcccatctgttgtactgggcctaggcccaattggcccaatatgtatgtaccataaaaaagaagtcattaagtttttatgattgacttttttacatagaagcaaaattataaatttggtgtatgaatggatggactaattcgagacgaatcagatggctaacgaaaaccagacttgtgtccgttttgcattttcgaaaattatcggaagaatcggtcaattgattaccctcttttttttttgtttaccccattttttaatagtcatgaatcatcttccttggttgtgtcagattacttaagtcattattttgttatagagatgctttactagtatttttgatttgttttggtaaggacacttgtctagctaaagaaatgttagttaaatgaaagaaaaaaggttcagtagttgacccgtttaatcaactgcgaacaacgttcatactaatataatttgttaccataaattcataatctaaacgcgtgcttaagttgtaaacaaaaggaattaacaagggacacgtaaagtagcaattccgcaggaaaagcgagggtaaaattgtcatttcagtggatccccaccaccaccaccaccgccgcaccagtttcttcttcatctcctacgtctgaaattgagaaatcggaagaagaaagataagtctaatcttgtgcctttagatttcttttcggggagatctagtagttgttggattcgttaaacggagaagtggatttggtacgagtctttaggtttccttcttcaccaaaagctctatatagagagaatctgcgagctctttttggtaggaaattagggttcgtgttgcttggtaaatatagaatca

SEQ ID NO: 4260 - DNA, 3000 bp, Unknown
  misc_feature (1)..( 3000): cDNA_ID_1823551_gDNA_ID_1620693_Annot_ID_48631 3000 nt of promoter + ATG
ggctatcccatgcagcgtgtcacaaggcaaggagatcttcataagcacaagtgttggcggaaaggtcaacctcgtgactgggagaaaggtggttgattacaatccagtggaaggtagctgggaggaggttggagataccatgtgtgagtttatgttttcaaaatgtttttgcgtggttggtaatgttttgtactcatgtgctattgaccgagtgttcagatggtatgacactgaggtaagaacatggagaaatttggagtgtttgataggaggacgactacccaagttatctccgcgtgcttttgttagtttggctgattatggtggaaagctcgctgttttttggaaccaaggtgtcggcgattggcagatgctttggtgtgcagtgattgcgcttgaaaggcgcaatacttgtgaaattttggggaatgttgagtggtctgatcatgtgcttcatgtccctaagatacgttcttactacaacgctctttctgctactctctgagatgaatgtgtcagtatgcttgaaccgtgtcttcatctttttgtgtaaccgttgtattgtggtctttgttctgtggtattttatgatttattggctttgatttcgattttatttagtttatttgattgtttgtcttgctcttttggctcggtagtttaagatccttttgtaaagagacgattggaataaacaagtatcctatttgagcttagtagcaaatggagtattcattatcttgaataaatggtgcagtagaagataccagtctaattgtattgctagaatttcacccaatgacggatcactgcttggatggatactgttaccaaaattaaggtcattgtttcttgtaacatgtcattgtttagaataaaccgtcgtgttataccatgatactcttacttcttcttttctaactaacatgctgaaatctggacatggggtgagctgagatttgaagttcacaaattttgtctcccttaataagtcatttttaaaactcattttcccttgccttaatcttgtctgcaatgtagggtattgatgtcttgaacggcatagtgacaagcaacgcctatttggtaataaatctcgctatgcatgcgttttcgagtggtgttgactattttgctgacaaggaggatgttagctattgtgatttagtgccaccagctgaaccccttttaagtataatgaaggaaataccaccgctgagataagggtgttcaatggagaagatgcaaactgcacgaccctaggaacgtgaggcaaagagacgaaagtttggcgctcttgttccagaggaccagtttctagctcaaaatccggtaatgtttttgttttccttccttgtgactagactcgtgtatctaactagcagtaatacattttcagggtccctttaggatcatgatcagagtttctggtgcagacgactatgtggagtctttgaaatcacggtggactcgttatcacacagacagatgttaagtggaaagctggggttttagaggacaacaagtcattgcacattacaatgttggagcaggagaaattctaacagtgtcttggtgacaaggtttttgtgcacattagcaatagtccggtcattctttaatgcaaaccataatctatattcatcccaaaatctcagaatccaaagcgcaagagaatcaaacgtttcatcatcttatatctacaacggcctttagcagaagagtgtaattgaaggtccatgacccaagttgcagtatccatatcacaatttgaggtccaaaaaaagaaaaaaaaaataataattctataaaagaaccaaaaaacaaagatactaggaggatttgtcatagtgaatagtgatgtgacacgtagagaaagcccatatggcatcatcagcctcataaatgggtgtaacttgtaaggaacttgttgcgttcgtttctggtttggagcctaactttttgtttctttgtctttcaccatcgctgtttctgtgattttacgtttatgccattttaagttaaggacttagtccagacatcttagaattacatcattattcatcacgatatcgaaaattatacaaatgacgtttagaacaaacggatataaacaatacaaaatcacacgcaatacacggaactatgacaaccatgccacaagtctccacatgtactcatgtagtgatgatgtagcgtcctaaacatatccacattccttaaaatgaaaaaatctactttttagaaaacgaatccaaaacaatagacagtaaatgaatctagtagaatttctacataagtttactttctctatatatcttatattttataacaacaataatgtttataaatttgtttcaccttaattatggtttacaaaatactgtatcttggatttaattaaaaaagataaatcatttataaactaaattgatgtgattcatactaaaatactaaagtgttcttaagatattgttagctttgtagacaagtgagaagaataaaaaaaggcttttgtatggtttaagtcttatagtaaatgctaatttggtttataaaacatatttatactaaaaatctagaaattaataaattaaacataactgagcttatgtgaaaaaggtaagcaaatacatttttggtcaaagaaaagatggaaaaaaatccaaaaaagaaaacaaatattatcaaaaaataagaaagtaacccattttgagtgggggtaataatgtaaatgtgatataagggtggggtaggattagtcgctaaaaaaacttgagggcaattttagtcacacgaaactaaaccatccttcacttgtttaatttaattttgaaaaggcaaaaaaaagagcacttacttttacccaaaaacaaaaaaatcgtggcctcacttgcatttaaatccatccacaccacatctctctctctgtctatctatctctctcgctcgcataaaaggttaacctcaaaacaagtagctcctccttccattaggatg

SEQ ID NO: 4261 - DNA, 3000 bp, Unknown; identical to SEQ ID NO: 3158
  misc_feature (1)..( 3000): cDNA_ID_2049474_gDNA_ID_1620693_Annot_ID_164858 3000 nt of promoter + ATG

SEQ ID NO: 4262 - DNA, 3000 bp, Unknown; identical to SEQ ID NO: 4260
  misc_feature (1)..( 3000): cDNA_ID_3072906_gDNA_ID_1620693_Annot_ID_164855 3000 nt of promoter + ATG

SEQ ID NO: 4263 - DNA, 3000 bp, Unknown; identical to SEQ ID NO: 4259
  misc_feature (1)..( 3000): cDNA_ID_1382080_gDNA_ID_1620693_Annot_ID_164853 3000 nt of promoter + ATG

SEQ ID NO: 4264 - DNA, 3000 bp, Unknown; identical to SEQ ID NO: 4258
  misc_feature (1)..( 3000): cDNA_ID_3072910_gDNA_ID_1620693_Annot_ID_164852 3000 nt of promoter + ATG

SEQ ID NO: 4265 - DNA, 3000 bp, Unknown; identical to SEQ ID NO: 4257
  misc_feature (1)..( 3000): cDNA_ID_2999608_gDNA_ID_1620693_Annot_ID_164851 3000 nt of promoter + ATG

SEQ ID NO: 4266 - DNA, 3000 bp, Unknown; identical to SEQ ID NO: 4256
  misc_feature (1)..( 3000): cDNA_ID_2050918_gDNA_ID_1620693_Annot_ID_164850 3000 nt of promoter + ATG

SEQ ID NO: 4267 - DNA, 3000 bp, Unknown
  misc_feature (1)..( 3000): cDNA_ID_3593514_gDNA_ID_1620694_Annot_ID_48634 3000 nt of promoter + ATG
tactagtacatgctattatcttttttattttattaaatatttttgtccttcattctcaaccgttgccacattttctttgttaatgatcattatattattattatgaagtcgtttttggaatcctacaacattaacatacacaaatgtctttttgtgataccatacaaataatttgtttttctaaaacaaacaaaaaaatatcttttgtgataagcaaattgtgaatctgtgataacctcgcccacaaatcatatcacttattcgacaatttgtgataatttagcccacaatatttatgcactagctgatagaaagaaacatatccttatcactcacttactgtataaaatcccggattggccccatcaaatatacatcgctcttatcattaaccacatctggcaagtggtttaagctgtcaaatacaacacgactttgttgaacatatttttgtttctcaatctgtaatccaccgacgttcattttttggttaatcttttgtctgctgatctgatcatgtaaacctgacggaatcgaataacatatataactcaatctaattatgcaatgcaaaacaattatttgtgaataactcatttttaacccgttgaaagaaatgatggttttttaaagatacatgcaacctttaatctcctttattcatgcgtgtctgaatttgtatcacaggatagagtaacttacgaattttcttggattagattattagaacttcattttgccaaagaaaatattgcttacataataataaggaggcggctaaggataacatgaattacaatcgctatacaacacataattattacactttttgttcttcttaaaaataaatgttatccagctatattttcatccagcaaagccgtcaggcgttgtcgataagcttcaaaaaaagaactgatgaaattccgaaattcctcctccatattagcgtacgttacgttttatttaatttattttgcaaatgatattttcttcacttccagttatttttttatttttttaattggtagagtaaaaaaagatttattggcactctaatttttgacggttaacacacatatactgcaattatgtttaacaaaactaaaccgatcgatgaaatattctttacttggtcgatgaaaatagttgtctcatccgatgatccgaatgactctttccaagttggtaccttaaattgtggtatctgctgtattccatacgaaagtaaaccgcggaataactaaattcttaaaccatctttatcagaacaaagcaactaatctgcaaaattgtcagtgttgcaagctataaatgttccgtacaagctacaaataaagaaatacaaggcttagccgatgtgaaacgtacgttagagttgtacacgatatgttttgtgtgaatttgataaattcaaaaaaaaaattgttgtacaccttgatcctagtcatgctggttggtgtatattaatatattatatcagaaagtgactgtcattctattttaatgtgatatttacggtcaaagacatgttgcatgtaattgcgcgcgcaatgtatacgaccattttttgatgaagtaactcagcgggtaaacattctatcactttccatttcattggtaagtacaatattggattttcttttgtggtatgcactagtcggtatcagtcccgagatgtaattagagaaatatttgtaactagaacttttttccaactctttcgaatttttttttttttttttttttgccgtagatttggaatatgattctaacagaatatcaatacaatatagcaactttggctcactggtcactgcttcataacatgataacaaaactctcaagcaactactttcatctgaccctttttatgtcaaaaaaggtctttcgtctgaaccgaaaatcaaaccgagttggaagcttctagcaaagataatgagccgtactagtcacaactcacaagtcacactttcgaatttcaaacttcaattgaagatccgaatatccactgccgtagtttgtacgatactttcactcatttcatgttgtcatgtgtcgtacaacagtttccagtttcccattattatttaatgtttatttattaatatttggactttaattacggcaggttatactatatggtatgatagaatattttcttcattccactggattttgctaattatatatatttattccaaatcacaattttgatttatcgtcattacaaaaactaaaaagtaatgaccaaaataaaagatatgtaatttcagatattccgttctaactattctattctcttcctgattccattaccaaacactgagagacaaataagctactggccgctaattggctatcgctctctttacatcttcgaacataagcaatagttgaaaaatataactttactaaaaaaatacatatttttcgttaaaaaaaaccttgtggtcgtctatatactattctaataagtaaaaaaaaaaaaaaaaagtaacggaagcatgaactttcatgcctggaagaaactactggccaaaaccatccactaaatacaactaatgaagtaatcatcctagttgagcatattgtaatcatcacattcaagaaaaatatcccatggagaacaattttgcattatataaaaagttaattccttgtcgacttttatataacacaaacaagaaggagcacatcgtaaattcatcaccgcttctacaccttcaccgtacgtgtctctttcgtactttctcactatttgtcattctaattataaagtacaaaaaaatcaatagtttaattattaaattaatattaaaaataaatactttctactaaaagtctaaaatattataacatcgaagttgcgaaaaataaaataaaataaacgtaacatttcacctttaaaaccgtacgcagagtgctcaacgaacccaaacacactctaaaaatatcttctttctccttcttcttcattcttctcaatatctcctaatg

SEQ ID NO: 4268 - DNA, 3000 bp, Unknown
  misc_feature (1)..( 3000): cDNA_ID_1823608_gDNA_ID_1620694_Annot_ID_48635 3000 nt of promoter + ATG
gaaagaccttttttgacataaaaagggtcagatgaaagtagttgcttgagagttttgttatcatgttatgaagcagtgaccagtgagccaaagttgctatattgtattgatattctgttagaatcatattccaaatctacggcaaaaaaaaaaaaaaaaaaaaattcgaaagagttggaaaaaagttctagttacaaatatttctctaattacatctcgggactgataccgactagtgcataccacaaaagaaaatccaatattgtacttaccaatgaaatggaaagtgatagaatgtttacccgctgagttacttcatcaaaaaatggtcgtatacattgcgcgcgcaattacatgcaacatgtctttgaccgtaaatatcacattaaaatagaatgacagtcactttctgatataatatattaatatacaccaaccagcatgactaggatcaaggtgtacaacaattttttttttgaatttatcaaattcacacaaaacatatcgtgtacaactctaacgtacgtttcacatcggctaagccttgtatttctttatttgtagcttgtacggaacatttatagcttgcaacactgacaattttgcagattagttgctttgttctgataaagatggtttaagaatttagttattccgcggtttactttcgtatggaatacagcagataccacaatttaaggtaccaacttggaaagagtcattcggatcatcggatgagacaactattttcatcgaccaagtaaagaatatttcatcgatcggtttagttttgttaaacataattgcagtatatgtgtgttaaccgtcaaaaattagagtgccaataaatctttttttactctaccaattaaaaaaataaaaaaataactggaagtgaagaaaatatcatttgcaaaataaattaaataaaacgtaacgtacgctaatatggaggaggaatttcggaatttcatcagttctttttttgaagcttatcgacaacgcctgacggctttgctggatgaaaatatagctggataacatttatttttaagaagaacaaaaagtgtaataattatgtgttgtatagcgattgtaattcatgttatccttagccgcctccttattattatgtaagcaatattttctttggcaaaatgaagttctaataatctaatccaagaaaattcgtaagttactctatcctgtgatacaaattcagacacgcatgaataaaggagattaaaggttgcatgtatctttaaaaaaccatcatttctttcaacgggttaaaaatgagttattcacaaataattgttttgcattgcataattagattgagttatatatgttattcgattccgtcaggtttacatgatcagatcagcagacaaaagattaaccaaaaaatgaacgtcggtggattacagattgagaaacaaaaatatgttcaacaaagtcgtgttgtatttgacagcttaaaccacttgccagatgtggttaatgataagagcgatgtatatttgatggggccaatccgggattttatacagtaagtgagtgataaggatatgtttctttctatcagctagtgcataaatattgtgggctaaattatcacaaattgtcgaataagtgatatgatttgtgggcgaggttatcacagattcacaatttgcttatcacaaaagatatttttttgtttgttttagaaaaacaaattatttgtatggtatcacaaaaagacatttgtgtatgttaatgttgtaggattccaaaaacgacttcataataataatataatgatcattaacaaagaaaatgtggcaacggttgagaatgaaggacaaaaatatttaataaaataaaaaagataatagcatgtactagtagcaaacaacataaaagaaatgagtaactatcgctttaattaaaagtgggactaaacatgtctctagactattgaaatattcttattgatttgaattttcttattgtaaagataactttgaaattcactctttaattattttcttaacgagtttttggaatggatccgaatgtatatatatatattgatttgtgtttctatttatctaagcttgtggtaactttattggcgatggttaataaaaaacacgttgggtgcgtatatgcaatattcttgatactcgaattcattcctgaacatgagatattaagataaacgacctactacttcgtgattaaaaaacataagttaaaatttaaatgtccgaaggaatcatagttaagtgacagcatttaagttgtctaaaaattgccatttgccactcgcatcaatttgtaattttgcaaagtgcaattttatgtctcaagatttgtttcgcagtaagtaatgaaataacataatcaatgttctaacaaaatatctcacctaccagccacacgagtgtcaatttagtttacatttgaaccagagacctaaaagtttgaactaccaaaataatgattttgccgacaaaataggaaaactaagaaagtagtaatgaatatcagatatctgtttcttcagatcaaagcctactaaggaacgcaaaaatatataactaaacaaaattgcgtaaatttagaaacagtgattaaaagcccatatttgattcaatagtaattgaaaacagcataagataatggcccattagccgttatttaggcccgttatcatatcacaaaacaaaacacgaatcatctacgacgaagacctgaaaaaacacactgcaattgagatcgatttcgactgtaagtgaactttgattgccgcgaagattactcaaatcgccggacacaagtttttcagtgaattccattggcatagaactcgagagaaagagacacagagagagagagagatctaacaagagtcaaagtttctgactttttcgcattctttttgagatcgagttctgtttttgttggcgtgtgagatgaattcttaagaaggaagaagaagaagaaggaaag

SEQ ID NO: 4269 - DNA, 3000 bp, Unknown
  misc_feature (1)..( 3000): cDNA_ID_2132959_gDNA_ID_1620694_Annot_ID_48636 3000 nt of promoter + ATG
tgaattattgtatacattctatcattattttcacctcttacgtatgatacaattctgacatacataaacatccaaaagtatcaaaacaatttgccaactagttcttactattcttctactcgcttttccgggagaaaaaaaaaataaaaaaaaattcgttgattaacatttttaataaaaaaaattgttcctgaattatgcctttattagttgggttaaaatataattatattgacatatctaattaaacctctttacactcaaatcaagacctacaatttcacaagtttaaggttgggattactcgatatatagaatgaaactattgcaacaaaaaaaaataaaaaaatgaatgaataggattgatggtgtgataaaagaagagatgaatacaaagaagaaacgaacacaagtattgtgaacaagtcaaagcctaactattgaacaactttagaagacaagccaccaaatgtacaaacaaatcctcccaataacaaactacaaaagagaaattaatcaattagaaatcataagacatatcgacacatgctaatggtattatctacttacacctcatcaaactcgtgcatgggctattgttatccacatatgtatacagtcatggttatgtcccctcaatctcttccagcttgagaactatttgtaaaccactagtcaattatttcatattcagttcatagatagcctataaacattacatattatatctctagagataacaaaggggagcaggaagtgttagtactgtcgaccttatgcgcccatataattcttccatagctttagattttagtgtttgggctattttaattgcacccgaataatgacaggtaggggtccatgcaaactcatattcatgtgcatatcatcataaaatatccaaaaatctatcttatctatataacttcattgaacaaaacatatatatattcatgcagacgtatggcatgatacagttaatggtctgaattgctcaacgtaaaccatacatgcactagacagtttcatgggaagactaagattttgggactgcaaaattcttcttggaattgtgtagcggctttcaacgtatctttaggttatattcggtgaaccctttatttaccggcacagaatattacggttgatattcaattgatcaaacaatgtgaattagacgtctaattattgatggtcgccatatgaatatcttcttcttccttttccaaaccaacaccaacatcttttaatcgatagaagtgtcaattcgagctcgactctcacatctaatgcgtcattataagattgaaaatcagagacttgaagttttcgtttaggaacttaaaatgaagtttataactattgcttaacgtttttgttgttcatcccaagaaataattgacgttttcaagttaggtttttccaacccaatttattttattatccaataatattataaattctctagtgaaatttcattccttagcttccacgcaaagggtcgcttgagttttgagtaacacaagattggagagatcaatgagaatgttggcattggatccaatcctactatttgggaccagcttcactcgattcatcgcgtcctatttttgtccgtttacacatcttcggatcattcaattcttgtttaatcatcttcattagtaataacgttgccactttatttttaagacggatttatcttctgcaactcccaaattcatattcgctaaatcttctctaaactcagcataatagttaacttgaaaaagaaaaaaacgaaaacgataactaagatggtgaccactcgcatggtttagtgatgaatttagttaaaccgtatgttaatttccttggttaggctcttcaaacagaaattcgaaaacgatatcaaatgctccatgataagtttatgatttcttagcattgtctaatctaagagactagtaagaacatgaaaacaatattcgttaaaccaagtggtaaaacaactatatacagtatgtgtttttcgattataatgttgttaacttttaagattattatattttatattatttcttaaaatatgttgaggtttaaaagatttcttttcagaaaaggattaatgtcttcagcaatatatgctagtaatttactaagtgatattttgcaagtttgttggcaatatttaaccttttctgaataaaataaattcaatattaagaaacaaaattatatacatatagtagtatttaattgttatctatttttaaattatatgtgaataaaacaaagcaagtgtaactgtgtaattataacattggtacacgcacgggaaaaaacacagctagcaaattgaaacgttaatttggtaaagaagaaaaatattttatttttaaaaacacttaatatagttttaattggtgattttcccaattctgaacatatatatgatgataagttttccatcccaagttgttttttctcattagtcactggaaacattaattaccagcaatcagtagttactttggtattccccacacaaattcaaatttaaaagaaataattagtagtacttcttatgactgttttttttactgaataaaaaagaactatatataggttgttcttaactataaccactaaaaaaaggttctaaaattaattttaaaaagaaaaatatatgaagttaacttttatatattacacatcaaattccaatttcaggggctggtaatttggtaataattaaagaaactcaatggcaatgatttaagcacttctttatataagtccaccaaactacactgatctcctcaacaccacacacagcaaaacaaaaagctctctacactcaaaatataacgaaagaacaagaagacatcatcttagctcactatggctttgaagacggtaacaatatacaaactttctctattttttccacttttgatttaatgaatctaaaagaaaatattttggatgattggtatataggcgacgagtggtatgtgg

SEQ ID NO: 4270 - DNA, 3000 bp, Unknown; identical to SEQ ID NO: 3095
  misc_feature (1)..( 3000): cDNA_ID_1823602_gDNA_ID_1620694_Annot_ID_48638 3000 nt of promoter + ATG

SEQ ID NO: 4271 - DNA, 3000 bp, Unknown
  misc_feature (1)..( 3000): cDNA_ID_1823598_gDNA_ID_1620694_Annot_ID_48640 3000 nt of promoter + ATG
aggggcagataacgcaaagaaagagattgatcaacaaacatatatgtttggtaaagagaagccaagcttattcaccataaattttatttaatcaatgatttatttttccttttttttgtcttttccggtgagagttaaaatcaatcattctattatctccaaggggaaaacgtctagtcaataagcaaaatgaatatcaaataaatttgattaaaaatgtaaaatcaaaagttttgaggttctgaaatcattgaagattatagtctaaagatcaggttaggtctatgtggaattgatatgtatggaagacactctggctcattcagaaggtttcaaataagctggtttagatactattgtccaagaaagacaagtgctctctcattctcattggttcgcgcgtgtaagctctcattgtctttaggtttggaacataatccttaagacaattggtgtgaatctaggaaacagagaaatcaaggattcgtggtatatttacagatcaaaatgcaaacaagaatacaaatacttgttactagttcttcaacttttgtcattttcagactacaaacaacagatttttgattccttgggtaaacaagttatgaaaaaggagaaaacaaatacttatagctctaattctcctgttgattcctttcttcttgttgaatcagagtatagaacaacctttctgagattttctcttcttcttcttcttgttttttggtggctggagaacgaccttgatagccgcatcaaacactgctttcacattctgttgaacagataacagatataggaatcatcagcagattcaattggcggttttagacaggtaaagattagataaagatattgactctcaggttaatacctgttgagtttttgcactgcattcgatataagcaggcgccccaatcagcttctttagttcttcaccctgttttgataccatcaaaatatgaaacatgcagaatattaacacctaggattcagtttagaaagataatgagaaaggtacctgagcggtagagataggcacagcaccagggtgctcggcaaagaattgcttatcatctcgaagatctgtacgagactcagtcatcaaaatatcagaagagttccccaaaacagaaaacccccgataatcaggcgattaagagttgagctaagaaaaaaccaaccaagctttgttccaacgaggatgatgggaacaccaggagcataatgtctcagttcaggaacccactaagaatcaaaagcaagataccaaatgtattctatcagaatcactgaatgtaaactgaataaaacaggaaagaagtttcaggagaagaccacagatcaaacctttttagaaacattttcatagctagctttgctgacaagtgagaatgcaagtaagaagacatctgcaccgcgatagctcaaaggtcttagtctattgtagtcctcttgccctgtttcaccaagtcaaaaacacaaatgactctctggaagaggaggaaattcaaaagacaaaaaaatccaaggtaacaacttgcctgcagtatcccacaatcccaagttgatagtgttgccatcaacaatcacattggcactgaaattatcgaacacagttggcacataatcctgtcacatagaaaattccactaaaacatcagctacaaaatctccttacagaaagttacctaacactctttctaagatcattaaacagatcaacaacattgctacggtacatgaatctctgagtctctcaaatcctaaagatcacatcagtacattcactaaggtagcagaaagaagaagactttaagaaaacctaacaaatacttgtgactaaatccaactcataagcttcaacaacaaaaccaacttcaccaagctaaaatttcacgaaatcaaagtaaaagaagagaactttaaagctaaccgtggggaaagtgttgctagtgtaggagatgagaagacaagtctttccaacagcaccgtcgccgacagtgacacacttgataaaccttgaagcactcatctttctctccttcttcaaacttcaaaaaccctaatttgttcacgaattggggatttttgactaaagagagagagagtgaggttctttaaagagaaagaagacaaagaaatagctgctgaaagtctctcccagactagagtcttcctaatttttactactcatcctcacatgcacctcaatttcttggtcttcttcttccttttttttcttctttttactaaaattttataaaatagcatttcttcttagatagtgcgtttcccaacataagaccctacaaaaatttatgggatgaaaattataataataatttctatgtacttttttttttttttttttttaaacttcgttttcatctaatactatgcagcccatatactaaatgcctaaatctatacatatttagattgatctttaaatatcaataaaaaatttagctaaattttgactggtttagaggatttttccgatgtgtcattaggattatacaactatggtttaaatatcaataaaaaatatagctggttttacaatgcaatatgattggagtgttaatttttattgatcagcctcctttggatacatattcttctgttacatgttaaatgataatatttttgtcccggtatgttgaagtaaacattaaaaatgtacatacaacttctctaagaaataaatgttgagacactaaaaaaaacgtgaacttaaggtcaatatttaatatttttataaccaatcacggtataaaggcttaccttttgaatctgtctagctagttattgaccgttaattttaaaaacacttattgaccgttaaagaatctgttatggggacccaaaaaaaacgaatggtaatttcactaatttgttatgttatgtccaacataataggcgaagaatagggtgaaaccaacatttaaaaatagcaaaaacaaattaaaaaaaaaaaatcgaaaaggaaaaatg

SEQ ID NO: 4272 - DNA, 3000 bp, Unknown; identical to SEQ ID NO: 3093
  misc_feature (1)..( 3000): cDNA_ID_1823594_gDNA_ID_1620694_Annot_ID_48642 3000 nt of promoter + ATG

SEQ ID NO: 4273 - DNA, 3000 bp, Unknown
  misc_feature (1)..( 3000): cDNA_ID_1823586_gDNA_ID_1620694_Annot_ID_48644 3000 nt of promoter + ATG
ggccattaaatttgatggtgtggttgactctcacaaaatttctacacagaaaacatgatcaaaatatgcttatcgtcgtcagatatatcaatattccaggcctaatttgtgagcaaaatgatgcgaagacgaggattgtgatgtttaatccgaattatcatgtaccattgtatataatttacctctagatgattttcagtggtaataaggtatatttaataaatgtaaatcggaagtttagcctttttaattaaaaatgcaaacaacacaaggaacacatggatgaagcaaacataaccaattatgagtgactagtagatagtagatatacaaacacatatttccgatttcccaagtaatatgaatctttgtgatgacaaaatcgttacatcattcacgttgtattaagttacaactaaccatgcagtttttattttacaagtaaatgtgatttgttttctagtatacccatatagattatactcctttgctattttaaggtgatatgaaagctctcccagagactagtgaattagttatggatggttgccccgcaaaataatatcgttttgtaatttaatatggactaatggttatctcatgacatatactaattaaaattgttaaactatagaagttatttaaaaagaagattgaaaatgagatgtggttttcattgagttattatttattaattttgaaaccataaaaaaatgatgttgaaacttgaaacatttatatttgttgcataaacaattaaacatgtcaagggtggtccaccaatacgtaacatgaacagtccgtcttaagagattccaacttccaatcccaaaatattcatcaattctgtaattgtttagtcagatttgaaataattgcgaatagagatatcttaaaaacttcattcaatagcaaacatgaattgtataacaaatgtctatttcatctatctgtcaatgtttaattattgccacactggtgatgcatatataacaaaagcgacctatatagattaaagtccttttataacaggttcatatacacccagtaaccaccaatacacatacacgtacatatatatattattgccgtttgagagtcaaactcatacacgactcactgaaggttgatacaaaatatcagcatataataactaaatatatggtcgaaaactacttatagagtttggtaggtcgtattttcaacattttaaactcaatttttatgttgacaataacaaaaaaagaaaatcatatcatatatctcaacatatagagtctaacttttttcgccaaaccaaaagaaagaagaaaccaagaaacaagaaaaatgggtgttcttgatcacgtctctgaatatttcgattgttctcatggaagctccaagagacacaaaagtctacaggtaattaaattctgcatccattcataattacgtttatttataatcaaatccttattataatatgttgtggttggaaaatactagacggtggatgtgagggttttgatagattgtgaaggatgcgagaggaaagtaaggagagctttagaaggaatgagaggaataagagatgtaaccatcgagccaaatgctcagaaagtgacagtggttgggtacgttgaaccaaacaaagtggtggctcgtatcattcaccgaaccggtaaaagagcagagctatatcctttcgttccttacgacgttgtggctcatccttacgcgtctggtgtttacgataacagagccccgactgggtacgttaggaacaccgagtatgatccacatgtgtcacgtctcgcacgtgctagctccactgaggttcgttatactacggcgtttagcgacgagaacgcctccgcttgtgttgttatgtgatgttttttttttttggtttaatttttttttactgggattattttttgtgtttggatgttgatgtttgtttatgtttccatcacgaatgtatttaagataagaacgagtgaaaaaaatgtaaattgcatggtgatgaattggtggttaaaacaaagttgtcaaaaaaatatgataattaataatccggtgaccaaataatgcgagcaagggatttaatattcgacataatagtgtacaacaaaatcagaattaattattactttataacattaggaaaagaaatcaaaactataaaatgatacggtataagctgcccaaataattgtgcttagaagaaaagtaattttgtcgtactataagaattaacaaagttcacagtttgttagcccttggagctagttcggtggaattgactaataacgaaaagataatgcaaattgtgatcattagccatgcatgataaagttgaattattacttattagtttagttgtcactaattgtcacaaagggttggtttagacatcgatagcgtgttcggtccttaactttatcaatgtgacaagctagcagaggattttctctaaagtattttgtcctcaaatgtggataggattggtcgcattacgttcgagatttttgtcctcattaatatgcaaaaattcgtactttttaacgaaattgaatcctaaattttaatgtgaaaccactaaactactagatcaaagaggtttttacttttagtaaaaactaacccaacttattatgaaaaagaaaagaaaaaaatcgtctaggaggataattggttttaaatagaataattttaggaaattaaatgaagtggatccttagtgggcctcccagctaatagtccaatactatttcaatttccagcctttcagctataactttcgtaacaacaggtcgtcctgacattactgaaacacaatgtatgcggtttttcatataaataaacgtcatggcgttttcgtatagaacatcgaaaacagcattgttacccgcttcattcctcctctctctttttgggcgggaaactgtaccagaaaaaaacctcaagagtgagaactgagaagaagaacgatcgagagcgagagagagagtgatg

SEQ ID NO: 4274 - DNA, 3000 bp, Unknown
  misc_feature (1)..( 3000): cDNA_ID_1022876_gDNA_ID_1620694_Annot_ID_48645 3000 nt of promoter + ATG
agtttctcgtgcaactttgactagaaaacaggattcatcttcacctttctttttttcttcacatattaactgtatgtacctttctttatatgatacaaaattcgatgtcttcggttgtcacatttctttgaagaccaaatgactttttgattgtcttaaaaacttatgaattgtttacaaaagtcggccgagtattacgtgaagaccgttttgatacgacatagacttggcacgagtaacaaaaatttgacaaatcaagtacattatatatatacgagaattgattgatttgttttcttcgtcaaattgactagtataaatcaatggaccattttggtaacgtataataaaagctgacctagtagactttgttcatgaaagagttaaagtctttagatataatgattttagttgtcttcgatggttgtgaacttttttggtgcaataaccggatgatcggacagacgcattgaatgattcccaactttcccggtttagtttctttcggtgttgaaataaattaatattgaaaatctttagaaagcagaagttgttggtaacgtatatatctttttctctggactaattcttgtttccaagaggcttaaagtatcgaggccacgacctgtcacacacaacacaatattccatacttctgcatcaattacgtaatctttctcttttttttttggctatttattttacttatcttcctagttcctactccctcatttctttgtcccactccattagttcttcctttcttcttaaaattttatttatttaaaaacgaaccttatgaggaaaaatatttagaaaattaaatccatagtatatcatttttcatccaacgtgcactaccacggctgtgactagtagtgatttttaaagcaagaatttcaaagggatatatttagttcttttaaaagttaaccattgaagttgaattttcttaagggaaaagaattgctttttcatttcgttttttttggaccagcgtaaaacaacagattctctttcttttggattttggagtggaatccactgcatatactggctgatttttccattttctttacaacattaaaatcgttttaataaatcgtccacagttaactaaaaattataaactcatacaattctctataaaatacatcctattttttctattatttatttaaaatattcccatagttcttagttgcttcaaatggtcaccatttacttaagaaatgaatttcatcatattcctctaactatcattttcagtacaacaaactatatatatattcaatagctgccacatacgaccatgatgttccaatataatttgtagaatatgattcagaagaggtttggttcatatcaatattaagtctatacactggttaaagcccaaaaattgagaattcaaggttgtaaagctataaccttgtatacattgggcctagcagtccttgatttcactaatatgggcccattatcaaggcttactcgtctgaatagtgaattctaccgaatgttgggctttttatttccaactaatgttaggtttcaaaagagaaaagtgcatgaaaatcagtaaatcacgtttgtttggggtttcagaggaccgacactctttctaaacataacaatattcgagcaaattacatgaacttggattttggccattaaatttgatggtgtggttgactctcacaaaatttctacacagaaaacatgatcaaaatatgcttatcgtcgtcagatatatcaatattccaggcctaatttgtgagcaaaatgatgcgaagacgaggattgtgatgtttaatccgaattatcatgtaccattgtatataatttacctctagatgattttcagtggtaataaggtatatttaataaatgtaaatcggaagtttagcctttttaattaaaaatgcaaacaacacaaggaacacatggatgaagcaaacataaccaattatgagtgactagtagatagtagatatacaaacacatatttccgatttcccaagtaatatgaatctttgtgatgacaaaatcgttacatcattcacgttgtattaagttacaactaaccatgcagtttttattttacaagtaaatgtgatttgttttctagtatacccatatagattatactcctttgctattttaaggtgatatgaaagctctcccagagactagtgaattagttatggatggttgccccgcaaaataatatcgttttgtaatttaatatggactaatggttatctcatgacatatactaattaaaattgttaaactatagaagttatttaaaaagaagattgaaaatgagatgtggttttcattgagttattatttattaattttgaaaccataaaaaaatgatgttgaaacttgaaacatttatatttgttgcataaacaattaaacatgtcaagggtggtccaccaatacgtaacatgaacagtccgtcttaagagattccaacttccaatcccaaaatattcatcaattctgtaattgtttagtcagatttgaaataattgcgaatagagatatcttaaaaacttcattcaatagcaaacatgaattgtataacaaatgtctatttcatctatctgtcaatgtttaattattgccacactggtgatgcatatataacaaaagcgacctatatagattaaagtccttttataacaggttcatatacacccagtaaccaccaatacacatacacgtacatatatatattattgccgtttgagagtcaaactcatacacgactcactgaaggttgatacaaaatatcagcatataataactaaatatatggtcgaaaactacttatagagtttggtaggtcgtattttcaacattttaaactcaatttttatgttgacaataacaaaaaaagaaaatcatatcatatatctcaacatatagagtctaacttttttcgccaaaccaaaagaaagaagaaaccaagaaacaagaaaaatg

SEQ ID NO: 4275 - DNA, 3000 bp, Unknown
  misc_feature (1)..( 3000): cDNA_ID_2108207_gDNA_ID_1620694_Annot_ID_164884 3000 nt of promoter + ATG
taatccatacagatcatcccacgtgtatcgtatctggtaacggctagaacgatccataaacatctgtctttttccatccttttaaataatggtcctcgtttctcgcaattcctttttccgattccccctccaacggtcactacatttgattaccgtatgctttacggttttttttttttttttacatcaattttatggttcaattatgccttgagaatgtgcttttgattttgattagcagtatatttgtttaattagtagtgaatgcgtttatttttgtggattgttttttaattagttatcttgtcatttagtacacatatggtaaactaagcatgtttatgtacttaactaggttttaacccgcggtttaccgcagacaatcaatttatttggttcttatactaaatatttgaagaaatttgatattttaaacttataaatataaatttctagtgattagtgaagaatcgtaataaatgatttggatattattgattattgatttcgtgattgaatatactgtttttagagatgaaatgtgattatattttgatttcaaaaacgatatagattccttatttttgttgaatagcttagattaaagagaattaattttattaaacggtttagattgaattggatcatataaagcttagaaaattgttaagaccaaactacccttaataattttgaatagcaaagaataaaatccaaaattaaaatcaaaattgagaccaaattatacaaaatttcaatttgtacttctcttttaataataaagggattagcttaattattcttaaaatatcttaatattatttacactaaagaaaacatagaacatactcctttctattcattgtttttaggctatattgtaccttcatatttcatttttgaacttttcagttcagaaaatagtacatacaataactttgaaaagattcaatattaatgctgtcttagattagcactttttaaaagtatgtataaaacaagtaatcgatcatccttaagtttggtgttccctaatattcatattttagctggttgcaaacaccagctatattcgtttatggattttggtctaattattattaaaaaaacaaaaattaaccataaggtgagtttgttttgtgtatccttcttatttttaaccaagaaggaacttacatcaagattagttgaaattttcaaaaagacgacacgtgctgagaaaaatatgttcttgatccttgacattggaaatggaagtagtagctagctacttaatcgttgtatatctttaagagttgggctagaccagataattcagcccattttgatgtattagcgacaattcttttgatagcatttttgggctaagtctattcgtaatgggtttcaatcatctcattgtttcttcagcacatttttgagcctgcttattttttttcagaacgtatggaacaagatcacatgtttaattatgtatggtcgacatgtttcaatccgttggctttaaggtcttaataacgtacgatacattagttttgttttgttgcatgtaacctgtgtggttgtacttgtacgttcactacttgttggtttctttataaccaatagaattcggcaattcagtaccatgtatatgtttttcttaaccgaccatatattccataattcacatgccatctcttaaaagaaatacaagcactcatagccataggtggtggatgaagaaatatgtgtgttaaaaatttcttctattgtccaaaatcaacagcttgatcagatgaacttctgagcgagccagagggttccaaggtgggccattgggaacttgataaatctcatctcgtcacatctcccaaggggcaaaacaaaaacttaagaaataatcaattcaaaaggcatattcttcccgcttggggcgttcacactatctcatcacacgtggaatccaacaaagcagccacgtcacccaagaccatactaaaccacttaaaaaggttttgctaaaaggccaaaaaaaccggataaggaaccacagcccaatgacgtcctcatttattttattttcattgaattgcctaatatttatttcttttgtcgtccttcttccttgcttttgttaccatataaaaaaaactttttttttaagtacagaatatatatatgacaatatcgcaatcgtgggttcagcttatcttaagttctcgggaacctaaattcggatcgcattgacgatgttgatctatcaaaccacagccagttagtttataaggttcaaaattaatcgtttatcaaaaactacatgtaagttggctttgttcaacgaatttttagaaaaacgtaaaacgatataatttggcaggaccaaataaaaaccaatgccatggatttcatcttctattacatcatagaatagattcaattctgtaagggttgactttgttttaatcattattctacattctctaataataatagattttgttaaacttgttaatgtgatgtaaatcaaaagtacagttatttgctatgagtgtctgagattaaaagatagtcgcactaattcatttagattagtttataatccaattaacaaaataaaaatgagcgaataaaacaaattaaaactactttttctgaatttgaataaatagtaggtaaccggtggttggattaagaaaaatatatatgaaacaattcgtggtactgtgatcataaataatacttgacgttcctgaatttctcgccacaatatataacatttgtttttttctttccagtatttatcacatgaaaaaactaaaataaagaaaaaacgataacctttaaaaattcccccctcaaaataaagaaaaaaataaaaagctaaaaaggcagtaatacacacgccatttataaataaggcaagtgaatataaaatagtgcctcatcatcatcagtaccatctcctcgttttgataaaaatctctgaatctctccaagctctcttctcatcaaaccatg

SEQ ID NO: 4276 - DNA, 3000 bp, Unknown; identical to SEQ ID NO: 4274
  misc_feature (1)..( 3000): cDNA_ID_1022876_gDNA_ID_1620694_Annot_ID_164878 3000 nt of promoter + ATG

SEQ ID NO: 4277 - DNA, 3000 bp, Unknown; identical to SEQ ID NO: 4273
  misc_feature (1)..( 3000): cDNA_ID_1823586_gDNA_ID_1620694_Annot_ID_164877 3000 nt of promoter + ATG

SEQ ID NO: 4278 - DNA, 3000 bp, Unknown; identical to SEQ ID NO: 3093
  misc_feature (1)..( 3000): cDNA_ID_2051170_gDNA_ID_1620694_Annot_ID_164875 3000 nt of promoter + ATG

SEQ ID NO: 4279 - DNA, 3000 bp, Unknown; identical to SEQ ID NO: 4271
  misc_feature (1)..( 3000): cDNA_ID_3072940_gDNA_ID_1620694_Annot_ID_164873 3000 nt of promoter + ATG

SEQ ID NO: 4280 - DNA, 3000 bp, Unknown; identical to SEQ ID NO: 3095
  misc_feature (1)..( 3000): cDNA_ID_1823602_gDNA_ID_1620694_Annot_ID_164871 3000 nt of promoter + ATG

SEQ ID NO: 4281 - DNA, 3000 bp, Unknown; identical to SEQ ID NO: 3096
  misc_feature (1)..( 3000): cDNA_ID_2132959_gDNA_ID_1620694_Annot_ID_164869 3000 nt of promoter + ATG

SEQ ID NO: 4282 - DNA, 3000 bp, Unknown; identical to SEQ ID NO: 4268
  misc_feature (1)..( 3000): cDNA_ID_1823608_gDNA_ID_1620694_Annot_ID_164868 3000 nt of promoter + ATG

SEQ ID NO: 4283 - DNA, 3000 bp, Unknown; identical to SEQ ID NO: 4267
  misc_feature (1)..( 3000): cDNA_ID_3593514_gDNA_ID_1620694_Annot_ID_164867 3000 nt of promoter + ATG

SEQ ID NO: 4284 - DNA, 3000 bp, Unknown
  misc_feature (1)..( 3000): cDNA_ID_1823582_gDNA_ID_1620694_Annot_ID_48646 3000 nt of promoter + ATG
cccctattttacagtgatttatgaccactttgtttaatttcctaacgtctttacatcactaaactaatcaaagctacataagaaaatattaaattatataatgatgtggtcattcgtgtaattagcattcaaagatggttggtacgaatcgatgatgtttgataaagtgtatattagcaataactaatggtggctaaaaactcgtattaatactaagtttgtagaccgtatctcacaaaaatgtgaacttagctaggtctaatcagaatattaatgcacaattgttttttttttccttcgcagacaatatgcatgaagatatgtttaaacaggtagttttcatttagttcacaccacaccaccacaacaatgatctgttctagctagcgttggagatatgtgcaaactgaaagtttttaatttaagggttgattttttttatattttttttctttctatccatccgcgaagattcgaaagataccccgacctattggtgcttggagaactagcggcgtccatatatcgtccaaagagtcttgcatcacgtgtacttagtaatcagtattccctaatgtaatgaaagtgagataagtatgaaacaattcgtgactattgctaagtaagcattgggttatggatatgtggaagatgcaatgcatcgaaaacgtgtcggtagatacgaaaggtgtgtcaaatttatttattttttgcgggggaaacatagtagcacatccacctcccaagaaacaagcgacacacactcggatgataacaataatagccaacaagtgtctctaagtcatcatccattatatatccaaagcatataaaatacttgttagatagagacatataatagttgaaggatatcacatggtttgcaccattcctctagcatgaattatgacattattcataaatatggacccttctctccatgttttcttttcttaccgcccaaaagccaacccattaaattaacaaatagaaatacaaccatataataaaccgttgcactttccttctgtactatgatgattgatgaaggtgctaaaaacaaccatattatattaatacgtacggtccaacgattttcattaaacttcttgctttagcaccgtttcctcctttttctttgatccaaatcataatgcacaactaacgacacacacaatcataatggtaaattggtaagttaagtgtgtatgactattagaatgaagcgtaaccacaagaatgagtatcgcgcggaatatcgttgtagactaaaaccctacgcgtgacccaaagttctaaatctcactaaatattgactaagagataactaattcttattaaaaaaaaaaaaaaaaaaaaaaaaaaaaaaaaaatcttataaacgttattgtcaacataacgttatcattaatcctttttgaaacaattggaatctagacatttttagaaaaagtcctaaattaaatcataattttttgtgaaaaaagaaaaaataaataaacccgatttattcatacatatcgttacaagatagtttgacgtttttttctctctaaagtaatatgatggtataaaattaggtttttaacagttgtactaaaaataggaaaaatccattttctgtttaatttgccacaaactcacaataggagaacatcttataatataaattacttaagccatatttgaccagaaattttcagtggtcaactaaagcgttttggagtagtatatgatttcattgaataacaatgaacttaaatctggtgcgttttaattcattccagttcaccagacattttataaaagtcaatgtttctgaaatttgccatattgattatacacactttcttgaaaaatgcaaagaagaatccagataaaataaaagttacactgtaatatcctaattttattaatataacagcaagcaatatatactttttaaaaatatacatgtctatgtttgtctaaatgtattaatttcaaaggcagtatgatgagctgtaaattaaaatagtaatacaacttttgtttttttcccagttttgtttcttgtgcacatctaaaattatgcctatggttgtggataacaacaaaaaaaaaagctttaacgtcaataatttgtaacaatggtgttatatggctgttttcgtttccttataatggcgtaaccttttgtagaacaaaataataggtaaactaagccattgtttgactaagaaaattacaattacttttcataattagaaaaagaacaaaaaaagtggtaaaaaatagaaccaaaaatcaaataattcaggcgttccagatgacccaactgaccaattcagtaaacaataaatttcaaatcagagaaaatagaagtaaataaccaaaaaataggaaaaagaaaagaaaaaatctgtgccctgccataattccacttggacttgtataatttttacacattaccgaaaaagccgaaaagaaataattaaataaaataaaaactagtactactaataaaagacaaaacggctctggcaaaatctctgaccttggaaagataaaagatagttcagtcacataatcagcatgtgtacgtcgtttctttagtgcttaatattataaattaagaatacttaaaaccaaatctttatataatattgattgtcagataaacattaacccaacaaagtctctctccctctcctattcaactttttcagttactttactccgttcatcttttatttttcttttcgtcgattctcatcaatactacaaaaatatatacttctatatatcgtgcagaggttacatgcattgtacaattttgttgtcccgagaaacaagcggatcagagacaaaatcagagtcggtttcctgctttttgattcctctttattaatcagcaaagatcgattccacttctcctctctctctctctctctgttctttaatttagagagaaaaaataagcattcttccttctctgttttcgagcgggaaattctggag

SEQ ID NO: 4285 - DNA, 3000 bp, Unknown; identical to SEQ ID NO: 4275
  misc_feature (1)..( 3000): cDNA_ID_2108207_gDNA_ID_1620694_Annot_ID_48648 3000 nt of promoter + ATG

SEQ ID NO: 4286 - DNA, 739 bp, Unknown
  misc_feature (1)..( 739): cDNA_ID_1823660_gDNA_ID_1620695_Annot_ID_48654 3000 nt of promoter + ATG
tgcaataaagaaagacaattagttgtaagttgaaactaaacctacatgttgtctcacctactacaatccgatttgtttcgaatgttcaaagatagactaaaaaaaaaaaaatcctaatctacatgaatcgacaatcgatctccgaggatcgtgttaataagccaaaacgaaagaaagaagaataatttgtttgttgggttggcaattattttaatacagattaagaaatagcaagagatttacatttccatgatttaagtgtgtgatcgttttctatcattgtttagtgcgttataattgatgataccaaatgaaaataagaaaaaaatcgtagacgagttgcttgactcccaacttaaatctccaatatgtttactctgacaagtgacaacaaaccttcaacaacgaaacaacctagaaaacatatctgaccttattcaactacgtgacgatagagccacagaactgaccatttcgattaaaaaaaaaagtaatgatgtggttgtaaatttagtaagaggaacttgatgtgagactagtatcaacaccattcaagtgaagcctcgacaaaactttgtcgtttcatcaaactcagcaaagaagcaaatgaaagcctaatgcaggcccaagaagcccacaactcaagtttggaagcaacggtcttctgagacaaagacagaaactccagaagcttcaccaagtcacgacaagaacagagctggcacaacttcacctaatg

SEQ ID NO: 4287 - DNA, 3000 bp, Unknown
  misc_feature (1)..( 3000): cDNA_ID_1823648_gDNA_ID_1620695_Annot_ID_48659 3000 nt of promoter + ATG
ttataagcttcatgggcttaggctaggattaacattcatgggtataatttaaagttgaaaaagttgggtcataaagaggtaacacaattaaactctataaaagattatctatgaatataacatctaaagtttgtttatattattatagctcatactttttatgttatcttcgcagcttgtatcacatcattttcgtactttcaaatgttggaaaatcattttttactggcctctaatatttgtcatcaattttgactgtcgtttcactaaacatttcaaatcattaaagcaagtacctttcgagaccattattaacggttttgattcattagaaggatatattaggagaagactctaaatttgtatctatgtatcggaaaaacaaagtgcattgtaatcaaaatgtcatgtaagttaatatccaagagggataaggtgaaattggggtcatagatcattagaacttttaagcccattattggatagtgtccgccaataatcataaccgatgggtccatgcacgtagcaaacacacgcttcacccacaaccacaacaacagccactaccactaccacaaccacaaccacaaccagaacagtatagtagctagcaactcttttccttagaaaaaaatagataatacgtgtcttttagttgatttcctctcatgcatgatccagttccaggctatttagggttttgttggatcccatgcacttaattagttatctactgaaatcacaaattttcaaggttatatataaatttaatcccacattagaaaatgacacaatcttattactaaacaatacacatgatgagctaattcattcatttatatttttatatttgatcaaattttattcattacatataccaagacaattttataaataaatgaaatcgcataagcgtgaaattatgctgattagatcttggcccaacataaaacaacaaccactaattaaagagcccatatactactatatatatatggttcattttatatatgattgatatatagtgagatcaaatagattatcctactgagaagtgtgacagttcatcataccaaaaaacgatattgctggttttggtaatgagaagctttctagaaacgtggtgaagagtagtgtaggagagtaaaataatttaaggatgggttagttcgatgattccatgaacaaaattattgctttcttgcctgggttagtacccttttattattatggttgagaataataaaggataaattatacagaatatgttgcaaaaaggaatggaatataatatgaagaagaaaggtagagaaacttttgttagaaaccaaagaaggtggggaacaaaattaagaccacaaagtgaaaattttagagttgtaaagatgtagtgatgtacatcgtaataactttaggcactgggacacatatatagggtaaattaatgttatacttaaaaggaaaagcttgttcactaaataaaaggggaggttcagaattttagttagacacattccactgcatccattgaattatgtaacgaggaatttggtaaatgggttttggcttggcgtaggaagtcacaagaaaaaagaggtggcaaacaatgtcactgaatcgtaatatattcatcgcaaatgtattgacgaggatatttgtagcttatgatggttgtataatcaaacgtaaacatatgttggtaattaaatggtaatcgatgacgataatatttgttgcttcttcttcgaaatatcaatggcaaaaaacacaacgccgttagattatggactaatattaaagttgaatatcaaactcataaatgggaaaagctttaaagagtttgccgtgggccaacggaatgttgggaagagctcttgggctgtctacttagtgctatcacttggaggaagaagatgaagatgatgataataagaaagaacacatacttttattttattttcttttaaaacgaatgttttctaaattcggttgtgaagataagattccctttatgttgaatcgtggtgtgtgttgcagtcatagattcttagtatgaatgaatatactataggtttggtggttatatattgtggatttgtgtgtgcgtatgagtgggtataaaagataagggtcttttctaggtgtccccatgaaagagatttgtgtctatgtatgtaagacccaacttttcttccttttcattcaccagacatcacccaccacttcatcattgtgcacatttacgttgtatatatgcatgtatgactgtgtatacacataacacatgtaccatgtatgtatatggttatcaatgtgaatcaaagtgtcacacaacaggacgaaagtgagtataaattgatcggatttgacttatttaaagatcagtgtatcttgagctggttttattaagattaatatttgattgattatagggtatgataaacttttaggaatatttgaggttgtaacaaaactttcagaaaattttagtggctaatgatgtgtcacacacaacatgattcgtttaaagtattgaataaagtgtgggtttatggtccggcccagtaagcccagactatagcccatttagttaaagtggcacatttacgatgtgtgtgagagccttctcatctgatgtggaagaaggacaagacaaaacaaaacaaacacaacactgagcccttccgctggaaatgactattgcgaggttttttttttcctcttcccgtcttaatgaatgatgttgcactatgattgtattacactaaatcgccaaaaatcaaagcttaccaaatataataatatgtcaaaaagataaaaagttgtctgtctagtagttttccaattgtcaaaaaatatgaaaatattgacaccgtatcaaaggaaacaaacaaaacacaatatttaaaatagcacagacaaataatttaataacttatcgttacaagccaaaattacactgtaaatttggcatttcgagaagaagaagagggagtgatg

SEQ ID NO: 4288 - DNA, 3000 bp, Unknown
  misc_feature (1)..( 3000): cDNA_ID_1823644_gDNA_ID_1620695_Annot_ID_48660 3000 nt of promoter + ATG
aaatatttatgtgtaaaactaattatatgcatggtttcatttttttcattggatgtgaggaaacagaatgatgtcgaggaaagaatttactaatgggataccaattaataaaacaaaaaggattttacttatatttttcatcacggtgctcgtatttttcatgtagttctgaagaaaagagcatgaccatctcttatgatcaagattcaagattgctcaagatgagtgactaattagatttaatataagatttgaggaagaaaaactaattttgaaaacgttaggaaaaaaaaagaaagaagaagctaaaaaccaccggagatgatattaaaagttaatggtcaaaggacttaaatgactgtcggtgtctcccgccgacgccacaggcttccgtatattattattagcacaacagaaactgtgaaagagtgtggagagtacggaatttttttcttttcagaatatcgaattccaaaaacgtcctttgtcaacgttgaatattacacatctgcatccttagtgcacctgctcacacctgattttcggtggagggaacatccgcgtggcatgttgggataatctgtgtgtatgaactaaattcttaaaataaagagaatttgtaatagatgatgaccacaaaagtttcaatatttttggttagtttggatacagtcagaagaattagaggagtaaaaccaggaactgtcaatattttcaagaatgatcatcaaagattcaaaggttttttctattaaaaagttatgtattgtacaaacagagtatacacaattttgtcattttcctacactattactgcttttaatcaatgataatttacctttttcttctcctccataccacaaaaacctaatgtatggaatttacttaaaccacatttataatgttttccaaatatattattaaaaacaaatgttttccaaatgttgtaaagctaaaagatgtgcgacagttgaaactactgatatcgggaaattaaagtacaaattttctatatcaaacataatatacaaccatagagccattagtcaagcaacttaccaaagtatttgactcgtgaatacaaagaagaaattaagagtcttacgctatgtagacgttacgtacatgttaatctgttaggcaccgattttaaaccatatcagattacagcacacatcagccattagattctacataatctcaattcaattatatgtttaataaacaattacctgaagttttgagaattcggtttctctatatatagaaacaccattcttaggtatacttttctagattaatgttcgtaaacaacataacgaagcatgtccaaaacaaaacactaattagcaaaacaaaaatgctaacccatcatcaaatggctattttcacgattagtaagtttcagttacgttctagacactaaacaatatgaataatattttaatatgacaattatctaattaggctggtgagcttatctagagtttcacgttgaatgtgtttaaatacaaatctagaaaaaaagaaagaaagaagctgaaatatccaaaaatatgcgttcacacccaacaaaatgttcaaatctactcaatttaatttacatggatgatgagaaaagcaattcaaaaaaaaaaaaaaaaatcagttcaaaataaacaacgtgaaggcaccaaactagtagaaataaaataaagatcaacaatccgtacacgtgtcaacctatcaagtttggagtccagctgtctggtccccccaatatacacacacctctaaaaacttattctcgcggagatgacactgatttggccaaaataccgcgagaagttaccaatgaacgccgtttttaagagatggttttcaattttttttgtttagcttaggctattaaaaaggtttaaagttggttgccggtgatttgtgggacaacccgtacgtgattactgcggattaaccggatattgccggtttggtagtgctggtcaaccggattataccccgttataaaatccgtgcccctatcgatcgcattccctgttgttatggacggacacaccccttatttaattatcgtattaagtctgattgagatagttaattacttatattctccatgatttagattactgtttcgaataatttagattatgtagtatggaggaatgatttgcgtattttacactgagtattgcatcaaacattattgtggaattcaaattttaaaccctatgtatttaacttaattaaacattaaatcattatgaaaccaatatatatatattttagtaatatatataagttaattactccttatcatctgacgaccaaatgtctcgaatataatctgttgtcatactcgtaccaactacactgcaattataatggatacttgatgaataataacaattcaacaagtgagatttttttcatttgtaaatgcaaacaaagtaacaaactggtggttcattacaaaatcttcacaattatatatatgcttaagtcagctcaattatatgctaagtctaaaatcttcatagcaattatagtcacatggaattctctattaaagtataagaagaaagaaatggtatgaatgaagaatgatatagttagagaagtcattattattagagtagaccatctttatccatccggtacaggttttgaccaatacggaaagagagaaaaagagtcgcaatccttttttttttgttacgaaattaaaattatataattagtgcaatttaaagcacgaatagtaagcgttcacttaattcctcgattaactgattagcatattacgattatacccttcatcttccttattgtgtctctactctctactttcaccttcctttccttccattctcctctatatatatcgaccctttctctttctttcttcctcacacactaaaagcttgcaaaaaccataagcttatctacttactcatctctctcacaaatcattttctcagacttctctctttctcttaaacc

SEQ ID NO: 4289 - DNA, 3000 bp, Unknown
  misc_feature (1)..( 3000): cDNA_ID_1823640_gDNA_ID_1620695_Annot_ID_48661 3000 nt of promoter + ATG
gtatataaacaatgatgatagtcagttattttatttgtttaattactggaaatatagagaaaattgtttaagttaggttccatggaatatagtttaatatgtgtaaatgagagagacatggaagagaattgtaatgagttgctgtccagtatcttgcgtcgtgatattatttgctcttaatgtcaaccacaacgtgcctagagattatatatttgtagttttatacgtgttttataggacaaatggtggaatgattcaatggagatgcaaagttacttgtcaattggaactaaataatgcaatttaactaagatataaagaaaacatcaaacaaagtttagtggggagcttctcaatctaaagaaagtaagctcagaaagacagaaaccattgaatattcaaaacaaaaaaacaatccacagcttagcattttgttgaccgactcatataaaactaaaatgttgcgacgggctttctcgaccagacttagttaaaatccgccacgatcagtgttgctgattcagcatgtgggccggcccatggttatctgttagtaaagcttccacgtaatctaagaaaacaaaaaatgagccgcatggattaagaagataatgtacactttcaaatatatgatgaattattttcaattttgtgacaataaaataggttattatcaattctgagacagtttaaatgttacgataccttttatctgtatcttagataaacatgattcaacagatttaatatttcaatagcaaattttatttatgagaggttttaataagagcacaatggtttgtcagcattaagaagacaagctcattaagaggcaagagtaagaccaaagatatcattagccaggaatcatgatttaatgttcgttctttgaacttgactctttttttttttttaatgcattgaataagcattattgaactgcgattttcggttaaatagtacatgaatcatgaaataatgacaatggttatccaataagcaagattttggtttgattatatataaattaaaatagagacatgcaattagagaacgggcagaccaagtagtagaatattatgtcgctgcatttagttttgctgacgatgtctttgaataagggacaccaacatttgatttaatcaaataccatgcatagaaatgtcacataccaagttatagtaaatgttagtcaaacctttgatatttcgtttgtttgaagttgcaacttgcatgcaagtcataactcgaaagtcttttttttttgtttttttgggcacaactaagtcgaaagtctagaaaactgaatgtcatggataagttgatgcattccacagctatttaatttttcaaaactaactgagataaaaacatatttttgaagcaagttataacaaaacttaaactaattacacatttcgtgaactttgacaaaagtaatttgtagtagtaaatatcattaaacatacccatctccaaaaatcgaaatagtaactacaatctatactaaaaaaaactgtgtgatcaggcaaaaccagtatttgaataattccagagtaattttaagtcgagccgaccttaatctttaaagaaaaagaaagaaacatattttcgataatcaatcaaataaacaaactcaagtcacttgccgatgaaagtggtggaaatttcccataaataaacaaaggaacaaacaaacaactcctccatttccattactttactctttctatttcttaatataaacggacgattttaccctccatctctcgccgttttcacactatgagctttccacatccctttacgaagtgacgatattacccctaaaagcgaccttcctcgaagaaaccacataccaacaatctgagagattaatcgcaatttcccagacacgggaccttccctcattaatcttagctggcttccatggatgttccttctcagaaatcccaatttctcttcctttatattctcattcactcctcattctcctcctcaaatcaataacaacgataaaaaaacaaaccttccttaaccagaaccaaatttcagatttttaaacaacataagctctaatggcgtcaccaaagtcacccacaagaccaacccaacaaaacccacaacccaatttccacgattttcttcctaccatggccggaaacctaggcggtgaaggtctgatcggagagctatgcaacggcttcgagcttttgatggacagagagaaaggtgtcatcacgttcgagagtctccgacgtaacgctgcggcggttctgggtttaggagatttgactgatgaagatgtccggtgtatgattaaagaaggtgattttgactgcgacggtgcgttgaatcagatggagttttgtgtgttgatgtttaggcttagccctgatttgatggaagcgtcgcggtgtctcgtcacggaggtcattgaggaggagtttggcttcacgcgccggcattgacactggagagatttgggatcccttcctcttttatttaattcgattcatttgttacctttttcttaatttttccattaatgttaccattcacataattcttttaatcatagtacttgatactatttttacacttcagtttatatctttgatcagatgtgttgaacatatataaaataaagaaaaaaattcataaactagactggtgatgactgtatcacaatatcgatttgtagcacacacaaaaaaatcatcatccttaagcactatcaatgatgtgttgattataatgcttaatctttccatgaataaaaggagatatgttaattaggagctatctagtcaagcttttacaattaaggtggtttactggatcaaaaataagttaaggggcagaaatataaattaataagttttgggtcgttgactaaaaattctcgaagagctagctataacaacaatttggagctagattttctgcgaaaacaaaaatcagaaaagctttcagaggatcgagcgcacttcttcaatg

SEQ ID NO: 4290 - DNA, 3000 bp, Unknown
  misc_feature (1)..( 3000): cDNA_ID_1823636_gDNA_ID_1620695_Annot_ID_48663 3000 nt of promoter + ATG
tttttgttttcgcagaaaatctagctccaaattgttgttatagctagctcttcgagaatttttagtcaacgacccaaaacttattaatttatatttctgccccttaacttatttttgatccagtaaaccaccttaattgtaaaagcttgactagatagctcctaattaacatatctccttttattcatggaaagattaagcattataatcaacacatcattgatagtgcttaaggatgatgatttttttgtgtgtgctacaaatcgatattgtgatacagtcatcaccagtctagtttatgaatttttttctttattttatatatgttcaacacatctgatcaaagatataaactgaagtgtaaaaatagtatcaagtactatgattaaaagaattatgtgaatggtaacattaatggaaaaattaagaaaaaggtaacaaatgaatcgaattaaataaaagaggaagggatcccaaatctctccagtgtcaatgccggcgcgtgaagccaaactcctcctcaatgacctccgtgacgagacaccgcgacgcttccatcaaatcagggctaagcctaaacatcaacacacaaaactccatctgattcaacgcaccgtcgcagtcaaaatcaccttctttaatcatacaccggacatcttcatcagtcaaatctcctaaacccagaaccgccgcagcgttacgtcggagactctcgaacgtgatgacacctttctctctgtccatcaaaagctcgaagccgttgcatagctctccgatcagaccttcaccgcctaggtttccggccatggtaggaagaaaatcgtggaaattgggttgtgggttttgttgggttggtcttgtgggtgactttggtgacgccattagagcttatgttgtttaaaaatctgaaatttggttctggttaaggaaggtttgtttttttatcgttgttattgatttgaggaggagaatgaggagtgaatgagaatataaaggaagagaaattgggatttctgagaaggaacatccatggaagccagctaagattaatgagggaaggtcccgtgtctgggaaattgcgattaatctctcagattgttggtatgtggtttcttcgaggaaggtcgcttttaggggtaatatcgtcacttcgtaaagggatgtggaaagctcatagtgtgaaaacggcgagagatggagggtaaaatcgtccgtttatattaagaaatagaaagagtaaagtaatggaaatggaggagttgtttgtttgttcctttgtttatttatgggaaatttccaccactttcatcggcaagtgacttgagtttgtttatttgattgattatcgaaaatatgtttctttctttttctttaaagattaaggtcggctcgacttaaaattactctggaattattcaaatactggttttgcctgatcacacagttttttttagtatagattgtagttactatttcgatttttggagatgggtatgtttaatgatatttactactacaaattacttttgtcaaagttcacgaaatgtgtaattagtttaagttttgttataacttgcttcaaaaatatgtttttatctcagttagttttgaaaaattaaatagctgtggaatgcatcaacttatccatgacattcagttttctagactttcgacttagttgtgcccaaaaaaacaaaaaaaaaagactttcgagttatgacttgcatgcaagttgcaacttcaaacaaacgaaatatcaaaggtttgactaacatttactataacttggtatgtgacatttctatgcatggtatttgattaaatcaaatgttggtgtcccttattcaaagacatcgtcagcaaaactaaatgcagcgacataatattctactacttggtctgcccgttctctaattgcatgtctctattttaatttatatataatcaaaccaaaatcttgcttattggataaccattgtcattatttcatgattcatgtactatttaaccgaaaatcgcagttcaataatgcttattcaatgcattaaaaaaaaaaaaagagtcaagttcaaagaacgaacattaaatcatgattcctggctaatgatatctttggtcttactcttgcctcttaatgagcttgtcttcttaatgctgacaaaccattgtgctcttattaaaacctctcataaataaaatttgctattgaaatattaaatctgttgaatcatgtttatctaagatacagataaaaggtatcgtaacatttaaactgtctcagaattgataataacctattttattgtcacaaaattgaaaataattcatcatatatttgaaagtgtacattatcttcttaatccatgcggctcattttttgttttcttagattacgtggaagctttactaacagataaccatgggccggcccacatgctgaatcagcaacactgatcgtggcggattttaactaagtctggtcgagaaagcccgtcgcaacattttagttttatatgagtcggtcaacaaaatgctaagctgtggattgtttttttgttttgaatattcaatggtttctgtctttctgagcttactttctttagattgagaagctccccactaaactttgtttgatgttttctttatatcttagttaaattgcattatttagttccaattgacaagtaactttgcatctccattgaatcattccaccatttgtcctataaaacacgtataaaactacaaatatataatctctaggcacgttgtggttgacattaagagcaaataatatcacgacgcaagatactggacagcaactcattacaattctcttccatgtctctctcatttacacatattaaactatattccatggaacctaacttaaacaattttctctatatttccagtaattaaacaaataaaataactgactatcatcattgtttatataccaacttcgtttccacgctctctggttccacagaaccggcc

SEQ ID NO: 4291 - DNA, 2319 bp, Unknown
  misc_feature (1)..( 2319): cDNA_ID_2170409_gDNA_ID_1620695_Annot_ID_164931 3000 nt of promoter + ATG
gtctagtttattcttcctgttttattatgtgtcgactggtgtcaaaagaaacgtgttgattgtgaatttgtagacgccactctgtaaatttatttaaaataaactattttacttcacgttgagatcgggagttgccgggtttgtgtgccttatctgggcatcacccacacatgcattaagttgaaatgtatatgactttaaaaacttgaaacttcaaaaataaagaaaaagtctttagaagttacgtccacacgagcgtgatccacacttatcggtccttatattaggagcattgtaacttgctgcaataagctgctcattttattaatttgacttttggaaatcttaaaacaacaaaagtacattgtatatattaatagccggatccaagagtgtgatgcttaacatcttttgatgtcttaattaagttgggttttgaagtcagtgttcaaatagaagataacctttttatcaatttacgctaggctctaaatgattactgcgtatttggagcacaacaaaaatataatggttttcttaaggattagataatctggtacatgtaaataactgagttacaattactttctttagaatttggttcttaattaccttattcctctgttttattttgacaaacatataaattttatacgtacacaaaacataacaatatacttttaatatctgtaattcttagcaaactgagtttgtattggtaactactttctgcagacgagtccatagccggaagacgcaccacggctgcaatctaacaatgcgtatgtacttttgggcttgacagagccactcgcaacggcgggatcttcagagaacaaacaagttttgcaaacatgagagagcagagaagatgtcctaaagctatcttcacctcccaccactggcattacgactcctggtttagccggattcttaaaatcgggtctataagtgcgtcccaagattccatcgacttttggggacagattaataaacttgaactggacctcaaaatgggcaaaacagtcatctacaggtaatttgtagttgtggattctatcatcttctttggtcactggaaccacgttgaccatgatctcagctttgtctttgatagtcacgatcacactgttcttctctgtcaacctttcaatcttgatgtctttgtcggatgagtacctgataatatgcattaaaataatgagtgtttacatgaaaatctaaacgaatagacaaagatgacgtttaaaagttgaaacaatcgcaacctacaaaaatgatagggtaaaatttgagtttctatgattaccaagtggataaagtttcttgagggataattaaatcttggccgtcgatagtgaacttgaggtgatcaaggttgctgtcccaagtggcgactttggtggtctcaagggagaatttgtgggagttaaagaggaagccgagagcttggatccatgtaaagtctctagtgcggccagcaggtctatgaccagtgaacctagcattgatctgaaagtcagggtccgagacaatgctaaaatgttcattgctctttccatggaagtagaacacaattccatcaccacctatgaacctcggatctagacaaattgatccataggattcgcagttgggttttaccgctacaaaagatcatatccaaatcttaaaacatattttcaaaatctaaaattaatcaaaatgatgaaattctattaattctaattttaaactgcattggtatatcatcaattacaaaaagaaattggtggttaaataattaccccgacacacggcctcgcaaaggggtttaaagcaatcaacccaacaaattttgttctgagagttggggaacatttcggtagggcactcttcaggacagtcgatgtaccggagctggcatcggggagtcgcattgccaccacaataagtctgaccatgccaagccttgacatgcaagaaacatgaagctaccacaaaaattatcattagcaatgaggattttgggacctccatcctcgttttttttttttggctgaagtgtggaatctatatggattagagaagaaggtagaagattgtgttgggatgagttttcgattgttagtttataaggttgataaaagtcaaatatttttcttcggaagagggctacctttgatggtttctttttgttgagaacgcataaatttctaaaagtcgtatatacatccaaaaaatgaacatgggacaaatatactattacactcgatcttaatacatgtatataaaataaaataaaatcaatcggttttcatcaaactctaatgcaacatg

SEQ ID NO: 4292 - DNA, 3000 bp, Unknown; identical to SEQ ID NO: 3815
  misc_feature (1)..( 3000): cDNA_ID_1013540_gDNA_ID_1620695_Annot_ID_164930 3000 nt of promoter + ATG

SEQ ID NO: 4293 - DNA, 3000 bp, Unknown
  misc_feature (1)..( 3000): cDNA_ID_2050952_gDNA_ID_1620695_Annot_ID_164929 3000 nt of promoter + ATG
ctcaaccattctcaggtaataagatgattcttccattttttccaatttatctaagtatatctcttttcaaagcatttagcattgtgttttcttatcgtggaaaatgcagtcgtggatgataagtttgttaaggaaccagtgaaattctccaaccaaactactgcttttggacaagacttaaatgggttttcttctaaacctaagaaaggttacttacccaaatttttgttttacttctgcgcaaatcaagtaaccatatctcttgtatatcaaatggtgagattaagtgtttgaatgtgcaggaaagggttcctcaacagcagtcgtagacatagaagcagaagtaacagatgcagactgacaatgcgaaatagcgcatatatttcagtagaccgagccaaggtgatttggtagagacaacaaatcttgtgtaaagagctcattgttggatataaaagtagtatagaatacacgcccatatgtatatgtctttgacattgttatcacactttgatctttgaatgattgtttaatgttaaaagtagtagtctcgcatgtacgcctgtttctttgttacttgagatatgactttatgaagattggaaatttgttaagaaaaccagtcttgctaaagaatatattttaccatctggtcaaaatccataagcactcgtaacttctataggtcgataacttaaggagattacaaaattgcaaaagctctttctagaagaaaacataaacgttaacaagaccaaaatagacaaatcgaactatcaaaaatttataactgttttccttcttttgtagccttttaaccaaaatcactcgtacaatttcttggccgaaagagttctgagggttttggttttgtcctttgtagctttcgcttcatacttctcgctcaacgctatagctttagccacggctttcatcttccttgcattctttgttctcttcatgtttgtcctatagaaatcaagaaatatcatcacgattagaggacagcaaagggtaaagaggtccaaagaaaacataaagataagccagaatgcagcttgttctccgaacaaaatggtatacatatgttctaaaactatccaatataatcatcatgtcttggtacattccacttgaggaacgtaacaaaacgataaactagtttacaagcaaaacttatccaagattctctcatgcaccagcttgcatatgttttctaagtgttatgacagtagcaaactacatgactccaggtccaacctcaaaggaccagaacagagcaattcccaatggaaatttctaacgaacctgagacttaaataatgtaaacctagctagttgacaaattttcccgtgagaaccatgagtccataactggccaaaactactaatcgaatggctaacgagaaatcaatattacaaagctaaagccggtctcaaaacaattgttctatagaagagtacggaattgtcaaaaggcttacgggttacgagaaagagtagctagtttcaggtatccggtttccgtagctactttcaagtctccggtttccgtagctagtttcacgtcaccggtttccgtagtgtccatggctaacgaaaccaaagaagaaaaatcaaaagagtaaacacctgaatctcaaatcttaagaagatgaagaaacgaatatggaccaaaacgtgataaaagaattcgctattttactacctacagccacagctttcatattcattgcaatcttcgttctcttcatcggttttcctttcctcgtgctcatcctaaaaaaaagaaaatcatcaggattaaaggaaaacacaaagtaaggagatccaaagacaccataaaacaagtaaaaaatggagctttttctccgatcaaaatggtataatatatgttctaaagtaaccaaatttaagaatttcacgccttagtacataaatctaactaaatgataaaccaatttacaagaggaactagtcagagattctctcattcaacatgttgcataatggtctcctaagtgctaaactaatgtggaaacttgagctgcttgtaaaccattacagtagcaacctacatgactccaggtccaacctcataggacaagaacaaagcaattcacaatggaaagttggaaacttgtgaccaagagaaatacaactagagacttatgtaatataaacacaactagagactttcgaagaagcttacaagctacgagcacgagaagctagtttcccgtcaccggtctccgtagtgtccatcactaacaaaaatcaaacaagaatcttaagcagatgaagaaacgagtatgtaccaaaccaagacgcgaatttactttactaccttgaggagtagcttcagagacgctctgagattcagaaacgtccatggaagcttcctcgtctctattcttcttgttcctcttcttcgtcattgctgattaggtcagacgcacgacggcacgaagcaaagcaacgagagtagagagacggaaatcaatcgaattttagaatttcacctaatgctctgtgtcgggtcaatttactaattcgtgtctacttattgggcccatagttttggtaaaggcccatttatccactaatggataataaataaataacagcccgatgatgatcatcatctacctaattagagtttcattgtctctgtattttcaaattctctctcttatgttatgtattccgttggaatggcttctccttggcgaaattcagtttctttatttgaggtttgttgctgtttttagtgttattatttttagcccttcttgaatttctagttacatgttacaatgttgagagagattattattcaataaaattttcagattttctggtttcgagattcttctgctggcttttaaggaactcacattacgcgaaaatgggtattgattcaagacaaaaacgaaaaagtttgaatttttgttggtgggtggattttgaggtttatcggcgtctcctccgactacaatg

SEQ ID NO: 4294 - DNA, 3000 bp, Unknown; identical to SEQ ID NO: 3816
  misc_feature (1)..( 3000): cDNA_ID_2170393_gDNA_ID_1620695_Annot_ID_164926 3000 nt of promoter + ATG

SEQ ID NO: 4295 - DNA, 3000 bp, Unknown; identical to SEQ ID NO: 3817
  misc_feature (1)..( 3000): cDNA_ID_1823625_gDNA_ID_1620695_Annot_ID_164921 3000 nt of promoter + ATG

SEQ ID NO: 4296 - DNA, 3000 bp, Unknown
  misc_feature (1)..( 3000): cDNA_ID_1823629_gDNA_ID_1620695_Annot_ID_164918 3000 nt of promoter + ATG
gaagtcctgacgtgacatggctcagtcaacgcaaatactactcaacttagagacgtagctggcctgtatctaattgttttaaggcccatatacggcccacgcttccattttcttaagtatgcttttcgtagtggactgaaaccttttcttgtctattttctccaagtcgattccttgatgatcgatcgagatgaacctctatcgaacagaaacttcgtttctagaaattaaataagcctccatgaacaacagttttttcttttttttttcttttggctactagtattcaaaatctttaacatattcgcaaatttgttaataaaatgtatttcactaggaaaatagagattggaatttggaggcgaaaaaacattagtttacaacaatagtagttgaagccaagatccagagttttcctattgattttaagggtccggtttattgtaatttccgactattttttagtggaccaattatttggcaagtaagaagtttttttaaaaatatagaccatatgtgtataatagtgaccggatggcccaaactgacatgtaccaatagaaaatgaagacctaattttggcacatgaacgtaacaggtataagatcatcgttgtctctagcgagagagctctgtaatgcttacacttcaacgtggagactgtaagagatacgtgtaccaagaaacgtgaacgcaaagaaggaaaggaaagaaaaaacgtgtacaaaaagaggcccatgttaatcatcatcccttaggccttcttagcttatgcattgtctctttgctagtctttttctcacaatcgtgtcgatatattttaagggtttttaacgtgtggtttttctgtagggagcattagtagaattattgattggttttattcaaatatagaatatatatatatatatatatatacataaaacatttattgatggatcattgaatgttcatttgttcgttacaacattttcttattcaaattttatcgatccttgaatcaaagactttgacataagcgaaaccattggttacttctctaaattaaaatgaaatggtagtcttctaataaatatatatgtttaacaaacaaattggcataatttgatcgttctaaccaaagataggatttcgaatccaaattggatgggatgactagactattagatatttagatcgatcaccaatcaaacaaaataggcgtgcttttatattcattaagctggtttaaaacaacaaacaatccagcatttttaattttagtggttgaatagttaagttaataaaatcaaagataaacagaaaacaaacagctagtttttcaaattttggcgtttaattttatttggaatatttttttttaataaaacacacaaaaaaaaactcttttgacaaaaattggcatcaatactgcatatcgcatagccccatacatacatgatacatgccacatctcttaaaagatgagaacaagaagggatgtatttgaactattctgacaatattatatatacacacacattttgaatatgaatctctcttcttcaaagttctgacttgttccaaaattcttatccacacaatggaggaaaaaaagaaaaagaaaagccacaataatgagccataaccacaaccacacccactcaccagagactttgtgtatccgtggctctcatcatgacatctcatcttcctttgattcttcacaccaccgtcgatcgccacgtaggatttccccaaatcaaagcattccacataagcacaatcttttatgtggccagagtttaatcaacatttgtttttcttacaatgggttcgtgagagccacaaataaatcaactatacgattaaataaccatatctaacaaaaaaaaaaaacattaaacaattatagtccaagtaaacaaatactcgcctactatgtaccatattagaaagttttttattctcccccaataccgatatattattttgtaatttaaaaattcattgttatcttatcctcgcaagaaacacagatgttttggatcagtttgggaagcgaagaagtatgggagagaagtaaaaaacaaaacaagtggtttataaaaaaagagggaaagataattgaacaaagatacgtggggcccattaaacttgtgttatggtccagacaaatcccaggtgggctcacgtggctacgaagcccattgagaacctgattcgtccacgtaggacgggacagaatctcgctctcctccttccccggctgagatctcgccacgtcatcgactaaataaatctctcccaaaaaaatatctcgaaactgaaccatgagtttgtcgccacgtacaaacggggtttggctttggcccatacgcattaataactggttttcaaaaatcatttaaacttatttatcctaataacgcataattaatgtgttttacttaaactgtaatgattctaagtagaaaatgtgaaacagtattttttatccacaagaaaaaataaaacacaaggataaagctaaaaacaataaagaaaacattactgactcaagtaatttaaataattgcagcagatatagatctgataattatccaaacaaaaatctcaaataaaggttaaagtgataaacccatctctaaagcaaaaagatttttaagttgaaccaatccttaattgattaaatactatacgttattacaaagttaaattgaaatgaaatggatactaaccacagaataaaaaaaaaaggaaggtgctatataaaatagagtcattgtgaaaccaaagaagagaaatagattttttagcagaaggcagaaaaagacgaaactagcctccaaagaattgttgaatcacagaaaactcgccacgaaaaatatcccaaatcctgcaacttgcactttcctattcttcttcttctttccttatctctccaaggaaccaaagcatagacacaaaacgaacaaccacagaaacttgaaagagagaaagagtttgattttgattaaa

SEQ ID NO: 4297 - DNA, 3000 bp, Unknown; identical to SEQ ID NO: 4289
  misc_feature (1)..( 3000): cDNA_ID_3072959_gDNA_ID_1620695_Annot_ID_164913 3000 nt of promoter + ATG

SEQ ID NO: 4298 - DNA, 3000 bp, Unknown; identical to SEQ ID NO: 4288
  misc_feature (1)..( 3000): cDNA_ID_1823644_gDNA_ID_1620695_Annot_ID_164912 3000 nt of promoter + ATG

SEQ ID NO: 4299 - DNA, 3000 bp, Unknown; identical to SEQ ID NO: 3813
  misc_feature (1)..( 3000): cDNA_ID_2050942_gDNA_ID_1620695_Annot_ID_164932 3000 nt of promoter + ATG

SEQ ID NO: 4300 - DNA, 3000 bp, Unknown
  misc_feature (1)..( 3000): cDNA_ID_1823632_gDNA_ID_1620695_Annot_ID_48664 3000 nt of promoter + ATG
ttattttttcttgtggataaaaaatactgtttcacattttctacttagaatcattacagtttaagtaaaacacattaattatgcgttattaggataaataagtttaaatgatttttgaaaaccagttattaatgcgtatgggccaaagccaaaccccgtttgtacgtggcgacaaactcatggttcagtttcgagatatttttttgggagagatttatttagtcgatgacgtggcgagatctcagccggggaaggaggagagcgagattctgtcccgtcctacgtggacgaatcaggttctcaatgggcttcgtagccacgtgagcccacctgggatttgtctggaccataacacaagtttaatgggccccacgtatctttgttcaattatctttccctctttttttataaaccacttgttttgttttttacttctctcccatacttcttcgcttcccaaactgatccaaaacatctgtgtttcttgcgaggataagataacaatgaatttttaaattacaaaataatatatcggtattgggggagaataaaaaactttctaatatggtacatagtaggcgagtatttgtttacttggactataattgtttaatgttttttttttttgttagatatggttatttaatcgtatagttgatttatttgtggctctcacgaacccattgtaagaaaaacaaatgttgattaaactctggccacataaaagattgtgcttatgtggaatgctttgatttggggaaatcctacgtggcgatcgacggtggtgtgaagaatcaaaggaagatgagatgtcatgatgagagccacggatacacaaagtctctggtgagtgggtgtggttgtggttatggctcattattgtggcttttctttttctttttttcctccattgtgtggataagaattttggaacaagtcagaactttgaagaagagagattcatattcaaaatgtgtgtgtatatataatattgtcagaatagttcaaatacatcccttcttgttctcatcttttaagagatgtggcatgtatcatgtatgtatggggctatgcgatatgcagtattgatgccaatttttgtcaaaagagtttttttttgtgtgttttattaaaaaaaaatattccaaataaaattaaacgccaaaatttgaaaaactagctgtttgttttctgtttatctttgattttattaacttaactattcaaccactaaaattaaaaatgctggattgtttgttgttttaaaccagcttaatgaatataaaagcacgcctattttgtttgattggtgatcgatctaaatatctaatagtctagtcatcccatccaatttggattcgaaatcctatctttggttagaacgatcaaattatgccaatttgtttgttaaacatatatatttattagaagactaccatttcattttaatttagagaagtaaccaatggtttcgcttatgtcaaagtctttgattcaaggatcgataaaatttgaataagaaaatgttgtaacgaacaaatgaacattcaatgatccatcaataaatgttttatgtatatatatatatatatatatattctatatttgaataaaaccaatcaataattctactaatgctccctacagaaaaaccacacgttaaaaacccttaaaatatatcgacacgattgtgagaaaaagactagcaaagagacaatgcataagctaagaaggcctaagggatgatgattaacatgggcctctttttgtacacgttttttctttcctttccttctttgcgttcacgtttcttggtacacgtatctcttacagtctccacgttgaagtgtaagcattacagagctctctcgctagagacaacgatgatcttatacctgttacgttcatgtgccaaaattaggtcttcattttctattggtacatgtcagtttgggccatccggtcactattatacacatatggtctatatttttaaaaaaacttcttacttgccaaataattggtccactaaaaaatagtcggaaattacaataaaccggacccttaaaatcaataggaaaactctggatcttggcttcaactactattgttgtaaactaatgttttttcgcctccaaattccaatctctattttcctagtgaaatacattttattaacaaatttgcgaatatgttaaagattttgaatactagtagccaaaagaaaaaaaaaagaaaaaactgttgttcatggaggcttatttaatttctagaaacgaagtttctgttcgatagaggttcatctcgatcgatcatcaaggaatcgacttggagaaaatagacaagaaaaggtttcagtccactacgaaaagcatacttaagaaaatggaagcgtgggccgtatatgggccttaaaacaattagatacaggccagctacgtctctaagttgagtagtatttgcgttgactgagccatgtcacgtcaggacttcacctgtgggtcgccaacgattggctatatccaccagatcaataatgcaatgcatgaattttacttgaatcgtcgcaatgtacatatcaaactatcaatgatctgattctgaccactcgctcccttatatggtgactaagtcaaggaagattagccacatctatttattgcttttgtccttgctaggcttatacactcttaatctgagaaacttccaacatggccatcaaaacttaatgaggaatcatatcttgtctctggcgttcaaacaaaacaccctaataattttttttttcattctgaagaaaagttttatcattgaagttcaacatccacagacaatctgcattgaatttatcttgacttgtcgcttatgccaagttgggttgtacgaagttgacaaaaaaaataaaaaaatctgtatgtgattttcataatgtgtattataatgattgctttatttagtaaagagtcacaaaactagaaagaaaaaaggtttcattcgatg

SEQ ID NO: 4301 - DNA, 3000 bp, Unknown; identical to SEQ ID NO: 4296
  misc_feature (1)..( 3000): cDNA_ID_1823629_gDNA_ID_1620695_Annot_ID_48665 3000 nt of promoter + ATG

SEQ ID NO: 4302 - DNA, 3000 bp, Unknown; identical to SEQ ID NO: 3817
  misc_feature (1)..( 3000): cDNA_ID_1823625_gDNA_ID_1620695_Annot_ID_48667 3000 nt of promoter + ATG

SEQ ID NO: 4303 - DNA, 3000 bp, Unknown; identical to SEQ ID NO: 3816
  misc_feature (1)..( 3000): cDNA_ID_1823622_gDNA_ID_1620695_Annot_ID_48668 3000 nt of promoter + ATG

SEQ ID NO: 4304 - DNA, 3000 bp, Unknown; identical to SEQ ID NO: 3815
  misc_feature (1)..( 3000): cDNA_ID_1013540_gDNA_ID_1620695_Annot_ID_48672 3000 nt of promoter + ATG

SEQ ID NO: 4305 - DNA, 3000 bp, Unknown; identical to SEQ ID NO: 3813
  misc_feature (1)..( 3000): cDNA_ID_2050942_gDNA_ID_1620695_Annot_ID_48674 3000 nt of promoter + ATG

SEQ ID NO: 4306 - DNA, 3000 bp, Unknown
  misc_feature (1)..( 3000): cDNA_ID_1806998_gDNA_ID_1620698_Annot_ID_48720 3000 nt of promoter + ATG
tccaataattctatcagagattatcatataaattatactattacttattagtacaatgaaaattaagagtatttattatattcaacaactccttctttacgaattacgacccagtagaatttgtcaataattatattttttatatatatatttcacttatgaactttgagagttatcgtcattcaaagttataatttcatttggttttagtttcatatctctttcatgttaacttcttttgtctgcactaaaacatatatatattttttttattgtccgcgtggtctttgatatatatagtaatcattttcaaagccgtcaaatttttcacttttgattttgaatatagaggaacctgttgacccaaaaaaacagattatgaaggaacttaggaaatttcatacaagttgatcttaaaaattaagcaagaaaaaagaataaattaatgcagtcattccttaagcctacaatataaatgttcacactcccttgttctatctccaacacaacacaacacaacacaaaaaatccaacccaagaaccacagtgagatctttctcagaagacaaaaatgggaacagcgtcgtctaagtctaacatcaacctctcgcaggtcctcaacactgaggagccgtacagctccgtgatgctggccgtcgctgctctcttggccgttgtatgctacttatggattcaggggaagtccaagtccaaaaaggaacctccactgcctccgggaccttggccacttcctatcgtcggaaacctcccgttcctaaactctgacgtcctccacacgcaattccaagccctaaccctaaaatatggccctctcatgaagatccacctcggttccaaacttgcgatcgtcgtctcttcccctgacatggctcgcgaggttctcaaaacccacgacatcactttcgccaaccacgatctccctgaagtcggaaagatcaacacttacggtggtgaagacatcctctggtctccttacggtacccattggaggagacttcgtaagctctgcgtcatgaagatgttcactaccccaagtctcgaagcttcctactccactcgccgggaagaaacccgacaaaccattgtccacatgtcggaaatggctcgtgaaggatcaccagtcaacctcggagagcaaatatttctttccattttcaacgtcgtgacaagaatgatgtggggcgccactgttgaaggagacgagagaacgagcttaggaaacgagctcaaaaccctaatatctgatatctccgacatagaagggattcaaaactactcagatttctttccgttgttctcaagattcgatttccaaggattggttaagcagatgaaaggccatgtgaagaagcttgatctcttgttcgatagagttatggagagtcacgtcaaaatggtgggaaagaagagcgaagaagaagaagatttcttgcaatacttacttagagttaaagatgatgatgagaaagctcctctgtccatgactcatgtcaagtctctcctcatggatatggttcttggtggtgtcgacacatcggttaacgcatccgaattcgccatggcagagattgtgagcagaccggaagtgttaaacaagatccgactagaacttgaccaagttgttggcaaagacaacatcgttgaggaatcacatttacctaagcttccttacctacaagcggttatgaaagagactcttaggcttcaccctacgcttcctcttcttgttcctcacagaaacagcgaaacctcggtggttgcgggatacactgtgcctaaagactccaagattttcatcaacgtttgggcgattcatagagatcctaagaattgggatgaaccaaacgagttcaaacctgagaggtttttggagaattcgcttgatttcaatggaggtgattttaagtatttgccttttgggtcaggaaggaggatttgtgcggcgataaacatggctgagagacttgttctgttcaacattgcttcacttcttcactcttttgattggaaagctcctcaaggacagaagtttgaggttgaagagaagtttggtcttgttcttaagttgaagtctccacttgtggctattcctgttccaaggttgtccgatccaaaactctacacagcttaagtaagaaggatgttgaattgagttttcttgtttaaagtttacttttctttatctgtgtctggagttttgatgctttgtataaaagatgtgtcaagttacatttttgataacatttaatataacaaagttttacttacaataataacgcctaatagtcgatgccaaagctataaaactatattgtagttatatttttggcaagtcgattaaaattcttgggtcaacaaattacaaattagtatgaaggttacaaattaaaattgtaattatttaaattaattaatgtataattatatcacaaatacttcacgtcacactaaatgagtccttcttagcggcaaaatatgcgttattgggctaggcccatttataaacgacgccgtttacacagtctagaaactcaacatcgtcgtttctctcccggcgactttatcgccgtctttttcttctttaaactctctggctaatttcgttttgctttgagcttgtgagctacttctgattccggccatcacgcagcttcaggttagtttttgatttaaatcaaacaacagtacatgggttcagtgtgttgtgtctcgaatggaattggtttctgtgtttagattagggtttagggctctttcatctaaggaaacgaaacctaggttatacgaatctctttgttgggtctctctcaataccaataccaatcaacgaaaggattaattttgttcatcatcttcaacgtctaaggctataatttgtgttagttcaaattgattcagaataaagtttggatttttacttcacctagtcctgaatttgttgttctctgtgtagaaagtttctgtttttaaatcaaagaa

SEQ ID NO: 4307 - DNA, 3000 bp, Unknown
  misc_feature (1)..( 3000): cDNA_ID_1823797_gDNA_ID_1620698_Annot_ID_48721 3000 nt of promoter + ATG
gatgttggttgagatcacagaaagagcgatggcgcattgtgacaagaaagacgttttgatagttggcggtgttgggtgtaacgagcgtttgcaggaaatgatgaggactatgtgctcagaacgtgatggtaagctgtttgcaacagatgaccgttactgcatcgataatggagctatgatcgcttacacaggtctactcgcgtttgttaatggtattgaaacaccgatcgaagactctacctttacacaacgatttcgcacagacgaggttcatgcggtgtggcgagagaaagaagctgtactacttggggataagaaagttgcagcgaattgagtctgtccccatttttgttcatttttcatcaaatttgagattgaatctctctctactcgataaattggtttttgctaagtagttaagacttttaaatgtgttttattagccaaattatatgattgatatcttttggtttgaatgtaataacactttcaaatttcaaagtgagctttgtaaaaagttcaaatgtttcttgtgttgcatttcgctatttgttttattgctttaataaaaatatgatatctcaaagtcgacatttctaccgagaatggtggagagattagtgcattagtcttccttaatcatacaaaaacaactgtgaaaatacagcactactaaaaagtaaaaagtaagaactttttaatgtagaacgtatgagatggttcaattaatcacaagacacttctatggcattgcgtattaaacgaaaagtgagtaaatagaatttatacataatgatctaatcttgatcttgctaataaaaattgtaaaggcaacaacaagttgtcaaaaatttcaatttgacgtagagataaattctatctaataattttgtaaaaacattcgagatatagtgtatcatttttccatcatctagaactcatttgcgtattttcaagtgtaaatcagaaccttgacacataggctacacaaattttggtcgatatttatattacttttgtagcataatgtggatatccttctagagactagagttctagataaaacattcatacatgtaactatgtaagtaagcatgcatactaaatataaaattttcaaaagttttaaaagacatcatatagattcaaaaagacgtgggaaaaaggagaaaatgacaaaagttattagtaaaacaatcaagtaaaaggtcaaagtagttaacgaaaagataaaagtatttcaaaagtcttccttccatcttgaaatgccaaaaaataaaagacgaatgattgaagataaatcaaagttgtctgattgctattgtatacatctttttttttgttaaaactattgtatacatctaaaaaaccttgaagtaatcaagatctgaattatagccgttgataaggttttatgctttcacattgaactcgatcgtcgtcgtcaaatctactagtctcgttttttagttttaacgtgcttaattacttcactaatttgttttttgttatcattttcaccaattttattcattgtgtgaattaagttttgtccacatagtaagattcatcagtataataggacatatgataaaagtttgtatataatcaaagagtatatctaagaatatctaattaagatgaatgtttcagtccacattggattctgcttatagtcaaactgtcttgttcttaaacccaattaggttagaatacatgtaccaacaaatagcatttctataactaatcttttatcaatttactttatagcctacaaataattagaggaaaagaaaagagagttagtggaataattgtcctctaaatctcgatatcatcattaactaaatactatatttagaccatatatactatattttatagtatactatattttatagtatatataatcaactaatcatattagaccactattagaaatatggatctaaaaaaaacattctttaatcagtactattctcatccaaagacttgttttaagagactaaatatgaatatgtgtatgtgtatgtgtatgcaggagtagacacgtgcacgtggcacatgcagggaatgggaaggtggagtgttgacaaagaagaagaggatgatccaagtttcgaaatgattccaaaagttatgaactataagccaaagtgctcaatcgccaaacatgaacttaaataaacttcactcgttagatcgttttctcacattaaagccgctctacacttttacccattttaccatttataataaccaccacacatagatattaagttctatggattttattcgtaaacttaagttatgatcaaatagctaaatgattttgcgatttgcccgagttctgtttgtttctaaaatggttatccaaaaagcatatttttgttttatatagaatttgtgatatagaagaaatatactaaaaatgttttaaagtctgtctaaatcataaaccaatgcaaagaaagtgaaataaaccaagatctcgagcaatagacataataaataaacaaacacctaataacatcacatccccactaacaaatgtgaacattaactgttaaaaatcaccaaaaaagtcatcaagatttggctttccttttcaaaagcagtatacgtctctgtctcacacagacagtgtattcaatgcgttgtgttgtcttcccacttttcaccagctgaggttctgcttctttctcttcttctctccaaaacaagaaaattctgcagaataacttttcattcacgagagtggaaggttacagttttccaaatccgagaaacagacacaaaattggtccctctctaaaagttactatcttcgtttaacaaagagatagctcccaatccagtacaaaacagagtactctgctctataaatttcgttcctttattactctgctctataaaacagattattctgctctataagagagatagataaatgagctaaagctcagtaatttctaaacagagagacaagaaaattcaaga

SEQ ID NO: 4308 - DNA, 3000 bp, Unknown; identical to SEQ ID NO: 4069
  misc_feature (1)..( 3000): cDNA_ID_2051015_gDNA_ID_1620698_Annot_ID_164980 3000 nt of promoter + ATG

SEQ ID NO: 4309 - DNA, 3000 bp, Unknown
  misc_feature (1)..( 3000): cDNA_ID_1823785_gDNA_ID_1620698_Annot_ID_164968 3000 nt of promoter + ATG
ttaataaacatattgtaatttaattaggaaaaggtgaaaagttgcatgattaaatgactttattattaaactgattttcttaaacataactagaaaactagaaagtagaaatcgaagaatacattttctttaattttaattaaaatagctgaaaattcactaactcatgatttctttgatgtttttttaatagctcacgatctttttctataaatgaatagtcgagaaaaaatcacatcatactttactaatatgttgatcatcaatcaaacgtgaataagagaatctcgttaattatctggagcttccctacaagattgggaaatcttaagaataagtaataacttctcataatgaaactatttacaaaattgaaaactagagaaaatctataaattgacaattaaaggtagttgttgcacctattttttttttttttttgaacaatttaactcaaattttttgaataaaaacacaacaactatactcctaattttggtatatgatcgtgatcaggcagttagttgtcgctgtaatcatcgaattgtaaggtttatttaaatcataaaaattcatcttctacatatcctaaaaatattggctacagctgtaatgtaagaacgatataaacgtattatattgataaaagtgattagaagatgtcactatcttataaatgtgtgagtcaaatattaagaaaagtgaattataagaaattggccggttcaaatgtctgaacttacaagccaaataatagtcccacgccacactcttctctttgaaatgtctttgacaattactaattttttaattcatactcttcttaattgcgactttcactttaaataaattatctcactcattagtatcagatgtgaatgggaattatataaagataatggaagcatattattttaatttttattactgtaattctgacaagtgagaagtgagaactgttgcatgcagtgactacatgttctgtctttgaccaaatcctaatcctctctatctgttctctaatatcctcaagattttttaaaagaatctaactcgacctatatcgacggctcagatctgacactataaataaaaagatccatacaactaagtgcgttcccactttcgtggtttcaccacttactgcgacgattgcggatatttttatcctataagaaaccatatattaaagttaaaagtgagtttgacatcgaaggaaaatatagttgattaccttccaaacaaatggatccaataagaagtatgagtacttattagaaaaaaaaaaaactatgaagtatccgtattaattcttctaattgtacatccacttatacaataatttaaacctaaagctatgctttcgtcacgtacatatcatattttcttgtgacaacaataatcatacgctaaaatccatgttcgatcccggattcaagtatagataaacgcattattatgtataagaaaatattaaaacaggcgtgactccataaaaagacgaaaacgcatcggtgctacaagcactcaagaagacacgaatcatgtctttccatttaaataagtctcgaaccttcactatattttcacacatgacactctaagaaatttcaagtttatttctgagagttttttttgctttattgccgttacttaatcattatagaaataatgataagaatttaatgttataacagaacgacggttacgaattatcatcatttaagagtaacattgacggtgaatatttatgaaatatgtttgtgtatcttatgtaaaattttaaataaataaacgagctacaccgaccaaagtcgctcacatgtcgaatggtacacgtaggaccaacttcttcgacgcgccttcaactacttttaaaggtcgtttcttcttgaacacatgatttttttccagaagttttcttcatttgttcaacgcgttttaaaaatttcatatcaccgaagacttttattttctcttctcgatttcaccattaacaaaatattgtgagagtaaactaataaacacaatatgttatgctaagaattcaaaatcctgtgtacatatgacataaattttatatctaccctttaggtttcatatctttgattattatcacaagtgaagttgaaaattgaattgctattgaaatgtttttatcaaaacaacaagcatgtacatgtgagtgaaggtcaaaaaaacattcttacatgtgaaatcaaatgtttgtaaccaaaaatatctgagtgagaacgtgaaatttggcgggaagacaaccgacattccgcgggaaccgaagttatcaacggctgtttgtttgttactacgcaaatcccgtatagatcctaacggcgttaattcttttaactcttaacggcgttaaatttacggttgacaaatcgcgcgtaaaaatcttacaactctcacatgtgatctgccacgtaggatcctccgaccaaagtgttgttccctttgctttgttgtattgtacggccaaactcaattgtttttttttttttttgtgtaaaaaaaaagggaaggtgggtaagaatccaggagacaagaacggaaagtctatgaagaaagatttgtttttgaaaattctaatggtttagatttttctttctatgggaggagcccagagttttccaaagcaggaacaggtcagcgtctgtttatttttattttattcttttcccctaacgcctacttgatattttaattaggaatactatttatatatattaccatttatttcttatcctattaaattctcttatagacagacttggaagtaactctgcccctggagaaaaataaagagagagaaatagagagagagactctgtagaagaagcacatgaattgttctggttttatgatagctttctcttaagaagaagaagaagaaagataaattaaaagggtggttctgagttttaaggattattgtttgaaacaagaagcaagaagaagaagaattgaagaataaaaaagatg

SEQ ID NO: 4310 - DNA, 3000 bp, Unknown
  misc_feature (1)..( 3000): cDNA_ID_1447960_gDNA_ID_1620698_Annot_ID_164967 3000 nt of promoter + ATG
ataacctatcgttgttagaagattagttttgtcaatagtaaatcagtgtgttgtatgtaaaattaaattaaattatggggttagtgtaacgcaaaggagacaagtgggtcctacatgtgtgaatcttattgattcgtttttttattatataatctttatctaagcatgcttataaaaagacaactacatttcttcaagatgaagataacatgtgaccgatagacaaaagattaagaattatggttaaggataatataatatatttaaagtttacacaaaactattggccatggacatgtcgtctctatgacgtaaaagctacgtattattatgacaactatgctcatgactcatgagtcattaacttatggacaaaattgaagtggtttagtcatgtatgaaactgaattttaattgtttgtatatcaataatattaatttttagaaatgaaggcagcattattgttcaaaattgaatgaagtcaaacaaacatttgaaattggaaaaaatcgtacctgtacttgtatgctgtgtacagttctttgtgaactaatttagaagaacaatccaattagaagttaagagaatctaactttactgttggctttaaaaggcagagttgcaaacagctaaggcattattgaccaataaaaaccaaacacgagacttctgactttgaattttgcaccaaaccggttcttctgacatgttgccatataccgccggttaaagttgggttcgcatcatataggggttatagtatagttgacaaaaaaaagttaagtaaattaatagtgtaagtggacttttatatagggcttatgagacccaaatttataatattgggccgtttgcattagctcatggatgtttaaaactatatcgattcttgcatgttgcacagctaatcatattttatctatcgatgtttaagttgttactctttgacataattttatgactctgaaataagacacattatataacatgtaattcagattttgagatgagttttatcgtttgtaactatgtatttagttttatgttttgagtttaagattaaattttgaaattatgaaatatatctaaagacacaattcaaagtagagttttaaatagacatgatttgctgatgtagattttaaaaaggtgtactgtgaatttctaaccaacataaaactttggaggaaatgcacttcgagttataatttttgtttaaaaagcaaacgtattctttataagcccaaacaaatagattactactactaaaatgctttttcttatctaatctttattttcttaattaattttctttgttttcttggaaagttatagtatgtattaatcgctacgagtcaatgctttgtggtcccgatttatattatttttaaaaattatgattcatgattacttaccctttgtaaattattcaaacaaattaaaaggtagaccaaaccttggaaaatacatttctttgtattattaaattgtagtttatgtgtagattagcatataatgtgataaaatattattgttgacagaggaaatgatacgatatctttttcttttctttttttttgttctcaaaataagacaagttgctctataattcaaaatgacattaactagtttggtagatatcatatcctcgtgagctaaacttgagaaacaaaatgaaaaaaggatataacaggagattactccttccctttcgcaaagattatatatcgttttaagatcaattccatgacatagcttcaacaaatatcgtctattgttaaacaagcctacttgaatttattttcattttaaatatacatcttcattcatacataacactggaaaacaaacattgagaagattaacatcccaaaatactgatgaaatatcgacatctccttgcgttgtggaccgtggtcacattattaaactatcatctggttgtatgcttcgacaatatatcaaagtgtagtcacttattctgctgaaacaaatcgcattagtaatagtaggaataggatctgtcttagcttgaggatggtttaagatatatatatatatatatatatatatatatatatattatttttttcttttagttagcttagaagtgaaattacttgcttagaagccgatatttacataagttgtatcgtcgagatttacgttacttttttgcaaaaatcattttctatatatttccaaaacaacaatgatataaaaacaccttaaaagaatgacagaaaaaaaaaacaagtcttatctgcaggccacatttgtcttttaaaaaacagaaaaaactaaaagtaataataatttaaaacaaaaaaattagtatcacccactttccgtttttttttttactttctatttattatttattcttctcttttaaattattaattttccccatcggattccagcaaaaacacgaattcccatttctataatatgacaaaaagatattattttctccaaattaaaatataaaattgtgagttgtattataacgccccattaaatacatttccttttcacgaaaacaatacattttctttttcgtattaatttattcaatattaaatttaaacggacagacaaggaaaaagttaggaaggaaatgaactaaaagcctgaaataaatattaaaataatatatagaaaacgctttattttccaaatttcaaaatcaaaaatattcattgccgtcaaaaaaatatttattttcttatttcatctaaaactacacagcataaataaatctaattttcctcactttcctctcaaacatttcctaattccatcctaataattttcaaagctttaattctaagaaataatatctacaagaaaatattatctcatgtatttcttcttcctccttgatttttaatctgatttttaacctttggatttggaaaattatatcttcttctgtcccaaatctatttttaggtttgtcaaaacgattattttgtttaataatcgtaataggtatg

SEQ ID NO: 4311 - DNA, 3000 bp, Unknown
  misc_feature (1)..( 3000): cDNA_ID_3091429_gDNA_ID_1620698_Annot_ID_164964 3000 nt of promoter + ATG
ccaaacctgaaaattacattacatcaaacttaagtatattttgattgtcttaaccattcaattatgtgacaaaaaagagaggtaaatcgttaggtttagtcaccattttctttattataggttatataactcaagaattatgtgatgtttctatgttcacatgagccatgagtagttttgatattttccataaccgttggtgattaaagcaaaactagatatcatggagtatagatatttaatccaatcaatctacgtcaaactgaaaacaactgattcaaaatttcaaccaaaacatcatttgtgcttttattttattaattctatatgtaaaaacaattattatttttggataattaatatatcttacactggatgctgaaatgtgactgatgcaattcaaaggcagaatctcgatcgagttttggagttcttccttctttacagtacttgtcaacgacaattttgatcgtttcttcgacgttgcaactcagtttaaccattgctcttaccggtccaggacttccttctactgctacactgattattacttttggtgcttcttttgtattaccctgtttcgaaaaataataacaaaatgaggttctctgattttagaaatttaatagaaatgtcaatttttggtatatttatcacgatctgataacatgaactggagaactgactctagaatttgcagctgaacttaaaactctttgttcagcctatataatggttatattgaaatattttataatattaggcttaaactgtaaacttttaaatctttgtggactaaatgatgaattctcttacagagttgaaatcatgaatttgttgatttgaaaaaatagaagcaaacgactctgacctcttgattgatcggagatgaagacgagggcgaatataagttcaacaacgacggagacgaagcgaaaacctcagagcgaatcctaggcaagtaaacgatcggttttgtttcttcttccatcggtaaacctctcatcggcgatggtcgccgcaagtgattactctgtccgtcgcggtggcgattaagactcggctctgagaagcttctctcgaaaaccttattactcgatttagagcgattattcttgtcggaaacatatctgaaagctgttcgtcttgttctggagctccgacctccatttcctacaggattcgaaacttttctccggtgaatcgaatcagacatttcgtgaatgatgatctttgcttaaggaggaggaagaagaaaaaacaattgagaggttttggtggtttgcttggcaaagaagcgaattaagagttattctctgcttttgctttgctttactcttttattatcttcttttctttcatttgtatttttcaaatgtttttccaaatcaaattgtttttttttttctttttaacataagtgtggattttaacatttaaattcaaaccgaccaaaaaaaatacacgattaaaggtagtaatatagacgtggttcttgtaatatagtatttatatttcctgtcgacgatcgattcttttatagtatgatatcttgtgctgattcttacgtacttgtgtttattatagtaaaatagaaatgcgttgaattgtagcactgtattagattaaaacttctatgtaattatggagctaaaatgttttctggttagcatacggagtattttttaaaaaatctatccttattatggataaaatgtgttggaaaaaggcaataatatacttgtacaaatgaatataaatttcttgatgcattgttttagaagattacttgggagactcacaatcctataaagtgtaaaggaaacaaaactattggatttgtagaaaagttgacacgttaaacaagaaaacgagaaacccaaacaagtttcgtaaaacacaaaaaatctaaggtgatagtgagaagcacataaacaaatgaaaaaaaacacataaacaattagagaggagggagactcaactagtatcatcaattcattaaattttacgaaagtgctgagtaatggaagtaatataaaaaatttataaccaaaaacaagaattcatcaacgtcaagaaaaaacaacataaaataaaaaggagaatttgtgtggctgagattggtccgaggtttgtttccactgttaaaagaaagaacttttgggcttgatttaaagtcattaatggtgtggtcgacttctcttatgccatacgcactcatgttcacgcgtaacgcacttgttttccaccaagtatttaacaacgatcgtttgtgacccttttttatgtatacttgaaacttaaaaaatatgtattattacatttaaatatcatttattgtcatgacgaaaaaattgtaagactttataatttcaaatgtaacgtcacttttcgtgatgatgtaataccattctattacttaaatacaattggccaacagcctcaatttatttcaaccttttgctatctctatagtataatggtgtcataaaaattcatagacacattccacaaaactcgtgtatgtatatccgtgtctttatatatatgtgtatatccaagtgtataataaagttttttttcttaaaaaaaaaaacagaaatttgtatgcaccatttaaacaattaaagaaagaaaattgggcctactccaaacacaacgctactgtggagtacattttatccattttaatggcccaataatttataatgggcttttagtatgggccattttgtccctcttttttatgttgtaagcgagatcttgagacaatgttagtaattttggtttaatccggttcaacaagtaaacatcacacttgtaaactaaaccgataatgccacgtcactactccaaatattcgccaaatcataacagacaaaatccaacaacaacgacgacactctcctctctcactctctctctcaatctcaatctcaatctcacgtcaacgaccgtcgccgtcaccggaaggaaacgatttcatcatcttctacaatg

SEQ ID NO: 4312 - DNA, 3000 bp, Unknown
  misc_feature (1)..( 3000): cDNA_ID_2051061_gDNA_ID_1620698_Annot_ID_164963 3000 nt of promoter + ATG
caccaaatccgattactacctctactgccacaacattctcttcctcttcctcatcttctctctcgttcctctccctctcgttttcatcgaatcatctcaatccacctcagatttgttcaatcgctacaaaatccaaccaaaagtgaaaaactcattctcatcgatgttcaaatgttacaaagacgtcatgaagatgttcatcctcgtcgttggtccattacaactcgtttcttatccttcgattcaggttaatttctggaatttggcttctaatttcggaattgatgcgatttaggttgattttgtttttcgtgtgttgaaacagatgattgagatacgaagtggattaccattaccatcatgtatggagattgtagcacagttagtggtttacttcttggtagaggattatactaattactgggttcatagattctttcattgtaaatggggttatgagaagtttcatcatattcatcatgagtatacagctcctattggttatgctgctccttatgctcattgggctgaggttttgcttcttggcattcccacgtttcttggacctgctattgctcctggtcatatgattaccttttggttgtggattgctttacgacagattgaggctatcgaaactcatagcgggtaaggaaaaggaatggttttgaattgtttatcttagtttataatgcgttggggctatgtgggaagtttcaatagtgcgtttaccttttgttggtggggctaaggttaggcactagccttttctgatgctttattgactgtaattagctctaggtgattgtttagagactgcttagttaatcttttgtggtcaacatgagcaagaaatcattcttgagatgataagcatcttgtcttgttcaaataagtatttggacaatatgatgattgcttggtgcatgaaacttgtttctctggagataaattgacttgttttttttatttttcgttttcttttgaagatatgatttcccatggtctctgacaaagtacattccattttatggtggagctgagtatcatgattaccatcactacgttggaggacaaagccagagtaactttgcttcagtttttacttactgcgattacatctatggaactgataaagtgagtaatgaaacttcagttcttttccggttagcgtctactaattctggataaaaatttgacaatgtgggtatatgttcttattttcatcagggttaccgattccagaagaagcttcttcagcaggtaaataaatactccataaactgagactagcttatctctcggcataccgcatacccataaacgcagccatcaaattgcaagctcacataacagtatatgtggtatctagtatcatcatattgatgatatgtttcttgatgctatatcttatgagttgcagatgaaggagaagtccaagaagagcaacaagctggttaatggaggagagaaattcgattagtaaatctaaaacccctcgcgaggttgacttaccgtaagtttcaagcattctacaaatgtagtcaatacttaaaaatgaaagggtagttagttttctctgttctggtcttccctgtgtcacatgaaaatgctcgtgacgagttcctatctgaagttttttttaaaactcttttggaattggtgtgtgtcaataaatcctttttgtatattttaaatgttacatagtgcattcattggcttgtaacaagttcctactctgatagtattaagttaagttaagtataacttaagtatctaacgttaacaacaaggcccgtctagctcagttggtagagcgcaaggctcttaaccttgtggtcgtgggttcgagccccacggtgggcgtttcttttcctttttgttgcatttgagtggcatgatttaaaaggaaaatccttaccataacgatagttgcattgatgatgggggtcgatttcactctcggaaaacaaatctaatcaaagaaggctaaaacaagcgaaacacatgcatttactaaagctgtctcaccaaacttgaaaacaacagttttaagtacagtagtaggtacaataacttatttagttgttaccaactaatttatgactttaaaatcgaaacactctcttccttcctgtgttttttcaactaaacctaacaacacacagtttttctttaacacacatttccttgttctcgttgtcttagaattaccatggacacagtgaatatgataataacttcaagaatggggttgtagctgtgtgaggctatatttttttttttggtttaatgaggctatattgtaaactacttcaataagtttttactcttaaaccaattcacgaaagagttttaatgaacttgatattaagtttttgtccacacatattttgtgtatcaacgagtttttcttttctagacgtatggatcatcactcttcgtttcgtagattgttaaacaatgaagaaaggctttagctattcaaaatcatttggtgaaaagaaattactcctgatgataggtctataaatgaatttgcaacaaatatttccgaacatacaattttagatatcttctaacctaaataactactaaaaaataacaaccttagtaactttgaattttcgttttatatttttaaaaaacgaaaatgtgacccgttcgtatcaaatatagacgtaaagagataagatatgttttgttgtgttctactaaaaagtcaaaaaacaaatacattgaggacccaatttggcggacttctcaaagggtaaataatataccaaaaattggaaaaatcaaaaaaaaagaaaaatcaccgaaattaattaagtaggtaccatgtttcgacatttgtgcatctttatatagtttttcaagcatcctcatcatacattttccaaaacacattcaagacacgttttatgagtctataactccaaaacaatgctataacataaaccacacaaattaatccagacacaacactctcacaatatg

SEQ ID NO: 4313 - DNA, 3000 bp, Unknown
  misc_feature (1)..( 3000): cDNA_ID_3072997_gDNA_ID_1620698_Annot_ID_164960 3000 nt of promoter + ATG
ttgaacaaagaaaaaaggataattatccatgaaaacaaaaaaattgtcagctcgatttcatcgaaatttataaactttattcctcaattcaatttggggtttgcttcatttttttctccgaccaaacaagttccgggtgttttgaaagaaccccgacaatggcgtggaacgtgttcaagttctgcacagcacttcgcgccttgggttcgatcatgatcttaattgttatcgggatcatcggattcacatactacgccgttgtcgtcgttaattacggacctgctctactgatcggtggtgtcgattcattactatctgttctcgtcttagcgttcttccactttctggtaaactcaattcttccttctaggtcaatctgaaatttttaatctttttgtgacccttttgaaatttttgcatttggtaccctctagatctctgctaattacatgatacgctggtttggactatgctttagttacttacgaattgtaatcttttgggttctgtcagatgcaccaacttgattttgctttgataatattgagtcaaagcttgttgctttgttgtggtagtgggctcaatctagcttggcgtgtggatttacatttgtgtctgttggattttaagtaacagcaagatgagatagtgaattaggatagtataagctaagtaagcaatcaagtattcatctttttttttttggtttgatttggttgtagtgtagagtgtctttgtttcttttagttttaaagctgttggtttcttgtgtgttttaatagattatcaacatttgaactccctcgcattgtagaactcacagaggaaagagtaaggaagcaaaggactcattttttttatgattgttgttttgtttgcagcttataatgctactgtggagttatttctctgttgttgtgacggaccctggtggtgttccaacgggttggaggccagaattagacatagagaaaagcgagggaaaccaagctttgattggagaagcttcggttggagattcctcgtctcatggtgtaagatattgtagaaagtgcaatcaatataaaccgcctcgttctcaccattgttcagtctgtaagtctcttcaatgagtgattcttttctttgaatccggtatatgtgttttttagtagtgaaaaagttgtcatattgggttttcaggtggaagatgcatactaaagatggaccatcactgtgtttgggtggtgaattgtgttggtgcaaataactacaaatcatttctcctattcttggtatgtcaacttatcatagcatcgctgaacgaagttgtttttgatatgttctgttcattaatgttgccatgatcataatccattcccaatatctcaaaaatgcagttttacacatttcttgagacaacggtggttgcagtatcactattgccaattttcctcgtattcttcagcgatggagatggtgatataaccgtatcaccaggaagcctagcagccagctttgttgcatttggtgagttcaaagatatagaaatctcagtttccgtttttgtttcagaacaccttaacgttaccatctgattcaaaaacttcactctcttgctttccagtattgaacatagcatttgccctaagtgtcctaggcttcctaataatgcacataatgttggtcgctcgtaacaccacaactattgaggtaaagcaacaactctcacttggttttgctcttaacttgggttctctcaggaatctccatgtcaataaactcactgaccaaactaatggtttctttaatctcaggcgtatgagaagcatacagtgaactggccatacaacgttggtcgtaagacaaactttgaacaggttcgctctccatcttctttgtttcactcgttcttcagtgactgattcgtttccccgctacttagataatatctttgacatcgaacacaatgaaagctttaaaaagtttggtctctattcctttgttgaatcaggtttttggaagtgataaaatgtattggttcgtgccattgtacacggaagacgataagaagaagttgccagcacttggagggttagactttacgagcaggtcggagtccgagacagagccgcttcagtctctatgaccttacaaacttgaaatttttggaagtgtgtcttctgctttgtgtatgtatcaatcaaatattatatcaaacattgtcttgtgtattataaagattagtgcctattgtggaatttgtatctttttatttcgtgaaaagaaatttctcaaacttcttaaatataccattttcacatttgcttaaatataccattttcattttttcactattgataataataacatgttatttatcataaaaaataaaaaaatcacgacacgtgaatgatgtactgtaactatcaaagatttgacgtaccacatactttctgtatgtttttgatcgaatcaaaaataattatttttgtccttttttgttttattgttattttataatgtaatacttttactaaaataattttttttaaaaactaaatttctggtctatataattttggccaaatatgtacatatttaaaatccagagtcaaccatttaacaaacacttggaaatttaattaattattatgccctgtttagtagaaaatccattaaaaattacagaaatggtctgcgtgtcgcattgaaccaatcatatctcgacatctgtaaatacagttggagaagattttttcttcttctgctggccaaaaaaaaacattgcattaaaaagggttcaaagaaaaattctcaaattctctaacaaagagctctgagatttttggaaatctgaatcgttgttcgaggtatgaacttttggatcactctccttgaatctgctctttgattcgatttcgtacttgaatttcgcaattttggagttttctctcgcttcgttatactgatcgtttagggcttgaaattgaaggtttaatgttaccatttccggcaatg

SEQ ID NO: 4314 - DNA, 3000 bp, Unknown
  misc_feature (1)..( 3000): cDNA_ID_3091437_gDNA_ID_1620698_Annot_ID_164959 3000 nt of promoter + ATG
ctctcgcttcgttatactgatcgtttagggcttgaaattgaaggtttaatgttaccatttccggcaatgaacttgaagaagtctcgatcggaaaactcatcagttgcttcatctggaagtaagattgaggagcagactgagaaatcagctgaaccaacaaccattaaggtaaacctcactaaacctaaacccggtttcaattttgctttgtggtctctctttaccacacagatcttatcattgaattctatctcttaattagggttttagttgagaatcttaaggttttttttcaaccagtttcgaagacttagttactagtgttatttgacgaactgatgcagacataaaggttataactttatttctcgttgtgtctttggctgatcagttatgtataaaatttaatcaatatttatgctatttaaggtttcgcagtgacccttttcttcaaatttggtttttgattctgcatgttctcagtatcactcttttggtggtgtccctgttttgacttttgtgtttctctacgcatgttttctcatcttgctatatattaaacgatttgtagtatgattctgttgatccaagtagcttgtgagtgactgttcttcttttcaccgagattccatatttgtattgtgcaggtgcagaaaaaagccggtactccagggaggtcgatagatgtctttgctgtgcagtgtgagaagtgcatgaagtggaggaagattgatactcaagatgagtatgaagatatcagaagtagagtacaagaggacccgtttttttgcaagacgaaagaaggtgtgtcctgtgaagatgttggagatctaaactatgattcctccagaacatgggtcatcgacaagcctggcttgccgaggacaccaagagggttcaaaaggagcttaattctgagaaaggattactcgaaaatggatgcgtactacataactcctactgggaagaagctcaagtctcgtaatgaaatcgcagccttcatcgatgccaatcaggattacaagtatgcactgcttggagatttcaatttcacagtcccaaaggtgatggaagagacggttcctagtgggatattatctgacaggacccccaagccatcaaggaaagttacaattgattgagctacatagcgcttcccagcttcttatggtgttgaagttgttattggagtcagttttaggtttctatctggtttagtcttttaagggtgtcggacttcttactgtagaatgtttcttaaactcatctctttgactctgattggatctttattttctaatgaaggattatcttttcttctctttttgttatgtcacaagtcacaactacatgaatcgctctggttttcactcagtgtgtacaaacaaacacgacaaagtatattcaagcagcatgtgtacaacttcttctactccaagcgcaccctctgctatagcgtgcggtgtgcaagtcctcgcttatgggctatttatcccattcaacattgagtattggtcataacctcttgggactgagagctttatgaaaagaagccttaaacaatgattgcatatttgggattttcaaaaagaagactcacaacataactttatgtatgtttccgctcttgggttttctgaccagcccttgaagctagtcctttctcaaggttttgtgtatgtttcattagtttttgtttgtatctggagtctaccgtttattagaagtttaggttgctccttccaccgtccttactccttggtttagttgaataagcagttttctcatgtggtcttacttggtatgtaaaggctaaccttttgtgggcatgcaaagttctaaatttagactctttaggatgaagattacatggctacaatttttgattcttatatgtgattttttcttcttgttattcgtcgtatttggggtcctttttcgcgatttacatttgcctcgaagactgcttgtgagcttttgtagttctgcatctactgttctttccgcgctttctgttgactgcgagtgtggttttcacattattttgtttggtggtagcattttttcttaaacttcggtggttattttaagttatgttcaaagttttgtttgtaatttcgtggttccgaatgagtagcggcttgattatccgtattacttttgggtttgatttttcgaatcactctcgagctttgttcctaatttatgcagtttgtgttcaacttgtaactttttttgtatatgcaatctaagattaatgtttatagaattcatcttagattgcctaacgatattttgaatatggcttaaatctaagatttaaaacgtacaaaatcatgcggaaactcattttgaacggaaaaaactcgattcaactaatgaacatataaattatagaatagataaaataaaatggatttagaaaaacagtagaaaatatttataattttgccatgtttagaagaaaatccatgagtttaagacaatgagcaagagaaaattacagaaacggtgtcgaagttaacccatcagccaatcaaactgcgactcctgtagaaacacagttcgagaagattcttaaattctcttgctgcataaaatggcttaagagaaaatttctcaattccaacaaatatctctcagattgttgggagtccgaatcgttgttcgaggtatgaacttcaaattcgattacggtgaattttaatgtttgattttgatttctgattgaatttcaatttcgggttcttcgttaggtctagttcgcttcaggtctctggttttttcttcatgatatttacgttcctgagttgtttgtgacttgattgtgatcgattcatgtaatcttcctgatttactgttgaaattgctttgcagttagagaattgttatcttgctagagattgtgttgaattgcaaatttcagatttgtgtttgatgatagcgttttatgaattctgtttttgtttttgtatactttagtttttatcagggaagatg

SEQ ID NO: 4315 - DNA, 3000 bp, Unknown; identical to SEQ ID NO: 4307
  misc_feature (1)..( 3000): cDNA_ID_1823797_gDNA_ID_1620698_Annot_ID_164958 3000 nt of promoter + ATG

SEQ ID NO: 4316 - DNA, 3000 bp, Unknown; identical to SEQ ID NO: 4306
  misc_feature (1)..( 3000): cDNA_ID_1806998_gDNA_ID_1620698_Annot_ID_164956 3000 nt of promoter + ATG

SEQ ID NO: 4317 - DNA, 3000 bp, Unknown; identical to SEQ ID NO: 4313
  misc_feature (1)..( 3000): cDNA_ID_1808018_gDNA_ID_1620698_Annot_ID_48722 3000 nt of promoter + ATG

SEQ ID NO: 4318 - DNA, 3000 bp, Unknown; identical to SEQ ID NO: 4311
  misc_feature (1)..( 3000): cDNA_ID_1823793_gDNA_ID_1620698_Annot_ID_48723 3000 nt of promoter + ATG

SEQ ID NO: 4319 - DNA, 3000 bp, Unknown
  misc_feature (1)..( 3000): cDNA_ID_1823789_gDNA_ID_1620698_Annot_ID_48724 3000 nt of promoter + ATG
gttccatagatgtaatcgcagtaagtaaaaactgaagcaaagttactctggctttgtcctccaacgtagtgatggtaatcatgatactcagctccaccataaaatggaatgtactttgtcagagaccatgggaaatcatatcttcaaaagaaaacgaaaaataaaaaaaacaagtcaatttatctccagagaaacaagtttcatgcaccaagcaatcatcatattgtccaaatacttatttgaacaagacaagatgcttatcatctcaagaatgatttcttgctcatgttgaccacaaaagattaactaagcagtctctaaacaatcacctagagctaattacagtcaataaagcatcagaaaaggctagtgcctaaccttagccccaccaacaaaaggtaaacgcactattgaaacttcccacatagccccaacgcattataaactaagataaacaattcaaaaccattccttttccttacccgctatgagtttcgatagcctcaatctgtcgtaaagcaatccacaaccaaaaggtaatcatatgaccaggagcaatagcaggtccaagaaacgtgggaatgccaagaagcaaaacctcagcccaatgagcataaggagcagcataaccaataggagctgtatactcatgatgaatatgatgaaacttctcataaccccatttacaatgaaagaatctatgaacccagtaattagtataatcctctaccaagaagtaaaccactaactgtgctacaatctccatacatgatggtaatggtaatccacttcgtatctcaatcatctgtttcaacacacgaaaaacaaaatcaacctaaatcgcatcaattccgaaattagaagccaaattccagaaattaacctgaatcgaaggataagaaacgagttgtaatggaccaacgacgaggatgaacatcttcatgacgtctttgtaacatttgaacatcgatgagaatgagtttttcacttttggttggattttgtagcgattgaacaaatctgaggtggattgagatgattcgatgaaaacgagagggagaggaacgagagagaagatgaggaagaggaagagaatgttgtggcagtagaggtagtaatcggatttggtggcggagtaatcgaaccagagagtctctagccatgtgaggtttcgagataatgcgatcgacgcttcttcgattgttgcgtatgggatcattgtagaagatgatgaaatcgtttccttccggtgacggcgacggtcgttgacgtgagattgagattgagattgagagagagagtgagagaggagagtgtcgtcgttgttgttggattttgtctgttatgatttggcgaatatttggagtagtgacgtggcattatcggtttagtttacaagtgtgatgtttacttgttgaaccggattaaaccaaaattactaacattgtctcaagatctcgcttacaacataaaaaagagggacaaaatggcccatactaaaagcccattataaattattgggccattaaaatggataaaatgtactccacagtagcgttgtgtttggagtaggcccaattttctttctttaattgtttaaatggtgcatacaaatttctgtttttttttttaagaaaaaaaactttattatacacttggatatacacatatatataaagacacggatatacatacacgagttttgtggaatgtgtctatgaatttttatgacaccattatactatagagatagcaaaaggttgaaataaattgaggctgttggccaattgtatttaagtaatagaatggtattacatcatcacgaaaagtgacgttacatttgaaattataaagtcttacaattttttcgtcatgacaataaatgatatttaaatgtaataatacatattttttaagtttcaagtatacataaaaaagggtcacaaacgatcgttgttaaatacttggtggaaaacaagtgcgttacgcgtgaacatgagtgcgtatggcataagagaagtcgaccacaccattaatgactttaaatcaagcccaaaagttctttcttttaacagtggaaacaaacctcggaccaatctcagccacacaaattctcctttttattttatgttgttttttcttgacgttgatgaattcttgtttttggttataaattttttatattacttccattactcagcactttcgtaaaatttaatgaattgatgatactagttgagtctccctcctctctaattgtttatgtgttttttttcatttgtttatgtgcttctcactatcaccttagattttttgtgttttacgaaacttgtttgggtttctcgttttcttgtttaacgtgtcaacttttctacaaatccaatagttttgtttcctttacactttataggattgtgagtctcccaagtaatcttctaaaacaatgcatcaagaaatttatattcatttgtacaagtatattattgcctttttccaacacattttatccataataaggatagattttttaaaaaatactccgtatgctaaccagaaaacattttagctccataattacatagaagttttaatctaatacagtgctacaattcaacgcatttctattttactataataaacacaagtacgtaagaatcagcacaagatatcatactataaaagaatcgatcgtcgacaggaaatataaatactatattacaagaaccacgtctatattactacctttaatcgtgtattttttttggtcggtttgaatttaaatgttaaaatccacacttatgttaaaaagaaaaaaaaaaacaatttgatttggaaaaacatttgaaaaatacaaatgaaagaaaagaagataataaaagagtaaagcaaagcaaaagcagagaataactcttaattcgcttctttgccaagcaaaccaccaaaacctctcaattgttttttcttcttcctcctccttaagcaaagatcatcattcacgaa

SEQ ID NO: 4320 - DNA, 3000 bp, Unknown; identical to SEQ ID NO: 4310
  misc_feature (1)..( 3000): cDNA_ID_1447960_gDNA_ID_1620698_Annot_ID_48725 3000 nt of promoter + ATG

SEQ ID NO: 4321 - DNA, 3000 bp, Unknown; identical to SEQ ID NO: 4309
  misc_feature (1)..( 3000): cDNA_ID_1823785_gDNA_ID_1620698_Annot_ID_48726 3000 nt of promoter + ATG

SEQ ID NO: 4322 - DNA, 3000 bp, Unknown; identical to SEQ ID NO: 4069
  misc_feature (1)..( 3000): cDNA_ID_1823766_gDNA_ID_1620698_Annot_ID_48733 3000 nt of promoter + ATG

SEQ ID NO: 4323 - DNA, 3000 bp, Unknown
  misc_feature (1)..( 3000): cDNA_ID_1823844_gDNA_ID_1620699_Annot_ID_48735 3000 nt of promoter + ATG
ttaaagtagcgagcgaatcaactgagagcaagttaacaatcactatcaagtatcaaataaataaagcaaccactactaatttccccagatattattaaccaatacagtacacataagagagatctttaatatattaaaaacaaggaaaattgaacagaatctcactttaaggatttgttttgctaatacaaaaaatgtaaaaaatgaatggcgcagtgggtgttacacgattggggagacaaagattgcataaagatattgaagaattgcaaagaagcggtccctccaaatatcggaaaagtgttgatagtggaatcggtgatcggagagaataaaaagacgatgatagtggacgaacgagatgaaaagttagagcacgtgagattgatgcttgatatggtgatgatggctcacacaagcacaggcaaagaacggactttgaaagaatgggactttgttcttaaagaagctggctttgctcgatatgaggttagggacattgatgatgttcagagtcttataatcgcgtatcggtcttaagaggaggacatgaaagatatatctttcctttgaggaaaactcaataaattagtgattgttgatttggtgtttttatacagaacgacgtgtgggtgaataattgtgttgtgtgataataagtaaggcttgtttcagtatcagcagagttgttttttatttgtatttttcacatttttttatcattaatttccttgtgagtggcacctctaatttacttttttaattgttataggctatataagatagataaccttatacaatgtcaaatcttacaattacattatgaacatgaaaacaaattaaaaataaacttgctaagttttcaaaattatgtaaatttgcttgtaaaatcttgatttagtggaaaggtataatcattgatataaaaagaaactataaatatcaagaaatattcttaaagtcttaaatgcttcaatcatactttcaaacataaacaagtggtccaacgaatagacccaaatattacgtggttacgatgagagtggcagtggggtttatacgattggggagataaagacttgataaaaacatgctaagccatgtttatttgatcatttgacatttacatccaaatgatctatttgaatgattcatgtgaatgattcatgtgaatgatgtttgtttgatcatttggtattttatctaaataatgtatttaaatgaatatttctttgcttgattattttttaatttatctacattctcattctaataaaaatgactaaaaatacccatgttataattttaacaaatgacaaatatttaacatcattaccaaatatatcatttttaatctttaattttagttatattaatttaattattgctgtaaaatacatttacaacgaaataaattattattttaacataaaaaatatgatttgcggttggtggaaaatatactttgtagttttggcagaaaaatatgattttacgggtttggcgggaaaaatatgattttacggttttggcaggaaaaatattattttgcggttttggcgggaaaatatgattttaacgttttggcggaaaaatatggttttgcggtttggcgggaaaatatgattttaacgttttggcggaaaaatatgattttacagtttaggcgggaaaatatgattttacggttttggcgggaaaatatgattttacggttttggtgggaaaatatgattttacggtttgagcggaaaaaaatatgattttacggttttggcgagaaaatatgattttacggttttggcgagaaaatatgattttacggttttggcgggaaaatatgattttgcggttttgtgggaaatatgattttaacgttttgacaggaaaatatggttttgcggttttggcgggaaaacatgattttgcggctttgacggaaaacatgattttgcagttttggcgagaaaaacgaatttacaattttgacgtaaaataatagttagtgattttacaatttttagagttttttttgtacaataggtaatttaaaaaatattaaataagaaatctattaaaaataatattattaaaagagggtatatttgtcatttgttttttgaactaaatcatctccatccaaatggttctaccaagtccatccaaatgaatttcacaaattagcttaaatttacaaagtcattcagatggaacatccaaatgaatcatccaaatgagctgttaatttgtcaaaaacaaatatcatttttcatctctatctatatgatccatctggatggaaaaacaaacaggaccttaatagcgtaaagaagaggtccaactccaatccaaatcattacatttcccagcgatacaaaattttgatttggtttcaactagattcaatctctcaaaaagttcataatgaagcccaaaagcccattactaatgagggtaacttacacatgttaccttcttactgaaccaagaatcgcctctccctttttcggcgcgcgcgtacaccttacactgttacacagttacactacgctactatacactctgcattaggattcttttgaagcgcacatgacatgtctctaaagttcatatataaacgtgtccgagacaatttgacagcgtagctgatatgtgttcgtttgttgacacagcttgagattaatggcttgcggttgcgggcagtattgttattaagaggtgttgcaaggtttaaagtctaatttgactaggtctacttttaactcataatcattcagtaatggctaacttaccaatgtttttagcaaatccaaacaaaaattttttttaaaaaaaacttgagaaatacagtgatcaactaagtttgaattcttgaattactattctgtgtaagatcaatattagtatattacttatgtgcccccaaatttaaataactataaaagaaacctaattcctcaaaccccaaataacctgccttttaatttacttaacaaaatg

SEQ ID NO: 4324 - DNA, 3000 bp, Unknown; identical to SEQ ID NO: 4275
  misc_feature (1)..( 3000): cDNA_ID_2108207_gDNA_ID_1620699_Annot_ID_165001 3000 nt of promoter + ATG

SEQ ID NO: 4325 - DNA, 3000 bp, Unknown; identical to SEQ ID NO: 4274
  misc_feature (1)..( 3000): cDNA_ID_1022876_gDNA_ID_1620699_Annot_ID_164997 3000 nt of promoter + ATG

SEQ ID NO: 4326 - DNA, 3000 bp, Unknown; identical to SEQ ID NO: 4273
  misc_feature (1)..( 3000): cDNA_ID_1823586_gDNA_ID_1620699_Annot_ID_164996 3000 nt of promoter + ATG

SEQ ID NO: 4327 - DNA, 1095 bp, Unknown
  misc_feature (1)..( 1095): cDNA_ID_3073035_gDNA_ID_1620699_Annot_ID_164994 3000 nt of promoter + ATG
aagcttggcttctctttaccaaacatatatgtttgttgatcaatctctttctttgcgttatctgccccttgatttagacccacgtattattcgattcctaaactaattgaaatgattagatatgtgtcatgacgtttagtgaactaatattcacctaatatgtctttcaatcacttaagaatttgcattattcttgtgaaaaacataaattcacatgctgctagtaaaatatgttaacaaatcaattaaacatcagaaaataataactgagatcttcataaagaaagtggaagtttttttaaatatatgaagaagaaaagtgcgtagtgtgcacgggacttagttcatttaattctcgagccattgccgtacggaggaggctgccttcaaggcttaagtcgaggcgtgttcgttacgtttaacccgcaatagccggtggctacacactcacaaatcccctttgactcaccggatatcgacggtttcccgctattttttcccctaactaactttttttccttttcttgtaaaactcttaaaaacaaaactcggtgttgtctctttgtttgctcactccttttctttctctctctcgccgacactttcattctcacttgtgttcgtacgtaatgttcttgatccggtaggtttttatttgattataaactcatttcatttaacaaattgagtccatctctctatgattcacccataagatgatagaagaagatcaacatttacgtctgagataaatcatgtcctttaatgtatatttgtttattttctggtcaatcatcgatctttcttagtcgtagcagttacacaatgctgatggtacatggcggcagattttcgattcttattatttaaagaccaaatttaataatagatgtatgtacaacgagttttggtatcactatcttgtccggtaatgctcattgtttatcttttaaatctacgtcttcttctgcataattgacacaaatcacttgtttcaatggagtttttgtttgtttgatttcctctgttacttatgcagcaaaagaagaaattgagtttaaaggagaagtgtgagaaggaagtttcaggaagatg

SEQ ID NO: 4328 - DNA, 3000 bp, Unknown
  misc_feature (1)..( 3000): cDNA_ID_1823899_gDNA_ID_1620700_Annot_ID_48746 3000 nt of promoter + ATG
ttcgtggaggctttgattcaatgcaatctcaattctttagcagatgttaccgagcgtctacaagcagaatctatggagaagaagatatgagatgtgacttgagaatcttttcattcggaaaagaaggaaaaagaccaaagaagagaaataactcttcccttttatagcaatgtctatgttttttcttcttctatttccattttctgaatgtttgtatattattggaagtttgtaacgaaatgatttcgaatagctgtcaaacgagaaatataaattcaaatttgtaagtgtttatatgaaatgcttttttatttttaacatttccacatgaaaatataaataacatatcatgacacatgcaaaatcatatttatgaaagttttttcaactctctccattttttcgacatatcagcattagatagagtgacacttatcacatcaacatatgaattacatttcttatttaatttaatgtatttaagaatttataatcatgcattaattctttctaaattttttgacatgtttgaacttattaattaaataatttcaatttaattaggtacaaagtatatcaaactcacataaataacttatttaaattaaattatataaatcgtataaacttatgtataaacataaaattaatagaattttaatgaacttttagatttgattaaagtataaaaattaaataatatgatataagaatttatttcatgttttcatatactaatatatatatatatatatatatatataaaagattaataacaattgatattagttaaatttacggtttagtttaaggtaaacccaagatgctctcatctggaattctgttatgatctgtacgtcctcaaagttccagagatgttgagaaagatcaaacatcagcagcgtcagaggctttttctctggagaggtgatgttgaatggctctatgcgctgctcggagagcaaaagagtcttgaagaagactctagcaaatccatattggcatctaagcttgatctttgtgttcctgttatgaaacacagaatctagactgagactgaagttggatacctcagctttgggatggagaataccggaactcttggccggagtaagaggatggaaagcatgctgaagatgagcaagagcgttccaagaaagactatgacgaagaaaacaaatcagaaatatactaagtatgagttgtttcaaagaacgtagtaatggtttataataatattaacaatagaataaaataaatagtaatggtttaagaaaatattaataatagtgagcaaaagctaagcaaaatataagcaaaacataataacatagtcaaaataatatggaaatgacaagtatataaattatatgttaaaagttaagaaattgacttggaggtttgtgttgggattttcccttaacttaaataaaggttttaaatgtgaacaaaaaaagtttgaagttttagttgggaaaatgttttgatttggaggtttgttttggaattttttcacttacctaaaaagattttggttattattaacataaaattctactaataacaattgatatgcttcttcgtgttaaaaacaaaaaaaaaacaattgatatgcttcttctttttttgtgcacccaataaatatgaattaaataagcatttttaatagatttatctcttgatagggtatccatctaaacaaatacaaaaaagaatacatttaaccaaaatgcttatctaatgtatatttaaatgtaaaactttattgtatttgttaatttagcaaaagataaaatgtctaattgctaaatcatatttacaaaatataatatctgttaattaaatcatgattcagttgtttgggctgttaattttgttttaatccgtctttgggcttgacccttctgtatttgcctattgggctttatgaatgttatgaatgaaaatgaatagtcacaaaacaaaagaaaaaaaacagaatttgagtcggtacacaactgttaacgaggtgtacttggtggaatcatagacacgtgtcttgacactcttaaggcctcttcaccaccaaattacttccctaacaaaagaattattattattgtgaagccccaaaagatcgaacattctaattcaatggcctacttgctgaccaagcaaaaaggaccggctccgttttcacctaattccgagcttcacaacgtgccttccattggttgaatattcaactggtttaaccaaaccgaagttacacatacgatttgagtcggtacacaaatattacgagacgtactttgtggacagtttgacacgtgtatcgccactctttatccctcttcaccagtcaccactcaccaccaacttaaaaataaaataaaaagagcatatattgtggagccccttacatgatcgaaaattctcgttcaaaagcattcgttaagaccgtgtgttgtgtgtcgttttttgtcgacgaaaattagaccggctctgtttttattggctcgtttcgattgaaagcgtggctataattggtttaaccaaaccgaagtcgacgtctcggtttgttcggttaagattaagccttgtagaacattccaaaacgccgcgtcaaagcttttagggtttgattctgctgtgtggctacccactcaagtctccagtgttcctttgtggctctggtttgccctattcttctcttccccctctctctctctctctctctcttgttttctttttccctcttctccaaggaatctggaaaaaattaaaccttttttctaaatccctggaaatcagaaaacttcctattgagaaaccatagattcgatccaagcctttgattgtatcaaaatctctgcttcaccaagaatttgggttgatacagaagaaaaaagttaaatggttgaggcagagcgcgcggagaatagttggattgcttcggaaacgtctccgtcgtcgtctccggtggtaatagaaagcagtgatttttcgataactgatgga

SEQ ID NO: 4329 - DNA, 3000 bp, Unknown
  misc_feature (1)..( 3000): cDNA_ID_1840331_gDNA_ID_1620700_Annot_ID_48748 3000 nt of promoter + ATG
gacgttttgattcggtttttatatatttggatctttataaatatagttccaaatttatgtactaaaacagggaaaacaatgaataatccaagatcggttagtcctttggtttctccagcaaaccactcagatctattagaaaaccaacgtcaatccggttctggagatttctcaagattagagaaacgaatcggagcgaggaagatgaagtttcattccaagtctatgccccgaggtgccatgtttcttgatcaagaagcatctagaaacttccacgacaagaggtatgacctattcaggaccatgtccgggaaactcgaacgtcagatatcgaatttacgtgggaaacccactgagagttcgttgcaggatcataaagagattactgaatctttaaccgctgatagatactttgatgctcttcaaggccccgagcttgaaactctcaaggtattttatcattcatttttgctcatatggttgagttatacttgtgtttggttacttctatttatgggtttattggtggatgacaggagaaggagaagatagttctgcctgaggacaaaacgtggccgtttcttctacggtttccaatcacatcatatgggatgtgtcttggagtaagtagtcaagccatcatgtggaagaccttagcaaccacagaggcagagaagttcttgcacgtgactcaagtgatcaaccacgtgctctggtggatctctctccttctcctcctcgccgtttctatcacttacctcttcaaaaccatcctcttctttgaggcggttcgccgtgagtttcggcatccgatccgagtcaacttcttcttcgctcctcttatatcaatcctcttcttggcacttggaatcccacactctatcatctcacatcttccctctacactttggtacttccttatggctcccatcttgtttcttgagatgaagatttacggacagtggatgtctggtggacaaagacgcctctccaaagtcgccaaccctacaaaccacctttccattgtcggtaactttgcaggagcacttctaggagcatccatggggttgaaagaaggaccaatattcttctttgccatagggttggcttattatttggttttatttgtgactctctatcagagacttcccacgaatgaaaccttacctaaagagcttcaccctgttttcttcctctttgtggctgcaccagccgtcgcttccatggcctggaccaagatctctgcctctttcgatctcggttcgcgtctagcatacttcatctccttgttcttgtacttctctctggtagtttttgttttcattaacagagttctagtgagctagtgctgagtttcttgtggtacaagaaatgtaacagctttacttcttgtgattcttgtttcaggtttgtcggattaaccttttccggggattcaagtaagctgtttcttgaactgcaaggatctaatttaccaaaccaaataacatacatgttatctgacataattattcaaaaaatatcagattctcgctagcttggtgggcttacacgtttccaatgacggcagtggccagtgcgacgatcaaatattcagacgaagtcacgggagtggcaacgaagatactatcggttgtgatgtcgggagcagcaactctgacggtgatagctgtgcttgggttgacggtgatgcatgcttttgtccaacgtgatctcttccccaatgacgttgtcattgccataagtgcagaacaaccgaagcagaagagatggttcaaacatctcacaaaagaaagttatggaaataatgagagatgtcccaagattttggatccggaagataatcaaatagatttagaatctcctcctttagtaaatgtagatagttccacggttcagaattcaaattaacaaaaaaaaaaaatgtgatgaaaattcatgatctttgttaattaacttctcatgtacaacactatagcagtgctaataataataaattagcgaaaatcttaattattttggtaaattttagttgcataccattctttttactgatcatgataaattacttcttcatttcagcaaaaatataaaaactataatcactttggcttattctttcgttagatttagttattatagtattgtttgattcaattcaagtaaaaactatttgagttataggcaaacttagtcacaccaaccgcaaccttcacaatttgtcttaacaagttagatcatatttcgtggaaataatgtctagcttaacatctaatttgtcgaatatatcttaatgtcactgttatgttaattcatcctccatctttatactttgtcaccaaaacgaatcgtcttgtcacatatgacatatgacagtaaaaacaatgtaataatttcctacacatcacgtttttgaaaaaaaacatccttcatcaaccgctggtcaatcttgaaagcatggtaaattcattcaaattacgtcaaatgattcgttctacaaaactctcagccgtcggatcatacgacttttgactaaaccacttaaacgacgacgcttcgacgggattggaaaacatcggcgccacatgatgatgatacgaacaaccgcgttattttatatgtgccgtaggtacaacgctgagttaggcccacccaaaaaaaagtttgacattatttaaaacgaacgaatctgaaagaataaagcagcagagtccactaatcaaacgaaccagaatttacccgcaccctatttattgtggtcgcgaccacacaacattttcaacttcttcttctcttccgtttcaccaccctttcttctcctaaattcgaagaaccaaaaccaaaaacgtgaattcggagttatgattttggatcttcttcccgtctttatatataattttctgggttatgtttttcttcttcttaattcatctgaccattggattggttttcgattgcagagtcttcaattggaatttggatcgtgggattttggaaatg

SEQ ID NO: 4330 - DNA, 3000 bp, Unknown
  misc_feature (1)..( 3000): cDNA_ID_1823891_gDNA_ID_1620700_Annot_ID_48749 3000 nt of promoter + ATG
agcatggttaaaaaccgattcgtatccttcaactctccccatataggccacttgaatgcctataagatcgtcaaactcggagatgacttccacaaagtcgtatctataaggaagctcctgtagttctaggtgactgttccaacttgcattccaatcactgaaaagagcccatgtttcgccttttctcgggttcacaatgacctcttcagcagatttgatgtgatccatctcatgagcaaacatcaagtggctcttgatctctgtatctccatattcaaatctcccacaaccactgagaatagactgctcatcttttgtagttttgacatgttcaagtagtgtcacctgcaaactcaactgggactcaaaaatctccctgatctgggcatagttcctaggcatatcatctctaggatcatataaagcccatacttgatcaacagcaaatgagctcattgacttgctaaaatcattaagctttgtatcaggacaagttaatgagttaggatcctcataacttttatctgtgcagacaattccttcaatgtctccatcatttgcttcctgagacttctgtttcttggcttgaggagtacaagaatcagcgtcactatcattctttaccaacaaaggaggttcaatttcaaggttggatctcttccgagactctgcttctacaagttgtggtcttgatgtttcttctaattccatctgcttcaattcaagctctttcaatcttttttccaatgtcttctccttaatctcaagaccttttctcatcagttcagtctcctctctcaatttttcagcttcttctttcatcttcagctccaaagtctcctcctttctcttcaattcagcagtcttctctttgacagcttcctcaagtgccctgagatccttctctcttgcctcactttcctcattccgtctctcagtctcagctctttgtttcagatgaaactccttctctgccttctctaactcacacaacttctcagaaactcggcaagcctcctctttcctcccatcaaactcactcaccagctcctcaagtttcttcgtcgtcgaacggagaaacaaaccaagcttattctcctctgttttaagttgtgtcactaaatcttcactctgcttctcaagcaccaatctcatgatacttgcttcaatgaccaatctcaaatcagtttcaatctctttctcctctaaaacacttaaccttcgagatattgactcttcaagcaaaccaatctccttctccttcatttcaaccactctcagtcgttcttccttcttctccagcgaggcgaccacgtcatcaaactgaagcgaaaactcaaaaattgatgaagattttgcctgaatcttgtctaggattttgagatacccttcactgttttgctcagtaacgtctgattctactgaatccccttgcattgccatattctcagagacataaaccctactttttagttaacaaaagatgggtcataaaggaagaaacttttcatgaaaaaatacaaaaatgagaatgtacagaaagaataaataatagaaacaaaaagtaggaagagaaaataaacctctcttgagtttggtcttcggttgacaccaacggtggtttctgagccggcgtgtcttctccgggaactagtaaaactttcggtttcaacatttttttcgctgtacgaacggagcctttgagcttatccaggaatttgaagaaaagttttaaactttcttggtaagactcagaaattttggtaaagaagaatggcttcttcccatctctcttatgaaacaagaaaaaatagaatgctttatttactgaaaatggagggagaaagagaaactagtgctattttgtcttattaccttataaatacagctttcctttttggccgttcgattgtattattttaagccgttggattattgtacatcagacgtcagctttctattaactctcggacaatggggttttgttgtagcccgttgggcgttggataaagatcatgagatttgtgaaagtgaaaggatcagctaaatgggcttcgtaggatgatttttgttagcccatcaaaaggtttatgaaagaaaaaaaaggaatcaatcagcccaatattacaaattacagaacctcattttcttaaattactatcactataattctaaactttcaagatggcaaaacagtagtaggaaaaacattctataatcgattttattgacgagtgtacggaacggatactaaaaatccgcagacgcgactaaacgagagtgcaaagccgcctcttttattgactccttgactttcgagtccactaggacattccgaggaacattatctctactctatatatgtcttttttacttgtttgcatattttatccgaacgtttttgtacgattcaatttcaatgtattcttacggtcgttgtccttgtatttatggattaacagtgcctttaacaatagcctgggactaccttcagattggagtccatcacttgatcatatcggttaagatgtaactggacaaatataactcgagagacaagaagtaatggtcaaaacaaaactgctcaaataaaaacaaaaaagtgaaagacaagatactttatctggacagcactaaagccaaaacacacaatatctttggttctggcccacatatttaccaaaataccattttcagaggacttatttgacttcacatacacaaaagagtcacaccgactgatcagatcctctgttcttttcaaacactgatcagatctacattttctttttccatcactttctcttcattttctgtaagtttatatatacatttatgtatgtgtgtgtggtttgcatgttcgttttcgtaatatgttaacaataatatacaactaacccatttgcaaaagttggatgtgacgttttgattcggtttttatatatttggatctttataaatatagttccaaatttatgtactaaaacagggaaaacaatg

SEQ ID NO: 4331 - DNA, 3000 bp, Unknown
  misc_feature (1)..( 3000): cDNA_ID_1823883_gDNA_ID_1620700_Annot_ID_48752 3000 nt of promoter + ATG
tcggaagagatccaaccttgaaattgaacctcctttgttggtaaagaatgatagtgacgctgattcttgtactcctcaagccaagaaacagaagtctcaggaagcaaatgatggagacattgaaggaattgtctgcacagataaaagttatgaggatcctaactcattaacttgtcctgatacaaagcttaatgattttagcaagtcaatgagctcatttgctgttgatcaagtatgggctttatatgatcctagagatgatatgcctaggaactatgcccagatcagggagatttttgagtcccagttgagtttgcaggtgacactacttgaacatgtcaaaactacaaaagatgagcagtctattctcagtggttgtgggagatttgaatatggagatacagagatcaagagccacttgatgtttgctcatgagatggatcacatcaaatctgctgaagaggtcattgtgaacccgagaaaaggcgaaacatgggctcttttcagtgattggaatgcaagttggaacagtcacctagaactacaggagcttccttatagatacgactttgtggaagtcatctccgagtttgacgatcttataggcattcaagtggcctatatggggagagttgaaggatacgaatcggtttttaaccatgctgagcagtatggatgcatcaagattgtgatcccacctgcggaaatgcagagattctctcacaaagttgaatcagtgaaattgagcgggaaggaggaagagggaatcccatttaggtccttcaagctaaaccctgctgctatgccgagatactatcatgtgcttgaggaggtggtggaaacggaaatacaaattaaagatccaacggtcgtacatcaaaatggatccacaaaagatcttcccataataatagattgagggattcaagcctggttggtgcacctttcttatctatgcaaatatatatttaagtatgtagagtgcttggtgatggctgaggttgcaggaagtagtgaaactgtaatctttttggtttctgtatctgttttctaaactgtctatcttctgaattgtaccaacttcctttgatataaataaaagagaatgctttaggaaaactaactgcctacttgctcgcttcggcatagacctcacatgtggattactgagtgtctcaaagtttcaactttgttttcacgaattgcattaaaactaacataatgaccatcctatgttgatcaaatgcgtctgctgtaacagtctgaacactacaatctaattgacacaagtcaatacaatccccaagctttgtatatcctcgaaactccagttctattattgaaaccatattcgtgcatttacataaataacacataacagaagtaaagactgaaactttagagtctaatacatcattaccttataaatacttccaaatgctataactatagacaatataaacgccaaagataaacggaatacgatccataacctttgcatcatcactcaaagcagagtaagtagtggctattgactatcctctgctgttgttgagaatcgaacctagagttcccaaaacggcgaaagcaagcaaagggctaacgtcaagcgtatcaaagactggagggataatgttcctgaagagattaagataaggatcacacagatctctaatggctgacaaaggctgacgatcccatggaatgtttgggaaccaactgagcaaaactctgaccatcagaacaccactgtatatatcgagccatttcgatagcccggctgcaactaccgtcaacggagtgttcagataaccggcgggtcgatcacggagcgacgcgaagaacaacggacttgctgttcggaaagatgcttgaatctgtggagataggttcacaattgcgacagagagcttctgaattagagatttgattacgacgccggctagaagcacgagggtggtgatcgatctagttgagtcggagaaggggaattgagaagggggtttagaggagagtaccggagacgaggaggtaacggcggaggaaacgatggttctagcgttatggagggagagattgaaagagagtttacggggaagagagagacggggacggatgatcggaggaggtagtctagggtttgcgagaattgaagcgcgaagagcgagactgttggttgtgaaagaagccatctttgttcctcggtgccggagattactcactcctcagaatgttgtatcggaggaaataatgaacccaaaagattaaaatagaaaaataaaatatttatttttggtcaaaaatttatctctttgtataaattattttagttacgaaacttcgttgcccaaaatataaaattaaaaaaaaatacgaaactaccttctttatttatttttattcaacaaataaaattaatttaattaaggatagaaaatgaatcgaagtagtgtactagtggtatagttaaagaaaaacgttttatgtaccagcttttatcacaacagctttacattgtaaccatgtttgaataaatcaacgaagaaagtcgttaaaaaaaaaaaacgttttctgtcaacaaatataattaattaggacggttctaaaaaattaaatagaatttaattacttcccaaatttgtagttttttttttgattcccttgaaattaataatctttttttttcccacaattttattaggaattttacaacggttgttatttcccggcaaaaatattaacgaccataagagttaatggaagaagcattgctaaaaatagagggaggatcgtcccacaccagtcaaacctatatgtcttctccgtcgtccactaaaatcttatttacccctcaaaaagacattcctccactacaaaaacttgagagcaaaacaaaacaggttatttgtttgacaagaaaacacaaaacattcattctttcgtttatatttgaatatctttccttctagggaatgctaatcaaggatttgttcggcagaa

SEQ ID NO: 4332 - DNA, 3000 bp, Unknown
  misc_feature (1)..( 3000): cDNA_ID_1823871_gDNA_ID_1620700_Annot_ID_48756 3000 nt of promoter + ATG
gctgcttcattgtctaccgtcacatgcacgtacatatccgttatgcctgaaccatattcacaactctttttaaaaacttcaattgcacaagtctaaggagtttgatttaaatgttcttaccccattctccagcaactctcttagacttgtcaataagtttgtaaccaactccattacgatgcagctcttttgcaacacagacgttgctcaagtatgctctagcaaaatccacaccaatcccctataacacaaaatactcttaggctactcaatttgtccaatttcagattttaagttcagcattgttggcaacatcaaatagacaaatacctctggttttgttccagcaatttcatcaggaagccaacgacattggttaagatcaaggcttcccaccacaactctgtcttctatgccatcagagaactgagaaacagatgaaccatagcacaaatccatatcacagttttttctagaccaggaagtaacaatgacatgatgacaattccaaatgtagagcaccataacttaaatgcaacaaaccctcttgaacaggtaaatacaggatgaccaaattgagtacacagaccttacatgcagagcataaatcctcaaaagagcttgataattgcgacaatggaagggtagcatttatgcaagcgacccgcgtaaacccttccctcttccctgaagttctctccttaagcgcctcgaattcacgctctgccaagtatcttctatgatcctaatgaaacttgaacagcaaactgtaacatcagcataagaaacaaaccataaaccaaacaaaacactcactaactaatcacacaacaacaacgaagttcttcaaaactataaacacagctccaacatcaattatcatttcatctaccaattcatagtcaacggagttgacttcatgatacaacaaatagctaaaaatcatcttctaattcaccgattaagtaagaaactgacttggatattgtaagcagaaggattgagttcgttgaaggttcgtacgcggagacaagctgcagcccaaagctcatcttctgacaccgattcggatatgacgaaagtcgacttgtcgatcgctggagcacaaatgtgtgaggaagcagcgacgggacggaaccgtaacttcaatgaaggaatcgaaagatacgagcgtgatgatccatctgtgtttgggtcgccgaaaatggcgatagaggatgaacttgggagagacgaacagagaaacgccattttttcgcggactaatcacatcctcagcttcttgctaagcttcaaagctcgcatgtttgggcttttctattatttgggcccaatatgagcccatagttttctgtttgtttacgcttctttcaatttttatccgagagaaatggcagccacacaaataccaactaaatgtcataactcataaacaaaagatacgtaacaaacttttaacgttttatttcccaccaaaagaaaatcaacatgtgtcatcatcactcatcatcttttctttcaacgacaaaaaataacattgttcttatcgcaacaatacatgttttatcatcatcatttgaatgtacgtaatcaatgtatctcgattctttttggttgatatagaaaagaatttggagttgtattttgttacctaataaaaatcaattaaaattaataatagtaatctacaccctcgttaagagaagcaagtagagctagttcatgcatgatgatgtcttagtaaaagaaataagattatctcatataaagtaatagttagaaagtgtggaaggattagaatgaggatgatgatgatgtgtgtcatgagtcattgatctttgtcattatcctatgattcatatctcttctttctcgtgcatccaattcttattggtcaacaaataccaatagaaatcatttcagcaataatggacagaaacctacttacgattggtgggagggatacacaagaagacaactagagtgactaactataacatgttcacgcatatgatcttttatctattttcataattctgatgtctgtgaccaccttgcaatacacctgtacttaaatgtagaatatacgttataatattcgtaatacaacgcatcacataggacctaaatggcgatttttatggttgcatagtttcttgaaaaatgttttattttgttgatacgtattcaatcgtgattgtcaagagaatgaaatatcatacagtgaaatcaaaaggaattaactaaacaataattggtagtcaaatcttaaaatgctatacgtataattttcttctttaatttttctttttttcttttttattttgtaagagatttctttgaacaataattaattcaatctttccttacgtattaaacaatgaatagaaaaaaatcacaagacattattgaataaatgtcggattatctactatatatgtgtgcgcatgtgatatagtactgtaatagtgggctacaggccaacttcggctttccaagaacatggttgcatcgagcatatctttgctagattttaaatataactacaacttcttgcttactttgtgatgcggaaactcaaaaccgtaatcactcatgttatattttttgttgttgctttcaacgctaatatctgaaaccagttttcgctggtctaagatccatttgcaagaaatgtcaacaaaataaaaagctcttatcattcccacgagttttagttaaggtaatctattattccaagacttccacgaaccacctatatatagaagcttacatattctatagacttaataaatgtatagttcaatattatgtcactaacgtacgcggctaacaggtttgttaatccttcctatcacatgattgacatacacacacacacacacgcacgacacattatttgtattcagtattcacatatacgatatataattacaagagacgtgtatattgagagattcattttttagtgattgtagatcttaagagagagagagagag

SEQ ID NO: 4333 - DNA, 3000 bp, Unknown
  misc_feature (1)..( 3000): cDNA_ID_1013388_gDNA_ID_1620700_Annot_ID_48757 3000 nt of promoter + ATG
ttaaaacaggatcagatgaatccataaaaaaatgtagaaactatatgaacagtgaccacctacttacaattgatgaaaaaacaagtccatgagcattgtctttccagttcctactcctccatataagtataagcctttgacaggagagacagaagagtgagacacaaatttgttccagaaccaattactcctagtggactttgcagatgcagaataacgatccaatcgacaagcatcagcagattgaacaagctcgtcgtagagtctctgaagttctcttagtgtacctagctgcaaccaaaaaaaaagaaaagattcaaaaatcgatttcactgctaatgaatgaaccataaaaggaaagtacctgacataaatctccatccaataactctccagctacgattctgcgttcatactccactaacggccctgcaatctttccatctccattggaatgtggagacgaacagaaggaagaagccgagaatagagatgaagaagatgtgctgggattgatagagatcaaacaattatgaatgggagcgaaagcgtatcgttgatgcctcgagaatagagttacacggcgaagggagagaagaagcaatcgcatggtgagaatgagaatgagagagagagaaaggtaatcggaaacctcttcagtgatcggaggatgacggattcaacgaagaagaagaagaagaagaagaatcgaagcgatgcaccttcctcactactcgcacctgctcaagctcagactctctgaactaaagaaagattcaacaacaaaagactaaaccgataataaccgattgaatcggtttaaactgtaaagtgaacttaggcccattagtattggagcccaacaatgaaagcggcctcattggcttctttttcttctagtcgtcgtcaccggaggagaaaagttggcgatttgcaaacttcattttcaatcgactgcgtctcctctttcttctcctacccaaccaaagtttctcatcattcatttcagatcagccatggaggacgaggtaatcttacatcttttcgtatatatttattataaacacgatttagctctgtttttccgccggagattataatttgccggagacctttattcgagatctgattgatcatttcttatatgcctacattaactttgatacccattagatttctttttgatggaaatcgatttgatgtgaaattagctgctcgttactctggctttttccactcatcctctatagatgatctggtggagtgtttgtatagagaagaaagacatatgagttcattagaattgtagaaaagtgatggaagattttccgtcaaatcgttttctcaaaggcgtggtggtctattgttgctcgactggaattgtataatagagtttctctgtcaaaccattttggcatttttttagtagacttgggaactgaaagagaagaaaagatggatctttgaagtctaaaagaaaatgttgttattgttggtctccatcttcgtgactcactaggaaaatttatggttttatctgagttttaaatggcacaaagcgcaccatggcacagagagtcctttagtgcgctatgtgccatggctcaccaaagcgcgcgctttttggatctgtggcgttctcttaacagattctctgcatatggttttagccttcaagcttatatcgtctatggtgttctatttagaaaaattagggattttacatcttctaactggttaaaatgtcgtgggttaagaggtaagggtcaaatccgttttagtttaagataaacctaggattgatttggtttgataagctaattataacacatggttaaactttctagtcgtggattaggctaccaaaccacttaaattgaatcatgtattaaccagctaggtttagaaaatggtttatcctattcctcctagtcatttcttcgtgcaaaccctaaaatcacagaattctgttgttggtttcgaagagttttcgcctgaacacaagaggcgatcgctttgccaccttgtgcatcggccaaggctcacgtatggcgtgcgcatcatagatgtcgcctcgcctccacgtcttgttgccctattcttagagcatcggtgcgctatgcgccatggcacgccattagcgcgctttttaaaaccaagggttttatctcggtgtctaaatctgtttgttttggtgtttctattgaatttagattgaactgaaaactgctcctgctgattttcggtttccaacaacaaaccaaacgaggcactgcttcacccgttacattgagttccacaggtactcttgtgtgatagagttagtgactcttcagttcattctctaacttcaacaacaataacataaacaatatctgtgcaggtgcacaactgcaaaaggtgaggatgcaaatgaatgcgagaggttcgccaagtactaccgcgctctctgccctggggaatgggtttgtactttcattttttattatccgtcagcttcactagctactcacattcttaacaagatatgtgattatcttctcgcaggttgacaagtggaatgagcagagggagactggaacattccctggccctctttgattcacacaagaatctctctttttcattttaagtttgagaccaaaaaaggtcgtgtggatgatcatgaaatctataactcttgtctttcattaatcgtttttccttggatgatcaattaaataaattggaacaagacattctttggattcatcatgtcagaattttatttgtcgagacaattttgtcacttccaacaacttaaagggtgtaaacaataaatagcaaaagattttaacttttagttgtctagctgtcttaagaaccaattagttccgtttaagtcccaacagatttcgtaacggacaaagttcccaattctttttttttgcataataagatctgaaatcggagatagaaaaaaaaatcacatttttatttccgccggaacaaaaagcgatg

SEQ ID NO: 4334 - DNA, 3000 bp, Unknown
  misc_feature (1)..( 3000): cDNA_ID_1823861_gDNA_ID_1620700_Annot_ID_48760 3000 nt of promoter + ATG
tgctttttttgtttgtgttagcttcaaatatcttattaactttcacaatactgaaacagagcaaataatttacaaacagaattttagaccatttgagaaatttctacaaaatcaatcgagaaaagcaaattacatgaatcattgtcaaacagtacaataatgatcactacaagggagcttataaaagaagagcaaggagtaaagaggaagcagcaccaatatggaaggagcctgggaacataatagttgaggctgcagaggatgttgttgtgttgcgaggtcctctgtatttcacccttttcttcatcaccactgcgagatttcttgagccatgctcaccctcagctgaacacaaaagaaaggcctgagagaagaagaagaggaatacgatggagaagaggagtatgcgtctggctttgatcatctcacccatctttggtttttgcgttttgcttaattctgatggatgtgagtattacatatataaagattaggaagaagaaatgttctatagttattaatgattaagtcttattaggtgtgttataaacaatattaattgacgcgctccagccaagtggatttgggcagctatagtgttgcagacttgaccaatcttgatatagaaagccatttcaagcacaaaacgtggaaaaatggaaagatagaaaatgattttcagatattgaaggattaataacaatttgtggaatgaaattgcctaggtccatggagaggggaaacttgaattcaatcatgtagtcatcttaatttgaaattattgggggtaaaaaagagttgtagcgaaatataatactaggcaattggacatgtctcttctctgtttaaaattgactcatccaccttatgtgtttctttcttccagctttgatccttttgtcaatgcatatactacttgttttctttctttctttctttcttaaaatggacatttcatacacgttgggccatatggcccatatcaatgtatcattttgtgttaggttttatccactggattctatgtcaccttgaacatatattattgctttgctcaagctccccgtgtctacgttctgtcaagtagttttcccctttctcacatagatagctagatgccttatgcatatcattcaattttaggcttcatacgcgtaaaaatggattttcaaaaagagaaaaagacaaagactcaagcaaaatctagggagccctcacgtggttcgtctctactaatcatggtctctatatgctaggctttttgttagattagaaacataacgcaaagtcacatgatggcacgtgtccgatcctaacaaatgtgatacttcctaacagactcttggaaaattcctaacgattgatatcatagcaacatgttacattgtaatttataaatcgatcgaagaagaaaataattggatgtacggtatcggaaaattcgacaatacataatttgcgttgataaattaaagatctatctatatggtagaaagcttatattggatgcttagttccaagcatgagtatcaatgtatcatgcatagggaatatctttgacatgtaaacttttggtgttatgcaatgatcattgtcaaagaatgccattcacaattttacgaaggtgaagactacatatataaatgctcgctaaggttttgccaatactaatccggaaataaagtgtttctgacgaaaagatctacccaaagatgtatgttagtaagttgcagcgcacatgaatggatccaattatatgtttgtcaacgaaccaattacgatcatttcaaaaaaaaaataacgatcatttcttgaaatcgtttttaacgatgaagtgcgcaatttattttgtagacggtaacaaccatgcaaatagaattaaagaagaaaaataaacaaaaaaaagactaatctagacgaattaaaaaaaaaaaaaaactacacaaatgaaattttgaaactttttgtttataattttcttttgaaaattcaaaaatttatgcttaataatcttgtggcaaaaaaagcccaaaagagccaaaaagttcataaacacgaagatccatactgtaaaataaactaaaataaattgataataagatatgtaaagtcatgggtgaaatctcaaaaaatgatgaaaataagggggaaacattaaattaaattcaattgttcaaaaaaaaggaaaaaatcatatagaaagatagaagaaaagatgaagttggtgatgaggtgttaaagaagcaaacaaagaaatgagaggtctcaattttacttagcctcaaaacactcttaaggagaatagaagagagaatagcctcgcaccttatcctatcctttctatctctctctctatatctctatctctattttctcaatcactatttgacccctctcgtatcttatttccttttacttcctcattgtcaccaccactagtccctcatttatacacacacacacacacacacacacccttctctcttcttttttccttctatcttcttcttcctcacccttcatctccacttattcaaatacacacttcccctgccaagtctttagggatataattcaatccaaggctagcttaattttgagttttcttgatcaaattcagaattgtaagttttatgtgaattggtaatggctcctaaagcggggaaaacaaagccacacaagagtaaaggagagaagaagaagaaggaagagaaaggttctcattacaaactaattcaataccattcaaaattttcttatcttaagattcattttggtttctccacgcattatgagaattcaatttttgcttccttagctcttcttttatttgataacattaaaaaaattgcgtggttgtgcagttttgcccactgtcattgagataagtgttgaaacaccagatgaatcccaagtgacactcaaggtttgatgagcttaacactaaataacaaaacattgattgagaaattgtttataactcaaaagccaatgaatatg

SEQ ID NO: 4335 - DNA, 3000 bp, Unknown
  misc_feature (1)..( 3000): cDNA_ID_1823857_gDNA_ID_1620700_Annot_ID_48761 3000 nt of promoter + ATG
tgtttctccaccattcatatcttttttttattttctctaactcctatctttaaatttttctctttcacatatttttgctagcgttttgcgaaattaaaagccaccatgttatatacatgaacatgtaaatacattacaaatgtacatggataaatatgaactatacattatgcttagttactaatgtagacatgtagttaagaattcttagttactactagaactagtagtacaaaacaaaaagacaaggcctataatttccggagctaaacacagtttacaaagggattatagactctaaaacaaaccagaaactgccaaaagtcaggaatctcttgtttttcttccctcacatctctcttctctctctcttcacaatagtcctttggacagaacaaaagagagagaagatagtgaataatggaaggctgcttttcttcgtgaatctcagaatcttaaaagactcagatttgagaaaacgtttcaatatctaaatccatttctctccctctctctttagccatttagaatgaagaaaagtctcactctactcatcctcctcctctgttctctcctcttctccaccgtcttgagcaacctactcgtcgaaccggtccaacccaacaccgtaccagccttccccgtcgaaacccaagctcaaagctgccgacttgacctctccaacgagctattcggtggcgtcaacgaagcttgcggaagaaaccttgaccggagtcgatgttgccctgttttagccgcttggctcttcgcagctcacgctcgctctgctctccagttaccagctcctgctccaacgccggaatcttctgatcccgacgaacccatgaagcctgacgactctcagaagtgcgtcaacacattgcaaagtgcgcttttgactaaacaaatcaagatccctcagcctaattctagctgtgacgcaatcttgtgcttctgtggtattcgtctccaccagattagctcactctcttgtcccgccgctttcaatgtctcctccggcttcaaaaacgcaactccgaccgccgccgtgaagaatcttgaaaaagaatgccggaactcttcttactccggttgtaccagatgcctcggtgctcttcaaaaggttcaatttttataacttaagttcaaatttttcgcattccgtcacattaaattttcattctttatgtccctagtccctacactaaggattcacagagcatttaatgaaatttttttcttatccttaaaagcataataaatgttttgatttcatttgcgtgaagtcttcttcagaatgttcaagtagctgtcactctctatccatgagtaacatgttcaccaaactcacaataacaaattttactgttaattttagggtttatgttgaaagagacacacacaagcacattgttggtttttctttggctatccttttaggttgcaaacaattggagatgtgctttttcagaaactttcttttttcgtatagacccaaagcactgcaacactctgaaacccttcactttcacacgcaatctttttgttttccattatattaatgaatcttgttttttgtttcaaattttgatgggtggatttacagctaaaggtaagaggaggaaacaagaagacaacaacagagagagggactaagatgatgagcaaagattgccagctcatgggactcacatggctactagctcgtaacaaaacggcatacattcccactgtttcggctgtgttaagagctattatgtatagtccacacccacctcacctcaacaagtgtagtcctgaccaagagaacatgcctttagcagttgactctctacagtttcaaaagagcttctcttcatcatctcatctttttggggttttaccgtttttacccttagtcctttgtatctttctctttctactgtgatttttttctgtattttttggtcgggaggggtaaagagagtcacgtgaagctacaagacagttatgtgtatgtaaatgctgtgctctttttttggttctgcaaactcttaaccctcattttttggttttaactgtgttttgtcccatttaacactttgtacgaggtcttgaaattttaaaaaatcatcttggcatttagaaagttgtcatattggactatataagaaccatatcatgtgaacttaataaacaattacaaaagagagagagcctttggtagtcgtcgaatcccaaggactatacttactaagcatgttggtcgtgtccactaatgcgaatgtattcccccaaagtcaaatccaaaaggcattgcaattcctcttattaatctattactagtttataaagtgtggtgttatctcacacaagcttaactatatttttgacaaactatttttgcgaaaattttcttgggaaccatgtcaatgagaaccacctttctaccataaaagtttgaaggttttttaaactgatctcactggagtaaaattaactgcttaaaataatacatctcaatgaagccctgaaacaacaagtgagaatgcaacagtcaccataataggaggtctttaaatataaaatgaatatcaataataataaaaaaaatcattgagagaatcaagaagagatttgtgtctttgtatagacacttaagactctttaccacttatttaaagacactacttttcatgtgtttccttttaattggtcaatgtgtttttgacattaaaatattaaatcttttgattttgagacactcaaaatagtggttcactaatgaggatgctaatgggcttgctagataacttttttttttcttcttttacaagaaattgaatgatacacgtaataagttatttagcttattgaaaagcttcgcattagactttaaagacgtcaccgagtcaaatttcggttactacaaactccaaaactcatattcaagctctctcttctcactttttcttctttggcctcctctacattaccaaagtttcatcaagattgagtatg

SEQ ID NO: 4336 - DNA, 3000 bp, Unknown; identical to SEQ ID NO: 4335
  misc_feature (1)..( 3000): cDNA_ID_1823857_gDNA_ID_1620700_Annot_ID_165053 3000 nt of promoter + ATG

SEQ ID NO: 4337 - DNA, 3000 bp, Unknown
  misc_feature (1)..( 3000): cDNA_ID_2051189_gDNA_ID_1620700_Annot_ID_165050 3000 nt of promoter + ATG
tgaatacaaaaacaaaaaaaattctccaatcaacctttttgaaccactcttttgtcacgcatcacatgaacggatactgcggatctctggggcgatcgtgacctggagtgatggtttgatcaacacagctgtagcaaccaggttgtcaagagatgcttttagaatcatgcagcttggttctgtgatgaattgtttgcatgtgtagtaagatctatgtgacttggttataggattgtgataaggtgaaacaaatacgtagagatgtgggacaagtgaccatatacttttgacttttcttatagataagaaacaactggaatgaaacatagggatcggagaagcttctccgactgctttttttgtttgtgttagcttcaaatatcttattaactttcacaatactgaaacagagcaaataatttacaaacagaattttagaccatttgagaaatttctacaaaatcaatcgagaaaagcaaattacatgaatcattgtcaaacagtacaataatgatcactacaagggagcttataaaagaagagcaaggagtaaagaggaagcagcaccaatatggaaggagcctgggaacataatagttgaggctgcagaggatgttgttgtgttgcgaggtcctctgtatttcacccttttcttcatcaccactgcgagatttcttgagccatgctcaccctcagctgaacacaaaagaaaggcctgagagaagaagaagaggaatacgatggagaagaggagtatgcgtctggctttgatcatctcacccatctttggtttttgcgttttgcttaattctgatggatgtgagtattacatatataaagattaggaagaagaaatgttctatagttattaatgattaagtcttattaggtgtgttataaacaatattaattgacgcgctccagccaagtggatttgggcagctatagtgttgcagacttgaccaatcttgatatagaaagccatttcaagcacaaaacgtggaaaaatggaaagatagaaaatgattttcagatattgaaggattaataacaatttgtggaatgaaattgcctaggtccatggagaggggaaacttgaattcaatcatgtagtcatcttaatttgaaattattgggggtaaaaaagagttgtagcgaaatataatactaggcaattggacatgtctcttctctgtttaaaattgactcatccaccttatgtgtttctttcttccagctttgatccttttgtcaatgcatatactacttgttttctttctttctttctttcttaaaatggacatttcatacacgttgggccatatggcccatatcaatgtatcattttgtgttaggttttatccactggattctatgtcaccttgaacatatattattgctttgctcaagctccccgtgtctacgttctgtcaagtagttttcccctttctcacatagatagctagatgccttatgcatatcattcaattttaggcttcatacgcgtaaaaatggattttcaaaaagagaaaaagacaaagactcaagcaaaatctagggagccctcacgtggttcgtctctactaatcatggtctctatatgctaggctttttgttagattagaaacataacgcaaagtcacatgatggcacgtgtccgatcctaacaaatgtgatacttcctaacagactcttggaaaattcctaacgattgatatcatagcaacatgttacattgtaatttataaatcgatcgaagaagaaaataattggatgtacggtatcggaaaattcgacaatacataatttgcgttgataaattaaagatctatctatatggtagaaagcttatattggatgcttagttccaagcatgagtatcaatgtatcatgcatagggaatatctttgacatgtaaacttttggtgttatgcaatgatcattgtcaaagaatgccattcacaattttacgaaggtgaagactacatatataaatgctcgctaaggttttgccaatactaatccggaaataaagtgtttctgacgaaaagatctacccaaagatgtatgttagtaagttgcagcgcacatgaatggatccaattatatgtttgtcaacgaaccaattacgatcatttcaaaaaaaaaataacgatcatttcttgaaatcgtttttaacgatgaagtgcgcaatttattttgtagacggtaacaaccatgcaaatagaattaaagaagaaaaataaacaaaaaaaagactaatctagacgaattaaaaaaaaaaaaaaactacacaaatgaaattttgaaactttttgtttataattttcttttgaaaattcaaaaatttatgcttaataatcttgtggcaaaaaaagcccaaaagagccaaaaagttcataaacacgaagatccatactgtaaaataaactaaaataaattgataataagatatgtaaagtcatgggtgaaatctcaaaaaatgatgaaaataagggggaaacattaaattaaattcaattgttcaaaaaaaaggaaaaaatcatatagaaagatagaagaaaagatgaagttggtgatgaggtgttaaagaagcaaacaaagaaatgagaggtctcaattttacttagcctcaaaacactcttaaggagaatagaagagagaatagcctcgcaccttatcctatcctttctatctctctctctatatctctatctctattttctcaatcactatttgacccctctcgtatcttatttccttttacttcctcattgtcaccaccactagtccctcatttatacacacacacacacacacacacacccttctctcttcttttttccttctatcttcttcttcctcacccttcatctccacttattcaaatacacacttcccctgccaagtctttagggatataattcaatccaaggctagcttaattttgagttttcttgatcaaattcagaattgtaagttttatgtgaattggtaatg

SEQ ID NO: 4338 - DNA, 3000 bp, Unknown
  misc_feature (1)..( 3000): cDNA_ID_2051193_gDNA_ID_1620700_Annot_ID_165049 3000 nt of promoter + ATG
ttgaatccatgaatctcatcaaaaagctagattcacttttaaaatcccgatctctaattctaaatcacagatgaaattttttttaaatcagatcaaaattgtgaacctgaagagcattaagattagatttgtagaaatcttcaacgttaatgctggcataacgagtacgataagtggagcaaacgtcagagtacatcaaacaactcctgatccgttcccaattcttagcattgttgacacgtttctgcaaccaattagagtaatcggcgacatgatactctttataccctcgatccgatataacctcaccggcgccgcggtttgtgactgcgaaagcgaagattgtgaaacagaagccgaggagaatgaggaggaacatagcgaagaggtaaagccagaggaggcaagagacacggcaacaagcaccgacgagtccggcgattgagacgaacatgaggaagattccgagtacgaccattggtttgtcgaggaaacgttcgcattcggttgctgcatttttgccgagccagatcccggcggagagaattgggattgagaggaggaatgtgaagaaattgaggattccgaggagattgttgctacactgaaccatcgctttttgttccggcggaaataaaaatgtgatttttttttctatctccgatttcagatcttattatgcaaaaaaaaagaattgggaactttgtccgttacgaaatctgttgggacttaaacggaactaattggttcttaagacagctagacaactaaaagttaaaatcttttgctatttattgtttacaccctttaagttgttggaagtgacaaaattgtctcgacaaataaaattctgacatgatgaatccaaagaatgtcttgttccaatttatttaattgatcatccaaggaaaaacgattaatgaaagacaagagttatagatttcatgatcatccacacgaccttttttggtctcaaacttaaaatgaaaaagagagattcttgtgtgaatcaaagagggccagggaatgttccagtctccctctgctcattccacttgtcaacctgcgagaagataatcacatatcttgttaagaatgtgagtagctagtgaagctgacggataataaaaaatgaaagtacaaacccattccccagggcagagagcgcggtagtacttggcgaacctctcgcattcatttgcatcctcaccttttgcagttgtgcacctgcacagatattgtttatgttattgttgttgaagttagagaatgaactgaagagtcactaactctatcacacaagagtacctgtggaactcaatgtaacgggtgaagcagtgcctcgtttggtttgttgttggaaaccgaaaatcagcaggagcagttttcagttcaatctaaattcaatagaaacaccaaaacaaacagatttagacaccgagataaaacccttggttttaaaaagcgcgctaatggcgtgccatggcgcatagcgcaccgatgctctaagaatagggcaacaagacgtggaggcgaggcgacatctatgatgcgcacgccatacgtgagccttggccgatgcacaaggtggcaaagcgatcgcctcttgtgttcaggcgaaaactcttcgaaaccaacaacagaattctgtgattttagggtttgcacgaagaaatgactaggaggaataggataaaccattttctaaacctagctggttaatacatgattcaatttaagtggtttggtagcctaatccacgactagaaagtttaaccatgtgttataattagcttatcaaaccaaatcaatcctaggtttatcttaaactaaaacggatttgacccttacctcttaacccacgacattttaaccagttagaagatgtaaaatccctaatttttctaaatagaacaccatagacgatataagcttgaaggctaaaaccatatgcagagaatctgttaagagaacgccacagatccaaaaagcgcgcgctttggtgagccatggcacatagcgcactaaaggactctctgtgccatggtgcgctttgtgccatttaaaactcagataaaaccataaattttcctagtgagtcacgaagatggagaccaacaataacaacattttcttttagacttcaaagatccatcttttcttctctttcagttcccaagtctactaaaaaaatgccaaaatggtttgacagagaaactctattatacaattccagtcgagcaacaatagaccaccacgcctttgagaaaacgatttgacggaaaatcttccatcacttttctacaattctaatgaactcatatgtctttcttctctatacaaacactccaccagatcatctatagaggatgagtggaaaaagccagagtaacgagcagctaatttcacatcaaatcgatttccatcaaaaagaaatctaatgggtatcaaagttaatgtaggcatataagaaatgatcaatcagatctcgaataaaggtctccggcaaattataatctccggcggaaaaacagagctaaatcgtgtttataataaatatatacgaaaagatgtaagattacctcgtcctccatggctgatctgaaatgaatgatgagaaactttggttgggtaggagaagaaagaggagacgcagtcgattgaaaatgaagtttgcaaatcgccaacttttctcctccggtgacgacgactagaagaaaaagaagccaatgaggccgctttcattgttgggctccaatactaatgggcctaagttcactttacagtttaaaccgattcaatcggttattatcggtttagtcttttgttgttgaatctttctttagttcagagagtctgagcttgagcaggtgcgagtagtgaggaaggtgcatcgcttcgattcttcttcttcttcttcttcttcgttgaatccgtcatcctccgatcactgaagaggtttccgattacctttctctctctctcattctcattctcacc

SEQ ID NO: 4339 - DNA, 3000 bp, Unknown; identical to SEQ ID NO: 4333
  misc_feature (1)..( 3000): cDNA_ID_1013388_gDNA_ID_1620700_Annot_ID_165047 3000 nt of promoter + ATG

SEQ ID NO: 4340 - DNA, 3000 bp, Unknown; identical to SEQ ID NO: 4332
  misc_feature (1)..( 3000): cDNA_ID_1823871_gDNA_ID_1620700_Annot_ID_165046 3000 nt of promoter + ATG

SEQ ID NO: 4341 - DNA, 3000 bp, Unknown
  misc_feature (1)..( 3000): cDNA_ID_3073053_gDNA_ID_1620700_Annot_ID_165045 3000 nt of promoter + ATG
gattgagaggaagtgttgtgttcattttccaatttcaggtctgttgattcttcttgatagtcttcagatttgccccagagaacaatgtagagaccaaggatgatagccaaagcgcctaacaagctgcagaaacgagcaaaacagatttaaaaatgtgaattgagctacagaacgaagagaggatagtaagaaaatggcatacctcccgaggtaagtctgttcttttagatacagagcgccgaagaaagtgacgatgactgcagaaagagggttgaagagggcagagaaaacaggtcctttctgtgatacgatccaagcttgtagaaagaaagatatcgccaactggaatccagagtatatgcagcaagagagcttcaagaaggaatcaagcttccagggcggtaaatgagtgttgcctaaggcgagagccacgaggaaagaagctatggtagcgatgaaacatgtgcaggcagaagtgtacaagtggtcaggacagtgagaggcaataggaacctgaaggatcaaccaaagagaccaagcaaatgtgctaataagaaggaagaagcagccgagtaaccaagctgtgttgtcttggttgagcaaggcattgagcaattttggacctctgagaaaagtcattgccatggctcctcccacacagacaccagttcctattacttttgcaacacttttcatacttctcctctttatactctcgaacctgaaacaaacatccaatatcaataataaataaccaatccatcaatatagaatcttagaacatatatgttgatgatacatacccaacaatgatggagataatgaaggtgacggcaggaataagattagtcatggcacaagccatggatgaagaagacaagtcaatccctttgaaataagcgttctgattaacagtcacaccaataacagccgtcaaagccacccaccaaaagcctcttactcccagagaaggtttgttttctttcctcctaattaccattcacatggaaatgagtcagaattcatgtgataaataatatatagattggttcaaaaacactgaacttaccaagcggaaatgaaagagatggggcagatgaagagagtggcgatggcttgacggtaaacaacgaagacggtgggattgagaccttccatgaaagcagctttcgtgaagagtgcaactccggcggacgtaaactgcaacatcactaacgctagcaccgccttgtatttcgatatctccatctctctctctctctcttaagatctacaatcactaaaaaatgaatctctcaatatacacgtctcttgtaattatatatcgtatatgtgaatactgaatacaaataatgtgtcgtgcgtgtgtgtgtgtgtgtatgtcaatcatgtgataggaaggattaacaaacctgttagccgcgtacgttagtgacataatattgaactatacatttattaagtctatagaatatgtaagcttctatatataggtggttcgtggaagtcttggaataatagattaccttaactaaaactcgtgggaatgataagagctttttattttgttgacatttcttgcaaatggatcttagaccagcgaaaactggtttcagatattagcgttgaaagcaacaacaaaaaatataacatgagtgattacggttttgagtttccgcatcacaaagtaagcaagaagttgtagttatatttaaaatctagcaaagatatgctcgatgcaaccatgttcttggaaagccgaagttggcctgtagcccactattacagtactatatcacatgcgcacacatatatagtagataatccgacatttattcaataatgtcttgtgatttttttctattcattgtttaatacgtaaggaaagattgaattaattattgttcaaagaaatctcttacaaaataaaaaagaaaaaaagaaaaattaaagaagaaaattatacgtatagcattttaagatttgactaccaattattgtttagttaattccttttgatttcactgtatgatatttcattctcttgacaatcacgattgaatacgtatcaacaaaataaaacatttttcaagaaactatgcaaccataaaaatcgccatttaggtcctatgtgatgcgttgtattacgaatattataacgtatattctacatttaagtacaggtgtattgcaaggtggtcacagacatcagaattatgaaaatagataaaagatcatatgcgtgaacatgttatagttagtcactctagttgtcttcttgtgtatccctcccaccaatcgtaagtaggtttctgtccattattgctgaaatgatttctattggtatttgttgaccaataagaattggatgcacgagaaagaagagatatgaatcataggataatgacaaagatcaatgactcatgacacacatcatcatcatcctcattctaatccttccacactttctaactattactttatatgagataatcttatttcttttactaagacatcatcatgcatgaactagctctacttgcttctcttaacgagggtgtagattactattattaattttaattgatttttattaggtaacaaaatacaactccaaattcttttctatatcaaccaaaaagaatcgagatacattgattacgtacattcaaatgatgatgataaaacatgtattgttgcgataagaacaatgttattttttgtcgttgaaagaaaagatgatgagtgatgatgacacatgttgattttcttttggtgggaaataaaacgttaaaagtttgttacgtatcttttgtttatgagttatgacatttagttggtatttgtgtggctgccatttctctcggataaaaattgaaagaagcgtaaacaaacagaaaactatgggctcatattgggcccaaataatagaaaagcccaaacatgcgagctttgaagcttagcaagaagctgaggatgtgattagtccgcgaaaaaatg

SEQ ID NO: 4342 - DNA, 3000 bp, Unknown; identical to SEQ ID NO: 4329
  misc_feature (1)..( 3000): cDNA_ID_1840331_gDNA_ID_1620700_Annot_ID_165037 3000 nt of promoter + ATG

SEQ ID NO: 4343 - DNA, 3000 bp, Unknown
  misc_feature (1)..( 3000): cDNA_ID_3092135_gDNA_ID_1620700_Annot_ID_165035 3000 nt of promoter + ATG
atttcgttacattcggagacgatagacggaaaaacagggacattggctatagaatcgttcgtggtggatgtgccggaaggtaacacaaaggaggagacatgcttcttcgtggaggctttgattcaatgcaatctcaattctttagcagatgttaccgagcgtctacaagcagaatctatggagaagaagatatgagatgtgacttgagaatcttttcattcggaaaagaaggaaaaagaccaaagaagagaaataactcttcccttttatagcaatgtctatgttttttcttcttctatttccattttctgaatgtttgtatattattggaagtttgtaacgaaatgatttcgaatagctgtcaaacgagaaatataaattcaaatttgtaagtgtttatatgaaatgcttttttatttttaacatttccacatgaaaatataaataacatatcatgacacatgcaaaatcatatttatgaaagttttttcaactctctccattttttcgacatatcagcattagatagagtgacacttatcacatcaacatatgaattacatttcttatttaatttaatgtatttaagaatttataatcatgcattaattctttctaaattttttgacatgtttgaacttattaattaaataatttcaatttaattaggtacaaagtatatcaaactcacataaataacttatttaaattaaattatataaatcgtataaacttatgtataaacataaaattaatagaattttaatgaacttttagatttgattaaagtataaaaattaaataatatgatataagaatttatttcatgttttcatatactaatatatatatatatatatatatatataaaagattaataacaattgatattagttaaatttacggtttagtttaaggtaaacccaagatgctctcatctggaattctgttatgatctgtacgtcctcaaagttccagagatgttgagaaagatcaaacatcagcagcgtcagaggctttttctctggagaggtgatgttgaatggctctatgcgctgctcggagagcaaaagagtcttgaagaagactctagcaaatccatattggcatctaagcttgatctttgtgttcctgttatgaaacacagaatctagactgagactgaagttggatacctcagctttgggatggagaataccggaactcttggccggagtaagaggatggaaagcatgctgaagatgagcaagagcgttccaagaaagactatgacgaagaaaacaaatcagaaatatactaagtatgagttgtttcaaagaacgtagtaatggtttataataatattaacaatagaataaaataaatagtaatggtttaagaaaatattaataatagtgagcaaaagctaagcaaaatataagcaaaacataataacatagtcaaaataatatggaaatgacaagtatataaattatatgttaaaagttaagaaattgacttggaggtttgtgttgggattttcccttaacttaaataaaggttttaaatgtgaacaaaaaaagtttgaagttttagttgggaaaatgttttgatttggaggtttgttttggaattttttcacttacctaaaaagattttggttattattaacataaaattctactaataacaattgatatgcttcttcgtgttaaaaacaaaaaaaaaacaattgatatgcttcttctttttttgtgcacccaataaatatgaattaaataagcatttttaatagatttatctcttgatagggtatccatctaaacaaatacaaaaaagaatacatttaaccaaaatgcttatctaatgtatatttaaatgtaaaactttattgtatttgttaatttagcaaaagataaaatgtctaattgctaaatcatatttacaaaatataatatctgttaattaaatcatgattcagttgtttgggctgttaattttgttttaatccgtctttgggcttgacccttctgtatttgcctattgggctttatgaatgttatgaatgaaaatgaatagtcacaaaacaaaagaaaaaaaacagaatttgagtcggtacacaactgttaacgaggtgtacttggtggaatcatagacacgtgtcttgacactcttaaggcctcttcaccaccaaattacttccctaacaaaagaattattattattgtgaagccccaaaagatcgaacattctaattcaatggcctacttgctgaccaagcaaaaaggaccggctccgttttcacctaattccgagcttcacaacgtgccttccattggttgaatattcaactggtttaaccaaaccgaagttacacatacgatttgagtcggtacacaaatattacgagacgtactttgtggacagtttgacacgtgtatcgccactctttatccctcttcaccagtcaccactcaccaccaacttaaaaataaaataaaaagagcatatattgtggagccccttacatgatcgaaaattctcgttcaaaagcattcgttaagaccgtgtgttgtgtgtcgttttttgtcgacgaaaattagaccggctctgtttttattggctcgtttcgattgaaagcgtggctataattggtttaaccaaaccgaagtcgacgtctcggtttgttcggttaagattaagccttgtagaacattccaaaacgccgcgtcaaagcttttagggtttgattctgctgtgtggctacccactcaagtctccagtgttcctttgtggctctggtttgccctattcttctcttccccctctctctctctctctctctcttgttttctttttccctcttctccaaggaatctggaaaaaattaaaccttttttctaaatccctggaaatcagaaaacttcctattgagaaaccatagattcgatccaagcctttgattgtatcaaaatctctgcttcaccaagaatttgggttgatacagaagaaaaaagttaa

SEQ ID NO: 4344 - DNA, 1207 bp, Unknown
  misc_feature (1)..( 1207): cDNA_ID_3073065_gDNA_ID_1620700_Annot_ID_165033 3000 nt of promoter + ATG
cttccctcaaagatggagtaaggaaattgaagtaaaacaaacaatttggactaatgaaattttataaaacgattcaagttggaaaatacaaggaattaacaaaacgtgttttggacgtcaaaatttagacaagagtagtcaagaatccaactatggaactaaaccatcctcactgttaaatctagactctagtgattagcattcaacaaaaacaaattatacttttcgtacggaacatattctgaaactattcacatgtcagttttgtcatttcctcaaaactcatattcattttttttttaaatggacatcacgggacctgagttcctggccataaaggctaaaaagcagatccaagaattgattgattatatgaatttagttacaaagtacaaccagattgtattctatgaacatattaattgtttccactattcatggattcatgatagagaacaatatcactcagaactagttaatgtcgcgatttacaaaaatcccacagcaccataacctcgcaatcgcatgacgtaatggaaaatgtgagagagagtcacaagaacataggacctacactaaacatgtgtagtgtctacactctacagtcacctactatacaagttgctaaatactactacgtacgacttgtttagttagaactgcaaaaaattaaacttgtttgtcctctaatcccaacagattttgtttttatatactgattaaccactgctttgttacaacaacttacaacttgaaaggaacgttacatgaaataactcttctcattcatgaatcatcttctctacataagaaaaagttgtgcataagaaatatctacactgaaaaaatggcagtgggggttacatttttgatttctctaattctttatttacatttatttctattttcatgttaaacatttatttcaatgccaaaataataaagaaagtaaaatctataaatgggattcagtgcaccaataattcttacacataaaaaaatatcagtatcaggcctctcaacatcacaatagggcaagaggaggggccaaagtacacaactttctcctcagggtatgctccaaattcccaacttggcctctctttttcatcttttgggtttttatgttcactcttctctgcttcattcctctttctacttccaggaaataaaaacttctaatcaaagagcaagagattaagaaatg

SEQ ID NO: 4345 - DNA, 3000 bp, Unknown
  misc_feature (1)..( 3000): cDNA_ID_1823978_gDNA_ID_1620701_Annot_ID_48765 3000 nt of promoter + ATG
tctagtgtatgagtggtgagatttatagggtttttgagggtagaattgaattgttttgtggacaagcaattttggaattgttctcttgtcggagtagaataaacagatttgacacatagaactaagaaaagaagaaatagatacataaaaagctctctcatatctttttctatttttggtttcttgtgtttgaagtctcagacaaagaacaagtagtgttcttgatcctttgtcttgtttagaaagattcgttgagaaactgattgagtttcagagagaagaagagttcaggaggctatatagatttttcatttttggggttatttgtttgatcatgatattaaatcaacgtcactattatgaatataataagattattttgacgagtagctaaaacaaagacggtagcttcgggtcaaaagtagactatttgcgagttgatgtggaatggtgatcaccatgtatacgcgtttaacaaatattgcaatttttcaaacgtggagataattattacttgatggagaatactttggctcattattagatgtagacttccattgttacaaaaagccaacaaaaaataatttcaaaaataaataaatcagaattaaagggcatttccttttacagttatatccattttaagtatttttgtcaactttagagcttaacgttggtttgtcaagagtcatggtgtagatggatattattacacaaaaatgacttctagctaacatattagaactactaataatagtagatgtttcggaaaaaataaaattcataaagatagatgtctatatttgaaatttgtgtaacattttgtattttgtccttgttagttattagaatgaagaaaacattataaatataaattctaataggatttggtaaaaactaattttagcatgtgtacaaacccttagaaatctgtttttgttttttgtgccaacaatcttcaattaatatacataaactttataaaacagaatgagtaacacttacacttacaagtttattgggtctttcactcttctggataacaatattttctagattaacaatctgacttacgcttaaaacctacacaaacggtgtataaattccacacttttattcttaaaatacatagttttccttgtataaaacttgtaagcgttatatacatagctggagcaaattaaaatatataatcaagttgctagtatgaaacaaagaaaattgaatgtcccatactcttgtattcaaaggattttaaaaatgacgtcttatattaatacaattttatctcacttaggaggaagattataaataagttttaaaaaaagaaatgaagcgttaacgtcgtcatgcttgatgtcaactctatggcattgctcaaaaaacgtgtcaacgttcttacattctggaagtctttgatttggtgatgcattgaatatttgaatgatatagtgttacaaatagattcgtagttgtacttctctcacaaccacaaacacctaatccgaatcaagatttttgcacttgttttggatatatatgtcataccaaaaaaaggcaacgagaaaaaatagggtcaaaattttgattagatatagctgaagctagaaagcaaacccatgatgagaagaacacaataaccgtccaatttttctgaacgtgagggatctgagtaagcaagtttaaaagattcaagaagctttctaataatatcaaatttatcaaccccactgatccctgttaagattcagctgtgtgttcgaaactcccattacaaatgcatgcatatacctatgagcaatatctataaggttttctttaaagcaacaacgattgttggtagagaccgaaacacacacaaatcttataatatgcttcatgacttttgaattttgctgtcatcaaatgatgctatactatacccccattttcagggattcttcagatatatccacatgacataactaacacaagttttagccatttcaattagtctgacagatcacagacctcacataccgtataagaaaatagttaattacaaatcaaatgtggtagtcctaactttatcaaataagttatgctattgctcagtctaatcatataggaacaaagtgtgatcaactgatcaatctctagtctctacaagactacaacaaacagataataaagtacaatattcaaaatgtacaaacaacacataacaaaaaaattaggaaaattcagatgagtgaatgtaaagtttccatatatattgataatattatctaccatatttggaagcaaagaaataatgttctccacaacaaccaaatcatccctcctccaattatctttaagaatattgatcgagatatccgcaacgctatctcgggtagaaggcataagaaaagatggcggaagttcatgcttctttggattcgatagctcggtcttttctttgttgttcttgaatatattgtaatcttgtttttttatcttttttgccaagattgcactatcattaggtaaagctctttgtaataccttcaatttcattatatgatatttacaagtcagcaaaaacatatatatattatcatatgggtggtatcaaaatcagatgttcagtcctaaaacaataaaaccagctcacaaatctactaatcatatttttagtttaattctcaccacgaagaattaagctaaagacaacaacaatggagaacaatctcatacacgagcgaccaaaaacccaagaagcaatcagattaaggttatgtccaattataaaagtcaaaacaacaattaaagactatgtaactaagaaattaaatctaaataatatcgttatctagatagagcaagcgaaagccaccagttggagtaagccaccaccaactccattgacacaacaattcacaacccaaaagacctctaacgagtgacacgattcggtgcatcgactcagctgttatttgaccaaaatacccctgttaattaacacacatcccgaagatg

SEQ ID NO: 4346 - DNA, 3000 bp, Unknown
  misc_feature (1)..( 3000): cDNA_ID_1823976_gDNA_ID_1620701_Annot_ID_48767 3000 nt of promoter + ATG
ggtgttttgttatggcgtatgtctcggatttgtcatcgtgcggcttttagcatttctttttgacaattctaaatcaactttcgaaattggatccaattccgattgaagaaacttttaaaaagaggatgtagaaacattggtattcatttgtaggtggtttgcaaatgatgcatcacatttttcaatattcaagttcatcttaattagaagaaaaaaacaaaacgtttatgtcaaagttgcattagcatgagtgcatgactattctaaaaagattgcatgtaacaaaattaaacaacaaatttggagcttatgttaagaagactacatattccatggggaatcgaatctaagacaagtatcttagttgtggactatttagaagacaaaaacaaagtctttttgttgttaaagtgtttgaaataagtaatgttgtatatgaaagaatgattaatatttcaacctaattgaaattttgaaactctcaaagtgcataatgaaaactattatttatatagtggaaagcctcattgctatatcatggctatcattaaggtttttggccatgtctaattacttttatatgaatagttcccaacagatgtaaaggggctaatatctattctagatgcgtgtccatatatgtattaatttgttgatataaagtaataaaacaacacatcacatccatatctacatcattcatatgtattaagcatttttattgtaagaaggtactattgaatttttatttatgacttcattgttagctaaataaaatatatatatctccctttccttttatgtgttcagaaaaatattaaaatcttcaattttaatttaagatatcagaatctaattatctataatggatgtttgattattttctttatgaacaatgagaaatgttacaaacaataattttgttattaattttttttttcaacaaacaataatttcattagtaaatttctcatattataccattttgtaaatctacaattctatttttgttagttttattattgatttaaaacttatgcataactttatcatttgtgtatctatctatccggattagtattacggtattaccacaacaaacacgtcgaaattgatatttactttgtccttggttaagctaaggttcttcacttccttttagctccccattacatttacatcttcaccttaggtatttctatctctcttttctaagattttaacaccagcccaacattctaacattactctactccgaaaaagaatgttagattcttatttatttataagatcaaatatgtagatatacaattttagtatagatctcacttatagcagctagagagatgagtaataagaattatctgcagaatttattcatctagtctttggttggtgatacttaagcaaaagtcccttactcatagactcatagtcataggcgcatagacgcatagtagtagtcatattagacccatactccctagagaagagaaaaaccattctctgaaagtgacaagagataacttcatattatcaatggaccgaccaaccatctgatcaatgttggctagccatacattcttgtttttattttccatttccaaatcaaaaagcggatctgtgtctgtgatttatgctgaagaggcttttagaaaattagaaaaaaaatgtaatttttgttttccaaaatttaaacatcttttaatagcaaaacaatttatatttgtctacatatacatggcgtgttactctagaaacaacacaaatttagaaaatactattttttttattctcatttagaaaaaactattttaattttgcaactttttagaaatagtaaataaaatattattttaattcagaaaaagatatgagatttttatttctctacaaaaactatttttagttttgcaaaaatagcaaataaaatattgtttatacaaaataaaagatatgaccttatacaaataatattttaatggctaaaacagaacaaaaaaaaaaaggtaggaaacgtgggccgaacattatcagaaggattcaagcgaagcaaaatcccaccctttcttctgtgacagagtgtctgtatttgttgtttcccttcaattggagagagtaagcgagtctcttacgcccagagagagagagagagagaggcttgtttgttttctctcctctaaggtaaaataatcctcagatctctgagtctcattctcttcaaattcttccgatttcttctctcagattctatgtttttctcattatctcttccccgatttatagatcttttctgcaaaaagttcgggattttttttcgtgaatttcgaagaatgttggcttttttcttcgtctaagtttctttttctctcgtgggatttgatgatttgatgttttaatttgattcatagctgaaagttttgttctttaatacattgtcaaggttctcttcgttgattggctctgtctttaggtaatgctgagaatgttataatcttataatgtctcccttatgttggatcattgacccttgattagatttcttctttggatgtgttctcttttgcaaatcgagctttaccaaatcctcagatgccaaatgcagtcttttagttttagattgcctttaaagcaatagatttcctagtaattgacattgaatttttcagtttggatgatcaacagatttatgttcttgtcagatgaagatgttgtcattttttttctattgatatttgtatttgaatgagtactgtttcatatgagcagaattttgcagcacagtaggattatctttttattgttttgggatcaatttggttggaatttcttttatgagctagctagaacttaaatcttctaacactatcgtgaattttgtttcacctttaatgatatattgttcattctcaatgtttgtttctcaacagtactgcatttaagatttttggttttggatttacttgcagaaacaatcagtctcataaagtggcaaagatg

SEQ ID NO: 4347 - DNA, 3000 bp, Unknown
  misc_feature (1)..( 3000): cDNA_ID_1823964_gDNA_ID_1620701_Annot_ID_48771 3000 nt of promoter + ATG
tagttctactatattatttggaaagtacattttaaatgtaaccttaatttttgtaattaattacatgacaatgccattagaaaaatttaatcaaaaacaaaaatctttaatgacgtcattaagattaccaaaatcatttaacaacaatattcatctcttaattataaggtttattggatctaaagacgggtcatcaaagatttcctaaactgaagcaaaatacactaaatattcaaatatctatctgttaccaaattataaacaaataagttcgtaaaacaatttaatattttatatacgaaatcaattaaatcttaatcacataaaaattagcacaaaaaaagtattcaacaattaaacaattatcaaatctctgtgttatataagttttgatactatattcgaataaagtgtaatatatcttttcaatttgtattctttaactaatttaagctacctaatatatttgctaatcttatacctatcaaaaccgactatcgtttcttatctctacagtatttttgcaagacttttttagtggatttggataaaagtgcattcgggtcatatggtacattctcctattaaataaatatggtgcactcctatgttattagctaaaatattcagattataattcagagtcatatcataaataaaattaatattaataaaataaatggctttttggcaagacggatttggagagacgggtttttgaatcaacattaataaaaaaataaaatataattaatccactgtttgaatacgggttaaatctttaatttattattttttaagaccactaatattaaacatatcaaatcatcctaatttagaaaagattatataaaaccaaaaatgttatgtggtatgtataatgttactatatataaaattaaactataaaatataaatgtgttagagaatgatacaatttgcaaaacttttatatataataaataattcttaaattttaaaaattattactttaaaaaaatattacgggacgggtaaaggaattacagaacgggttttattttggaattgggttatatggtggatgtatttgaatcaatatttataaaattttaaaatattattaatatgctgttttacaaggggttaaacttcagttttttaacaattgtctcatggattcgtggtatagcgttacttaataacaattataaactgtaaaatataaatattttataaaaataaaatttgcaagttttaatagatattactttaaaaaaataaatcatcccgcggtataccgcgggttaaaatctagttctgtttaaaatctccatgtttcttccttaatcacacttttacttttggtcatatgatatgactcatattttagtgttatgcattcattacatgacatggttttcttcaaattttggctacaaagcacaagaaatgtgagaataccaaacattaaggttatgattcgtaacattgcataatagcataacggtataagttgcataataaaatatgtagaatgaaaaaccgtagaatcaaattacttaaaaatatatgttgattggatacattttacagaacgacaaataaaatattatatcaacaatatatatttatactaataaaactgtttttaataaattttaagtaatatttgataataaaaatataagattcttaaaatctattaaagagttgtgaaaatgctgattagagattttgaaatgaagtaagtaaagatatggttagttatttggttgttcggatttttagggaatattatttcgtgtaatattgaattagtagagattcaagggattaatgtgtgcaatttatgagggtagtgcaaaataatatttttgtttaggtaagtaattagtgcaaaacgtgaataattgatcaaaaatttggtcattgtcataaagaagacaatcttgtctgattgattttgtagggactaaacatacaatatcgaaattgaaaaatgatttttcgacacaaatcttccccaaaaatgtatatgtagattattaataacataatttttgtgtaaataattatagttttttattgtttaaaattgttagtatttaagatgcgtaaaataataacaatttcttatgcgaataaaaactatatacccattttttgcataatgaatttttacttgtaaatttaaacaaaaatacaaattgtgcgtttttacgttttcttatacaattatgcaaattttcttaatatgagaatttttttacataattacattaaaaaacgccttaccaatcagagccttaaacctataataacttcacacgtaaatggtatttattttcttctagaaaaagagaatggtggataggggaataaaataaaaagttggaaaaagaaacgattctacaacatgtaatgaccaaaacaccctccttcctccctctaaaaccccattctctctctcccactctctttttctctgttgctctctcctgagttcttcttacatgaaagtccgctgaactctttaggttcgttgtcgattattcttgctttatgtttgtgtatttattttttgaacttctgggctctttctgaaattcaatttcattgacccatcttctctgttcatgacaattcgtttgtcctaatgttacactcaaaacccttttttgttgtttatacccaaaccctctatctatctgtacttccttggaacgaaatttttttgctttgactcaatttctttcttagaattagaacattgagaatgttggaactcaaatagatgttggttcgattttgaactttttgtttatttattaatgttttctatggctctgatttgaattgtcaagtttaagacattcttcttcttctcttagataccctaatttcaggggtatgcacattttgcataaaagttccaatctttcctgatcgttgacaatatttatgtgtacccttttgtttgtctcagtgtgttaaagaagctacattgtgtttgtgatg

SEQ ID NO: 4348 - DNA, 3000 bp, Unknown
  misc_feature (1)..( 3000): cDNA_ID_1823956_gDNA_ID_1620701_Annot_ID_48773 3000 nt of promoter + ATG
tgaaatggttctggcttagatcaaggtactctatattctcccattttgaccatcttgtcagatttccttcaaactggttgtttgagagatcgagtaaaacacatcccccagtcaagagaggaagctccccggtcagtgaatttgaagaaagatcaagggtgtgaagagtagttgacatgatagaacttactggccctgaaacacaaaaggaaaaccaataaaaaaatattagatttctagttttcttggtgccaccgttaacatataacaatttccactatgtagaagataaagccaagagcatacctgagagattgttgccacttaaatccagcgttgttaaaagcaaagagtcaccttttaacaaattattgggaagggaacctgagaatctgttgttgctaagcttgagaacttcaagatcatagacataattgaaacctggtaattctccagataacatgttgtagctaagatccaagacttttaagttctgaaacaactgaaacccactagtcaatgaaccttcaagctgattatggctgagattcaagtgcttgatactctcagaaacaccaggtaacagtttcccagacgtcgtcaccaatctgtttccactgatatcgacatagctcgcattcgttaaaaggaaaaactccccatcaagattaccatcaattgaattaccatgcaaatcaagcacttcaagacttgaaatcaactcaaagccccttggcattttccccgtgaatccattagaagacagattcaagtacagcagatcgttcagccttgtcaaggactttggcaaaggtccagataaggagttgctactcatatccaacgactgaagtgaaatcaaaccacccatagactctggaatctcaccagaaaagttgttaccagataaagaaagattcctcaagcttactgatctaccaatctctttaggcaatgaagaagagaacagattatctgataaatccaggaactggaggcttttgaaactgcctaaatcatttggcaacacaccagaaagggaattgtttgacatagatagcttgacaagctttgtcaagttggagaacagactgaaatcagcatcagcagtcaaacccaaattatccaaaacaacaccagccacattaccgccattgcagacaataccattccatgaagaaggacaaccattgaagtcaatagactcatcgttccatgaattaaggacaaaccctgtagggtcatgtttgatgcctttcttgaattcaagcaatgccatgatgtcctgtgatggaagttgccccattgcagatagaaaaaacatggagagtaacaaaatcctagaaagattcatccttccttgacttcaaatcttttcccccaaaaagctacagtttttgaagaatcccaacaacttttccagctcaccaacgcagaaaattcatggaaccccaagtaaatctgacataaaacataatgaaataagacaaaacccatcaatgttaccaaaaaaaagtttaaatctttctgcaaaaatcaacaataccagaaatttcactctgataaaaaaaaaaacagaagctaaagaaagaaactttacctaagatgaacaaatcttctgagaaaccccaatcaaacaaaatgcagtaatgctactgagtgagaagagacaatcttcactcaaagggaatcagctgaaaaaaacattaaatgaacaaatgggctattcaatatttgggtcccattccgagatctaacctaactccaaagcaaagagataaatgaaaagtgaggatttttaaacttacggggatgaaaaaagcttctcactgcaagaacaatgtcgacagagttgaagaagaaggaagacaaaaactttaaagcagaatcattttgttcattagctcatgaactgcacggggttttggattaagctcaacagtgttgtagactgagtcactgagctaactgagggaaatctttgtgggtcactttaaaaattaaaaacccttaaaagattgtcactgtttaagaacaaaagaaagaagccaaaacaaaattaaagatagagaaaatgttttgctagttttcacgttcgacagtgacgaacgacaaggaccttgtaaaagggtaagtcttgaagcgtgtgaacggacaccaaatcaaaaaccctaaataaaaagtaaaatagcaagaaattattttcatgggttcacgagaagaaaattatatattaatttactttttcatagtcttttcagtgaggaaagatttaaaatatagtttaattacccgcctggaatggcccgggaaaggaatccaaaaaaaatgaaaaaagctacttacactaatgtttttagtgagtgtgaccatggtggacgtgaaagggtttatccaatatggttatgagtctatgtccttgcctttagtgagagagatttacagcattgggaaaataagcgaaaattgcgcagtgttctaataaattttggtagaaacttgcaataaatgaatttacataaataaataatagggaaaataaaaagagtaatgagagttcggagtgaatgttatttacaccaaaatacagatattaaaagcttgcaaggaaaatgtgtagtaaatgaaacatgattttttgaacaatccagaaaaaatagtaatgaatattcggacaaataaatatttttgaagttgataccacattaattagtaggaaaatgtagaagcgaaataaataccgcgtaggaaaatgggtcccacatgctgactacgttgactagggaagaccggaagagacaagggcatcagaccaattatttgggttctactgataatgttgaaagtaaatgtccgggttcagaataaattaatagttaaggggtcataattcaaaaaacaaaaatctgagtgttttgatgagattacacacttacgtctaaaactcactctcatttgctaattgttaacttgctctgagtttgaagaaattcatcaatg

SEQ ID NO: 4349 - DNA, 3000 bp, Unknown
  misc_feature (1)..( 3000): cDNA_ID_1823952_gDNA_ID_1620701_Annot_ID_48774 3000 nt of promoter + ATG
gaagataagagagtcgtcaacataccatgaaagtaagtgtaccagcttctgcagcaagaacacctccagagacgggagcatccaacatgactggcttttcccaattatctacatcaaagatgcttgaaactagtgaaaatgaaacaatctcgacttgttcacaagaagaacaaaatgaagctgttgttaactcataagaagaaactaacttccttccaaatcctatctaagctttacctctcttttctttcaaattacaattagaaacagcaagtgagatttttcgagttgtttgtggatcaatagtggatgaatctataaacaaagcaggtcttatatcattttctccaagaagcaacccatttgttcctgtgtacacatccatcacctacatcaatcacaattttttttccttcataaaaatcatccaatcaattgaagattaacattctttcagtaccaggagtaaacaacaatactatctcgtagactaggtgcagctaatcatacagctaacaggacgatctttcaaactgttttcatataaaactattgctaaaggtaaataacttacatgagatgatgaaggcaacattgtaatcacaacttcgctatcttgtgcaacttcataaggagtttctctagaagagactcccatttcagtgaacattttcataacatcacggtttctgaaaattcaaacacaagtatatgcacaagaaagttaatcaaaggaatcaacattaaccaaatatgaaaattgataggcagcaaaacgcactcaaagtacattacatgtcatgaacggtaactttatatccagctctaattagattattcaccattctgaatcccatatttccaagtcctatgaaaccaacattctgacaaaacagcaaaaatgagacttcatttacataaattttgggtactgaatcagacaaattttgctgttaaaaatctaatccagacaactttttttgcagaactgatgaatttagataagtggtcaagatcaataagcaatttggccactaaaattcttattaactatgctcgagattacaaaagttaagatcttttattccaactaccttaaggatcatgttttagaacgtttcaataaaattctaggtgacttatgaggaaaagagattatgttttctgatcatgaagacaatttaaaaagcagaacctggaattgatttgaattttgagacgaagaagagaaccggtggagcgacccagacacgaaattggttttgaatttagaaagacaaagtagagtttgcgctctgcgaatcgccattgatgaatttcttcaaactcagagcaagttaacaattagcaaatgagagtgagttttagacgtaagtgtgtaatctcatcaaaacactcagatttttgttttttgaattatgaccccttaactattaatttattctgaacccggacatttactttcaacattatcagtagaacccaaataattggtctgatgcccttgtctcttccggtcttccctagtcaacgtagtcagcatgtgggacccattttcctacgcggtatttatttcgcttctacattttcctactaattaatgtggtatcaacttcaaaaatatttatttgtccgaatattcattactattttttctggattgttcaaaaaatcatgtttcatttactacacattttccttgcaagcttttaatatctgtattttggtgtaaataacattcactccgaactctcattactctttttattttccctattatttatttatgtaaattcatttattgcaagtttctaccaaaatttattagaacactgcgcaattttcgcttattttcccaatgctgtaaatctctctcactaaaggcaaggacatagactcataaccatattggataaaccctttcacgtccaccatggtcacactcactaaaaacattagtgtaagtagcttttttcattttttttggattcctttcccgggccattccaggcgggtaattaaactatattttaaatctttcctcactgaaaagactatgaaaaagtaaattaatatataattttcttctcgtgaacccatgaaaataatttcttgctattttactttttatttagggtttttgatttggtgtccgttcacacgcttcaagacttacccttttacaaggtccttgtcgttcgtcactgtcgaacgtgaaaactagcaaaacattttctctatctttaattttgttttggcttctttcttttgttcttaaacagtgacaatcttttaagggtttttaatttttaaagtgacccacaaagatttccctcagttagctcagtgactcagtctacaacactgttgagcttaatccaaaaccccgtgcagttcatgagctaatgaacaaaatgattctgctttaaagtttttgtcttccttcttcttcaactctgtcgacattgttcttgcagtgagaagcttttttcatccccgtaagtttaaaaatcctcacttttcatttatctctttgctttggagttaggttagatctcggaatgggacccaaatattgaatagcccatttgttcatttaatgtttttttcagctgattccctttgagtgaagattgtctcttctcactcagtagcattactgcattttgtttgattggggtttctcagaagatttgttcatcttaggtaaagtttctttctttagcttctgtttttttttttatcagagtgaaatttctggtattgttgatttttgcagaaagatttaaacttttttttggtaacattgatgggttttgtcttatttcattatgttttatgtcagatttacttggggttccatgaattttctgcgttggtgagctggaaaagttgttgggattcttcaaaaactgtagctttttgggggaaaagatttgaagtcaaggaaggatgaatctttctaggattttgttactctccatgttttttctatctgca

SEQ ID NO: 4350 - DNA, 3000 bp, Unknown
  misc_feature (1)..( 3000): cDNA_ID_2107199_gDNA_ID_1620701_Annot_ID_48776 3000 nt of promoter + ATG
agcgcggagctcggcttaatctgtcgtccgacgaaaccaaagttgtcgaaactattgattccgtcaaaacggtgcgagcgcggagctcggcttaatcggttgtcagacgaaaccaaagtttgtcgaaactattgattccgtcgaaacggtgcgagcgcggagctcggcttagcactcccttaagtgtaggttttatccaagaccgttttaccgatacatggcatacttaaaggggttcgtgcgttcgtttatcgatcgaatgccgggccaggacaccgatgtaaattagctcgatcgctacgaggtccagcggaaccctttttaagaataatgatgaattgaattacgacaaaaatgaaaattttacttatctcaacgcaagagtttgtggtacgatcgagttttgacggtcgagttcgttgatacaattatcgaaaagacgatgctcaatgtctgccctagttcttgtcagttcgttcgtccgacgtgacgttatgctaagtggcatcgttttcttcgttttagtgggatggcgttggaacgagatctccgacgttttgagtgacgatgtgaatttcgctgttgaggagagtttggcttttcttcagttcgcctagctccagcgggtgctgttactttcactttgcaagatggcgcaaatggcgtttggttggttgcgtcgttgtgtacgtccagagccgtctggttctttcgtttagcttctcgtagcctgccgacatgatgtgttttgttagtcgttttggtgtggtcattgctttgcggtattcgcaaaacattggcgtcagtgtcggatcgtcgatatctcttatggcgcgtccgacctcatggaccctggagatggctcaattgatttgggcgtgaaggtcttgcacttggtatctcgtttatagcggtctgaggaattgccgagctgggtttgtttaagacaacctgaatttcttcgcgtaggtcgggtatgcgaataacgactcatgtgcatgcggctaattttatcttgtatgtgctcttgggcggcggttaataatcgcgtcgcgctgctttaaatgatcgatgatgatgttgattagttcttcgccgcgttggttggctttagccgtatcgtccaggcgatgaaatcagctaagtgaagcttctccttggtctttttgcaacgctaggtattcaggcgtgggcgataacgaggtcggtacaatagatgacgccgagtagtattctttatttgagttttcccgtgcgctgacgttatcgtccgagctgccgagctgggagtgtcatcgtcgaggttctccaagtgacgtccgcctgatgacttctcctcttgttcttggttaggcgtgagtgataacgaggtcggtatgtttattgaggttatgggatgttcctctttgatcggtggcacttcctcgtcggtcagtgttattgtcctgactgcccggctggaagtgtcatcgcctaggatgatggggtcgatagttccttgaagtccttttcttgtcggagaacatgctgcgatatcgaatgaagaggtcgagtgactggctctcccggggatcgacgttgtcgttttacttccagagcctgacgagtcggtatcgaatgctccatgtagtctgtttgttgtcactttgcttcgtcgctgggtcgtagttttgagagatatcttcgagctatccccctacctggcgcgccaaccgttgatgcacgaatcacacaagtacgaaaatgggatctctagggaaggaagaagaatcgttctattaatgacgagcccgcgacttaggcgaattggacggattacaaaggatgatttcttcaacaagcataaatggaaaaagaacgagccgattgtagatgaaagacgagcttgaggccggaaaacgatcttgatatccgaggaagaatagagtttattcgttttatagctgaaccttgtaaaaggctgcctacgtaccctcagaaagggatcaagccacacgtagttcatattagaataagtgagctaggccgtcattggaggtaggtcggcaggtagttgacgagccggcaaatgtgcgacgagctggatgaaccgtggtagagagacttggacaaaccgagttgtttgctggtgtagacgagctgggcgacgagataggtggactatgcagtcaatggacgaactgccgctaggcgaggaggtagatgagttttgcagtcgagggatgagctgatagctagacgaggagttggtcgagctgaggaagagcttgaagacgagctgaggagcttgatgacgagctgaggagcttgaggacgagccgaggagcttgaagagcttaaaggcgatctgaagagcttgacgaagaggagcgagctaacgagcttcttgagaagggcgagaccccaattcttgagaagggcgagaccccaaatacaatcaacaatgtatgcttttttccgtttcttgcgttttgggtttctttatttcttatctctattgagacaagtctgttggcccttgagaccccaattcattggtgtttcttaaaccggatatgtataactgtctaaaacaaaatttaaaatagcctagtaaaccgatggttatgactgttacggtttccggttagtcttaaccgactctttcaattacaaatccaatcttctcgtcgtcgtcgtcgtctctatttctctaccaccgttgatgttagggtttcggctgtattctcaccgctgctgacggagacggcccgaatccgcaatttaatcttcgaggttcgattttagtgaagaacaagattcaatagtgatatgcagatctcatgtctcccaatttcgattccttcgatcactcctcgaacctcaattccactcttaccatcactctcctcaaatcctcgccgcattttcaacctcacttcacttcagagcccaaatcactgtttcttcaaaagattacataaatctcagactggtttcagcaatccagttttggctgcc

SEQ ID NO: 4351 - DNA, 3000 bp, Unknown
  misc_feature (1)..( 3000): cDNA_ID_1823946_gDNA_ID_1620701_Annot_ID_48777 3000 nt of promoter + ATG
ggctgccatgagaagagaagaagatgttgaagtcgatgattcgttttatatgagaaagtgtgtggagctagcaaaaagagcaattgggtgtacaagtcctaatcctatggtaggttgtgtcattgtcaaagatggtgacattgttggccaagggtttcatcccaaagctggtcagcctcatgctgaggtaacaaaaattcaatctttctttgttgggttactgaaaatgagcaaactttaagtcttgcttgtggaattgttgttgttggcattggtatggtaggtgtttgctcttagagatgctggagagttagctgagaatgctactgcttatgttagtttggaaccatgtaatcattacggaagaacaccgccgtgtacagaagcattgattaaggctaaggtgagaagagttgttattgggatggttgatccgaatccaattgttttttcttcgggtattagtcggttgaaagatgctggaatcgatgttactgtgagtgttgaagaagagttatgcaagaagatgaatgagggattcatccatcgaatgttaacagggaagccttttctcgccctcaggtaaagttcattgcttctcttgagtggagacaaatccgagtcaatagattgtttttaagttttgaaaatctttgcaggtattctatgtctgtcaatggttgtttgctagacaagattgggcaaggggcttcggatagtggtggatactactcgaagctattgcaggaatatgatgcgataatactttcttcctcgttatcggatgaactctcgagcatttcttcacaagaagctattaatgtttcgatccaacctattcagatcatagtagctagcaatgcacaacagtctcatatccttgcttcttcccacactgtggaagaatcgggtccaaaagttgtagttttcaccgcaaaggaatcggttgcagaatccggaatcagtagtagcggggtcgaaaccgtagtattggaaaagataaacttggattccattttggattattgttacaaccgtggactatgcagtgtcttgttagatttgagggggaacgtcaaagaccttgaagttcttctgagagatggatttgagcagaaactattgcagaaagtaattattgaggtcttgccggaatggagcacaaaagatgagagacagatcgcgtcgatgaagtggttagaatcaaagcatgtgaaagatttgcagtctaagcaattaggtggaagcgttttgctagagggctatttttgatgttttcatgtatgaatgaatacaagtcatgatatttaccttttttaaagcatagtattattaaggttttacagatcctattattaatagattgataacagatttttgagaaaatgttgtattttcaaaagaaaatattttcacatgttgagaatctgattcgaccttctatggcctacacatgatgggtatcctaagatgagatgttttttcttaattggagttcataaaccaaaacccataaaaaaaattaaggatgtgtaatagaatgtgaagtacattcaatgagaactgattgttgatgtcgattgcgttacaaatttgacaattctttttggattttggtggaaatgtgaactaactgacaacaaacatcaaccatgttggatttgtttttgtcaaaaccgatatatctagagatattcgaaagaaagaacgaaataaacactatacaatagtcaattttaaatcactttatgatttaacaatcctaagttcctaacttcaaatttaagatttacaatagcatgaattttagtctttcttattgtttcatagcattattgtattaaaaaattactctacagttacaccatctctctttataatggttgtttcaattgagttaatcatttactattaatctgaaaatttgtagtatgaatgttattgttggtacacaaattggtgatggaacaaaagattaagaggatatcttttatgtcgacaatggtcgagtggttcaacaaaatccacgcaatcgcctgagcgaaaaagttgaccatactcagccccaccactctccacttcataacctttttcttttatccttcttccttttgcatttatacaagtattttccaatgacggaatgcagaaagaaaaaaatttgttaagcaaatgtcataaaatataaaaatatctatagcaagtgactgtaactacgattaactcaaccgattggagaattgagtaacttatatcgaactcaagttcgaacatacgctatatatgagagtcaaaattattgatcaaaatatgcaatgtaatggtccaaaattcaaaatattaccaaaaagaaattctataagttaatgttggaattatgataataaaaaaatactaattgatagatatgaaacaatttaagacgatccatttgagacccgggaaatagattagtttatcaagtattaatttataaagattttactttggactatttgttcaaaaaactacgtgatgatgagttttctatgcaaaatcaattaccgatatgtggatgattcttgtcttttgtagtaatgttggttatctttcactcttaatgagaggtttaatatcatgtgagagttaacgagcttcttatttgagtcaattgtagataaatagcttaacatatgcccttataaactagcgttgattctcaatccaatttgaaactattaacagaaccattaaaaactatatatgaacacataaaatatataattgaccataacgacgagtcaagatatatatttaaagaacttacttttttccactttgttttgctttttttttttttagtctttggtacatatatattacaaacccttttccagtaaatagttagcacaaactaattatcagatgtcacttaaaccaacctccttctttatataagcttggttaacattgagtttgttatcatggtctatgtgaaacaattcaggaataaaaaaagaa

SEQ ID NO: 4352 - DNA, 3000 bp, Unknown; identical to SEQ ID NO: 4351
  misc_feature (1)..( 3000): cDNA_ID_2173389_gDNA_ID_1620701_Annot_ID_165079 3000 nt of promoter + ATG

SEQ ID NO: 4353 - DNA, 3000 bp, Unknown
  misc_feature (1)..( 3000): cDNA_ID_2107199_gDNA_ID_1620701_Annot_ID_165078 3000 nt of promoter + ATG
aagttgtcgaaactattgattccgtcgaagcggtgcgagcggggagctcggcttaatctgtcgtccgacgaaaccaaagttgtcgaaactattgatttcgtcgaagcggtgcgagcgcggagctcggcttaatctgtcgtccgacgaaaccaaagttgtcgaaactattgatttcgtcaaaacggtgcgagcgcggagctcggcttaatctgtcgtccgacgaaaccaaagttgtcgaaactattgattccgtcaaaacggtgcgagcgcggagctcggcttaatcggttgtcagacgaaaccaaagtttgtcgaaactattgattccgtcgaaacggtgcgagcgcggagctcggcttagcactcccttaagtgtaggttttatccaagaccgttttaccgatacatggcatacttaaaggggttcgtgcgttcgtttatcgatcgaatgccgggccaggacaccgatgtaaattagctcgatcgctacgaggtccagcggaaccctttttaagaataatgatgaattgaattacgacaaaaatgaaaattttacttatctcaacgcaagagtttgtggtacgatcgagttttgacggtcgagttcgttgatacaattatcgaaaagacgatgctcaatgtctgccctagttcttgtcagttcgttcgtccgacgtgacgttatgctaagtggcatcgttttcttcgttttagtgggatggcgttggaacgagatctccgacgttttgagtgacgatgtgaatttcgctgttgaggagagtttggcttttcttcagttcgcctagctccagcgggtgctgttactttcactttgcaagatggcgcaaatggcgtttggttggttgcgtcgttgtgtacgtccagagccgtctggttctttcgtttagcttctcgtagcctgccgacatgatgtgttttgttagtcgttttggtgtggtcattgctttgcggtattcgcaaaacattggcgtcagtgtcggatcgtcgatatctcttatggcgcgtccgacctcatggaccctggagatggctcaattgatttgggcgtgaaggtcttgcacttggtatctcgtttatagcggtctgaggaattgccgagctgggtttgtttaagacaacctgaatttcttcgcgtaggtcgggtatgcgaataacgactcatgtgcatgcggctaattttatcttgtatgtgctcttgggcggcggttaataatcgcgtcgcgctgctttaaatgatcgatgatgatgttgattagttcttcgccgcgttggttggctttagccgtatcgtccaggcgatgaaatcagctaagtgaagcttctccttggtctttttgcaacgctaggtattcaggcgtgggcgataacgaggtcggtacaatagatgacgccgagtagtattctttatttgagttttcccgtgcgctgacgttatcgtccgagctgccgagctgggagtgtcatcgtcgaggttctccaagtgacgtccgcctgatgacttctcctcttgttcttggttaggcgtgagtgataacgaggtcggtatgtttattgaggttatgggatgttcctctttgatcggtggcacttcctcgtcggtcagtgttattgtcctgactgcccggctggaagtgtcatcgcctaggatgatggggtcgatagttccttgaagtccttttcttgtcggagaacatgctgcgatatcgaatgaagaggtcgagtgactggctctcccggggatcgacgttgtcgttttacttccagagcctgacgagtcggtatcgaatgctccatgtagtctgtttgttgtcactttgcttcgtcgctgggtcgtagttttgagagatatcttcgagctatccccctacctggcgcgccaaccgttgatgcacgaatcacacaagtacgaaaatgggatctctagggaaggaagaagaatcgttctattaatgacgagcccgcgacttaggcgaattggacggattacaaaggatgatttcttcaacaagcataaatggaaaaagaacgagccgattgtagatgaaagacgagcttgaggccggaaaacgatcttgatatccgaggaagaatagagtttattcgttttatagctgaaccttgtaaaaggctgcctacgtaccctcagaaagggatcaagccacacgtagttcatattagaataagtgagctaggccgtcattggaggtaggtcggcaggtagttgacgagccggcaaatgtgcgacgagctggatgaaccgtggtagagagacttggacaaaccgagttgtttgctggtgtagacgagctgggcgacgagataggtggactatgcagtcaatggacgaactgccgctaggcgaggaggtagatgagttttgcagtcgagggatgagctgatagctagacgaggagttggtcgagctgaggaagagcttgaagacgagctgaggagcttgatgacgagctgaggagcttgaggacgagccgaggagcttgaagagcttaaaggcgatctgaagagcttgacgaagaggagcgagctaacgagcttcttgagaagggcgagaccccaattcttgagaagggcgagaccccaaatacaatcaacaatgtatgcttttttccgtttcttgcgttttgggtttctttatttcttatctctattgagacaagtctgttggcccttgagaccccaattcattggtgtttcttaaaccggatatgtataactgtctaaaacaaaatttaaaatagcctagtaaaccgatggttatgactgttacggtttccggttagtcttaaccgactctttcaattacaaatccaatcttctcgtcgtcgtcgtcgtctctatttctctaccaccgttgatgttagggtttcggctgtattctcaccgctgctgacggagacggcccgaatccgcaatttaatcttcgaggttcgattttagtgaagaacaagattcaatagtgat

SEQ ID NO: 4354 - DNA, 3000 bp, Unknown; identical to SEQ ID NO: 4348
  misc_feature (1)..( 3000): cDNA_ID_3073090_gDNA_ID_1620701_Annot_ID_165074 3000 nt of promoter + ATG

SEQ ID NO: 4355 - DNA, 3000 bp, Unknown; identical to SEQ ID NO: 4347
  misc_feature (1)..( 3000): cDNA_ID_3073094_gDNA_ID_1620701_Annot_ID_165073 3000 nt of promoter + ATG

SEQ ID NO: 4356 - DNA, 3000 bp, Unknown; identical to SEQ ID NO: 4346
  misc_feature (1)..( 3000): cDNA_ID_1823976_gDNA_ID_1620701_Annot_ID_165069 3000 nt of promoter + ATG

SEQ ID NO: 4357 - DNA, 3000 bp, Unknown; identical to SEQ ID NO: 4345
  misc_feature (1)..( 3000): cDNA_ID_3091158_gDNA_ID_1620701_Annot_ID_165067 3000 nt of promoter + ATG

SEQ ID NO: 4358 - DNA, 3000 bp, Unknown
  misc_feature (1)..( 3000): cDNA_ID_1823915_gDNA_ID_1620701_Annot_ID_48786 3000 nt of promoter + ATG
cttgtcgagagcatgcgattaactcaagtcgctcacacattttttttttttgttttctcagaaatcattattaaatcccgaataaaactataaaagtaattataaaattaatttaagtaaacttggtattgggtattgttgtttactaaactttttatgttcaaaccattttgtatatatgtaaagatgaatctttataattaaaaagaagtaaataattacgcatatatcatgagcacacatgttttgacatagagcttgagcacacatgttttcacatactctctctaatagtaaatttacatgcaatatatgcttggtttgactttaattaattgccattatacttttaatatatgtccctagattttttttttctgtttatatgtgattttctcatttaatcatatctacttgattctacaaaaattcacatacagacaagagttaaccattggtttttgactacgcttagcctaaagtttatggtgtgtagacagattttcagattttattacaccacaatttttaacacgttttgcttataatctcactctcctaaatactgaaagtacagtttcttaaatgtccacgccccaagaacctataagaatacaccttccacaacacaaaattagatcataaaaacaacaagaacttataatttaagtcttctctttctacgaaaaaatcaagaacttcttgaaaaaaatggataacttgaatgttttcgctaatgaagacaatcaagtgaatggtttgaagcgtccacccccgtcacgagtgtgtccaaggtgtgattctgataacactaagttttgcttttacaacaactacagtgaatctcaaccgcgctacttttgcaaaaactgtcgtagatattggactcatggtggagctttaagaaacataccagttggtggaagttgtcgtaaaccaaagcgtctgaaggtagatcaatcttcgatttctgagatggtttctgttgagaaccaaccaattaatcatcaatctttcagacaaactcaagaaaacaatgagtttgttcgatcttttgacgcttcttcttctgctactgttactgccgttccgaaccattttggttatctaagtgaacttcatggtgtaacaaatttgcttccaattcaaagttttcgaacaatggactgcttagatttcggtgatgaatcttttcaacaaggttattacgatgttggatccaatgatttgattgataaccctttgataaaccaatccatcggtgggtatgttgataatcttacaagttattgcataaatcaagtggaaccaaagcttcaaccacgctatgaacatgaatcataaagccagcagtagtggaagcataggatcttgagacactcagaagaacaatatgagaaacatgtttgtttaggtcttcttaacattcggaagttaatgttccagtccatcgtttctacttcttttttttttattagtttcgtttatgcatggtttatgttgggtctttttttagttataaaagtttgcatctttgtttaagtcccaaaatattcagacataagttgtttaattcccaatttctttgatgcttgtaattttttttttaatctcgcgaaagcaaaattttaggctgatgccttggcaaaagaggtctcctcgcttgtatgaactcaattctctaaatcgaatgaaaacaaggttgtccaaaaaaaaagaaagttgtttgatcctttttcctttttatatatacaataagaactagagatatttctcgaacaatctcaacacgagttcgatttccgttgtgagaattaattgattaaaccttagtctcgattgtgaaatgttcagaattaaatattatcaatattaattctccaaaagaaatcctaaaatgttagtagccaactataaagtagatatgtgaaccaaaagaaattgagattatttattaaatatatgacgaatcaacaatgatgtaattaatacttagaaattcgttgaaatctatgttttaattaatacaacatttatagtctttaatgaatttctagattttaaaattttaattaattattgaaaaatgtgtttcttaataaataattttattttataggtaattatgactatatggttaaagacctaataaaaacataaatgaatagttacaacttgctctctcagattttcgagagccaaaacggccactttcatagacaaaatcttaatgaaattaaagaaaatctgatataacaaggacattgacaaaacgtccagattgtgttagtatagacgtggattatcataagaccgccggttaatgcaagggaaaaagctagattttgtcagtcatcgattccgacagagatagagatgaggtcttccacaaggaatttgaaacgtgctcactctttcctttttataataagctttcttaacttcattatccctatcgttttcaaaagttggcaaatgcattatcaccatatagtgaattagctatatggttacatgaattttttgagtgaattaactaaccatactgcatttccttctaatttttgtttacctccgtttcattatatactgttttaaaatatttttaacttttaattatatcgttatgaaatacacttataagggttttttttttctattgaataagctgaaataataacaataaaaatgattacgatcgtaaatttggtgtaatttctatgtaatgcttttaaatttttgagacaaaataaattgatcgcgacaaaacaaataaagacttacactacacgtgtctatacattaaatagcaaaagctattgacggtgcaaaacgtcaaaaacaaatgccctacgtcgcgggtaattaacaaactcatccacatatatatacgagtttcgtatctcaaacatttcataaatcaaaccatcatatacctctcaaatcatttctttgatttctataaacactattcttgttaatgactgaccataaaaacaa

SEQ ID NO: 4359 - DNA, 3000 bp, Unknown
  misc_feature (1)..( 3000): cDNA_ID_1823911_gDNA_ID_1620701_Annot_ID_48787 3000 nt of promoter + ATG
agtttgaattaccttagcttcttttttattgctgtgtagttatgtttctttttgttttctcttcatctaagtaaatgtacttttccagttgacggattccgaagatgtgaaaagtggacgcagaatgacataattgacatggtggactcaaaggaatcaaagacaacatcatggttcaaacggtttataggacgtgaacaaaaaccagaagtcacttggtcattcccttttgcggaaggcaaggtctttgtcctaactttgcgagctggaattgatggtttccatattaatgttggtggaagacatgtgtcttcattcccttatcgaccggtatgtgatatcagatgagcattctacttgtatatggctttggtctcagcactcaatagtatcatttgttcaaaccaagaggattcatctcgtccatgtctgataactttgtaaaatattttgtgatgtctggcctctcagggatttaccatagaagatgccacagggctggcagttacaggagatgttgatattcattctattcatgctacttctctttcaacatctcatccgagtttctcaccgcagaaagctatagagttttcttcagaatggaaagctcctccattacctggcactccttttcgccttttcatgggtgttctctctgcaactaaccatttttcagagcgcatggcagtgagaaagacatggatgcaacatccttctattaaatcttcagatgtagtagcccgattctttgttgcacttgtaagttcttacaatctttccttattttaaagcatgatctttaagaagtttaatactgcaggtcgatttaattgaaacattgagatggagatttgctgatttgaagttcttatgctttggaatactgagcagtttatgtgtttttgttgatttgttttgtgtagaatccaagaaaggaagttaatgcaatgctaaagaaggaggctgaatattttggagatattgtgattctgccctttatggatcgatatgagctagtggtccttaagacaattgccatttgtgaatttggggtattgatcatttctctcatgactccatatctgtttaagtctttgaacaatctctgataaggatcagtaaatgaacagtttccctcattgtagttactttacacaaatctaattatgagagtctgaatatcttccattcaggtccagaatgtgacagcgccatatataatgaagtgtgacgatgataccttcatcagagtggaatcaattttgaaacaaatcgatggagtctctccagaaaaatcactttatatggggaatctaaatcttagacatcgtcctcttagaactggcaagtggacagttacatgggaggtacaatggcttctgttctttacctgcatatagtctgtatgattcagaaatcagaagcagcctcagatactaaattttctcttatactgtaacaggagtggccagaagctgtgtatcctccttatgccaatggacccggatacataatctcaagcaacattgctaaatatattgtttctcagaattcaagacataagcttagggtctgaccctttatcatcgtcttacgttcatctccatcttttactgtcatgaacataagagtctcctaacattttcaaactatttcgactttgttgtcacagctattcaagatggaagatgtgagcatgggattgtgggtggagcaattcaacgcctctatgcagcctgtcgaatactcacacagctggaaattttgccaatacggatgcacactgaactattacactgcacattatcaatctccgagtcaaatgatgtgcctgtgggataatttgttgaaaggtcgaccacaatgttgcaatttcagatgaccaaaacatagcactagccggaagatattacaggattacagatttggcaccaccttaacccattttgtaatttttcctctttggtgctagttgcttacatttacacattcaagataacaatctcttattgtacattgattaggattttgtctaagaaagagatttacactgatatctaaacaaattctttcaaaacgtctttgccataacactatggggctaccaagaaagagaagccaaggtcactgtattatacatttatactactctgctggtctttaagttcttgagtcatgttatcaagattttggctttcatcaagtcgcatttccttaatcatctgcatttcttgcgcttcactgaaagatttccagcttttgcaagatggggaaatggaagagggcatccacaagatccaggtagatgtcactgagttgttttcttcagtgtttgccataatcctcatccggtagatgtgacatacccatagagacaacaagtttggttagtatacagatgaattgatcagaatcctgattgtataaacagaacatctaaacatcaatcttaagagtgtgcaggtcaatagcagaagcaactgtaatgaagaaaactcgaaagacggattgattacaacaaaaaaactgtggcgcaaagactaccaatttaatcttttcatgatcagatggatacagccaaatgtgcctttagaattttgtttagcaccatgtttaatccgcacgccaaaaccttacggctgtgaagttctgatacacggtgcgtgaatcaatcaagaagagaaaaagagaggcatagagaaacttgcacggttaagatatccagatgaactacacagtgataaagtttcactttttatgtctttgaagaagcattatagattgatagagaatcatcagagcttaacctgaaacgaaccatctttctccggacagagaatggcggcggctgtctgaagttattttgagaaagtgaagatttttagggttctgagaagtttccatcacttgaagtcttttaaattttaatagtatatgataatggaattgcctcgattctaatgcaattgacgacaatgcccacaagaacagagcaaa

SEQ ID NO: 4360 - DNA, 3000 bp, Unknown
  misc_feature (1)..( 3000): cDNA_ID_1824006_gDNA_ID_1620702_Annot_ID_48790 3000 nt of promoter + ATG
ttagattaatgtagatcatactaagcaactttggttggttctgagtaaaccgattttgtccctggggcagatgaagaagaagaggatgaaaacgacagtccaatcgaagaggtccgtttaaccgtaccgataaccgacgatccatctctaccagttttgacattccgtacatggttcttaggaatggtttcttgcgtggtactcgcgttcgtgaacaatttcttcggttaccggtcgaacccgctcacggtatcttcagtcgtggctcagatcatcactctccctctaggaaagctcatggccacgactctaccaacaacaaaactccgtttacctggtacaaattggtcgtgttcgttgaaccctggaccattcaacatgaaggaacatgtactgatcactatattcgctaataccggagctggaggagcttatgccaccagcatcctaaccatcgttaaagcattttatcaccggaatctcaatcccgccgccgccatgttgcttgtccaaaccactcaggtatgtatacacaatatacaatataattcaaaaattacatagtttttgtttgtaacagttacattatttatctgtcatgtagttgttgggatatggatgggcgggtatgttcaggaaatacctagtggactcaccttacatgtggtggcctgcaaatcttgttcaagtctctctctttaggttcgtgtttttttctccaaatcattcacatttgtaactgtcacgaaattttactttttgatggattagagccttacatgagaaggaggagaagcgtgaaggaaaacaaacgaaacttagattcttcttgatagtcttcttcctgagcttcacttactacatagtcccaggctatcttttcccttccatctcatatctctcctttgtctgctggatatggacccgctctgtaaccgctcaacagatcggttcagggctgcacggtctcggcattggctcatttggtcttgattggtccacggttgcaggtttcttaggcagtcctttagctgtaccgttcttcgctatagccaattcctttggcggatttatcatcttcttctacatcatccttcctatcttctactggagcaacgcttacgaggcaaagaagtttcctttctatacctctcacccatttgatcacactggtcagcgttacaacaccactcgtatcctcaaccagaaaacattcaatattgatcttcctgcttacgaaagctatagcaagctttaccttagcattctgtttgctctgatctatgggctcagcttcggtacccttaccgcaaccatttctcatgtcgccctctttgacggaaagtaagattcttttttttttctttttttctctactctgcgtctcaaaatactgtatagatcaatttatcagtttccatgaaaaatatttttttgttgttgttgtggttgtttacatgaaggtttatctgggagctgtggaagaaggcaacattgacgacaaaggacaagtttggagatgtgcatacaagattgatgaagaagaattataaggaagtacctcaatggtggttcgttgcggttctcgctgcttcctttgtgctagctctttatgcatgtgagggatttggcaaacagcttcagctcccatggtggggacttttactcgcttgtgccatcgcctttaccttcactttgcctattggagttatcctagcgaccacaaaccagcgaatgggtcttaatgttatatcggaactgatcatcgggttcttgtatccgggaaagccacttgccaatgtggcttttaagacttatggttctgtgagtatagctcaagccttgtactttgtcggagacttcaaacttggccactacatgaagattcctccgagatctatgttcatcgttcaactcgttgcgactattgttgcttcaactgtctccttcgggaccacatggtggttgctttcttcagtcgagaacatctgtaacacagatatgctcccaaagagtagtccgtggacttgccctggggatgtagtgttctacaacgcgtcgatcatttggggaatcatcggtcctggaaggatgttcacaagtaaaggtatataccccgggatgaactggttcttcctcattggcttccttgctcctgtcccggtctggttctttgcaaggaaattcccggagaagaagtggatacatcagattcatattcccttgatcttctcaggggctaatgtgatgccaatggccaaggctgtgcattactggtcgtggttcgctgttgggatcgtgttcaactactatatcttcaggaggtacaagggatggtgggcaaggcataactacatcctctctgcagctcttgatgcaggcactgcggttatgggagtgttgatctactttgcgttacagaacaataacataagcttaccagattggtgggggaatgagaacacagaccattgccctttggcaaattgcccaacagagaaagggatcgtcgctaagggctgcccggtgttctaaaaccttgttgcagtttaacattatctctgtagtttctcatacctgcaggtgagggacagttactgcaaagtcgtttggtggccataataataataatgcgtaaagactttgtgagagtttaagtgataaagtaaaaaatggtttgcaaattaagaacacccaaagatgatagctctaacacaaatttcaatcaaagagagtataatttcaggacaaagcaaaacaaggctaaaagtttccatctttttctaattgaataacactaagatctgtgaacaacttccgttcctgtcaatttcaagcaatcaagaaccaaatttgtcaccttctattgaactcaggaaaactcctaaattgtgcaatttaacgtacatgtcaaacgtaatcagatcctaagattcatagttaggtttttcaaaccttcgaagtcatcatgagagagatctccagaggaggcaggagatg

SEQ ID NO: 4361 - DNA, 3000 bp, Unknown
  misc_feature (1)..( 3000): cDNA_ID_1824002_gDNA_ID_1620702_Annot_ID_48791 3000 nt of promoter + ATG
ttcatcagactgttcattctcttcttcttcttcttcctcgtctgtggaaacttcaggctttttgaggggcttcttctccgaaatacatttcctctgcttcttcaatggaggcttctgggttttagccgccttcttcagcggagacgccttagtctgcttattcagtggcggagtctgtgaattggaacccttcttcttgttacgcgtaagagcagccatggatacggtttttacaacttagggtttatcgccgtgagggtttagcagaattgcagaggtaggagaagcaaggtcgaagaatctagtaaagatggaggatgagcaaagttgcttaatgggcttgattgatactaactaatgggcctgactaatactaactaatgggctgtagtcgaacttattttttgtcagcctaataaattatcgagccactgaattcataaaacctataaaaacataattcaataagttatttgatgtatgcgtttaggggtttcaaaatgggtaatccaactcaactcttaatcaaataagtttagatgttaaatgagttgggtcaacccataactcatttaatttgatggattgaattgttaaatgggttaacccatttaaataataatttaattaattattattataaaacaataataaataattaatattattaattcattatcatcaaacttaaaatatttacggattccactttttacgggtttacgtttttggcggaaaaatcacaggtttatgtttttggcgagaaaattataggtttacgtttttggcaggaaaattacgggtttatgtttttggtgggaaaattacgggtttacatttttgacaggaaaatctcgggtttacgtttttggcgggaaaatcacgggttaacgtttttggcgggaaaattacgagtttacgtttttggcgggaaaattacggatttacgtttttggcgggaaaattatgagtttacgttttggcgggaaaataacggatttacgtttttggcgggaaaatcacgggtttacgtttttggcgggaaattacgagtttacgtttttggcgggaaaattacggatttgcgtttttggctggaaaattacgagtttacgtttttggcgggaaaattatggatttacgtttttggcgggaaaatcacgggtttatctttttagtgaaaaattacgagtttactttttatcaatttcatcgcttgtatatttaagaaatttggaaaaatattaattttattaaattggtttaaatgtgttggttaaacttaaattggcattggtttagaaattttagttggtttaattcaattttacaaaacttgatgggttaattgggtaaaccattgaaatcattaaccattacaacccaactcattttactcatcaaaccaattgactcatcaactcatttgacccattaactcatttgagtcaaaattttcaactcattagagttcatgggttgaattgagttgagttaacccatgaattttaacccattttgacatctctacctgcgttacatgctcagcccatgcatgattgaagctagtgatgttgataacaaaaactgaaatgaatcacgtaattttctaaaatcagttctaaacgattctgtttcttctttaagaatgaaaacacgaatttatttttggtgaattttaattccaactaccaaaaataatttgattgattggttgaaatttcttgtaaaattgtgttagaatttgaaatattatcatttgcaggatatatatgtagtttggctgtcaaaaaaaaatgtattatgtttttggtgaagttgcaagttatttataacacatagaacctagtcatagacgttgacatgaaacagattgaataagacagtgtgtgtcttagaaacagaaacttgaataaaagtggaaatatgcgtttcatattgtataaccgatagattatggaaacaatgatgcatattggcaatcaaaacaaaaacaacgatacatacaattgcgaccacaagcaagaccgaaagacacacctgtgacgcgcgtccaacgcacaaagagtccgagtcaaattcggagtctattaagcggtgcaccagcaagtatacacgtacgaaccaattacatgcataatgcattaagactgtcactatcgctaaaaattttgtttttagctgctgcaagtgatcgccaattaaattgcaactcttacctcacaaaattgtctcttgctagttcaattatttcctttttattatcaacatccgctaattattgtaatgctcaatttctttttgtaatttactctctatcctaatcttttactttgaatgagagtgtatgtataaactatttttgataagttctttctcttttttctatatagaaagtctactttctgtaaactgatttttgtctctttcaaaccagagaagtaaagtgaataattgaaagctatagacggaatacactacaaattgctagatccagtatctctaaatgattaaatgccaaaaattgctatatttatgatctgtttattcttttagtttaagtacctatttcaaaaacataccagatgtagaatctacattcatactcgaaatcaagattttagctttttaccccgaagtgaaagttttttttccactgaaagtgaatcaacaactttagttctaatgagttcagtaaacttgtcgatattaagaaattcgtcgagaaatcatgattctttcagtcttcactccaatacatattagaggaaatactctcttgtatcttctctaatactagtacatcctctcaaacatcttaactaaaacagaggtctaactttttcctttttcctggaaaaattgcagagaaaatttatttttaatgtcaggtcattaacacaggttgcttacaagaacattacttctacagcaagttattcagaactctggacattatcacccgagtcgatcgacgtcagggccgcctaacagaaaatg

SEQ ID NO: 4362 - DNA, 3000 bp, Unknown
  misc_feature (1)..( 3000): cDNA_ID_1823998_gDNA_ID_1620702_Annot_ID_48792 3000 nt of promoter + ATG
aaccaaccaaagttgcttagtatgatctacattaatctaaaggaatcgagttgtgtttaagaattatacaaatagagcatcagccataacggtacacaaggaatcaaaccacatcgaaccaagattggtcaaaacagaatcgagattttatttaccggctatgacgatcttggactcaaccttgtgctctggaggcttggatacttcgagagagcctaccattttctgttaggcggccctgacgtcgatcgactcgggtgataatgtccagagttctgaataacttgctgtagaagtaatgttcttgtaagcaacctgtgttaatgacctgacattaaaaataaattttctctgcaatttttccaggaaaaaggaaaaagttagacctctgttttagttaagatgtttgagaggatgtactagtattagagaagatacaagagagtatttcctctaatatgtattggagtgaagactgaaagaatcatgatttctcgacgaatttcttaatatcgacaagtttactgaactcattagaactaaagttgttgattcactttcagtggaaaaaaaactttcacttcggggtaaaaagctaaaatcttgatttcgagtatgaatgtagattctacatctggtatgtttttgaaataggtacttaaactaaaagaataaacagatcataaatatagcaatttttggcatttaatcatttagagatactggatctagcaatttgtagtgtattccgtctatagctttcaattattcactttacttctctggtttgaaagagacaaaaatcagtttacagaaagtagactttctatatagaaaaaagagaaagaacttatcaaaaatagtttatacatacactctcattcaaagtaaaagattaggatagagagtaaattacaaaaagaaattgagcattacaataattagcggatgttgataataaaaaggaaataattgaactagcaagagacaattttgtgaggtaagagttgcaatttaattggcgatcacttgcagcagctaaaaacaaaatttttagcgatagtgacagtcttaatgcattatgcatgtaattggttcgtacgtgtatacttgctggtgcaccgcttaatagactccgaatttgactcggactctttgtgcgttggacgcgcgtcacaggtgtgtctttcggtcttgcttgtggtcgcaattgtatgtatcgttgtttttgttttgattgccaatatgcatcattgtttccataatctatcggttatacaatatgaaacgcatatttccacttttattcaagtttctgtttctaagacacacactgtcttattcaatctgtttcatgtcaacgtctatgactaggttctatgtgttataaataacttgcaacttcaccaaaaacataatacatttttttttgacagccaaactacatatatatcctgcaaatgataatatttcaaattctaacacaattttacaagaaatttcaaccaatcaatcaaattatttttggtagttggaattaaaattcaccaaaaataaattcgtgttttcattcttaaagaagaaacagaatcgtttagaactgattttagaaaattacgtgattcatttcagtttttgttatcaacatcactagcttcaatcatgcatgggctgagcatgtaacgcaggtagagatgtcaaaatgggttaaaattcatgggttaactcaactcaattcaacccatgaactctaatgagttgaaaattttgactcaaatgagttaatgggtcaaatgagttgatgagtcaattggtttgatgagtaaaatgagttgggttgtaatggttaatgatttcaatggtttacccaattaacccatcaagttttgtaaaattgaattaaaccaactaaaatttctaaaccaatgccaatttaagtttaaccaacacatttaaaccaatttaataaaattaatatttttccaaatttcttaaatatacaagcgatgaaattgataaaaagtaaactcgtaatttttcactaaaaagataaacccgtgattttcccgccaaaaacgtaaatccataattttcccgccaaaaacgtaaactcgtaattttccagccaaaaacgcaaatccgtaattttcccgccaaaaacgtaaactcgtaatttcccgccaaaaacgtaaacccgtgattttcccgccaaaaacgtaaatccgttattttcccgccaaaacgtaaactcataattttcccgccaaaaacgtaaatccgtaattttcccgccaaaaacgtaaactcgtaattttcccgccaaaaacgttaacccgtgattttcccgccaaaaacgtaaacccgagattttcctgtcaaaaatgtaaacccgtaattttcccaccaaaaacataaacccgtaattttcctgccaaaaacgtaaacctataattttctcgccaaaaacataaacctgtgatttttccgccaaaaacgtaaacccgtaaaaagtggaatccgtaaatattttaagtttgatgataatgaattaataatattaattatttattattgttttataataataattaattaaattattatttaaatgggttaacccatttaacaattcaatccatcaaattaaatgagttatgggttgacccaactcatttaacatctaaacttatttgattaagagttgagttggattacccattttgaaacccctaaacgcatacatcaaataacttattgaattatgtttttataggttttatgaattcagtggctcgataatttattaggctgacaaaaaataagttcgactacagcccattagttagtattagtcaggcccattagttagtatcaatcaagcccattaagcaactttgctcatcctccatctttactagattcttcgaccttgcttctcctacctctgcaattctgctaaaccctcacggcgataaaccctaagttgtaaaaaccgtatcc

SEQ ID NO: 4363 - DNA, 3000 bp, Unknown
  misc_feature (1)..( 3000): cDNA_ID_1823994_gDNA_ID_1620702_Annot_ID_48793 3000 nt of promoter + ATG
atcgattatgctctgaaaaacagggatgttaaactcgttccatgtggacttgattttggccgaccagggtaatatacattttcatctgcattgaaaaatttcatgattcgtcatctgaacacaaatgttttgctgcatatcttcagatttagcagttttagagaacaccggttccacccttctttagagaagactagacgtttctatcctcacgtgcacaacatggatggattctttgttgcaaaggtatacacttggttaacctatgaatagcttttccctgcaaaacagatgttttataaaatatgaatagtgattaaaccaacgaggtatttactttttcctttctttgttctgcagctgaagaagatgagcaatgcaatgcagccttcaggaaatgatgagccagctgtaacaatggagcaagctcaggtgtcgtctagtgatgatgatgatgagaaagctgaggccattgaggagttggagaagccacctgttgccagtgggcaacccaagagagagagtaacactaaagaagacacgaacaaacgaaaaaatccaaggtcaaaggaaattcacaaaggcaaaaggaataaaaacacaaaaaccgaaagtggtaatgtggaagaacccaggaagcaaaagaagaagagatcacaatggaagaatgagattgctcaagctaggtaaaaaaactaagtgtttccttgacagacaaaagagaaaaccttcttatgtacattgttgtatcatacacccatttacccataaatggttgaatatgttgcagggaagaaaaaagaaaaaccatgagagagaatgctaaggagacgccaaagcacaggggataagaataggtttgagatcgtgatgcatcttgaagagtagaatatttcggtgttctggccatggcgaaggacacaagaaaagaggcttcattggctgaggccaaggtatctatacaatggctttctagttttgattaatttactgcgtaaagaaagggtgacacccacatggattagctgttacatgtccaaaagttttgtatcaatcacataacttgatttttgtgagaggctgtttctattttccgttttcaattggagttgtaaaatttattgaaaacaaaaacgagtccctactttctctcacaagtgtgtttgaaaggctattcatttttctgctcctagcaattatttaataaaatacataaatcttggagggttgggtccataccaccacataaggatagaatttctcatagtattgatttgacgaaaaaataagggaattgggagtgagctggtcattgttagggagagatgtgaaggttttctgaagtgggacttgagtgttggagaaacatgacaatccaattcaactcttcttcatccatctttatcagattctcctccgttggggaccttacatttacttctctcacactaatcttcttgtttctatttttagattataagcccatattataactgctagtgcttgtagccttgtatacacaaactcacatgcatcacatataacatcgtataattgctgtattcactttatatttggatatccaagattatagaaaagagattcctttgcaggacccaaaagatacagcttttaaaagcaaatgagttcattttaatttcttgctaaccaaaatggtaagtaattttgtggacttatggtatggataaataacaaaatctcaataaaccattgaaaataggaaatcaaaaaatatatttctgcatataatttgaaaagaaaatttgcatggaaataactatgtttttgaacaaactaaacatggaaataattattaccgcaaagtacaaggcattacgataagcatccttgaaagctttgtctttttttttgggaactcgaaagctttttgtcttccagttgtaagaaaaatacaggaaaaaagaattgaaaagccctaaataaaaaagtcgaaaactttagctttgaccaactctttcctctcttttcatggtagacccaactctctcatttcttactctctgattcatctctctctctctcttcatttccatggaaggaaggtgatgagctttctcaatctctctttactgattcttaatgaaagtcatctcctttctctttggtatcccttttcttcttctctgcttaattcctgaccaaaaattgtgacaagatctttcaatccaaaagctatatacattaaggtaacgatttatgaagtatttctcctcaatttcatttcttttgtttctacgagtctgcatagatccagaagagctttgcttgattgttcttactttcctgagatctgtttaaacttagcaaaaaaaaaaagtctactttgcatgaaatgtgtgattagggtttatgctaattttggttaattggagaatcagagagtgttccctgatgtggaagtagtgaattactttgggttgagtaaatgtatgtctctcaattgattgtcaacgagatttgagctcgagatccgtaaccaagttgagctaaagcttctttctttcgacttgttctctatatgaaaattattttttctttgactcagttatttttcttaatttgatttctttgagctcgatcttatgattcatactgcaatgattgagttgtggcatcagctctgatggtatcttctgtttttaaaaaatagcaactttttagtgtttttctgctcagctctatgttaaaggatgtttcttcattacggggagaaatgaatgagagctcttgtttattgatcttcccatgattctagttctaaacgagccttctgttatctgaatttgaagtgttttaagcttttttattctaataagccgtcttcttctctgacgctatgttttgctcactgcagagctcaggtcactatctgacgggatccgtgacaatagtggttactggagtcaaaagcagctccttgaatcttgagtgttaagtagataggtaaggtaaccgttc

SEQ ID NO: 4364 - DNA, 3000 bp, Unknown
  misc_feature (1)..( 3000): cDNA_ID_2993867_gDNA_ID_1620702_Annot_ID_48796 3000 nt of promoter + ATG
atttatgttattaacgactttttcatattttctattaacaaattcacattctacttatgataagacctttacatttttaatattttgatttgtctacgttttgtttttcacttgtgatatgcctacgttgacataattttaaaactgggtactcgatgctatctttttatatcacaaagatagaatcatatgccctacatgaaaatatacaaaataatatttttgcatcaaatttaatcattttaatattatgttccattgacattttacctttacctataagggaaaatattctgttgtgtggtgttttttttatcctctcttgcgtgggcatatttcttatatatgacgcctaaaacaatatagtttttatctatatactatagttttctataaaattatgagaaggagaagataggatctgtagacagctgagcttctcttgtgtagaggaaaaagtctacctctaatgttctttttgggcataatgatgtttatgagtatccaagggttgcattatatccattaattaatttgtagacggccaataatagaattcatatttggcattcgatgacctcattgatcccatagttgtttacttgttctagtaagaaggtaatactagtttgcgaagaaaaaaaatgtaatatgagtttaaaatactttttttttttttttttttttttccaaaacatcttagtttatttcagaatacttgtgtataagcagttaatcatatgccgaattcctgactaatttcaaacatacaaaattggattaaaaaatgtttttgaaatcttcaacgtgatcaaatagaaaattgcaaattgaagagaatttcactcctaaaaattaaaggtctcctccagcacttgagtacaagatcaccattcttcgaggtatatgccaatatatcgtgaactttaaataattcaaaatcttaagtacaccaaactaaaatagtgaaaccacccctttttcttggtcaaatgtttgatcaaaattatgatgatggtgtggttatgtgaaggggacaacacctttttgaactttggaaattttcatgcaaacttttccgtttctagattttcttagagttttttaattaccaaaaaaaaacagttatcgagtttttccttatttcttctgttaatctagacattaaatttaatatgtaaaaatgacaagactatgtatatgatatgagtgttgcaccaagaaaaaattactatctaaaatcttcactagtcacatatttttgaatagttatgatatattttctgttgctttatcattttaccgagttacccactttcgaattatcagtttttatcaaaacatggattgataattatttaaaatacaagtaaaacaattgttggtttagaaaagaattacatagttttattctgaaacggcattgaacagtattgagagatatatacacatattcttcttatcttttacacattttggaagttttacaaccaaagaaacatgtttttttttttttttgaaaaattctctaacaagatttgaggtggaccaacttggatccagaatgtcaccactcaccattatatatcctaactgttatccacgcaaatagaacacaaccgctaccccacaagataaaccaatagcttaaatttttaacaaaaaaaattcgattcaactcccacataatttggtaggtaatttgactcaagggcctaggcccatttaaaccaatgaaagaaactgagaacggcccaaagatatctcacacatatcctctctatataatacataatcatagcatatcaatttcattatcaccgatcaaattagggtttctctttcgattacagagtttcacttgtttggagccaacaatcatactctgcaaccaaaatccaaaacaagaaaaaaatggcctgtctcaacgatgataagaagaagaagtttcacctagtccttgacttggaccacacgcttgtccactcggtacttgtttcggacctttccgaagagcagaagtatctaatcgaaggagctgattcaaggtcagatctgtggagaatcaacagagatccactcccagcgaatatatgataaagctacgaccttttcttcatgaatttctattagaagccaacaagcgtttcatcatgcacgtatacacaatgggtgattctagttacgctcagaccgtgttgaagtggattgatccggaaaaaaatatactttggagatcgagtcctagccagagaacaaagtccttatgagaagacactcgatcttcttgctgttgatgagcgtagagtggtaattgtcgatgatgcgattgatatttggcctcatcacaatagaaacttgttacaaatcagcaaatacatttatttcagcgtcggtattgaactattgataaacatcgcagaagataagatagacgagagtcgaagcaacggatcattggcgcacaaaagattcaaaaaggtaagttttaaaagacctgagactgttgatacctgatccttaattatcatcaacaatactgcttctgactgtgtcaatctaccaatgctacaacactcttactttgagatttaggatgtttctggttccaacaactctttaaacaagcaattttgattacactaacttttttatcttttacattttgacaaatgtacatgagaaaaaaaaagaggattgtttacatcttctaattgtttttgtcaactttaacgtttgttgttgttgctttagaaattgataaagctaaataaaggagaaaaagaagaagaagaaaataaattattaaaaaaatgaaaaggaaaaacaaagaattaagagaggtgtgaagtcaatatcgttctttcatctttcactacaatcttcactaacgcagagaccaaaatctctctcatttcgccatagctgagagcttcttctactttcccttagcttcttttttccttcatttttgttctacccttgcgaatctctgaaatg

SEQ ID NO: 4365 - DNA, 3000 bp, Unknown
  misc_feature (1)..( 3000): cDNA_ID_1808391_gDNA_ID_1620702_Annot_ID_48797 3000 nt of promoter + ATG
aagattttgaattatttaaagttcacgatatattggcatatacctcgaagaatggtgatcttgtactcaagtgctggaggagacctttaatttttaggagtgaaattctcttcaatttgcaattttctatttgatcacgttgaagatttcaaaaacattttttaatccaattttgtatgtttgaaattagtcaggaattcggcatatgattaactgcttatacacaagtattctgaaataaactaagatgttttggaaaaaaaaaaaaaaaaaaaaaaagtattttaaactcatattacattttttttcttcgcaaactagtattaccttcttactagaacaagtaaacaactatgggatcaatgaggtcatcgaatgccaaatatgaattctattattggccgtctacaaattaattaatggatataatgcaacccttggatactcataaacatcattatgcccaaaaagaacattagaggtagactttttcctctacacaagagaagctcagctgtctacagatcctatcttctccttctcataattttatagaaaactatagtatatagataaaaactatattgttttaggcgtcatatataagaaatatgcccacgcaagagaggataaaaaaaacaccacacaacagaatattttcccttataggtaaaggtaaaatgtcaatggaacataatattaaaatgattaaatttgatgcaaaaatattattttgtatattttcatgtagggcatatgattctatctttgtgatataaaaagatagcatcgagtacccagttttaaaattatgtcaacgtaggcatatcacaagtgaaaaacaaaacgtagacaaatcaaaatattaaaaatgtaaaggtcttatcataagtagaatgtgaatttgttaatagaaaatatgaaaaagtcgttaataacataaatgtgtataatatgtatcgtgggttcgtatattagatagaagacaagtcacctacgaacaagaaaatgtactatgtagtaatcttggaatattaatgtaatttctctctaacgctcaattaatatataacgttgtcacttgactcactttatctcttaaccattcattttctggtgttttgtgtaccgaataacatactgattaattattatgtatccgtccacttgttcgtgattttgtaaggtaaagtccaaacattttgtaaatagtctgaaaagaccaaaaaaattctaaaacataacgctaagtaattcacctaacttaaattatatgagacactaataatttcggaaactttgatgacgattttagctcaaacattatgtaactattttctaatgtttgtcccagtgattatgatgatatgaatatatgataatttttagatatttaaattatttcaatacttttgtagatagtgattgaatacattataccttacctaattagaaattaactcattcattcacctatagtttttacaaacacattactggtttacaaactcatattattatacgctgatgacatttatataaatcattaaactacaatgtatgttctaaaaatcttccaattttaaagtaaatagtataaaattaaatatatgcataaagtttaaacttagtttgtttccaaagcaaggaataatgtgcagggattcagaactttggaaattcttgtgagtttttttaaaattataagaactttggaaattaaactttagaagaaaatcttcatacaatcataaattcagctacaattgaaaagttgtagaagaacaaaaatagacaatgaaattagtgtttcttcaaataaaatggaacattttcttttgatgatattaattagcctttagaaaagttgtgatactcataaattgaattactcattttttctagagactccataaattgaatttaatctcataagaaatgtaaaatctatttttcaattgtttttatcacaaataaattattggttagaaagtgaattattgagatgaatatatatatatttgtgggaaaaaataaaatttaaaaataaaaaggagctatcatcttccatcatctgtctttagggcctccctctaagtctaacaaccctaaaataaaagattctaacaccaaaagagagaagcaaatctcaaattcttcccctattattatatgtgactgttgttgtttttctctcttttaccatctttggcctgaagaaaaaaaaaaggaatccttcttaatggatttggtaaatcaattaagaaagcattacacaaaataaaaaaggaaagttttttaataagcttcattgagagagagatatagagagagaaaagagagagaggccatattttgataagagaagaagaacccttatagagaaagagaaagagagagacagagagagtggatggatgtcttatagaatgaacaaaacatcctctgtttctcttgtccttgtccctttttccagatcttaaggttttccacattttatcatctgggtcctctccttaatggtgaattctccatctttacaagtttgatgtttttgttcatcaaatctggcgtttttttttctcttctaatatatattgtctctgctcattttccgtttctcttcccattgattgttctgtttcatttctgttttttttttttcaatagttttgattggatgctttgatgatccattgtcagatttgaagacactcaattcctatttgatcggggactagaatttggattctgtttcagacaaaagtagatttccctgtctctttcccgtttgattttcaataagatgaatccggaggtaaaacattgaacaattcttcataaatctcagaactttgagcttttttgaatcttaaaacacgatcgaagtaaaaaatcgaattgttagatgaaatgggcaatcgtcattttcgcaaatctgatccgtatttgtgagatcggattcattggatcgactttggggttttgcaggagcaaaag

SEQ ID NO: 4366 - DNA, 3000 bp, Unknown
  misc_feature (1)..( 3000): cDNA_ID_1823982_gDNA_ID_1620702_Annot_ID_165123 3000 nt of promoter + ATG
tgcatcggatctgggcaagctcttcattggcgggatttcatgggacacagatgaagaacgactgcaagagtattttggcaagtatggagatttggttgaagctgtgatcatgagagaccgtactaccggacgtgcccgtggctttgggtttatcgtttttgcagatccttctgttgccgagagagtcatcatggacaaacacatcattgatggccgcacggttagtattcttggatccattgcttgacaattcatctaattatcagtcttgagtaatcgagtgttctaaagtctcgatctttctgtaatgattctgtcttagaggtcttattggtctcgctgctcgttaatgagcaacggattgttctataatctcgatctttctgtattcatgctctcttagagatctgtttggtgtcatccattaatgagttttaagcagcaacgtttagatctttctgtaatcatgctcttttcgaaatcttctgttgtcattagcttctggatttgctgttactgttataacttgtgagaatgtgttgttgctttgtgttgaagtggcaatgttagtgttagatcaatgagaaaagaatgaaagatctttttttatttctttgttgcaggtcgaggcgaagaaagctgtcccgcgggatgatcagcaagtgctaaaacgacacgccagtccaatgcaccttatctcacctagccatggtggtaatggtggtggagcacggacaaagaagatctttgttggaggtttaccgtctagcattactgaggccgagttcaagaactactttgatcagtttggtacaattgctgatgttgtggtaatgtatgatcataatacacagaggccaagaggctttggcttcatcacttttgattccgaagagtctgttgatatggttctccacaagacctttcatgagctaaacggaaaaatggttgaggttaaaagagcagtgccaaaggagctctcctcgactactcctaaccgaagcccacttattgggtatggtaacaactatggagtagtccctaataggtcttctgctaatagctacttcaatagttttcctcctggttataataataataatctaggctctgctggccggtttagtcctattggtagcggtagaaatgctttctctagcttcgggctcggattgaatcaagaactgaatttgaattcaaactttgatggaaacactcttgggtatagccggatccctggcaaccaatacttcaacagtgcttcaccaaaccgttacaactctccaattgggtacaacagaggagactctgcttacaacccgagcaacagagacttgtggggaaacagaagcgattcctctggtccaggttggaacttgggagtttcggttggtaacaacagaggaaactggggactttcttctgtggtgagcgataacaatggctatggaagaagctatggggctggttctggactttcggggttatcattcgcgggtaatacaaacggttttgatggctctataggggaattgtatagaggcagctcagtttatagcgactcaacatggcagcagtcaatgcctcatcatcagtcttctaatgagttagacggcttgtctcgctcttatggctttggtattgacaatgtaggctcagacccatcagccaatgcctcagaaggatactccggaaactacaatgtcggaaatagacaaacacatagaggtacactcatcgatgtcaaacttttttccttttgcatctcatctgctacatttatttttgcctgttgaaaagtaattagattgattaacgttttcaggtattgaagcatagaaagaaatcgacgaagagaagtgagaattgtagatcaagaagaacagccatttccgttgcagagtttgaagagttgttatttcgatatcaagtagagaaagaaaccaactttcttcatcacagtgagtttcttgttttgtttttttcgtcgttagcatcacaaacacaaaaaagagaagtttatttttactttaaaaattcttacataagataagatcagattggtagctgcaaagatacaacatggatgataaaaaaagatttggtttcgtctccatagcaataaccagagatcgttgattctcgatcactattctttaggtttctctccttcttcttccatgatttcttgatgttgtgtgctctgtttgtaactctaattgttaaaattttttatgttacagattttttttttcttttggtttttaaactttggattcgaattgttcatgggaacttttggatttttctattagcgtgagagaaaacacattgtgcaaaaggctccaaaatgattattttgttacatttcatactttttacctttgggtttcttttctcttctgcttacagtataatctatttattaagtacatgtggttaattcatgattttaaggtaaaaaagtaaacaagcttatcttccaaattggatttgtttccaagaagacattggggttgttaccaagaatttgagaaagcctgaattattggatcctttgactaaaccaagacacatttgggtccaggaagtgacaatcacattcacacaaataattaaccaatcttaaaccatgggacattgtgattaagagctacaacatcagttgaacttgaacattatgagactacatcttgagcattagcactagcattggaagttaatgggcttcaggcccactaagtaagttttcagcctaagcaatatcttcaataatgattttttatttatttaggatatttacttttaaaaatgtaaaaacaaaaagacaataaaagtttgttgacaaaagaaaaaaaggttcaaaagtcccaacggtcgaatcgaaattcagacagttcaaaaagccgctctccatctccttctctcttacagaacataatcagatctctcttgctctctcaccctcactctcactctcactctcattgtctgaaaacc

SEQ ID NO: 4367 - DNA, 3000 bp, Unknown
  misc_feature (1)..( 3000): cDNA_ID_1378280_gDNA_ID_1620702_Annot_ID_165117 3000 nt of promoter + ATG
aaatgcaccaaagagaaactgtgggagttttgtgatgtgttggacatacacattaccaaggctacaacaaagaaggtcattatggttatcaatttctaagtttttgttcttgagattcatttttttcctctgtgaatagatacatgtgaaggtttaaatttctgtctttgttgagcagcttgattagccatttctggttgtccaagtttatgcttattcatttccccatttaatcgaatctggcaacttcttgttgcatgctttttcaacacaggaagatattattacaaaactgtttgagtttttggagaaacctcatgtgacaggtgatgtgaccggtgacactacagtttctgagaaagagaaggtaatgtggtgttgggaaagttttgtttgctttaataactattgtgcatcttacattctttaaaaacattctgttgaaacagtcaagtaagggagcaaaacgcaagagaactcccaagaaaacttcacctacagctgggagttcatcctccaaacgatcagcaaaggtaatgcatagcttagagctgagggcttgcttgttcattaatcttgttattaactctgaaaagaacgtgtaatctcaatgtagcttatttgcaactgtccatcactggtcaacccgtcaatgtttctggctaagtattttaatctgattatattattctgcacttcctttgcagagccaaaaaaagtctgaagaagcaacaaaagttgtcaaaaagagtttagctcattctgatgatgaatctgaagaagagaaagaagaagaagaaaaacaagaggaggagaaggcagaagagaaagaagagaaaaaagaggaggagaatgaaaatggcattcctgataaatctgaggatgaggcgcctcagccttctgaaagcgaggagaaagatgaatctgaggagcattctgaagaagaaactacaaagaagaaacgtggttctagattgtcagctgggaagaaagaatcagcagggagagccagaaacaagaaagcagtggtcgctgcaaaatccagtccaccagagaagattacacagaagcggtcatcagccaaacgaaagaagactgatgatgacagtgatacaagtccaaaggcgtcctctaagaggaagaagtctgaaaaccctatcaaggcctccccggctccttcaaagtctgcatcaaaagagaagccaggtttggtcattatcctgtttttttcttccagtaagatggtcgcttaggtagaataaaaacatgttgggtgtagtgtatgtcagatgcattggagaatcttattccttatatcttcattttcagaagcgaaccaatatacaaccactaatgttttctgacaccatgtttatctctgtttgtgtctatatgctaaaagtaaaaagggctggaaaagggaaagacaagccgagtgataaagtgctgaaaaatgcaatcgttgagatcttgaaaagagtggactttagtacggtgagtaatttctcaaccttttatatgcgatacacttaactacttgggatgtgtgtggaataaaacaaaattggattctgccgaacaaacttattggttacatgaaataaccttcgttttctgaaagctgatttgaagtttgttgtgcaatatctattcaaactgtgaatttccttctatacctagataacctaataagagcattgttgttcttctgcaggctacgttcacggacatccttaaagaacttggtatgaacagattggtttcagtcatttgtttttccagtgattcctggttatatataaaataaacacattgtttcatccatctttcagctaaggagttcacagaagatctcactccaagaaagtcatctataaagatgataatccaagaggagctcaccaaattagcagatgaggaggaggaggaggaaaagaaagaagaggattcagagaaggaggaagcaggagggtctggtggtggtgaggaggtgaaagcctaaactcctttctgatcacatcgcacatattgagtctctctgtcagatactgttgcctaatgcctagtagtcatctggcaaatgtgtaagttaaatctgtggatgtaatattttgttgttggagtctgaactgcgtaaagcagctttacttttggtagagacaagaggaagaagctgcatagccaaaggataggttgcttgtatgtctatagcatttaacataaaagcctccttggattgtctttgatttgtgaggctcccttttcgagacattgtcaaggtttcttttgtttatgtcttttggtttgaaggaggccaatggtaataaatgaataatatgtttctcttgattccctttaagactttgaatattgcagaaggaatttatgctcatcttgtatccttgatctatctctaacatatctgcaaatctaccaacgcaaatccagtctaagaaatgtaggaattggtacctcataaacatatacaacaaagattaacattgatgaagaagagagtctgtattcttacaggaccaaaatatacagaaaagaatctgtgctcttcttctacatccccttttcggacaacccaaacacaagttccaaaagaatgtaattgctgttgttacattcagagtacctaaatagattgcaatggagacactgcaaatacatagaattcaaagcagatggctaaacatggttaactataagcataagcaacacttgtccaggcttttatcattctggctgcagctactattatcttatttgatgtactagattcgaaaagacctgtcacacacacaaaggcaaaagtaccggtccgattgcaaaatagaatatcgattaaggagtaaaccggaataagagtaacggaatatacttgacagacctctctcagtagaagaatcactgagaaactttcacttcttcttcgtctccgtagtttcagtttcgatctgtaaagtttcaaacttgtggtcgaatttttaaatg

SEQ ID NO: 4368 - DNA, 3000 bp, Unknown; identical to SEQ ID NO: 4363
  misc_feature (1)..( 3000): cDNA_ID_1823994_gDNA_ID_1620702_Annot_ID_165116 3000 nt of promoter + ATG

SEQ ID NO: 4369 - DNA, 3000 bp, Unknown; identical to SEQ ID NO: 4361
  misc_feature (1)..( 3000): cDNA_ID_1824002_gDNA_ID_1620702_Annot_ID_165114 3000 nt of promoter + ATG

SEQ ID NO: 4370 - DNA, 3000 bp, Unknown
  misc_feature (1)..( 3000): cDNA_ID_1824006_gDNA_ID_1620702_Annot_ID_165112 3000 nt of promoter + ATG
agaaggaggagaagcgtgaaggaaaacaaacgaaacttagattcttcttgatagtcttcttcctgagcttcacttactacatagtcccaggctatcttttcccttccatctcatatctctcctttgtctgctggatatggacccgctctgtaaccgctcaacagatcggttcagggctgcacggtctcggcattggctcatttggtcttgattggtccacggttgcaggtttcttaggcagtcctttagctgtaccgttcttcgctatagccaattcctttggcggatttatcatcttcttctacatcatccttcctatcttctactggagcaacgcttacgaggcaaagaagtttcctttctatacctctcacccatttgatcacactggtcagcgttacaacaccactcgtatcctcaaccagaaaacattcaatattgatcttcctgcttacgaaagctatagcaagctttaccttagcattctgtttgctctgatctatgggctcagcttcggtacccttaccgcaaccatttctcatgtcgccctctttgacggaaagtaagattcttttttttttctttttttctctactctgcgtctcaaaatactgtatagatcaatttatcagtttccatgaaaaatatttttttgttgttgttgtggttgtttacatgaaggtttatctgggagctgtggaagaaggcaacattgacgacaaaggacaagtttggagatgtgcatacaagattgatgaagaagaattataaggaagtacctcaatggtggttcgttgcggttctcgctgcttcctttgtgctagctctttatgcatgtgagggatttggcaaacagcttcagctcccatggtggggacttttactcgcttgtgccatcgcctttaccttcactttgcctattggagttatcctagcgaccacaaaccagcgaatgggtcttaatgttatatcggaactgatcatcgggttcttgtatccgggaaagccacttgccaatgtggcttttaagacttatggttctgtgagtatagctcaagccttgtactttgtcggagacttcaaacttggccactacatgaagattcctccgagatctatgttcatcgttcaactcgttgcgactattgttgcttcaactgtctccttcgggaccacatggtggttgctttcttcagtcgagaacatctgtaacacagatatgctcccaaagagtagtccgtggacttgccctggggatgtagtgttctacaacgcgtcgatcatttggggaatcatcggtcctggaaggatgttcacaagtaaaggtatataccccgggatgaactggttcttcctcattggcttccttgctcctgtcccggtctggttctttgcaaggaaattcccggagaagaagtggatacatcagattcatattcccttgatcttctcaggggctaatgtgatgccaatggccaaggctgtgcattactggtcgtggttcgctgttgggatcgtgttcaactactatatcttcaggaggtacaagggatggtgggcaaggcataactacatcctctctgcagctcttgatgcaggcactgcggttatgggagtgttgatctactttgcgttacagaacaataacataagcttaccagattggtgggggaatgagaacacagaccattgccctttggcaaattgcccaacagagaaagggatcgtcgctaagggctgcccggtgttctaaaaccttgttgcagtttaacattatctctgtagtttctcatacctgcaggtgagggacagttactgcaaagtcgtttggtggccataataataataatgcgtaaagactttgtgagagtttaagtgataaagtaaaaaatggtttgcaaattaagaacacccaaagatgatagctctaacacaaatttcaatcaaagagagtataatttcaggacaaagcaaaacaaggctaaaagtttccatctttttctaattgaataacactaagatctgtgaacaacttccgttcctgtcaatttcaagcaatcaagaaccaaatttgtcaccttctattgaactcaggaaaactcctaaattgtgcaatttaacgtacatgtcaaacgtaatcagatcctaagattcatagttaggtttttcaaaccttcgaagtcatcatgagagagatctccagaggaggcaggagatggaggacaagcttgatgtactcattatgggagagctcaaacttgagctagtagagctacgccattatttcccaagctcacctttgtttgactcgatcacaaaactcagtgagtcagactcagttcaacgaccctctaatttggatacccgtttacgcggcccaacccggcccaatactggattttgaatttttttatgtttaatgattttcttataaatatttggctttgcgtagagggagagagggagagagggaggagagatggcgttgtctaaccaaaaaaaaaacgagaatagataaagcagcagcggttgctgtcggagttttgcttcgaagacaaaaaactaaggttgttaggttttataggccaacggtttatgttctcctacttctctgcttcttctgcattcttcaatcctaagcaaaaatccatttgtggacgtcactatcaaacggccaacttcaccttctctgacaatatcactacaccttcctttcttcttcatctcttctatcttcactatttttttaccaaaatcttctccatctgctgggttcacaccaaaacctacactttttggtatgttgctctgtttcgcagagtgaagataaggtatttgatgaaaatgcctcactgatatatccatccatgtctttttttttacatgtactttaattgcatattttaaagacttttcatggctttttagctcaagctttactctgtttctctttgctcttgttcaggagatcaaatcaaagacctctctgtttccgatatg

SEQ ID NO: 4371 - DNA, 3000 bp, Unknown
  misc_feature (1)..( 3000): cDNA_ID_3073133_gDNA_ID_1620702_Annot_ID_165109 3000 nt of promoter + ATG
tgtaacccatgaaatatcactaacagttaccgggaacattgttttgcagtttcgtttcagctatatgatcttaagcagcaaggtttcatagagaggcaagaggtgaagcaaatggtggtggctactcttgctgagtccggcatgaacctgtcagacgaaatcatagagagtataatcgacaaggtgtggttccttcctaccctgctcgatactatattcttgttccactgttgtatagccaactcatgatagcagttgagaataaagtaaagagtggtttctaagtttcttctttcacagacatttgaggaagctgatacaaaacatgacgggaggatcgataaggaagagtggagaacccttgttctcaggcatccttcccttctaaagaatatgactctccagtatcttaagtgagttcctaaaccaagacttatccgaggtttaggcaatgcaacttccaattttttctgtgttattattaacaccgatctctgatattgtgtgcagggatataacaactacatttccgagctttgtgttccactcgcaggtggaagatacctgagaaaaacaatagcatattagcagaggagacaatttgggaattgtgtttgttttctgattatgtatcatgtctatttgtttcaatctctctgaacattttcaagattttgttgttacttgtgtgaattaaaagtaaagaaaacaaatctgtatttttgctactcctgattttgattgctgattttctcctcgcatctgtagatatactactaaccttgagacatgaatcctattaataaagagcaaactgatgaagtgataatagagagcaaaaaagagagaacccaacaccaaatgatcgggtatgctctagtctgaattctgaagtcaaaattgaaatcaccgatttgatcgaaccggatgcaacattacaacaatcggatttgttagtcttgtggttgactttgtcagttagagttgacaaagtaattagcaaagttagtgacgattgtgttctgcataaacacgtttactttgaggaataaattacttactctttcggtctttcctaatatatatgttttccctgtctcaaagatctgaataggtatcagagcgcgttgacaatctctttttttgatcatcgatttgttctctctttcttggctaaaaagtttctatctacacgactctccatggattcaacaagaaattcagcttcttccaactccacgggatgctttacggatcagaaaaagcgaaaggcactctatgaggtgtttaagaaactcagcggtgttgattgccaaagaaacgaggttcgtataaattatatgtaactttcttgctaagtacgcatatgatataaatctgtgtttcttcgttcagggtaacgttgtagaaggcgtaacgtgttattatggtgaaatgaacaaggtatttggaattatatataaatatatatgtctttcttgccacgcactccttcttttcaacaagtcttacagattttccataacgtgtcctgttgtatttctgttgtatcaggaacagtttcatgtagccatattccagactgacaaaaatgagagcttgttttcagagagggtattttatttttgttctcaacaaaaaaagtctttgtaatccatttgcaaacaatgacattaccctatcacacaggtcttcgatttgttcgacacaaatcatgatggattacttgggtttgaggagtttgcccgagctctctctgtctttcatccatctgctcctatagatgataaaattgaccgtacgtctctgatctcaaaaactagacccgatatattaaccatctacaaacaaactgttcacatgctacctatatatattccatgaaagcttattaacggttacctggaacattatttggcagtttcgtttcagctatatgatcttaagcagcaaggttttatcgaaaggcagggggtgaaacaactggtggtggctactcttgctgcgtccggcatgagccagtcagacgaaatcgtagagagtataatcgacaaggtgtgttttccttccttctattttttggttcgactctagtctatagtatagccaactaagtttaagcagctgatgaatatgaagtgaagagtgatttttgagtttatgaggcagacatttgtgcaagctgacacaaaacatgaagggatgatcgatgaggaagagtggatggacctagtttttagacatcctcttcttctgaagaacatgactctccagtatctcaagtgagctcctaaaccaaagactaacccgaggtttagccaatgcaacttcaaatttttctgcatcacgtattattaacaccatgatatctgatattgtgtgcagggatatcacaactacatttccgagctttgtgttacactcgcaagtggaagatacctgagaaaaacaatagcatattagcagaggagactgtttgggaattgtgtttgttttctgattatgtatcatgtttatttgttttcaatctctctcaacattttcaagattttgttgttcctttgtgtggaaaaaaaacaaatccgttgatgattttctcctcgcatctgtagatctactactaatcttgagacatgtaaaagcaaactgctagagcattgaaagggcaaactgctagaaaaaaaagagagaagaactcaacaccaatgatcggctatgctctaatctgaattctcaagtcaaaattgaaatcgccggtttgatcgaaccggatgtatttaacaaaataaacaaaataaacaaaaaaagaaggaaaaatagatcctcacgcgttaccgtagcgcgtatttttttcacaacaaaattcataagcagtgtgggtcccacaggtccactaagtttagtggtgggttgctccgtagctaatctcatctctcactctttttcttatccactatccatagaagaagaagaagaagactgttgacgacgacggcgatg

SEQ ID NO: 4372 - DNA, 3000 bp, Unknown
  misc_feature (1)..( 3000): cDNA_ID_2170256_gDNA_ID_1620702_Annot_ID_165106 3000 nt of promoter + ATG
atgaaatgcccacttctgttcacacttctgcactactgccactacattcttggactgcttctgccgctatattcccaccacaagggaccattcttttattattagacaaaacaagttaaatccgattgaaaagtatacagacaaaaccttctactatagaaataaataacccatatcatattctagattagatccagcgtaacaccctttattaattctcacttaatataatttattggagcagatcaagccattcaacaaagcctctctctcatgtgatgagatctctgacctaattgaatcgtgattagatctagatcttgttacattgtcttcgtcaattatccgcacttaaacatttcttcgttattttacactattagtatacgttgtaacacatatttcatctttctgtactaataaagagtacccacccataaactactctttcataaacaaatgtcttcatcaacaaatgtcttatataacgtgaagtttcatatccaaaccactggttataaagtgttttgtaacgttaactttcactattagactcatcaatgtttgcctatgtaatcatacaacagtagtagttgtataaattataaattggtgtagagaatttaggaataatgtttggatgaaagggtgttgtcacccaacaaggagagggaccattaataaccgataatcataataagatttgtgaaagaaatgtttcactgatttggcagaagtacagttggaggttctttgtcttttctcttctgcaccttttgttctctttacttccttcttgtttgttggtttttgttcttttcttattttttttccctaccataaatggaccattaccattcatttctctctttttcttattatttgctgtatttagttgattttgttatatccgtttaaatttgtgtacatataaacaacgacgtctataagtttttataacaaaaaaaaggattatgttaggtgaaatttcgattcgttttacgtgtaggatcaacgtgaaagaaagtcgttgtaggtatgaaaaatatggaccgactacgatacggctgcttgagaaaattagatgtataacgtaaagtgaaatagtgaatgttaaggcaattagggaaactaaaattaaatattcaattggtatgtagggaaacgactttttatttattcacatgcacatgacctctctatgtcatgtgccttaagttgccgtgttcgatctttttataatttgttcgacccgttaccctaaatttaaaaatcatttctatttttttattattatgtccaaatctgatttctttttcatgtgtcatatatataaaactcattttaattaaattacaaatttgaaaaaatatttttttttgggaaatttaagaccgacaagatgagcaagggacatggttgtaaactaattatttctttaattaatcagtcacaaaaattcctagcttgcatgtgcaatttcactctccaagattccatgttttacttcaacttttatcactagtttatactatcaaagactcaaagtagatgatctgtattctacgctaatagtaaataattttaatataaccactatttacccacttctgttttctctcaaaataaaaacagaatccacattatatacatggtttcttgtggttactagttacacaatgtactagctacaagaagtgcttctgattaaaccatgtacagttttctagttcaaatacacatggttcctcgttactagttacacaattatgtcgacattcatgggaagttcaagggatttggatacttcaattcttactatgagaaaccctatttaaatgtaactactaaaacacaagcactttttgtcgtggatataattggttaaaattatcggtgcgtttaatgtgttgagaattcgttgaacactttattacctattattaaaccaaaaagaagcattaaagttcatcgtgccgctttaagatccacaagttttgtttcttcgattcttcgtggtgaacgttgcagccatctttgggctgtactattgtcattatatttaacgggtcttttcttttgtaagttagagctagtatatatgaattaatgatatagttaaatttaaataacttgtaatgctcggtctaactcttaaaaaaacgtttgaatgtgattgaacctttcgtaacagtttgatactagtttaatggtaaaactggccacatggaacaagacgtcaagacctataaatgatcgcaaccttttatcgaagtggagaacacttctcgttcacatgttataagatcatgatacgatgctctctgattagtggattggagtgaaatttcgacaaaattcgtacatgcaaatgtcgtaaaaggcaattacaatatagcagcggaaaagagaggaggactatttgacatgtcggtctcaaaaccatgaaagttggtgccattgtaagagggctattgttttgacatgtcattcttgattctcagatttcgattttcatataaattatagcatactatttttgttgcataatatttgattattttcttactttcaaaaattttggtggtcggccataatatgtttttccaataaataaataaaaaaggtttatctatgtaaggtatattccttgaagtcaaatccaaatttaattacaggattatgtttcaaaacgttatctaaaacttgatccagctatttcaagagtgaactactttgtaacttaattaggactatttagggtaattgttttttcaattttacaaaaatcaaaagcaaagattaaaataatactaaagggttagtgatagaaactttgttgggatcaaaaaccttcctttgctacttctctctctgctctgtgtttatttatatatttcctataaacaaaataaaaccaaaaccgatggattggttcttcgctttacaatcccaacgcacttctctcattcttcttcctcatcttcgtcttctccgatg

SEQ ID NO: 4373 - DNA, 3000 bp, Unknown
  misc_feature (1)..( 3000): cDNA_ID_1388618_gDNA_ID_1620702_Annot_ID_165104 3000 nt of promoter + ATG
ctgaaccaccagagaaaagaattaagaccaaaagcaaaagaggtacaagcattagatgcctatgttggttccctttaggacttaaagtaatcaaaatcagtaaaacacacaagaagaagcttaaccattttttagcatataccaacacagaggattttaatattcaaaatctcaactttgatcaaaaaaaaaaaaaaaaaaaagatacaatggtctcaggaaagaaaagttgcagaaattggttggctaaaaccacagctggtttcactagacaggtatgtaaagctgattgtatataaaaccccacaagtctcagctaatggggctttaagaaacatcacatgtctaacggtagactgaaacagggatcatctgaaactcctttcacattttttacttattttatcagaaagaagtaaagcaaccaaatctctttctttttttctgtagtccctcaaaccaacttgcatcacttgattagacaataccaactttgagtatctagattctagaagaattaaaaaatgaacaagaaacttcgcatgtctaatggtggcatgaatatagtaccatttttctccccaaattcctttttcgctttccctaggtgctgtgatctttctaacgattcaaacttagccaaatggacaacaaccttgagcattctctctattcatctctcaaagcgtaggtacaaaacttaatatcaggaaaccatatcaaaacaaaaaagaccttgaccctcataagataaagggaaatcagtttgaaaatggtgaatcatgtggcgattggcgaaaacattatttatatccttcaatatctatctctcatttaacacaatcctgatcgagctcttaacattattagaaggtccagagaacaatatccaaagcaaatggaccaaaagaagtaaaagaatcaggacctgacttcttccaatgttacaccctcaaacctcagcaggagtctttgccacaatagagagagcatgtaacccgctcttcaactcatcttgcaacaagtcatatatcagcctatgtctcttgaccaagcttttaccttggaaagcatccgaaacgattcgcaagttgaaatgtgtttccccatcatcaccagcactacctctaacagcggcatgtcctgcgtgctggtaagaaacatcttcaacttctaactcaacaggatctagctccttctccaatttctctcttatcctcatccctctactccctaaagcaacaacatttgacccactctcagaatcatcaatcttttctgttcccaaatcctcaactagatcaggtttagactccaaatccacctccggaacattagcttcgtccttagtctcaggaatagacacaaagctggattctgaactctctccagaacttgaatcttcctcacctttgacttccaaatgaagagcctttttctgcatcagcttaagcatattaagtaatccattgtttctagaaggagacagactctgctgcaacccgagaagaacagcgaaatcaggtgttatcctcaaaatctcagggacaggtcttccagataaacccttgactaatagagcagctaaccctttagtgagaaccgaatcagaatcagcttcatacacaacattacgttcctcatcaaagaaagccctaacccaaacctgagaaacacatccttctactttattctccctcgtcttgaattgagaatcgagaggtgtcagattcttcccgtagaacataagctgctcgtatttagcctttggctcttgtaccgattggaaaagcttgacgatctcttgtagcttcggtggaagctcttcgattggttgaaggtctccatagctcgacggagatgatgaagccgatggtggaggaacaatcccggttgaaattttctggaaagtgatgatcgtccggcgaaaggaaggaacttccgacggttttagtggtcgtagaagaagggttttggccggataatggattgaagaaaacaaggtccgtttgaatgggattaaacgaagcgaggaagcgcaacaagaagaagacatcgctgctgccatagtcgcgaacttgaaacttcgagagagactgagatgatgatgaaagctctccttcttcactttttctgagtcaaaaaccaataccgccaattaggtagtaaccgggaattaaaccgggaatgtaccaaaatccaaaaattagatgtaaaatcaattgtggggttgattatgaataattagaaagtatacgactcttttcataaataaggaaaagaaaaagatatctagattttttttgttttgttttgaagcatcgtcttcctggttcttcgttctcttgcgttcgtcacctcaaacacgctccgccattattatatatcaaatcaatcatgtccgaatccagcttttaccaatgtaagcaattaaattaaattaaataaaaacacttttatcaaatttaatcaaattaaaaaactgtccctttcttatctgagattctattgtttctgtctacttccacagaaagaaactgcatctccgtttttttttctgatttgaggctttccttagatccttgagagcaaaactgaatctgggtaattttaaaaatctcatttttacgacttatctcttttgaacgatctgttttttcatgtaagtacgatttcacctcgagatgatcgatcattgctcttctggttcttccatgtttgattaaatgttataacttgagggttttgtttcttttggattgttctcgcatttgttgatctatggttatcaaaagagtttggatttacagtttttggttgcagctgaaatttttcactcttttcttctctgttttgctggataaagttggatttgattcacattgttgtttagaatctagatgaagttgtaagattccttgtattgtgtttgcttatgcatgattgtgataaagatttaagttattttaccaatgtacaatgtccagaattgtcgtcggg

SEQ ID NO: 4374 - DNA, 3000 bp, Unknown; identical to SEQ ID NO: 2998
  misc_feature (1)..( 3000): cDNA_ID_1819223_gDNA_ID_1620702_Annot_ID_165127 3000 nt of promoter + ATG

SEQ ID NO: 4375 - DNA, 3000 bp, Unknown
  misc_feature (1)..( 3000): cDNA_ID_1010729_gDNA_ID_1620702_Annot_ID_165124 3000 nt of promoter + ATG
agaggaagatgacgacgactcattgggtgatcagattcgtgaactaaaggtcttgttttttgttactgtcatatagctgcaaatatcatctgttacatatttgatgtgagtttgttgtatatactgacatttgaggaatcaatgttttgtaatttggttggttacaggaagagctcataagaacaaagtcggatgggtacaacaaagctgatgcaagtaagagtggacactttgcacgtgacagtttaagtcaattgagagtcagtatcaacaaatctttactcatgtcgtgtccaaaaagagatgaatctgagggaaaagaggtgatcgtggatggtgaagatgtgctggaattgaataaacatattgagaagcttcacggttcttatgattctgttcactcctcatttgcaagtgcttcatgctatgaagccgactcgatgagtggagatgatgaggatgtctgctcagaagacttggagaaaccaatgcatggaaaccataaagatgttgactttgtagataatgatccaagccagctcgacaatgttgaattcgatacaacgggtagtggcatttcaatcagatcacagcttcctagttgcgttctagaagagccaattttctcagaatctccaaagtttaagaatgttcagaagagtgtagctgcatcgacaaagttttcagcaaatcctaggaatgtgtctgaaagctccaacattggagacatgaaagtcaatcagattagcccgtgtatgtcaaagaaggtttcaggtcctacagattctctagctgctagtcttcagagagggctgcaaattatagactatcaccaagggagctcactatcaaaaagttcatctgtttccttctcttttggccatatggcattgaaaccttgcgcagaaggtgagaatcttaatgcttcagtccaatcttttagaaaagataaagcttcagaaggtggattgtcgtcgattctcctatgtctttcatgtagaaagaaagttgaccaagaagctgaagtatgtccacaaaacctgagatatttgcctactttctctatagctttaattttggtaattctgtttcgttacttatcttataatctcttctatatcaggtaacagaagaagctggttcaaacgaaaaacatctcaagaacatgtgtatggagcaagcagctaaaattgaggagctaactctcctggtaaaaaccttgtaaactttaaagaatattagtgttataaaaccttgaatcagattttcaaaaattagttttgataattcttaacttagaccaatatacaacatagctgtggaagagcctgtgaagttaccagttgagtttcattgacgatatttgacaagaatggcaatctaaattgaataaactgtgttgtggccttgtttgcagcttaggaaatcagatgatggagaagatggaacagagttcatcaaagaaacatatgagacgaaacaaattagtgaagagtttggaaaaacaaactttgaggtaagtgaaaaggaagctcttctcaaggagattgcagacctaaagagcaagctgcagcctactaagtccacagacaatctgagatcctcgttactactacgatccattcaaatgcgcaaaagcattgatgttagcaggaatggtgagaacagtgatgatctagcgaaagaaagggagatgtggacagaaatggagagtgagtggatatccttaacagatgatctcagaatggatatcgataaccatcgcagtcgagctgagaatctagagtttgagctcaagcaagagaagctagccactgaagagttgaatgacgcgctcactagagctgtgcttggccacagtagattcatagagcagtacacagagctgcaggagacgtacaatgaacttggggagaagcacagtgtgatgatggctggaataacagatgtaaagaaagcagcatccaaggccgctatgaacggccgccatggaaagcgttttgccaaagccttttcagatgagctttctgccatcagagctgagaaagagaaagaaagagagctcttgaagaaggagaacaagaacctaagaactcagctgcgagatacagctgaagcagtccaagctgctggtgaactacttgtcagacttagagaatctgaacaggccttacaagtctctgaggtaaactaagctcattcataagatcataacactctcatgtggaaaatcttggtttcattaaatggctaaacttgaactcaaaccatcattgcaggaacgattcagcgtggtggaagaagagaaagagaggctgaagaagcaaatggagcaactaaagagcaaacacaagacagaaatagggacaatgaagcaatacttagcagagagtaaattaccaggatctgcattgttgcagccatggtacaaagatgaggaagatgaaatagaacaagtatcagaacatgaaaccggagctgtcagtttcgatgactacgaggatgatcaggcttggagagcagagtttggagctacatatcaagaccaccattactagtctttgtttcagacaaacgacccttctcgggtcatttactatgatcctccttagtacttttgtactgttatctttcattttgttgttctattgtatctgccattattgaaccgctaaaaagatttgtaacggttggaaacatttttacatgtattgattgattcatcttttcctgaattccagtgaaattcccagaagaacagaaatctaactgaaaccgcaagaacttactgtaagcccaattctgttaatgataatgttaaatgggctataaaatgagccccgtcatcagccgctgaagtgaaacgcatcgtttagtatcgtcgtcttctggggaaaatatctttttttttaaacactatcaattcgactggaaaaaggatatttccagattaggtagagagagagcaaaagtactttcattcagacttcagtttaagct

SEQ ID NO: 4376 - DNA, 3000 bp, Unknown
  misc_feature (1)..( 3000): cDNA_ID_1815368_gDNA_ID_1620702_Annot_ID_165099 3000 nt of promoter + ATG
ctataccgaattaaaggtaataatttgaagtttcaaatacgatatttaagatcctaattatgagtagaattgaatgtgaaacggttttattagtacaagaaaagggtatatgaaagggttaagcaattaggttcgaaatataaacacgcacagaactcgaagagccgaatttaacaatgaacccaaaattaaacgacactgaagcaacctttgtgttgtgactctatatgagtgtatatatatatggtttatagaatacaaagtcttcagatatgtaatggagatttcagaaaaatggataagacactatagtagcacacacaaaatccttctagttggagaaggaaacttctcattctcactatgtctagcttcagcttttggctcggccatgaacataactgcgacctctctcgattctgaaggtatgtaaaacccattttatatgaacatttataatatacatctatcgatcactagtcgtaactaatgtattgacttaaatcaataaaattttacatgtagatgaactgagcataaaatatatggatgcggtggataacataaacatattgaagagatacgggtgtgatattcagcacgaggttgacgtgcacacaatgagcttcgataatagtttgagtctgcaacgttatgaccgcattgtcttcaattttcctcacgcagggtctcgtttctttggtcgtgaattgtcctctagggccatcgagtaacgaaatatattctttcattttcttactataatatatagtttatgatttggactgatgtaatgataaaatgctgtgttttggatcaggagccacaaagagttagtgagaggatttcttgagaacgctaaggagatgttggaagaggacggagagatccatattacacacaagacaacgtatccatttagcgattgggggataaagaagctgggtaaaggagaaggtttgaagctgcttaagaaatcgaagttcgagctgagtcattatccgggttatatcaccaagagagggagtggtggacgtaggagtgatgattatttccctgttggtgaatgttctacttacatgtttacccaatcctaactttgggaaatcttgcttaatttttttttggtattatgataactaaaaaaaagaattgggcattacaacatcaacaaggtaacaataatttggtccgactggacacgttcattcagttccttctgaaaactcaaaagcaattggtatataaaaagatcaaaaagttatatgaactatgtactttgaaaaagaaaaaaaagaagaagttatatgaactatgttaataataaagatctttaaactttttaatctcatttttgtttataatacatcgatttttattgagcttatacaagttcccgtaactgactttatatatagtttcatgtattaatttatacataattggccaataagtaggccttttttttgttgttttctcatgtaagtataattaagtgtgtaatcatatgaatctctataatctatatgcatacatacatgtatatagaatatatctatttttcgccaacaagaaaaaggacgaggaaactaaattggttgagattaacactttagtttattggttggtccaagagttggtagatttctttgtcgtttctctatagttggaacatgcatttatgtgaacttcgattatgacgatatgcatccatactacatgtaaaatttattgttgttttccgccaacaaaagaaaaacgaaaaagctaattaaattacgtacgagtaaattgaacacttggagaatcacatggatcctggagctctgctcatgcttaggagtgctcgaggccttagatctttcctatatgtagacgttgatccttgtgatctaaaaggtttcgaggtcttggaaatctatcacccgtccatgtctgatggctttgtgaactcggtaatggtcgcacgcaaactcactgatcgattaattaagtacgagtggtgtactggaactcgatcactaaattcattaaaaaaaacaaggcaagtgatgattccctaagaaattaggtcaagattggagccatacttgtggaacaaggcagatgatgatttccctaatgaggctctctgactctcccttactagttcaatattagttctgtcttttgtcaacgtgttgacgaaatcaaatctatattattagttgttgttttctctctatgcttattgtgattatgatgtcactagatcaaatactcggtttgaatgtttccttataaatgtatcagcatgaccatttttctcatattttacgaaatatttagcctgacaagcattaagcagttctgttaaacataaaacatacaatatccatgaaagaaaatcctcaatgtacatgagtcattaccaaatgcaagccatttgatcagaagtaagctgtggctgaaacacaatgtacagatgagtcatctttttgtttgtttgcttgaatagaaacgcagcgtttttgactaatcgagtaaccaattttttttttacaagaccgaaccggatcaattcaacaaacgtgaaataaatcgaagcgggccaggtcaagtaggtagccctctcaatgattaagagggaaccagctgtatccagagaccctctgagtcagtaagaagcttctaagagggacaggaaacggtaaaaaaaacacgagttatgtccggtaatatcaaaatggcaaaaatcattcatttcaagaaagaaaagagtagagagagtctcacacagctataaaggcccaaaaacaccaatccaccgacgagtattgtagatttagaggtctacaactaaaagcctttgtgtgtgccagattagctccctactaatccgccgccgcacctcctcgatctccgcccagctcccttcttttctatctatctattcagttgtttctccggtaacaaccagctgaggaagaagaagaagtagtagccgtgatgatgatgatg

SEQ ID NO: 4377 - DNA, 3000 bp, Unknown; identical to SEQ ID NO: 4366
  misc_feature (1)..( 3000): cDNA_ID_1823982_gDNA_ID_1620702_Annot_ID_48798 3000 nt of promoter + ATG

SEQ ID NO: 4378 - DNA, 3000 bp, Unknown
  misc_feature (1)..( 3000): cDNA_ID_1824077_gDNA_ID_1620703_Annot_ID_48800 3000 nt of promoter + ATG
ttaaagggtagtgatgatatagctaaagttgtagaggaggagaaaaaagatgatcttgatgatgagttctctgttaagatggtctttaaaggagtctcgatattcgaaagaggagatttgggttctggttattcgggaattggtgttgtgttggagaggtcaggagatttggagttgattcaggttcagaagaagttggatttttatgtcgaagagtctgtagctaactatttagctcttatggatggtcttgaagtagctttacagaacaatctcagctctgtggttgctgtaaccgactccgagttgctctataatcaggtaaagtctctcttctttagcttgttgaagagacttgctttcatatggttttgtatctctttgtaggtttgagctcacgttttatatgaattgactttgcagataactcgtgaggagcagctcgagatccctcttttagtagctctgagagaaagggtattggagaaaacaagtaaccttaatgggtttgttctaaagcttgctcctttctgtgatcttgatgaagctctaagcttggctcaagtagcggtaggaatcgtgtcttctaatcttgatggggataaaccgatcgagaactgctcgatctgctgtgaagaccgtcagtctgagatgatgctatcattgaaatgcactcacaaattctgttcgcactgcatgaaaacgtacgttgaagggaaagtaaagacttcagaggttcccatcaggtgtcctcaagtgcaatgcaagcattatctctcagcagcggaatgcaaatcgttccttcccgtcactactttcaaatcattcgaggaagcaaatgtgtgtagtaaaaacaatgggaagatttactgcccatatcccaattgctcttttctgttagacccgcaagaatgtctatcatcaggaagggctagctcaagctcgtctactcagtcagagaatagctgctgtgtggagtgtccagtctgtgagaggtttgtgtgtgtggactgtggtgttccttggcatgcttctatgagctgtgaagagtttcagattcttccagttgatgaaagatacccagatgatattacattgcatcgcttggcaaggtataagaggtggaggcggtgtcagcaatgccgtataatgatcgagcttgctcaaggctgcaaccacatgacttgccggtaagacacacatatatatctatggctacacattgttttccgtatctatacatatttgaaccaccaaagttaggtttttgacttccaataaaatatagttagtcttgaccctttaactgcagaatcacggtatcgtaataaccatatgattctaaggttttttttttctcgcctacgtttaaatctagtattctagagcaagtgtttcttttgcgattcttacgcatataaatgtcaaaactctctgtgttttccgcagatgcgggcatgagttttgctactcgtgtggagcagagtacagagaagggcaacagacttgcacgtgtgctttttgggacgatgatgaagaagaacaagaaaacgcagtagaggaaaacacaattcaagaagttgagcaatggccttgggacacatttaactcaattccaactgtaatggacgcgtactcagagcaagaaagatctcagcttgctctgatccaaaggttcttagcaggtggagggtttagtctcagtgatcaccatactacttatcagtcaccgccgcctccatgtacagagtcatcatatgttgaagccgcaatgaaagatcttcatcagcttccttggcttgagaggtttgtgtctgttataagtgatgattactatgaagagtataatagccagtgaaagtagtagaattgtaatttaatagccttgaggatccggcttggtttggttcagagaggccaaacgagagtatctcactctcgaaagtaattgttgggagggttttagattcttgatgaactcaaacaaacgaattgtgatgaaactatttgcaattataagaagaagagtttgctcatctccattctacaaatcctgcaagaaagattaacactcttttatattcagtgttatgttatgatatttaatctaccaaaatttggttgaagaactaatcaaaatgaacttggttagcatcatcatatatataccaactaccaagtaaagaaaaagtttgataaattcaattattcatgctcttcaaataaaatacagaacccattaaaaagggtccacttatcatcaatctactcttgcattatcttgagtttttgtgtagacataacataacccattttataagttatgaccttattagaaagggtccacttatcatcaatctacttagcattttgtgtatatttctcaaagctgacgttatttaagacgtcatagacccacttcaccacaactcaagtcgtcttcaattgctgacgacattgcttacggtttttgaatcgtcgtcacaaaatttaggagattggattaggaattggctctttctttactattctccaaagactttactatttggtcagtcttcttatttctcacctttagcttttagataaacctctgatttttttctcccatctgttctgagattgtcttcttcttcttgaaatctttttcatttgtgcaatgattttgaagactacccatctattcagttctttctcttatgatttaagtttcatttagtttttttttctcatccgccattttcgttgactttttgaagcatttctcgaattgactttgttcttcacattgattcattagaatgttctttcataaagtttggatcttttcttcagggcttgattaatttcatatctatgatcttctctgtattgtttttgatccaatcacttctcaaaatttgatccttgtcattggatttagatttagggtttttgtatccttggggatttgaagatcaaaaacagagtctttgagtgatacttctggggaacaaaatg

SEQ ID NO: 4379 - DNA, 3000 bp, Unknown
  misc_feature (1)..( 3000): cDNA_ID_1807647_gDNA_ID_1620703_Annot_ID_48801 3000 nt of promoter + ATG
cttcttcacatttgtaaaatctgcctgttaacataaattatatacatatgaacgtaaatttctaattgatataagagacataaactatatagtatgaatgtatattcgtacctggaggatgcagccaccaagacctatgccttcgaacaagtgatggaagcaaagagctatgatgagtcctttaatggtacatgaatcattagttgctcctagagatagtccaatgaccacagaatgaaataaaatgccaacctccaatacctattcatggtattcaaaaatagcttgagtatggttatacatattaatttatgatttgaactcaagaccgttttgtagtattttcatatgtactaaccatggcaatgacttggtagcgcaaaagctgtccatcatctttagttgctagcactacaccatgaccgtgactatgattgtggcctaccatgtgaatcgctttctcttgatcaatgccatactcttcatcaggcactggtccgactgagttcttaccggtataaaggctggtggtaatggagtcaatggctagagtgactagaccggacatcatagcgacaaaacccgcaaaagggaacttatgccacggattatcactaagacatttcgatgacaacatctcgaaagagtcaggcaagacgtgcatgaaaccggttccaaggatgattccagaagaaaaacatttgacgatcatgaaaccattgccatcgggacggaggaacgaaatgtaacggctgaaaagaggagaggtcacgcctatcaagcttgttgtaagtatggcaacaatggctacgattttgagtggtaaagccttagctttgttgatgcacgggttatcaaagccgctatcacaatgttccggggccgttgagatcgccggagatacggtgaaggtgaataggatgaggagaatgtagacgagcttggtagtagccattagtattgagattgttttataatatatgatgtttgaatttttgatgagataaattgttttgtctttggttgtcttatatagaagatttgccggcttgttctcggtgctgctgatttggaaagtcaagttatgactaaatcaatagaaaaaagattacactagagaatcggaatcctgattttattgattgtgtatgtacattatcagatagaaaaaggttttaaattgtattttatattatcctatagttttgtttaatcgaagagaagcctggaaggtgtggatcatgccaaacgatacatgaaatgtcgtattattttactgtcaaaatgtattgctaaattggtttaatgttgaattaaaattgaactaccgacatcgctgaattgaatatgttacaatttacaaactgttaaaaaactacaaaatttgtcgttttctttgtcatatccattggtaatatatcgttatttcctacttcaaaatttgtttatgttttcattattagcaaattaggaattactaattagttgtgttcaaaggaaaaatctgagtaggccatctattgatattgggccacattgatatgtctcagtaggcccatatattacaaattaaaattagaaatgatgtacaagattcaaatgagaagtgttattcaaattagaaatgatgttcaattgtttgttctgtgtttgctccatttatttggttaattcattagtaatcgcatttgttctgtttatttcctctgttaattactgtttcttcagatgccacaaacactgcaataaaagataagtccatgttcacatttcccatttgaattaagattataaacaattaagctaatgattgctgtctccattttcaaacttcctgctgccataaactgtcctcgagtgtcttctattgcagaaatacaattattaaaaatttcatttttgtacttctttttgctaactttattcaaagggaatataactattggatgttaaaagtcagagaaagatttttttttaatgaagttacagctttttttctcaatgagaggagacaaagtccatgtgctaactttggtttcttaagctataattcttcatgctcaggttctaatccaattccattattacagtttcaattatttaaactatatattttaaattaaatacttgatgattagtaatgtgaaaataattatttcattgtgggaaaatataaaacattgtacagtacgagaatgacagcaaagtgaagccaaaaactcagaaaaataaaataaattaataaataaaaaaagagagaataaagaaacaaaacaaaaaaaagtaaaacttttctcttacgccattcgaagagagagcaaaaccagaagaaccgatgattcttcttcttcttcttcttctctccacaaaaactcagtagaaacatccaaaacaatgcgtttattttcttttttttcctggaaaaaaacagagattttgaagatgttattatagcttagagttttcttcttaattttagtttccaagtgtaaatctccttccactggtaagaaagcttctggatttctgttcttgcttaatgatactttaatttcaaccgatctcgttttattacaaaatctctggtgatttctgctacttaaataaattagaatttttttcttccttgaaatatgtaataattgagggtctggttggtgtttagtgggtcaacaaatcgagctgcttcttttgttatcttctgtgtactttcaaatgatttggtctctgatttatgctgatctgtttatgtaacttcatcaagcttagctgttttgttgatctgtaatgcaaagttcattttttttgttccctttcctctctctctcagtatatggtataattgagattagatgatatctaaaagaattagctttatctcatttttattcggttttgtttcatgaaatttgcagatccgatatgggtttcattggtgtgttgctaagttaagaaagtttgtacctttttgtagtttagataggtttgtttccagacatg

SEQ ID NO: 4380 - DNA, 3000 bp, Unknown
  misc_feature (1)..( 3000): cDNA_ID_1824073_gDNA_ID_1620703_Annot_ID_48802 3000 nt of promoter + ATG
tgtttttactacacacatttgcttcctcgaatgatttgaaagtagtgacgggaaggaacgatttgcattccgctgctgagagataatgcttgcattgcacttgaggacacctgatgggaacctctgaagtctttactttcccttcaacgtacgttttcatgcagtgcgaacagaatttgtgagtgcatttcaatgatagcatcatctcagactgacggtcttcacagcagatcgagcagttctcgatcggtttatccccatcaagattagaagacacgattcctaccgctacttgagccaagcttagagcttcatcaagatcacagaaaggagcaagctttagaacaaacccattaaggttacttgttttctccaataccctttctctcagagctactaaaagagggatctcgagctgctcctcacgagttatctgcaaagtcaattcatataaaacgtgagctcaaacctacaaagagatacaaaaccatatgaaagcaagtctcttcaacaagctaaagaagagagactttacctgattatagagcaactcggagtcggttacagcaaccacagagctgagattgttctgtaaagctacttcaagaccatccataagagctaaatagttagctacagactcttcgacataaaaatccaacttcttctgaacctgaatcaactccaaatctcctgacctctccaacacaacaccaattcccgaataaccagaacccaaatctcctctttcgaatatcgagactcctttaaagaccatcttaacagagaactcatcatcaagatcatcttttttctcctcctctacaactttagctatatcatcactaccctttaaccaaagttcttcatcaccacaacaacttctaaactcttcctcatctcctaagtgattcaatggaagctcctcacattcacaagaatcctcttgattttccatgtctggaaacaaacctatctaaactacaaaaaggtacaaactttcttaacttagcaacacaccaatgaaacccatatcggatctgcaaatttcatgaaacaaaaccgaataaaaatgagataaagctaattcttttagatatcatctaatctcaattataccatatactgagagagagaggaaagggaacaaaaaaaatgaactttgcattacagatcaacaaaacagctaagcttgatgaagttacataaacagatcagcataaatcagagaccaaatcatttgaaagtacacagaagataacaaaagaagcagctcgatttgttgacccactaaacaccaaccagaccctcaattattacatatttcaaggaagaaaaaaattctaatttatttaagtagcagaaatcaccagagattttgtaataaaacgagatcggttgaaattaaagtatcattaagcaagaacagaaatccagaagctttcttaccagtggaaggagatttacacttggaaactaaaattaagaagaaaactctaagctataataacatcttcaaaatctctgtttttttccaggaaaaaaaagaaaataaacgcattgttttggatgtttctactgagtttttgtggagagaagaagaagaagaagaagaatcatcggttcttctggttttgctctctcttcgaatggcgtaagagaaaagttttacttttttttgttttgtttctttattctctctttttttatttattaatttattttatttttctgagtttttggcttcactttgctgtcattctcgtactgtacaatgttttatattttcccacaatgaaataattattttcacattactaatcatcaagtatttaatttaaaatatatagtttaaataattgaaactgtaataatggaattggattagaacctgagcatgaagaattatagcttaagaaaccaaagttagcacatggactttgtctcctctcattgagaaaaaaagctgtaacttcattaaaaaaaaatctttctctgacttttaacatccaatagttatattccctttgaataaagttagcaaaaagaagtacaaaaatgaaatttttaataattgtatttctgcaatagaagacactcgaggacagtttatggcagcaggaagtttgaaaatggagacagcaatcattagcttaattgtttataatcttaattcaaatgggaaatgtgaacatggacttatcttttattgcagtgtttgtggcatctgaagaaacagtaattaacagaggaaataaacagaacaaatgcgattactaatgaattaaccaaataaatggagcaaacacagaacaaacaattgaacatcatttctaatttgaataacacttctcatttgaatcttgtacatcatttctaattttaatttgtaatatatgggcctactgagacatatcaatgtggcccaatatcaatagatggcctactcagatttttcctttgaacacaactaattagtaattcctaatttgctaataatgaaaacataaacaaattttgaagtaggaaataacgatatattaccaatggatatgacaaagaaaacgacaaattttgtagttttttaacagtttgtaaattgtaacatattcaattcagcgatgtcggtagttcaattttaattcaacattaaaccaatttagcaatacattttgacagtaaaataatacgacatttcatgtatcgtttggcatgatccacaccttccaggcttctcttcgattaaacaaaactataggataatataaaatacaatttaaaacctttttctatctgataatgtacatacacaatcaataaaatcaggattccgattctctagtgtaatcttttttctattgatttagtcataacttgactttccaaatcagcagcaccgagaacaagccggcaaatcttctatataagacaaccaaagacaaaacaatttatctcatcaaaaattcaaacatcatatattataaaacaatctcaatacta

SEQ ID NO: 4381 - DNA, 3000 bp, Unknown
  misc_feature (1)..( 3000): cDNA_ID_3073168_gDNA_ID_1620703_Annot_ID_48803 3000 nt of promoter + ATG
accgagttcatggggtcaatgctccaaggtagcatcaaacttcagatcaagtgcttcacggcggctttgcttggctgcgccgtaatgtcggtcgtcgccgtgtgggcttaaacactctttcaacataatcaataaattatttgatttattattcaaggcgacaaatactttcgcctttgtatatttgagtttttgtttttaagtttgattcatttattagtttgtatagtgcatgtaagcgtttgaaagaaatttctttttatgacattgtaaatttatttttatgaatgcgatgtttactttcttctttggaatgacatgtatttaattattggagtttgttgattgtcaatgttagttagaaaaaattaggtccgaaatactagtgacacggaaattaaagctatatgaattaatactatcaattatatttaaaattactctcttcaagaaaatgtacatacagtctcttgttttaataaagaaaaatttcttactttggttagatttaaattacacaatatttcatgacaactatttaaccataaaaactcgataatgtactatatctaacacataatttgtaggtgtgaatggcttaagctaaaaagcttataaattctatgtatttcattccatttcatggttttttggttgaaaactttaagtacaataacagacttactaactaatttgtaaatttccacacatgttttgattccatacacctggaatcatatcaaatacttgtaaattctgaacctattgaaacaagttgaaccatttctttctaaagattaaatgcattatcttgaagtataagttcttagaacatactattaaataactttgaatagtcttcaattttactaatgccttaatcaagttttgaaattatctttttcaaatcatacacacttcatcctgacaattgtaaatgtttatagtttttagaataatttttactattttttttaatttgtgtcaatatctgatttggtttgattctagacttcgtttgttttctcaaattgtgcaagtaaaaaacacgaatatatctattttttattttatgttcagaaaaaaaaaaatatatatatatatatatattcgtgttttttacttgcgcaatttgagaaaacaaacgaagtctacaattaagcgaaatcacacattgacacaaattaaaaaatatttcttttctcgaccgaaaaaagaaaattatttcaccaatatggaaaatctccccaagttcattctattttctgtatcaaagttaacgaatagacatataagcattttgtcacgtcggtggagtatgagtttggcacgttttgtttcgtgctcgtccaaccatatgaaaacgtgggaggtaaaccactcaactaataatattatacctttaaaaaaactatattataaatccagtttgatgcttattttattaatcattcttcaaagaaataaaacttaaatagtgaaaattataaccgaagttgactagttaggaggcatgccatggaatattggatacatactcggcatggacagtattgaatatacaggataatgtagataactatattttctataatttattttgtgtcaactattttttctatgattctgatgattaattgcatgacaatcaatcaaattaattatgccttcttctatataaccatgcaaaaccaaaaaaaaaaagattatttcgaaacgacatgagaatcaaaagaactcataaatcctaatagacatgaaattatgtatacagttataacattgaaatatcttaataccttacctaaaagataactagattaataaccataaaaccaataatcattaagtcaataaccccataatcttataaatgaagtcagtgactatatgttcatgtaaaaatgcgtaagttcatagctagatgtcccttttttaggagcacatggattgacacattaaacattcatacccgatttcatggaattctatttgtcattatcctttcccaaaaacttagttgtttcttagttattaaaccttgaaaaaaaatcaattcaaaaatgaaaaatgacttatatgtatgtcatttttgaaaactagacatcaagctatgaaaagaggaatctatttaccgaataaaggaggaggaatctacattcatatgtagtgtttttggtgactggattgcaaccatacactgagcacaagctgtcacgtgtgatgttgtgctcgtagcataaactataaagtataaacctaattaagcttaaagttaaaaatagtacaagattaaaaagtaaacgtttgtgagagttgactaacagaactatagaagacgcatggggttgacttcaagcggtctgcaaacggcatgaacaatgcattcaaacgataatataaaccttaattccaatatagcctttttcaaatttaaaaactcgaatgtttacgaaactataacttgataaaactgattgaaataaaatgtacttacatttttttaataaaatatacttaaattttttaaataaaatatactttaaaatatacttaattttttaaaatcatactatggattttaaacaaaataaattgtcactgagtcatatttctttggataaaagaactttacataagtgattggtacaatataataatatgcaaatttaagacattttattaagtttatattatcgtttaaatgcattttctatcaacttaataaaatctagctaggtactttcataattctatcattattccttttgaacgattaattactttattttctcgtttcacactggaagcaaacgagtaatcaaataaaatttcgtcatcatcgacaataaatggcatgaaaacaaccagcacacattactatataaaccgattcatctagtaagtccaaagtcacacaaacattaaacaatctaaacacacaacaatccaaaagaaaaaagaaaaaaaaaaaaaatggcttcaaattcagcacttctc

SEQ ID NO: 4382 - DNA, 3000 bp, Unknown
  misc_feature (1)..( 3000): cDNA_ID_1807497_gDNA_ID_1620703_Annot_ID_48804 3000 nt of promoter + ATG
gttgtttgattttaaaaagttaggagttttcatcttgtcacgtttccttcatatatagcatgaactcggccacgtacgtccacatctatcttgttcgtttgtctaacttacgaaatcaatattaattagaaatccacatatagaatataaattgaaaatgaatttgaaaacgtataatgggacaaataagtagtctattctaaaatgataaaaagctctgaacaagtgatgatgttaggcttagtttctgacattggagcaaaatcgataattagacaaacgaatatgtcgacaaaatatatatacaaatgaagttgagaaagaaaagacaaccgaagttgtctttttcgacgagtctggtttatcctcaaagttgttcagtactgttacttttaaggaaaataatcgtggtttggtcttctaaattgatttttcttttaatatcatatgtggaaaaacttctattacaccaaaaaatgttgttgagttcaaaatagatatgatgtatcggtaaagaaagactgaaccgatatttacacaattctcggttgtaaaaagagattgagatcgtccactttaacgtaagtattaggggtgggcgcaaggctagtacttgctattttagggatacttgttactcgacttgccttgtacgagtaatcaaataagtaattgtatttggtttattgaaaacgagtacttacaatttcaagtatttgctaaaatatgattgccttgcgagttacttgccttgtcctgttacttgctacttgcgagttacttacatgtacttacgagttactacttgatattcacgagttatttacaagtatttacgagttattacttgctacttgcgaattacttgcaaataaattacttgcaagtaacactttcgaattacttaaaattacttattattttatttatcatattttttacttatttaaaatttactttacttctaatatagttttaaaatgtgtctaacactaaaacaatacaatatatgtatagaaaatggtaaaataatgacgagtatcgagtcaaacgagtcgagtattagttttttttcattacttgttacttgatttgtacttgcaagtatctaaattatactacttgttacttgccttgttaaaaacgagcatttgttttttcaaggcgaatacgaatcaagtagcgaatataagacgagtaacgagtacttatgtctagccctaataaatatatatgtgttttttcaataactataacaaaaataatcgattaactcttttgtgctcaagttactatgtaaaaattggtatgaacaacattagatacgcatcatgataatgtttgtttagtggataaaaaatcgattaacaataaaaaaaaatagagagaggcatgaaaacgaaaataaggaaaagaaaaagactattcgtttggtgtggtcgacctgtcccacaccgaggaaatcacacttttatgacaagacctacttgtccgtactatataacattatcgaatgattccgattttctctttccttttttttttctttaatacggaaattactaattaaaaattaaaaagcgaccagacgacaattcaagaagcaaacaaaattggtggtaccgaaacaataaatcttttttatttatttctaaacaattattaatttattgaaaatttcacgaagaaatgaaacagaaagtttttcttggtcccacttagacgtggcctcaatcttcacatcatggccccacacgcttctcacgtgcaacttaaccagttacgacaaaacaaaattaagaaacatattaactttagaaatgtatttacaatggttaaattattgttttgtgccatttcgtttaatacaatgcaccgctacatgatcttaagatagctcacggaaaatttagaaaagtaaatcacaagtcccaaatatgccacggtggaagatgacatggcagatataaagcggagctttgccacattgaataaaattacgagagtaactttatagtttgtaaaattaaaatcatgggaatggtttaaattttaaataaaataaaactgaagaaatgaagagtatgcatatttaatactatcttttgatatgaaatttaattacagtaatcacaaaataaggaaaagttaataagaaaaatatgggttgactaaagagaggttaatttggaatctttttacagaagagaatacagtgaactaacataaaaattttattaggaaagacagctttacacatttttaaaaatgcatttaaggaaaaaacagctttgcacctttttttataggatttgcatctttaaattttagaaataatacaaaaaaggatggacaagaacataaaatctaatagttttttcaacaaaagaaaaaatcgaatagtttatgctaatatcattaacatattagcaaaaaaaaatttattgattttataatggctctttgactagtcaagcttgcatatgtttatgtggatgttgctaaggaaacatgcatgagtgcatcaataaataagaaagaaatattacaaaaaaaaaactttttacacgtcccaatatttgcaaacttcaagaaagatagtatatattgttgaataaaaacttagtatattttatatttctctagattatattccttttaagttcataaaattggttgtttctttttctttttccttttacaaaaatcaactgtattttactaacatttaatttacaaaaactttaattactaaacacaattggtaatataccatgaaagtcaatatctaatttgaattcataattattctaaatatctaaaatatttaaatagtaaaagtaataaatatgtatttatagaaaattaaaaaaatattgacttttttctctcccttaaataaaagccaatcccatagatttcttcaccagtcgccacaactcctccctcttctctctctctttgtttcagaatctctaggagcttttttcaacaacaatg

SEQ ID NO: 4383 - DNA, 3000 bp, Unknown
  misc_feature (1)..( 3000): cDNA_ID_1824065_gDNA_ID_1620703_Annot_ID_48805 3000 nt of promoter + ATG
tgacaaaaaattttgggcttttatttatctgtgtactattaaattaaaatgtgaatatatataaggacaaaattgattagacgttttacgagggtcttctgtttatttttggcttttgattgtttctatcacttttgtggaccaattcatgttttcttataaactaataaaggataaatattcgaacaatcaaactacttttatttaggccatgagagttataattgtattagtctaaacaaattagaattcttttacttaagaaatttgtagccacaatcaacatagtttcttttgtaacatctctactagaacaataatattgacattttacatatgatttgagaaaaaaaaatgaagtagaacaactaaaaagaaactatctagctaatcaaacaggggacacgcacacgatatattagccgtaggcgacccaactgagctaatgctaatggctcccaccacactaatagatcagtcccaaccaaaaacctatgtggtgtttggaattagaggggctattaaaattttagttatacccgaaaaggaataaaaaatgcgtcaatatctttaagcagccccaagattctaatcttaggcggctatgatgactaaaaaaaccaatcaaaggaaatgtgatttggataatttttagttaaatgtcaatatcagtcccaaccgatacgttgatgagactattactatatcattcctcgatatgcatgcatacattcaagttacagcaaattgtctcgttactaaaatattcattatttactctttaagttatgaaatgattgaaaaatattcatttttatatctaaataagtagtatatatataaaagtagtaaattaataatgtttttttttaatcaaaattcaagtatgccacctagtacaacaaaaactatactcctgtatatttgtaacaacaattcatacagtcaaaatttcatttgttaaaaacatgagatataattaataaaatacaatttcttgatttctagctatggaaactaatattctcccttgagttggattaaccgcatgacacatttatagatccaatacggtagtatgcgttgtcaatctaactattgacagtttacgctcttgctcattaaaaccaaatagactatcgtagattttgtctaagagttgcacaaaatgtcttctatcctttcttttcacaaggattgcatatgtttgactttcttcctcgtaacatcaacgcctacttcgtaaatttttattttattttgtctcgataaataataaattcatatttcatgacaattgttagatcctcagaaatctgaaataccagtatgctagaaatgccacatatttgtaacttcttttagattcaacttgttgtatttcagcttttgcttcttagtaaaattaatttcggtggtttatttttgaaaaatcacacatacgacatcatttgatacaagtgtaaaaactgtttagtacaatttttcaattccttgaaagctaaaagggtttcatattctaaaacgcataacaaatacgatacatattcaaatgcacgtagatgtatataccgagatacatgtggtttaacctgctcaatggtgaaaaatccaactctacaaacgttaacaccataattaattgttttcatagtctaaacgcaactaatttcctgtaaaaagtatcagtaccaacatggcctatatcaagtacacaaaaacatcattaactgttattccaatttcattgagcattgagttgtatcagcatcatccatgttggttcatgtgggtcattcacgagaccaatggatggtgacagaaaacatgcattttcaattagcaggtgagttaataaatgaactaataccacttttattattataagcttaatgagtgtatttggatattttttgttttagttaaagtaaacatacataatgatgacaaaaaacaaacgatattttattttgtcaacatttcctatacgatgcatagacatgatcaatgcagtgagatattttgtcaactaatcatatcaatgctcaatgaaatcaaaatggatattttgacggttcacggtttgattggtctaacacaccggtccgacaaggctttggaaaccattttttatatccatctgattaccaagaaaatatactgtataagataaacacaatcaatcaatagtatataagaccattctctaaacactatctttaattataatgtgagtggatcactcgtatctcggatttcagcccaatttgttttaacatgataggcttgttaaacgagaggctggctcatccatcgaattcctttgacatgatccaaagttactcttatcgcaaatagattagactacggttcaagccataacacttaaatccacacttcatagtctcttgaccaaacaacacacttatgcacactatctttttaaataaaacaaccgtaatttgggtcgatacatatagggttccttatgtaagcccaaaatgtaaattggctttaatcagccattaaatgggccaacaaggcctttaaatcaaaacagtataacgacaaaaacgtacttggacgtcaaaaacagatagacacgtggcagtttattgttgatagacaaaaatcgtgaagccgcttcttggaatggagattcttcactttggtggactagagactctttgaggtctcaagttaactctttaaagtttaaaccttttgacttaattcaaagccgtacaactttttttgttcgccgccgcgtcgccggaaaatcatcaccgttagtcttcttctcttccttggtttatctttttgctgctaaaatcaaatttagggtttaatcacttcactgttgtaacaattactgattcttactcaaattgattcgttgaggcattgtcttttcgaatttgatagttttaactgaatcttcttgtattagcttcaagcttatatactatgtgaatttggtagcaggtatatgcgataaac

SEQ ID NO: 4384 - DNA, 3000 bp, Unknown
  misc_feature (1)..( 3000): cDNA_ID_2138832_gDNA_ID_1620703_Annot_ID_165172 3000 nt of promoter + ATG
gttgcctgtggtgggaaactcttacttttatgggaagggtacatgaagcataatcccaataataggaagaagatttggtgcgcggttatcgcgttagaaaagcgtgatggaggtaaggtttggggaattgttgagtgggttgatgttgtgcatatcgtccccacatcatgcaagctcttgcattgtctcgttgtctcggtttgattaacttgtatgatacaagttgtatccaggtatgtcagtccttaactccatctttggatcccttgtcttagttaatttgagttcatttagttttataaaaagttcatgcttcttttttttttccctgtacatatatgatgttagtatgtataacattatatatatatgaatggattgttgaccagttggaaagaggagaaggaagcaaaggcaaaaaggagtgcaacatggattacctttcgcctcatgatcaacacagtgtcttctcatgtagatgatctaaccatctttcaaactttgtgtagagtttcgtgacttctgacttcagtttgttagaaatatcctcctcatgagttgtgtctttaacatctttcaaactttgttttaacattgtaacttcatcatgaattctttgttttgagaaaagaaacaaattctgtttaatatgttacagtttgcaatctccacggttaaaaacaatgttggttagaagtatctacatattaagggacttctgtgatcgaaaacaaaagtagggaacacattggtaaaacaaaaaacactagggttattttgttatataccaaagaggtcctcttttttttttttttggtcctcttcatattttctcatttgacccattttagtcaagatcccgtcactgccgctgattgtaatcacagtggctatgaactttcaagtggaaccaccggagaagaagaagactaagaactcgtctccaccacattcacctccgtcgtcgtcatctccgtcgctttctctacttccagaagaaatcgtcgtgcactgcttagctcggatctcaagattgtactacccaacgctctcactcgtttcgaaaagcttccgctcaattctctcttccacggagctctacgcaaccagatctcacctcggaagcactgaacagtgtgtctatctctgtctatgggatcccagttatcaatttccccaatggcttagactcttagttaaccctaaccgaaccctagccaactccatcattaagaagagaaggaagaagaagaagacaactggacaaatgttagttccgcttacctcgtctaagtttacatcagtatcaaaagccaccgttgtagttggttctgagatttatgtacttggcggtccagtcgactccgccgtgcgggtgcttgattgttgcagtcacacttggcgcgatgcaccgagcatgaatgtatcccgaatgaatgcctgggcatgtttccacgatgggaaaatttacgtaatgggaggttgccaaggattaaaggacgaaccatgggctgaggtgttcaatacaaagactcagacttgggaaggcctccctgagccgggtagtgaggtacgtaagtgttccattgacagaagcggagtgattgaaggaaagattgagtttggaaatgtaaacgagatgtgtgcttacgacacgaagctatgtaaatgggagtattgtgtaaacaaaagtgcagctttgaggtcagaatgtatgattgagaatgtttcatatggcttctggaacatgcgcttgttgtggtatgacaatgacatacaaaaggattattggaaaagattggaagggttagagtcactagatgataagtacatgaggaatggtggctcaagtggtaatacgactaaactagttgcatgtggtgggaaactcttacttttatgggaaggatatatgaagcataaccccaataataggaagaagatttggtgtgcggtgatcgcgatagagaagtgtgatggaggtggagtttggggaattgttgagagtgttgatgttttgtatactgtccccatatcatgtcagctcttgcattgtctcgttgtctcggtttgattgacttgtattcaggtatgatcagttcaaaatcagtttgtaggatctaactgtagtataacatagtatgaacgatggattgttgaccagttggatagaggagaaggaatcagaggcaagaggagagcaacaaagtgtatgagattaattagttaaggttaagaggcacattttgtcaaactagctactatggcatattagtgtttgtctaatcccttgttattaatgaatctgatttgttgtttgagttatcatgctatgaattgagtctttctttactaacaagtagggatggcttgcaaaactaaaaatccgtaggtatgatcttttggattaaccctttctgggtcatccttcacgaacaaaaacattgatttctcttcgcctcatggtcgacacaattctctcctctaaatgagaatcgcaccaatgataaaatctttcacacttgagttgagttatgtccttcagaaagttataaccatcgtcaattcgtcatcaataaaagagatgctgagttctgtttggagtatgggcttctgtaatgagaaaaacaaaaggtagagaacaaattggtaaaagaaattacaacttggttttaatctaaaataatgtgcccatgtctataaataattccaagtattgaagtatctcgaaactttagagttaaataatattttatattattgctttttatgtctcaataattcaattgtcactcttgcgttatccatttgaagatggatccatcactatgacaattatttttctgccaccttgacttgtacggcttatattccaaaaatttcttttattgttcacctctttttcttcaatccttcaatttctctcaccaaccctaatttccccaaatttggtaatacgatttcgtcaatttacttcgcaatcgattcaattcaattatg

SEQ ID NO: 4385 - DNA, 3000 bp, Unknown
  misc_feature (1)..( 3000): cDNA_ID_3073161_gDNA_ID_1620703_Annot_ID_165158 3000 nt of promoter + ATG
ctatatataatacagtcttttattttccacttttcagaggtatcggctttatataaaattttacaataattgtaatcacagaaattttctaataaaattgacacattcaaataaaataaatatatacaaatatacaatcatatttataatgtgagcataaataataaactaaaaaggtcgtatttgaaatattaaacttaaatttaaatcaagtgtcttagtaaagtggttgacggtctacttctatggcttctctaccagattttgactttaataaatcacgttatctcgtatagtagggattgtggtattgatcatacgatccaaatgatgtaaaatatataatactatcttgaaataaattttttagattatttcaaagacagaaattgtgaacatctattagaaaagcaataaatttctatcataaaaaagacttacttaaaatcgacgttttttttttcaactaatgataaatttccggcaaatgcaaaagtttactatttcttttgttttaatattgaaaatatctcttctcaaaagggtaaaacaatatctgcgattgtgcgaaatgtttgcttgtaatttttactttattttgtaataatttggggggactttagtcacccctcaccctaacaaaaaaaaaaaaaaagtaaaacaatattttcttttcaatattacacacacatacatatatatctacatgtataattaattactagcaaagcataagataaaaaagttttttttcagtatattttaaaacagtataagtttcataattccagatattaaccgtaaaaaatatttcactagtagtttacaaaaaaatgccaagaatagtaagatttgtagttgatttcacacatatatttttggaaattttgaagttgaatgaaaaagtatatatactatccaaatccgaatactaaaaggcgacattatccgatgactagcatgcaatgtatagatacctctacatataatttgttacatttggtactctttaatcattgtaatatattgtttgacaaacagacttgttatatggactatatcgaagtcttttttatctctgcttaattaacagcagactttcttttgtaagctagtattaattttatgtcggacaacctacaaaaaaaaaagaatccgcactatatacatatccaatattaataactagatgtctaatttaattaacaaagcttaagatgtctaatttcggatatatttaaatagtaaaatttaataatttgagatattaaccgtgaagtagaatgaaaaagtatactacccaaatcgatagtaaaagttgacaaaaaatgaaaactgtacgtgaaaattcaaaagtttgtccaacacctagcaatatatatatatatatatatatatatatatatatatataccgattcttatccaagttgatttgtaatgaaacgtttttccaaaaacttttaaaatgaatcgaagaagtacatttttaaaattgataaataaagtaaattttataattttaaaaacaaaataagagaatttaaatcattcttttttttttttggccaaaagagaatttaaataattcatgtgacaactctggtattttataataagaaatcattaaacatatctagtgaccaatatatacattgttagccaaatagacttgctagatatatcattaaacatatctcgtgaccaatatatacattgttagccaaatagacttgctagatatatcattaaacatatctagtgaccaatatatacattgttagccaaatagacttgttagaaatatatatatataaaatcgagttatttttttaattaaaagcagattattgtttggttctctaagcttagttatattttcatattatgataaacctagttggaaatcatattatcataatatacgcgtataagaagtcttttatatatactattagcaaaatcaaaatagattaaataggagttttgttgcactaagtgaaaaactacacaattgacttcgcctaatcagagtcgcaaacaagaaaacagtaattgcaaatcaaaatctccgtccatgaacttttttaaaaatacccaacgtttactagatttttcggttacaattcaactttttcggttactatatatatatatatatatatatatatcgtttagaagaacaaaacaaatttcttcaataactcatgtgcgatagtgttatgtttaggtaacaaatttaaaattacattaccggaggctcttgaaccaaaatataatctaatatgtgatctagaaaaggaaaaaagctaattcaatccaaagacatgtatgtacgggtaacctatataagaccatttccatcgctcatattatgagagggttttctcaccattaaaatataacatgtaaagtttcattttagtgtttgggtgtctttaaatttaatagtaggatgttttaaatatcctgatagagatattttggtgtctttaatttaaagacctttcatctttatttattaatattttgtaattttagttttaaagacactttccaaaattatgcaatatatgtgctctaatgttcttgccaaaattggttaaaatcataatgagagtagtcgaacccaaattttcatacttattatagtatatgttaaaatctttaaccacttgactgctataaattaaattcttaaacttataaggatatgtgaaataaagatacatcaactatgacaaaaatgagcttttaatggtgtcacaacatttagcaaagacttttggctgtaaaatataaacaaaaatccactaaccaataaaaccctcctaaattcaaagttgaatttgtcttttgttttattattcaagatatctactcccaaaatctctataaaaagagaaagaaagcaccctttcagtttgtatcactactaaagcacaacaaacaaagaaacacataaagcataattttgctaaaaaagagtctcgaagaaatg

SEQ ID NO: 4386 - DNA, 3000 bp, Unknown; identical to SEQ ID NO: 4383
  misc_feature (1)..( 3000): cDNA_ID_1824065_gDNA_ID_1620703_Annot_ID_165155 3000 nt of promoter + ATG

SEQ ID NO: 4387 - DNA, 3000 bp, Unknown; identical to SEQ ID NO: 4382
  misc_feature (1)..( 3000): cDNA_ID_1807497_gDNA_ID_1620703_Annot_ID_165150 3000 nt of promoter + ATG

SEQ ID NO: 4388 - DNA, 3000 bp, Unknown
  misc_feature (1)..( 3000): cDNA_ID_3073168_gDNA_ID_1620703_Annot_ID_165148 3000 nt of promoter + ATG
atggccctcgtcgaccttctagctaccgagttcatggggtcaatgctccaaggtagcatcaaacttcagatcaagtgcttcacggcggctttgcttggctgcgccgtaatgtcggtcgtcgccgtgtgggcttaaacactctttcaacataatcaataaattatttgatttattattcaaggcgacaaatactttcgcctttgtatatttgagtttttgtttttaagtttgattcatttattagtttgtatagtgcatgtaagcgtttgaaagaaatttctttttatgacattgtaaatttatttttatgaatgcgatgtttactttcttctttggaatgacatgtatttaattattggagtttgttgattgtcaatgttagttagaaaaaattaggtccgaaatactagtgacacggaaattaaagctatatgaattaatactatcaattatatttaaaattactctcttcaagaaaatgtacatacagtctcttgttttaataaagaaaaatttcttactttggttagatttaaattacacaatatttcatgacaactatttaaccataaaaactcgataatgtactatatctaacacataatttgtaggtgtgaatggcttaagctaaaaagcttataaattctatgtatttcattccatttcatggttttttggttgaaaactttaagtacaataacagacttactaactaatttgtaaatttccacacatgttttgattccatacacctggaatcatatcaaatacttgtaaattctgaacctattgaaacaagttgaaccatttctttctaaagattaaatgcattatcttgaagtataagttcttagaacatactattaaataactttgaatagtcttcaattttactaatgccttaatcaagttttgaaattatctttttcaaatcatacacacttcatcctgacaattgtaaatgtttatagtttttagaataatttttactattttttttaatttgtgtcaatatctgatttggtttgattctagacttcgtttgttttctcaaattgtgcaagtaaaaaacacgaatatatctattttttattttatgttcagaaaaaaaaaaatatatatatatatatatattcgtgttttttacttgcgcaatttgagaaaacaaacgaagtctacaattaagcgaaatcacacattgacacaaattaaaaaatatttcttttctcgaccgaaaaaagaaaattatttcaccaatatggaaaatctccccaagttcattctattttctgtatcaaagttaacgaatagacatataagcattttgtcacgtcggtggagtatgagtttggcacgttttgtttcgtgctcgtccaaccatatgaaaacgtgggaggtaaaccactcaactaataatattatacctttaaaaaaactatattataaatccagtttgatgcttattttattaatcattcttcaaagaaataaaacttaaatagtgaaaattataaccgaagttgactagttaggaggcatgccatggaatattggatacatactcggcatggacagtattgaatatacaggataatgtagataactatattttctataatttattttgtgtcaactattttttctatgattctgatgattaattgcatgacaatcaatcaaattaattatgccttcttctatataaccatgcaaaaccaaaaaaaaaaagattatttcgaaacgacatgagaatcaaaagaactcataaatcctaatagacatgaaattatgtatacagttataacattgaaatatcttaataccttacctaaaagataactagattaataaccataaaaccaataatcattaagtcaataaccccataatcttataaatgaagtcagtgactatatgttcatgtaaaaatgcgtaagttcatagctagatgtcccttttttaggagcacatggattgacacattaaacattcatacccgatttcatggaattctatttgtcattatcctttcccaaaaacttagttgtttcttagttattaaaccttgaaaaaaaatcaattcaaaaatgaaaaatgacttatatgtatgtcatttttgaaaactagacatcaagctatgaaaagaggaatctatttaccgaataaaggaggaggaatctacattcatatgtagtgtttttggtgactggattgcaaccatacactgagcacaagctgtcacgtgtgatgttgtgctcgtagcataaactataaagtataaacctaattaagcttaaagttaaaaatagtacaagattaaaaagtaaacgtttgtgagagttgactaacagaactatagaagacgcatggggttgacttcaagcggtctgcaaacggcatgaacaatgcattcaaacgataatataaaccttaattccaatatagcctttttcaaatttaaaaactcgaatgtttacgaaactataacttgataaaactgattgaaataaaatgtacttacatttttttaataaaatatacttaaattttttaaataaaatatactttaaaatatacttaattttttaaaatcatactatggattttaaacaaaataaattgtcactgagtcatatttctttggataaaagaactttacataagtgattggtacaatataataatatgcaaatttaagacattttattaagtttatattatcgtttaaatgcattttctatcaacttaataaaatctagctaggtactttcataattctatcattattccttttgaacgattaattactttattttctcgtttcacactggaagcaaacgagtaatcaaataaaatttcgtcatcatcgacaataaatggcatgaaaacaaccagcacacattactatataaaccgattcatctagtaagtccaaagtcacacaaacattaaacaatctaaacacacaacaatccaaaagaaaaaagaaaaaaaaaaaaa

SEQ ID NO: 4389 - DNA, 3000 bp, Unknown; identical to SEQ ID NO: 4380
  misc_feature (1)..( 3000): cDNA_ID_1824073_gDNA_ID_1620703_Annot_ID_165146 3000 nt of promoter + ATG

SEQ ID NO: 4390 - DNA, 3000 bp, Unknown; identical to SEQ ID NO: 4379
  misc_feature (1)..( 3000): cDNA_ID_1807647_gDNA_ID_1620703_Annot_ID_165144 3000 nt of promoter + ATG

SEQ ID NO: 4391 - DNA, 3000 bp, Unknown
  misc_feature (1)..( 3000): cDNA_ID_3071717_gDNA_ID_1620703_Annot_ID_165138 3000 nt of promoter + ATG
ttcaaaagactactcaacttctcctctttacatcccactttatcaagaaactctattgtctccagaattctgcgccagctatatgttttccggtcagacaagtaccgcccaagccaatcacatcctacttgtaaccctttcaacttatcaactacagaagaaaactcagcatcaatcccaccaaccagtagcaaagggcaactagtaactaacttaataactgtagccttactaagacccaaattctcataaccccttagcttcatcgccaacatcccagattcatatctaaaaatctctctcgcttctttatacatacggccaatcttaccacgcgggatcccatagttgcaaagagcatgaaagttctcaaacatgataccatcatcactcaaaaacattagcttccgtggaagaaacgtttcaaactcataaggacacaaacccaaactctcgaaaaacggttcaaactcgtttatcggattgtacctaaggaacttagtcaatcccttggatacatctttctgattatcatcaatcttagacaacaaagtcgacataaaacaaggagaattcttacttatatgctctgcatcagtaaaagtaaagcttctagtataatgcaagtaatcaaaaagagcttcttgagcttgattcctactagcccttgataccggattaacgaaaaacctagttggtaagtgagacgagtgttgttgtaacttagatttatcctgacgaacacagctttcaatctgaaaactccgaaatggaactgaaacacgagaaaggtcgaacctttgaactgggttttgacgaggaatagatgagaaagttatacagtagttgagatttgaaatcatattcaacagtttatgaactcttctctgatttctggataataacatcgcaacctaacaacaaagagaaacaggtgaaagtcacaatcaaatagagagctatgaagaattctcaatgcttactctttcaagtaagaaatttacctgaaattagggcttattaagcatttgaatcaaccattttcccaagattcttagggttcatagccaaatctcagttactttgcttaaaccttgttctggcttcaaattaaggtggaaatttcagagaagcccctaaacgtttataatatatccgaaacgaccataatcttatttttctatacttcaatatgtgcctaagagtttccgaaatatcataaaggtaccaattagtgcatcatcaacacttggccttaaaagacttgacgtgagatattattattcctcttttgataccgaattaatagacttgtcaagtttagacttgtcaaaagtgataaacatatcacacgaaatcgtgttattatcacgagcgttacaaattcttcaagtatatcactataaaacgacttcaaaacccaaccaagtggtgatttctttgagctgactatatgtatgcaagataaaggcagcaagaaacggtgagttttcttcacgagcataaatggtttgttcgtctttctgatttttgattttatagatatgtaacttttttattaggtcaatttcaagtggtccatggtagattcaattcatgttaggtcatcatcttcaagctaaaacgcctaccaaacatataataacaagtattcttttaatcactagttttagtttcaaaatatttctgactatcttaagtgcatttagattttagttcaacatgatggaaaaagataacttgactcttgtttaacttgcatatgttttgtttgactatttgttatgtttgagaggaatgatttttctttgtaaaacagctttatataaaacttgtggcttactcggatgaattttatatttgttttgattatttttcaaatgttgtttttttcaaaaccttttgacagtaaattacaatataaattattttcaaagatcttaatatgtcttatttaagtgaatttttaattataattataagtaaattattaaatatagattataacaatgaagttaaatcttattcactatatctttaaatatttttttctcttatttttttaatattttattcactatttgtaacaaaattataaaagccaaaattaccaaatttctgcaagaaaaaacaaaaaacaaatccttggctcctcctaaaatccacctaccttacccttttatatataagatacaaccaaaaacaagatgatttggtgctttcaatataaaagatataatatttcataattaacatattctcccttaggttttcctgcacactcgatttaaatcgtctaacaaggtcagaatccataatttatacaaccattttctgcttcctttgtttcctccctaattacatgttattaactattaagcatatccttaaaacaaaacccaaactgaattatctttgtcaatagttgtcttctctctcgattattcttaagataactactttggtagttttgtttttttaattactactgcaccctcttgcgcttcaagttacttggtaaaaaactctcttaactttggataatttctcgaagtctctgaagaaagaaccctttttttcttctctcataatcgtctctgtaacgtccttctccttcttcatcttctttgcgtttcttctgcagccttttgcggttcacgtgttgattgcttctgtctctactttttgtccgttttaaagtttaaacttattgttacaaaattggattttctctgatcaaacgataaaaacagagtcttttagtatcttcttcttgggtataacgaagatttttgtggtttcttctgatgtaattcacaaaaccatttgtataatccttgaaaagactttttgttcagaaatgaagtttcttactttgctctttcttttctatatttcagtaatgatgatgataaagcttgagagaagtgattagtctgtagaagaagaagagttaaaaccattcaccaaagaagaaattgagaactagagacagtcatg

SEQ ID NO: 4392 - DNA, 1560 bp, Unknown
  misc_feature (1)..( 1560): cDNA_ID_2138836_gDNA_ID_1620703_Annot_ID_165173 3000 nt of promoter + ATG
cttctcggtgcgtagactcaaccctttaacactgcttattgttatgtagaatcataccatttcctgatggtattgatcgaattgttctttgtttgatttccatcagtctgtaaaacccatttggggaagaaccaaagaaaccgatgaacatatgggatgggtctttccaggttcagataccgaagttccaggagctgatcctgaccatcttaatggtgctaagagtgtaagagaactctatgagattgctagcccaaactacaccgggaagtatactgttcctgtaagtcttttggcttctcaatgtcttttaagtctctttcagtcggaagtagttactagttagtcatgagttttggtttttatgttaggttctgtgggataagaagctcaaaactgttgttaacaacgagagtgcagaaataatccggatgttcaacactgagttcaatcatattgcgggaaatcctgatcttgatctttacccttcccatctccaagctaaaatcgatgaaactaatgaatggatttacaatgggataaataatggtgtctatagatgcgggtttgcaaagaaacaaggaccttatgaggaggtaagtgtggaagccatgaataaagctattactgtatatgctaattgatcccatgagaatgtaaagtttatggttcttatatgtaggcagtggagcaagtgtatgaagcattagatagatgtgaggagattcttggaaaacatcggtacatctgtggtaacactttgactgaaacagatatcagattgtttgtcacccttataagatttgacgaggtaagttcatactttcaaagcaagaaaaagaagtacaccatatgtgaacgaatctctaatgttgaaacgttgatccaggtttatgcagtccacttcaaatgcaacaagaaactcataagggagtatccgaatttgttcaactacacgaaagacattttccagatccccggtatgagtagcacggttaacatgaatcacatcaagcagcattactatggaagccacccgtcgatcaacccttttgggatcatccctcatggaccaaacatcgattacacttcgcctcatgatcgacacagattctccaaatgaaaaacatctcatcaaagatcaaatctttgacacatgagttgagttctgtcttcagaaagttaggaccatctttaccaaataagcttaagtcgtgtctttaacattgcaagtgatgttgagttttatgttatgagaaaaataaaaagctttctgtttgatatgttacagtttattgcaatctccacggttgaaaacactgtttgtttttactgcaatcacattgaaacttcgaaggtcatgtggcggattagggtcttttatgtaacctttgaaccttggagttcgattctacttttcctcagcattttgtggtctcttatgtaactaaaattttaattaggggctgttttgcaattaacaaaactaaaaccaaaaagtgttcatatgagaattgtttttctcatttgacccaaaataaagtcatcactgcggctatg

SEQ ID NO: 4393 - DNA, 3000 bp, Unknown; identical to SEQ ID NO: 4385
  misc_feature (1)..( 3000): cDNA_ID_1824054_gDNA_ID_1620703_Annot_ID_48808 3000 nt of promoter + ATG

SEQ ID NO: 4394 - DNA, 3000 bp, Unknown
  misc_feature (1)..( 3000): cDNA_ID_1824036_gDNA_ID_1620703_Annot_ID_48814 3000 nt of promoter + ATG
tgaccggtccaccagccgctctgtttgatccttcaaacgcaggtacaacaatttattttttggtacagcattatatgaactaaaccaattaaatcccaaactttaggtcgcgaccatttttttgtttggctaaaataattcacaacttttttgtttcatgaatcttaagaagtaaagatatattcaatataattacagttagtgtaatttatctaaaatatgaaattttgacaaatttaatttatttctttcgatttttcttggtttacttgcacgaaatttggtcttgttacagcacaagtttagcttttaaaatattcggtatgcaaattttggttcggtttataagggtcaacattaaataaaacgatcgataatgattaaacccggttttgtataatgattaaatccggtttgtgataataggtccaagcggagacgctggaacaaggtcatggattcaagctggactcccagcgaagaaagctgtcttgggatttccatactacgggtacgcgtggcgtctcacaaacgccaacagtcatagctactacgcgcctaccactggagcggcgatatcaccagatggttcgataggttacggtcagataaggaagtttatagtagataacggagcaacaacggtttataactccacagtggtcggagattattgttatgccggcacgaattggattggttacgatgataatcagagtattgtgacgaaagttagatatgccaagcagagaggtttgcttggttacttctcgtggcatgtcggtgctgacgataattctggtctatctcgtgcaggtttgatttgataccaaattctaaatattaatattaattgaaaatgttatgatttttgacgattttggggatttcacagcttcacaggcatgggatgctacgacggcaaccaccagaactatacagaaggtttaagctgtccacagtttcgacaacagcaagtgaagaagtttttttcgtaattatacagaaaataaactttatctgcttattatatatattgtccaataaaactataagtttattaattgcaatgcttcttttcatttatagaattacaaatcattttgttttgttaaaaagaagaatcaaacaattcaaatcaaatccaaggaaccctttctattggtacagtacatgtttccatatatagtagtctaactacgaactaataagtctatgatttttacaacattcacgtaaatgttataaccacattctactttaggaaattacatattaatagaagagaatcctggttttggtcaggcgattggtcaccatttgggagtctaatgaattttctcaaacgcaccggaggataccttatatcgggaactactgtaacattggactgagaagagcaacatgcttcatcgagatatacccaaatcagcagtacaacttctgaaattgatagtctctaccatcaaagaaaagcctctcctctagcatgccacctataacaaattaacaaccctgaactcgcctgttctttacttcagatatggtttgctaagaccgcttgacgagtccactaacccggtgcttcatcagggtatcatagattctcgtcgtcgaagatgagtacggattctgcatggttcgattcgttcgtatcccccatgcacctatggactctgtcgtctaaatgttttttctttttgtattgggctgttaagattaggttccagatatgtattttttttctttctttatcatgcttcatatagaaaaccattttccaaaaacactatatgcatacacaactatagatccaacctaacgaaatatctctaattagatacatatatccactcaaatcttagatcaatacatggttgacaaagttattgctagaccaacatactatacacattatttcttcatcttatatttagcagtttttcaaacatataattcgaaaatttaaccattttgttggttcatgcgcatatatgttcgtttctcttcttagttcgatcaataatgttgaaatagaccaatcctgtacgtttccaaaataataaatttaattgagatttgaaaatttctaactatcatggttttctgaactaatctttatagtttttattaacagaaagattacaatgatcaagtatgtatatctttataaatcggttatccactttcactagtaaatgaaaccactagctaactatatacatatataccccaaacaggctaataaaatagctctcagactctatctaaatttttagatatatagaagttgacccagaaaaaaaaaaatgttagactcattcatcaaaatttggttttagaattatccagaccacacacttttgaagttgctgatacatgtaaatctccggatttaatatcaagccatagaagatggaaactttaaataagaaaatcaatattataataatgttttaatatggggtattttcataaatttcagcctttcaggtcaagatcacaagaatgttaataacaaaaaaatatcataagaatgttgctgttacatgtaaatttcttaaattggtaaagtggattaaattgatcaatccattgaagacgaacgatacttatatctagttctacactggaactctcatcttcgacattgaacttgtcaggaactagaggccttaacaattaaatttcgtatacttgttattttcttgttgaataaggtatctaatagaaatatccactttggaagtatctttgaatatgtgaacagaatgtttcaattttaatctaaacgagcttgtttgtggtgtcccactcacatcttcaccagagacattttcgtttgtcgaaattataaattcaatgttgagtttgtttatgttcagaaactaaaaatatctttgccctaaatcctctataaatagataacgaacccatcctcagtttattactacaaagcacaacaaagcattcttttaaaagactctcgaccaaaaaatg

SEQ ID NO: 4395 - DNA, 3000 bp, Unknown
  misc_feature (1)..( 3000): cDNA_ID_2993676_gDNA_ID_1620703_Annot_ID_48815 3000 nt of promoter + ATG
atataaatgaagttgatcatgtgtcacttggtccctgctttcgcattcgtataacacgtgtgtagaaaaaaaaaattggttgataaatacataatcaacgaaaccatgctcgtttttctcacagtaactcgcaacaatgtcttccacaaaactcatttccatcactttcttcttatctctcctcctacgattctcctccgcccaaacagtcgtgaaagctacctactggtttgcggagagtgaatctccgttggcccaaattgactcatctctcttcactcaccttttttgcgctttcgccgatatcaacactctaacctatcaagtcattgtctcctccagaaacaaacccaaattctcaacatttacacaaaccgtccgacggagaaaccctaccgtgaaaacccttttgtctatcggcggtgatttcacatataatttcgcgtttgcgtctatggcaagtaaccccacctctagaaaactgttcattagttcttctattaagctcgctagatcgtgcggattccacggtctcgatctaaattggaagtatccgagcattacgacggagatggacaatttcgggaagctacttcgagaatggcgattggcggttgaagcagaggctagaagcagcggtaaaccgcgtttgcttttgacggctgcggtattctactcctacagttattattcggtcttacacccagttaatgccgttgccgatagcttagattgggttaatcttgttgcctacgatttttatgaatcgggttcgtctagagtaacttgctcaccagctcctctctacgatcctataaccacaggtacaaaaaaataactgaactaagctaagataaagtaataaaacctatacatatataacgtgttgaatatgtatataggtccaagcggcgacgccggagtgagagcgtggactcaagctggacttccggcgaagaaagcagtcttgggatttccattatacggctacgcatggtgtctcacagacgccaagaatcataactactacgcgaatagcagcggaccggcgatatcaccagacggttctatcggatacgatcagataagaaggttcatagtggataacaaagcaacgatggtttataattcgaatttggttcagaattactgttatgccaagaagacttggattggttacgatgataatcaaagtattgttatgaaagtgaaatacgctaagcaaagaggtctacttggttatttctcgtggcacattggagctgacgataattctcgtctatctcgtgcaggttcggttttattccaattctaaataaaataaaatattcgttagttttcttatcagaaacgaaaaggtaatgttttaatgatttattttggtattttttggatttttacagcgtcacaggcatgggatgctaagaggtagcaacgatggtaatcctacagaagtattaatgttgaaaacggccagtgaagaagttttgtttttgtaaaactatgcgaaaacaaacgttgtttgcttatttattgccaaagcaacaaggaataatatgatatgaatataatagaagcaagaaccaatttgtttttaatttagaaaagaaaccatatttaatttgtttctttttaaagatgtcattgtcacccttctcttctcagtgtgttatctcaacccgaaaagtcaaatattattttggagtccacgtcattgattagctttggccttagctaatcttaagctagttttggaaagtttgggggtagactggcttattggtcagccacgtgatcctcatacaatgacggactagaaaggagcaaacgagacaattagcccaaggcgacggtattaatgtgataagaacagaagtggaaactcaaacattaagaagaaaacactcataaagaaaaactagttgggagggatttggttcttgagagtccctcgtgctgtcccccaaaacgccactattatattgcagccacttgttgtcccccattcatactcaaaagtggtatccacttgaacatgtagttgacaagatttcatggagtacactggccacacatcagcatgtgtataatgattgggagcaaataattaggagaatatatattgacttttgtttttacaataagtaggagaggatatcaagtgattaagggattggtttacgcatgagagagtttggcatgctaatagaattcaccttaagatatctatactccgttctttggtttctctcctcttttgattctctgtttaccattagtttcatatataatccgatacgacatgctaatttgattgccgacttgcagtggcctatgagaccaaaactccttttattccgtttaacgagagagattgatagaacgaattatatatataacccatacttgaagatgtgattcttcaaaaactaaatagtatcaaaattgtttgaagaaaaatatattatcaaaattggtaaaaaacatattaaaaaaatggcagtactctgtagacagagactctccacaaccattattaacccaacacgtcacatgcatggaacttggcagcaaccatacactttcactaatgagtcattaccgctattagtagccattggtttcttgttagacaagaaatcatataatatacgattaaaattgaatataaacaaaatctttcgtaagcaattggatattctataggatacgtgagctgaatattcaactttgatataaatgaagttgaatatgtgtctcttggtccttgctttcgcattcatattacacacttgtgtgttgacaaaataaaatgcaaaattttgccccaactaagactttttctcgtttagcaaaaaacaaaaactaagacttttctctttcgtaagatattattcatagatttctcattttcaaagttgaattacgtaagaaagtaaatatactttttcaataaatagacaacaaaccatctctgtttttcacagcaactcgaaaatg

SEQ ID NO: 4396 - DNA, 3000 bp, Unknown; identical to SEQ ID NO: 4384
  misc_feature (1)..( 3000): cDNA_ID_1808321_gDNA_ID_1620703_Annot_ID_48820 3000 nt of promoter + ATG

SEQ ID NO: 4397 - DNA, 1560 bp, Unknown; identical to SEQ ID NO: 4392
  misc_feature (1)..( 1560): cDNA_ID_1824019_gDNA_ID_1620703_Annot_ID_48821 3000 nt of promoter + ATG

SEQ ID NO: 4398 - DNA, 3000 bp, Unknown
  misc_feature (1)..( 3000): cDNA_ID_1824155_gDNA_ID_1620704_Annot_ID_48824 3000 nt of promoter + ATG
acattaacccaaagacattcaacagatgagtctttacctgaaccgtgattgtactgctctaaaatgctcaatccagattcggtcattattacatggtcgccagtgaataatgccttgagggacttatggaacatgcacactgatccctgcaaattgtacgaagctcttatcccaagatcatgatggaattctttttaacaaaaattgaacatttgtttttatgtatgttcttgcagttggacaaacttacttctgaatgaccaggagtgtgtataagttcgacatcttcatagatactccatggtccacttccttccagctttaactccacatcagaggtcgaaggttcaacctaacaaaaaaaaaattcccttaatggtcgatcagagatgggtttagtaacaaaattgtttgcgtggctagtttactttttacttttatccaacctcataatctttttctattttctacagagcatataagcagcccaaggttcttgtaactatgtaagcaagctttttcatttttcacgaaatctagatgttgaaaaaacctatcaagaatgtgcagagaggtgtgaaaaattcaaggacatacatcatcagaatgcagaattctggtagacttgaatctgtctgcccatttcttgtgatctgcaacatcatccctgaacaatgaaatcgcttatcctgattaacagagattacaagagaaaacacggattttctcctttaggtgttatcaattctacctgtgtgtcaaaaacatgtagcgaacaccacccttcatctcgatctttccagcaagtttctccacgtacctaggactgcagcaaacagcaaaaccttggtttaatcagttgtgtagagttaatagccacaacgaagtatatcaagaaatacattgcatcaacaatgtataagatactaaacaacaaagaaaataagaattcatgatgcctcctcccaagggtatatacctatcaacaagtatatttccctcacgatgaaggatcaggtaagaagttgctccatacgatttcttggaatgaaatccacaatgaaaaacgccctgagcataatgcaaatctcaaactttataaacctcaaggacagcagacaacatataagaacaaggtagtaagagtcctcagtggagctaaatcagttaagaacttaaggtcattgtatctaaatctattcaaaacctacgtatgcttacaatgatctaatcagagttagttgacttgttaataaccatcctaaaaaaatgaaagcttaagggattaaaaagtacaggaagtgtgtctttgtccactacaagtggaaaggtctcttgagcttcccctatgtcagcaggtggagtttgagtgcgaatagagcccgtcggacaagatagtaaggcctgaaagaatcaagaaaccatgagtaatcaggacaacctcagaaattttactcactaaaatatttttcttcataagaaatttctcagtctatgacatcctagcagacatttccacaaaatttgtctatctgttttataaggtaacaataaaagctatcaaagacaaaaaaacaaggagattcaaaaacatcctcaatgaaatgtcatcagatattaaatagaaagaaaactaaaatcgacgtagttaaggcacctgaagagcattcagtctttcctccttacaagttggttgctttgtaaccgcagacatgttgtccactcgagtgaataaatcctgtgaagataaatcagagaaaagctgtttacgaattggctgaaaaaaatgtaaagggaaagtaaaatcctgctctcacagctgcattggcctgctaacaaacaactataacatgaacattctaacttcttgttctcatataatgactgtgatcaaatcagattatattctaatgttagtatatccttcttcgagatcaatcctaaggcatcaacttcccaatacccaaaatgaaaaccccccaactactttaccctaccaaccaatagacccaaaatgcttaaatcaattcatcaatttcaaaggaccaccaaaagggtccacaagacaggggaaagagcagaaaaatttaggagctttacagatttcagagaagaaaagcttaccggaaccatccaacgacatgtatcacaatcaatacaagtattgtctgcaaaaaaatccattgaaagatagacagagagagggcgttaatgatctctctttgttttcaatttgcaataaaaagtaaccagactttatttaccaacaaatatatctccttcgacgttctgagttcgtcttctaggattctcatggcttgtcacttgagctgctttgatagatccaaacactctccttcctgataaagccgtcgagctaaaacaggaagctttcgatgaaaagatcgcttcttttgaacggaattgatacgagagcgaagaaaccgcagagaaagaagctgaagccatgagaatggtgattgatcctcgtctcttctcttctctttttgtgagctttgatgagtgtagtaactcatcttgaacttcgcccctatgaaaattatttgactattaaaaaatctatatttgactacttgtggacccagctaaaatccggtttacatacggttaagcttgattaaatcgttcaatcctgattggacacgtgtaagcttcttctcattcgtgccgggtcctgtcctcctttgtagatcgtctctctcaatctttcaaaacgagaacccggttttttagcggttaagcctaatttggtctggtttgtttttccttaaaccgtgagtctcgaatccaatcatgattggacacgtgtaagcttctttctcattcgtgccaggtcctctccagtgtatgtagatcaatctctctcttccatctctcaatctctcaaaaacaccaattccaatcctgtttccttggatcagagatacgaatctgaatcacaatctcgagatcttcagtgttttccaacggtgattgatg

SEQ ID NO: 4399 - DNA, 3000 bp, Unknown
  misc_feature (1)..( 3000): cDNA_ID_1824151_gDNA_ID_1620704_Annot_ID_48825 3000 nt of promoter + ATG
atgctacgagaagaaaatattaccataagcgtttccaatcgcgaagatatttgaggtagagcagacaacgatcagacacaccaccagaagggaccagttaagaaccggtatataaatctgtccaatgaatttctttgaggtgtgaatgattttaagacgtgggaaacagcctagtgctattgactgtttgatgcatgtaaatgtggctgttgtcattgcacgactggcaattaaagcagcaacattagaaatgagaaagactggccagaacaaagaacctgaaaataaaaaagagtgataaacagttagaaacgtgaaatgagaggtaaaatcaagccagcaaatgaaggaatacccttgttgatcttgacgtactgtggaagctagtggatcttacttggaactgacgaaaagaaagcatccccggcagcgctggaagttttcagagaggtatgcggcttgacccaaataacccagcaagaggcaaggtaacaccagaaggataaaagtaagctgcagataaacaccagtactgaatcaaaagttcagatgactctaagaaagacaactatcagaagagcaataaatgagtatttatctccttaaagtacctggatagagtgaacagagaaatagctaagatctgcaaacatggcctccgatcctgagacaagatccacatgtatagaaatgagcaatgacatttagtcaaaaagtcattcaatgtatttaagctttctaaaatatttcccagaatatgaaacttaccagttgcacataaaacgcaacccccaagtgcataccaagcatttacagagtttctcttgaaaaagaaatagatatatgcaggattgaacgctttaaaaacgctgctgtcatattttacgaggttgtaaattccaatgcccgctagacaaaaaaaccacagaagtaaagcaggacccaaaacaagccccaatttgctggttccatatttttgtacactgaacaagatcacaagaaagctgactgatatcacgaccacctgatctgcaaatgaagccatagtcagaaactttacacaaaaaatagtcactaatcactcatcaagataagattatgttttttgaaagctttgtacaatcattagcccctattcagggggcagaagagtttaccctcttctttgttgtatctataatctaattgaagtcaagggacccaggatgcaaccattaaagacccataaaaagttttctggtccaaggaatacatatatccaaggaacgattacaagttttgaaagccagacgaaatcatgctcgtgaccatacataggcgctaataaacgtcaactagaattagttaccttgttctataacaccaactccaaccttcagaccaccgatagcagacattactgtgtccaaaaaagagggtaaaatttagctgcagattattcatgcaacgataatgctcacatgctttttctctatacttgatatgtgacataggaacaaaaaatgtagcctgacagcatataagtacctgacattgctggcgtaacaacagcatcagcaatcaccatagcagtgccggcaagaactaaaatcagaagaagctttttcaaggccattgacgcctcaagtctttctttaattatcaatgatctttcaagttctggagacggaaccttcaaaccaaagcctgatatgcgagcatctgatggaagttgatttgggataaggctaacatttgcatgccggcagatcaacgaatacaaagcaaacgtcccacctgcaattcatttccaaaacttaaacctttaaaccttaaatgaacttcaatctacaccatataaagaggaagagatataccttcgccatcgtcattggcccaaagaacaaaatgtacatactttacaagaggaatcaatattaaagtgtatataaccaatgacaaggctccaataatatcttctttgtcgttaattggagatcttctgaacatgacagtgaaggtatacaatgggctagttccaatatcaccaaatacaaccccaagtgtctgcaaagcaagtatgagtttctttcctataccagtgtcctgaaaaaacacattaccaagttcaacaactcaatcagatcgaaaagtaaacaacatgaagaagaagaagaacattcacacacaaatgctaacctcgatttcgtttttctgagttccaggaatctcaagagcatctacatcgaaagagtcaacggcagggctagtgcgaatcaaacgctgctccacattgtcatcctcctcatcggaatccatttccgggtgattatgctcatcatatccatcatcgtcgtaatcttcattaacctcataatcatctttctcatcgaacacccatcgcgacaatgacgtcgttgaatcgtctccgccaaactcctcatcaatctcagacccatcgcctccactgctttcttcttccacgtgaaacatcaatcaccgttggaaaacactgaagatctcgagattgtgattcagattcgtatctctgatccaaggaaacaggattggaattggtgtttttgagagattgagagatggaagagagagattgatctacatacactggagaggacctggcacgaatgagaaagaagcttacacgtgtccaatcatgattggattcgagactcacggtttaaggaaaaacaaaccagaccaaattaggcttaaccgctaaaaaaccgggttctcgttttgaaagattgagagagacgatctacaaaggaggacaggacccggcacgaatgagaagaagcttacacgtgtccaatcaggattgaacgatttaatcaagcttaaccgtatgtaaaccggattttagctgggtccacaagtagtcaaatatagattttttaatagtcaaataattttcataggggcgaagttcaagatgagttactacactcatcaaagctcacaaaaagagaagagaagagacgaggatcaatcaccattctc

SEQ ID NO: 4400 - DNA, 3000 bp, Unknown
  misc_feature (1)..( 3000): cDNA_ID_1386598_gDNA_ID_1620704_Annot_ID_48826 3000 nt of promoter + ATG
gagcaggattttactttccctttacatttttttcagccaattcgtaaacagcttttctctgatttatcttcacaggatttattcactcgagtggacaacatgtctgcggttacaaagcaaccaacttgtaaggaggaaagactgaatgctcttcaggtgccttaactacgtcgattttagttttctttctatttaatatctgatgacatttcattgaggatgtttttgaatctccttgtttttttgtctttgatagcttttattgttaccttataaaacagatagacaaattttgtggaaatgtctgctaggatgtcatagactgagaaatttcttatgaagaaaaatattttagtgagtaaaatttctgaggttgtcctgattactcatggtttcttgattctttcaggccttactatcttgtccgacgggctctattcgcactcaaactccacctgctgacataggggaagctcaagagacctttccacttgtagtggacaaagacacacttcctgtactttttaatcccttaagctttcatttttttaggatggttattaacaagtcaactaactctgattagatcattgtaagcatacgtaggttttgaatagatttagatacaatgaccttaagttcttaactgatttagctccactgaggactcttactaccttgttcttatatgttgtctgctgtccttgaggtttataaagtttgagatttgcattatgctcagggcgtttttcattgtggatttcattccaagaaatcgtatggagcaacttcttacctgatccttcatcgtgagggaaatatacttgttgataggtatatacccttgggaggaggcatcatgaattcttattttctttgttgtttagtatcttatacattgttgatgcaatgtatttcttgatatacttcgttgtggctattaactctacacaactgattaaaccaaggttttgctgtttgctgcagtcctaggtacgtggagaaacttgctggaaagatcgagatgaagggtggtgttcgctacatgtttttgacacacaggtagaattgataacacctaaaggagaaaatccgtgttttctcttgtaatctctgttaatcaggataagcgatttcattgttcagggatgatgttgcagatcacaagaaatgggcagacagattcaagtctaccagaattctgcattctgatgatgtatgtccttgaatttttcacacctctctgcacattcttgataggttttttcaacatctagatttcgtgaaaaatgaaaaagcttgcttacatagttacaagaaccttgggctgcttatatgctctgtagaaaatagaaaaagattatgaggttggataaaagtaaaaagtaaactagccacgcaaacaattttgttactaaacccatctctgatcgaccattaagggaattttttttttgttaggttgaaccttcgacctctgatgtggagttaaagctggaaggaagtggaccatggagtatctatgaagatgtcgaacttatacacactcctggtcattcagaagtaagtttgtccaactgcaagaacatacataaaaacaaatgttcaatttttgttaaaaagaattccatcatgatcttgggataagagcttcgtacaatttgcagggatcagtgtgcatgttccataagtccctcaaggcattattcactggcgaccatgtaataatgaccgaatctggattgagcattttagagcagtacaatcacggttcaggtaaagactcatctgttgaatgtctttgggttaatgtttttgaatattcattcaagaacgtagaaagattgatctaaatgttttttttttgtgtctctggcagtgcctctccagctcgagaacgtagaaaaattgatcaacctggatttcaattggctaataccgggttagtgcactttggctatatatatctgctttactactgaaatggacattttggatgttgatggcggttttgtatatcaggacatggaagaagagtacatttcaaagatggagacgagaaggcgaagaatctggaagcacttgttcagaagcacagagagaaacaacttgtttcctttagcaaatccgggaaagcttaagatatgtatgctgattctaaaccggttaatcaaactaaaccagaccgaatgtctctacggcctgactggtctatgtgtcagttagttcccacgcgagtgatgtatttatttctacgtaacattgtgaacctgcttaaacgcttactagattgaaacgaagaccgtgagtaataaagtctcctctttcctagtgcaagtatgtcagctaaagtgttgctgtgtttttttacgatatttttcatgttattcggaatgtcttaaatcacaaaaaatattcgacttttcacaagcatcggatgcatagttgtttatttgataagggtatctcccatagctagttaaaaatgttatttaatatattcgttttggtaccatatgctacaataatcatattatgcagagatcatcgaataacatcacataaggtaagaaagttcatgtaaaaagaaaatgcactaataatcattcacaaacttagcagtagattagcgatcgaaaattgatgtcaccaaatttaacaatctttaaaatgacatcttttaattaacgacgttcattcggagacaaaatgaatttcatcaaaaatgagtcactaaactatttttcaaccactccactaaaaaagttaaacctcattcaaaaactgccacgaaacattcccaccaacaaaagataacaaataatatagactccctcgccttgttgcttcccactacaaaagtaacaagaaaaattgttacaatactaagcatagtattaacgttatgctatatatacaaatctctcgtcggaccaaatattcgcattcatagatttcattacaaattaacgaactattcacagaaagaaataaaacgag

SEQ ID NO: 4401 - DNA, 3 bp, Unknown
  misc_feature (1)..( 3): cDNA_ID_1820105_gDNA_ID_1620704_Annot_ID_165178 3000 nt of promoter + ATG
gct

SEQ ID NO: 4402 - DNA, 3000 bp, Unknown
  misc_feature (1)..( 3000): cDNA_ID_1824143_gDNA_ID_1620704_Annot_ID_48829 3000 nt of promoter + ATG
aagcgaattcgaagaagaagagacgcttagattgttaccaaagtgtaaacatgcttttcatctttattgtattgatacttggcttagatcacacaccaattgtccgctttgtcgtgctcctatcgttgaggccaacacaatgattgatgatcatagtgaggggctagaggagataagtgtgatgattccagaagaaaatggagatgataccgatgaagaaatcgaggaagaaagagatggctttgttagtaatattagtagagatcatggtgagtcacaacaacagcgagtgagacgatcagtgtcgttggattcgttatcgggtttaagggtaagtgaagttgttgtgggtagagaaaaggagaagttgaagagaggcaataatattggatctgggaggtcaagtttattgaagagatctatctcttacagtggaaagtagtactagctagcttcagtgctaataataaaaacaagaagtccataaagtaagtaagtttcttgaagaagaaaatcaaatcaaacccaacaagatatagattgtattcatatgtatgaaggtgatataagattacgattatcaaagctagtcactcttgtaaagttaaaagagagttttgacaacttctactactctgcttagatactctggatttgtggattaagtataaatatacaccaaacttcgttttgtatgttacttatttattgttcctcaagaaataccatctggattttaattatttttagattcaactgtcttatgtgaatggatttacatttggcgttgtggatctctaacactaactatatgaaacgctgcgtttcattaaaagaaggtaaaaacgacaaagagaatcttcgtcttcatcgatcattgttgtgtaaaactcttgttcctcttcctcttcaacgtgaacacttctatttctcagagaacattcacctatatgtctttcttcaaggagaagtcttcctctttccagatttaggttagattcatgttataactttttctaagatttctgatttccgaatttgaattttgtttatgatttagtgtcggtgtagaactgaatgatactaatgcaaatgattgagatcgatttgatgtaaaattatcaccttctcgtgtaatttaaaggtcgaatcgtccggggtcacattgtcgcaggtttatgtttatcctctaaattagggtttcttttgtgaaattggggattttttttgtctgcttacaaatcatgctgttttatttctcttgaaattaacttcatgctgtttttgacatagaatacaacagacaaactagatttaacagaactgttaagatgaacggaacataagatgacttctaaaaatggataaattttaggtcaatttttctttccattttcagttttctgaccctaggtgagatttgttttggacttttcatgtattgtacatgtgagttaatcaaataaaatctaggttcatgcatttacaaacatagtttaggaagtaaaatcacatgttaagttttgatcttaaactcttgttgttattcttgttgttgtttgctacttgttagaattatgaatctttgacctatagcaaatttccataaaatcaatcatgttaacccttaatccaaatcctccatcaaagagtttttttgcattagttagcttctcatgaagcgaatttggttttgggaaaagaatttgtggggtggggtccaaaactgacacgacacaaaaactttggtttctccgtctttgttggagaaatgcattcacatccacttcttaccaaaattaaataaatcaatatttaatttttttaaggccttcttgttttttcagatgaacactcttcagatgccttgtgccttattgatccagattcgaagtacccaactttactctctagacctttttcatggcagccactcccacacacttctctgtctcccatgatcctttttcttccacgtctctccttaatctccaaactcaagcggtatgttgtcaattcttcttccccccctccctatcacactgtttcatctaattctgactattggttttcttaactctgttgcattttttatttcagatctttggtcccaatcacagtttaaagacaacccagttgagaattccagcttctttcaggtaatttcttggctttactaacttttcagtttggaattgggataacgatccgtaattatgatatagttgtgagagaatctatgataagaatcttagagaaatcacttggtgatgcattgtactttgttgaagaccctttttgtttgtacagcttatgtttttgtttcttaggtttctataagtagtgtgtcttttataagatttgaaaagaagagtcttttttgtgatgcttcaaatggcaaaatctcagtgaagatgtttttataataatcaaatgttcagatttagtatgtttttgtggtgtttgcagaagaaaagctacaaacttgcaagtgatggcttcaggaaagacacctggactgactcaggaagctaatggggttgcaattgatagacaaaacaacactgatgtatttgacgacatgaaacagcggttcctggccttcaagaagcttaagtacatgtaagttgcagagtaccaccaattgtcatttttcaatggttaatagattacttatttcctttcttcttcacctgatgatattctcttgagcagggatgactttgaacactacaaaaatctggcagatgctcaagctccaaaggtagctttactcttcaacgaaattttattgttcatggaaggcttgagatatcttctgtggtttgaattttgtctggagaaaggaattgttactaacagtttaagcaacagtttctggtgattgcttgtgcagactctagagtttgtccttctgctgtcctgggattccaaccgggtgacgcattcactgttcgtaacattgcaaatttagtacctccatatgaggtataacattta

SEQ ID NO: 4403 - DNA, 3000 bp, Unknown
  misc_feature (1)..( 3000): cDNA_ID_1824127_gDNA_ID_1620704_Annot_ID_48833 3000 nt of promoter + ATG
ccaattccccatcttgaacctgagttctccccaatggtataaaacccatctttgaggattttcgcactggtgtcttaagctccaagcaacaaatgggaccatggcggacagtccatgccacatattaccgtaatcgtaatgattatacgagacaaatgtcaatccctcctggagactggcattgacaggaagagcttgaggccaagccagtgcataagtagttccatatgatccatcatgctcatcaacccctttcaagcacaaaagccttcctttcgaagattccgaaggaaattcttgatattgaacctcaccttttgtttggttatcgtagagagagctcataaaccaagtatgaccttcaagtggtttgtttgaaaaacgaaggtctttcaggggaaggaatgttaccgactcacgtagtttctccaccaagtaagccgtctcgttctcagattttatttgttcaggttcttgttgttgttcttttagatatgtgaatagtgaaggaggaagtaaaatgggttgttgggtaatgtgaaatgaccagatttgaagaagaacaaaaactgtgacgacaagacacaagacgttcaaggagaacttaggggaggctaagcaagtaactagattccttgaaacgctgcgtttagtcatgttttgaatgggaagagtgaatgaatgtgaagactgaagaaagagaatggtttttatcagatgacatgggtgaaatgaaactcgtgaggcaaaataaagctaactttatttgccaaagatgttgatgcattgcatgtttgaaaaacgaacgttatcacatctgcgccaacatttgtggcagtttttagcatcgactaacacatgcgtcttgttttattttctaaatttgttcagaaagtttttaagaaagaaatatgtatttattttgataaattgacaacccgaaattttcatataaacttaaagaatttagatagtgttttactgcaactttaactaaaaatcatgcacttataccaacttatacgtgtatatatcaaacgtcaccaatttttttatatattactatgagtaaagaaccaagtaagcactttaacaaaccacaaacaaatttaaaatacaacatattaataatcaaaaggaaattaaaggtacaaaatacaaatcatcaaacgggggtatgcgtaattaaacaaacaaaaacacaccacaatgaaacaactaattacaacaatcttataataaaatatacatcatcaatcacatgaagtgatgatagttcaaggactcgaagtagttgcagaaggcgggggagagaagaacggaatggatgggagactagtcggcagagagggaatggatgggagattagttggaagagaaggaatggatggaatattagtcggaagagaaggaattgttgttggaaatgaaggcaaagttggcattggaggcattgccgtgggaatggtgggaagatttggttgtggcaaagctgatggcattggaaatggagacattgcagtgggcattgtggggagagttggtaaagacggttgtggcaacgtcgatggcaatggaggtagtcccattgttggaataggcagatttgggatttgaggaagaggttgttgttggagaaggcggcgtgaggctgagcaagtgttgatcatcatagaggaagagaggcacactagaaaagcaatgcggaagagcttgtatgatgccattttgctttggttgtgaatctctaattatggttaagcctttctaattgcttctcttgtattgcttgctttgtgttgatgagaaattcaaagatatgcgattgagtttatatagcggcaagagtctctatggataacaaagaccttttattcaaatatcatatatggtttggttaggtgtactttatggttggcttgagctattgttagttcaacttaatgtgtgtttaatagattattttgacaattcaaggatttttattgaagttagttcaacaatcaaaactatctaactctaatacacatgttaagtctataaccaaacttttaaatgtcattttaagcttataaataccaattaccaccgtaagtatattataaaatctgatgtaacaacataaattttgtgtaaagctatgaaatatgaaataatctccaaaacaccaaataaaacaaacaaaaattatgatcattattttgtcacagctgtaccaaaaactccaaaatggaatttcccggtcaaaccggatacatggtttgccaaataaaaaaccggaaagacgaacaactaatggtttgacggatatgaccggtcgaaccggatagacaagcaattgaattttgaaaatctgtggtcattcccgaaaagtcaacctaactagacagaatcgaaattcaaaattccgtctctttggtacagaatacgctttggaccttctcgagcccgtcggaactgtaactcagtattattctggcgccgatgactctccggtcagttcaatcccgaagtaagcggaaaccgattgatgtatttgattactctgacgaggatgaccgtgttgaagaggagtcgaagaaactccttcgcaaattcgattccccagttactaaaaaacaccactgcgccatcgataagtatgaattccttcgatgctgtgagtgtttcttctctgaatttctcattgaattttgtttttggctgtgtcctgcaaaatatttgggaaggaagatcttatttctcattgaatttccccaagtttaacatggtaacacaagagaaggaatatgttattttttgtgttaatatctttctattgcagttgcgaaggatacccaaagcgagagtaaagtattgcaacacattgttattgatgttgaaggtaatagtaggaaaattatatcttggagaacagttctcaactacaaatgatgaaaattgtgtagaattccaaattttcagatgctagtgtgtgtggtagaatagaaataaccaatt

SEQ ID NO: 4404 - DNA, 3000 bp, Unknown
  misc_feature (1)..( 3000): cDNA_ID_1824123_gDNA_ID_1620704_Annot_ID_48834 3000 nt of promoter + ATG
actatttggatctttttgtggctcaagctcctgctaaattcaatccatccctcatctcaagatcggcaaattttgtaagtagtcttgtttccatctcttgaatatgatgaagttgcatctgacatactgaatttactatgccatagtaagcagatcgttgttagtttactattttcttaaaattaaatgtgactattgaaacatgcatttgagaatactattttatctgtttcacaaatgatatttaagaaaattgaaacaaatttttataatcttatttacaacttaagttttcttatgatatgaaagcactccaccgagaaacagtgatttgaatgagatggtttaatttattttctgcttcttttcagctaactaggaattggtttcctgcaaaggaagcttcacttaagcgtagaaacatcttagaattgctttacaacctccacaaaggtcatgatccaagtattcttccagctaattccaaaagtgaaccacctcattgtggagtttccaacaggaatgatcaagaaactgaaagtgagaatgtgattgagtgctgtaactggataaaaccatttgatggttcctcatcaaccgttacagacatttcccaaacgaagacttgctcgccggatctgattcttagcaaagaagtttcttacagcggaggttatgaccctccgtcttctaagctccgaaaggtcttcatgtcacctattgtggtaaaatttcattttctatatcttcagtttagattctactgctaagtatcttatgttgataatgtttctatacaatttctcaaaccaggaagaagtgcaagaaagttgtgagaaaaaggaccatttggaaatggacatacagaaatccactggtcatgagatagaaacattgcgaaaagagggatgcatgctttatattgaggacagtgatgatgaagaagctgtttcagtagaatacgtctctgattctcaagattcatatgaagttgagatgaaagtagaagatgatgatgacgatgagcttatagttactggagaatcttcagggattcatggaagcagagaaatcaagtctgattcagcatcgatcgaaagagtgaacaaaagtagagattcaactgctgcctcttgttataatgactttcttcttgtgttatctgatgatgagaggagctcagacgacaaagaaaacatcttaataagttcaaatgtgatggccaagccaaaaacttgatactttaatgaagatgaatatcgccaatctaatgcgattattatttttatggttttctaatctctttgcccataatgaatatcatgtcaaattttatattcaatagtgctcgtctcttatacgaccagtatcaaagctttgtttttcaacagacaaaaaacaaaagaatctgctgttattatccaagtgggaggatgaaaaccgagagctcacacaatgctttaatacaaaaagaaactgatgtcgtcgtccattcacattcacacgtcttcgtctctactctgatgctccaggagcaattgttccaactcttccttgcgtcgggctatctcctgcaataagggtcaatgacttagaaaccatttgagtgatgataataatgatgcagatagactatcaattgacacttgcctcaagatccttgactgcttgttctcttgaaacttccttttgctgtcgagcacgcttcagaaagccgatgcagagaactccctgaagttcagacaacgatcaaagattgacagtgaaaacataaacgggaactcagatattgaaaaacaaaggaagtgattgcccaagaagctcatttttcaagttagaaatagccctacagattcgctaaccaccacatcaagcatctattgttcagagttgggagttatccaagtgatcctaaaggtctggggacaaagtgtcaacatgagttcttacaacaaaccaagaatcgttttcaagtgaaatgcattcttataagcaagatgcaaccacaaggcacaaactaatacgaaaagattcaacaataagcgagagcagagagggaataagcagatgtgatataataggatgaatggtgatagcgtacagaaatgacatagataacaccacaagcaagaagcaagtagcttgcgatgttctgtagaagcaggagatccttcttttgagtcatatagtcagggaaagctcttgtcatcacagcaacactgaaatgaacaaagtaaagatatatacataaaacataaaatcatacagcaaccaaggaatggtctcatttttgagtacctggcctggaattagctgaagcagcactcaaaaaacacatcataaaagaacaacacgatccattccaacacaagaggtacaaaagaaggttactaagctgtatagatgtacttacaaaatttgaagcattcctctaccagcccagtattcaagaacctgtaaacagatttgcaaaattagaatcaattcatgttagaaaatcaaaggaaagagatagcaaaagatacgaaaccttggaaaatttgagaatgaaaccccattcagtctcaacgagaacaacaaaacaagcaatcaccacagcataacaccggaatattccatcgaagagctgctcggagaggaaaagataaaagctttacacagagatcatcttcaagtaatctaatgcctgcgcagcgagagaggaaaaagagagagagagagagagagattatacatcgtggctgtcacggaaggagcgaacggcagcgagaacgttaacgacaacacagagaatggcgatgagagaggtaacgaggctgaagcatctacaaacaacaaggaaaggatctgctctgtttccgagcttcaatttcgcggatccggaagaaggtccggcgggggattcttcgatttcctcagtcctatccatctaaaaccaatttcccggtgagaaaatccgccgtcttaagtggaatttggaatcgagacgcgaaaaacgaa

SEQ ID NO: 4405 - DNA, 3000 bp, Unknown
  misc_feature (1)..( 3000): cDNA_ID_1824120_gDNA_ID_1620704_Annot_ID_48835 3000 nt of promoter + ATG
aacaactcatagagatgaagcaaaaaaaagttaaaaaagaagtacccattggccaacaacctttccctacaaataagaacacctttaaatgctaattctacgacttaaagatattttttttgtagtctaaaaacaaaaaggctttacgaaccctgagcacatacatgagaaaatagtctggacgagcaaaattgtattcaaatgaaaagactgagcaaatcacaccattaaatggaacaaatggcaatgtaccaaagccaataacaaaacaatgaattcgataaatagatggcaaattgagcagtaaaatacatacccttgattctgttaattcaccatagctctgatgctcttttgctgtagcaaccaaagcattacttatccgcgacttcaaatccggaagcaagaccttgatatgttgaacaaggatctaaaaaaatgcaacagaaaggccatcttctatcagacattttctaatattaaagtatcttaaagtctgtaaacaaaaaaagatatacatgcaaggccaaaaaaataagctagggtagaatccgcacagccatgtaagtaaccttaaaaagtgaataatgcatttaaactccaccataatcccatattagatatttcaacatagagaaagcgtctcccttatgccttactgaacaatgattgacataacgaaaaaaggaactcccaattcccataactgcagaaaatacctgatttaacttctttgctagctgaggaacacccaaacgatcggcaagaccatggtaaacctgtataggtaccaaaaagactcagctttaatcagaaaaaatagcaagagtatcagaaagtgaatcaacaaaatgatgttagcataccgggtgactccggaagaacttctcctctgcgagaagtgcttccttgactgtgcggtttagcaaaatatcctgtttataaaatataaagatcaaaacactgtagatgcagacgccacaaaaagtagacaaaaaataaaaattctgtcacaatagcatcgaagtgataaaattagaattaaaaaacaagcacagccaaaggtagaataataaaaaaaaaaaaaaaaaagaagagacagcctactatatgatagcaagagaatcataagaaaaataagtacagaacagaagcaataaagctcaagtcacataaaagaagagccacactaaataaattaaaaagcaatagttgtgagcaaccacaggtttacctcctggcaacgatttacaactcccacgtatccaagtcgaagaggaacaacatttccaagaaggagttttcgagcatcagtacctttgtccataatatccaactgaaaacatgataataacatatagtaaatcacatgaaagacagggacgcctatggtgatgaaataaaacaaatgtctggactgggaatatgcacctttgtgattacacctatcgttctgtgacctggagacagtatagatagatgaaagggtgaagatgagtaatgtcaaatacaacccattaaactagtcattggacttgtgagtagaacttaccatcaggatctacaatgctagcaatttgaagggcatcagagtttgctagatcggtattagcaggggtaacagccaatatcaagcaagtatcttgcttgatgtaagacaagatcatcgttcttatacgtgcttcaatgtcggatggctggtcaccaactggcaccttggtaataccaggcagatccacaagcgtgatgttcaatacattaggtgaagaaattttaagacgaatctgtgtatctgctacacctttgttctctccaactaatctattcgtctcagcctacaaagatgttgcatttcatacattaatacaaacttggaagagcaatagagtatcaaataaagcaaggaagggaataaaaaacctcaatttctcgacgaatctcagagaaatcatagaaacgagtttcaggaaggtgacgaaactccccccactcatcatcggatccgccattagcgcggcttttagtctggaggagctggagaacaagaggacgacgcgtgcagatatcattaccacgagggagaaagtcacggccgacgagtgcttcaaggacgctagacttgccactgctttggcttccaacaacaacaacctgaggaagcgcgatcgtagactggcttccgagctgagcgaatatgtcttgtagcttgtttacaatcggaatcacagaggatcccaacggcgcggcgttggtggtggaggaagacggagaaggcgtagaagaagaaggaggcgtagacggaggagtctcaccggaaacttcttcaatagtcatcgttggatcggattttgaatgaatcaaagttgctagggttttgaaaaaattaagttcgtggagaagagaagacaacactgggaagaagagaaggtcaattactcgggattttcgtgcttagctctatctctatcgaagagaggaggatctttttattagagtcgctaaataatttttacttgctcaagaattttaaaaacgtgaagaagaaattgaactttaatcacaacttaacaaaataattcaaattaattttatattcacttaacctttgttaatttataatgataacaactaaataatttcaccttaatctccatggtccaaaagaagcgaataaacattttcatttacctaattacattagtttttaatttataaaaactttttttctttctaatattagcctgtgcttttattaatcaaataagtttagaaaaaatctatagatacagttttagtgaggaactgaagttctgttctgtctttaaatattcgttgttaacttaaacgcaatcttttgctatttcatcagtaattttttgtatggataaactaaaagaaaaaaaaaatagagaaaaatcgaatgttaaaatcgtggtaaaccggctgatgtcgtatcatttattaaggtctcaaaccggaggtgtgtgttaattttcaatg

SEQ ID NO: 4406 - DNA, 3000 bp, Unknown
  misc_feature (1)..( 3000): cDNA_ID_2147516_gDNA_ID_1620704_Annot_ID_48836 3000 nt of promoter + ATG
cgatagaatactttaaattttgtaacccttacctgaaatacaaattttctcacagtatgaattggattttaattatctttgtacttatctatccaggactttatattggcgcacatgggctatatacatcagaagtaatccatttaaaacgcaaatttggccagtggaaaggtggaaaggagtctaagaagccaacagatatcgaattttatgaatatgttgaagctgtgaaattaactggagatccgtatgtgcctgctgggaaggttagctttatgtttgttctagtatgaggtattaagacaaatatgaaaacttgttgttttcatggtcagtgtcaaaaatttgcgtactcaaacgactgtgttaccaatctagttaaaaaaaacgctgttacttttctgcctacacaggaaaggagtattatcatgcaatagtcacttggatctataaatgcacactcgcttattttcgatatctttcttcttccctaatactcttttgttgcaatatcatgatgagtgccttaccacagtcttatccatgacaggttgcatttcgggcaaagattggtagacgttatgagctcccacataaaggactcatccccgaagaatttggagtggtgtgcttaccttacaacactaattcaagtttatcattaagctcggttttcgtttagagttgttgtttgtgtcgcttcatagtagagttattcttacaaaatgcagattgccagatataaaggacaaggtaggcttgctgatcctggatttcgtaatccgagatgggtagatggcgagcttgttatcctcgatggcaaggttcctctcttcgtctctcaatatactaaaacaaacttgtccatggattcaaactcaaataaatgacatgttttgtgtgattgttgaattatggttttaatgcagtatgtaaaaggaggacctgtagttggattcgtctattgggcacctgaatatcactttgtgatgttcttcaaccgcctgaggcttcaagcctagttgtattctgctctacaatcgaggaagggttttcttctggctgtaaccattgtgtacgtatactcctagatacacagtagatatgaagtcggtactgagaaaggtataactgaaatggtttaattatatgcagattcatgagatcggttgtgcctaagataagattacttcaagttcaggtctttctggaccagtatagagatccacggtctcgctttttcttctggagcttggataaaggtacctaaattgggggaagatttaacacgccagagagtctttgatcagaaaggaaacttagattgtaaagcttgacaagtttatagatatatatatatatatatatatatatatatgtaaattaatgtatgtttctctgagattgctgctatattgggtagaaacgtggtaagagctgttgttgtatttcctttgtgtattttcagtttatatggcagaaaaagagaagaaatctttcttgttaatagtgactttgttactacatgcaacaacttaaaaatatagctcaagcaatgtgatcatgacaatagagaagcaaaggaatcattgatcttcaagtttatcatttcattacactcaatagtataaagattaaaagcagaaatgggaacttaggaggaggctgcagtagcagcagcagcttgcggtggcggtggtgttggtcggagagtgatctcaaccttatcgtgaacgccttgaagcaaaagttcaccttcaaatgcgactattttgcgtttcttggcagctctcagagtcccaaccaatgcttcaaagatgttggcacatcgatcgtcattgaacaacactccaaacgtcacctgtattcaaaaggaacaaatcaatcctcatgatcaagaatcaatcaactgtgtttgttagatctgagcgagagaaaagagtaaatgttacgatcttgattcttcagataagagtatttgttgattgaaaatgaaataatacagatttattccagatatagggagatccaacaagatttgaggagaaagagagagaccttgtaagagccatcggtctgacgagaaccaagacgatggatctcttcttccagtttctgaatctcttcgtctacgttcattctttcttcttccttagagatttcaggtctcaacagcctaatgttgtaaaaagattggattgaagaagagactctttctgtttctgacgaagacagctcgatggactcattcttgtccctcctaatccggttgaaaagaccaaaatgcgcacacttaaccggtttgaaaaccttatcgtaccgatttttcttcaacattgaaaattaacacacacctccggtttgagaccttaataaatgatacgacatcagccggtttaccacgattttaacattcgatttttctctattttttttttcttttagtttatccatacaaaaaattactgatgaaatagcaaaagattgcgtttaagttaacaacgaatatttaaagacagaacagaacttcagttcctcactaaaactgtatctatagattttttctaaacttatttgattaataaaagcacaggctaatattagaaagaaaaaaagtttttataaattaaaaactaatgtaattaggtaaatgaaaatgtttattcgcttcttttggaccatggagattaaggtgaaattatttagttgttatcattataaattaacaaaggttaagtgaatataaaattaatttgaattattttgttaagttgtgattaaagttcaatttcttcttcacgtttttaaaattcttgagcaagtaaaaattatttagcgactctaataaaaagatcctcctctcttcgatagagatagagctaagcacgaaaatcccgagtaattgaccttctcttcttcccagtgttgtcttctcttctccacgaacttaattttttcaaaaccctagcaactttgattcattcaaaatccgatccaacg

SEQ ID NO: 4407 - DNA, 3000 bp, Unknown
  misc_feature (1)..( 3000): cDNA_ID_2107920_gDNA_ID_1620704_Annot_ID_48838 3000 nt of promoter + ATG
atttacttggaaatttcaatcctttggtttttaagtcgatgttggatggtgttgtttggccagagaacagtgcatttgcttgtgatgatcattgattcatttttttattggtttgctttcctttttggcttcagaactcgaaatgcttgcttacccatggcaaaacgggtcaatacttgcaaatgtgttgctacgccgcaagagaagatcggtaatgttcctactccatgttgtttttgctgtaatgattagtaacatagttaatgatttatcgtcttttagctgtttatctgtttcttacaatacatgattttgttttctgtatgtagagtataagaccaaagtgtcacggaattcaaacatgtccaaacttcaggctggatacctattcccggaggtttgttacctgttactctcttggtactactatttaagatttcaaatacctaaaggagtggcatttcaagttaacatttttgaaagcttctagtgatctgaaatattataactatctgtgtaataagttaatatatcctcattgattctgtatataatgctcctctctcttatttttttgtgtggatgcaaacagattgcaagaagaaggtctgcacacttgttgaaatatccagatgcacaagttataagtcttggaataggcgacacaactgagccaattcctgaagtgatcacttctgctatggcaaaggtacctccttatcttaacttagcttcatgtgctctttgcccttctctgggctctagcatattttaaactgattttactaacactgccctaacatgtattatttcgttcattttgacaaaaatgtataacatattttctgttttggcgtatttggattattaaacgagaacttctctgtaatctaacaatgaaaattattctggtagcatagtttttttgtttgctatactattcacacaggcatgtaatctctagagattaatcatgttttttttctctgacagaaagctcatgagttgtcaacaatagagggatatagtggttatggtgctgaacaaggtgcaaaggtcagtgcacccttcatttccaccttattgcgttgttatcatttctttattatctgcctttgcacgtcacttcaattttattatggatagtcttgaactgctgctaaattcaagagaagatggatttaaacctgtttcttacatgtaaaatcttaaagcttaatctgttaagtttttatccaaactaaccttgatttcacatatgtgaaaagccactgagagctgctattgcgaaaacattctacggtggccttggcataggggatgatgacgtttttgtttctgatggagctaaatgtgatatctcacgtctccaggtttgttttattgctgactattcatctgtaattgatacaagattaagaaatatgaacagctgtttcttgattccacttcttgcaggttatgtttggttccaatgttacaattgctgttcaggatccttcatatccggtaattgggcatatagaaaccaaattgcagttgtagtcttctctacttttgctccattttaacgtggaactatgctgtctcgttttttttggattatacaggcttatgtggactccagtgttattatgggtcagactgggcaatttaacactgatgtgcaaaagtatggaaacatcgagtacatgagatgcactccagagaatggcttctttcccgacttgtccaccgttggcaggacagatataattttcttctgttccccaaataaccctacgggtgctgctgccacgagagagcaactaacgcagttagttgagtttgcaaagaagaacggttctataatagtgtatgattccgcctatgcaatgtacatgtctgatgataacccacgatccatcttcgaaatccctggagcagaggaggtaatagactgattgattataacattaaaaggtccatttttcaacatctttcttcatgtgtacaaccgcttacaggtcgctatggagacagcttcgttcagcaaatatgctggtttcactggagttcgacttggttggactgtcatcccgaaaaagctactctattcagacggtttccctgttgccaaagacttcaatcggattatctgcacttgtttcaatggtgcatctaatatctctcaagctggtgctcttgcttgccttacacccgaaggacttgaggttagcttagctaaagagagatctcaaaccagttcccactagttcagatatgcaaaatgatttattttgttgtcttttgaatcattgcaggcaatgcataaggtgattggattctataaagaaaacacaaacataatcattgacacattcacatctctcgggtatgatgtatatggaggaaagaatgcgccttacgtatgggttcacttcccgaaccaaagctcatgggatgtgtttgctgagattctggagaagactcatgtggttacaactccaggaagtgggtttggaccagggggtgaagggttcgttcgtgtcagtgcctttggtcacagagagaacatcttagaggcatgtcgaagattcaagcagctttacaaatgaagaaccttgtttgtaatcgttcctcatcatcatcaccctctttaatgacatgatttgagttaaaataatgtcgtttccattgttttctggaatttgtagaagacacttttgacaccagtgtttcaagcaatttggcaaagtattttaacaacgaaatcaaagtgcaaataagtgaactagtgtggaaaataaaatatttaaattggactgaggaagaacgtcaaaaaaatataaaattggattggttaaataaatctaaaattggaccgggatgggtgttttcgtaatttaggcttgttgagccaccgtgtgggcaaaaatatccaaaaacacaacacaagtgttgtcttctcgcgtctctcatcaacgagaaccagtttttttgttgatcctatcaacaatg

SEQ ID NO: 4408 - DNA, 3000 bp, Unknown
  misc_feature (1)..( 3000): cDNA_ID_2993740_gDNA_ID_1620704_Annot_ID_48839 3000 nt of promoter + ATG
ttcaggtgaagaacttattaactatcaacccagatgaagaaatacctgtcaagaatgtcacgataagaaggattccaaggtgaaacttccaaatctaagtaactaagccccactgaatgtgcttcaaaagctgatttcttgctttgttttagagttccagaaatcttgcctttatatgacatattgaacgaattccagaaaggactcagccacatggctgttgttgtaagacagtgtgacaaaatccacccattaccttctaaaaatggtaaactgcttcattaatcgacaaaacaatgtcttgctgagttacaagtattgagaatctttgctttggtttctaatagggagtgttaaggaagcccgagtggatgtggatagtgagggaactcctactcctcaggagagaatgttaaggacaaaaagatcgcttcaaaagtggaagagctttccgaatcgagcaagttcgtttaaaggagggtcaaagagcaagaagtggtcaaaagacaatgatgcagacatcctgcaattgaatggcaatccgctgcctaaacttgctgaggaagaagaagcagtcggaatcattacgatggaggatgtcattgaagaacttctgcaggtaaggaatcttatataagttaaaaacaaaaattctttttcacggattaattattgcttggcttgtggttgcaggaggagatctttgacgaaactgatcaccattttgaagactcctaacacagagtgcatgaccactgaactggttatgaatgtcgaaaactttagtctttgttttcaactttcaaactgtcacttgtccggcgaatgtgtatcaatgtaggcatgaacaacaactttttctatggtttcaagatgttttctctctatatatatatcattggtctctaagatatgtcgctctctcctttcttcaaagagttttaccaaatctgaaccctcataggccacaccaatagttgtctctactacctatatatcattagtctctaagatatgtcactctctaccttacttcaaagagtttttattcgcattttactaatacaagaattaatgaaatatgatcatcttatggatacaacatcactgccggtgtaaaaaggcaattacttttgtccggaaagatctagtccctaccatattttctcttcttcctatcccttttcttctcttttgacttgtgtttcttactaagtttcttcttatgctcctttctctttctatgagcccgtttgtaaacttcctcctcgtcggaagaagaagaatctgtcctacgtctcaataaaggtgatcgctctggctgaatcactagcttccgatctcctgtatcagaagttcttgacaattccctctcaggaagacagggtagcggttcatccatcatagcaccaacagaacctctgccacgcttgaccctatcatagaccagaatcacaagttttatcagcaaaagccgatcccaaattcgatcattattgtaaaggaaataatcaggcagcatctgagtataatggaaataccttgattggagaaaagtcttaacctcgacatctcctaagccttcatcatcatcatcctctgattgccatcttttgcttctgctccggcttgatgatggtgataaactagtagtagtaacattctcatcaactgaagtacatctctttaaaaaatccctcctattgttctgctcactttgaccattgctgctctcatctcttgattttcttttgagcctttcaccaaactcaatctctttactccgaagactccacatctcattggtttccacagctttgtttgctgaatggaataaagaagaaacaaataagagataaactaaaaaaaaactagattttgttggatagaagcaaagtctgtcaacaaaagattataccttgctgaacaccaagaactgtagcagtgagaaatctagagttaggtcgatgccttacattaggcttctcaagatatgctctgacgccatctttctcagcttgtctcctcaattctgctgcttctcttaaaagaatggaagctattcgattttcagtttccagatccatctactccaaggtaaaacaaaaaagtataagcctaatcaagttatgtgatcaaatcaatctgggtagatcaaacaaagatggagttgaacttaattcgaccactacagctatctaaatcattgcttcttaatcacagaacttccactaaagctacgttctttcgacaacgaaatcaacgaagcaaaacaaacaaaattacgtaaacacacaacaatcgaaaaggggatttttggagaaccctattggtcgagattaattaccacgaaatcgaattgactcagatacagatatctagtagcagcttcacgaaatcgtgcgattcctcggcgttttccagcaggcgcagagcaaaatcattgtccgagccagagagagaaataaataaattgaactgaattggaaaattcccaaaaatttctagtaaaaccgaaccggaacaaaccggattaatttcctctcagaccaaaccgaagaagaaccctagttttatcagtctcaccaactatctcccatggttcatttgctctgcaaatttgtctgaaaaaatctttgtgcgaagcaggaaaaatgtcgtcgacccatcagttagtttcttcgatgatctcttcttcctcatccactttcttagccccttcaaattttaatctcaggtgcgtcgttttgttttcttttactctctgtttgctactgatataatctagtgaggatgaatatgaaattggattcatttccagaaattaattgtatgttatgaatttacttggaaatttcaatcctttggtttttaagtcgatgttggatggtgttgtttggccagagaacagtgcatttgcttgtgatgatcattgattcatttttttattggtttgctttcctttttggcttcagaactcgaaatgcttgcttacccatg

SEQ ID NO: 4409 - DNA, 3000 bp, Unknown
  misc_feature (1)..( 3000): cDNA_ID_3073222_gDNA_ID_1620704_Annot_ID_165212 3000 nt of promoter + ATG
caaggaacaaagatctatcttttggttgcgtttacatagtgtttacgttccatgttataattattagctcatattagaaacccagacgtaaacacaaacaaataatcatgtcactatacagaatttacctagtatagaagtccatgatttttgttctttttaccttttaatagaaaagttttgttctttagttttttgggatttaacattcgttttaatatatcttgtagatgttgcagaaaagtgttggtggtaataagatagagcaaacctttccagaaagtacattggattactcacaaggcttctcggctactcagtttcaggtttctctctcttcactatctctctgttaggttctgttgagtacacgtgacttgtctcaagaatctcactatatatgtctttgggtgttgaaacaagcaggacaaaacagcattccaagagcagtgtggttatttgcatatggaaaccagattctaaataaccagttcagtaattttttattattatttctgtagatgttcaactactttgtttattcttactttataaagaatatatcaaatctgactaaaattaactttgaaattcgctggtgaagatcaaactgatgaagagcagcagctattttggacatttgtgaagcttttatggattcaacttgaaatcatttcaagcagtgattaaagtgaaactttaacgtcccagatgtgaaaaataggaaggagttttaagcaaaaagactgatatagaacgaaaaaaaaaaagggttctcaaatctcaactggactgattcttttctctcttttgctttgtaatttcgtcacaaacaagttttccttgtagccgcctttatgtaactcgtggtttacaaattacaacacttcacttccattgcaattttctttcatagtataacaaatttcaatgcctgaataagctttttttttgtgtggggaaaaaaacttccaagaaatatctagcaaaacaaatgatcttaatggttcttttcagagctgctaaattctcaaaagaataattcgaagtagatgacaaagagggcatattcaaaacttataaagaaactaataaaacgtattactttaaatagagcacgaaaacctatatataaccaaaatgctaaccctaaaagtaacacttgaagaatgcgtaacactaacgcaataaaaggggaaaatagaaacttatcaaaatctggttatcggcttgtttttatagtcactcttcatatgcatcagtgtttgagattctgcagattgttgtagcagatcatgtttaaagtccgttatttgtagctcttttgagttactagcgattttggaggtgttaaccggcccaagcatgaataggcctgatggtattctggtccatctgagcttggccgaagttaattgcaaaattaaaattaagtttatattattatgcttttgtctatctcttgactttaattaatcttttaaggttaattggttattggtagttgagggtgtttcagttaaccttaaataaaaaacttaattgacttaaattatagtaaaaaccaaaccaaaccaaatagagatccaaatttaaatgtacataatctaccactttcataatgtaaaaatccaagtgttatcagctgccgcatttgttctgtcttctatatgtcgaatacgagtacataaactacaactttgataatctaattttaggattttaatatgctaggctgttttgcgtttgtcatgagtagggtcgaatcatgccttagccagtcgtactagtatagatggttgtaagttggatttgatgacaactgctttggatttgatgacaagtaactacttaaaagcaatggttaggcagacattaaataggtggtgatctaatgtctaacatctaaaacgttttaattggaatttaaacgagtttagatggtctaattaagcgtttattatgtacataatagaacgtataaaatatcatgattcacagaagtaaatttaaaatgttttaattttagaagtaaatttaaaattcaaactacatcaaaaattcaatagaaatcaacttaaagataaccataaaatcaattcaattgacatcaaataatagaagccatctactttttatgttataaaacttataatgaattttatgtcattataaatcgaaaaactacactgaaatgaacaaaaagtcaaatgacaacagattaatgattatgtaaactgtataatgtcgattaaaaccacataatgccatcaattatttagcacctatcaaataattgtcacggttgtatatatggcgcgcctagaccgccacttaaagcgctatttcaagtattgttacaaacgaagaaggtaggcggtctaatttttaagtctaaaattagatatctttggacgcctcatattacttattgttttactctgtcggatcctatctcacccaaccatacatttgtggcaacagaaattgcctccaaatgcaaaaaaaaaaatcattctttctactgttaatacttcgaaatatacaatttttaaagttaatatgtgtttaaataccattttgatctaaattttgtgttttgtgtttctttctatatatatatgtacgttttccattatatcagaatcgaatcatatctaaccatatatgaattagtctcggtagttgtaatttggaatatttatttcgcttttcaacgttggtaggttcaaaaatacttaagttaagccacgtttaatttaaatacgttcatatttagaatatgtagagttgaaatttataacttaagtatatgttatggaatttgttgacagctattttaaagtagttgggacaaaacaaaaatgtaggtaggtgctcacattaatttcaccttgtaaagcctaaaactataaatcttagtaacacatatgtgatatgtcagttgtactctgttgcattatttctctcactcaaacgtatatacaaacataaattatg

SEQ ID NO: 4410 - DNA, 3000 bp, Unknown
  misc_feature (1)..( 3000): cDNA_ID_3093131_gDNA_ID_1620704_Annot_ID_165198 3000 nt of promoter + ATG
ttgatatcaatgccaaactagacaggttttgtgttgtgattccttggagacctaacttatcagaaacacacttgcctggagtctttatacttctcatgctaaacacttttcttttctttgttcctctggtatagagacttgatgaacttgattcttgagaaagggcatagcagagttccagtatactatgagcagccaactaacataatcggccttgttctggtaactcccagtctcatgcattacttccacaatttgactcgcttctctgtgaagtcatttttcacaaatattttcctctttagtgttatggttccacttctaaccattcatatctattatcttcaggtgaagaacttattaactatcaacccagatgaagaaatacctgtcaagaatgtcacgataagaaggattccaaggtgaaacttccaaatctaagtaactaagccccactgaatgtgcttcaaaagctgatttcttgctttgttttagagttccagaaatcttgcctttatatgacatattgaacgaattccagaaaggactcagccacatggctgttgttgtaagacagtgtgacaaaatccacccattaccttctaaaaatggtaaactgcttcattaatcgacaaaacaatgtcttgctgagttacaagtattgagaatctttgctttggtttctaatagggagtgttaaggaagcccgagtggatgtggatagtgagggaactcctactcctcaggagagaatgttaaggacaaaaagatcgcttcaaaagtggaagagctttccgaatcgagcaagttcgtttaaaggagggtcaaagagcaagaagtggtcaaaagacaatgatgcagacatcctgcaattgaatggcaatccgctgcctaaacttgctgaggaagaagaagcagtcggaatcattacgatggaggatgtcattgaagaacttctgcaggtaaggaatcttatataagttaaaaacaaaaattctttttcacggattaattattgcttggcttgtggttgcaggaggagatctttgacgaaactgatcaccattttgaagactcctaacacagagtgcatgaccactgaactggttatgaatgtcgaaaactttagtctttgttttcaactttcaaactgtcacttgtccggcgaatgtgtatcaatgtaggcatgaacaacaactttttctatggtttcaagatgttttctctctatatatatatcattggtctctaagatatgtcgctctctcctttcttcaaagagttttaccaaatctgaaccctcataggccacaccaatagttgtctctactacctatatatcattagtctctaagatatgtcactctctaccttacttcaaagagtttttattcgcattttactaatacaagaattaatgaaatatgatcatcttatggatacaacatcactgccggtgtaaaaaggcaattacttttgtccggaaagatctagtccctaccatattttctcttcttcctatcccttttcttctcttttgacttgtgtttcttactaagtttcttcttatgctcctttctctttctatgagcccgtttgtaaacttcctcctcgtcggaagaagaagaatctgtcctacgtctcaataaaggtgatcgctctggctgaatcactagcttccgatctcctgtatcagaagttcttgacaattccctctcaggaagacagggtagcggttcatccatcatagcaccaacagaacctctgccacgcttgaccctatcatagaccagaatcacaagttttatcagcaaaagccgatcccaaattcgatcattattgtaaaggaaataatcaggcagcatctgagtataatggaaataccttgattggagaaaagtcttaacctcgacatctcctaagccttcatcatcatcatcctctgattgccatcttttgcttctgctccggcttgatgatggtgataaactagtagtagtaacattctcatcaactgaagtacatctctttaaaaaatccctcctattgttctgctcactttgaccattgctgctctcatctcttgattttcttttgagcctttcaccaaactcaatctctttactccgaagactccacatctcattggtttccacagctttgtttgctgaatggaataaagaagaaacaaataagagataaactaaaaaaaaactagattttgttggatagaagcaaagtctgtcaacaaaagattataccttgctgaacaccaagaactgtagcagtgagaaatctagagttaggtcgatgccttacattaggcttctcaagatatgctctgacgccatctttctcagcttgtctcctcaattctgctgcttctcttaaaagaatggaagctattcgattttcagtttccagatccatctactccaaggtaaaacaaaaaagtataagcctaatcaagttatgtgatcaaatcaatctgggtagatcaaacaaagatggagttgaacttaattcgaccactacagctatctaaatcattgcttcttaatcacagaacttccactaaagctacgttctttcgacaacgaaatcaacgaagcaaaacaaacaaaattacgtaaacacacaacaatcgaaaaggggatttttggagaaccctattggtcgagattaattaccacgaaatcgaattgactcagatacagatatctagtagcagcttcacgaaatcgtgcgattcctcggcgttttccagcaggcgcagagcaaaatcattgtccgagccagagagagaaataaataaattgaactgaattggaaaattcccaaaaatttctagtaaaaccgaaccggaacaaaccggattaatttcctctcagaccaaaccgaagaagaaccctagttttatcagtctcaccaactatctcccatggttcatttgctctgcaaatttgtctgaaaaaatctttgtgcgaagcaggaaaaatg

SEQ ID NO: 4411 - DNA, 3000 bp, Unknown; identical to SEQ ID NO: 4407
  misc_feature (1)..( 3000): cDNA_ID_2107920_gDNA_ID_1620704_Annot_ID_165197 3000 nt of promoter + ATG

SEQ ID NO: 4412 - DNA, 3000 bp, Unknown
  misc_feature (1)..( 3000): cDNA_ID_2105071_gDNA_ID_1620704_Annot_ID_165195 3000 nt of promoter + ATG
ttcattcattgctgccagattgtgagtgaaacaattcctgctcttcagaaactgaaacaagaggggaagacccggttcattggtatcactggtcttccgttagatattttcacttatgttcttgatcgagtgcctccagggactgtcgatgtgatattgtcatactgtcattacggcgttaatgattcgacgttgctggatttactaccttacttgaagagcaaaggtgtgggtgtgataagtgcttctccattagcaatgggcctccttacagaacaaggtcctcctgaatggcaccctgcttcccctgagctcaaggtttggcattttacaaaagaatgtgattcttgttaacatttctgtagcacttgtattgatacaccgtataagagactagtgttaaaacgccattcgtgcagcattctctcgagcataggcaggttaaattctatagatgctatacttctgagactgacaatctttgtttcttaactcgtacaatcattgtgattagtcttcataggcaagattagagacacttcagatagttcccaatgggtattaacatgttagttggtctttgatgagtattcagtagaaaattaaacagattcacatggacgctggtatttagttgaattgatgtttggaagagtaggggatgctcttgagttagttttggtttgttctctgtttgatattttgatttagtgagaagtaaacgaagatactgacttcttaacaaattgttctcaaatatgaaagtcataacccgttgctgcttttattgtcttatgtagtctgcaagcaaagccgcagttgctcactgcaaatcaaagggcaagaagatcacaaagttagctctgcaatacagtttagcaaacaaggagatttcgtcggtgttggttgggatgagctctgtctcacaggtattcaagcttggtatttccttgtcaagtcccaaattatgtgggaagttggagttaaatatgaaagaatttgtgtgtttctgaaacaggtagaagaaaatgttgcagcagttacagagcttgaaagtctggggatggatcaagaaactctgtctgaggttgaagctattctcgagcctgtaaagaatctgacatggccaagtggaatccatcagaactaaaagaagctctttgtgtttctggtaaactcttgtcttgcttcttgtaatgcttatgcattcgttgttgtgtcattgtgttaataagagtgtaagtttggttggtatgattaataaagtttcttagatatcaaaatcagtcggaacatctttgatcgaattgattattagataaattacagcggagggtgagacttgggaagaaattacaatatgtccatttaaaaaacacaagaaaaagactaggaaaaatctccaaatctccatcacaagcaactaagttcaatagcttcttggaacctcttgtcatacgtagcgggattgccaaatagccaaagactaaacttcgaacgagcagaactttccgatgagtttctcgccggaaaaaggcatttaactatggaggctgacggttccggtgtggctgtagtctgcagagtattgtttgttgttatctgctgagttagaggaagagggagcatgaacatcgcagctgatgaggccattgataagttgattcgaagaaattgggtgcaaattggagagattgcatttagatgtatatattatgagtggagaggatagagaatgaagggagtaggtgtgcgtatttttctttgggaccaaggaaggctgaaacagaaatttccgttttatatttttatccaaacataaccgacgggaataaaatatatccaaatttgaccaatcagttcatgacacgtatgtagcacaacatgctaacttgcgcaaagacggtggctaacttgtgccaatgataaggtaaagaacttgtgacgacgacgataccgtgaagtgcagaaactctctattgtcgtggacttgggaccaacgcagagagctgcatgcaataaacccacatggccacactacatcttataaaatcttattcaaataagaaagagttgtaactggtctctcttataaattaatctgcatacaagaagtgagcagcaagtaacaaaaaaacatccgaaaattaactattgctaaatctcaagatcaaagataattgtgaatgatcatcataacaaccgtactcaatcaaattcctgataattacgctctctctttatccatttcatgaaaattgattttttcgtttttgtttgattttgtggcatgaagattggtgttttcgtatttttttatgtgtcctaatattagttaattaatatcagttcttcttcattaagcaatgctcttgggctcatttaggacttaaaaatgtttcttgtaatctcaatgttcgtggggtttttggttttctagcccatgtgtgggttgattaactttctaaaagattttactcttatgggattttttaaaattaaagccaatgactaacttgttggattatgatttataacctattggtgcataattatgatgtgtgaacaagtttttaaggaatcttggcgaatgacaaaactttggaaagaagagaagaataaggaactccaaaaccaccgatgcttcctctcctctctcgaatcttctaccgaagcagattcctatacttttgtcaacactttttaagtgttttgcgtttccaatgtactttgaagattattctcaaaactccataaaattcttactgaaacagagaatttttttttttaattttaatctaagaattatcttgaagctgtgttctttggcaaatataaatacacgtcgactaggacaacacttgcgctctaaagattgcaaatccgtgttctatctctctcaacaattatttcccctgcttccaaagctttgacaacatttctattcaaaaactttagttttgagttttttttttcttgtatacttctccccaaaatatg

SEQ ID NO: 4413 - DNA, 3000 bp, Unknown; identical to SEQ ID NO: 4406
  misc_feature (1)..( 3000): cDNA_ID_2992369_gDNA_ID_1620704_Annot_ID_165194 3000 nt of promoter + ATG

SEQ ID NO: 4414 - DNA, 3000 bp, Unknown
  misc_feature (1)..( 3000): cDNA_ID_1824120_gDNA_ID_1620704_Annot_ID_165193 3000 nt of promoter + ATG
caaatgaaaagactgagcaaatcacaccattaaatggaacaaatggcaatgtaccaaagccaataacaaaacaatgaattcgataaatagatggcaaattgagcagtaaaatacatacccttgattctgttaattcaccatagctctgatgctcttttgctgtagcaaccaaagcattacttatccgcgacttcaaatccggaagcaagaccttgatatgttgaacaaggatctaaaaaaatgcaacagaaaggccatcttctatcagacattttctaatattaaagtatcttaaagtctgtaaacaaaaaaagatatacatgcaaggccaaaaaaataagctagggtagaatccgcacagccatgtaagtaaccttaaaaagtgaataatgcatttaaactccaccataatcccatattagatatttcaacatagagaaagcgtctcccttatgccttactgaacaatgattgacataacgaaaaaaggaactcccaattcccataactgcagaaaatacctgatttaacttctttgctagctgaggaacacccaaacgatcggcaagaccatggtaaacctgtataggtaccaaaaagactcagctttaatcagaaaaaatagcaagagtatcagaaagtgaatcaacaaaatgatgttagcataccgggtgactccggaagaacttctcctctgcgagaagtgcttccttgactgtgcggtttagcaaaatatcctgtttataaaatataaagatcaaaacactgtagatgcagacgccacaaaaagtagacaaaaaataaaaattctgtcacaatagcatcgaagtgataaaattagaattaaaaaacaagcacagccaaaggtagaataataaaaaaaaaaaaaaaaaagaagagacagcctactatatgatagcaagagaatcataagaaaaataagtacagaacagaagcaataaagctcaagtcacataaaagaagagccacactaaataaattaaaaagcaatagttgtgagcaaccacaggtttacctcctggcaacgatttacaactcccacgtatccaagtcgaagaggaacaacatttccaagaaggagttttcgagcatcagtacctttgtccataatatccaactgaaaacatgataataacatatagtaaatcacatgaaagacagggacgcctatggtgatgaaataaaacaaatgtctggactgggaatatgcacctttgtgattacacctatcgttctgtgacctggagacagtatagatagatgaaagggtgaagatgagtaatgtcaaatacaacccattaaactagtcattggacttgtgagtagaacttaccatcaggatctacaatgctagcaatttgaagggcatcagagtttgctagatcggtattagcaggggtaacagccaatatcaagcaagtatcttgcttgatgtaagacaagatcatcgttcttatacgtgcttcaatgtcggatggctggtcaccaactggcaccttggtaataccaggcagatccacaagcgtgatgttcaatacattaggtgaagaaattttaagacgaatctgtgtatctgctacacctttgttctctccaactaatctattcgtctcagcctacaaagatgttgcatttcatacattaatacaaacttggaagagcaatagagtatcaaataaagcaaggaagggaataaaaaacctcaatttctcgacgaatctcagagaaatcatagaaacgagtttcaggaaggtgacgaaactccccccactcatcatcggatccgccattagcgcggcttttagtctggaggagctggagaacaagaggacgacgcgtgcagatatcattaccacgagggagaaagtcacggccgacgagtgcttcaaggacgctagacttgccactgctttggcttccaacaacaacaacctgaggaagcgcgatcgtagactggcttccgagctgagcgaatatgtcttgtagcttgtttacaatcggaatcacagaggatcccaacggcgcggcgttggtggtggaggaagacggagaaggcgtagaagaagaaggaggcgtagacggaggagtctcaccggaaacttcttcaatagtcatcgttggatcggattttgaatgaatcaaagttgctagggttttgaaaaaattaagttcgtggagaagagaagacaacactgggaagaagagaaggtcaattactcgggattttcgtgcttagctctatctctatcgaagagaggaggatctttttattagagtcgctaaataatttttacttgctcaagaattttaaaaacgtgaagaagaaattgaactttaatcacaacttaacaaaataattcaaattaattttatattcacttaacctttgttaatttataatgataacaactaaataatttcaccttaatctccatggtccaaaagaagcgaataaacattttcatttacctaattacattagtttttaatttataaaaactttttttctttctaatattagcctgtgcttttattaatcaaataagtttagaaaaaatctatagatacagttttagtgaggaactgaagttctgttctgtctttaaatattcgttgttaacttaaacgcaatcttttgctatttcatcagtaattttttgtatggataaactaaaagaaaaaaaaaatagagaaaaatcgaatgttaaaatcgtggtaaaccggctgatgtcgtatcatttattaaggtctcaaaccggaggtgtgtgttaattttcaatgttgaagaaaaatcggtacgataaggttttcaaaccggttaagtgtgcgcattttggtcttttcaaccggattaggagggacaagaatgagtccatcgagctgtcttcgtcagaaacagaaagagtctcttcttcaatccaatctttttacaacattaggctgttgagacctgaaatctctaaggaagaagaaagaatg

SEQ ID NO: 4415 - DNA, 3000 bp, Unknown
  misc_feature (1)..( 3000): cDNA_ID_3073242_gDNA_ID_1620704_Annot_ID_165192 3000 nt of promoter + ATG
gctgtttcagtagaatacgtctctgattctcaagattcatatgaagttgagatgaaagtagaagatgatgatgacgatgagcttatagttactggagaatcttcagggattcatggaagcagagaaatcaagtctgattcagcatcgatcgaaagagtgaacaaaagtagagattcaactgctgcctcttgttataatgactttcttcttgtgttatctgatgatgagaggagctcagacgacaaagaaaacatcttaataagttcaaatgtgatggccaagccaaaaacttgatactttaatgaagatgaatatcgccaatctaatgcgattattatttttatggttttctaatctctttgcccataatgaatatcatgtcaaattttatattcaatagtgctcgtctcttatacgaccagtatcaaagctttgtttttcaacagacaaaaaacaaaagaatctgctgttattatccaagtgggaggatgaaaaccgagagctcacacaatgctttaatacaaaaagaaactgatgtcgtcgtccattcacattcacacgtcttcgtctctactctgatgctccaggagcaattgttccaactcttccttgcgtcgggctatctcctgcaataagggtcaatgacttagaaaccatttgagtgatgataataatgatgcagatagactatcaattgacacttgcctcaagatccttgactgcttgttctcttgaaacttccttttgctgtcgagcacgcttcagaaagccgatgcagagaactccctgaagttcagacaacgatcaaagattgacagtgaaaacataaacgggaactcagatattgaaaaacaaaggaagtgattgcccaagaagctcatttttcaagttagaaatagccctacagattcgctaaccaccacatcaagcatctattgttcagagttgggagttatccaagtgatcctaaaggtctggggacaaagtgtcaacatgagttcttacaacaaaccaagaatcgttttcaagtgaaatgcattcttataagcaagatgcaaccacaaggcacaaactaatacgaaaagattcaacaataagcgagagcagagagggaataagcagatgtgatataataggatgaatggtgatagcgtacagaaatgacatagataacaccacaagcaagaagcaagtagcttgcgatgttctgtagaagcaggagatccttcttttgagtcatatagtcagggaaagctcttgtcatcacagcaacactgaaatgaacaaagtaaagatatatacataaaacataaaatcatacagcaaccaaggaatggtctcatttttgagtacctggcctggaattagctgaagcagcactcaaaaaacacatcataaaagaacaacacgatccattccaacacaagaggtacaaaagaaggttactaagctgtatagatgtacttacaaaatttgaagcattcctctaccagcccagtattcaagaacctgtaaacagatttgcaaaattagaatcaattcatgttagaaaatcaaaggaaagagatagcaaaagatacgaaaccttggaaaatttgagaatgaaaccccattcagtctcaacgagaacaacaaaacaagcaatcaccacagcataacaccggaatattccatcgaagagctgctcggagaggaaaagataaaagctttacacagagatcatcttcaagtaatctaatgcctgcgcagcgagagaggaaaaagagagagagagagagagagattatacatcgtggctgtcacggaaggagcgaacggcagcgagaacgttaacgacaacacagagaatggcgatgagagaggtaacgaggctgaagcatctacaaacaacaaggaaaggatctgctctgtttccgagcttcaatttcgcggatccggaagaaggtccggcgggggattcttcgatttcctcagtcctatccatctaaaaccaatttcccggtgagaaaatccgccgtcttaagtggaatttggaatcgagacgcgaaaaacgaaatggagaagcttgttggttaggattcagaagtggttagtgcggaaagctgaattctttctttcaccggacgttcaagccttgtcttttattcttcttctttcttctttgggaatatttaactctgcttactatttttatatatcagatcattaagtgttgtacaaaaaaacaaaaaaaacgtcattgttgatttgttgtaatgtttagaaatatgctatttttctagatatttttgcagtaatgctaacaggtatgcgatttctatcagttagtattcatgaccacatcatactgctctctctaaataattcagggctccacattacgattttttattataaaatctactagtacttataagaaagtagagttaatgaagtcgatgggaaccacttgggagagtggttacaacactccagtctagtcacatgtaacatgttcatggatacgacctagcttcctcttagtgaggttaaataatcctatagagcccattagaagtcaatgggctaacaaatatatgactggctctagctctagctctagctctagttctaaaaccaaaacccaagaccacaacaaacaatttttgccgtaacacactactaattttcactttcatctacaataatctccaaaattttgtattatgtagagatttgagtctgaatacgctaaaattttactcaaaaactggactataaattagaaattttggtctttttggattagcattccgttcgaattgatccgcataccaaaaataaaataaacgttgcggtttggttggttaataaacggacatgaccacataacacataagtcagtcacgagtcacatattccttttggtcaatcaaaagcccatatcatcatcatcgtccacacaacacaaaactatattcgatttcttccaccaccacacgctctcacatctctccggcg

SEQ ID NO: 4416 - DNA, 3000 bp, Unknown; identical to SEQ ID NO: 4400
  misc_feature (1)..( 3000): cDNA_ID_1386598_gDNA_ID_1620704_Annot_ID_165181 3000 nt of promoter + ATG

SEQ ID NO: 4417 - DNA, 3000 bp, Unknown; identical to SEQ ID NO: 4399
  misc_feature (1)..( 3000): cDNA_ID_2147485_gDNA_ID_1620704_Annot_ID_165180 3000 nt of promoter + ATG

SEQ ID NO: 4418 - DNA, 3000 bp, Unknown; identical to SEQ ID NO: 4398
  misc_feature (1)..( 3000): cDNA_ID_2147481_gDNA_ID_1620704_Annot_ID_165179 3000 nt of promoter + ATG

SEQ ID NO: 4419 - DNA, 3000 bp, Unknown
  misc_feature (1)..( 3000): cDNA_ID_1824094_gDNA_ID_1620704_Annot_ID_48847 3000 nt of promoter + ATG
ataccgtttctattaatgtttgggactcttgcttccggcgaaatcgaaactgccagactgaaccgtaatttggggattacgtccaatttaggggtttcctgcggtggatttgaagactttgctatgagattcgaaggggaaaacatggtgccatacaaaggtgaagagcaggaggaggaagaagaccaagtggtggtgaacgaaacgacgccgttccagtttcaacaacctttgtttctgcagcagcagcagaagctcgttgttgggtatgctctgacttctaagaagaagaagagtttcttgcagcccaagcttgaacttcttgctaggtaaccaataacaaacccaaaatgcttctttggagttataaagttttgatttttcattgcaaagtttccaaatttgttgaacaatcttttttggttctgctttttctttcctgagagacgactgttcctttgttggcgtttaaacataaccgacaaactcttttctactttcaaaaagatctttaggactttgacattttcttccagatttggttcttgtttccttactcttgttttggtacctattattggtttgcctgattctatgaggaccattgccacttgccatgtcttgtcacctgccatgtttttgtccttaatcggctcttttgcttagggttaggcttacactagtatactctacttgtggtatcaggatgtttctatgggaatattccttgtgtaatccttttggattagtctctattgaggtttgactctggcttttaaaaaataaaatacttagatgttttgccttttctgtggcttggaaatcttcttcaaccacatgggtgtttttgttaaagcaatcactggttctacttaatatgtcatcttctagaatgtctctaataggtcagagagaacatttcttattggtttagtttgacgtctggtctctgttttgcttctttctaatcaacccatagctttcattctttttcttctttcagcagtgttttcaagaaaatgctagtaatactttttgtgtctgtcaatttcaggagaaaaggcattttctttgtcgccatcgatttgaaccggcccctatctgaacaagggccatttgatgttgttttgcataaggtttgtgagaactaagaactctctgagctttaatctgtgtttttgctggaagtctaatgaattatatgattgttctcttgtagttgttgggaaaagagtgggaagaggttattgaggtttggaaaactgactacttttcttatatgtttctggttttagtttcttgcttgaagatggtaaccaatctggttttgagtttcttagtttgaactatgtaaaggtattaacccttgagtggtatttgaaagacttctgttaagctggggcagtttttcagtctgtggaaattatatgttgtcaaatacaatctcatgttgtttcaccgtttttgtaggattaccaacaaaaacacccagaagtgactgtgcttgatcctccaggatcaatacagcgtatatataatcgacaatcgatgcttcagggtatggcagatttgaaactgtcagattgcagtggtaacaatcctcaataagttcttttgacatcgaaatttaagaccttttctaagtttctctagaagtgattttttgcttttggtaaatatttgtaggcagcctttttgttccaaagcaaatggttgtcttgaaagattcagcagctagtgctgatgcagttgtggaagctggtctcaaatttccactaggtacagttgaacatattatcttggcattgaatattcttgtatgtataaatgatgatcatgaatttaaacttgtttatttcaaatttgtcccagttgcaaagccgctctggatcgatgggactgcaaagtcacatcaattgtacttggcttatgacaggcgctcgcttgcagagcttgatccgcctttagtccttcaagagtttgttaatcatggtattggttaatatgacacttcaatacgcagttgtcccatgtatatgtgttttcaaaaaattcaatgcatcttttttggtgcctgaaggtggagttatgttcaaggtatttgtggtgggtgatgttataaaagtcatgagacggttttctctaccaaatgtgagtaattgtgaaaaagccaaagttgatggcgtcttccaattcccaagggtttcatcagctgctgcttcagctgataacgcagacttggaccctcgtgttgctgagctacctccaaagcctttcctcgaggcgcttgtgaaagagctaagaagcttattggtatagttttagctgcctttctccacattttactttacaaatccggttttgattatcataatttctaactgcttttctattattagggacttcggcttttcaacatagacatgatcagggaacatgggagcaaaaacgtgttttatgttattgacatcaactattttcctggcaagtttttcccttatttttgaagcttttgtgtagttctctcatggaagcagagaagtgaacttttctctgtttgatatcgatttgcaggttacggaaaactgccagactacgagcaagtctttgtagatttcttccaaaatctggcgcaggtcaaatataagaagagacaacattgtaaatgaaagaaaatggcggcagtttttagatggtctactaagaagcgacaaataataaaatgtctaattatggatttgtacagaatttagctctcccttttggaagcagtatcagataaacaagttttgattactgattttgaattttcagtgaaataaacgtctcttcatccaaagttgaccaaacgatatctgaattcttattttgaccatagcggttcgttatataaaccgaatcaatcttaaccggttcgatcgaattgatttcgtcgtctctaaaaacgcaatcccttaaaccttttctctctttatctaactctcgtcccacccaacaatg

SEQ ID NO: 4420 - DNA, 1577 bp, Unknown
  misc_feature (1)..( 1577): cDNA_ID_1571642_gDNA_ID_1620705_Annot_ID_48854 3000 nt of promoter + ATG
aagctttacatctgaataagtttctctgattttgccttcctttcaggctgttctggatgcacataattctgtaatctctgcgatgaagccaggagtaaactgggtggatatgcacaagtaagtcttactgagatgctatatagctctgttctactatgcatgcagatgcagtaattgggattgacaatgtaagcgtaaactcagttgctttggtccattttgatttatcctcttgttagggagataaattgaaatacatctccatatggttattcagctttctttgtcgactgaagcaaattaatgtacaggttagctgaaaaaatcatccttgagtcactgaagaaggggtccatactcactgggtaattctctctgtgttagacatttcaatactcttctctaaaggttaattcattctcatggtttcgttctctgttcctagtgatgtagatgacatgatggtacagcgcttgggtgctgttttcatgcctcatggactaggtcacttcatgggcatcgacactcacgatactggtggctacccaaaggtacatcaaatcttttttcaacccaatagtatcatcacgtaaataaaaccacagtccctgtgtcttacccgttgctttgatctttcattcttttagggagtggagagaccaaagaaacctggattgaagtcattacgaactgcaagagacctacttgaaggaatggtaagggccgattgtttcaagtagaaatgcttttggttcttctcatttatcgtctctgttcattgtcctaatcgtatttatgtcaggtaataacggtggaaccaggatgctatttcatcaaggcattgctgttcccagccatggcaaacgcaacaacctctaagttcttcaaccgtgaaacaatagagagattcagaaatttcggaggtgtcagaatcgaaagcgatttggtaatgtcaaattcatattcactacaacgtctacaagttaaaacactctcaagagtaatgtcatatacaataatctcattttgttgtatatgtgtgatttcttttttaggtcgttactgctaatggctgcaagaacatgacgaatgttccacgagagacatgggagatcgaagctgtgatggctggagggccttggccaccgaccaagtgatcgtagctactcttaggcagcttatggaaattaaaaacttgataagtaaaactcaataatacaacctttatttttgttaatgggaataaggaaaaattgcctgtgttttactaatcttgtacatgtagtttattttgtttcagtgtcttgtttgtgtggttggatattaaaccgattgaatgttcaagtggacagataaaatctaaccggtttggtgcttgtcgacgaaaaccgaaccggtacagaaaatatcttgagcacaattttagttctaatataaaattcattaacaagagagaaaaaaaaaacttcaaattaaaagcttcgtgtcttcataaaaccctaatctcgcgacttcgtctctatccccaaaaaccctttcctctcttccttcttgtgtgagaccgagaaaaaaagatg

SEQ ID NO: 4421 - DNA, 3000 bp, Unknown
  misc_feature (1)..( 3000): cDNA_ID_1715104_gDNA_ID_1620705_Annot_ID_48855 3000 nt of promoter + ATG
aacaggtgataagataacgtctctcacacaccttgtacttcaagtcttgacatttaacaccaaccacggcgtggtgaccgataatgttattgcatcctatgaatgtatagccaggaagctcatcgccaacaacagcaccactggctgacaaaaattcaagacagacacatagcaaagatcaatcaatcaatcaataaattacagagtataatctaagagatggaagggtttttacgtcatgagaacacaagattcccccaactctgtgtttccaaagacatggctagaaggatagagtttgcagccattgcctagcttcactgaagagccaatagtacagtatggaccaactgaaactccctgttagccaatgtttctggttaaccacagtctagtaagctcaaatctcaaacaaagcatcacactttgaccaggttagatcaaattcaccatcttgttctactaatttgaaaattgcaagtgttaagctgtttctagtcttcaaatgagcagagaagggttcaatttctgagtaaagtccaaattcaccaaatataaaggttcttaaaacaactcagagacctcaaagcaatgtcagtaaatgaatcaaaccttgccaatcacagcatttgggtggacgacagcactcgggtgtattaagacttcagaatccctcgaatcttcacgagaatctgctccaaaccacacaattattcacagcttagagtagagatacaaattcagctaaacatgcccacataaagcagaagcgggaatagagaaagacagatttacaggagaggctagaggagagtcttcggatagtggaactgacgagaggagagagaagcttctcgcgagctttaaggagagaaatcatggcgggctacgtcgaccaaaaccacaccccttccaattgcatacatggtgttcgacgaaatgcctcaaagaacgatatagtgatgaaatttcacacgtgccaaggatcgatcacgtgacttagttttttactgttggtatataaatttcttttgaagtgatagttccaactttttgcaaaaaattaacttcttttttggattttcagtttcaatcaatatctgatacattttttcttttgatatacactaccaaatataaaatcgaatgagctttagctaaattccttcatttttaatgtagcttttgagtttaaacgctggtagcaattaatttccattaccatgacacaaagcaatgcctttatcaatttagtgaagaggaacaaacaaatgttctttcatcacctttgcattaatcagtaacacttattatcgactctaaacaaagcctagtgttattgtgttatgaatcttcttcttttgttattgtgctgacaagttgcagcaggattctctgttgttcctctgcactactccattccttgacttctgctttgatcagtaagggattgtctgagatcttcttccatagcggataattcgttctcggcatcacaaaatcacactctctcagcttcaatgtcgggcagaagtcacctcctccatctccaaggtagataaaccttcttggaatttgatcattggaagaagaagcacgtaaatgatccattactaaaccctgaaagaaccaatgaagtttcactagtcaaaatcctacaaaactgaatccaatctaagggtaatggatatagcaatctctatttgtacaacgctagaattgaagatttcagcttttggactcggaactaatcccaaattctaatggacaagatcataaacaaattgcaagtctaactacaaggcaaacatggagggcttcttatatagttaaaaaagatagataagagtaccttgcatagatttgaagggcaaagattgcagctatgtggaggcaatgcatcactatgataaggcaagatccgcaagttcccattatcatcaagagaggttggatttgtgtaaatctcagaaaagcaatccaccaaatcatggtgctctagtatcttctcaatgaaaaactgatttgcatcactcacaatctttaaatcacatctgcaaatttgaaccaaacaaacaacactcaagactcaaccaaaaaaagaaactgagaccatctaagtgaactgatcattgttcataccctgaagatttagctgatttgatagcttcaataatatgagaatcaataggcattttcttcaaacaagatttaatgtcatcaatcgatctaccttgtgattgtagctccatcatcatcctatccttttcaaaatccaattcaaattttgatttcaatatgcgtaaatcataagaagaggatgagattttggatgctttaataaatgaaataccataagacgattccatggtaaagtgaaacggagctgatggaagatctctgtgagtcccatttcagtgacaacccaattgtcactatctccgtcgatcaaagtccgatcgaaatcaaataatatcacgatttttgccattttctgagatataaacacaacgccggagctctgcttctcgccggagctgcaaatcacttctcctctttcttaattggtcgacggcaacatccaattgtccgacgccacttttcgtcttgccaatgacaagtttaccactctccatcctattaattacatttgagccatccagtcgtattaattaatgggccttactgcttggcccattttgtgctgtgatccgaataatttaccacacatacaaaaaaacaaaacagtaattatctaacatggtcgagaaagtggacccaagttcgtgtcagcattccaacagccaataagattgcaggaaacacgttaacaagcgtaacatcgattccacttcatgaacacggcacaggatcaaaacccagagaattctttaaacccatgatcttctatatagaacccgtgaaagaattttattaaagtcccaaactttaccatatttaagagagatagagaaagcttctctgcttctgacttcaatg

SEQ ID NO: 4422 - DNA, 3000 bp, Unknown
  misc_feature (1)..( 3000): cDNA_ID_2992562_gDNA_ID_1620705_Annot_ID_48862 3000 nt of promoter + ATG
ttatatataacacgctttcaaagaaatacagacgaacataaataataacataaagaatcaaatcacatgcgtacccaagatgacgtggacagaacagagaaatcacacttctatgtctcaatcaattctcaaaaatatctcaacattataccaaaaaaagaaattctcaaaaatatttcaacctttgactatatttaccaaaccccacttcctggaacctcctaacttttaacttatgtattgtaatgatacacctttatacttttgcaagtagactaatctcatggcatctattgcttgctaatggtcggtctaagggaaatgatatatacagcattatacttctgtaattagacaatattaggagttcagaaagaagttgttaccctcgtttacgaaaaaaatgtttatattcaattatgaaaccaactcttctgaaattctgtgatagttttattgttcctcaatggtccacttattccccaccttgatatttttgcaaatgaggcttttgtcttactcataaagaagatccattcgaagacatatttttgtttctttccgttttttcaaaaacaataaaaaagtttttgttcacattttagaagagaagcaattcaccaattaatttcgtaaggtaacatgaaccaaagaagcaaaacaaaacatcattataaatatatttatactgacaccactgaaaggtaacttgaaccaaagaagaaaacacaacataaatatgattctgtgacattatcaaaaggtttaacgaacccaaccaagaagtaaacaaagcataattatgataggataataaaatagttaaataacgaaggccagtgtaattccctactggctattattttccttactagtagtatagatttttcttatctatcactattcagtaataaactttttttggagatccacgtagcaatggaaaaccttgaaatcgcagttcggagctgctatagtgtctaaaatcatcttcgccgtgcgctcttgactcaccctcgcgttattcttttccacaagcaccgcttctacgatcttattgaaccctttccctcggctacgagccacgaaatcaaccagagcagcttgtaccggtcccaaacttgggctatacgccactgattcaatgtaccatccacggtaccacttcccttcgtcatcctgcagcgccactcccgacggagactcagtgtacggagagaacgaattgtttgccgcggctagagccttgcacttcaaatgggaacaatctgatgagcatatctcttcggtagaacccgaaagggtgaggcagttatcgcgcttctcgagaaggagaggggaaccctttgggaggacgtcgtcaggggtgaatctgtacggaaggaggagcttaaggctcgagaatgatccttctgcttcatgctttgatttgagcaggattttgatgtcaagctcgttgctggtctccataagaaactggcggcagtttccgcacggcgcgccgaattcgatgcagtcactagagatggcgactgctaactgacggagacctttctcggagtttagtgcgaggttggtgacgaggaattgctcggggtggatggagtggtgaagaggaagacctgggaattcgacattgacgcctaaatagacccgacccgatgatgcgcgtccaacggctccgactttgtatttggagattggaccccgagccagagacatcgcctttctgatcagctttggaagtctgatgggttcggtgacaccttccgatgctgcttctttggcagtgaaaacgaacttgtacttatcttgtgccgccattgccctgttttgagattctacacgagattttggaaatgagttaacaagttaggacgttgggccatttaggatcgtgtttcgagtttttttttggttgagagatatgaaatgagatgagaagtggtattgagtctttgcctatttatataggtgtgtcgtgtctgtttgcatattgtgaaaggactttttaaaatcgtgtttaggtcattcgtatactcaaaacaatagttagtgtgtgaacttcaagattaaaaaaaggtgattgtgacgatcaacattcatgaactagcttttaaagcaaagtagtaattagggttaattttctagttagtataaagtaatgtactgtaatgaagagtatttattcgaggaagactaagtagttcttaattaacttttactgagtagtaacatttaatggtttgaatagtactaattaatataggtaaagaattacatggacaggcaagaatataaacgagattatgactgtatctccgtcatcaagactcatgctgactcatgaaccatttctcaaaacaaaattgcttttaaaagtaagtaaggttagtttttttttttttttttaaattctatactaaagaatggttaaaaaaataaaattcaatagtcttgattagtcataaattcatggtatgaaaattgggaatcttattcttaaaaagttataattaaattcattgagtttgtgtgagattgtgacaatataaaaatatcaaataatactctaagtccatgctatatatatattttctctttgtgtttaaaattgaatcttgttcagaaatgagcactttgggtagatcattttgaacttaaatgtatgatatatatttgttcgaaaaatatggattccagttaattttttgagtgaatatggattgaaacgttttaagaaggatgattgtgttactctaatttttgtaacaataaacgttattatatttttacagttactccccataactttgtaaaaagtaaagaaaagccccaaacagagagaaacgaccacgtaagagtggtttggatcactaaactcgaatcgtcatcttcatcgatcgatatgcgacacatcatcttcatcgtcatgttctgtcttgcaaagttcaaacctttttacaaatcagacaaaacccaacaattaatgaaacaatg

SEQ ID NO: 4423 - DNA, 3000 bp, Unknown; identical to SEQ ID NO: 4421
  misc_feature (1)..( 3000): cDNA_ID_1715104_gDNA_ID_1620705_Annot_ID_165237 3000 nt of promoter + ATG

SEQ ID NO: 4424 - DNA, 3000 bp, Unknown; identical to SEQ ID NO: 4422
  misc_feature (1)..( 3000): cDNA_ID_2992562_gDNA_ID_1620705_Annot_ID_165245 3000 nt of promoter + ATG

SEQ ID NO: 4425 - DNA, 3000 bp, Unknown
  misc_feature (1)..( 3000): cDNA_ID_2173018_gDNA_ID_1620705_Annot_ID_165270 3000 nt of promoter + ATG
gtgtctcgccatggcggctaaaccagcggcggttgttatctcggcagacgggacttacgctgacgtggctgccgggacgatgtgggtggatgttctgaaggcggcggtggatagaggcgtctcgccggttacatggacggattatttgtatctcagcgtcggcgggacgttgtcgaacgctggaatcggtggtcagacgtttagacacggccctcagattagtaacgttcatgagcttgacgttattaccggtacgtaaataccaaaacttcactaatctcgttacaattttttaattttttggtaatataaattttgtacggctcaactcttaattaagaatgaaacagtatctatgatcttctagatgctctttttttgtctgcaagctttaattgtagtaacatcagcgatatatatatcacatgcatgtgtattattgatgataatatataatgttttagttacaaatttgattctcaaggtaaaactcacacgccataaccagtataaaactccaaaaatcacgttttggtcagaaatacatatccttcattaacagtagttatgctataatttgtgattataaataactccggagtttgttcacaatactaaatttcaggaaaaggtgaaatgatgacttgctctccaaagttaaaccctgaattgttctatggagttttaggaggtttgggtcaattcggtattataacgagggccaggattgcgttggatcatgcacccacaagggtatgtatcatgcatctatagtgtaatcaatttataattttaatgtagtggtcctaaatccaaaatttgatttgatttggttggaacgtacgtatatataataagtcaaaaggctgattttgaagacgaatttatatacttttgttgaattaaatctgattttgcttacgttttattagattctgcgtaataaatcctaggacttgctcgagtgtaatcttgtcttatgcttgcaaatcttgttgatgtcaatatctaatcttttttattatatttccctacgtaagttttagatatagttattttaaactgctataaattgtgtacgtatagactttagataaaaagttgtggtcgcttgcacctatttgtttatcgctatagtgattcaaaggtctatatatgattcttggtttttctttttgaaaaaaatagaccatacaatccaaggaagatgatcttaaatggactaatttatggatataaattgatatacaaatctgcaggtgaaatggtctcgcatactctacagtgacttctcggcttttaaaagagaccaagagcgtttaatatcaatgaccaatgatctcggagttgactttttggaaggtcaacttatgatgtcaaatggcttcgtagacacctctttcttcccactctccgatcaaacaagagtcgcatctcttgtgaatgaccaccggatcatctatgttctcgaagtagccaagtattatgacagaaccacccttcccattattgaccaggtactaaaatccattattcatgatgattatcttcacacaatcagtatcatcaccaattaccatcatcacttgtcatatatgatccaaagtaaatatatcacatgatataaataaatcgttcaaatctttttttttaaagaataaaagaatcattttcaagcattactcatacacatctacgaatcaccgtgaccatatataaccatacgcttattaaataatcatttttgtttgtaggtgattgacacgttaagtagaactctaggtttcgctccagggtttatgttcgtacaagatgttccgtatttcgatttcttgaaccgtgtccgaaacgaagaagataaactcagatctttaggactatgggaagttcctcatccatggcttaacatctttgtcccggggtctcgaatccaagattttcatgatggtgttattaatggccttcttctaaaccaaacctcaacttctggtgttactctcttctatcccacaaaccgaaacaagtaaatatttactttttgattttgttttatttgaaagtatatcccaataatgtatgttaaattgttaacaagaatttattttattaatagatggaacaaccgcatgtcaacgatgacaccggacgaagatgttttttatgtgatcggattactgcaatcagctggtggatctcaaaattggcaagaacttgaaaatctcaacgacaaggttattcagttttgtgaaaactcgggaattaagattaaggaatatttgatgcactatacaagaaaagaagattgggttaaacattttggaccaaaatgggatgattttttaagaaagaaaattatgtttgatcccaaaagactattgtctccaggacaagacatatttaattaacttatcacatgtcttaattaatttgttatgtaactttagaacgtatttttataacatatacagacaagtacgttcatcgtctaactaacaaatattatagtttagtgatttggttaggctacttacgttaatctttttcgttcttgtatgaaatatattgtataagtcaaaagacaaagaaaaatatattattatagcggtataggtctctcagaaattaagaaccaattatttcttttattaagaacttttatgtggttaaaaattactaagaagtatacaaaattttctaaatttgaaagtaaattaagaacctgttttattaagaaaaatttcgataatatctgtcaaaaaaaacaattcccataactttttaactattttcctttttacaaaatcttctcaaaaaaactgtgacagactaatttatgaaacgacatacatgttgaaatgctaaattgaaaacggtgtgttatttggaaattcaaaacgttttcgtttagaattagtacaaagttctcttcattggccaaaaattcaaaacgctgtcgcttttaaattagtacaaagttctcgtccttagccaaatgcatct

SEQ ID NO: 4426 - DNA, 3000 bp, Unknown
  misc_feature (1)..( 3000): cDNA_ID_1824167_gDNA_ID_1620705_Annot_ID_165269 3000 nt of promoter + ATG
tgctctcgtagcccagacgcacattactttaacaaaccgaatcatatctcctaaaacttgccaccctttgaaaggtaaatgctccacgcttaaatgaaaatcatacaaatctaactttcttgtatcttaactaaatcgataatcagtcattttgtcatattcagtgaaactattagagtactgattccatttccatagactatcaccttatcattgataaattttgagtctttatatcatgatagtatatagagctcacacatttccaaaaggttactagatgagtcccatgactttcttactttttacccagaaactttagtaataagaaaggcacatatttcaacagattaatctagcaaagagatcatgaaagtgatgaacatgtagcttcaggagctttagaagacctatctctagagaatagcaattgagaaagcattgtgaccaaaccatatatataagcagtaacaatgttggtcaagcttcatacacagtgaacaaacaagaggagagcctcacacgattcatagttcagaacctagtcatgactatcacacactaatcaagctttatgaaaatcaagataaatcataggtagatcgaatctatcaggaactgtttcactaatctgacatcaagtaatataaattgagaacaagaaggggcaatttcgaagatctagagatcagatcaattattagcttacatgaagaagatagcggtaatgacgagaccaatcgcaagagtgaacaccgataaagtcggatacagcgccaccggaatcggactcgcaatcggtttcgccgccttctcaccgggaacgagcacaaacacaccaaacaaaatcagaaatcgtaaaagcaacaaatagagagatcaaattagctgtgactgaaagcacttggacggatctagatttaccattgttgctaagctcttcttcttcttcttcgatctgaggaacaatgaaaaagctatttgactgatctcgctcgcttgatcgcttcactaaacaaacacgagtcgcttccggtttgtacttaaccggcttgttataacacaaccacggttattttatgggccagtttttctgtttaaaggttcgatttaataggcccaaatatacttattaaggcctttgatataaaatgtgttcatatctttatcttcttttaacgttgtataactttattcaaagtgcaatgtgatcctttaccattttcgaaaattgaaatccacttcaatgtagacatctccaactccttgtcaatcaatttccggattgaagattgggtactctctctagatttagttcccacctgaaaatatgggaccggatgtaatagtaacagatttttgtattggtcaacaatgacttatagatttcgtttttttcatggaaaggacttagaaattggttagggtttaatttgttgaccaatacgaaaatatggtcccaaagaagtgttgccatactaaatgacgaaaaccggctgccgaatatttctataggtaggacatagaacttacatcaatttgcgaccacatatattggaggtagcattttaatcgtctctagacttaaagggctatagcagatagaggagacggtttactcactcgtttgctatttgcagatatttacgaattttggcacatggatccaagaaaacaattctgcctgttgtgtgtggatagattttatgcagaaaaaaagtactagtccatcacatttactttaaaaattaaatcaacggcctagtatttttgttcgattataacaaaactattataaaaaaaaaaatgtacttatatttaacactattgattaattaataaatgaatcttccgactgttttctttgtagggcgtgatgtaatcacgggacggtgagtcggtgatatcattcgtgtgcttcactctctaaacatatagcgaagtaaattgacaaaaaaaaaaaaaacaaatagttaaccgtcgacaattcaataatggatagagtttgtgattaaatcatctataacatatatatatatatatatatatattaattaaatgtttgtctcactttgcatgtgatacgaaatgaagaaactacaaaaaagtgaagttcgaggtggaataagccttttgctttctcacgccacactaaaacttgcgtatgtgtttcgattctgcgccggtcctgttgattatagaacatgtaatttaataggagaaagtaactgttagtatagtattaaaaacgaatgtatataattttactattataggtatgatcgacttttgtactataaatttcaataacattccttcaatgaaaaaaaaaagaaagagttatattgtaatagactatagttttgtgagagagtttcaagtaacgtttgcaattggacgaacttttaaagaatattaactgcaaaaacactacttgggtgtagaaaagtgttatttatgaaccggcccacagagtcggagtttggtcggttccacaaatttcaaatttacgttgtgatctacatacaataaattatcacatcttataaagtcaaatgaaactacctcaactatactagaaaatattgaatactaaattataaaatacagaattagaaacttatcaggggtgttaaaatcaatttacccagtagactttttattattgttgaactacgtttaaacaacatatagatatttcgaagtcaatgcagtcaaatatttcatacaaaacactttcgacgaacacaacttgtatctttttttctctttggtgtcaacaagacttgtatatatatcaacatcaatgaaaatacgcaaagatatatatgttcacgtgacaatttattacattaaattgtatatagtctctctatggttctatataatctcatactttctacctcatctctatagtaatcccataatcaacaagacactctaatagtaatatctcaacctccgtctcgttttcccattaacctacccgtttgttagatt

SEQ ID NO: 4427 - DNA, 3000 bp, Unknown
  misc_feature (1)..( 3000): cDNA_ID_1033727_gDNA_ID_1620705_Annot_ID_165241 3000 nt of promoter + ATG
ccatgtcttgtttcttggcattggtagatgaagagcctaagagcagcctatcgtaagatattcatgtctactgaaacagtctccttaagttttgaagagcgtctcacggagctggtacgtgtaatcaatgaaaactcacttcactgtcttcttccctgtggatctagtgcataaacatctaaacatattatatctgatgtaattcaggaacaggaccaagagctgtacagtgttcctgcagtatcggcaatgttgcagtcaatccgagattctttcactgaaagtcgccgtgggatatgcaagttcagacaatggctcgattccacaacttagagacttagcttaggcattcagtaatcagcaatggcttattatacctaattgctcaataccatttccttcactggaactgtaatagtttgatatatagctttaactaagtgttgtcaacattctgtgggcacataacatccttaaaaatcacttgtcagagaaaggaaaattcattttggtattatttctaatactgtaatgaagctataacttttggatgctagactcatagatggagatggacttgaaaagcctgaggcagcagagtacctgcaaattccgatatgctcaatatacaaggtatagagagacagagaaccaataaactcatggtcgaaatagaggaactaataaatcgcatctcttcgtgagaccccactttgtttacaaactcgtgaagccatgaagccaaaggaaaatctcaaggctgggaatgcaatcttctacatcagtttcagggactgtggtctgaccaagatcaccgagctgtggtaagaagaaccacagatgggcatccggaacacatgtttcttgaagttaagtgtacggttgcggacttttcgagctgctctcttaactaaactattctgctctattggctacaattggtctgaacacatttcttctaagatgttgcagattatcctctgcttttatttggtgttccaatgtaatctaccaagctgattgttttgtattaaaccgctgcagccttataattccttgaagaatgaatctatatatcattcatttccctttctagccaagcattggatctttcccgtctttagattcagtttttttggagtgttaccaaaagatcatgtcttgtttcttggcattggtagatgaagagcctaagagcatcctaccataagattttcatgtctactgaaacagtccctttaagtcttgaagagctacttaacgaagatggtgcttgttattactcaattctcttcactgtcttttaccctgtgcatctatcgcagaaacatttgtacattttgcattttgcaggaactgaaccaagagatgtacagtgttcctgcagaatccgccatgttgcagtcaatcctagattctttcacagaaaaaggcttatacaagtgttgtgaacattgtgggcacaaaatatccttaaaacagtgagaagaaagttcactttggttggtcactttataataatatacatattgaagatgtgtctacttacattagccgtgagagtaaaggcaaaattaggttttcctgtaaaaatagccagttgcttttagtggcttagtgtagatctcattctcatgtctattcgtgattttagttcaattcattcttctggtctttccataatatcgtttctcttagttctttcttctttgttgtcattaacagtcaacaaaacagctacaaaaacttttaaaccaataaaactgtttggttgaacaagatacctaggtctagttttaaactacaaaagacaatattttgttttcttatcatagaagagaagagaatccactgtttcctttatacagccatagatgttagtctttcaccatggacatgctgaaattgtgaagagaacgcgtttccttttacataactatatacataatatacttgataacaaatgcatggtacatggcattacccgtgatacacgccagcgtgcatatactgcttcgtgcacctcctcaaccttgatgccagaattaggagttgttgccatgatttgagagaatgtaccaactggtatgatctctaaaatatgagcaagaactttcacatttgctcgagttacgggtaacagttcctgtttcaaacaaggaaacatgtttcgactacaatcaatagagagttatctcagttttatacatgtgcattctatagtctttggcatctacttactttaggtttcatgattgacgacatttttgcttgtttctcctgcggattaagaaaagttagttagaaaaccaagaatcttgttttttctatgcatagctatcgatccttttaccagatacaccaaaaaaaagaaacaagatcaacactacataagccaagtattagcatccatttaaacaaatccaggctcaattctactagacccgatgaataacccaaagatctctgctcagaacagagcataccaaagaaaaaaagaaagaaagagaggagatgcaatgatttcattacgctagctagacctaactgttacatacgttcgctatagtttctggctttctgtacacggaatgcaaagaaagggggaaaacaaaaatttgagaaaagataaaagacgttactgttgaccggtgaccaagtagacaatagccggcgacgaaataagcgggaatatcgttatccaatttgacgattggtccaaaaccaaatgagcctagcagagcggaatgaaaatacatcggtctaaacgacggcgtttatctgaatatttattgcctttctacttgtctccgttgccatccgccaaatcgacgaagacgacgattaccaggttcatgaaatctgcttctcacttttattttagccatcgtagatctattttcttatggtcaattcgcttcagtgttttgaaattttgaagccacagctttctggatttgtaatttcgaatatgaaaatcgactgaaattgttttaggat

SEQ ID NO: 4428 - DNA, 1577 bp, Unknown; identical to SEQ ID NO: 4420
  misc_feature (1)..( 1577): cDNA_ID_1571642_gDNA_ID_1620705_Annot_ID_165236 3000 nt of promoter + ATG

SEQ ID NO: 4429 - DNA, 3000 bp, Unknown
  misc_feature (1)..( 3000): cDNA_ID_1824171_gDNA_ID_1620705_Annot_ID_48876 3000 nt of promoter + ATG
cacatacgcaagttttagtgtggcgtgagaaagcaaaaggcttattccacctcgaacttcacttttttgtagtttcttcatttcgtatcacatgcaaagtgagacaaacatttaattaatatatatatatatatatatatatgttatagatgatttaatcacaaactctatccattattgaattgtcgacggttaactatttgttttttttttttttgtcaatttacttcgctatatgtttagagagtgaagcacacgaatgatatcaccgactcaccgtcccgtgattacatcacgccctacaaagaaaacagtcggaagattcatttattaattaatcaatagtgttaaatataagtacatttttttttttataatagttttgttataatcgaacaaaaatactaggccgttgatttaatttttaaagtaaatgtgatggactagtactttttttctgcataaaatctatccacacacaacaggcagaattgttttcttggatccatgtgccaaaattcgtaaatatctgcaaatagcaaacgagtgagtaaaccgtctcctctatctgctatagccctttaagtctagagacgattaaaatgctacctccaatatatgtggtcgcaaattgatgtaagttctatgtcctacctatagaaatattcggcagccggttttcgtcatttagtatggcaacacttctttgggaccatattttcgtattggtcaacaaattaaaccctaaccaatttctaagtcctttccatgaaaaaaacgaaatctataagtcattgttgaccaatacaaaaatctgttactattacatccggtcccatattttcaggtgggaactaaatctagagagagtacccaatcttcaatccggaaattgattgacaaggagttggagatgtctacattgaagtggatttcaattttcgaaaatggtaaaggatcacattgcactttgaataaagttatacaacgttaaaagaagataaagatatgaacacattttatatcaaaggccttaataagtatatttgggcctattaaatcgaacctttaaacagaaaaactggcccataaaataaccgtggttgtgttataacaagccggttaagtacaaaccggaagcgactcgtgtttgtttagtgaagcgatcaagcgagcgagatcagtcaaatagctttttcattgttcctcagatcgaagaagaagaagaagagcttagcaacaatggtaaatctagatccgtccaagtgctttcagtcacagctaatttgatctctctatttgttgcttttacgatttctgattttgtttggtgtgtttgtgctcgttcccggtgagaaggcggcgaaaccgattgcgagtccgattccggtggcgctgtatccgactttatcggtgttcactcttgcgattggtctcgtcattaccgctatcttcttcatgtaagctaataattgatctgatctctagatcttcgaaattgccccttcttgttctcaatttatattacttgatgtcagattagtgaaacagttcctgatagattcgatctacctatgatttatcttgattttcataaagcttgattagtgtgtgatagtcatgactaggttctgaactatgaatcgtgtgaggctctcctcttgtttgttcactgtgtatgaagcttgaccaacattgttactgcttatatatatggtttggtcacaatgctttctcaattgctattctctagagataggtcttctaaagctcctgaagctacatgttcatcactttcatgatctctttgctagattaatctgttgaaatatgtgcctttcttattactaaagtttctgggtaaaaagtaagaaagtcatgggactcatctagtaaccttttggaaatgtgtgagctctatatactatcatgatataaagactcaaaatttatcaatgataaggtgatagtctatggaaatggaatcagtactctaatagtttcactgaatatgacaaaatgactgattatcgatttagttaagatacaagaaagttagatttgtatgattttcatttaagcgtggagcatttacctttcaaagggtggcaagttttaggagatatgattcggtttgttaaagtaatgtgcgtctgggctacgagagcatgtgggttagcctcgagtcaaaactttaagatagacttgaaccattcattttagcttctttgtaataaggtcatattggactcttttggtattcattgtgctggtttagattcattcagcccaacaaggagtgatcaaaacttaccctgtcataacatttgtgttgcagctatgaagctacatcatccaggaaaaaccgaagcgtcggaaaggagctcgctacttcagcagttgcatctgtcttcttggtatggattttcttcttcaccctcttgacttaagtttaagagttttctttaaatctaatgtttggttaaaatctgtttctgtgttatttgcagggttttggatcgttgtttttgctacttgctagtggtgtttatgtctgatccttcttcctcaatactattcccaactagttcaaagacaaaaaaaacagatttatctttgttcaagtaaaatcagagttatgaatgttaagacttgagaagtagcctttaaacaccaagttacaattaaattatcttcttcttttgaacgctaaaccgagttttggtttcaattttcaccgcctttagaacagcgtttgcgttgttaagttgatcagttagtaactttctaccaagatttagaagaaagctttactcaaattttgtaatgggaagatactgattatactctttagtgtgaagaaatcattttaattcgctaatttaagtatttgcctattgggtatttgccgggacgaagtttactccacgtggcataaataataatattataaaaaaaacaaaggagagtagagagaaaacgagagaaaagaaggaaatg

SEQ ID NO: 4430 - DNA, 3000 bp, Unknown; identical to SEQ ID NO: 4426
  misc_feature (1)..( 3000): cDNA_ID_1824167_gDNA_ID_1620705_Annot_ID_48877 3000 nt of promoter + ATG

SEQ ID NO: 4431 - DNA, 3000 bp, Unknown; identical to SEQ ID NO: 4425
  misc_feature (1)..( 3000): cDNA_ID_1824163_gDNA_ID_1620705_Annot_ID_48878 3000 nt of promoter + ATG

SEQ ID NO: 4432 - DNA, 3000 bp, Unknown
  misc_feature (1)..( 3000): cDNA_ID_1824281_gDNA_ID_1620706_Annot_ID_48880 3000 nt of promoter + ATG
gctctcagagatggctattcagagcaggtagtggattgttcaagtgtgtctgtgtatggttatgagcataagttgctcttgtgtcagcttctttgcttcatagatttaagctactagcctactgtggtatatatttattacatgtgctccattattatatgacaattgtgttcctgggatgcagatagcagaagctttgctggaaattacacttcctagattttctggagacgtcatcccaaaaacagatgcaggaatggttttggcaataggtgataggtaaattgaaagcctaaagttttgttgtctctcccatttctttctacgccaaacggttcgtcctgtgaacacaaaaccttgtatctggattgcgcggagctaaattgtatatgcttctgatatgataatttttgttcgaatttgtgatcctatatactaacacctatgcttgtccctatgactgtagattggatagccttgttggtttatttgctgctggttgccagccaagttcaacaaatgacccttttggccttagaagaatatcatatggcttagtaagtttatagatattctgatctgaaaatgagctattatgatatgtcattttatggttgcatgaggttatggatgccaagtaatactttgtatgccacaggttcagattttggtcgagaaggataaaaatgtcaacttcaaacgtgttctagaacttgcagccagtgtacaaccgacgaaggttgaggcaaacactgtagaagatgtgagaatcaattgagtggcatcaaatcttgttatcaccatctgaaattgttcgtgacataattaactcttttatttgtttctaggtgtatcaatttgttactcgaagactggaacagctattggttcgtgcaacttttgtgatgtttatctttttcgatttcccagctcttaaaatatcttacgggtccagttcttgaaacaacgttttatccttttttacaggttgacaacggagtaagccctgaagtagttaggtctgtcctagcagagcgtggaaacaatccttgtctggcagcacggactgcatacaaggttagtgacttgtgatatgatccaatagcagttagctagggaattaggtaatagttgagaagcctttgggcatcattctcctagtgaatgttgctgtgtcatagtgatattgctccaaagaagctaacatcgctggtgcttgccttgcagacggaaaagctaagcaaaggtgagatgtttccgaagatagtggaagcatattctcgtcccacacgcattgtccgtgggaaagatgttggtgttggagttgaggtacttgaggtttctgtctgatcaaagagcatttgtgaaaacttgcagcttctaacattgaatgatgcaatcaggtggatgagaatgcatttgagactccccaagagagaacgttgtggagtacttacacctctatcaaagatcgaattcacactggtaactcactttcttccctgctgtattctctcaaacaagctcgcttccaaattcgtctcactaaccttccaaatttcaggcattgaaatcgaggacttcaccgagatatccatgcaattggtggagccactcgaggatttcttcaacaatgtatttgtaatggtggtaagttaaaactttgtccatacactgtactcgagtatcgcagacgagtgaagtttgaatataacggtttttgcaggaggaagaaagagtgaggaagaacagactcgctctgcttaataacattgccaatcttcccaaaggagtcattgacctctcatttttgcccggattttgatctttacttgtttcataatcccactccggaatcatcaattcattgacctctcattttttctttgtttcataacctcatatagttgtgttcactgagcaaaaattcaaactaaaacttgtgcaatggaatactttaaaaacagtttcataacctcaataaaaagatttcaaagatttttagatacttctgattgagatgtgttctatttcaaaattctttttttttttctcacaagtgatagaatttattaagctttcacaatatcatacataggctttaacaaaagcccaaacagcaggtttacagaaatagccaacaaagaccaaatagataaccgacttctgtagaagaatttcaatctaaactccatccatggaaacgtgtcgacaaccggttaaaccacgtcccacgcctgatgagtaatcacaagtttttccggcaacaacctccaccgttgagcgccgattccggtaagaaatcctcgccgataaggaatcgaacgaagactcttatgttttgcaccgaattgaaagcatcgaagctccaattaaagtaacagcttaagggaccatgataagcgacacaagaaaatcttctttccttcaacaaaagagtgaaatctctttgaaatcattctgtaaatccagagtacaaaagaaaaggatccgaaatttatcttgaagagataagaaactaattcggatcggagtaaaactcaaaggacagagacaaagaagaaccaccgtggatatggcagatcaacatccctaatcgtagatccgatgagattattagcaaattaaaaacataattgaaaaattaaagcaaaaacagaatccggccatggccgctaggttagccggtcgatgccgggcaaaagctagccaccgctacttaggaagccagtcggtgctagacgaaagccggccatcaccgttgagaaaaacggaagacgccggacatgtagccggataaccaccggacggcgagaagaagagcgtattctctctctaaaatattcagagagcgagaagagagagaaacactgacgaaaatatagattttatgggctaacaaaattcaaatgaaaacattggattataagatggttaacaaaaatggttgagaaaaaaccatcgagagaaccaaagggagagaaacggagctaagttatg

SEQ ID NO: 4433 - DNA, 3000 bp, Unknown
  misc_feature (1)..( 3000): cDNA_ID_3073293_gDNA_ID_1620706_Annot_ID_165315 3000 nt of promoter + ATG
tgacaaaaaccctcgatatgaagcatctgacaccagaacatgttttttcaacgcagacgtgtaccaaggaggtagaaatatggcgtcatgtttgaggacaccgctggaagtaaacaatgatgggggtttatctgatgacacaatggagtctaggagctcaacaggagttaccatatttggcacaggtcttcagaatgaagttggcgaatacaattgctttttaaatgttatcatacaggtaacccttcacttttcataaacggtttgagttcttgggaatatagtatctataattccagcttaaagacttatttttgctgaaagctattttgttttgttttgatcttagtctctatggaatttggagctgtttcgagctgagttcttacggagttcaacacgagagcaccatcacgtgggagatccttgtgttgtctgctctttgtatgaaatctttaccgctttgagcgctgcttcaagtgaaaaacaaaatgaacctgtggcaccttcatctctcaggattgctttaagtaatttgtatccagatagtagtttcttccaagaggtaaaagaatttgattactggttttaaatgtttatcctaatacaatgtaaaccttcatttcattaattagcctaatcctgggcgtcatatggtggacaggctcagatgaacgatgcttcagaagtactggctgtgatctttgactgccttcatcgctcatttgctcaaagttcaagcgtgtctgatgtggattcctcagacagcaactgtactggttcatgggactgtgccaaccgcacatgtattgcccattctttgtttggaatggatatttttgagcaactgaattgctacagctgtgggctggagtccaggcatttgaagtacacttcctttttccataacatcaacgctagtgccctacgcaccatgaaggtatcgtatgagtgttcatttgattgcgttttcacatatataatttgattattcactgtggttttgtcccactttacgcctaataggttacatgcgctgaaaattcatttgatgaacttcttaaccttgtcgagatgaaccatcaactagcctgtgatcccgaaaccggtgggtgtgggaaactcaaccatatccaccatattctcactactccaccacatgtatttactacaggtaaaacttatttttaggattttgatgaatggaaattttttcagactgctgatatttgtgtcttgtcactaattattttggggctggcagttttagggtggcaaaacacatgtgagactgtagaagacatagcagctactcttgcagccttgaataccgagatagacatcaacatcatgtaccgtggtctggaccctaagagcacatatagcttagtttctgtggtacgcatttcttcctcttcttccctatgatattatcagaagagtcgttaaaacaccagctatgtgctgtgttttccttgtgtgctttcaccctaaaaacctcaaggtaacaaattgttcttttgctatttctgcaactccaggtttgttattatggacagcattatcattgttttgcacatagtcgtgagcacgatcagtggatcatgtacgatgacaaaaccgtcaaggtaagattatcaatgcaatgggttttgcgggcagcagatacactcgtggacattatcacccagtttttgtaatatctttcaggtgatcggtagctggatcgatgttctttcaatgtgtgaaagaggacacttgcagccacaggttcttctctacgagagacgttaaaataaaaaagaagcaaaacaaatgcagaccaagtagagttctgttgctacaatttaggagatctcgtaagtacatactacaaaggaagtaagtacgtttttttgacaagcagaagtaaactcgagaggaaagaatgtgattttacactcatctcagtggttctaacttctaagaggatggggaagacgattttgtctttaaaatttaagcaaaagtgttttcagtggaagaggtcatagaagaagatatcatgtagttttcttggttacatccttgtcacattaaggattatatgttcatataaatctatttcatcggtcatctctatagatcatatcatcattatacatatatcatatcttgtcaactaatgaaaatgaagtcagaagttaggagagaaattgcagaaactctaatccaatgaaatctctacatatcattcttttaacatttactatgtgactatgtagtagtatatgtttcttattttcttttcaatccgactgtgtttaacacttaggacttaaccgtaataaaacgacatttgaaattaggatttgtgatcgggtaagtgattcgaacattagaaagcaaactaacctatgaggctatgactttagttggtcgagagtcggctttcatatgcggcatttgcggggtcaatcccgcaaagaggcagcctgaaggcactcactagggatagctcttacaatgagcaagttgacaacctcatgctccttgccgatcctgatgaatatctgtcacagtgggcaagttgtgccagcatgtagcggttccaaaaaacacagcggttcaattcgcaaaccgagtagttcgcttcgtctggtaaagtaaaccataaaataccgatggttcaactagaaataattactaatcgaagtaaaccggtttgtaatcgctaatgtaaatctcttttttggtttagtgacattcttctgctccgtagcgagagagagagagagagcacaacaacgactcctgtgttactctctctacctctatcccctcaccaacaatctccgccgtaatacgtggccgggatctctcaggcgacgccgtctgttgactgtaatttaatatccgattttgaccatctttgcccatttggtggcgcgtatatatatatacgtacgcgtagagtattcttcatgccgataaaattaaggtatttaagctgaatcgtgg

SEQ ID NO: 4434 - DNA, 3000 bp, Unknown
  misc_feature (1)..( 3000): cDNA_ID_1824227_gDNA_ID_1620706_Annot_ID_165308 3000 nt of promoter + ATG
atccttattactatgatacgagatatactgcatctaatgtaattgatacaaaaacgatatataaaaatactcggaaatttttcctgtaactctcctttgatccactatattgtattgttttaactacttaattttttttttggtaaggtgttttaactacttaattgttttctctatttgttaaaaattgtattacatatcaaatcttatatctctgatttcctttttttatttggccgcatcttttatccaaaatgatccaaaagactccaaagacaagatccaaaagctttttagcgttttaaggcgaagttgtaaagagatattgatagtttattactatatatgatgagaaattgagaatcataattatcctctatcggtacttagcattcagtcaacaatatttgaccaaagatcaatgaagtaaaaagaagatatatatgtacacagtttcttaaaatatatatatatatatattttaatttctctgactaattaactaatctttgtgaatgggtcaagagataaagaagcgtgcaagaaaagataattagagcataatcaaaccaattaactaaggtttcttattcgtcatactcatcatacgctcatccatactaagggactaattatgggaggagccactctttgagggattacctagaagctataataggttacgtgcacgtaaatgacattttggaatggattgatagataagttacaccatgttatttgtatcatcactttaattttgtagagtccgtaaaattttaaattttgttaatgtttttagtaatgttaagcacacttgtacaaattaatattttccgaaaattttatacggtttgctttttaagaagtgacatacctttagttagatttataattggtcaagtatggtttgtcacccctctttagcttcagttcgactatcagaagattttatgtttatgctaaattcttttctttttttaaatatgagtttattatttttagctcaaccatacataagtaaaccttaccaataaaccagtatcttaatctcaaaaaacaaattgtcaaacatataaactcccattggtcactttatattactgcaatacgagatttaccgtttaactaccaatttcaaaaacgttataattttttttctttcatttttcgtattgttactttttactgtttttaattattttgatattgattacaacttatctatctttcaaaaacgttgtatcgttttctattattaaagaaataggatccgaattgagattaaaattaaaagagtcgttgagggactaattaaacatgttaataaagataagatgtggatcccggttccggggacgggagagggaaggtcatgtgccattagggtaggaaccaccgagaggatgtgtcacgtgtcacgtgtgttggacttaggtgtcagaatggttttgaatggaaaaacaaaacaacgattctcagtagtcaataccccacacgatatcgtcatctttgttgtcttcattctttaaaataaataaattgaaaaggtactagtagttgtctagttccgtacggtacccgtccgtactctctagagcaataaatctttccatgaattttctttttctatctttctttcttttattcttaaaaatctatacttttgagtcttgacattgtatctatcttgtaaccttcaaattgtgagattagtagaaaaattgatggaattagtagaatcgcgagatctaatcaatttatatgaagagatataagtgaaacatatatatctgaaaagatttttttttttatacgagtacatcatcgaccatgtaatgtttgttctacggaaaaatgccaataaggtaaagaagttattgtgtaattgattttacgtcattttaatgaatataaataattatatgcaatctcacttcctctaaaaatcccacattcgttcttcgcaatatattatcataacttatctcgttttgttgcatttttcttccaaatgcatccatatagtatgaaagataaaacatatatataggattctataactctttttttctttatattttcacaaagatatgacaacatgaaactgtcttcatctacttcttctaatcagtccaataatcaacatttcaaactgattaggaccaccgtctgatccatttcaacaaaatccttctcttcatcgttccggttctcacgactagtcctgtggttcctatgtctctttttgactaatcaagctttttattgatgtatcacaatttttttttctttacttctgaggcacctatgacctatctaatgttatctcttaagaaaattttaatgagagatacatttgcttcatggacttcgatgattatgggcctattatatcattttaggcccatttgaaaattgaagttttgtgggtctcaaattaagtcaatacagtcagatgttgtgtgtccgagagcaagttaataatcatggacatgttaaagaatggaatcctctttttcttgtttattcgcatgtctgtttcttacagcattggtttgtctaaagactaaaattaacacgttatatgtttacaaaataaaaaaaaaggtaacatgctatgtagttttgtaattataattatgattatgatattgtaaaacaaatttggaaaatataaataagatggaaagagagaaaactaaaatagaataagactgaagaatacaaaaatgtaaaaaaaaaatcagaaacttttccatatatataaaattaagaatgtgaaaataagccaaaaacagataaaaagagagaattgggtaacaaaataataataattactcttttgtttaacgtaacggtggaaacagccttccctcttccctagtctcccacgcttctgtttcgcattttcccccattttctccggcgacggccaatcatcatcaaccgccggcgaaaacctcagattcgtgaatctgattcattcattccgtgattaag

SEQ ID NO: 4435 - DNA, 3000 bp, Unknown
  misc_feature (1)..( 3000): cDNA_ID_1824231_gDNA_ID_1620706_Annot_ID_165307 3000 nt of promoter + ATG
gcccataatcatcgaagtccatgaagcaaatgtatctctcattaaaattttcttaagagataacattagataggtcataggtgcctcagaagtaaagaaaaaaaaattgtgatacatcaataaaaagcttgattagtcaaaaagagacataggaaccacaggactagtcgtgagaaccggaacgatgaagagaaggattttgttgaaatggatcagacggtggtcctaatcagtttgaaatgttgattattggactgattagaagaagtagatgaagacagtttcatgttgtcatatctttgtgaaaatataaagaaaaaaagagttatagaatcctatatatatgttttatctttcatactatatggatgcatttggaagaaaaatgcaacaaaacgagataagttatgataatatattgcgaagaacgaatgtgggatttttagaggaagtgagattgcatataattatttatattcattaaaatgacgtaaaatcaattacacaataacttctttaccttattggcatttttccgtagaacaaacattacatggtcgatgatgtactcgtataaaaaaaaaaatcttttcagatatatatgtttcacttatatctcttcatataaattgattagatctcgcgattctactaattccatcaatttttctactaatctcacaatttgaaggttacaagatagatacaatgtcaagactcaaaagtatagatttttaagaataaaagaaagaaagatagaaaaagaaaattcatggaaagatttattgctctagagagtacggacgggtaccgtacggaactagacaactactagtaccttttcaatttatttattttaaagaatgaagacaacaaagatgacgatatcgtgtggggtattgactactgagaatcgttgttttgtttttccattcaaaaccattctgacacctaagtccaacacacgtgacacgtgacacatcctctcggtggttcctaccctaatggcacatgaccttccctctcccgtccccggaaccgggatccacatcttatctttattaacatgtttaattagtccctcaacgactcttttaattttaatctcaattcggatcctatttctttaataatagaaaacgatacaacgtttttgaaagatagataagttgtaatcaatatcaaaataattaaaaacagtaaaaagtaacaatacgaaaaatgaaagaaaaaaaattataacgtttttgaaattggtagttaaacggtaaatctcgtattgcagtaatataaagtgaccaatgggagtttatatgtttgacaatttgttttttgagattaagatactggtttattggtaaggtttacttatgtatggttgagctaaaaataataaactcatatttaaaaaaagaaaagaatttagcataaacataaaatcttctgatagtcgaactgaagctaaagaggggtgacaaaccatacttgaccaattataaatctaactaaaggtatgtcacttcttaaaaagcaaaccgtataaaattttcggaaaatattaatttgtacaagtgtgcttaacattactaaaaacattaacaaaatttaaaattttacggactctacaaaattaaagtgatgatacaaataacatggtgtaacttatctatcaatccattccaaaatgtcatttacgtgcacgtaacctattatagcttctaggtaatccctcaaagagtggctcctcccataattagtcccttagtatggatgagcgtatgatgagtatgacgaataagaaaccttagttaattggtttgattatgctctaattatcttttcttgcacgcttctttatctcttgacccattcacaaagattagttaattagtcagagaaattaaaatatatatatatatatattttaagaaactgtgtacatatatatcttctttttacttcattgatctttggtcaaatattgttgactgaatgctaagtaccgatagaggataattatgattctcaatttctcatcatatatagtaataaactatcaatatctctttacaacttcgccttaaaacgctaaaaagcttttggatcttgtctttggagtcttttggatcattttggataaaagatgcggccaaataaaaaaaggaaatcagagatataagatttgatatgtaatacaatttttaacaaatagagaaaacaattaagtagttaaaacaccttaccaaaaaaaaaattaagtagttaaaacaatacaatatagtggatcaaaggagagttacaggaaaaatttccgagtatttttatatatcgtttttgtatcaattacattagatgcagtatatctcgtatcatagtaataaggattaccaatccaaagtgtaggatgaaaaaattgtaatcagtgttgtccctaatagtactatccgtacgtatccatgtgctttcttggtaggtaatatattaaataacattcgatatctttaccggcatttttattaagctgcctggttagtagtaagtacgccattaatagtaatctctttaattggtctctaaatacacttttatactatttccctattaaaataaggcttttatgtttgttcgcctgacgcttgaaaaaatccgtcaaaagaaagaaaattgagtcttatttgttgactgtgtctcataataaggtagtgccactactactatagcggttttatcatcttctacgcttcgatttcgtcgtcctcctcccaacaaagtttgttaggaaacgaatactcgaacagccatttcttctctatttctcggtacggagtttcatccgttaagctttccgattgttccgtttctggtcaactattttggtgtaattttggattttcctttgttgtttcgcttctttttattgttgcttgagttctatcactatgctttcatggagaattcttggataatcatgctggtgttttatttcggtgcagtgcgatg

SEQ ID NO: 4436 - DNA, 3000 bp, Unknown
  misc_feature (1)..( 3000): cDNA_ID_1824235_gDNA_ID_1620706_Annot_ID_165306 3000 nt of promoter + ATG
tagaatccctaatccagaactatctttgtataatttttaagaacatcagtttcttggtctgaagtccatattaattttcttacatgcatgtgcagccaggttctttttggtctgcaatgccatgaagtcttccttgaattgttattttttttttagtttaaagtaatgtatatttgtgtgcattaaaaaaagaagaagcaaatgtttagtgtgaacactgtactacaaaataatttggagttgggatctttcaagtcaaaacctaattgaaaaggaagaaaacactggttatatctatgactttattttgggtcggcttaataacggagtttaggactttataatgtatacgattcatcttgcacaacaatctacacgtatgaaaactataattttaaatactaagtattcatctagatattctgcttatcaggaagatttgtttatcttttttttttttgtttatcttgaactcaaataaagacttaagaggatatgagaatcaatttagtgaaacaaatgttgtgtagataagatcctgggtccacagctttgtcaacaacaatgacttgtcatcgtctatgcctagcaagtattataatagattatagacaattatgagcgaataaaaatcactcagtgaaacatactattgaataatttagaggaatctttcgagaattcgaaagaggacacaacatgtttagctggacgatcttctaaggtttcacctatcggatcatatattacgaaaaagtgagagtaattattaattatgagctccaacaaacaagagcaactcaaatcaaaacttctggactagacgcagtaattaattagaaagaaaaagacacgacaattaaagagaaagttattctagaaattattggaacaggaaagcttcctctatatatttgcgatggaaacagaaaaaaacaatgaaacaaaaacatagccaaatgtttttaccacatgattttaccaaagcttattagatcttggttcttagactggcgagaaactgagagagatcggtggaggaaaaagggatgaaatatatagaagttggattttgcttcaattagggttttgatttgatgatttttttttactgaaacagaaactgaacggtgtttctaactgtgaattaggatggtgttaagatggcaaatattatatgtaaaaactctagcgtaaatatccaatgagatagctagttagatattgttttggcaaatgctaggtgtttttttggtatcatttcccctaagcatgtgtgtgtttaggtttttgattaaaactagcaaattctgtggactgcaatactcatcatatatgccaaacttcgaaatcacatcaataataacctcaataaatgtgaagtaactaaagtggaccctttgcctcttgtctttacatatgtaatcatccatttatgaacggaatcttatgaaatttatgaaccgataagtaattaattatttattttaatttatagtcttttttctaccccattggtaattttggaaaccaaatatccaaagcaacctctatcgctttacccccacccccatgcaggtatacgtacaaatgtgcaatttggtcggtcaactgggtcttagtcagtagccaaatgtctccaacattaaattgtaagagaagatggcaatatgcattcatattgtaacaaacgtatatgtcctctagacgggcgtgatctacctttaagattagttcaaaagcataaagtcgactgatagcacaaaatgatgtcttgccaaatgtgtatttcgggtagttcgatgtttttgggatcggcaaaagttatttgagaagacattcatatatatatatatttttgatttacgggagtagggtaaacatagaacaatacactttatagatatttatatatacaagagaaatgtgtttttaattaggattagctgggaaaaagagaggctggctctagatcttttatacagacacctaccgacttataattattatcactgcacatgcatgtggatcatatatattaaaagtaaattacatgcataacttacattaaaactaattattcattattcttgtttagtttttgatacttataaaattttaaattctttatccataaaactagaatttttttagaaatataccatttttactatgtgtatatatatatatatatatatatatattttaaaattgaccatatgtgttgtccattttcaattatacatatttcaaaaataatatatttaatgtctgtgacggcttatagtggttgaataatcattcatatttataaaatcttataattcatttagaaaatcttgtatttaaattttttttttataaaaaatcttatatatcgttatacataattgaaaatatacaatatatgcggttatttaaaaaacatattacttggatatttttgaaattcccccataaaagaagggattttttttgaaatagctacaaagaacataaattagaaagtatgttgactttattcgtaaattataaatgctagtagattttagagagaaaaaaaaaacgaaacctagtttttcttttacgcaaccgaaacctaaaattattaaattgataggtttgacatatataatataataattcgatcgaaaaatttgactacagaaatctgaaatcataaacttggtgtaatgtaaacatacatatctcattaaacaaaaaactaatatataaaataattgacttttgaaacaatatattgacttactagtgtaaaaatgggcctacctaaatccagctaactcagcccacacattaaaaagaaacgttaaagggaaagtaataaatgaaaatgagtcactcagagacagatgtctctatctttcacagccaaattcacaccattctttattttcatttttccccctttgcccagattccgacaaaatccactcgtttgattccaccactatatataattgagcggagaagcttgac

SEQ ID NO: 4437 - DNA, 3000 bp, Unknown; identical to SEQ ID NO: 4432
  misc_feature (1)..( 3000): cDNA_ID_2175536_gDNA_ID_1620706_Annot_ID_165283 3000 nt of promoter + ATG

SEQ ID NO: 4438 - DNA, 3000 bp, Unknown
  misc_feature (1)..( 3000): cDNA_ID_1824277_gDNA_ID_1620706_Annot_ID_48881 3000 nt of promoter + ATG
aaaagttcaaaatccataaacaagattagatcaaaacttcatttttttttaaattttttttcgtcaaatcagaacttcattttaattttgtgaaaacaattgaatcatcaacaaaacttactttgatcttcttcagtagttcatatccagtcatcccaggcatagagtaatccgtcattatcaaattaatcttcagatcctaaaatataatttcaaaccaaaaatcttttaacaccaaatttgaatggattctcactctcaaaaatattaaacacaatgatcagatttattacctcaaatccaaccgaactattattctctccatctaatccaagatattgtaaagctcttgtcgcactatcgacaacagtaactgagacagaacaaaactaatgtcagattcttgtacttaaacagattacacaagataaacaaacacaacacttttttttgataaacacaaacacaacagttacctttacaagatgagactctgagtaaccgctcgatgaacttccgatcaaccatactatcatcaacagcaagaacatgaagaagtttcggtgatgctaatgaagaagtgtcgttagagatatctaacatctcgggacgcaaaacctcagccatatcaagaagagtaggatcgtgactcgtgagagagatagagagaatcaactatgaggatttgattttgctgagagatgagaggagaataaatggatttataaaggaagaaagaaggagagggaaaagagaaaaatatgatatggggagaggattctgagagatctttgcatatctgtgggattttgtctgtctgatagcgcgtggctaattatttgtttattctgttttcttctcaaaagtcatattttcaaattttggctaaacttcaaataaaaataaaatcaaagtcataaagttttttaatattttttttgttgagaatagtcaagtaatggtgagtggtgaaatcatatgatatgtttgatttgggaagggaaataaaatcaattttggatgagggaaatcgtatcatgacgatctctctcgattattgttgtcaagatcatggctactttgattcatttctttttatttttgtacattttcgatactttcttgattttcccatttttcaagaaatgtaccacagagagaagatttgtatttcaatctacaaaatctttgagattgttaattaattaatgaacattgttggaaaagttagctgacatgtgaccgccagattgactatttgggcgaatgaatttcaatgttgatatctctagttgcgcaatcagataaattcaagatccgtatgtgtatatttctagaaacaaaacaaaaaatcattatttttcaagttattgttgtttgtccatctcgtaactgtaccataatagttgcctctactatcgatcgtggtcgaatggcataagattgatgagttaatagtaagttttcatgagtgttcaaaaaaaaaaaaaaaaatagtaagttttcatgaaaataaaatttcaattcacttttcttgaaaaatattcatatgtttacttgaattttaattcgctttttctataaatttggcgttcttttattcacatatttagcaacacgcatcgagtatttccacacgtgagagatcttttgacaattgatggaaggctttgtcacgacaggatcgaagatctatggactaaactcgaccaatatatttcaagaatggtaatgactaaatcatcattgaaagctgaaaatatgactatgatcgatgtatctctagaggagatatcaaatgaatgtgaggtactaggtgtatagagcacatgaccttactatatatgtcaaatttggtttggcttgcagagaaacggctcggatttctccatgatggttgtttatcagtatgtatatgcgtgtcccttcagagtaagtctacacgttttctctacttgtatatttggaaacaacatgagtttaccgatgaaattattgttttaatatatatgagtgttttggctatgtacatgagtccgagcttagtgtctatcatagtcaaagatcacaagatacatttatagaacttactattgtttgatcaaagaaattaagttaacaattcataaataaacctcttaacagtttatggcaaaaaaaagaaatgccagtaaaatttgttaggcaccaaaacattctataaagaataatcctaatggtctcggtttttacctctcaaatagtatgagaggctgaagacaaatatgctttattggtttccttacaaaaaccaacgaactttcgtgttaactgtctatgtgatatgaattggtacatgcatgttgttgtattaggttcttttgggacatctgataaaattgggaagatgttagcatggtctaaataaaaatgttcttgtattatacttaaaaaaaaaaatcttttctttgtgtgtgtctcaatttcactatatgacaaaggaaaatgttataaaatgagaatcaataagctaatatatgattattcaaaattatattcggggtccaaattttgatttctctacgtacgtaatcttttgatatagaaattttaagttatggattacaaatactcgatttattttatgaattctcctattctataaataatcgtgagtaactgaattacttatattcaattgttattcatcattcattgattatatatctgaaattatttaataattatctataaatgtacaagattattacagcttacaattttgtttttgttgcttagtgaatttacattttagacttttttttttgtcaaatacattttagactaaatggtgttttcttttgaaaaaatcatatagtttaggtcgaaccgcgaactcgagagagagaaaagaaaaaaggaagaaaggataacacaaaacctctctctatctctctcgtcttccaaaaatcgagcactacacattgactctcttctacaaagagtctggtcacactcatg

SEQ ID NO: 4439 - DNA, 3000 bp, Unknown
  misc_feature (1)..( 3000): cDNA_ID_2992453_gDNA_ID_1620706_Annot_ID_48883 3000 nt of promoter + ATG
tcttcattagcatcaccgaaacttcttcatgttcttgctgttgatgatagtatggttgatcggaagttcatcgagcggttactcagagtctcatcttgtaaaggtaactgttgtgtttgtgtttatcaaaaaaaagtgttgtgtttgtttatcttgtgtaatctgtttaagtacaagaatctgacattagttttgttctgtctcagttactgttgtcgatagtgcgacaagagctttacaatatcttggattagatggagagaataatagttcggttggatttgaggtaataaatctgatcattgtgtttaatatttttgagagtgagaatccattcaaatttggtgttaaaagatttttggtttgaaattatattttaggatctgaagattaatttgataatgacggattactctatgcctgggatgactggatatgaactactgaagaagatcaaagtaagttttgttgatgattcaattgttttcacaaaattaaaatgaagttctgatttgacgaaaaaaaatttaaaaaaaaatgaagttttgatctaatcttgtttatggattttgaactttttaacaggaatcatcagctttcagagaaataccagttgtgattatgtcttcagagaacatcttgcctcgtatcgataggtatattctactataataatcttaactatgatccttaattcttgtttaggtcaagattatgtaggaccaaaatttaccaaatatagtagattttgtgcatttattacttcaggagatggggatgattagatttagagggtattgtttgtttaggaaactttttaaagtaatcacactaatttaggatttgtgataaagttaccgttaaaggatatgtattgactaaattaaattgttgtataatcacaagattttgttatgatagaaaaggttattatatgattactttttaactatcatggggttaactttggtggtggttgtatatttgatcaagctgagatttggtgtttattttagtgggtcctaaaatgatttttaaaatggatcttaggaataataaaatttatcttgtggccataaatttagaaaagaataatccatcataagttaagcaagatcttctcttgagatttgattctatataagccggtgacatgttaggccctccaaaactttataatatatgttttaattgtttgggttgcataatcttaggtagggtcatttataaaatcccaatcctcgtgatagacacctcacatgcctttgcttattactaaggaaccaaaccctctttaccagattaagtttaatgattatcatatatgagctggccattttctgtatccaaagttataaactttatggaattagatcactaacatttggttccttatatttattcagatgtcttgaagaaggagctgaagatttcttattgaagcctgtgaaattagctgatgtgaagagattaagagattctttaatgaaagctgaggaaagagcttttaagaatattatgcacaagagagagcttgaagctaatgatatctactcgcagctaaaacgcgcaaagatctgagtttatcagattccacgtacgatatgttctttaaaagctcaaagattcacacacatgcatgtcctgattctttcggcttacaatttttgagacattacggcttcttttgctgatagaaccaagactgatcaagagtgacaaagatgggtttttataagatagaaatgtaaattgtagacttggattcattagagaggagaagagatacattttttttttctttacatgagagatatgtaaaatggtggtgtgttattttggaagttaacatatgaatttcttttgttaagattacttaaataatgatttaggaatggattagtagtttagtaccgttcattacacgaagacaagctaatcttttgtctaattaaaataaagctgtctacatgaatcgaatccagcgagataagttagttattttaagcgttggttggaacactttacatggcttttcgtagaaatttccccaagttgggttttattaagaccaagaaaattctagtctcctagacttttttttgtttcttttgttaatttagtctcctaggctttttcattctatctgaaagcaaaatatggttatgcaatttggtttagccaaaaaaacaaactaaatttttctagtccggttcatgtaacttcataatcaaacaagtaaaagtcgaatgtgacgcgtcttgccgaacgcaaaaacggaccaggcaagaaggtgtagttagttaattcggttaatattcagctgagagaaatcgaaccggttccatatcttgtagattatccggtttactttccggataagatttataagcaaaacagagttaaagtagtagatttcttctatacgagaccaaatctgaaaacccaagtcaagctacaaaaacttaactccaagcgaacaaatctcctcattcattaaacaacaaaattgttttccgacaaaaaagtgaatatcattgagttactgcgaaatcccaaccgagagtgacatctcaaaccaaaagatggagtctatattaaagagacgaagactccaaagtcaagctacaaaatttccaagcaaagattacacagagaaaactttccgaccaaatgtgaatgtttatgaaagtttctgcgaaactccagtcatgtcggatgtacaaagccatacaccaatgtaaaaccgacacgtggaaagctaagattcctagcttttctttcttcatgagtctccaatagccaaagagtcaactccaaaaaaaaaaacccatttttgcattgaaatggtctcatgatggggtattttgggtaactaattagtcctgtctacatcttcccataaattaacagagtaggagcggattaaagaagcaagacgattcaaaagaaaaaagagagaagaaagtccactaaagaaaagagaatagatatagatca

SEQ ID NO: 4440 - DNA, 3000 bp, Unknown
  misc_feature (1)..( 3000): cDNA_ID_1824269_gDNA_ID_1620706_Annot_ID_48886 3000 nt of promoter + ATG
gctgctaaaattaggaattgaattcatgccactaagaatactgttagggctattagaaagtgactcaataaagctctcatgacgatgtgttccattgttatcctcatctaaattctccaccggacgcggaagatctctctgatcaggcttttcactcccaattcttcgattggattccatttcctccttatcccctttgttaatcatcgcaactaataacaacaaaaacccaaatcaatataaacaaaatccacatgtaaagatagatcatttaattttaccttgagaaagccattgttcacgacgaagacctagcttgctctgtttcaatttggccgacctgttcgtctgcaaacccaaagagtgaaatcaaatctttgaagagagaaatgagatttgaggaaggattgaaaacaatacccttttcttttttccgaaatccctggcggttggagctgaagtagcagaagcgttggtgatcgaatcagaaatcatggtggttgcagatgattccaaagcaacaacaaaatcaaatacaaataaatttcaaaatcacgaaatgaagatttctcaaaaaccctaatacagatttgttgcgagagagaagaagaagaagaaacgtgcgattttttatttttttttgctttgtttgttgtgtctgtgagagaaaacgagagagagagagataaaataaggggataacggaaactcctcgtctccgcacagaactttccttctgactaaagtaccctttcttttgacttttgcacacgctcgaatgtaggggtggttttgtaattgtgatggatctacacgtgtgagaaacttctgttcatttaaaaacggtggcgtacggtggactacacgtgaggatagttcatatgattcacaaatatcagcgagcttctagatcaatcagctgggtttcttctggttacagaaaaaattaaatgatttagaaaaacatcaaaaccacaaagtcaaagttgtgtctctttctttcaatttgatgaatcgatcaaacacatttttatcttatattttgatgtaacaacaaaacatgaaattaaacaggttaaaatagcttatgaaaattggtattagggagctaggaaactgcagatgagagttgaacaacatttaggtaagtttttaactaagtcatgattagtttattgtattttgaacattaacctgcaaaattaattactactataataagaaatcttaggtagcaacatgaaaaaagtaagaatgctaattaacaaattacattaaattttagaaagaaaaaaaataacatgttaaacaatattttttattgcatcaacatagttctaagttatgaaatgacataggatgataaaaatcgattttagtgaaatgacatgtaacttgtaatggtgaatcagttacatggtttaccatactttagagtgtatataacttcaatcgatcagtgaaccatttaagattacgtaaagatacatcaagtgcattaagagagaccaattgatctactcgacacaaacagagagtataagctagtgtctaagattgaccgataaataataataatacaaggatttggatttaatccttcaagccactctaacaattccaaaggcatgaagacagattatcaacatgaaaagctgaaacatgtggaatgttttttaattccacaattgtccaaaaaaaacaagcttttatgactttattacaagctaacacactgttcaatatgaaatcaagaaaagaatgaaaaaaaactgaaattaaagaataaatcctactcgaaatagacaaaccaacacgatggttcaaaagaaaaggtgaagttgagcagaatctgacttaacacaacaaacaaacaaaaacccacagaataatattcgggaatctacctgaaaaagagagcaagacacgcatcaatggaaaaagacttttatggatcagagatacaaacagagttttgatatgttatctcacatcaattgcagttcttgtgtacaaaaggtaacgccacacacactctcgatgaaagaaagagatttctgagtaaatggaatattaaaaaaagtatgtttgtttgctgcaatgcaaaagtcgaggttaaattcaaaaagcaaacatatacatacacatatgtgtgttacctttttcctagacaacaactgatcaaataaattactttattattagtatgaagtctgaactaagcattttccaaacagtttacattggctaatcgatcgaagtaaacgaacaatgtccagtgagcttaattatgcactagtgactagtgttataaacttcaaagggagtccaaatttcagcttataaaacctcgtaccgaattatgattatattagcgaaactggttttgggttaaaaacataacacatgtttatatagatagatattacatgctaacaactcatgatgagtagtaatgtgcaatgttagaaagtatggttcgttttcagaatccacctaacggttggaataactcgaaatgtacccatgagtttcctatctatatttagaacgacatgcataatcttgattgtgacactcagtaatatttctctctaacccgacccgacccgcccgaactctcccaagttacctttccccttttcgaccgtttctctctctctctctattctcttcttcgatttattggtgttttgttcgcttacgcgatttctcgaagaaaaattctcgtattcctggatcgaaacaaggctgattcggttactcgctgttgctgttgttgattttggatctgtgttttgttatctgcggatcgggaaattggaaaaaaacctagatatttgagccatttcgtcgcgaaattaggtttttttttttcaccggtgggtttttggatctaaaggtatcgaatattgtctggggaaaaaaggaattttgaggatttgtttgattttcgctgaggaaattgatgttgttcgaaggagaagatgatagaaggct

SEQ ID NO: 4441 - DNA, 3000 bp, Unknown
  misc_feature (1)..( 3000): cDNA_ID_1824265_gDNA_ID_1620706_Annot_ID_48887 3000 nt of promoter + ATG
cgaagccattctaactcaacaaaagcaaataactttcaacgaagaaacgcacaaaaaccagagagattgtgaaatagagagataaaatgaagtgattaacatgaggaagtgtggagaatgtacttcatgttatttttgaaaatctcaaatctgtagtcttttagatcgagcttcacaggaacatgatgatggcttgtccacctgctgtatagctttagtaatagatggatgagccaccatttggttccaatgaagctcgacctaaaagaaaatagatatgaagttttcagaaataacgcgaagttgttgggcattcgctgctaggcacctattgaggggattaactacgaaagtacgacccagttggtgatgttttctgcacaagaactaatttctgcagacaaagtcaccaccaagtttggcactcaaattcatcaagaaaaatgcaacccttttaaaggcacaaaatgtgaggtaaccatctatcaattcagatatgtagatgtagatctttcaacgaggcagccttatcaacgctattgcaatccggctttttttatcaaccacacattaattaaaagatgattccatgattggttacccaatctggaagaaaagagtttagatacgtaacttcagaaaataataatttagaaaaacgcggtagacaatccgccctaatattactcaaacgagaaatagaagatatcgaaaaagaggaaaaatattacggagcgatccaaactcatctagaagattggagaaagcgtgtcattcttcaagagactgcaccatcgagactagctctgtgcaatctgattcaaatgtctggcagtcgatccttcgtgaaaggatattcttcataacccaaattaaagcttccagctccgagtgaaggggagaagggctcctccagaggcactttgcacataagagtactgtttgatcaattccttgaaaacaccaccatcctaatcccatggttagatccgaagatttccatgatccatcaaccctacatctaatagaatgagtcagttgatccatagacaccctggtaacattcgattcaatcggttccagttgggccgcatcccacaataattgttcactcaaagcgacatttagaatatctaaaggttctgattgtaaacctttgaaaacctttttattcctatctttccaaataaactataaaatccatgcataaaagttatttccctctctctcatctattggagatggtaatccacaaaaaaagtaatgaagatttgaaaattccgaggttaaaggaaagcttcctgctattacaggaatcgaagacatttcccagacttgtcgagagtgaggacactcaaaatctattttttgtagtcaatttttaaaaaatatagtcagcctagtataactattcatgcttatggatatatttcgcaaggagtgatgacgaaaaactctggaacggatttgaactacgcaatgcctttggtcaagtacgggatgaggcagaacgggatataaatattggatagctaagaattcgtatagtccccaatgtggagaaggcgaatatattaggatcgagagagggattgctgattcaaacttggttacagaagagagacagagatgttgttaggattaaaacaaaattggttacacaatatagtgcgaccaaaaaagaaaaacatgcaattttacaaaatatggttgaaacaaaaggcccatgtcttttggtcctcaaaaactatttttgtgaattcagttgatgatacaaaaatagaaattcggtaaaataaacaatgatgcggttagatgtggtaagagataccgattaaatataacgacatgataagaaaaaataaaaatggactaaaaatactattaattttaaaaagaaaacaaattttgacagcaacattaaacataacaattttgctgtggattcaatggatgcttggtttcgttttgacggtaaaagaacaacttcgttttttctaaaggggcataaggttttgtgaaagaattataaaaaaaaactgttttgccaccatttttgttaatcgacttatcatatagcacttgtttttactagtgatatgcaatattacaactttttgtggaagaatatacaaacacacaaatcaaaaatccaagtagttattcatctaacttatttgtagttgatgaatggttatgtgtggttgagacaataaatataaccaagttgtaccgaatgaattggccatcactctattttaaacacaaaacagtgactatacacaatttcttaaacccgattgaaaaataatataaattggacaattaaaaaaaaacttctgacaagttttttggtttatttcggttcttcaaaccggcttgcatagaatcaaattttaattgtaaaacaaaaacaaaaaaagtaaagtcaaaaggagtaaggaaacgtggtcaaaaccgtccgtcactcacccacctcttaatctctccagtccctatgtcacctgaaaaagattggagatgacgtcacgcccatattgttttttcatttaagtcaccgcactgtcacgttatctttgccccttccatccacaactcctctctctaacccgacccgatccgcccgaactcgtccaagtcacctttcccctttttcgccccgtctctctctctctctctcttcttcgatttattggtgtttggttcgcttacgcgatttctcgaagaaaaaatctcgtattcctggatcgaaacaaggctgattcgattactcgctgtcgctgttgttgattttggatctgtgttttgttatcttcggatcgggaatcgaagccctagagatttgatccatttcgtcgcgaaattaggttttttttttcaccgataagtttttggatctaaagttatcgaatattgtcagggggaaaaaggaattttgaggatttgttggattttgctgaggatattgatgttgttcgaaggagaagatgatagaaggct

SEQ ID NO: 4442 - DNA, 3000 bp, Unknown
  misc_feature (1)..( 3000): cDNA_ID_1824255_gDNA_ID_1620706_Annot_ID_48891 3000 nt of promoter + ATG
tcgctttaatggttggaaccggttattactacggtgataatccgtggaagaagtgagctccaactacttgttcgttttcacataattgagatgacactcgggaaatctgcgggcaaaggtgtgtgtgctctcgctctgagtgtagaaatatgcggtcttgctaggatttagtaagggtacattacatgatttgaataatttgaagaacgaacaagtatcgttgtatcttgatcaattgattagattgatttaaggaaattctccgaaaaccatctttactctatctgtcaaaatctcattatctttctgccgacaatctctgtgttgtttatttacttacacttatgtttgagttttgacttcttgaaagatcctttgagaaacatgggacaatgcattatcacatagactctattatcaaaatatataatggcaaataagtgggagtgaagagactatgtattagaaggcaagctatgtttaatgatttcagaacatcttagtggaagacaatggtgggcctaatagtttcctaatcatattcttgtgtttttttccagcttattgtggttcttgaccttctacatgtgaaatcctaattacatttttggtctttttagtcaataatggttatggtttagctaataatcatgccaccaagacataaagatgggaccaatgagaagcttttggaatgatacacttttaaagcgtgtcttgatgtttgaaatctcatgactatattttacagtgactgatcactgagctatactcaaaactgctttttctcttcaaacaccaaaatgtgtaggttacttttgtctgaaatccatgaaactgaagctctttcacctaaatcttcatctgcagcaacactaactcttatgaaccagaaagatccatcttcaagctctatagtgtctgttttatgtttagttatctctggtcttgctcttatcatcgtcttcctcggtgtcctctacttgatcttcaaatttctccgcaagtcctcgactttatttcccattccccatttcaactacaacccagatctcttttctttctcctcgcctcagctccagcacctgttcttcctccatgactctggtctagaccagactgccatcgatgcacttccagtgttcctctatggtaatgtaaccattagtcttgaacagccattcgattgcgccgtatgtctcaatgagttctctgacacagacaagctcagactactccctgtttgtagccatgctttccatctacactgtatcgacacatggcttctttcgaactctacttgccctctctgcagaagatcactctcaacctcaaacgtctgctacaaccactcggagactcttgtcgcccccttgtctgggcatcagcaggtggatgacggcaaagcctcccttgctaaaagagttttctctgttcgtctcgggagattcaaaagcacgaacgaaagtcaaagtcaacgacatgatgtcaaagatgaaatcggggtaagaatgccaagaagatgttactcgatgggcacgcaacagtatctcgtatgcgatcaagattttgtggtggctctgtcttcgtctcctcgtgagggaaatatcggtcggtaataaatgctccattcacgagggtgattcggtataacaagactctggtagttggggtaggctctaatgttttgtagtgaaaagagagtatgtctatgtcaaagatctggttttggtcggagaagaagagagttctgtttattaaacaaaaataggtggttttttggttgcatcttagtcttccttgttacttactacagacatgaaatcgttagaacacaggaaaattatagaatcaaaatattagaccgtcgtgatacatttacaagacacgttgaaagaggagtaactttcaacgataaataataaatcaaaccaaacttaacttttaaacaaataataaacaaggaggaaacgcaactcatacgagagacttttcaaacgcctatcgtcgaactcgtccgaagagatatcatttcacggcgtcaacgctgataacagcgggagatttacctgaagcaacggggacagaagcgtagcgcatcgagaagcttctgactccaccgactccagcttcgtcgtcgtcgtctttgtcttcatcttcgaaactcaaagtgtaactcacaggatcgtatcggaatttgtcactatcgtcccagtcttgacctcggcgtggatcgcggttgaatctgcggatgaaagtcttccaccgtggcccagccacgatctccgaccattctcggatctttagaaacgctcgcacccaccaccgtggctcctggtggttgtttctgtgaattcgctgccaccaggaggatttaacggtggtggaacagcaagacgattcaccaagaagcggattcgcttgtccaacttccattacaaaagggtcgaaactgagtttgaagggttttggtgtaatagaagccaacacgaaactgtttttttagctgtaatcaaaccattggctgcaattttatattttaaacaatcatagaccaagtcacatataagtcataaaaattgtattgtcccctacacataatattcaaattacttttaaacatctcgatcatgaattttattacgaataacctaattaaaaaaaaaattgtatacctagatcacatctttttcattaagtttttgaccatcgagcaacataaatagtcaataaattgatttacgatcatcatcttttgttttcgtataatactctctgttgtttctttgtatgtgtctttaataaaattaattttagacgacaaaaacaaaatcagctaaactaatgtttaatatttgtcagtaattaacttttctatcaacgaaataatttttcatagacacaggctctctcctctccttaattgtctccaatatggtctcattcttctactcccacaaatctctcccttccataacttgaaacacacgcaacccccaa

SEQ ID NO: 4443 - DNA, 3000 bp, Unknown
  misc_feature (1)..( 3000): cDNA_ID_1824251_gDNA_ID_1620706_Annot_ID_48892 3000 nt of promoter + ATG
tcacttcctctcctttctttgataaatacttctactgcctttggtggggtctccgtaacctcaggttggttgatattcatctgtcttaaaacaaataaaaccgctgcttttggcgacttgttaactgatctttttttcttgatttggttttgtgtagttcctatggacagagtcttgcagcgagtacactgagcagtgagactatattcagttgtttcatttgtgtcgcgggtcttgttttcttctctcatctcattggaaatgttcaggtaaaattcaaatgaaaattagctctctccatagtttttaatggagtctaagtgatttctctgctttttgaagaactatctgcaatcgacgactgctaggttagacgaatggagagttcgaagaagagacacagaggaatggatgcgacataggcaattgccagatgagttacaagagcgtgtaaggcgattcgtccaatataaatggctaacgactcgtggagtcgacgaagaagccattctacgggctctaccattggatcttcgtcgccagatccaacgacatctctgtcttgccctcgttcgccgtgtaagccacaccagaataacaccacatttccattacgttccactcaagtaagaaaccctaattttacgttcttttaatttttcaggtgccgttctttgcgcagatggatgaccagctcttggatgcgatatgtgagcgtctagttccgtccttgaacacaaaagacacctatgttatacgcgaaggcgatcctgtaaacgagatgcttttcattattagaggtcagatggagagttcaactacagatggtggacggtcaggattctttaactctatcacacttagaccaggagatttctgcggtgaagagcttttaacctgggctttagtgccaaacattaatcataatctaccattgtccacgagaaccgtaaggactctctccgaagtagaagctttcgctctccgagcagaggacttgaaattcgtagctaaccaattcagacgtcttcacagcaagaaactccaacatgctttcaggtaatcctcgtatggtctcataagcaatataggtttcttgcttcacacgctataaggtttcttgatctttatgttttgactgtaaccagatactattcgcatcaatggagagcatggggaacttgttttatacaagctgcttggaggcgatacatgaagaggaaattagcaatggagttagctaggcaagaggaagaagacgattacttctatgacgatgatggagactatcaattcgaagaggacatgcctgaaagtaataataacaacggagacgaaaacagcagcaataatcaaaatttgagtgcaacaatattagcgtctaagttcgcagctaatactaagagaggtgttttagggaaccaaagaggatctacaagaattgatcctgatcatccaactttgaagatgcctaaaatgtttaaaccagaggatccaggattcttctgatagttgttgtgacaaatgcatttaggatttctgacactaacttgatttgctgtaaccaatagtcaggtatacaaagaaacattattacagattgaagtaattgtgacttgacgtcggtcgatattatgtcgatttctatccaacgcactcttggctcctacagcatttattggtacacaaagtgggctttgaaactcataaaacaccttgtgtttaagtctaattatgttttcacataatttaggtgaattaaaaaattaattaattataaattgaatttgggcaatgaccatattttggtcaaaaataatgagaatgacacttataaaagaaaaataaaggatatagtcatagactcattccactatttgattggacgaaaatgatttttgattacacacttcaacttgtatttttcttcgtctacatgattttgtgcaaaccaaaaaaaatatgtaatccctttcagtttattgcttgatatttttaatatataaactgattaaatctcgcaatcgtgtcaaaaaccatatatttgtcatttatgccataatttaattttaaagatgaatatgtgaatatagaatgaaatctgaaaataatattgtaaaaagcacatagaaaaaaaccacctttttctcaactttaatcattttcttgattagtaaccttttggagcagtagaattttctcattgtattcaaatggtacgaattaaatcttcttattaatagcagatgattttttttctttatttgtcgaaagatttcaagggacaaacatcacaatccgcaaagtaacctatatttacaagaaaagatgaaaaacataccaaatagatgacacaactaccgcttagaaaacgacttcacaccataactagcaacttttgcatttatatagatatttcctttattttcattataatttttccacattgccacaaaaaatgatatccacaattaattaattttaatttgtagttggatctaaatctaatatgaaagaaaaaagaaaaaacatattgagtctgaatcatatggatacacataccaaaaaatcagagatcacggcaagacaactttttgtcttatcttttagttttttatttgtcaacgttgtttgttgtcttactaatttattttaattattttttcccgaatctcatttttctaagagggaaaaagaaaaacatttcttttttctcttatgcaataaaaatcgcttcttttgtctttgatattaggaaacggacaaatcagtctagtcaaatagagccattcaaagtacggcaacacaaaccaagagagtgtaagttaagcgacatgtgttagagatatccggagatctcaaccgttggattctttctccttcaaatcaaattataaatcccatcaaacagagagagagagagaagaggaggagaattcgaagaataaaagataagaactttgacgttttgaagcttaaagcttgaaacttgtttcatcc

SEQ ID NO: 4444 - DNA, 3000 bp, Unknown
  misc_feature (1)..( 3000): cDNA_ID_1824247_gDNA_ID_1620706_Annot_ID_48893 3000 nt of promoter + ATG
cacattccttccttccattaagaagagtttagcttttctactttgttgattggttttgtgatttccgttttcacaaaaactttgtatagatcgatttgaagcaatttgagaaagtgatgaagtacataaagtcaggtatcgaaagcaatgctactcttgaatgtggtggtgatcagattggagacaaaggttacttcatccaacctactgtcttctctaatgttaaggtaaaaagaaaactcttctaagacatctttaatgttcttctattaccgattctccatggcattaatctcgaacgcttggttcaactacaggatgacatgcttatcgctcaagacgagattttcggtccagtccaatcgatcttgaagttcaggtatatagagctaccaataaaactgatccagtagacaaataagtcacaatttggtaaaaatggctgagttgttagagatttggtaaactgaaactaatttcgaaccaaccaaacctaaactttttttaaagataaatgtattcaattaaaaaacagaaaccatgatagatttggtttaacactggttatgatgttgggttcagtgatgtggatgaggtgataaagagggcgaacgagacgaagtacgggctagcggcaggggttttcacgaagaatctggacacggcaaacagggtttcaagggctttgaaagctggtaccgtatgggttaactgcttcgacgtatttgatgcagccataccatttggtggttacaagatgagtgggaatgggagagagaaaggcatatacagtctcaataattacttgcagatcaaggcagtcgtcactgctctaaataagcctgcctggatctgatctctggagtgtggtttcagcatcataaatgctcaaacaaaagaaatagactctataaagttacaatagtaataattaaggtcatggtttgtaatttgagtaacggattgtgatacttctaataaatttttcattgttgtttattcatcacatagctgttgttacactgagacttgtgtgttcattttggttttgcaagatttctattgaaactgaaaacaaacatgaaactgaaaaatgcaacgaaaattagaaaatatatatcttaaagtaattaagagttaaaactcaataattaattaaaaacttttcagttgtttaaatatatactctgtttctatataaatgtagtttaagagtttttatttttttcaaaataagtgttgttttcaactttctatacaaataataaatatttaatattttaatcaattatatttaattaataatatttttatataaaagaggtagattaaatgagactttcatgatttttttaatatgtgtataaaaaccttaaactaatatgaaacaaaggaagtagttgttaattattaaattcatatacagtatattcttagaataaaatatcaacataaaattgatcacaagtatgaaaaaaatactttttattaaaaggtttatcagataaatatatttttccttttgtaacagacaaaaaattatactaattttgaatatttattatatttcttaataaatttcgatacaagttttctatttaaataatatttttaacatgactgaaaaatgttgaacgcatcagaagtgaccaaatcgtgaattttaacttgttcgtcagccagaagtttccgtttctctttagtttcttcatcgcgatttttgctacttggctccaaaatccctcctttttcttctttctcacttgcatcattagctcacgatttcgagtatcgattcaaccattttgatcttcaatctatcttagggtttctccttaattcttctctcggattttagctcttctcgactattactcacctctctcatggcgatgagaggtgtcgatttcaagtggtgagctctctctctctctctcttcaatcttcattcacttgggtcgatctaaaggggacggattgcgaatttgattatcgattcccattttttttgagttttggggttttctgatttttgtaaattgtgcaggtacgatgggttcttcttgtcgatgcttgcgactagtgtgtatccttatgctacttggattctgtcaaatttgttttttttctttttcggttttgttcttgtttggatcgagctgagaattctcattcttaaagctaattctccaccattcgatataagatttgatgatcgagatacagttggttaatcagaagaaaaaagtttatttctttgaagatccgattgattagttttggttcttgtgggataggtgaactggattttgttttattagggtttaaggtgatctagataacctctccatttcgtttccttaatggttattttgcgtcgtagaatcattgtagctgtcaactggaacagatatcgagcttgtgaatacccgttgcatatatggattgtggtagctgcctcagttctattctttttgttgctctttcttattatcagtttcagtttcatttgtgtttgtctcctatgacttcaggtcgattacaccaccgtctttatcttccgtgtcttcatgtttgttgacaatggtcttgcttctggacttggcttgtaagttccatctaaatctccctagttctagagttacaatgagttttaaaggtttttactttttggaatcttccccggtttcccagagttatctgaacaagttttttttttgcgtaaaattgtctttgctatccttattccttagataggcgtttaattcattgagaagtattagattatgataaatataagctatttgggaagcatagaatttctttgtagctccagtcgaataggctcttctagttgcaagctttatcttagaagtagctagttgcaacgtttctctatctctctaggtagcaaattttatgaatatatggtttcttatgtcacattgatttctggtatgaacatctgttagggattttggaagtcaacagcggaacgcc

SEQ ID NO: 4445 - DNA, 3000 bp, Unknown
  misc_feature (1)..( 3000): cDNA_ID_2051288_gDNA_ID_1620706_Annot_ID_165300 3000 nt of promoter + ATG
atttggttgagaaacacagcgaagagctcgcgtctctagagacatgggacaatggcaagccttaccaacaatccttgaccgcagagattcccatgtttgcaagattgttccgttactatgctggtatcataaaacgaacttaaatcttgagaattctggtgcttttggtgttactttctgtgaatgaacattcttggttttgctttgatgtgtaggatgggcggataagattcatggactaacaattccagctgatggaaactatcaagttcacacattacatgaaccgataggtgtagctggacagatcataccgtggaattttccacttttgatgtttgcttggaaagttggtcctgctcttgcttgtggtaacaccattgtcctcaaaaccgctgagcaaacacctctcacggctttctatgctggaaagcttttccttgaagtaagatacatccgatagattctcctattgtcttctctaggaaaagaaaaactttgatgagtaacaatgtttcttgtgaaatttatgataggcgggtcttcctcctggtgttctgaatattgtttcgggattcggtgcaacagcaggtgctgccctcgcgagtcatatggatgtagacaaggtagatatatttatttacttgctgctaacttctttaagaaactaaattatcttacattcttctttttgcttcagcttgcttttacaggatcgactgatacggggaaagttatacttggattggctgctaacagcaatcttaagcccgtaactctggaacttggagggaaatcaccgttcatcgtattcgaagatgctgatattgataaagctgtagagcttgcacactttgccctcttcttcaaccaggttttgtcaatagtagaatatattcaccttgagctaagctgactcattttcctagctagttcttgagataatgttgagtaatgtttttgtaggggcaatgttgctgcgcggggtctcggacatttgttcatgagaaagtgtatgatgagtttgttgagaaatcaaaggcacgcgcattgaaacgtgttgttggtgatcctttcaggaaaggcattgaacagggtcctcaggtaacacatacacattccttccttccattaagaagagtttagcttttctactttgttgattggttttgtgatttccgttttcacaaaaactttgtatagatcgatttgaagcaatttgagaaagtgatgaagtacataaagtcaggtatcgaaagcaatgctactcttgaatgtggtggtgatcagattggagacaaaggttacttcatccaacctactgtcttctctaatgttaaggtaaaaagaaaactcttctaagacatctttaatgttcttctattaccgattctccatggcattaatctcgaacgcttggttcaactacaggatgacatgcttatcgctcaagacgagattttcggtccagtccaatcgatcttgaagttcaggtatatagagctaccaataaaactgatccagtagacaaataagtcacaatttggtaaaaatggctgagttgttagagatttggtaaactgaaactaatttcgaaccaaccaaacctaaactttttttaaagataaatgtattcaattaaaaaacagaaaccatgatagatttggtttaacactggttatgatgttgggttcagtgatgtggatgaggtgataaagagggcgaacgagacgaagtacgggctagcggcaggggttttcacgaagaatctggacacggcaaacagggtttcaagggctttgaaagctggtaccgtatgggttaactgcttcgacgtatttgatgcagccataccatttggtggttacaagatgagtgggaatgggagagagaaaggcatatacagtctcaataattacttgcagatcaaggcagtcgtcactgctctaaataagcctgcctggatctgatctctggagtgtggtttcagcatcataaatgctcaaacaaaagaaatagactctataaagttacaatagtaataattaaggtcatggtttgtaatttgagtaacggattgtgatacttctaataaatttttcattgttgtttattcatcacatagctgttgttacactgagacttgtgtgttcattttggttttgcaagatttctattgaaactgaaaacaaacatgaaactgaaaaatgcaacgaaaattagaaaatatatatcttaaagtaattaagagttaaaactcaataattaattaaaaacttttcagttgtttaaatatatactctgtttctatataaatgtagtttaagagtttttatttttttcaaaataagtgttgttttcaactttctatacaaataataaatatttaatattttaatcaattatatttaattaataatatttttatataaaagaggtagattaaatgagactttcatgatttttttaatatgtgtataaaaaccttaaactaatatgaaacaaaggaagtagttgttaattattaaattcatatacagtatattcttagaataaaatatcaacataaaattgatcacaagtatgaaaaaaatactttttattaaaaggtttatcagataaatatatttttccttttgtaacagacaaaaaattatactaattttgaatatttattatatttcttaataaatttcgatacaagttttctatttaaataatatttttaacatgactgaaaaatgttgaacgcatcagaagtgaccaaatcgtgaattttaacttgttcgtcagccagaagtttccgtttctctttagtttcttcatcgcgatttttgctacttggctccaaaatccctcctttttcttctttctcacttgcatcattagctcacgatttcgagtatcgattcaaccattttgatcttcaatctatcttagggtttctccttaattcttctctcggattttagctcttctcgactattactcacctctctc

SEQ ID NO: 4446 - DNA, 3000 bp, Unknown; identical to SEQ ID NO: 4443
  misc_feature (1)..( 3000): cDNA_ID_1824251_gDNA_ID_1620706_Annot_ID_165299 3000 nt of promoter + ATG

SEQ ID NO: 4447 - DNA, 3000 bp, Unknown; identical to SEQ ID NO: 4442
  misc_feature (1)..( 3000): cDNA_ID_1824255_gDNA_ID_1620706_Annot_ID_165298 3000 nt of promoter + ATG

SEQ ID NO: 4448 - DNA, 3000 bp, Unknown
  misc_feature (1)..( 3000): cDNA_ID_1824265_gDNA_ID_1620706_Annot_ID_165293 3000 nt of promoter + ATG
gcacaaaaaccagagagattgtgaaatagagagataaaatgaagtgattaacatgaggaagtgtggagaatgtacttcatgttatttttgaaaatctcaaatctgtagtcttttagatcgagcttcacaggaacatgatgatggcttgtccacctgctgtatagctttagtaatagatggatgagccaccatttggttccaatgaagctcgacctaaaagaaaatagatatgaagttttcagaaataacgcgaagttgttgggcattcgctgctaggcacctattgaggggattaactacgaaagtacgacccagttggtgatgttttctgcacaagaactaatttctgcagacaaagtcaccaccaagtttggcactcaaattcatcaagaaaaatgcaacccttttaaaggcacaaaatgtgaggtaaccatctatcaattcagatatgtagatgtagatctttcaacgaggcagccttatcaacgctattgcaatccggctttttttatcaaccacacattaattaaaagatgattccatgattggttacccaatctggaagaaaagagtttagatacgtaacttcagaaaataataatttagaaaaacgcggtagacaatccgccctaatattactcaaacgagaaatagaagatatcgaaaaagaggaaaaatattacggagcgatccaaactcatctagaagattggagaaagcgtgtcattcttcaagagactgcaccatcgagactagctctgtgcaatctgattcaaatgtctggcagtcgatccttcgtgaaaggatattcttcataacccaaattaaagcttccagctccgagtgaaggggagaagggctcctccagaggcactttgcacataagagtactgtttgatcaattccttgaaaacaccaccatcctaatcccatggttagatccgaagatttccatgatccatcaaccctacatctaatagaatgagtcagttgatccatagacaccctggtaacattcgattcaatcggttccagttgggccgcatcccacaataattgttcactcaaagcgacatttagaatatctaaaggttctgattgtaaacctttgaaaacctttttattcctatctttccaaataaactataaaatccatgcataaaagttatttccctctctctcatctattggagatggtaatccacaaaaaaagtaatgaagatttgaaaattccgaggttaaaggaaagcttcctgctattacaggaatcgaagacatttcccagacttgtcgagagtgaggacactcaaaatctattttttgtagtcaatttttaaaaaatatagtcagcctagtataactattcatgcttatggatatatttcgcaaggagtgatgacgaaaaactctggaacggatttgaactacgcaatgcctttggtcaagtacgggatgaggcagaacgggatataaatattggatagctaagaattcgtatagtccccaatgtggagaaggcgaatatattaggatcgagagagggattgctgattcaaacttggttacagaagagagacagagatgttgttaggattaaaacaaaattggttacacaatatagtgcgaccaaaaaagaaaaacatgcaattttacaaaatatggttgaaacaaaaggcccatgtcttttggtcctcaaaaactatttttgtgaattcagttgatgatacaaaaatagaaattcggtaaaataaacaatgatgcggttagatgtggtaagagataccgattaaatataacgacatgataagaaaaaataaaaatggactaaaaatactattaattttaaaaagaaaacaaattttgacagcaacattaaacataacaattttgctgtggattcaatggatgcttggtttcgttttgacggtaaaagaacaacttcgttttttctaaaggggcataaggttttgtgaaagaattataaaaaaaaactgttttgccaccatttttgttaatcgacttatcatatagcacttgtttttactagtgatatgcaatattacaactttttgtggaagaatatacaaacacacaaatcaaaaatccaagtagttattcatctaacttatttgtagttgatgaatggttatgtgtggttgagacaataaatataaccaagttgtaccgaatgaattggccatcactctattttaaacacaaaacagtgactatacacaatttcttaaacccgattgaaaaataatataaattggacaattaaaaaaaaacttctgacaagttttttggtttatttcggttcttcaaaccggcttgcatagaatcaaattttaattgtaaaacaaaaacaaaaaaagtaaagtcaaaaggagtaaggaaacgtggtcaaaaccgtccgtcactcacccacctcttaatctctccagtccctatgtcacctgaaaaagattggagatgacgtcacgcccatattgttttttcatttaagtcaccgcactgtcacgttatctttgccccttccatccacaactcctctctctaacccgacccgatccgcccgaactcgtccaagtcacctttcccctttttcgccccgtctctctctctctctctcttcttcgatttattggtgtttggttcgcttacgcgatttctcgaagaaaaaatctcgtattcctggatcgaaacaaggctgattcgattactcgctgtcgctgttgttgattttggatctgtgttttgttatcttcggatcgggaatcgaagccctagagatttgatccatttcgtcgcgaaattaggttttttttttcaccgataagtttttggatctaaagttatcgaatattgtcagggggaaaaaggaattttgaggatttgttggattttgctgaggatattgatgttgttcgaaggagaagatgatagaaggctatgcatgggagggtttgtgagcggagacacaaaagtcgtcgtcggcac

SEQ ID NO: 4449 - DNA, 3000 bp, Unknown; identical to SEQ ID NO: 4440
  misc_feature (1)..( 3000): cDNA_ID_1824269_gDNA_ID_1620706_Annot_ID_165291 3000 nt of promoter + ATG

SEQ ID NO: 4450 - DNA, 3000 bp, Unknown; identical to SEQ ID NO: 4439
  misc_feature (1)..( 3000): cDNA_ID_3073315_gDNA_ID_1620706_Annot_ID_165288 3000 nt of promoter + ATG

SEQ ID NO: 4451 - DNA, 3000 bp, Unknown; identical to SEQ ID NO: 4438
  misc_feature (1)..( 3000): cDNA_ID_1824277_gDNA_ID_1620706_Annot_ID_165285 3000 nt of promoter + ATG

SEQ ID NO: 4452 - DNA, 2667 bp, Unknown
  misc_feature (1)..( 2667): cDNA_ID_2990652_gDNA_ID_1620706_Annot_ID_165284 3000 nt of promoter + ATG
aagcttacgtacataccctaaaatggagctctaagaatctcgattggtttgagagcaaaagaaatgaagagagctcacaaatttttaccttttcacttagaagacttatcgcgccactgttgctttctccttcatcgtcctttacattagttatctctgtaacatcatcgccggtgttctcggtaggagtttggcctgtgggtactccaaacatggcctcatcgtgggcggctttcaactgctcttccctttttgccttacaagtttttattaaaccatataaactgtctgaagctctgatataataaaaactgtgacttgattagaggttgacaatgtaagctaatgactcagtaaacctcgatggcggaaaacctataactttgtcccatgcgcttgaccaaggcagcatcatcatcagcacctgcaatcatatgaagtttttagcatcaagagtacagagtaactgagaatgatttccggctttagctctgtccgttcatcgaaatcatggagtaaaggtagagattcacgggaaactgaccttcttctagttcctcatcatcaactggggcctctttgtcgaattcaaatctttcccatcctgcacccttactggtatctttctcagctgcaaaccaagcagatcattaatttcaagagaagaactaaacatgagattgatatcaatgttttcacaaggtatacaacccaagggatctcatttttaaggacagagttgatctttcttgtttttttattctttctcagacaccaggacttttttcttcatctaccataaacacatttacagatttgatatctccatgaaagggtttgtctcaatcctccttatatacagagctgctatgaaaatctatgaggtcaatagattttgctttgctgataaggaaaagttaggaaaagtcttctcccaacagtaacgtgcattgtatcctgaatgccacgagataaagagccaaaacacagccctccacagaactacaccataaagactttgattgatgggagaattctcagctacctgctgacccaatgcccaaccaaaaacctaacattctccgtacctccattttaacattagcacctcaactaactggcttaaggctacgaatcactacaaaactactaaactaataagaaagccttatcagcatcatcaattcaaggccaagacattaagtgccaaaacacagccccaccgttctaacattccaaagatggatcccactcaaaagaagttgtcgaaagaatgagatcttagctgctctgaagcgtggacaacagaatcaatgtaatctctcaaatgggaccgactaacatacccgtttcatcaagctgaagcttcatcttggctttcactttttcagcagctgactgttcaagaaagcaacacaaaaaccaaccttataataccacggaaatgacaatcacacacagacacacacaaaacaccagcaacaaaattacagaatctatgactatcatccataaacaaagaaggagctccacaagaatggtaaaccaaattagagatcaagggtttataatctcaaaacatctattgaatgtgggcacatgaaggcaattcctatgttgcaatatgtaaaggtaattgctaagttcttattacactcctaagtcctaactctagagggattataacattacgatgctgattctggtaaacaaaagttcctcgaagtatgataaccatacaggctgaagaatgatgagagaaatgagtattaccatctcatcgtagcctttgattaaccgcgagtaatcaggcttcttctccttaacatcttctctgctcctccgctctctcctcggcgacaaacttctgcttcggttactcctcctccggctctctctatccccgtacctattacgcctctctgcactcctgctcctgcttctccgtctctctctatccacataactactacgtctctctgaactcctgcttctccttctatggcttttatctctctcatccctctctctactccgataacgacgccgttcactcgactctctatagctcctctccggcaccctaggatcttcaggtttcttcttcaatttatctctgatggaccggatctcggaatccttgttatcagtggatttagtatggttagaagccttgacgaattggttgagaaacgaagacgacgatgcgatcgccgatcctctctccggaacagcgttggctccggtggagaagccgagaccttgcttgaagcgagcagctccttctcctttacgcgtgagctcgtcgtagtaagctgccgctttttcttcctccataacttagctccgtttctctccctttggttctctcgatggttttttctcaaccatttttgttaaccatcttataatccaatgttttcatttgaattttgttagcccataaaatctatattttcgtcagtgtttctctctcttctcgctctctgaatattttagagagagaatacgctcttcttctcgccgtccggtggttatccggctacatgtccggcgtcttccgtttttctcaacggtgatggccggctttcgtctagcaccgactggcttcctaagtagcggtggctagcttttgcccggcatcgaccggctaacctagcggccatg

SEQ ID NO: 4453 - DNA, 3000 bp, Unknown; identical to SEQ ID NO: 4436
  misc_feature (1)..( 3000): cDNA_ID_1824235_gDNA_ID_1620706_Annot_ID_48896 3000 nt of promoter + ATG

SEQ ID NO: 4454 - DNA, 3000 bp, Unknown; identical to SEQ ID NO: 4435
  misc_feature (1)..( 3000): cDNA_ID_1824231_gDNA_ID_1620706_Annot_ID_48897 3000 nt of promoter + ATG

SEQ ID NO: 4455 - DNA, 3000 bp, Unknown; identical to SEQ ID NO: 4434
  misc_feature (1)..( 3000): cDNA_ID_1824227_gDNA_ID_1620706_Annot_ID_48898 3000 nt of promoter + ATG

SEQ ID NO: 4456 - DNA, 3000 bp, Unknown
  misc_feature (1)..( 3000): cDNA_ID_1824211_gDNA_ID_1620706_Annot_ID_48902 3000 nt of promoter + ATG
caagttctggagatattgctaatggaaatgatgtgtcttctggtgcggatggatttctttcatggatcttcacaggaccctctagcgaggaacaagttgtgtcatggatgcgcacaaaggaagataaaactaatcaaggactggagatcatgcagcatcttgagaaggagttctatcacttgcagaacctctgcgagagaaaatgcgagcacttaagctatgagggagcactgcagactgtcgaggatctttgtcttgaagaaggccggaagagggagacttcagcagaatttacccatgaaagctatgaaactgtgctgaggaaacgaagagaagagctaaatgagagtgaccatgagttgttgtttatcagtagcaggtttgagttagatgctataacaaatgttttgaaagatgccgaaactcttaaccacaatcaatttggatatgaagaatcatatggctgcactagttctcagcttcgtgatctggaatctggtgaagctgatgaatgggggataaaggattccttacatgaggctgacagtttcatagagattgcgattcagaaacaaaaagagcagttgtctgcagaggtaagcttttctatctttacgcaacaccactgcaataatcaattaatgcctttctgattttaaaataatctgtacatgtgctatcacagcttagcagaatcgatgcacaaatgatgcgaaatgtcactgggatgcagcaattagagctaaagcttggaccagtttcctccaacgattatcagatagtattgttacctttggtgaagtcctacatgcgggtaagtatctaactcttttgaccttgttactttttcttccattgtgttgctgtgttctttcaggttctaattggcatttccatcttaatctccccatttccctctctcgctctctctctctctctctctctctctctctctctctctctctccaggcacatttggaggcgttagcagagaaagatgccactgagaagtctgatgctgcaagagaagccttacttgttgagctagctcttgattctaagaaggaggctcgaggaagaaatgataattcaaaaaacacgctggaaaagtccaaggacaagaaaaagattaaagacactaggaaagtgaaggatatgaaggttcgaactaatctgttgtctactttttaggtacttcttgtctatatttgtaactaactttttaatttttttgttataggcaactattggaagcgaccatcgctccaatgctgattcagttgaacacaggtgaagatctgccttgttcataatttttacttaagcgggtgtaacctggaaaatctttgtttctgaaaatgttggtggtttataatatgtcgttgatttacctgctaatttcttgttccagcccccttccggttgcacctgtcggcgatcattcagaggctgacattgtttctgaagctgttgaagctttaaaagaagaggaagaggaatataaacgccaaatagagctagaggaggaggagagaaaacttgaaaaaaccctagagtatcagagaagaattgaggatgaagctaaggagaagcacatggcagaacaacaaaagaaatacagctcttcagttcccatgaatgttgcaaagacagtgtataatgggtgcacagataatgaagttgattatttagttttacaaggacaagaaaaatccataaatcaggtaacaatagagtgacaaggtggtggagttatgttttttcaatcatcgcttgaaattaatttctggggttctttgctttaccaggagaaaaggaatggacgacttgatgacctggaaggagccagtgtgaatacaaatggagttttcccgtcaacaaatcattctgcgatatctgatactgcaaaggtgcagaatgtaaaatcccaaaaaggttagcattggtttcgaatatgaaaatatgtgtctactgacctttctgaggcacttatattgttttttcttttttttttgttgtagtagtgcctaacggcacagctatgcaagctggtattttccaatctgatcaacgaactgggaggagaactagacgccaaaaagcttcaaacaagttagctgatggaaaatatccggtcacacctcctgagaccgaaaatagtaaatctcagttgtcaggcaccaacggcgagagacattctgaaactctacgtaacaatggtggtaagtgacattttttttttttttttttttttttttttgtcctagaatcattttctttttctcatgttttcaaagcactgatagttgtgatctatagatgatctgatttttcttcttgagcttattgtttttttctgaacataattattaatttattagatgtgaccagtaaaggcacaaatgaagccgttagatttcttaaaactgatacttctgtaaccggtgtatcttgtttatgcttttatgtcaacgaggaattacattatctacattgattaccagcaattgttttctaacatcattcatcttgcattctagatgtgggaacaaagacattaagacaattacaagctgaagacgatgacgaagaaaggtttcaagctgacatgcaaagggcagtgcttcaaagccttggtagtttttcaacatccttgtttatatatctgatatcatgtctgacagttaacattttgcgatattttgctaagtgcccattttgtcactattgtctgactgactgtcatttgtatgaagaatggtgtattgtgtataccacttttcttcatcccagtgcactttttctttttatctgattactttaggtgtctgaaactattttttctccagcttacttatgccaacagctgctacgttttattttagaatttttagcatatttgttctgtaatcattttggggtgacaaaaaccctcgatatgaagcatctgacaccagaacatgttttttcaacgcagacgtgtaccaaggaggtagaaat

SEQ ID NO: 4457 - DNA, 3000 bp, Unknown; identical to SEQ ID NO: 4433
  misc_feature (1)..( 3000): cDNA_ID_1824207_gDNA_ID_1620706_Annot_ID_48903 3000 nt of promoter + ATG

SEQ ID NO: 4458 - DNA, 3000 bp, Unknown
  misc_feature (1)..( 3000): cDNA_ID_1824332_gDNA_ID_1620707_Annot_ID_48905 3000 nt of promoter + ATG
catcagctatgtaatgctacccaccacgaggatcttaagcatctgagacgcatttcgagatagttactttgatggaatttgtgaatgtgactgaaatattcagcacaaatcagaacatggttcctgtcttgtttggagaagcactatgaaccaaacctgaagcccttgtgatttagagttacagagatacattaaaagggttcgggatttcacagtagcattcatagacagttcaggttagttaaacgtgcttcacaaaaagaaaaaaaacagaagtgtagttgaggtcacaccacaggtttatgctttgctcttaatcaaatatttatctttctcttttttgttatttgtcctttttaattccatttgctttattccttacttgtggggattaaatgtttgcagagaaagataattcgactgaataaatacacttttacctgtatacttgttatatatttgtgtcaccccaaagtgaaagctgcagactttgaaacacagaaattcttcccattgtagtgtttttttctcagaaacacaagaagagcttatggatattgctaagaagttcatatctgaaattgatgacaagctcgagtctaaatcagaatttgataaagagctcgagaaaatcaagtcttccttcaatgaagaatatgagaaatggtcgtctggaaaacagaggggatcttcctctaagcatggaaaccagtccacacatggtgattcatcaccaactcgtaacagcagcggcagcagtaaaaaagggcggcctaaggcgaaccgtgtggagacaagctctgagcttccggatcacctcattcgtggtttcattaacgagaaactgttcttgaagaacttcttgctgaagcaaaaggaatccgaagagttcaagactctagcaattgtggggaaatacggagttgggaaaacgacattgtgtcaggctgtgttcaacgacgaagatgttaagcaagtttatttcccgaggatatgggtttctatgtacagcaaagaaacaaaagaagacgaagatcccaagatagatgttgtgaagaggatcttgagatcccttggagttgaagatgagatgtttaaacacatcaaaacagaagcagaagaagagaagagtatcaaagatgaagctggggaaagagaggaagagacggtcaaagaaaaggagcttgctcgattattgtatgctcttcacttgaatctgattgggaagaagtatctgatagtgttggatgatgtttgggaagacaacgagtgggatcaaaggctcgatgatgagaagaagcaacaggaaaaatcacatctttcttgtgggtttcctaaagggtttggtgggaaagtgattatgactagcagagacgagagattggcgaaggcgatagtcggagaagaagagaatctgcagcgtttgtttccaagatccgatgcagagagcttgtgggagatttacattgatgcagtacccaccaaggtggacgatgcagcagccacgaatttgggcgatgcagtagccacaaatgcgggcgatgcagtagccccgaaagtgaatccgaggtatccgggaagatacaaacaagagcttatggataagtcttgtggtattcctttggctgctcgaatgctggcgaagattgagcctgtgaaagtggatgaaattggaaacatagataggaagcagagcttctaacttctaacgcaatatctatgtatttactatttactctctgatataaggaagctattcaagattactatataaagttattttattgttctagaaactgttaagagttgtcacttgtgtgagtgtaaacctatggcagttaataaagattaaaaagagattttaatacatatttttatcatcttagagtttcacgattttcttgagattgatcctcgtagcttgttgatgatgatttgtggattaaaaaccacgacatagcgtattgcggaagtgctgcttgaactaccgatttgacagaggacctcttggataattttcatttctaagcttttagacactttacttatacatatctaaaactactagttattttggaaatttggaaaaatgataatggtatttttttactatcacgtgtgaaaattcctcttaaagaatactgatctttcaaagtacttcaattttgaaagaagtaatgaaacagtattagaatattaatttcctttcagcttaagagaagtggcagattctccctagaaatatgttaagttaaacatctgtaccctcacttttgtaaaacctgtatcacatatcaccaaacataagtagaacaaaggatcatcaaaagacaaaaaaactagagcaatacatgtgattagcatgtaactttttcctttgtatgtaataaggaaagaaaagtttttgcttgtgtagtaaacaattccaaaagtcatatattcgaaaaatataggggcataattgttactctgaattctgaaataataagggtgaataattattggaagaatctaatatttatacttggcgtttttgtttcgacagagtgtaatctaaaacttgaattttgttattgttgttttacaaaatcaggataggcttgacatggaagttatcggagctggacttgtataaataagtgaatcaatcaacgaaggataacaaaacaaaacataaacaaaaactagaaagaaaaaactatcagtggagaaaactaatctgattaagtcactctaaacaattaaggttcttctcatacctctctctttgtttcgaattttaaattttagttttgtattgttagttgatatttgtcatatattgcatggatatataggggtagtgtggtatactctctgaatacatctcttaagttcataaaaataaagttactatcctagtagcaatctcaataattttgtttaacaatgatctcttcaagaaaactcaaatcaaaggtttaaatatttcctctctcattttttattttcctagagatg

SEQ ID NO: 4459 - DNA, 3000 bp, Unknown
  misc_feature (1)..( 3000): cDNA_ID_1824328_gDNA_ID_1620707_Annot_ID_48909 3000 nt of promoter + ATG
aaacattaacatgagactgaaatgagtgttggagtgcaagctagttatatgtaagataaaggcaaggtaaatgctcagactagcttctatttgaaatactaagactaacgtaccttatcattgacaaagaaaacggatagagaagaactttgcacagtgatatagcaaaatgttaagactaattgaatttgtacctttgcgcacatggagaagatgacttccaaatttgccacaatcatgtgaaatgaacaaaggaaaactttttaggtcaatggcattatttaaatgaggcttcttgttaaaaccagagcatatctcactgacttgtctctgcaaccccgcgatttgaggcatcaaatcactccaaccattggttgagaggtttttaccaaagaaattaaaagcaccctttctagttgcttccacagctgaaaataaaatcagcagacaaaagattactacatgacctgtgcattcaagttgccaaagacccgaatcaagaaagttcaaaactaagagtttacttggtatggagaatacatatttatgaaaaaatgtgtgagagaaagagagagagtctgaggtacatactgttataaggagctgcaagaagaaaatttgtgggaagaccaatgccgagaccagcaagtgttataccaacactaaaaccaacaccgcagccagcaccgacataaccaatgacctcagggccaaaaccaggtccccatccgacgccacaaccaatcccaatccccattccccaaaatgctccataagtaggatgcacaggattccatttttcatatctccgaaatatacctttaatgatcatcaagacctgcaaaattggtaaagatttgaaaacggaataagtttacattgacccaactaaattatctttcagtacccactgaaactaaatcaaatccaatgcacattgaattgagaagctgaatcaatggatattcaacagtgtcaccaacaaaacataaagctcatatttttcccacagattctctcgaaacccccataaaattcgaaccttttcaggatcgcgaacaatccaataagtactaatcaataaaccaattccagctgaaacctggggtatgtataaacttggataaacctacgaaatagaacaatatctacaaagaacaaaatttgtaaaatttaccatcaagagatttgctatttcgattcttctctcttctttgttctcaccttaattcgatcctcaagtgcacacactcttcgttcgatttcttttgttttctcagacgaattcactaagagaaccagtggatcaaaaccactcatcgttttacgcttggattaaaaaataagaatcggaccgaacagacataaccggtacaatctgatccggtttactaataaaaccaaactacggcagcaacatatataatcgatttcagtatccttcttctccggcgttcgatgcctggttctcggagtccggcgtttcgaaaccctaaagtttgttcagattcgtcactcaaatctggaaggctggaacaaagctcgcgaaatctcaagaaagtggtaatgcacgattctctcaggtgaaagtgacgacgatatcagtggtggctctgattgagatttttgctcacaggatgaacacgatcaggttaagcccaaaaacaactcaggattaatctgatcttagaagctaaattctctgttttgaaattagagttagaaaagttagcaaagctacttctggattctctggtttgaatatggagcaggagcacgaaatactcaggcagtaaggcaatttaggttacatatagcaaattagggttttaaagaattgagacgagttgtggattatgattagtcaacaataaccaaagatgttgaagacaaaagacgagagatacaatgtgttacacaaggcaagaggtgcttgttttggtaagaatcagtgtggctctagaatcttccttggtggtcctgaattgctctccgagtccgaaatgagccatcaatagccaaacaaagttgatcagttcaccacctttgttgagttgagctgcatgttgtttagaatcacagtgagttgctgcgtagcaaagcatctccacccacactttgctcactactttccacattgcatcattgcctctttcatttgttatatgcagaagctccttcgctagcatgctcgcttggaacaacatggacttgctttgataccgtctggcgttcccattccctagctcaaattccgtaaaggaatccacaattgctgcacaggccttctttgcatctcttgaaccctcaacatgcatcttctgaaacagctttttagcctctttagagtttttggcttctgctatagcgtctttgaattttatcttatcaattcctgcaactgttgacataagagaggattgtgcgactaagaggtacatcatgtagtctgaaatggttttgctgtactctttgcttctgacatttcttgctgcattgtctacttctgtttggtgtaagagctcagttgcaacgtgccacaccagaatgccctgatcatactccacttcagtgacatatggcaggagtttctcataataatcctcgatttgcatatcgcgcagaatccagtcgcctctagccgaatatatatggctggcactttccgatccaacaactaagagcgatctatgcttgacctcttcaaatatgaattcccagagctctttggtgaggcgtgtgcgggatgtgaacactatctcatttacctgatctgagatgctgaagaattctaggagatagttgatcaacggaattcctaagcagaatctaataaaaagcctgaaagggtaaagagtccgacgagtccacggaaagttgatgaacagatgaatcatcttagagtctatattcttgcggatgccattcgaggctttggaaactaacttcgttcctctgatgatgatatcaacaacaaaatcaatgtgcaaggttcgaatg

SEQ ID NO: 4460 - DNA, 3000 bp, Unknown
  misc_feature (1)..( 3000): cDNA_ID_1824316_gDNA_ID_1620707_Annot_ID_48913 3000 nt of promoter + ATG
aagctgatgttggtgctgcagcaggagatgacatgggtgcgattcactttgcttctcaaaaggggcatttggaagttgtgagaactttattatctgccggtggttctgtgaagtctatcactcgcaagggactcactcctcttcactacgctgctcaaggttctcactttgaaatcgtcaagtacttggttaagaaaggagcaagcgtcagagctacgactaaggctgggaagagtccagctgatgttgcgggtaatgcagaaacgcaaaatttccttgaagaatgtgaagagcaagcaaggaaagctaaggtgaacaatgagaaaaagacggaaatagtgaaaccagagagttgtagcaatgaaggagatgtcaaggatctgaaaagaaaggactctgaggatggaaacgagggtgaggaagaagaagcttcttcgaaaccgaaaaagccaaaagttgctctttctcatcttcaggacattgacgacacagaagctgatcaagaagaagagtaactcttctattccatcagaagtttcttaacaagagttgtaagatcctccatcatatgagataggtcgtagttcaccaaaacttttgttcgtttccgagatccgtaaaagcctgtagaagaatccatcactttgcattttagaattggttggtaaaacagattgtttttagctgtcaaatcaatcctcaaactttaaagctgtttctctgtattgctttctttttctgtaaatgatttaagattacatcacacaactgtctacgaatcattacatactcactgactctcaagtaatgttttttcctaagcatttggaaaaagaatttttaagtattgtgtagccatccatccgagaaccgagaagtaaacaagaagcaaacatgcacgtttcacttgtaccaatatattcaccttagaaaactgtctcttaactgaacaacaagcttgagggaaccaagattttgcatgtcttaagatccttatgatgaagactgtgattatggaagttgcgaagccagagacaatgccagcgatcacatcatatttccagtactttggtgttgattctccattaagccatgactgtaaaagtttagagattctgaaaaaaaaccaatgaaagaggatcaattctgtaaaaaaacaatgccaggacaaggcaagactgagaaactaaacagatgatagaacattcgtatatcacttcgacctcaatcattgtgctattacagtttgtatgtgtttagttataatgaaaaatgtataataatgagagaaaacagaagaacttacacaatagagtattgcttagcaatgtcagtgaaagaaagatcatctgcttggcaaccgaaaaagctatcccgataaagctttatctttggaatccctaatgtgtaccagcaatcgtaagtctcattaacctggacaaacaaaaacatattgcgattcagaacagtaaacaaactgatatcaagtccgagagtcaatatagtcaaaaaacttaccttgaagttatctttggtaagtaatgcagcaccaaagttaggtctgcactcaggaggaagagcttcatttggtgcttctgaaaacgctaaccgtgtttgacccattaagttatctttatactctacctgtgaatacgatatacaatggagttagtaaattgctctagtttgaaaaacaaaagacagaaaattgctgtaaaatagctcacaaccttgaagacagaagcccagtagtaatcataacgacatctgaatttatctctctcaaaagggtaaaacacatgttgtgctttgacgttcaatagtccaatgccacacactttagaagacctaagatcaacagctacatcacaattcggtaaaaaaccaacatcagtttctttatcaaaacccccaaaatcattgtgaagactttccatttcaatcattagaagtgagatcatttaacacaagaaacctatcaatttctgcaatcaattgatgataaagtaaatagaatcaaagctttaaacttacagctggaaacaattttgcagcgagaatgaagagaagcagaagcagatgaagaagaataaacccacaattcaccgatgaaaatcactaagattcctaatagaaacgacaagacgacgaagctaatgatcgagaaaactatcactgtacggaatcgcaaagctaacgaagagaaaaccctcttttgcttctttgtagtcgttaccgacgacgtcgtttcttcggaatccatttacactttcttctccggtgacggtgagtgagttttactcagaacaacaattcgaagaatccatttctcacggtgatcaaaacgacggacgccgggacatcaaatcttaccgattatcaatttttttctttcaattgcgccttttttttttttcccttccgcgttgagtctttgactatgatgcgagtgtgttaaatgcaattacaacaaaaaataataataaaataattttttcggacagggttgatcaatgtgaatgtgatggagagagattgctgactcagcagtacacttgccacgtcttccacgtaatatgttcgtttacttgccattttgggccttcaaatgggcctatatatgtgctttgagccttaccagtctacatcttaacgaagcttgtaagggaattttgtgaaggggtagatccgtaataacaccaaatcgtggctcgattgtgatttccaaattcttgaaaccctccttctttagtttccctctcaaagggagcgtaaagtttccacctttcactctaggggctaatctcaaatccttcatcttcttcaacctctggtctctgtcaattcaaacaaatcgtttttcgtctcctcaattttgaattcatttataaagatttcacccttttcctcctcgaatctcgaattgcttctactgattatccaaattttcttgaggtttgtaacgcttttgaatttgggttttagtgtcaatctgtaatg

SEQ ID NO: 4461 - DNA, 3000 bp, Unknown
  misc_feature (1)..( 3000): cDNA_ID_1824291_gDNA_ID_1620707_Annot_ID_165344 3000 nt of promoter + ATG
gttcttctgttccaattccaattccttctgaaatattcatcgcaattcgtatcggtaatttttccttttgatcgcattttttttttatctttgatcttccgtattaaacgtgctcgatctatatactcaatgatcttatatgtgtatgatcatgtaatttggaagttgaaatgtaaatcatctattccttggtaaattattcttcgattttttttctgatataggttaatggtaattcctgtgatttttactgatgtaatctggtgttgattgttgtgaattcttgatctatgagattatgtcttagatttgccaaatgttaagtttgtttgatctttgacaaaatattgtaggtttaaagtaaaaaagcaatgggaggtggtaaagacaagcatcatgatgagcaagagaaaggatttcatggttttccaggaggtggacattacccacctgctcaaggaggttaccctcctcaaggttacccaccacaacaagggtatcctccagctggaggctacccacctgccggatatcctcctggtgcttaccctgctgcgcccggtggttatcctcctgcacctggaggttaccctcctgctggctatcctgcacctggagctcaccattcaggtatgcattgtctcgttaaagagctcttctttgtagttttggtaaatgttgatgttttctatgcaaaagctatggagtgtccttgtagcttgcttggattatcaacctgctaaatattgttaatcattgaatgttaataggaaaagactttataaatgtttcggttttctatgaaaaaagctaaagattgtgcgtgaagtttgctggatcattaaccttcgaactttgaatgataatagaacaatagtttgtaaatcttactgttttctttgtaaataaagcttagaactggccttgttgtttgctggattatcagcctgctaagtattgtcaagtttgaatgatagtatgacaattgtttctgaaatgttgtttttttttctgtgataaaaagatgaggacatataaacttactgtcttctgttttggtgtatacattgatgttttaattttaaatctactaggagtacatgtttaatcgtgtgtgcttatcaatatgcaactttgtggtctcttatatgcattctgctactttgtggttctccatgtaatactattttcttttttccatcaggacattctggtggtggactcggaggcatgatagcaggtgcagctggtgcagccgcagcagcttatggagctcaccatgttggtcacgcctctcacaacccttacgggcatgctgtaggacatggagggtatggccatgcccctgctcatggctttggccatggtggtcatggtaaattcaagcacggaaagcatggaggcaaattcaagcacggaaagcatggaaagcacgggaaacatggcatgtttggaggaggaggcaaattcaagaagtggaagtaatctcaaaaaccccacctttgatcctctcctccagtatagtctcattacctgaccgatgtttctaataatcccccttcaaacatatttcattttaactatgtcggtttagagattactggttgaggaaataattggagagtgctagtataaaccttatggtatctgcagcagaggtttctttaatctctcaatagtagatgctttgaaacttatctataatttggtattgtaatgacagtttgtgtttggttttttcttcagtatcttctttgtttgatcatttgatgttggtggagttctccaaaatatttatgctattgtagatcctaacctttctatcttgttattcttcgttttttggccattattttcgtttcgctcccgatccaaattccaaagtacttcaacaatatcttatgcaataacgagacaaacacttaaggtcgtgcaagaatagtgtctgtttttcactgattcacttttacagagaacaaactgaattaattttgattattgaatagttgacatgcaataatatttgttaatccaaatgaatagataaaaaaaaaaattccttgagagtaaagaaactaaattttggaagacaatttttaactagttttctctaaaactaggaaagtcagaaaatgagaaaacaaatttgattttattacggaagtgaagggctttccgacaaattgctttgctcagaccaaactgtaaccgacccaagcccaataaaaaagcgaatcgggtcaaacgaaaacagataattcagaaaaccctaaattcgtttctctttttttttcttcattctgagcaaagcagtaactctcaggtgcgtgtgctctccgctggttccttagaacaatcggcacacgctttttcatttcaatcttcttcttctactcttaagtatctcaggtactaatctcgatttctctatttctcgtccatggagatttagatttcaagtcagatgcttttcgatttgttacagatgtataatttttgtaatcgattgattcgcagcttggattgtattgagccatcgacataccttcaaaattcttataattgtattgaaagtgtttgaatttaatgtttttttttttctttctctcgattgttttgatttctgggcaagtgtcaacttttgtaacagattagtgacctttctctttatagatatgtggaagaatttggaatttacaaattcggttcaccatttttatctgaagcactgaatttgcgtttttcaagcttgagtgaatattatttcttggctcttaagattttgcatgtcaactattatttcatcattgttagcatcttgtggtgttcaagttattattttaaatattgtttgtgctactctatagttattccctatgttgttatttcgttcctttgccttagcgtgacatctttatttggtatatttgtatctgtgtgatttagtttcttcaggctgttaaactatagatttcatgtattttgtaggtctgttgagag

SEQ ID NO: 4462 - DNA, 3000 bp, Unknown
  misc_feature (1)..( 3000): cDNA_ID_3073341_gDNA_ID_1620707_Annot_ID_165342 3000 nt of promoter + ATG
ttctcaacaaattcactctttctgtactgcataccaagtaggagacatcaaaaaaccaaaactgaaggcatatctaagaagagaacccttataaagaatcatactcaccccatcatgacagccaagagaaaggtgaagaccgggatggatggttgaatggcagcagcataagtgggatttgtgtatgtaagaccgataagaaataacaactggttcccaaataccctatcaaaattgagaacaaagcagaggtggctttactgagatatttaacctctataaacatgaacacaagatattgagactggatagagatgatttcttaccctgctaagcccagaaagaagaatgacaagagaaggcttttattcattggagttctgatctttctacatacatgaaagacgaacactgttcactgattagattttgaaaacttgaacattcaaagtttgagagtggtctcgcttaaacttgacgcattacaacctcctaaaccattctttcatttactgatagaactagacaaccctagctcgagaaaccagatcctatttatcccaaaacccgaagaagagacatggaactcagagaacattatcaaagacattgtatctaaatctactaacagtggaagtaaacggaacacagatctcaacttaagtctaggcacattgctccaactctgaaatctagttcttctataatgcagatcacattgactttaaatcctcaggagaacttctacagattcatcagagaaaaacccaaaagcaaaatacgaaaatccatactaatggatcaggcaattacaaggggactgtgtatagttctcacttcatatataaacccacaaattgatcataaaaccaggaaaccattgaaacccatctcgagaattcagaactaaaaacagaggaaacaaaaacaagttgaaaaagaagagacctttcgcggaagtaagcaagaggagcgagaatagagagagcaagaagatcacggcatacacagaagacaagctggttgactccaacattaagagctactttagtaatcacatggtatccaccattaaagagctgaacaaacgccatagcagtgtgcgccatccgagcgtctctctccgccgccgatccacttccggtcaggatcatcggcgccgtcatctttccgatttactcggcccctctctgacttgtagttataagttatttctaaagcaaagactaaaaaagtaagatcctttacttcgttagcaacgaatctgcttcttctatttgtcgagtcctataggttctgtgcaaattttcatatacaatatctaggagatttaattctcaaatcgatctacttttatttgagtctgtatcattttatcaaaatatattcgtgtattattaaatctggttaggacatcaggctcatactcataggctgcctaatttaggcattaaaaattgaattttcataagtattttgaataaaccatttgactcaaattttaattgaaatacgttaaaatttgtaaataaagtaatcaaactagggccagaataaaatccgaaaaccgaaaaccgcatccgacgacttcaaatcttcaaaactgctcctctcttctctctttaaaatctttcagagaggtaatgttaatcatcggttaggaatctcttccgggttttcccggatctgtaaatatctctctttgtaagatttaaataatttctgactctttgtcggattctgaataccggctaagttcggttttttgtttctcgcttctgcgagatagatctcttcctttacgcggattgaagactctgttttactttaaatctctgccaatctcaccaacatttcgtggagtaatatcttcatcaattccttatgcccatagagtatggagcaaagaaccaactacatcaaatttggtgttgtcaatgatggagctttcctggagtttggatatgctcgaagatttttgaagccaatcctcattcgacccagagattctcgatgtcttagccttgggtttgagatcaccagaaggccggaggttttttatcgctatttggccgattgacggtggatcatcggactttcagcggcggtcggtaatttcagcggtggagctcaatgcctagacacgtggcgtaggatcgtgatacatcgttgatacatgatgtggatcgcgacacgtcatctgcaagtgtcattaaatcaatttgcgttaatgtttatcttttcttagattgattttgggtctgggcctaacttgctgtattcctctatggacttgtgtaacttgcccatttgggatttaatgaaataagccgacaaaaaaaaaaaaaaaaactggaaactgtaaaacgatatgaataatctggctccgaaaccgaacatataaagaattctcctatccaaattaccggaaccaaattcgactcgaatcaaaaaccgaacgaatatctgctaattcgaaataaaattatatatctaaaaatattagttatatttagttatactttatacccaaaaaatactaaataactaaaatatctgagataatttttatatccgaaatttttaagttatatttgttataattatacaatattttgcaaaattaaactaaattttagtaaaattaaacaatttttttgttttttctctctcaaaaactgatccaaaaacgaatcgaatccaacaccatccaaactgaaaccaaaccgaataatcatataattcaaacggataataaactccctcatcctgattattcgaatccgaaagtattcgagctaaatccgatccaaaatccgagtacacaagcttaaatcaaacaatagaaataaataactaatcacagttgcaaattagatattttttgaatataaagtttacaaattgaaattataaagaaacggagggagtaattaaaattaaattgaggtatttcaataaccaaaaagcccatcattgggtaaatcttcacatcgggac

SEQ ID NO: 4463 - DNA, 3000 bp, Unknown
  misc_feature (1)..( 3000): cDNA_ID_3090982_gDNA_ID_1620707_Annot_ID_165341 3000 nt of promoter + ATG
ttcacaatgacactggagcacttaacaattagcatatttgaaagagtaaaaaagaatatggcataccttggtgcatttttaagaacctcaaattcttcttcagtaggaagagcacgaccaaacacatctttgggtcgtggtttcttcctttcctgtgtgcgttctcccccaccttgtgattcttctggtctacattgcgtcaaagagagaatattgtcaaatttcaaccacaaggatttaacttaatatcgtcctagcaataatttgtcaaaccaaatatctgtttctgtcaacatacctagaaccaacattgtcgtccgccactggatcctgagttgaagaaccctgacccttgtgtttctcatccttgtattctgctgctttggcactttcaggatcatagccaggtggacgaacatacataaagctcacagctttcatcgtttcgatctgcgcattaatctcaggaatcaacatcatgtaacacaaaactaagtaaaatcactagtttcaccaaatttcaataattgtataggttttgacatctaactaaggatcaaaagagttaagacatagctcaaatggattctgattggtaagagtcagcaacaagtggatattacaattcagcctaagaattcaaaactatcatcaccagactacagaaacctaatctgatgcattagggcacttgtgaacaaagttatcctcgaaactgaactcctaacaagatctgaataacataaaccctaatcttactcagaaaaactaaccttctctctttctttcttcgagataagagctgcttgcttgaaaaattcctgctcttgcgcaaactgcaaatccacgaaaaaaggagtaaggaaaacacgaattgaatcaataacacaatcacgagaaattggagacgatgtgcgatgaattacctcgcgagccacctcttccgctcttcgatcgtgttgggcatgagtctgctcggcgatccatttgcggcgctgattgggataagaaagaggatgccatggcttctgattcaggaaagagtggctccaagcggtaccggatttggtcttgtaatcgacttctaagctaccgccggtgaccttcccgccagcgaatctcttgctcagccgtattccgctcccttccccttcgccgtccatgtcccgatgtgaagatttacccaatgatgggctttttggttattgaaatacctcaatttaattttaattactccctccgtttctttataatttcaatttgtaaactttatattcaaaaaatatctaatttgcaactgtgattagttatttatttctattgtttgatttaagcttgtgtactcggattttggatcggatttagctcgaatactttcggattcgaataatcaggatgagggagtttattatccgtttgaattatatgattattcggtttggtttcagtttggatggtgttggattcgattcgtttttggatcagtttttgagagagaaaaaacaaaaaaattgtttaattttactaaaatttagtttaattttgcaaaatattgtataattataacaaatataacttaaaaatttcggatataaaaattatctcagatattttagttatttagtattttttgggtataaagtataactaaatataactaatatttttagatatataattttatttcgaattagcagatattcgttcggtttttgattcgagtcgaatttggttccggtaatttggataggagaattctttatatgttcggtttcggagccagattattcatatcgttttacagtttccagtttttttttttttttttgtcggcttatttcattaaatcccaaatgggcaagttacacaagtccatagaggaatacagcaagttaggcccagacccaaaatcaatctaagaaaagataaacattaacgcaaattgatttaatgacacttgcagatgacgtgtcgcgatccacatcatgtatcaacgatgtatcacgatcctacgccacgtgtctaggcattgagctccaccgctgaaattaccgaccgccgctgaaagtccgatgatccaccgtcaatcggccaaatagcgataaaaaacctccggccttctggtgatctcaaacccaaggctaagacatcgagaatctctgggtcgaatgaggattggcttcaaaaatcttcgagcatatccaaactccaggaaagctccatcattgacaacaccaaatttgatgtagttggttctttgctccatactctatgggcataaggaattgatgaagatattactccacgaaatgttggtgagattggcagagatttaaagtaaaacagagtcttcaatccgcgtaaaggaagagatctatctcgcagaagcgagaaacaaaaaaccgaacttagccggtattcagaatccgacaaagagtcagaaattatttaaatcttacaaagagagatatttacagatccgggaaaacccggaagagattcctaaccgatgattaacattacctctctgaaagattttaaagagagaagagaggagcagttttgaagatttgaagtcgtcggatgcggttttcggttttcggattttattctggccctagtttgattactttatttacaaattttaacgtatttcaattaaaatttgagtcaaatggtttattcaaaatacttatgaaaattcaatttttaatgcctaaattaggcagcctatgagtatgagcctgatgtcctaaccagatttaataatacacgaatatattttgataaaatgatacagactcaaataaaagtagatcgatttgagaattaaatctcctagatattgtatatgaaaatttgcacagaacctataggactcgacaaatagaagaagcagattcgttgctaacgaagtaaaggatcttacttttttagtctttgctttagaaataacttataactacaagtcagagaggggccgagtaaatcggaaagatg

SEQ ID NO: 4464 - DNA, 3000 bp, Unknown
  misc_feature (1)..( 3000): cDNA_ID_3073345_gDNA_ID_1620707_Annot_ID_165340 3000 nt of promoter + ATG
ttctcgagctagggttgtctagttctatcagtaaatgaaagaatggtttaggaggttgtaatgcgtcaagtttaagcgagaccactctcaaactttgaatgttcaagttttcaaaatctaatcagtgaacagtgttcgtctttcatgtatgtagaaagatcagaactccaatgaataaaagccttctcttgtcattcttctttctgggcttagcagggtaagaaatcatctctatccagtctcaatatcttgtgttcatgtttatagaggttaaatatctcagtaaagccacctctgctttgttctcaattttgatagggtatttgggaaccagttgttatttcttatcggtcttacatacacaaatcccacttatgctgctgccattcaaccatccatcccggtcttcacctttctcttggctgtcatgatggggtgagtatgattctttataagggttctcttcttagatatgccttcagttttggttttttgatgtctcctacttggtatgcagtacagaaagagtgaatttgttgagaatcgaaggtcaaactaaggttggaggcacacttgtgtgtgttatgggtgctgtcttcatggttgtatttcgaggtccggccttgttaggagataaagatgcagactttgcgatgaacaatgaaatcagtgctaaaggtcaacctgagcctactggttggttagtctctggttttctcgatcttggatttgagcaatggcacattggagttttatgcttgattggaaactgcatgtgtatggctacttttcttgccattcaggtaaatctcttcattgtttttgtttcttatggttaggtttagaccaacgcataaactgcagcctactaacctctgtgcatgtgtcttttaatgtggatataatggaaactctccaggcgccacttttgaagaagtatccggcaaatctttctgttgctgcattatcatacttctttggcacagtactaatgtgcacaacagctttctttatggtaaaggagccattggattggaagctaacacaatctgaggttcttgcagttatatatgcagtaagttacatcaagatttttttttcatctactcacatgtttctcgtggaatcatttgacacaatttcatctggtttttcttctctctagggagttatcgcatcagcactaaactatggactcttgacttggtccaataagattattggtcctgccttggttgctctctacaatcctcttcaacccgctgcatcagctttcctatcgagaatctttctcggtagccccatttatctcggaaggttagatacattttctggaatctttttcaaccatccacaatcttcacttgcaaaattaaacactttcacttttcaacatcttgttccatttcacagttttcacttgcaaaattttctaactcggtttcttttcctctacgcagcgttgtgggtggattcttcatcattctaggactctatatggtcacttgggcatcgtttagagagcgaaaaacagcggtttccgggattgggattgcgccccatggtctaaaaacctcagagcctctgatatttaatgggacagttaacagactaggacagttgttttctggattacccagttcctctgtgaaatctgcagactaaaaagataccaaaaagttaagattcagacgagatcccattttacaacagctataactttttgttaactttcatctcttattaatatcttcttcgattactactaatcacagattcacaagtacttgctcccttgttaattactctttaatcttgaagctcatctaattcgcattggttatatatctaaaccatatattagctatgaagatgacattttatctttacctttgaattttttaacaatagataacattcagtgcaagatatacaatatagtcttaggttaaaagggggatatcataaagttggaaaaagcaatccaagaaaaagctgtgtcttatttggtaagaacacataacagtagtggcaaatgtacgaattccaaaaaagaagttggttttatcccaatctagtttaactttttcgcaaaaaaatcacacgagttatcaaaaaaacgtggaactttattctttctttttggcaactaaaattgtttttagccttaggtaatctcttaaaggtatacaaattggatgagtgacacacaccattagcattttaatatcggcgccattagcattttttaaccaacaaatagacgatttgttaaataaattactaagaaagaaataaacttatttcatttacatttccaccccaaatgttttcaaacattctaaatttcccctggaaattgaaaattgagcaagacgttttctgttgaagagagaaaataaaaatcagagaacaaaaagggaaagagtcttttctgcacaaaacggatctctctccaacgtcttcgtcttcctctggtctgagtcgtgtggttttagccccgatactcatcagatctgcttaagattctcgatttttcttatacgaagacgacgattggttgattaactcatatatgtatatgtgcttttatactccttagacgcagagcgagatacgagatctaagagctgaggaagctttgacggtggctgaagtttcgtcttcgttctatgccaatgcgtgtttctggtattgtaccctagctatccaattttatgattgagtcgttgtgttgttatcgcaatgttgatttaactgcagatcgctcctttcattgtgtttgttgatttgtgaatcactcaagctcttttccgagatttttgattgaagacataaattgtcgatattcattgttgaatgcatttgatttgatttgtgtagttaacattttctgcagaagaatgaagaatctgaagagttcgttgtgcttctgcatttgagtaaagacaacggagaaggttgtgttgagtttgttagtatatgtaggcaagagaaatg

SEQ ID NO: 4465 - DNA, 3000 bp, Unknown
  misc_feature (1)..( 3000): cDNA_ID_3073357_gDNA_ID_1620707_Annot_ID_165331 3000 nt of promoter + ATG
tttcgcttttagtatatgcttggtgagaattatatatttcttttatttttaaattgtaactttaaattttactttaaacggtgatgttcgagatttctcgaatgttaggtataatgatttgagatcttcttgtatttttttacacgttaacatgtttggtggtccatttagattaagcgattataaaattttctcttcgtttccctaatgctaataaaatatgagtgttttttcaacaatcatttatacggatgaagagcaaactcaccgtatgtaaagtatttgcagtttgcttgtaaaaaaaatcgtgtttcaaaaatattttaggacaaaaaaattagatatacaattgtaaagtaaatctagctagtcgtgttcgttaggtggacgatccgaaatcgaataagataaactaattttaaatatgattgcaggaacaaattaaaaattatgcttaaacatatttttctataaaacaaatataaacaatctccttaatattcaaaaatcgcatattccctaatccctaccattatgcaacaagttaaaagttctacagagggaaacaatttgaatttattttcgcctttttttttccaaacaacttgaatttgtttccctctaattatatccaacaaaaattggaacttgtgatccggaccggaactagatttcagcatcttgcaatctttttaaaacatgaaagaccgatttttttttttgataattaaagacgataattccaaacgtgttgtatcatcgtatttaactcttcaacagataatatcaacatttattattttataaacatgtaaacttataacaataatggcggtaattttattttatgtttggtaaatccccatgaatcatgaataatatatagctctcatagaaaagtcaagaaaaaaaaataccagtgttacatcgtggaaggcaagaataaagaggcggccacgtaaagataccgatgaatccttagcgggccataataaagaaaagacacaaccacgtgataatcccacggttatatatgaaaagaacaccgtaagttcgtagagtgagacacagacgattatagcagtttcgaacgcgacacgaccacaatatcatcaatgacgatcgaaccaaagtagaaaatattctttttctagctcgggaatataaaatcgtagggtttttttttggtcatcacgagagaaccgcacattgaaaagggaaggaagagagatatttggcagagagagaaaacgttggaggaaggattgatatttgttggactttggatcgaaaaattgaaaggtaaaagaggtagagaagctctggattccgtctcttcccgtcgtcggcgacggtggttttgcccgttggctctgaggtatttctttcgcagatctccatctctccatttcatttctctctttatggtctcgaatttgatcagagtggatctaatttttcgttttgattaatataaattcatttggtatgcttggattcgtctgtttgggatctgtttgagtcggatttgatgtgttcggattatttgattgaaatttagggtttcttaggtagaattattgatttagtattgattgatatatcctcgaattggatatgtttgttttccagctttttccagcttttttcagatctgtgaggtataaagtgggccaatagttaggtgatgatggcaccacggttcagatattgtgctttgttatcttatctgcattttaattattgctgctaggtttttatggtttcgtgaacgatgattacttttgctaatgttgtttatgagactgtaatgtaagttgagtccatttttagagcttgcctggcttttggatggttttcttctagctattgttgtgtccatctttggatttcttataattttttaattgctttttcattgctatcaggttatatcaggctttaatttaagtggattgtcatcttctgagatatggaacaagtttttgtctggccaagctgctaccactatcggcttttctcattccaagaagcgctcgattggcggtttcttgtacgttctgatttccttgtgggctctttcgttaactgcacttagtggtcaaaccctcttctatgatctttaggggaaggtgtgaggcaaatttctgagacaggtatggctttcgattaaacctgttttattctacacgagtcttccctccttagatagtttgccattggaactttagtgcgtgttatgcatttggtacaagttgaatttcttgtaattatcccaattgtagtttttaataggtttcattaagatggtttagactttcttatgagtggcaaaataagaaaatttgagaaatggtaaaactgctaattttttttggacaatttgaaaaggaaaaatataaacaaacaatgaacacggaagtgttgtatgccatcacgtcaaccccacacttaatgatatcttttgtgcacatattcatatctatcagaggatatttacatatccgacattttcgttttttttgcagggctgaagtctgcaaattcttccttcgcatagtcctagagaaacctctttgttcctctctttcatatcttgttcttatgggtgctggttgaagaaagatacatcaatttcttttctttttcagtttacaaatgtcgtttccttgagtctgaacccctgagtgagatgttgtgagcatagggtccttcctattagccaaaacagtctttcttgttggttccttcgcgtctttgagttctcagtatgtgttttcctcttctcttgctctctttcttttgcctaaatggtcaacccgtttatgttcgaagtaaataacggtcagtctacccagctggagaatcattgattttactgccttggtgtcaagtacttcctacgaacgactggaagattaatgctatataaatctttcagaagttctttacttacataatataaagaggctactttgcttaaccagaaaaaaaaagatg

SEQ ID NO: 4466 - DNA, 3000 bp, Unknown
  misc_feature (1)..( 3000): cDNA_ID_2176945_gDNA_ID_1620707_Annot_ID_165322 3000 nt of promoter + ATG
gcaggaatactattgggcctgaaacccaaactcctacccagcccacaaaagctacagacacagtttaatctctctgttcttcttcacacgacgaggatgaagaaacaaaatttccgctgatcttatattatctcaccgttaataattatccaagtcttgaactttgacagagcttgtaattcgaaacttttcaaaatggttactttgtgttgtgttgtgtgaactcttaaaataaagaataaatgaatgttattttatttttagtcgtcttcaagttttggtctgcgatcgtgaaatttacgcagagagagatcagaatcgaagaaaacattgcaatataaaagagtcaccttcgagttcgtgtctcactccgataaagcaatgagtctattcgggcttggaaggtgaattactgattcctctccgtaatttgtccgaaaaaagagagtattttttctagagatttcgagattgtttgttatctcagatctttcgaatagttattcctgattgggtattaatatttcaatatgttgatttttgtggatttgctgagtaatggttgtgaatgaagatttgattgttcaatttttctattattcagaacttgatggaaccaatgttaacttactaccattgtcaatgtgtcctgaatgattcttgtcaaaatcttgttcaagttaatgtagaatttgcttatctgattctatgaatttgcattgtttatgttcatctgattagaaatcaaaagactttccgtcctaagaagagcgcaccatcaggaaccaaggtttgtagattcgattatttgacttgtttcttttacaaatgtgattcatgtttttgtagccttataaagcgtgttgttttgatctttttagggagcagagcttcgaaagcatatagatgcaactttaggtagtggtaatcttagagaagccgtcaaacttcctccgggagaggatttaaacgaatggcttgcagttaacagtgagcttataactacaccatcactttttcctcatggtttcactctgttgattaagttgttgtttttcttcagctgtggatttcttcaatcaggtgaatctgttatttggtacacttaccgagttttgcaccccggagaactgttctacaatgactgctggtcccaagtacagatttctcttcttcattatataagtaattttggtgctcatgattgatatagtaatttgatcactgttttctcttaagatcttgaatacaaaaaactttgaaactgctggagcaatatgggcatttgtaaagtggaaaagagtctttgtttttgagtgacaattatctcgatgatcaactactgactcatatgtaactattccattggtgaaatgcgtcggttgcaacgtttcaggtacgaatacagatgggccgatggtgtacaaatcaagaagcctattgaggtttcagctccaaagtatgttgaatacttgatggattggatcgagacacaactcgatgatgagaccatatttcctcaaaaacttggtaaaataaccttactctggcatatctttgatgattatggataaaaagacattggtctcaatccatggtaaattctgacaggtgcagcttttcctccaaacttcaaggaagtggtgaagacaatctttaaacgactattccgagtttacgcacacatataccactctcatttccagaaaatagttagtctcaaagaggaagctcatctcaacacttgcttcaaacacttcatcctcttcactcatgtatctataaaccctcttttactcatcattaatcttccattctagtcttttatcagtcactgagtttgttgatttttgatttttattggtctggttttgttttgcaggagtttgttctcattgacaagaaagaactcgctcctcttcaagaactcatagaatctatcattgcaccttactaaaccaaacaaaacccaaatcctctgtccaattacaagacttttttttttcaatcacattcatggtaataagtttaaccccaactgtaaaaaattgctgtttctgtttgtaaaaaaagaatatgcaatacactgctgaaccttggattttatttaaatggttacattcgaaatttcactggattacatatatgactcgtttacataattgctatgaagtttgttgatcaataactttgaagttttggctttcgttgaaaaggaaaagactaactttttgtatgtttgcataaatgttgtggtgttgtactgttgtcttacttaaaaactaagaataaagacgtcagccaattattgtggttcacgtgtatgtggttaacacgtcagctattttgttgatacggcgtcgttttcttctctgcctaacggaataagatggccgtcagcgaccttctcaatggattgcttcgtcacctaacgacaaaataccaaaatgcggttttgaactgatttggcatgactttaattaattaatgactcctccattaaattaaattaaaacattattcatcatttatgtttgtttaactgactaaacttacgtctttggcgtgattagttattttaatttatttatttattttgagtatacacagatatttctctctctgctgttttatttttttatagaaaatattaatttagctttggatttttttctttttttttctctgtcaaagttgaattgctttttctcttgtttttcgtcgaagtggaaaatttgattttattttttccggaattttgaaaatctgtgagctcataaatcttcgctaatcgcagagacgaatctgcgaaaattccaacaccagattccggcgccggagcgccgatgaacaatcaggtcgtttagtaaaattcgatgaatctcccgcggaaataattagattcgatttcgatttccgtggggaagttttgtgccatttgatttgttttcgttcgtccccgttggagattttttgtaatttctggggacagaaacaatg

SEQ ID NO: 4467 - DNA, 3000 bp, Unknown
  misc_feature (1)..( 3000): cDNA_ID_1824305_gDNA_ID_1620707_Annot_ID_48916 3000 nt of promoter + ATG
caaaacaaatcgatacatggataatggggttattggatatattgtagccaattctatacggatagggagccctacgtttccacaaatatattgggatggatattaaagcattttaaaaacttactgaaaataaacattgaatattatatagtcaatcagccatcgtcatggggttagaataaaacaagcactcctttcaagttgatgctttgttttaatcaaacgtcatgatcccaatactaatattcccattttaacgtcacttaataacgtaattaagtcaagataatttacgattgatttttttagcataagtttaacctaatcttcaaattatgttgataatccccgcttaagttcttctttattttaatcaagtctactaaaactaataatgtattatgactcgattgccttgataaaaaggtaaaactgaaaagcacaagattttctcttctcccacctaacttttggatttctctattgtttttccacaaggaagacctaaatttcttagtttaatggatgattaattgttttgccaaaaaaaataatatcacaatggccaaccatgataaaaatgactgaaaagaaaaaaaatcattctatgataattagctaaaagccatttgagcaccaaaatataatctacagcatgtatttgtaaataattagtacgattatatggatttgattaagtaagagaaaacatttattcaaaacgtaacataattatttattaatggatcatatgtgtgttattcacgtggttgtatagtaacgttattgcgtgaaattcattttatatgcatacttgttggaattcaatacgtactgcataagtgcatagatatgccaatattcaagtgccaatgatgattgtgccgtgttcctaccaatcgttgtggatgagcatatataccatccacttacgagtaaattaaaaagaggcaaaaaaactattattggtttatcttaaatcgtttcatgtaattttcataagattcgtctatcagaatcgaatcttattaaaggaaaccacttaagaaatattaaaattgagtagacaaactaaaatatatagcactcgtaaaatataattaagacaaggagcaacattatccagttttctttatacatgggatctgcgggaatatatgcttatgttctggaaaaataatggagtaattgagttttataaaattgcgtgaacctccaaaatcaatgtatcaaattcagatccacataaaagttatcaacataatcaaaattatctttcaattatattagtgcttccaaattcctagtagtctaaatatcttgttctttgacaaaaaaaaaatatatcttgtaggttcggctttgaggaatctaagaaaattaccggacccaacttaagatatattagtatttagtgacgtgtaaaactaataccataaaaataaaatcaattatggtgatttagtagaatataaataaaataatgttaagtagaatttaatgatgatttatgatatggccaaatgaattaacttataaaatagttaaaaagttgttttgtttaataattgaagaaaaattaagaaattatttaatagattggtaaactaatttatctaaatataattttcaaaaataatataaatgatataaaactttggctaccaaaattgaactagtcctctttgggttggtttgactgtttgagaaaattgcttcttacagtttagctttgttgtctatgcttggccttggctgatcgacaaagtgattcgcataatcgcatcttttggatgcaaagacaaataaagatatactccaaaagatgcgactataacattcttttcaatattaacgctactttatcatcaacataaattacttaatcaacaaaacatgaaaataaggaacaaagctcgaaacgcaacatgcactacggaaaaagaggaattaaaatgaacatgtctacaatttgtcagtgaagttttggatgtttctactatgatatggcttgtttcatgcctaccatatgataagtgttctcgtgattctcgctttatttttgcatttttttcatttgtttgtaaatcacttattattgttgtttttcattttttttttctgcgtttggcgttttactggaactttaagttacagaaaacatgaatagggaaatttgttaatatgtaactaaggttagatattttgtaagtgacgtaataagtaaacagattattccatatcatttgtattataaaaatatgaaaattgtggtataacaagtaattttttaaagtttttttttcagttgttttatgttgctttccaaaaatatattaacacaaaaaggaggcaaaaataatctttaaggaaaaaaaaaactttttttaggaaatttttgaagaattaataaaaataaaagaccatttttcatattttcacttaattaaattggcttaactctgcaacaagtgtcgtcatcagtccttttaaaacaccttgtatcttccttttaccaaatccgccattgaagaataagagagagagaagagaactactcagatataaaaaccctagatttcttctcttaaaacccacatcgaatctcaactcagaaccaacaatgctccaacctttctcttcctcctctgttttctcgagaatcctctggactttcttggtttaagaagattcgttgttgaatcagagagaaagaaagcatccatttttctatcattgcttgcttgctatggaattgggtaaatctcgattctacttatgttgcaattgcttttctcctgttagattttccgattattctttagctggaagtgattatccagacgccatctccatcactttcaattgtattcctataccttcttctgaagattcttcgtatttctcgattcgatgtttataaacttcaaattctcttccaaatcttgaaacgaatttctcccaaaaatctctgtttcttcacaaaaaaacaaaaaaaca

SEQ ID NO: 4468 - DNA, 3000 bp, Unknown; identical to SEQ ID NO: 4463
  misc_feature (1)..( 3000): cDNA_ID_1838565_gDNA_ID_1620707_Annot_ID_48918 3000 nt of

SEQ ID NO: 4469 - DNA, 3000 bp, Unknown; identical to SEQ ID NO: 4462
  misc_feature (1)..( 3000): cDNA_ID_1824297_gDNA_ID_1620707_Annot_ID_48919 3000 nt of promoter + ATG

SEQ ID NO: 4470 - DNA, 3000 bp, Unknown; identical to SEQ ID NO: 4461
  misc_feature (1)..( 3000): cDNA_ID_1824291_gDNA_ID_1620707_Annot_ID_48921 3000 nt of promoter + ATG

SEQ ID NO: 4471 - DNA, 3000 bp, Unknown
  misc_feature (1)..( 3000): cDNA_ID_1824283_gDNA_ID_1620707_Annot_ID_48923 3000 nt of promoter + ATG
cttttaatgtcggggaaaatggttttgacaagctcaaattcaaccattgttttgtcaatatattgccggtttggtctgaactctgaactctgaagaataaataaacaagatatgatttcgggcaataattattaatgctaattgttttaagctaaaggggaggggggagaggaagaaattttggttctttattatatcaacaaaaaacataacgaaaacatgaatctaggtatatcattttaatctgcatatccgaaaatgttccctatactaactaatacacgaatttattataagggaaacaaatagacaggtgatattttaaattagagctctacacatctctttttttgcttggtggctcaacaaaaacttcatcttcttttggtttcaaactctacaaaatcgtggatgcacttacagttatatataattagatatattactgataatatagattatatgatatggatctctctctctatatatacattgtatttaatccattattccatttactcaactcagacaaactatgattaatagataatatatatatatatatatatatatatatatatatatacacactgatacatttatatatcgcatatatatgtttgtaatcttgtatatatatctaacgtatggatgcatgaattttacaaaatgagagaaccatttattggtaagacttttctttgatatcatgaaggaagcagccaaagtaatatatattttatgttctgattattatatttttctccgctccgccaagtcaattgataaatttcgtgcaactaagaaaaatatctgcatcttaagctaagtcatatcattagaaatataaatatagaagtcatattcttatgttccttttctctaatcagattacatttaaaacccaaaagtttgaagatatatactagagttatttggctttgttacgttaacgtgggaggaaaatagcgagtgtttctgattaaagtcaagagcaaatgagcaatacatatttgtctgtatatgtatccatgagttactagtcgaaaaaaaaatgttcattacttttatgttatgtttatttttgtcaacaggtcgttgcagatttgcagcttatcttaaccctaatattttacacatatgtcatgtatgtatttctcagaatcaagttaagaggttaaacaaaaaaggaggttaaccagggtttgtagcttataatatattttatatttattatatgtagtttatattaatttttgtatatataagtgaaaaagctatgtaacaatattgtaaaaaacaacatatcatttaaattatagctccataatatatatagggaatagaaacaactcaaatgtaaataatatagtggtaagactcctaaattatataatccttaggcctcaaaaaagaatgcgttagaatgtaaattaacggtttaaaattttctgagaaaaaagatgatgaggattcggtccacaattctccgattaaccatataaaactctaaactttcatataactcttatcatgaaaccgtaaaagatcgtccataattattgatccagattttttcattaaataatagaaggattcaatatgattttagctagatagatttgggagtttaattagctggtttagctaattcaccagaaaatgttttatctaactagtactaattagcatattgtattttacatgttatcccaaatgaattatttttaattttcacacacacacacatgtatacacttttcatctagaatgccacacatcttcattttacttttagtcattgttagttgtatttttttgttaatgaatgattgaaaactgaaattgcaatataagaatattttgataaaaaaatatatatgacacaaatgcaaataataatagagaattctcaatatagaattgtttaaagaaatctatcatattaatctaaaaaattattatcaagatataaattaaaaaaaaatatcttatctaattctatatgtgcatgtggtatgtgtaataagctactacagacacgtaaacagatattactactttgaatagcaattacatttataactttacaaagaaagactacatatgtagtaaataaatctcaatattcaatctcgtttagccatttgtcatgatatttgtatgtagatatgctatataatatcacaaatatcatattcaagtagtaaaaaatctaaagaaaaaatagttgccaaaacaaaagagataagtaaaactagtcttcgtagttatctctctgaattatgcatggatatcattcccactcttttattcactctactattaagaaaaaaaaacgtgctgtatatgaaacaaaaaaaaaacccaaagaaattgttgatgtcaattgatataacacatatctgaaattaaatatttgatgtagcacaagaaacttaaatttaaaaaccaaataaacttataaagggtagactttaccccacatttgtctctctctacttaagccaaattgctctattcttttgttttctctttataattaggctttataaaccaacttttattaagaacaacaaaaataaaattgttatttatttggcaacagaacgaattattaaccaaattaatccatttgaatggccctcctctctctctgtctttaattagttggtttggtcaaaatctcacacgctctttatgcatgctctttgacacgtgctatcttcgtctctctcaaatgagctgtctctctaataagagtttcttctgtataggaaaggaaaggtctctctctctctatttacttatgagaatagcctataaaaccccttcacatctcccacttgttttgcatcacaaacatttcttccattacattaaaactccaaaaaattcatttttgttttcttttagagttcacaagttcttcgttgttcagctactcccactgtcataacacgaagtgggtttttttctgatcaaagaacaaaaacaaaa

SEQ ID NO: 4472 - DNA, 287 bp, Unknown
  misc_feature (1)..( 287): cDNA_ID_1822388_gDNA_ID_1620708_Annot_ID_48925 3000 nt of promoter + ATG
aagcttcgaatacttcaacgctctcgtcctccgtgattggctaatccgtggccgtcgtctctccgagtcggaatcggaatcggagtcgtcgcttactttctccgacggcaattccacttctcgtatcagctctctcggattgttagtttccttttgctcacaatttttgataaaacttctctgttttaggataagtctgattttattttattttctgtttcaatttttctgatatcagtttgcattacacgacggtgaaattgggtactccgggaatgagattcatg

SEQ ID NO: 4473 - DNA, 3000 bp, Unknown; identical to SEQ ID NO: 3920
  misc_feature (1)..( 3000): cDNA_ID_1824402_gDNA_ID_1620708_Annot_ID_48926 3000 nt of promoter + ATG

SEQ ID NO: 4474 - DNA, 3000 bp, Unknown; identical to SEQ ID NO: 3925
  misc_feature (1)..( 3000): cDNA_ID_1824395_gDNA_ID_1620708_Annot_ID_48928 3000 nt of promoter + ATG

SEQ ID NO: 4475 - DNA, 3000 bp, Unknown; identical to SEQ ID NO: 3926
  misc_feature (1)..( 3000): cDNA_ID_1824387_gDNA_ID_1620708_Annot_ID_48930 3000 nt of promoter + ATG

SEQ ID NO: 4476 - DNA, 3000 bp, Unknown; identical to SEQ ID NO: 3927
  misc_feature (1)..( 3000): cDNA_ID_1824383_gDNA_ID_1620708_Annot_ID_48931 3000 nt of promoter + ATG

SEQ ID NO: 4477 - DNA, 3000 bp, Unknown
  misc_feature (1)..( 3000): cDNA_ID_1824374_gDNA_ID_1620708_Annot_ID_48935 3000 nt of promoter + ATG
attccccatccatagccgcaaatatgagagtcttgactaaatctgattagtaatttgaataagtaaagggtagcaatgattcttgtcatagttaggccaagcttcgtctcctttcacaagcgtctcatggcgcttccaaacttgtgcatcgtagttttcagttaaaatgtagtgtaaaccaatgtccttaatctccttcatgaacttttccaaggagtcacctctcttaggactgaaaaataatgcttcggaggcttttttggctttaagcagcatcttgatggttctcgcaaggtccttatgaaattccttgaaaaatgtactgttgaatcataaaaatatgtgtcatgataagggatgagaaaaaaacatatcgaaaaagcggaagactaaaatggagagcaaggtaccaatcgcttgcaactatgatgtcgaaagtgttggttaactctgaaagttgatgctgattccagtgcaactccatggcttttacgcttgtgccaccaaatgccatggagttggtttctatgttacgtttaatatctggatgttaagtacatcaatgaatccaaaacgttttgagtaccgagattccatatctcaagggtttcagccatagaagaagacaattctaatgaaacagtatatgcacaacacaaaaacaaaacatgaaggatacaattgactacttgggggtttccatcggagattaccacttctgatgcctcggttgcagctgcaataactaaaccggctaatccataccctgatccaagctcaattactcttttacctctgcaacatcccaatgagccgagtaaaattaagtagacgaagttataaaagaacaaagaacacagatgcaaatcagtcttaaacctgaaacgttctggctgagacttgcaaaagtaggctagtacttcttcagagggccactgacctggaaaacaacgacagtatgaattcagagaatcacaatttagatagcattagagttccctaagcaactaaatcttttttattcttaacttgtttgaatcatggttaatgccacgttgtatattgacagactaaaagtttaagcagatatagtttggttagcgattgtatcagccgcaaacaagccaaatacacagagcagagcagcaacattgtactactaagtttcaaaaccaacaaagacactaatttatgtgacaagtagagagatacagtgagattgagaacttacagacaagtccagtattatcaatgttgtatcgattagatatctcgaagtcattgagatcactacaattatccactctttgtctgcatatattttaaagaagctcttaggagtggcaaatctatcgaacaaaacataacattgtttcatttgatgaaaacttcagatcaaaatcctaacgttagatagagtttgggagagccagtgatgggaagtgtgtagcaaacggatgcttcacgagacttatccgattgaggagaagagtccaccacttgacaaggaatcaagttgaatccttgagttgctttccttgaaatccgtttggtctcagtttgagattgagaatctgaggaaaattgaaagatgatccattagctatgcgaatgtgtgaaatcgaaaagtggatgcaggaaggagaaggagtaggggagtatcaaccagatctacggagaagcgcttggcgaagaattttccatctaagagcagaggaagaagaagaagtgggatccattgaagaatcgttatagctttctccgccggaatctgaaatttctcttgcagactaaacagcaaaacagggaagatgacgatttcgcttcccggcgaactttagtttggtttttttgcctttttaacacagtactttttgggggtcaaacaaagtacagtgaaaattaaattgtcaactgtaaagtacagtaacatttagattctgatctcactgatgttaattattttaaaattgaggacttgttttgtaatttaatattaaaagtgacacaagatgacaacacaactgctataactcaaaagtcaaatgacaattgtcaagggataaaagctgtatgttagaaataaatcttattcactctttagatttggtgcacaattttttttaaaatctatagattttcttaatcttacttatttatacagttttaattactctaaaaactctattgattttttttttgacatctaaaactctattatttaattttcaaataattgtacttcatagagtgatatgagattatgcaattgatttcttcttaaacaaaatagaaaataacatgtgacagaatattatgtttttagtagacatatatttttatacaaaaaatagtataagtgttatatccctttaaatcttattcttatttttatacaagaaaaaattttcatcatcataattgattataccttttaatcattttttttgccttttatgttttctaatagaaaaaaaaaccaaagttttcctccatggtttaggtaagatcctactgttaaatagaatttcatttggcaaaacaaagtcaatacagattaccattatcatagtcaattacacatcttaattacttgaataattcttgtttagtgtgacactaaaaaaggtggcaaaacaataaacaaatgtacaatatacactcaacaaaaagaaattttggatataaacaaatttaatatttggataaagcgcgggaaaatctcctaaaatagttaaaaaaaaggttaaaccggcccggttcatagtcaaaaagtatgctcctcttgaaacacgcaacgcccacgtcttcctatctccgagactccgacagcaaggttacttaacagttaatcaaactagattcgctttcttccatcactaatcttctgactttttctatttctgccccaaatctttttcaaattcatataaataaccaaacacttgttcttcttcattcccccttcgtcttcctcctcctaaatcaccggcgataatg

SEQ ID NO: 4478 - DNA, 3000 bp, Unknown
  misc_feature (1)..( 3000): cDNA_ID_1450444_gDNA_ID_1620708_Annot_ID_48936 3000 nt of promoter + ATG
cttgacctttcgaagccattgttaatccgtagttcaacatctcgttctctgtttcgttgactgaatgatccgatgactcggattctttaacgggtcggagcgagaagaagtaatgagactcatcgactttaacggcgggttcgtctttagtcaacggccattggatctcgtcaccgacgcgagcgaaaaccgcgacggtgatatctccttgaacaagacggagaatctcgagatcgccgcaagcgagctctacgctgtaggatttgtcaatgaggtggaccatcgcgccgtggattgtgagaatcacttcctccgtcgcgagaggaggcgctgaagctgagtcagaggcggtgggatcggggaagatattgttgacaagatcattgacattgattgaaggatagagattattattattagtagaagaggaggaggaagaggacttagggagaggagcaacggtggttgaagtgtcgacggttggataaagcttgggaggagttgcagagcattccattatcgccggtgatttaggaggaggaagacgaagggggaatgaagaagaacaagtgtttggttatttatatgaatttgaaaaagatttggggcagaaatagaaaaagtcagaagattagtgatggaagaaagcgaatctagtttgattaactgttaagtaaccttgctgtcggagtctcggagataggaagacgtgggcgttgcgtgtttcaagaggagcatactttttgactatgaaccgggccggtttaaccttttttttaactattttaggagattttcccgcgctttatccaaatattaaatttgtttatatccaaaatttctttttgttgagtgtatattgtacatttgtttattgttttgccaccttttttagtgtcacactaaacaagaattattcaagtaattaagatgtgtaattgactatgataatggtaatctgtattgactttgttttgccaaatgaaattctatttaacagtaggatcttacctaaaccatggaggaaaactttggtttttttttctattagaaaacataaaaggcaaaaaaaatgattaaaaggtataatcaattatgatgatgaaaattttttcttgtataaaaataagaataagatttaaagggatataacacttatactattttttgtataaaaatatatgtctactaaaaacataatattctgtcacatgttattttctattttgtttaagaagaaatcaattgcataatctcatatcactctatgaagtacaattatttgaaaattaaataatagagttttagatgtcaaaaaaaaaatcaatagagtttttagagtaattaaaactgtataaataagtaagattaagaaaatctatagattttaaaaaaaattgtgcaccaaatctaaagagtgaataagatttatttctaacatacagcttttatcccttgacaattgtcatttgacttttgagttatagcagttgtgttgtcatcttgtgtcacttttaatattaaattacaaaacaagtcctcaattttaaaataattaacatcagtgagatcagaatctaaatgttactgtactttacagttgacaatttaattttcactgtactttgtttgacccccaaaaagtactgtgttaaaaaggcaaaaaaaccaaactaaagttcgccgggaagcgaaatcgtcatcttccctgttttgctgtttagtctgcaagagaaatttcagattccggcggagaaagctataacgattcttcaatggatcccacttcttcttcttcctctgctcttagatggaaaattcttcgccaagcgcttctccgtagatctggttgatactcccctactccttctccttcctgcatccacttttcgatttcacacattcgcatagctaatggatcatctttcaattttcctcagattctcaatctcaaactgagaccaaacggatttcaaggaaagcaactcaaggattcaacttgattccttgtcaagtggtggactcttctcctcaatcggataagtctcgtgaagcatccgtttgctacacacttcccatcactggctctcccaaactctatctaacgttaggattttgatctgaagttttcatcaaatgaaacaatgttatgttttgttcgatagatttgccactcctaagagcttctttaaaatatatgcagacaaagagtggataattgtagtgatctcaatgacttcgagatatctaatcgatacaacattgataatactggacttgtctgtaagttctcaatctcactgtatctctctacttgtcacataaattagtgtctttgttggttttgaaacttagtagtacaatgttgctgctctgctctgtgtatttggcttgtttgcggctgatacaatcgctaaccaaactatatctgcttaaacttttagtctgtcaatatacaacgtggcattaaccatgattcaaacaagttaagaataaaaaagatttagttgcttagggaactctaatgctatctaaattgtgattctctgaattcatactgtcgttgttttccaggtcagtggccctctgaagaagtactagcctacttttgcaagtctcagccagaacgtttcaggtttaagactgatttgcatctgtgttctttgttcttttataacttcgtctacttaattttactcggctcattgggatgttgcagaggtaaaagagtaattgagcttggatcagggtatggattagccggtttagttattgcagctgcaaccgaggcatcagaagtggtaatctccgatggaaacccccaagtagtcaattgtatccttcatgttttgtttttgtgttgtgcatatactgtttcattagaattgtcttcttctatggctgaaacccttgagatatggaatctcggtactcaaaacgttttggattcattgatgtacttaacatccagatattaaacgtaacatagaaaccaactcc

SEQ ID NO: 4479 - DNA, 3000 bp, Unknown
  misc_feature (1)..( 3000): cDNA_ID_1824368_gDNA_ID_1620708_Annot_ID_48938 3000 nt of promoter + ATG
ggtgaacgtagatctagaggaggagaaggttgttacaattgtggtgatactggtcacttcgctagggattgtacttcagctggaaacggtgaccaacgtggagccaccaaaggtggaaacgatggttgctacacttgcggtgatgttggtcacgtggctagggattgtactcagaaatcagttggaaacggagaccaacgtggagcggtcaaaggtggaaacgatggttgctacacttgtggtgatgttggtcactttgctagggattgtactcagaaggttgctgccggaaacgtcagaagcggtggtggtggtagtggaacttgttattcatgcggtggagttggtcacattgcaagagattgtgcgactaagagacagccttctcgtgggtgttaccagtgtggtggttctggtcacttggctcgtgattgtgaccagagaggaagcggtggaggaggtaatgataatgcgtgctacaagtgtggtaaggaaggtcactttgcaagggaatgttcttctgtagcttaatcgatttcctaatcaacaaaacaaaaaaacaagaatgaaattgaatcgagttatatagtttggtatatattactcttcgttttcatttatctttttttttgttgttgatgggaatgaaattgcctggtccttttggtgtgtttttgagcttttattattatacagagtgatccctttttgttataactattacaagtttttagctttatttgatatggatgctctctccttttcttctatctgtttctggaaattttgacctcatcatattacttatgtcatccaaagtttgagttttgtcctttttattaaagtgctgctagtttcagttcattgcttttgtacttggatgttttgactattagcagcacaggtatgacgtctcaagttcaatagtactttttaaccctttgacacaagatgaatccaatccactggttcttttgttgttggtaattgttatagactttttagctttatctgatatgagtgacatcccaattatcaattgtgacttaattagtaacctgtgaattgatggatatgattttgcagtttcatccttctttaccaataaaggactggatacaaatcttgtggacaaagttcaagtgatgacctcagtcttacctgattaatccctgctttgtacagtcatttagggaatgtcacagtcgttttaaagggttaaaagtttgaacctaattcactattaactaaatccaagactgatgacgaatcttcctgatagaagaaactggaaaccaaagtttggtgttcaccttttcatgtccaaacaaagccacaaaatcatatgatcattggttagaagattatagtaataaaccacatataaaaacctgattaggttaaacatcatccacatctccttgtttatatcatcacttggatccaatcaacgaaaaccttgctaatcacctcagatcgcattaatcactaatatttttcatggtattaagttccattgtcatatagatgtctcttgaaatggtagcttaatgagcaattttaaggttatggatcaatttcttttgatatttggtcagtttttttttattccaagtgcaatcgaacctgcaacttctactagttttacatccaaaaactcggatcttcaaccacacatggatttaaaggttatacttcattttatagaaatatgcactaaacataaacgcaactatatagccaaatctctaatcagtcataccaattttgcttggatgtttggaaagaagatcaaattcaataaatttgcatagtagaaacatacatgagacctaccccacttgtagtatttgtttttcctatttgaacataagaaccggtcacatgtcttagtcaaaacataaataacttgtaacaatggaagaagcatgaaccaacaaagttaatatctctacatcacacaactaaaccttggaatgtcgttgacccaacaccctttctttataaaacaatctttacggaaattctcatccaacgttagccactgtatctctttccaataataactcaaaaaaaaaaaaaaaaaaaaattgtattcctctcctgaacttctgtattgtatgttcctgcttgaattctaaatagagagagatagatgtttgagagtctcacgaaatatcaaacatcatcatatttagttttgtcatcttgtacttattgtaataattaattaacagtgacacaacacaacttgggtggatagtagctatagatactttgtaagaccgtgtcccttggaagaaagaagagggcagaatctaaggatggcatcacacaatacgttttctttgtcagccttttttgttgttcaccttatttccttcaatacatttccattttatggtgattagtctgcgttagtgatcgataaaccactaaccaattttttctcgctctgctcttttacttaaagaaaaagaaaactacaaacgaagtaatggatcgtctaatatattatttaagccaaaggaggagacaagttctattttagatcaccgacatcaagactgatcaatatccatatgcaacccatattgtcatattgcacgaatcatacaaaataaacaattaagaacatgatataataatatttctatgattcaaaagaaatgtttctacatataaatgctcattaaaaataataataacgtgaacatgaacgacacattggccgactaacttagacaaaggcggcatgggctcacgtgaagccgacctttctaaaaaatctccaagccctttaaaagattcaaccatcccctaaacctctctctctcactccaatttctttcattaccatataaatacaacgccttcacatttgcactctttatacatttctctcgagagcagaaacagagtcaccggtaaactcatctccggcgacataaaaacacaaaagttcatatatttagattctggtgactctctgctctaatg

SEQ ID NO: 4480 - DNA, 3000 bp, Unknown
  misc_feature (1)..( 3000): cDNA_ID_1824360_gDNA_ID_1620708_Annot_ID_48942 3000 nt of promoter + ATG
aacctgatttcagagaagtcccatggccaaccattagcaacggtgccaaagatttcgtgaagaagttgttagttaaggagcctcgggcacggttaacagcagctcaagcgctatgtatgttatgcacaagcaaatgccatatatttccattatttttggttaacttataagttactcaacttatggatttggtttgtagcacattcatgggtgaaagaaggaggtgaggcctcagaggttccaatagacatatctgttcttaacaatatgcgtcagtttgtgaaattcagccgtctgaagcagattgcacttagggtaatagagaaagagatagtttgtatttcatacgattaagtttttcagtatttttcttaacctgagttgttgtgtttttggaggctctggcgaaaacaattaatgaggatgagctggatgatctcagagaccagtttgatgcgattgacattgacaagaacggttctataagccttgaggaaatgaggcaggtaagaagaagacagcacaagtaagcgatttcaacacatgactgcaacagagtttgttgactttctaatcttaacaggctcttgcgaaagatgttccttggaaactcaaagatgcaagagttgcagagattctccaagcggtaggtaaacttagagtattaggactaattaaagccccttcgacaggttagtttatcatccaaaatgtttatgtgtctctgcagaatgatagcaacactgatggtttggtggatttcactgagtttgtggtggctgctttgcacgtgaaccaattggaggagcatgactctgagaagtggcaacagaggtcaagagcagcatttgacaagtttgacatagacggagatgggtttataactcccgaagaacttagattggtcagtctcatgcttttcacactcccctctttgtctaccttgtctcactagaatcaatgtttgcagcaaacgggtttaaaaggctccatcgaaccacttcttgaagaggccgacgtagatgaagatgggagaatcagcatcaatgagtttcgcagacttttgagaagtgcaagcctcaagtcaaaaaatgttaaaagccctcctggttaccagctttcacaaaagatgtaaattactttttaacttctcaaatcaccaagtccacaaactctaatctcccatgtacaggaacagaacacatcatttgtcacaatctgttagatgggatttgtatagaggataccgaggaacgcacatctgccgttaggtttgaatatgtttctcaagtcttataacatcggtcatagacaatagttcagttgcaaagagatataagcaaatgcttttgtgttttatttgcttgtgataagaatacatcgttaatcatgtggataatctacaacaagtttaatcatggtaccttctcaatcacggtattaaacacaagttcaggggaatatgtttattggtttatggcttcaacatgtcatttacggtaccgggggaactatcttgaacagcttgagataatgagtaactattcgatgagcttgcagtggttgtcaagcttactttcttctcttttccagaaacatcctgcatggaagtaaactctggtcagtccatgaaagagcttgttggcaaaactattgaagagatcactcacctgttgagctaaagaagaggcatggattttaagctcgagctttaaacgaacatcatctttttgatcatttccttgacctgaatggttactgttcatcatcagatccaaatctaacggcttgattttggaatcttgtttcattgaagcatcggcagaagaagaagaatgctgctgaaccgatgcttgttgttcggttagaggattgacagaggctgaataaggtataaaactggactgaccctgagttatggctacgaaggggatatgataactgtaatgaggtacccatggaaccatggttttgattctatgctgatattgagcattaagaatctcgatatcagactttaaagtcgctttctcctctctcagctcactcttctcttgaattagctgatcaaacgaactggaagatgagcacttgagcagagcatattcaactataaatccaataagagaatggacaaagttaatcaaatcacctcacgagactcttgagatagtgtttcatactcagcttttagtctatcaacttggttcattacatccttgagcatttgtattgtatcagtgagaactgaggctttgtcactcttaggcctattcggatctgtagaaagaaaccattactctaaactcaattcaaagaaaattttgaaaatctgtattcatcttgtgaaaagatatataccaagtgcatttccaagctcaagaaactgttccttaagcttatctctacgaagcttctctcgctctgctttctgggaacaaactgcttccttcttcacttccaccaccatctcagctcctctgtaattagacgaaactatgaataaacatgacacagccatgtaaagttaacatctttaagcactaaaacctgagattttgtcccgaagaagaagaagaagaagcagaggaatcatcagcaaaatcagattcagagcaagtttttggtttcattggttgatccatttgcaacgttaaaatctctaactaaactccaagaaagataaagagagagccactgagaagaagtagaagttggttttcgtcttctcattcttcttctacgtgaatatataaaaatccggcgataatggtggtggacgccgacgaggcaaatcaataacttgtgctccccacgcgccaccattgaaaagatatcatatgctacggttagttacaaacttacgtattcacgtgtcaaccgtcgattctactgactttagtcttctaagatctcaaccgtccaatcttagagatacccaatttcccctaaaggaatgatctttgtcgaacgaactacagtgggaagaaggagaagatg

SEQ ID NO: 4481 - DNA, 3000 bp, Unknown
  misc_feature (1)..( 3000): cDNA_ID_2993638_gDNA_ID_1620708_Annot_ID_48945 3000 nt of promoter + ATG
tcatccgaacttaagattgcttctgaatttcttacgaattggttgcctttcttatctagagatctctgcaacgactgtgctcatgttctctccgatcgaatccgttctctagacccaggtttgaattcttcttctctgttgaaaattctgattcttttttcataattcgattaaagaaacggaggagaattttcgttactactaatgttgtgtgttctgtttcgaaattttcttcagctattgaattcaatttaatgattggagttacaataatttctaaactaattcatagatttgtgatgattagagatatcgaatattctatgtaatcaagctatcttcgtgagatttctgtatttgttctcttaccttatgtgtaattgtgtttccttattacagagcattgtagtaatggagaagttaaagcgggttctggttcaatggtggataacatggaatctgaagaagttgataacatggaatctgaagaagttgataacaagatggacaatatttatgacgggaagttgtgtgtttctcactcattagatagtttgaaagctggggcttttgtatttggatctttgtcagacagtgtaagtcatgcaatgccatcatctcagtcaactgtttctgaggcggcaagtgcacaaatgtcttgggctgatatgggagaagaagatgggctcgaggaggaagaccagaaagagaatgaattaggttcacatggagttgatgtgagtccttccgttggagactcgatgaagactcctgagaagcgtaaattgtctagggaagaaagagagcgttatcggtttatgaatgtgaagaaaatgaaagtgttttcttgttatgagaaagttagagggaggtctgttaatattctcgaaggacttgaattgcataccggtgtttttagcgcggtggagcagaaaaagattgttgattttgtctatgaactacaagagaaaggccgtagaggagaattgcgaggtttgcttctggttttctttcattgctttttgcataatgtgaatttgaaaactctaaacggtacttatctaatcttgaatttttggttctttttcgatatctagagcgtacttttaccgctccgcataagtggatgagaggcaaaggacgagttactattcaattcggatgttgttataactatgcaccggtaagtgactctttcctcatctttaaaaatgaaaacattttatcaactatagtgaatatggaaagagttttttgttttttggataggacaaagcgggaaacccacccggaatccttcaacgtggagatgttgatccaatgccatctattttcaaagtaataatcaaaaggttggttgggtggcatgtacttcctccaacttgtgtaccggatagttgtatcgtcaatatctatgaggaagacgattgcatacctcctcacatcgataaccatgacttcctccgccctttctgcacagtatcattcctcagtgaatgcaatatactctttggttcaaatctcaaagtcttaggacctggtgaattctccggttcttactctataccgcttcctgtcgggtaaatcactaaagtttgcgtaccctctctgagtttattctactgaagcttctgttgcttaactttttgacgagtttttcactttttttgcttcagatcagttctagtgctcaagggtaatggagctgatgtcgctaagcattgtgtacctgccgttcccacaaagaggtaatttgttagcaccttgattgtttgtcaacgtttatttatatgtttggtaatgaaaccattactctctctttttacaaaaggatttggtgttttgcaatttatcggtgttatctcgttttgttttgttcatactgtttttgctatcgtcggttctgctttcaggatatcgatcacgtttaggaaaatggacgagtcgaaaagaccagtcggattcaccccggaacctgatttggaggagattaagccgttgccatacgaacacaccacgccgagtactcctgctgatgcagtcattagctcttcaagatccagcattgatcaaaatggtagtaatcacaacaatcgaactgcacatggaggaggaagcaagtatcgtaggtcgagagattatcattctgagagtcgagagcggtcatcatcgggccaacgaagagaaacttcacgacatactcctaataggtcctatagacccaaggttactagctccgacaacgtctgagaatttgtaacacgaacataatatttgattttaccacagaacaaattatagaaattgcttctaataattcttttcgttttgaccgaattttttacgataatttcaactatatggttgaatagacgaaaatatcatccaattggtttcttctgaaagaaaaaaaaaatggcgtgaaagatttctctctttttttctgtaaactttcattctccgtgtaaaacttgttcgatgattataaaaaacgaacacaactatattatcagtgttaattacatttccttaaccataagattttgttttcttcgcatttctgaaatttgagggaacaatggggactttttatataaaaaaagttgggacctttatatataactcggctgctgaatttcgtttcgttgcactgctacgctcgagttctcaaaggttctcctcgctttctcttttcaggggagtctcgcagagagacccacaccaaaaaaaaaaatcgagagggaaaattcatcatcttccatcgttaacctcgaggctattggtgttataccagataaccgactcttattaaattagcttaatttgataaacccttgttagtgtctgacctagtggagcaccttgggcttagcgttagggatcgtcgcggtttgggttttagaaaggaggaggaggaagcaacgtttactattcctactatgtgacggaaccctaagacagcgttttcgcttgtctgggtcagctttttttatagccatg

SEQ ID NO: 4482 - DNA, 3000 bp, Unknown
  misc_feature (1)..( 3000): cDNA_ID_2687174_gDNA_ID_1620708_Annot_ID_165394 3000 nt of promoter + ATG
ttcaaaaagatgacttgacattcgtttggttgatgatccttgcatctcttggatcgaaaatcttgcggcttcaacgattttgtcaatgctaatgccctcttgagattcaaatatcctgttgattcttgagcggagaaccattagcagctgatcaagtgttgttgtatcctcatctggctcactggacttactagaggactgtttttccacagatcttctactgcaaacactgttggaagattttgaagctgagttagctccatctggatcactacctactaacttttcaatctccaagaagtcatccatcaactccagtctactagaactcctaggctttgaggaaccattaacacttacttttctcactttatgagaatctagtgaggttgctgggccacactcagaagaacttccttcttcatcaaatccatcttcggacaccgaggtgacactaggcggatagtgatgatcatgaccactggatagactttcagagagatttctgctatttgattttggagcattcttgtcattgttaaacatatgcatctgcccttcaagaatcttaagcttcccaagagtcttagcgcatacatttctcgaaacctgcagttcattgttacgagcagagagatgttctttaagcgtctgaatctcctcctccatttccaatgtacgtcttgtgagatatacattctctcttttgcactcttccaacttatgatcagtagaaatctctgcctttgcgatgtgtgcattgtgattttgagacatgtttctctgtgctcgagggtctgtgaattcatgccctaagccttcaacttctagcttcatttgagccatagcagcaggaccaggaagctttttccgcagaagtcctctaagcctatgacactctgcttcaagttttgcaatctttttcacaccttccagatgctgcttatttgcgatatccgccgacttcaaactcatgtttttctcttcattgcggatctcaacttctttggaagcaacgtgaagatcgtacttcagataactaatctccttctcagccaactgaagattagtcttcaacttttccacatcagcttcagctttagacctctcctcactaatccttactatcatctcagatcgttcttgcaacgatctagtgagtgctgcattgtcagaagctgcccggtgtagtccttcactcaattcatcgatctttccttcaagctcggctttgatcttatcccattgactggtcttagcaagaatcacatcctgcagcttcttatcactctcttctttcacaatccttatctgccttgtacactctttcaacgcatcatccaaatgcgatgctcgatcctctgcagtgagctttaagagtgtaacagattcgagttgacgtttaagtgccaaagtttctgcatcagccttctcccatcctaaaaaaagaacaaaagactataatcagcaacaaaaaaaacatctcaaaacaaacaaaaatgctgaaataacattttacctgaaacagcttcttcagcgactttggcatgttgaagaatcaaagattctttagtgttgatctcagagtgagcaagagtgagtttttctttaagatctttaacttgaacttcaaacaatttgacctgatcctccattctactcatatgtgtgtatgaatccatagttatctgaacatagtttgtgtttttacacttctcctgacacacaaatcaaacacacaaaaaaagacttcaaatgaaaatttctatctcacagaaactgacagattatcacaaaactatataaaacagaggtttggtgtaaaattaaagcacctgattctcaagagaagccaagtaggacaaagaacaaacaggagttgactcgattccaacaactggtttctcagtcgtggctttgtccgaagactttctcttccatggccaacctctaccctccattttttttgctccaaaataatagtactctgcagaatccgtagaagaaggaagaaaataagctttaataaaaaaacagacaaagaactgatagaagttttgaaatttgaactaacgtacaaaaaaaggaaacaaaatcttccgtaaatgttactttcaatttcatccgacaaaatcccgctatatatttattatactgtatcacctcaacaatgaccgttttgttgtttctttctttttttccgcagtgattcacatttaatgatttctttccaaaactatgtaaccaaatttattgaaaagtctactaaaaaaataattcaaatcccatcgcaatgggcgcgagcgagtccttcacattaaacctgatcataatcatcatcagctaccacagtatcgcacttagaacacacacaatcaaattcaaacaaactttcgcttgacaatttcaatcgaaaccatatcttttcaagtttagctaactatcggaaagaaattacataccgagactaatgattccacagacttgagagagcgcaaagatcgaagaacattcgtcgagagaaagaagaagaaagtgggaggagcgtgtatgtgccagagaagaaggagcagtggatgatttatgcgcttgggctgtcgctttttttcaactttgacgctccacaaagacacaacaacgacatctctctatttcaaaaaagttttatttttttattcattttaaatacattttaaaaaaattaacaaataaatcgccatttgttgttcttttttcaaaaacggaatacgagggtgcagttatcctctacgagcaggtgcatgtaataccatctgatggatttgacttatcgtttatccacaaaagattcaaaatcttcccggtttttaagtttgggcttcataaggcccaattagtggcaaatccatcacagtccactagggtttttgagagactggatataaaatttgattttgttcattgttgtcattcgccgtaatctgaagaagacgaagcaaatcctcccacaaagaatcatcc

SEQ ID NO: 4483 - DNA, 3000 bp, Unknown
  misc_feature (1)..( 3000): cDNA_ID_1824344_gDNA_ID_1620708_Annot_ID_165387 3000 nt of promoter + ATG
aacattaccaaaataaataattaaagttttggatggtcaagaattcaccgaaccacctagtcccaccttgtgtcccaacacagctagcttccattaaggatttctgtggctccatagataatgttctcaactgtctcttgacgctgtgtgagctcctgccaacttttattttctacgtagtttcctccaccgaccatgaaaactatcgcttctctaaacggtcccttcacatggctactactactagagcctgactttgaagctctcgggtccagtattaggtatgactctgtttccaggttcggttttccttcagttaaggcttcaacactcaacagcccttgccaccgctagtttctcatcactggataagagattcttgactcccgcgcggtcaccacgtttatagactggccatagagcaatatgacttttgctggctgagtttgctgctaaagaaacgttcagcgatttgatctttttcacatactgaaacgtgcttgtatctatcttagcttcacgcaatgctgcttccacagcttcaacttcggtttggttaacgctttctaaggaaattaagtacatgattgcaaaccgtaacttgtctatattagtacctttcgccttcaaaacagatagaagctcggttctgttgatgctgcctatcatcatcatcatctccttctctttctcatcgtatgcatccaaagattgctccttgatatgtgattatcatccaataattaagtgttgccaatacacagaacaaaccattagcgaccttttcaccatgacctcataagtcttcaacaaactctgctgctcttgaatctctgcagctaaacgagagtcttgtggagagacacatacaggcttggggttattctctctgtaaaaatgcttcatttcggaaagattcttgagttcagaaatgacaactttgtccgctgcctgaatcttctcgggatcgtaaggagtatgagcactttgaagctcgatataagcagatttcaaggacgagatgtttccaaagagattggagataagtgcttccatagcttcaggattttgattgatagactcttccattggttgaggatggattatgtatgtgtttcatgtttggatcataaaaatataagagacagtgaaatcagcactatgcatgtcaccaacagaaagtaaataagagtatcaaatactataacaagtacctacaaatttgcaaaagaacgatccaacttgcaaaaaaggttcttaaattcgaaaaactattgtcgcttgggggaaaacaatgataaccaagaactcacagtccctaaagtcagcaaagctttatttatataagacctttccttgcgccttaaaccactggtttcagcctttgagctctcagaacctgtcaggtcaatgaggttctgcagatatatgtgaaagtgaaattatggtcagttgttcatctttaagtgttcagacagtgcaataataaacagtttgtcagagttaatgaaacagtaagctattaccgaacataaaatcacttgataaaaagaaaagatgttatagcagctccactttcattattgtcaaccaatgtattgaccacgggtgtcataagagaaaagttctactaggttgcaaagtgtgtaaagcagagaactaagctaaagaatgcaactataaactaactacagtaaaagtaaaggctttatatggtcaacagaacgacagtagctacatgcataatgtgagtttgatttcctgtctgggacctcactcaagtataaaccaatgttaacaatccacagaacaaacatatcaaacaaagtgattgtgacaatttctttggaatgcaaagccttaggcggtacctttcctgtataatgtaactgtggcttgttatggctatccacagatgtctttggataaagttttgaagacgacgttgttgaagatacaggggaatcacaaaggctttaacttgcttaatccagcatttgtagactttgatacttgtttagatcctatcacaaacgaaattccaacttccggtgactgaaaaaaaagatgcaagtacaaaactttatcaaataataagagctagcaacaagtatactattgcactttttttgagtttttaagccaatcagaaggctctatttcgtaccctttccaattcatgactttttttatcgacgcacatctctccaaattctccatcgcgtgactcttttagtttttttcaacaaaaccaatgaaaccgaaccgaaatcagttttaatttcaaaaccaatgcataccaaaccgaatcagcaaatagtgtgaatcaacaattctggacagaaattttctcaacatctcaacaacgggaaaaagagaaaacaccacaactcaaaatcacaaatcatagaaaaatatccaaaaaaatcacagtagcctttgattaaactttcaaattgcaaaaatctcagaatcaaagccaagaagaatcctgaagatttctacttccatggcatccaatagtggaagaagaacaatctactgcttcaattaaacatgaaaaacgactcaaagagcttagctttactagttttagtaaaatttctcggcaacaaagtcaaaacagacatgaacgcataaaaaagatactaaaacacattggaggagctcttcctcaccacgagcttgtagagtggaagctgttgtatcacaaaactacccttttgtaaatattttcgtttccgggttaacgtaaacttaagtgggccttttgattcatgggcttcacggaccagaacttttgtcggcgttttgtagtggtaaattccaaaactacccttttgtaaatatttataagcaaatccgacctaaatttgttatcaatgaaagacgactcaaaagagcaaagtaaacgaactcgagaaaagtttgttcgatccgtacaaactgaaactaaagtacggaaacagcgagatttggtttgtgcgatagaagataatg

SEQ ID NO: 4484 - DNA, 3000 bp, Unknown; identical to SEQ ID NO: 4481
  misc_feature (1)..( 3000): cDNA_ID_3073372_gDNA_ID_1620708_Annot_ID_165386 3000 nt of promoter + ATG

SEQ ID NO: 4485 - DNA, 3000 bp, Unknown; identical to SEQ ID NO: 4479
  misc_feature (1)..( 3000): cDNA_ID_1824368_gDNA_ID_1620708_Annot_ID_165376 3000 nt of promoter + ATG

SEQ ID NO: 4486 - DNA, 3000 bp, Unknown; identical to SEQ ID NO: 4477
  misc_feature (1)..( 3000): cDNA_ID_3072158_gDNA_ID_1620708_Annot_ID_165372 3000 nt of promoter + ATG

SEQ ID NO: 4487 - DNA, 3000 bp, Unknown; identical to SEQ ID NO: 3919
  misc_feature (1)..( 3000): cDNA_ID_1824395_gDNA_ID_1620708_Annot_ID_165362 3000 nt of promoter + ATG

SEQ ID NO: 4488 - DNA, 3000 bp, Unknown; identical to SEQ ID NO: 3920
  misc_feature (1)..( 3000): cDNA_ID_2134143_gDNA_ID_1620708_Annot_ID_165360 3000 nt of promoter + ATG

SEQ ID NO: 4489 - DNA, 3000 bp, Unknown; identical to SEQ ID NO: 4483
  misc_feature (1)..( 3000): cDNA_ID_1824344_gDNA_ID_1620708_Annot_ID_48946 3000 nt of promoter + ATG

SEQ ID NO: 4490 - DNA, 3000 bp, Unknown; identical to SEQ ID NO: 4482
  misc_feature (1)..( 3000): cDNA_ID_2687174_gDNA_ID_1620708_Annot_ID_48950 3000 nt of promoter + ATG

SEQ ID NO: 4491 - DNA, 3000 bp, Unknown
  misc_feature (1)..( 3000): cDNA_ID_3073448_gDNA_ID_1620711_Annot_ID_48990 3000 nt of promoter + ATG
acttcttccctcaccgaaatcagaatcgcgggcttctgttcttccatcattagttaagacgtcgtgttcatgagtagttgcaactgttttgttttgctggttcttctcactgtatctcctcttctcttttgttttgataccaacagcaaaactgtgcggttgtgctttttcatggtttatatcatcgcatcttctctgtcgctttctttccccaccaacatcaatactgtgcgcttctggtgcttgatgatttttctcattacctcttcttacccttccctttcttccctcacctgcattagaaatgcacgcatatgaaatttcataattcttctcattaaatcttcctcgctgctttcttcccttatccgaatcaatatcatcagccttagaattttcccgagaatgagtttcagcagcaactttttgcattttctgactcttctcgatcactatccatttattgtttaatccatcaccttcccttctcttcccactaaccataccacttgctccagaaacattaacctccactacattctcaacacctccagcttctttctccatcattaaacccacatctactcctcctaaactctctctacatcccttcctagacttgtcagtcagcataagcttcttccctaactccaaacacttgacaactacacgcttataccaacaataaggacaatagaaatttccaaattcatcgaaatcaggttcatcagatgcacaactctgatgaatagctatagtacattcctctccgtaacataccaaaacccaattgtctttcccatcacacacgaaacaagtattagtctttacaacattatcactatcacctcccttgctttgccctaaattttgagtctttcctccaattggaccattctcgtgagttttcgggttttcttcatcaacgtcgtcctgcgttatcacatcaaaacaatcaccaaactttcgaaagaaagtaacaaaattgacttaaaagatgagaattttcgattttttttatctccagtaagtacagagaaacgtaagaagattaccgaatcggaggataaaattcgagaactcatatcttcttcttctttttgcaatttcttctgttcatcgtttcagaggttaattcctgcgatttggttcactttacttctttcttattgggctgtttatggcttcttttattttcattaggttgggctgtgcccactaaactttactttaaagtaaaacagataaaattttaatcaaattcaagagaatataccaaattcaagagaaattttaaccctaaaatcatgcatataggaacaaattctaatcaagttcatgaataaaataaagatccaatagagtattaatcgaaacaatcatcaagactgatgaaaaaaactatctctgccaataatcggctttactcatgcttagcttcttttaccattatgtatatcaatcatgtcttacaatacatacatatactcgttaatgattcaaattaccctaattttactgacaacgaacaactttattttttccaattcgatgaatcataattctaagaactcacatcacatcaattcatataatcagagagagatttttacgttgacaaaccgattggtgaatgattacctccaatttttaaatcaaaattcagatatcgatttcgaaagttcacttcgttgattagatgaaacaaaaacgctgtggagataatagcgtaaggacgaccggaggtcataaacctaattaaacccaatttaccatttaattttgttaacattcttatctatgaatcctgctaataatcatgtggcctatttcaccatgaactaaattgctttatcgtttccattcaccgaacttttttatgtgcttataactacatgaacttaaatttaatttgaatttacaatacaaactatgaaaattcggtagaaaacctcaaattgctagactgtagaatatcatgttacatttcagcttctcaaaacattattttgtgaatattttactctattataatgctagttaacatatatattaatgtatttaatgtttgagaaaatacgcatgtcaaaatgccggatgccagcttctcaaaatatgtattttgtgtaaattttactttcttacataagagttcaaaataattcaaaattgtagtaaatattgaattctttagcaaaaaaaaaaatgttcaaattatatgtgataaaattattttttgtttccaaaaaattggtcatttggctttgttttatttttttaaaaattaactacattatactctctctattttacaaaaatctcatttaaaaaccgtcgtttacttaaaaatataattaattataaccagttcaaccaatagaaattcaaggccttagatgaagttttttttttttttttttttggcctcagatgaagttaggcacggtgattaccgcaccgacatattgtataagcgcgtcacagagaataactacccaacacacccacgattttcttgattttcgttattcgctctctttgcgaacgcattaagcaaccaaagcaaagcagtgagagagattatcagcgtgaccttcgaaacaacccaaagtccctcgaccacctcttctagatctgactccctcgtagatctccatacctggatctctctctctcaggtttgctctcgaatactctgagatctgttggattcgcatctgcttcttctttcgcgttttctgattttgtattcatcgttttcgtattccattatatcaattagcttctgagttttgcgtttatgatccatttgagatctgatctattgatccaccgatctgattcattaatcccgaatctggttactacgaatctgatctacatgcataaaccatttcgatttcaatgtattcgtgagaatgtgcttgaatctgttacaatagtagtgatttttactaatcgtgagagagtttttgtattttgatacaggaagggacaatg

SEQ ID NO: 4492 - DNA, 3000 bp, Unknown
  misc_feature (1)..( 3000): cDNA_ID_1824561_gDNA_ID_1620711_Annot_ID_48991 3000 nt of promoter + ATG
aacctcaaatccaacaatctcataccccaatgccttcttcttatcagcttcagagatcacacccataccttcttcaccagtaccaatcacctccatgacattgccttcatactcatgaaccaaaaccttaaacttgaggtgattaatgatgtaatcatcattactgttaggtggcgaatacccaacaggatatccagtccactggatagtaaccccattctgcttagcgaatctcaaagcaggcaagttatcaagaatcatattcacttgatacaactcacgagttctctgtttcaagagcttgacctcatgctcattcaaaggactcgtagtgcataagtaaagagactcattggttctcatccgaaacctataagcagagttatcaatctgatcacccatgagaagctcaccaagattctcagcacttttcttgataccttcaagtggttggcagtaaggaagactatagtaactgaaaggaagctcagtttcaatagaagtcaaggaattgactttggcgaagatagagtctccatctgaatatgtgtgcatataactccctggtaagtaaaacccattgcaaagctgactaacaaacaccagtaacacgaatactcgatacacaccaaacattgtcccttcctgtatcaaaatacaaaaactctctcacgattagtaaaaatcactactattgtaacagattcaagcacattctcacgaatacattgaaatcgaaatggtttatgcatgtagatcagattcgtagtaaccagattcgggattaatgaatcagatcggtggatcaatagatcagatctcaaatggatcataaacgcaaaactcagaagctaattgatataatggaatacgaaaacgatgaatacaaaatcagaaaacgcgaaagaagaagcagatgcgaatccaacagatctcagagtattcgagagcaaacctgagagagagagatccaggtatggagatctacgagggagtcagatctagaagaggtggtcgagggactttgggttgtttcgaaggtcacgctgataatctctctcactgctttgctttggttgcttaatgcgttcgcaaagagagcgaataacgaaaatcaagaaaatcgtgggtgtgttgggtagttattctctgtgacgcgcttatacaatatgtcggtgcggtaatcaccgtgcctaacttcatctgaggccaaaaaaaaaaaaaaaaaaaacttcatctaaggccttgaatttctattggttgaactggttataattaattatatttttaagtaaacgacggtttttaaatgagatttttgtaaaatagagagagtataatgtagttaatttttaaaaaaataaaacaaagccaaatgaccaattttttggaaacaaaaaataattttatcacatataatttgaacatttttttttttgctaaagaattcaatatttactacaattttgaattattttgaactcttatgtaagaaagtaaaatttacacaaaatacatattttgagaagctggcatccggcattttgacatgcgtattttctcaaacattaaatacattaatatatatgttaactagcattataatagagtaaaatattcacaaaataatgttttgagaagctgaaatgtaacatgatattctacagtctagcaatttgaggttttctaccgaattttcatagtttgtattgtaaattcaaattaaatttaagttcatgtagttataagcacataaaaaagttcggtgaatggaaacgataaagcaatttagttcatggtgaaataggccacatgattattagcaggattcatagataagaatgttaacaaaattaaatggtaaattgggtttaattaggtttatgacctccggtcgtccttacgctattatctccacagcgtttttgtttcatctaatcaacgaagtgaactttcgaaatcgatatctgaattttgatttaaaaattggaggtaatcattcaccaatcggtttgtcaacgtaaaaatctctctctgattatatgaattgatgtgatgtgagttcttagaattatgattcatcgaattggaaaaaataaagttgttcgttgtcagtaaaattagggtaatttgaatcattaacgagtatatgtatgtattgtaagacatgattgatatacataatggtaaaagaagctaagcatgagtaaagccgattattggcagagatagtttttttcatcagtcttgatgattgtttcgattaatactctattggatctttattttattcatgaacttgattagaatttgttcctatatgcatgattttagggttaaaatttctcttgaatttggtatattctcttgaatttgattaaaattttatctgttttactttaaagtaaagtttagtgggcacagcccaacctaatgaaaataaaagaagccataaacagcccaataagaaagaagtaaagtgaaccaaatcgcaggaattaacctctgaaacgatgaacagaagaaattgcaaaaagaagaagaagatatgagttctcgaattttatcctccgattcggtaatcttcttacgtttctctgtacttactggagataaaaaaaatcgaaaattctcatcttttaagtcaattttgttactttctttcgaaagtttggtgattgttttgatgtgataacgcaggacgacgttgatgaagaaaacccgaaaactcacgagaatggtccaattggaggaaagactcaaaatttagggcaaagcaagggaggtgatagtgataatgttgtaaagactaatacttgtttcgtgtgtgatgggaaagacaattgggttttggtatgttacggagaggaatgtactatagctattcatcagagttgtgcatctgatgaacctgatttcgatgaatttggaaatttctattgtccttattgttggtataagcgtgtagttgtcaagtgtttggagttagggaagaagctt

SEQ ID NO: 4493 - DNA, 3000 bp, Unknown
  misc_feature (1)..( 3000): cDNA_ID_3000049_gDNA_ID_1620711_Annot_ID_48992 3000 nt of promoter + ATG
ttcggtaatcttcttacgtttctctgtacttactggagataaaaaaaatcgaaaattctcatcttttaagtcaattttgttactttctttcgaaagtttggtgattgttttgatgtgataacgcaggacgacgttgatgaagaaaacccgaaaactcacgagaatggtccaattggaggaaagactcaaaatttagggcaaagcaagggaggtgatagtgataatgttgtaaagactaatacttgtttcgtgtgtgatgggaaagacaattgggttttggtatgttacggagaggaatgtactatagctattcatcagagttgtgcatctgatgaacctgatttcgatgaatttggaaatttctattgtccttattgttggtataagcgtgtagttgtcaagtgtttggagttagggaagaagcttatgctgactgacaagtctaggaagggatgtagagagagtttaggaggagtagatgtgggtttaatgatggagaaagaagctggaggtgttgagaatgtagtggaggttaatgtttctggagcaagtggtatggttagtgggaagagaagggaaggtgatggattaaacaataaatggatagtgatcgagaagagtcagaaaatgcaaaaagttgctgctgaaactcattctcgggaaaattctaaggctgatgatattgattcggataagggaagaaagcagcgaggaagatttaatgagaagaattatgaaatttcatatgcgtgcatttctaatgcaggtgagggaagaaagggaagggtaagaagaggtaatgagaaaaatcatcaagcaccagaagcgcacagtattgatgttggtggggaaagaaagcgacagagaagatgcgatgatataaaccatgaaaaagcacaaccgcacagttttgctgttggtatcaaaacaaaagagaagaggagatacagtgagaagaaccagcaaaacaaaacagttgcaactactcatgaacacgacgtcttaactaatgatggaagaacagaagcccgcgattctgatttcggtgagggaagaagtgggcaaggatgtttccatgagaataaccagcaaacgaaagtgtcgtctactgaaagatgcgagcaggaaatccctaggaccaataaaagagtgtcactcggttctggattaggggaggggcgatatcgggagggaagacatattgaaaagaatcagcataccgaaactgttaaaactgaaactcatgggaaggaagtttctaaggataggaagagaaagcgggaaagaggagtggaaagagatggggatgagttctatttggcggagaatcaagacagacaatgccaagctgatatgagaaatgatgatgtggccttcaataagcaagcgactggtttcagcacagttgaacaagtagagcgaaagtctgtatcatctatttcatctccggagtctacaaacaatgttaacgaccctaatgttgcttttcaagagttagctttgatcatccaccctaaggctggtgtacaagaacaacctatcgaagcacgacctttacgctctgtctcttcgaagaaaccatcttttcaacctgaaaaatacggacacaaaagttacctggagaagaatggacctgcgtctaatgatcccgcacaaaggtttctattcatttggaacttcgtgacatttaaattgcctttagcataatggatgtttttgaggaagattcctaagcagcttgtcacgggctttaagctaacaatttttcttccatgtagtgctacaaaaaggaaaagacgattttggacgctggcagaagtagagatgcttagggtatgtaacttgcacatttctctctatcctacgtatatttcatgctgcagttatcttggtttttcgtaatttggagcttacacattcaacggctctttttaaaggtttatgcctgttttagtttatcagctttataaaaacagccagggtagctggtcttatcatctcctaagaggcggtatttcattttcagtcgtaatgcaattgttttgtagactagacttcataaataagagcttatcctccaaatcattgtgaaattatatctgagatatataacattgtttgtggctgtccaaattaaatattttgctatgtagtgcacaatggtgataaatgtggatttgtctaacttcgtcctgtcctttaggttggtgtgcagaaattccctggcgagaggaatattccatggcgcaaaatcttgcaatttggtcgggatgtgtttcatgatgaacgggctccaagcgacctcaaggacaagtggaagacgttaaacaaaattccttctgacacggggaaatgggtaagcctttcaactgaaagacaaccgaattactatgtgtctgaagttagttctgaatgacctatcggacttagcaagcattagagcttagaagagtagtagatagggctttgcagattttgtacaaccttgcttgctcctagtttgctaaatgtatatggagcaaaactgatcttaccttttaacactaaattcaaaaaaaaaaaaaaaaaattgatcttacctttctaatttgtatgtcctcggcaatgtagagaattcacaagagtgagatgatatttcatgacacttgaacacaagtttatactaaaaatcatgaaccaatgttgtacttcaatatctattaaacttttacatgtcttttgatatggatttctctgcaattgtaagacaaagaagaaaacagtaaggtcaattttacacttcgtgtaaacaaacttttttctaagtttttaatgaattaaaaaatagatgttttagacagaaaatgatgagggtagaattcccgccagtgcgtgggttcaactataaatcctttaaccgccacgtgtcctagaagagtgccacgtacagccactatcctccactttcggcttatttctgtcggtttattctctgctcactgagtggcaagaaaaaaagaa

SEQ ID NO: 4494 - DNA, 3000 bp, Unknown
  misc_feature (1)..( 3000): cDNA_ID_3000053_gDNA_ID_1620711_Annot_ID_48996 3000 nt of promoter + ATG
atttaaactgtttaacagacaaagaccaagaataccaaacttcaaaacgaaaatgccgaatcaatgtgacgagacagcgtaaaaagcatgaggaagggttctgatatacacatgacccataaccaaaagtatgtacaaaagggaaagaaaaattcagccttcaaaacttagcaaatggtttttcttccaactccggagaggtaagactagacctaaacccggctctaattcttgaatttttccagatcagaacctgaaacactacaaatctcgtaatgcaaccttcttgcttctacgatatcaataatattaccactacgatcgttagctattcgatttggaagagatatcaggaatagatgcacaagacgcagccttgtgctggatgcttttcatgctcagctccatgcttctatgaaccatgtcctgcagcagtttcttagccgtttcagcagctttttctgccccgtcgacttgtactgcaatgccatagacaattttctctagtgttaatggagtcatttctttctcacgaggggtttctctcagtaggtccaagagaactctggctctatctcgggactttgatgttccatctactgttgaacttaggagacccgggattgcaccttctttcagtatgagttttcggtacttatctcggtcgctgcggcatagagaaagcagagctccaactgcgtgttctatgctgagtggagaaccatcctctacagtctctactaaagtcagaataccatcttcacagctggtgatggcatttcgcccgtcctcagagtgagacaggatcatctcaaccaaggctgtggctttttcagcaaacttggaatgttttttgcattctttaaggaggtggatgagcgggtagacagctttagcatcaagaattggagcagagtactctttgcaagctgataaattatgaagggctgtgacagcatctactttcccttgtacagttccggagctaagcatctgaatcagaagcggtggaactccagaacttataatcatcgccttgttggctggtgcagctgaaagtgttagaattgctgcagtggccaattcacgcaaactagcattgtggagcttcagaatctgtatgagaggtggaacggcaccggctttcacaatctcaatcttattcctggtcagaaatcacaacccaaaataagtaatgaccaccacaagaactgaaaatgcaaatctatttccacacagattacaaaggatctgtagaaaatactgctggagcaagtaggtaaattacatcctacatttgctatctttatccaaatagcagtaaactacaggtaaagctagacctagagcaatcagatcagtgtccaaaaagcagtatcctcttggtttcaacagatctaaagtccaaaatgtagctactctcagtacattctgatgcctgattgatagagttaaacaattgccttaacactaaaactacaaatccagaacaatgtcataaatcaagctctgagcagagattagtgaagtcactaatcctaaacactgcctaaagcctcagatcgagttaaattagacctagaagacaagacgagagaatcagtttctggtacatggcaataaaacctagaacaatccaagagagattaccgttcatttctaacggcgaggttaaggagagcgaggagagaggcgtgacgagcatcaacgttagaggagaagagcatgggaacaagcggcgggataacgccggcgtcggcgagttttgacctagcggaagacttaaccggagactttctaagcagctttcggatttccttagcggcttcaattcggaaatcgagatctccatggagaagcttcttggagagatgtagaatcagtaattcctttgtggttttccatgtgttggtggtggtttcctcctctgcttcgtcttcttccgatatatttgccgtcaccgttgagtcgccggcgatggaagccatcatctgattctggttctcttccaccaccattatctctgtctctctcgctcgcttgctcgctcttgtgtttgtttctctctagtcaaagacgaaacgacgacttatcgaatcatctacttaattaaaacgaaagttatggtattagttgaaagagcccatatttctcgaggttagttagttcacaatttaccaaccgggacatttcaatattttaactttttcaattttatgcaaggaaagaatataagaaagaattagctagaaaaattattttcaaaattaacaacaaatcccgaatatttatataactatttaaaagtataattaggttgttcgtttgatcgccgcatctatttgcgacagcagcaaccatgatgatattcgtttggtggacgcaagacgatgtggtcaaacgttaaggcaaacgcaagtagctgcggttaaaaattgttgacatcattttacttcaacaatatgcggtagagtttgctgctgccgttaggcgtaatgaaacaaatagactaacacaaagaataaacgactacaatttataatttttcatttataaaataaaataaaaattggaatatattgtgcggaattcctatatatcagaactcattgatctgctgcttcttctgaaagttcttaagtggttccacgatgtttccattttgttctgacttccgaggccaacgagatgagtccaataaacaaagggcacggaaacattctttttaaattaggtttgtttttttatttttggtttttggtttttcccggaaattgtatgaagtcttcgttacagtttctctctctcaccttctctgtataaagtcttcttgagatcgaaggataacttcaattcaattctctccaaggtacacacaggtacagttttctccttcattctctcttgtttgagatttctgaagatgggtttgttaaaaaagtgtacttttttttgttctctctcgtgtagctgatttttgtgataagaagattgattgag

SEQ ID NO: 4495 - DNA, 3000 bp, Unknown
  misc_feature (1)..( 3000): cDNA_ID_1824549_gDNA_ID_1620711_Annot_ID_48998 3000 nt of promoter + ATG
gagaattcaatatgttcaactctagcaagtgatattacattattcgaaaagatatcagaatcaacgtatcgtgtacgtgttaattgtttctctgaggaccctgacaagagccagtctgattcggacgactccgggagtgttgatgatgaatctgatgattgctcaattagttctggtgatgaaattgaacatgtttcagaaaatcctgcacttcgaaaagttaagtgtaggaaaaggcggaagcataaaagtaaaatgcgggaagtatgtagtgagattgatgaaagccatcccggagaaccatggctgttggggctaatggaaggcgaatattcagacctaagcgttgaagagaagttagatgtttttgtggctttgattgatcttcttagttctggttccactatcagaatggaggtaatctacatactatttagaccaaatatttcaacatttcaactgagtcgaggtctgaataacttttaaaacctgagtgttagatcgctccaacattgcatgtctaataaaatcttgggcagatggacttttgatccatgttattttggcggcaccttgactaaagatatgagctaaaacttgacacccttctttgaaacttaagaaaatgacatttttttttgaaagttactggaaaaagcttttttgttacatctatatatctccgttgcgtagtgctaacttttatttttcaccacaggatctaccgagagctgtggctgactgtgcccctagtatctatagtcatggttctggtggaaaaattaagcgatcctcctctaatcagtacagctatccacgtggatcatgggtccatggaggagagctttatggaataaaagcactatctaaatcgtctgattctcatccagttgattcttcatcaattgtgggggcatttgcaaagctggctggaaatagagcgaataatgttcaccctatgcaatctgtgtaccttggttctgatcgaaggttcaacaggtactggcttttcttaggcacatgcaatgcaaatgaccctggtcataggtgtgtgttctttgaatcttctgaagatggtcattgggaagttatcaacaacaaggaggtaatgtcattgtactcttcctgaaatcttaatcactctgctggttaaatggaaacttgtattgaaagttatatgatcatgtgcctgattatttcctctttcgcttggtgtaggctttgcgggcgctgttgtcagttttggacgataggggcagacgggaagctcgtcttattgagtcgttggagaaacgagaaagttttctttgtcaagccatgctgagtagacaggtgacccagtcggagacagcccatttcacagatatagttagagaggacagttcttcacctgtttctgatatagacaacaacctatgtctgaatgaaattgccaatgatcaattctcctcgcaacatgcggctatagtatttgagattggaagtaagcgggagaaaagcttattgtggagccttattcaggaatttgatgattggatatgggcaaattttaattttaatctcaattctgttaaacaccgccgaagatcctaccttgattcacttactaggtgtaagagttgccatgatttgtattggagagatgagaagcactgtaagatttgccatgccacgtttgaggttgatatagatcttgaagaaagatatgcgattcatgcggccacatgtatgaggaaagaagagtgtgatacatttccggatcataaagttctatcttcccagttgcaatcactaaaagctgcagtatatgccattgaggtatgtcaatagtcttttgctttactttttttctgagtgctcaaagtcttactttcttggtttgtattaagagatgcctctgttgttttacgtgtgctgaaacatgttgcagtctgctatgcctgaagatgccttgattggtgcatggagaaagtcagctcataggttatgggcgaaaagacttcggcgaagctcatctgtgtctgaaattacgcaggtttcattctattatataagctccttttcctagttcaaattgactgtcctccaactgaatcttaaattgataaaacattatgtgtaatttatgaaggtgattggcgactttgttggggcaatcaatgaagaatggctatggcactgtagtgatcaagggcagactttaatgggagaaatcataaattgcttcccttcgatgcctcaaacaacttctgcgattgctctctggttggtaaaattggataccttgattgctccctatgtcgaaaaagctccacctgaaagggatcaaccgttgtgcaggaccagaaatacaagtatgatcctacttttctaaactcatctatcagaactcagccttcttgcttttgcttgttctcgcttacgacttttcaagactgatcgtttttgaagtttcagatttcacgtcatttgccaattgtcttgatgatttcacgtcacttgaacttgataatgtttttgggtggttttagtttctcacttgtgtgtattactccattgcaggtagacgagcgtctaagcggtagttgtagctattatctggacatcaaggacggcgatagaataggggaagaagattgtatagaggaagaatgtttagttcctgcattcagtttgagataatttgagattggaaaattctacaatccaagtgactttgagataatatgtacagacaatttagatagtagcatggatcacattcagttttgggtttgattaccaaaatcttttttttgttgttgttgtttttgtgtatgggcatagaaagactgtttaacgttgtgtcaattagacaattagtcctttaatatataaattacattttaccccagaagttatgttcttttgcatagtcatcccccaaaagtatcataatttttaatatctctaattctatatggaagtttcaatttagtccacattcctcctaattgaatg

SEQ ID NO: 4496 - DNA, 3000 bp, Unknown
  misc_feature (1)..( 3000): cDNA_ID_2031854_gDNA_ID_1620711_Annot_ID_165439 3000 nt of promoter + ATG
tcagtcactaagttaataataaaactactaagatgaataattaaataaagaccttatctctaaattttatgtttatgagttgatgaaccttctaaattttattttatcactatattaacaccatttcgacaagtaagaaatatgataaacactctacactaataatcatcatcaagtcatcataccataatcagtcataaaaaccaaaacaaaggaacaaaattatgtatgaatgttgtatatttacatgctatgcttttgttttcccctgtttttcttgtatggttctaccaaacttgttgatcacaaaggaccaggcttagtatctaccagtttatctgtagtttcagaggaaagggacaaaaatgaattatatattttgtttttattttgaattattctgccaattaaaaccagcttttaaagagataccaccaaaacaatcttgaattgacaatagacgcatcatgagaaaatttgtaaaatagagttatttgtgaatctattagacttgtgatatagacccttgttaattacttgactcatcaaacaagagtttttgaacttttgagttatcagcaaagtcgattagcgacacgggaatgggttaattatacttaaatggtccattagaatgagttcttatcattgtcattgtattgttgtttgatcattagtttccgttgatcgtctagcttttaccttgatataatagatttatttattttcttgtcttacttctctatgcttagtttattgctttaactcacctagatatataaaagtgattatgattgtataggttcatgaagaactaatccgttacaaagtatgaaagtagtcataaaaagttttctaataaaaacatctgagtacaatattcattactatccgcaatgctatactatagattgtgaatgtatttgtaggaactattattaatgaacactaactttgagtgtaatcaactctttattaagccacaaacaaaacctttatttattataaatctgattataacgtatacataaaaacatattatgaaatataacaacataatcacttctcttagtacgaaaacaacatttgccttatcaagttggtgaactcgccggaaaaaaatccaaaacaacttatagaaatacacataaaattgatttcttattgtgctggaggaggaggagtaaaaggaggaggaggaggaggagtctcaactaaaacatctagcttcatgccttgaacgcaaccacctcttccatcaagtagataataacgtctagtctcatagagaggaacaatatctctcccagctccacgtgtataattacgtattgggcggttggagatacatttttcataatcagccttgtttacctcaagaatgttgtgttggtctctatagaacacaaaatctgacaagaaagtgataaataaaacataagtctaaagacagaaccaagacttaacttaaccaaaaaaaaaagacagaacaaagaaagagttatgttctaactagatctggacttaaagaaaagttaaaaaaactattacaagatttaaagctaaaccaatttcaaatcagatctaaatatgacagatctgagagtgtagattgagaaagaagagatagagagaacgtacaaagccagtctccgacgtagaaatgtttgccttgagcccatagggtatagttaatgttggggttccagaactttttgtcgccgactaaatatttcttggctgttacttctggtatcggcgccgccactagaaaagccagtacaaccgccgagattagcaccatagatctccccatttctctctagcaaaactctctctctttctcccttgtagaattaattagctatcataaatatagtagttcatcagttccacttccactaaattattgtttttggcaaaacagtaacttaagttatataaaaaaaaaaatcattagtcaatcaatcacagtcctttatgataaaacgaactcataattattccaccgacaacatgcgttttaaattattttttcttaaattatattatattatattgatatcaacctagctaaaataattcggatggcgaaatcggacaatttttaatagaaaaaatgggtatgaagatagtctatgattccgttcttagcgactagagggacctgctcaaatctcccgggtgatacgcgatgtcaagctcaatagaaccccacaaccgacgagaccgagaaatccttgatttgggctagaagattttgaaatgaatttaatatattctaagtaacttgcttaaattttttttcaaactctaaagacataactaacataaagtaaaaaaaaaaagttaatacatgggaagaaaaaaattaaactaatgattagctctctaacgtgtttaatctcgtatcaagtttttttttaaaaattatattgctattaaaacattgtactattgtttctattttgtttagctattattcttgtgaaatgaaaagttgtgtttattcaattactaaatggcaatatttatcttggaaaactatacctctaattggattaggccctagacatcctctttagcttattgacgttaaaattattcccaaaactattaaagtttagtagtttgaaagatgcatcaagacctactcagataggtaaaagtagaaaactacagttagtgtgattatattttaaaatatataaaacaatcttattaaactaaatattcaagatatatactcaaatggaagataaaaacatttagtctgttaccactaccagcctagctagtcactaatagtcactttggaactgagtagatatttgcatcttgagttaccatggactcaaaagtccaaaaagagaccccgagtgaaaatgctaccaacttaataacaaagaagcatttacagcggtcaaaaagtatctataaatgtttacacaacagtagtcataagcactcaacacaaactctttacgaatacttttaagt

SEQ ID NO: 4497 - DNA, 3000 bp, Unknown
  misc_feature (1)..( 3000): cDNA_ID_1012082_gDNA_ID_1620711_Annot_ID_165438 3000 nt of promoter + ATG
aaagaaaactggaagtaaagtaaaataaaaacactattaagagtcgagtccatgcttcgtggagacataatggacattttacactcactgactcatacacaataagctctttggttacgtgaaacaattatatttaatttattgcatgtattcttcattcttcatcattaatagatgatcatagagtcctcttctaatagcagaatgcatgccttcttctaaattaaaaattttaacacactatggctgagattttggcacttgcattgattatttggactacgtgtaaccgcaagcttaattaggatgtcactacctcatttatgaagttgaaactgttgttgcatcatcaagtttctcaattcttgcttgatttttttttttatataacttggcagaatttggtattaataaacattttcaacaaactttggagacaaatgctattaactttattatctagctaagggtattgacaaatttcattcatctcattattctaaaatttatcagccgtgatattgcctgaaatttttatgaggccgtccttcaactaagtacttgtagaaatagtctaaatatagttcaatataggccttcttcatttaaaaggaaaaatggataatcagaaggttcatgaacgcgtaaatataaaagttcagataaaacgtctttatttatcattccacttatagcataaagattagatccatcttagtttcaataagaagtttgttaattaacttattaattgatagcttcatctacataggagacttgaaactttgacactttcctctcatacaagaccgaggaactgcatagttttgggagatcctttcctttgtacgctttgcagacttgtgcgaccaaattatggtaattctgcatccccaaaataaagatattaatttaaaattcgttaaaatgaaaatgaaaggaagagttatatatacgtcatagagtggtttgccgttgagtgtgacccatggtacgtattcatgttttggcttcaaactcgaggtcagttttgcatacccaagtatcagctgcaattacaaaaaaaaaaattggttataaggttatataattataatttatatatatatatgtatatatatataaatgtgtgtatatttttatatttttgtatatagacctaccttttgagagagatcaccattgtaacaatcattgatggctttctcacgtccagattttttaacacatgattcccattcattcgtatctttttcaacgcagcgtatgaacttgtactgcaatttctgtgttccaaaaccatcccatttttcatattaagcttctaacaaacccacacatacaaaatagtataaatatagtaggtaattgtattttttctataccggatcgggcaaagttcttataccgcaagcttcgagagcgttaagtttgcattcctcttcaccatgcttcacaaaattcccaaatttggttaactagagctagagtcaaagtaatttatcaacaaaaagtgagaaaatttgaaactaacctggcaagtaatagtcagattattggagatatgagcgttaccgaatggaacgagcttgagatcggtgattttgaggagatcggagtcaaagattttacctagatcatcaacaatgaaattttgacaatagggacaaagtgattcatagtaaagattgatcttcactttgttggaattttcagccacgacgaggttgtttgagtatgtgaacacgaagaggcaagctaagaaaagacatgggaacagatcaacaaacttggttgcagaagaagaagccatacttaaaagtattcgtaaagagtttgtgttgagtgcttatgactactgttgtgtaaacatttatagatactttttgaccgctgtaaatgcttctttgttattaagttggtagcattttcactcggggtctctttttggacttttgagtccatggtaactcaagatgcaaatatctactcagttccaaagtgactattagtgactagctaggctggtagtggtaacagactaaatgtttttatcttccatttgagtatatatcttgaatatttagtttaataagattgttttatatattttaaaatataatcacactaactgtagttttctacttttacctatctgagtaggtcttgatgcatctttcaaactactaaactttaatagttttgggaataattttaacgtcaataagctaaagaggatgtctagggcctaatccaattagaggtatagttttccaagataaatattgccatttagtaattgaataaacacaacttttcatttcacaagaataatagctaaacaaaatagaaacaatagtacaatgttttaatagcaatataatttttaaaaaaaaacttgatacgagattaaacacgttagagagctaatcattagtttaatttttttcttcccatgtattaactttttttttttactttatgttagttatgtctttagagtttgaaaaaaaatttaagcaagttacttagaatatattaaattcatttcaaaatcttctagcccaaatcaaggatttctcggtctcgtcggttgtggggttctattgagcttgacatcgcgtatcacccgggagatttgagcaggtccctctagtcgctaagaacggaatcatagactatcttcatacccattttttctattaaaaattgtccgatttcgccatccgaattattttagctaggttgatatcaatataatataatataatttaagaaaaaataatttaaaacgcatgttgtcggtggaataattatgagttcgttttatcataaaggactgtgattgattgactaatgatttttttttttatataacttaagttactgttttgccaaaaacaataatttagtggaagtggaactgatgaactactatatttatgatagctaattaattctacaagggagaaagagagagagttttgctagagagaaatg

SEQ ID NO: 4498 - DNA, 3000 bp, Unknown
  misc_feature (1)..( 3000): cDNA_ID_3073414_gDNA_ID_1620711_Annot_ID_165437 3000 nt of promoter + ATG
gtaggttgataaacaaaagaattaaactatgaaatttgttgcaatcaaccttccacgtaaaatcgtaaaaaagagaccttgtaagtatctagcttccttaacccattcataaaccttgagtactttttacataagtagccaattgataggttggatgtaattcttcacaaatatactcaagaaaataacacacaatagataagctaaaccaaccctagttctaactattaagtttatgatgattcttacaacaccttgagtaaagaacactcttcagatcaagctgaatatcaacttcattttttgatgcatgcattgtttaccaaggttaataagcaacaattttaacaaaaaaaaggttaataagcaacaacaaaagcgtttaatgcaccagaaatgttgagaagcatgtcttatgggtctctctgtccctgattctagactcattctaagtgtttgtacactctctgtccctgattctaaggttgcaaaagaacaagaattagcaacatctcgatcacttgaattttcctcaagcgtggtcttcacatgaatttttgctcacatcttcaaggtcacaagggtttatgtttgacctttcttcttgcatagtgattatctttgagttaatatcaaattcatgttcctgttcaaaatgggccactcgtatatatatatatatataatatgtatttaaattgtggatatgttcgaatatctgttcgggttcggattgggttcgggttttaggatttagaagtttagaactcgttcgggtattcataaattttgggttggttttgaatatggttttttggatcgggttcggatcgggtaatcgggttctgtattatacccacccctacttctcactgtcagatctgaaaacatgaatattcatatcaaacgtgttacaaattacattatatcttatgacattttaattcaataataaatggcaataagtgaattgattcacaaatctcatcacattttcgttgtgggattttttaacgtctcttttaaattattagatttttttgggatgaaatatgtctgaacaatattcaggttggattaatgtatttttgtggtttatttttttgtcgagcctcattggccattagtaagtggtgatggcggcaacatattttaacggactagaacacatcccatgttttggttctgctaccgtattgaatgttcattcatagactcatagtccatctaaacatatacaatgagaaatatttaattggttctgataacatatacacaaacttacaaaaactaatttaatgctacttacatatcttacatattttcaacggctagctgaaatctccaacggtattcttttcatttatttatatataaattagtcaatatatatagcttgtcagctaaatccaaaggttgatatatgctcgtgagagctaataatcattcttcaattatcgatctcatttttaagaattattttgctacctaaattaagtagatgcactaaaattagtaaagcaaactcataattgtatagagattgcacataaattaaaattaaaaaataaatcacctaaaaaggcgtatagacttataaatttcatagagataactcacaaaaatattttcctaaagaaagatagaaatatttgaaactaattgatgctttgctctatttacaggttttattttgaatcaaaacgttgtactttagtaaaaactaattattatgattaaggaagattcttgatgaaatggaaagttgagtttattcaatcttagtttaatgaaatttttcacacacaaaaataaaataaaaattgatgacattagataaaaggtaaaaaatagactctattaaggttcaagctagacacccacttgcatattgtcattaattgttttccaaaactattaaagtataacaaaatattgcaatttgaaaaatgcattaagacctacttagataggtaggtagaagttggactaatttctatttactgttactaagattactttattttatctcttttatatttgatttgttacaatgctagaccattttttaataataattattatgattcactgtcagattttataactttttttttaccatcgtaacatgtgtgtcgccaaatagtttatgtgagtcactagataaaacggtaaaagtattcattatgacttcagttaacaatagtcaactctttatactttatactgtagtgttttcttatctccatttttctttttgtgtacatcttgtagaaaatcttcccactataacttcttcttattatttttaaaaaatactaatctactattatgttgttggacacaaaaaaaactaaactaatctactatgttgtatggataatctttttttgttgatagtctcattataaattaaaacgaatacttcacagttcactagatgattaaatatttgactcaatttgccaaatatgattatagaagaacttttctatataacataccttcaagtggatgaaaatgtgtgagattttttcttcataaatgttttttttcagtgacactatatttttctttattaacctgctatttcttctatatgactcaaaattgatttatttatctatcctatttttaaaaataatcagcaaaacatcctctctcaattacgattttaccaatattttgtttgtcgtttttgaacaaaaatttggctatctacgtaataaaccttaacaagagttatcaattttgatctaaatgatgaataaattatgaacctcaaaatctggacttggatccgccacttactagagtcacacaaacgtcaaaagaaggacccacgtgaaaaaccaaaaccaaaactaaaaccaaagtaaaaaagcacgtaacggtaaaacacatgaataacttggctataaataaatagcaaggctttagtcatgaatgagcactcaattcgatcactaactctcactcttagtacaaatattttcaaga

SEQ ID NO: 4499 - DNA, 3000 bp, Unknown
  misc_feature (1)..( 3000): cDNA_ID_3089775_gDNA_ID_1620711_Annot_ID_165428 3000 nt of promoter + ATG
aaggatactccatgcaatacataagggcaccattaggaccaagctttagatcctccatcacatcttccaaagaaataagttctctgatatctgcattcaacgatgtcaaaaaagtgagaagcactcaaaactccccccaaaggtaattgaacaagaagaaacttcttcactcacccatagccacaggatagttgaagatctccgcagcaggatcaaggttaacaacatgcattgttcgaccgatagtttcacaatgttcatacaaagacgagcaataagttgactgatagatccaaaacacacaaaaaaacacagttagtcaaatctcactgatgaaactagttaacagaaattaacttaacatagactatagcataacctttccactgcctgctggaccaataactagctgggcgtaacccattgtagcaagcaagcagaacctctccacaaaagctcttgaaattaacaaatacagtgaaagattctaaaagacgcaaagattgcaacagttatataagcaatacaccagacacctaaaccaaacaacactctcaaaatgtcgcagggacccataaaccagaagcaagaagcaatagacacatttcagtacctgaaaggcaaaaaagatcaaaactttaacactcacatacatgatttagctagggttttaaagacccacataaacccatgaaatagataacctaaaaaagacgaaatttgggagagaaattgaagaaattagaagcagccgacaaaaatttcacaaggttgaaacgaaacccagaaggaataaataatcagaagcatcaatggagaagaaaatcggaatcagagaaatgattattgactttcacctttgacgcgtcttcgtttttctttgctctcaaaacctaaagctcaagcaaaagaagaagagaggaaatttcaagagcttcagttttttggtttgttgcgttttattaaagaccttttttagggttctttatggtttttcattcattacttttttaatagtggtcgtaatatataaatcaaaaagacttttttacttaattattttttaattctttgaaacagctaaacgatttgaccatgcaaaagaactagtctccaccaacgtgtctcacgtggatcaaaaacaatgggttttatgcaaaaaaaaaaaaaaaaaaaaacacattcaaaatcgatatttttacaattttagtttttagatttaaaaaatagaaaataatttgattgaatctaaaataatatgtaatatatctaattttagtttgcaactttacagtaaacgttttcacgatcacatatatttgtgtttaaatattttaaagatatagttgaattcatcatctcgagagattccatttgatatattatttatcaaaattttaacatttgacgataatgaaaaaaattgaattgcgtattattttatattttataggtttattttgcatttctgacataaataaaattgtaaaaatagacgacttcgaagtttgagcttgagatcactaaaagaagttaatgaggtatgttgtttgaaataaatttggggacttgtctcccacaaaaactccttatggattaaatagatcaaggcacacctactcaaaagagtcactatttggtaaataaaagaaaatactactttgggctcttagatgtggaagaaattactcaaatacaaaggagtggccaaacaattttgcaaagttgaggtaaacaactggaaaaaagtttcattctggtatgataactggtttacaatgggctgtttgatggatatcataggagagaggggacgaattgagtttgacatcttaaagcaaatgtcgatggcggaagcatggacataactgcaaccctaaaacaaattgaaacagatctcaccatgaagagacaaaatcaaaccgatgaagaggatgtggtattatggaaaggaaaaacgatgtgtatcaatcaatctttagaaccaaagacacttggaatcacactcgtaccgatacaaataaggtagtttggcataaagaggtatggtttactcacacaacaccaaagtattctttttgcacatggttggcgatccagaacagactctcaatgacaaacttctttctctacagcaactgcattgaatcagaggatcatttattcttctattgtagctatgcagctgaagtatgggaggctctaactataaatatctacaaagcaaactactcgacgaactggacatctctaatcacaagcatatatagcccatggcaggagcgtatggaaggttttattgcgcgatatatattccaagccacagtgtcacacaatttggtgcaagagaaacatacgtagagataaagaaacaccaaaccctctggctcggctcatcaagtggatagacaagcatagcaaaatgttccaattttaagtaagaaaaacaaaattctactgacaatttcaaaaacaagataagtaaaagtttaaatttaaaaaaaatgaactaaaaagctttgtcctattgatcacctaatgagcctttaaatttctaaccgtcttaaatcctattactagttaaaatctttaaattattttaaattaaagatataggttacattatttaaaatatagatataatcaattaaaagtttaaaactcatgttaaaagcatcttaaagggaaatgaaatattaatacaagaaacaaatatatatatgtaaagacatattttcaccagcggtccaaaaaaaaggatatattcacatattaaaagaaaatattggggcaaagtggataagataacatccaatgagaataagacatatcaaaattcatatccctgagagccacaacaatcttaagaaacagatcctctgtcttgccacatcagcaaacgcaatctcaagtttcgtagattgcttatttcttcatcacacacttcaaactcgattttattttaattttcataagagaacaaccaagacaaaaagaaca

SEQ ID NO: 4500 - DNA, 3000 bp, Unknown
  misc_feature (1)..( 3000): cDNA_ID_1824534_gDNA_ID_1620711_Annot_ID_165425 3000 nt of promoter + ATG
tggagtactcgtattctgcggctctacaacatcatcaaatgaaacattcttagaatggtaaagcccagaactttctactggtgactgggagccactgatgtttcctggtggccttaaatgactcttgcctctactattcatatctggccctgattttccaagactatcgagaggatcagtatcaacaaatactcctccgtggacagatgaatgatcagtttttctgctgttgaatttaccaatttcctccaatggatcagtgaaccctcctgtggaaggttctctaagggttgatgtagactcctccaagactacaaatgggtcttctttcacattagaagatgtctcggcagtccgatacggaggtttctgggattgactagttgtctctgaagttgtcctgcgcagaaagagtagatcatcaatcaattggtaaacaagttatgcctataccagcaaagatcaaaatgaaattttgcatataaacgagttatgctttcaaagactttctgggagttatcttctaggtttaagagagtacacataagagacccttgtattgtgtgcaagcaaacatacccttgagcagctctcaagacaggtctaggagaaacaattttgaagagcaattaatggatataaagacattgagtatagttcatgctacaaagctagatataaaggcactactattatgaaagcatgaagtctctagtctaagctctatacccttgagtcatttcacgcaagcaaggtcgcaaatttgaagagcgggtgacaggagcaaccctaactagtaaccacagatctaagagcaatgaccggatataaagacattgaatatagttcacgctacaaagccagaagtaaaggctctcaagtcagctctagctcctccataaccactgatatagttcatgctacatcacatttcattacgtgatggctctaaattctacacccttaacttctttcacgcaagcaagccctcagatttgaaaaccaatgacaagatataaagaacaatgacccatttgtagtcatatgaaatgaaattttgcatatgaatgaccctaacagcagattaaaggttgaagatttctcttgtaagttctacaaagtacacataagagaaccttgtatgctagcaaaaagctcttcagtaagacctaatatagttcatgctacatgtcatcatgtaattgttatggctctaagttctagacccttgagtaaactctcaagtcagttttaaggagaaacaaatttgaagagcaatgtcattcaaaattggatatgaatgacaagcaaaaggttgaagcttttgagagcaatataaaaaaaacttgtagacttgtagtatccaagtaaacagctatccataagcattatacagttcaagcaaaccaaaatctaagcttcatacccttaactaaaatcacgctagcaagctttcaaatttgaagagaacagcttccataagcaccaaatgctactacatttcatgctctaagctctataccgtttattcatttcatgcaagaaagctccctagctagtaaccataaacagaagaagagtgaatgaattcttaccgtttagctggaggagagctagtgcgaccaaacccgggaattaaatcatcaaaaatggaactacccttctcctctcggtcactctctttcttccccaaattgtttcccatgagatcatcgaaaggagaactgttctgtttcctgtgcttcgtaggagaagatgagatagaagagaaaacattctcaaacctagctgactgagaagaagtggaagggattttgagctcaggaatagactcaaacacatcctcatcatcatacacaggcttatcataaaccggcatagacgacgctgatttggatttgggttccttgaacataacatcatagtcaaaagcaggagcagatggagaacgagaatcaccagaagatccatactttggtggtggtccgctaaacacatctctgaagagaagatcatcaccatctcgaccaagatcgtcaaacaccggcaaagaatccgactttttaccagcggcagaggcgaagctataagaagaagcgaaagtgttgaaatcagcggcagaagagtttgattgagaagccatgggcgcagatttgccttgaggtttcaatccgaagtctctcgctaacaatcctgtgaaatcatccattggattcctttaaattctctagctccgaattcgaaaagctttagattttgcccactagaaatgaagaagaggttatcttcagatctgagtcgccattaacgaatcggatcaaagcatttgattttttaaaaagctcttttttcttcgttttccgacttgtttatggtttcttctccgactcgtacatgtttcccagtcttcataatttcttcattattgctaaatgggtcctaaagtttcagaaataacaaatttggtctccaaaatcttaaaaaaataaaaaaagtaattccttagagttgatcctcaatatatataaacttataattatattaattaccaaaatacaattatatgtttaacattttctatagcaatgaaactcttagaattatcaaaatatgtagaaaatatttgtcaatgtacaattttgttttttttgtgaataaattttggtattttacattggttcaaaaccaaaatgaataaatccaaaactctagccaaagtatcaccgaatttataagacttgggggacccaaattgaaaactctgaaactttaggacccatttagcaaaaacgaagaaattatgaagacacccagtcggagaagaaaccagagacaagttgggaaaacgaagaaagaaaaaaagagagcttttttaaaaatcaaatgctttgatccgattcgttaatggcgactcagatctgaagataatctcttcttcatttctggtgggcaaaatctaaagcttttcgaattcggagctagagaatttaaaggaatcca

SEQ ID NO: 4501 - DNA, 3000 bp, Unknown; identical to SEQ ID NO: 4495
  misc_feature (1)..( 3000): cDNA_ID_2051413_gDNA_ID_1620711_Annot_ID_165420 3000 nt of promoter + ATG

SEQ ID NO: 4502 - DNA, 3000 bp, Unknown; identical to SEQ ID NO: 4494
  misc_feature (1)..( 3000): cDNA_ID_3000053_gDNA_ID_1620711_Annot_ID_165415 3000 nt of promoter + ATG

SEQ ID NO: 4503 - DNA, 2231 bp, Unknown
  misc_feature (1)..( 2231): cDNA_ID_2051442_gDNA_ID_1620711_Annot_ID_165409 3000 nt of promoter + ATG
aagcttcgtcattttttcagcatcatacttaacactgcagggaacaacctcaaatccaacaatctcataccccaatgccttcttcttatcagcttcagagatcacacccataccttcttcaccagtaccaatcacctccatgacattgccttcatactcatgaaccaaaaccttaaacttgaggtgattaatgatgtaatcatcattactgttaggtggcgaatacccaacaggatatccagtccactggatagtaaccccattctgcttagcgaatctcaaagcaggcaagttatcaagaatcatattcacttgatacaactcacgagttctctgtttcaagagcttgacctcatgctcattcaaaggactcgtagtgcataagtaaagagactcattggttctcatccgaaacctataagcagagttatcaatctgatcacccatgagaagctcaccaagattctcagcacttttcttgataccttcaagtggttggcagtaaggaagactatagtaactgaaaggaagctcagtttcaatagaagtcaaggaattgactttggcgaagatagagtctccatctgaatatgtgtgcatataactccctggtaagtaaaacccattgcaaagctgactaacaaacaccagtaacacgaatactcgatacacaccaaacattgtcccttcctgtatcaaaatacaaaaactctctcacgattagtaaaaatcactactattgtaacagattcaagcacattctcacgaatacattgaaatcgaaatggtttatgcatgtagatcagattcgtagtaaccagattcgggattaatgaatcagatcggtggatcaatagatcagatctcaaatggatcataaacgcaaaactcagaagctaattgatataatggaatacgaaaacgatgaatacaaaatcagaaaacgcgaaagaagaagcagatgcgaatccaacagatctcagagtattcgagagcaaacctgagagagagagatccaggtatggagatctacgagggagtcagatctagaagaggtggtcgagggactttgggttgtttcgaaggtcacgctgataatctctctcactgctttgctttggttgcttaatgcgttcgcaaagagagcgaataacgaaaatcaagaaaatcgtgggtgtgttgggtagttattctctgtgacgcgcttatacaatatgtcggtgcggtaatcaccgtgcctaacttcatctgaggccaaaaaaaaaaaaaaaaaaaacttcatctaaggccttgaatttctattggttgaactggttataattaattatatttttaagtaaacgacggtttttaaatgagatttttgtaaaatagagagagtataatgtagttaatttttaaaaaaataaaacaaagccaaatgaccaattttttggaaacaaaaaataattttatcacatataatttgaacatttttttttttgctaaagaattcaatatttactacaattttgaattattttgaactcttatgtaagaaagtaaaatttacacaaaatacatattttgagaagctggcatccggcattttgacatgcgtattttctcaaacattaaatacattaatatatatgttaactagcattataatagagtaaaatattcacaaaataatgttttgagaagctgaaatgtaacatgatattctacagtctagcaatttgaggttttctaccgaattttcatagtttgtattgtaaattcaaattaaatttaagttcatgtagttataagcacataaaaaagttcggtgaatggaaacgataaagcaatttagttcatggtgaaataggccacatgattattagcaggattcatagataagaatgttaacaaaattaaatggtaaattgggtttaattaggtttatgacctccggtcgtccttacgctattatctccacagcgtttttgtttcatctaatcaacgaagtgaactttcgaaatcgatatctgaattttgatttaaaaattggaggtaatcattcaccaatcggtttgtcaacgtaaaaatctctctctgattatatgaattgatgtgatgtgagttcttagaattatgattcatcgaattggaaaaaataaagttgttcgttgtcagtaaaattagggtaatttgaatcattaacgagtatatgtatgtattgtaagacatgattgatatacataatg

SEQ ID NO: 4504 - DNA, 3000 bp, Unknown
  misc_feature (1)..( 3000): cDNA_ID_3073448_gDNA_ID_1620711_Annot_ID_165408 3000 nt of promoter + ATG
cttctccaggtaacttttgtgtccgtatttttcaggttgaaaagatggtttcttcgaagagacagagcgtaaaggtcgtgcttcgataggttgttcttgtacaccagccttagggtggatgatcaaagctaactcttgaaaagcaacattagggtcgttaacattgtttgtagactccggagatgaaatagatgatacagactttcgctctacttgttcaactgtgctgaaaccagtcgcttgcttattgaaggccacatcatcatttctcatatcagcttggcattgtctgtcttgattctccgccaaatagaactcatccccatctctttccactcctctttcccgctttctcttcctatccttagaaacttccttcccatgagtttcagttttaacagtttcggtatgctgattcttttcaatatgtcttccctcccgatatcgcccctcccctaatccagaaccgagtgacactcttttattggtcctagggatttcctgctcgcatctttcagtagacgacactttcgtttgctggttattctcatggaaacatccttgcccacttcttccctcaccgaaatcagaatcgcgggcttctgttcttccatcattagttaagacgtcgtgttcatgagtagttgcaactgttttgttttgctggttcttctcactgtatctcctcttctcttttgttttgataccaacagcaaaactgtgcggttgtgctttttcatggtttatatcatcgcatcttctctgtcgctttctttccccaccaacatcaatactgtgcgcttctggtgcttgatgatttttctcattacctcttcttacccttccctttcttccctcacctgcattagaaatgcacgcatatgaaatttcataattcttctcattaaatcttcctcgctgctttcttcccttatccgaatcaatatcatcagccttagaattttcccgagaatgagtttcagcagcaactttttgcattttctgactcttctcgatcactatccatttattgtttaatccatcaccttcccttctcttcccactaaccataccacttgctccagaaacattaacctccactacattctcaacacctccagcttctttctccatcattaaacccacatctactcctcctaaactctctctacatcccttcctagacttgtcagtcagcataagcttcttccctaactccaaacacttgacaactacacgcttataccaacaataaggacaatagaaatttccaaattcatcgaaatcaggttcatcagatgcacaactctgatgaatagctatagtacattcctctccgtaacataccaaaacccaattgtctttcccatcacacacgaaacaagtattagtctttacaacattatcactatcacctcccttgctttgccctaaattttgagtctttcctccaattggaccattctcgtgagttttcgggttttcttcatcaacgtcgtcctgcgttatcacatcaaaacaatcaccaaactttcgaaagaaagtaacaaaattgacttaaaagatgagaattttcgattttttttatctccagtaagtacagagaaacgtaagaagattaccgaatcggaggataaaattcgagaactcatatcttcttcttctttttgcaatttcttctgttcatcgtttcagaggttaattcctgcgatttggttcactttacttctttcttattgggctgtttatggcttcttttattttcattaggttgggctgtgcccactaaactttactttaaagtaaaacagataaaattttaatcaaattcaagagaatataccaaattcaagagaaattttaaccctaaaatcatgcatataggaacaaattctaatcaagttcatgaataaaataaagatccaatagagtattaatcgaaacaatcatcaagactgatgaaaaaaactatctctgccaataatcggctttactcatgcttagcttcttttaccattatgtatatcaatcatgtcttacaatacatacatatactcgttaatgattcaaattaccctaattttactgacaacgaacaactttattttttccaattcgatgaatcataattctaagaactcacatcacatcaattcatataatcagagagagatttttacgttgacaaaccgattggtgaatgattacctccaatttttaaatcaaaattcagatatcgatttcgaaagttcacttcgttgattagatgaaacaaaaacgctgtggagataatagcgtaaggacgaccggaggtcataaacctaattaaacccaatttaccatttaattttgttaacattcttatctatgaatcctgctaataatcatgtggcctatttcaccatgaactaaattgctttatcgtttccattcaccgaacttttttatgtgcttataactacatgaacttaaatttaatttgaatttacaatacaaactatgaaaattcggtagaaaacctcaaattgctagactgtagaatatcatgttacatttcagcttctcaaaacattattttgtgaatattttactctattataatgctagttaacatatatattaatgtatttaatgtttgagaaaatacgcatgtcaaaatgccggatgccagcttctcaaaatatgtattttgtgtaaattttactttcttacataagagttcaaaataattcaaaattgtagtaaatattgaattctttagcaaaaaaaaaaatgttcaaattatatgtgataaaattattttttgtttccaaaaaattggtcatttggctttgttttatttttttaaaaattaactacattatactctctctattttacaaaaatctcatttaaaaaccgtcgtttacttaaaaatataattaattataaccagttcaaccaatagaaattcaaggccttagatgaagttttttttttttttttttttggcctcagatg

SEQ ID NO: 4505 - DNA, 3000 bp, Unknown
  misc_feature (1)..( 3000): cDNA_ID_1824538_gDNA_ID_1620711_Annot_ID_49001 3000 nt of promoter + ATG
cgtcgagttcatccatttgagatgctgtcgggctatttacagaagctcttcctgagctaggaacgtgtgagtggtaagcagacgtcggtatagaaggctcattaaccttctttttaataggacgtgtaggtcttggtggtggaggtctcgtaggtggcggagcactcgtaggttgcgtaaagagggggatctcggatacagtaagccacacatcatcagacgactcgaaacttccatttgaattggtaggtggtggagtactcatattatgtggctctaaaaaatcttcaaatgaaactttcttagaatggtaactcccagggctttctactggtggtgactgggagccactgatgtttcctggtggtcttaaatgactcttccctttactattcatatccggccctggttttcctagattatcaagagggtcaatatcaacaaatactcctccgtggacagatgaatgatcagtttttctgctgttgaatttaccaatatcgtccaatggatcagtacgggagggttctctaggggttgattcagactcctccaagactacaaacgggtcttcttccacattggaagatgtctcggcagttcgatatggagctttctcggattgatttgttgtctctgaagttgtcctgcacaaaaagagtagagtatcaatcaattggtaaacaagttatgcctataccaacaaaaatcaaaatgaaattaagttagaaaactacgcataagagaaatctgtatagtatgcaagcaaattgaagcactaataaatatagttcatgctacattgcattatgattatgtaaggcgtgatggctctaagctttatacccttgagcaagctcttaagacaggtctggggaaacaaatttgaagagcaatgtcaggatataaagacactgaatagagtgcatgctacaaagccagagataaaggcactacaattatgaaagcatgatgtctctaagctctataccctttgagtcatttcacacaagcaagctctcaaatttaaagagagaaggtgacaggagcaaccctaactagtaaccacaggtctaggagaaactaattattaaggcaatgaccgtagccacagatcaaaaatgagattgtgcatatgaatgacatgaatcttgaagtttctaaagtttttttttccagatttctcactcaagttttagagagtattcataaaagaaccaatatccaagctctgtgaccaaccaagctccataatcactaatatcaacttcatcattatgtacgtttgaagagccatgactcatgccacgcaagcaagctctaaaatttgaagagcaatgaccctaaccagtaaccacagatgaaggtacatagtaaataacatatcgaaaccagggaatcaaacagctctacatacaaggaaacagttctccataagtactaaatgctacatttcatactctaagctctacaattcaaagagtcatttcacgcaagcaagctctcaaatttaaatggcagtgagtgaccctaactagtaaccacagataaagaaaaagcaactagtgaatgaatattaccgcttagatggaggagagctagtgcgaccaaacccaggaatcaaatcatcaaaaatggaactacccttctcctctcggtcactatctgcccctttcttccccaaattgtttcccatgagatcatcgaaaggagaactgttctgtttcctgtgcttcgtaggagaagatgagatagaagagaaaacattctcaaacctagctgactgagaagaagtggaagggattttgagctcaggaatagactcaaacacatcctcatcatcatacacaggcttgtcataaaccggcatagacgacgctgatttggatttgggttccttgaacatagcatcatagtcaaaagcaggagcagatggagaacgtgaatcaccagaagaagatccgtactttggtggtggtggtccactaaacacatctttgaagagaagatcatcaccatctcgaccaggatcgtcaaacaccggcaaagaatcggactttttaccggcggcggtggcgaagctataagaagaagcgaaagtgttgaaatcagcggcagaagagttcgattgagacgccatgggagctgattttccctgaggtttcaatccgaagtctctcgctaacaatcctgtgaaatcatccattggattcctttaaattctctagctccgaattcgaaaagctttagattttgcccaccagaaatgaagaagagattatcttcagatctgagtcgccattaacgaatcggatcaaagcatttgatttttaaaaaagctctctttttttctttcttcgttttcccaacttgtctctggtttcttctccgactgggtgtcttcataatttcttcgtttttgctaaatgggtcctaaagtttcagagttttcaatttgggtcccccaagtcttataaattcggtgatactttggctagagttttggatttattcattttggttttgaaccaatgtaaaataccaaaatttattcacaaaaaaaacaaaattgtacattgacaaatattttctacatattttgataattctaagagtttcattgctatagaaaatgttaaacatataattgtattttggtaattaatataattataagtttatatatattgaggatcaactctaaggaattactttttttatttttttaagattttggagaccaaatttgttatttctgaaactttaggacccatttagcaataatgaagaaattatgaagactgggaaacatgtacgagtcggagaagaaaccataaacaagtcggaaaacgaagaaaaaagagctttttaaaaaatcaaatgctttgatccgattcgttaatggcgactcagatctgaagataacctcttcttcatttctagtgggcaaaatctaaagcttttcgaattcggagctagagaatttaaaggaatccaatg

SEQ ID NO: 4506 - DNA, 3000 bp, Unknown; identical to SEQ ID NO: 4500
  misc_feature (1)..( 3000): cDNA_ID_1824534_gDNA_ID_1620711_Annot_ID_49002 3000 nt of promoter + ATG

SEQ ID NO: 4507 - DNA, 3000 bp, Unknown; identical to SEQ ID NO: 4499
  misc_feature (1)..( 3000): cDNA_ID_3089775_gDNA_ID_1620711_Annot_ID_49004 3000 nt of promoter + ATG

SEQ ID NO: 4508 - DNA, 3000 bp, Unknown; identical to SEQ ID NO: 4498
  misc_feature (1)..( 3000): cDNA_ID_1824505_gDNA_ID_1620711_Annot_ID_49011 3000 nt of promoter + ATG

SEQ ID NO: 4509 - DNA, 3000 bp, Unknown; identical to SEQ ID NO: 4497
  misc_feature (1)..( 3000): cDNA_ID_1012082_gDNA_ID_1620711_Annot_ID_49012 3000 nt of promoter + ATG

SEQ ID NO: 4510 - DNA, 3000 bp, Unknown; identical to SEQ ID NO: 4496
  misc_feature (1)..( 3000): cDNA_ID_1824503_gDNA_ID_1620711_Annot_ID_49013 3000 nt of promoter + ATG

SEQ ID NO: 4511 - DNA, 3000 bp, Unknown
  misc_feature (1)..( 3000): cDNA_ID_1824647_gDNA_ID_1620712_Annot_ID_49014 3000 nt of promoter + ATG
acaggaattggtgaagagatattctgaattcattaacttccctatctccctctgggctagcaaagaggttgaaaccgaggtcccagttgaggaagatgaatcagctgatgaggaaactggtgagtattaatgaaacaccatattataattttctgctgcagtgttatcttttttcccttcagtttaggcagccctgatttttggtaatggtacttgacttcagaaaccacctctaccgaggaagaaaaggaagaagatgctgaggaggaagatggtgagaaaaagcagaaaaccaagaaggtgaaagaaacagtttatgaatgggagcttctgaatgatgttaaggctatatggctgagaagtccaaaggaggtgacagaggaagagtacactaaattctaccactctctctcaaaggtgaaaaccatgcgttaactaaatcatacttgttacatactaggtgtaaaattttcgtgtggatttccctgaccccagttgttatacaggattttaccgacgagaagccaatggcttggagtcactttaatgctgaaggtgatgttgaattcaaggctgtgttgtatgttcctccgaaagctccccatgatctatacgagagctattacaacagcaacaaggcgaacttgaagctatatgtcaggagggtgttcatctcagatgaatttgatgagcttctgcctaagtatttgagtttcttgaaggtaaactacttgaaagacaaactaaggggttctttcaatacaaatttatgggctaaatccctaacgtgagttgcttttgcagggtcttgttgactctgacacattgcctctaaatgtatcaagagaaatgcttcaacaacacagcagcttaaagacaattaagaagaagcttatccgaaaggcgcttgatatgatccgcaagcttgctgaagaagatcctgatgaaatccatgatgatgagaaaaaaggtattccataaaacaagtttcttggtatcaatccactttgaccgttccacttttttttaccatttggtagcttcatctttctgaaacatggtctaagcttattgacttgttggcacgcagatgtggagaagtctggtgagaacgatgagaagaagggtcaatacacaaaattctggaacgagtttggcaagtctgtcaaactaggtatcattgaggatgctgctaacaggaaccgcttggcaaaacttcttcgttttgagacgtaagctctgttactttttttttaatacacgtctgtccattcattagcaccagcaggctaaagatttgtattttgctatttcagaacaaagtccgatggaaaattgacttccctggatcagtacattaagagaatgaaaaagagccaaaaggacatattttacatcacaggaagcagcaaggaacagctagagaaatctccattcctggagaggctcatcaagaagggctatgaggtttgcattgcacacgaataattcttctttaaatgatctccaactcgcataacacgttctcatacttgtgttcccaggtcatcttcttcacagacccagttgatgaatacttgatgcaatacctgatggattacgaagacaaaaagttccagaatgtgtccaaggaaggactgaaggttgggaaagattcaaaagacaaggagctgaaggaagcattcaaggagctaacaaagtggtggaaaggaaatctcgctagcgaaaacgtagacgatgtcaaaatcagcaaccgtttggctgacactccatgtgtagtcgtaacatccaagtttggatggagtgctaatatggagaggatcatgcagtcccaaactctctcggatgctaataagcaagcttacatgcgcggaaagagagtcctcgagatcaacccacgacaccctatcatcaaagaactcaaggatagaattgcaagtgacccagaggtaaaacaaacataagacccatcaattcttttttttacttactgtctattagagaaataaactaacataccaaattctctcaggatgagagtgtgaaggaaacagcacagctcatgtaccagacagctttgatcgagagtggattcatactcaccgacccaaaagactttgctgcccgtatttataactcagtcaagagcggtctgaacatcagccctgatgcagtagccgacgaggaaatcgaggcagcagaggaaccagagaccagtgaggcaactgagacgaaatcagatgacttggctggtggtctaaacattgaagccgaacccgttgagcaacaagaagagaacaccaaggacgaactgtagatttcacttctgatgtttctcctttgtgtttacctctttagtttaaagcagaacatcgttttactcgaatatcaagattagtttaattaagcagtttttgatggattatgtaaacgcactacttgcattctagagatcaaggaacctaaacttcttcttttcaatgtatgagttttttatctttcaagattaatggtcctgctgtccgagtttatctagattgtccgagtttatctagatatggtaccataatatgcactctctttagctaatttggccacctatcatgcatatattactcggtgttattttccacaaaatttattttcgaaaacttatgacttttgcaaaaatttcaaacagataatctgtaaagctatagattttatatggaaaaagactttaatcaatatattcgtgataacatggcttttcaagatgttgttttatcttgtatcactttaaaacataaaagaaattggtcaatacttttgtgagatcatcacatatcttgagcttgacccttgagacaacgtatatatagaggtgctttaaactctactcttggtctttctttttcctcttttctctcttggtctttcgttttgtgaatattccaaacttaatttctccaccaaaagtactttttttttttaatagagagacaaaaataaacagtgatg

SEQ ID NO: 4512 - DNA, 3000 bp, Unknown
  misc_feature (1)..( 3000): cDNA_ID_1824643_gDNA_ID_1620712_Annot_ID_49015 3000 nt of promoter + ATG
attcaaatgaggtgagcaagaatgtgtctgggacgatatgtgggtcgcacgatgtgagcgtagcccataatagcaaacaggtgtcttcattgactcatatgacggacaatcaagattctgacaattcatcaagattatcaggtggccttggtagaagtagaaaatttgagagtgacaatttaactggtcttgctgacaatgaaggaaaagatgatatgggtcattctgacaaaaagaggagagtaaaacggagaaaaaaacgcatctcttctagatcaatgaccatatcccagcgccttggagcaattgacaaaacaactactgatattgatcttggtattttggatgccttggaggtcgctaccaaagtcgcacaggaagtcgcaagagaagtggactctggagaaccttctcatagttcttcagaagaactatccgatgaaagcgggcagtctggttcgcaatactcccgcgatgatgatgtacatacaggttctccatctaagggattatcagtgactgaaaaccattcctttgaggaacctcatgttggagatgatgatctaatggatgagaaagatgacaaacctgaaagtggtgatgttgaagaaagacacctagcaacagctgctaaatctgaagtaggcagagagaaaagcccatgtggctttgatcttaatcaagatatatgtcctgatgaaacagatgtcattatgtcctccacatctacaacccctgctcctatgtctgtttcattttctgtctcatcttctgcaatgcctgcagcagcaccgtggcatttggaaagatctcttagcgggaaaggatcagctgctacgagtgtatttcactcagcattacctcataaagttcctagtggggatttaagagaaaagcaggtgatttctcgtggtatcgatctgaacgtggctgaggtaggagatgatcaagttgaagatcttactccttggaaacagtttcctttctcctcatcaaactctaggggtggagagtcttcacatgaagccagtctgcgaggatcaagcaagttcaacttggatttgaattgtatgaacgaggacgatgagatgcctccaccttctgagtcgaagatggaaacaagattgtttttaagtcacaatggtcagcaaagcgcatcacctgtctcctcatcgtcagttgctcaacaatcaggcaaggaagtaaactttgatttgaatgacaggccacagtttttcattgattcacgtgatcagggtccctactatgggcggcacccatggagtacagcctcctatggggggcacaaattggaagaaccaggtatatctatcttgggtacaaaagtggaagctgacagaaaagactctgtacctcagatggcttcgttcttgtccaatggcaagtccctcgagcctgcaacaggtttacacatgggaagaacgggaaactctttgggtctagcccctggtgtctccttttctccagcccctatgtatggctacaacggattgactggtcctcctggtttgtcaatgtcatcacccatgtatgttcctggaactgctattccatacatggtggattcaagaggtaccccagtgatgatgccgcaaataatcggatcagcgccgtatgtgcagccaccattccctcaacaacacatgttcatgagcttggcgggtggatcgcctagtacgaatggatcaatgcggccaaactttgatcagaactctgggtttggacttgagataggaaacagagagtcgctaaatttgaggcagtttctatcaccttcacaaagcggggctatgggagagcattcaggagcaaatgtagagccctcatcgagttcttctatcagcattggtggaaagcgaaaagagccggagccacgttgggagtttcctccatggaggtgagtgatctacaaagtggtggagatgggttcttgaataggttgatgaattgattgattggtcaaaggatgatgacaagtgttttgaggtaacttataaagtgtcttgctgaacttttccttcttttttttttatttcctcagttttcccatttttcaggttttttattttatttcataacatataggaggattagttcaaacattggtatatgtcaagcttctttttaaccttgttgggtttttctccataaataaatatatagttttaagatacagaaaaggttctagtggtttgattaatctgttgcgtccattttcgttccattcgtcgatatgttatgctctcatttctgaacaactgttcatggaagaaagcagcgaaggaggtctctggtgaggaaggaagtctctcacgtgttgtatctttcaataaataatgggaccaaatagacattaccatttttgaaccgcgcatacatattgctactacggatgagtgatgactatgatcttcccaaattgacaaattgtatcgcctttaggcgagactttagccatcaaccgattaaagccagccaaacgtaataaccttggcaagcataatcatcgttgtacaaagaaaaacatcattttacttttgtatccgacatcaataaaagcatagcatcctaatatccaatagttatttgtcacatgtaaaacaactaaatatagccgtccgatcgtcccaattaggacgtaaacgaatatcaccgttgatttagcatactttgataatttaaaagtcgtccatccacgccacaaccccgaaatccacgtcgctccacgtcaagaacaaaaccttgctccaatacaaaactaccacgtggctatctcacaatacgatccgttagatctgacacgttggcaaatcatgacgaagctaaccaatcaggagaaactaaagtgtacgcaactaaacagttcacacatcactgaatcatttcctattatatacggatctatcgagctgaatcatcatcatcactgagtaacccgaaagcaaagactgagagaaccaaggctccgatctaacaatg

SEQ ID NO: 4513 - DNA, 3000 bp, Unknown; identical to SEQ ID NO: 4512
  misc_feature (1)..( 3000): cDNA_ID_1824643_gDNA_ID_1620712_Annot_ID_165458 3000 nt of promoter + ATG

SEQ ID NO: 4514 - DNA, 3000 bp, Unknown
  misc_feature (1)..( 3000): cDNA_ID_1824639_gDNA_ID_1620712_Annot_ID_49016 3000 nt of promoter + ATG
atcagaaattcatttgtttaatgctctctaacaaacaataagaaattcaatataacttcagatgagaacaaatcatttctatcttcactggatcattcttttctctcgaaaatgttcgatgccacgatctcaaaatgtctgcagcttctatatatgttcttccgtaaactaaattccatcaagttaccatcggataacgcgagtacccctctagctcctagctctactcaattttctatataaaaaaaaaaacttgacgaaaccatggattaatatatatatgcgagtaacttgtattttgcaggatgagttcgttcgatggtacttggggctatccttctcagctagagtggtgatttatattacagttttgggtactatatttctcccatatttatataattaacatatggagtactatttatcttcaatgtagagctaatttgtttgtttttttgtttttgttattgtttctcaggaacaataatgacgattacttatttggtattgaaattcctgagcgaatgtgacatggaggatgacacacagaggctaccattggtggcagaagaagaagtcaccaccgattggacgccgccgttgatcaatgagtcgttggaggtaacggggaagggagatgtagaaacggcgtcgtttagctcgtcggatgatgtggactactcgacactgtgtgttatatgcttcgaggaacgtagaaactgtttctttgtaccgtgtggtcactctgccacttgtcgcggctgtgctcaaaggatcttgtcggaagaaagtaaggtgtgtccgatttgccgaagggtgatacgcaaatcaaagagattagtgttgaaaaagctttgagcgccgttgctttgcctaatcaccattttgcgaactcatgcttccaagaaacgccctttgctttgcgttttattattatttgttcttttcagttttcagcgacacaagtgaaagaaagatccgagtatctttggtgtcaccacaagactataattccatacaatctgtaatttaacaatgcaattctttaacaaccaaaaacaaagacaattccatgccaatgtacacactagcatttggatttgtttctttttcggtaaaccgatttgtatttatcatgccaactgtttgcgtttttgggggtgtatcatgaaattaaaatcaattctgtaaagtttagatttgaaatttgaaattatttttaaaaatctattttgagccatttgaaatgaaattttttcggagtttcataacattggatgttaatgaaagtatttaaaatcttagttgaataacaccaaattatagattctagtaagcatgatttacaaatgtaaagatttcataacaacagattttaaagtatagtttagaatcattaattgaataacattggattagtgttaaatttcagttctattaaatccatgattgaataacaccaccttatagtttatgccggattataattggaagaaagaaaatattgggttttgagctatagtgtatatgttcttataaatttagtatttggtattttagaatgtatcaacaatatttaccatgctaaaatcaaataataaatcataaaaataaaaaactactttcataaatttaaaggtctacataagaaaactctacaaagtaacatattgcaaatataacaaaaaattcaaaacatattttaaccatatgaaaaatcttaattattatattatggattaggatattcacggaatttatctgatttttgtttgttccccatagaattccgcaaaaatgggttgtggtggaaccatatgggtgggttcttgttgactcacacaagttggtacataatgagccgggccgtgagtccctaccgattcactcttcacacgcttagcacgtgcagttttcatcaaaaaacgcaaacgaaattgagcaaaaaaataaatattcaccaatcgcttcataagatttttagttattaaatatttattgccaaaaagaataaacgaagaaaaagccttttcttctctctcgttttcgcgacaaccttttcctcgaagaagaagaagaacgaggttttctctcagagctgccaaccatcgttgcccggagatttaaaaaacctgtgataaatcgtaactgagtgagagatatatacacatatatatacacagagggacaaggaaagagattgggatatgcgagtgcgcatcggttctgtcggaacggctaactcgcttgacctagggtttcgtcttccttgtgcttcgtggtgagttctatattcctctctctctttttacaatgatgaatagctctgaaattcgcctagggtttattagtggtattcatttggtcatctgtcttcaattttttaatcactttttgaattgatctttggaatcttattcattgaattggcttaatctcatattatttgtcgtatagttctccacatgtgttgaattttgctagttttttcttcttctcaattttagggttttgatcctggacctgggatttggttggcatgatttttaaatagatgtactctatagtttctgagattgggagattttacaatttttgttgtcctttgtctgtaccatcaatttgaaagtcgctgtattcctgttaatatcagtcacggtcactagaaggtatagtgtagttgtcctgcatattgtagttatttgtttttggtactatgccaaatgtaaattcatatttcttcgacaatggagtgatcttggattccttgcatatgaattgggtctctctaagccatggtgaactcgatttcatattcaaaatattttgaacagtttgattgtgtttttttttgtacttgtcacagtaggttaatgacataaagtttgtcttgttctgtttttgttttgtttctcaggagtttttcgaatgggagaaagaacctttttgctttctaaccgtgttctatatttttggagttgtcataagtaaagcagtatg

SEQ ID NO: 4515 - DNA, 3000 bp, Unknown
  misc_feature (1)..( 3000): cDNA_ID_1824635_gDNA_ID_1620712_Annot_ID_49019 3000 nt of promoter + ATG
gcgtttctctctctatatctttaggtatgtgttgatagtgcatcagtcaaatcgaccaccactcataggcttacacgtgtgatcatttgtcaagcgttttgacactcctcagcgtcaatgattttaaatttggagcaagtggagctcgaattatatatatattcgttattattattcgagaaaaatctaagatattttatatttttgaggctgattagatgctaaaaatataaaaattaaatttttaattaaagaaagatctaaaaggaggaaggtctctctcttctctctatagtatttttcagagaaagatttttccgatgtaagtttagaatcgccgtccgggtttcttccggtttccgttatctggattttttccggctattatctcccgttgatcgggatttagatttctttttgggcaattttgaattcggtttcttcggatttgtttttgttttgtagctttaaaatcttgatgatgaaacattatgacaggcagaatcttcagttccgaagaggtgttctcttcgcatgatttagtttctttctgctttgattggcttcaccgttgggttctgttttttttggctccaacagttttccggcgatgtgtgcgttctcgacaattaggttcgtttggatctactgtgtttaagacagtttcaatttctccacgactaaggttaggtcaaagctcgtttcctatgcaattaagatatgcctttgttgttcttgcaagagatttaattgttagacaagtttgaactactcagttttctctaatttcttttacccatttttgccgaatcctttgtgattcttgcaatcggatgagattaggagattgatgtttgttctgtaacttttaattggtgataaaaaagaagtctcgttgaccggtgattttccaacgacgtttctgattcaccaggcttgagtctcatgtgcagtggaggttaggcctgggcacgaagcgaatatccggaaaatttgggatatttgttattcgattcgttttaatcgaatacttaattttattatttgctttgatccgaaaatttccaaatatccgaaaatacgaatatccggatttttgtatgatatttgtcggatatccgctttgctttgctacatccaaatatttttttatataaattatttaacatagatttcaaatttcttaccttatgacttacgagtgtgagattgagagcaactgaaaattttctggttataaattctgtaaccaaattgagtgataaaaatagtgaaaggtcgaagaaaggaaacagaaatgtcgctcttatatttgatggattggaaagtaaaacgacaattttaggataaaatataaaaaataaaacaattttattttaaaaaattccacttctctaataaaaactgtgtcacaaaaaaaacacaggcccaaaggatacaaatacaagcccaaatcccaacatatacaaatgcacaacctatattgtgatatatatatatatatatatatatagatcgaagcgaatatccgactttagaaaaaatagtatttgttatttgcttcggtttttacgattactacatttttctatttgctttgctccaaaatcttacgaatattcggatttttcgaatcaaatcaaatcgaatattgagttaaagcggatcgaacgaatattttgtccaggactagtgaaggttgtggacgttccacgtgtccctagcttattattattggtctgacacgtctatagcttatctcttcttttgtgtcgtatgagcctttatatgtgggatgtcttgggctttattttggttttctcataaccaagcattgtactggtaatgataaaatgaataaaatattacacttatgagaaaaaaaaaaaaaaaaagatgctaaaaatattacatatttatgcagaatatagaataaatcacacatactgatttaataaatgctctatcaactctgatatataaggagattttgaaaagaaaaaaacaaagaggagacttttgttgtgcgacagtgattttagtaattttggcaaagttaagtttgcctttctttgtttggtaaagtcgttagggaaagaaacaaaaactttttattagtgaaaacctcgttagactgatttttaagtttcttcgtgaagtgtgttgttacccatttatcaagttttttttaaccgtagttgagcaaataaggacgagtgtcatgattgtggttccgtcacaaacttatcgactgggtttggccatgtaggtgaataggtaggaagacatgggccttagtcttatcatattatgcattaacataggcccatgttttgtttgtaaaggcccaaataaactatgaactgtccttgcatattacctcaaaaacctttaatctctcttttggtcttgttttctatttccatttctataccattcaaaactataacttaatttcagcatcattaaagcttggaatgggagtaattttcaatgagctggtttttgttatttcaaaaaaactcactaaacatccaatcaaaattaaggaaattagttttcataaaagtgtgttttttaaaagccagatttttatcatacgaaaatccaaaaaaaaaaaaaaaaaaaaaattaaaaaaactcttccaatcattattttagtttgtaaagagtccaaagacaaagatccagtgagagcaaaaaaaaaagcggcgcgctgcataaggattaaggaaggagccggtgaggtggagaagaggataagaataaaaccgcaagagccaagtcagcagtcatagcggttaggcgttgagaaaatataattgacggacccgcttcccgtttaaagccgaatatgctttcttctttgtctctcatttattcctttttcctttccttcttttctaacctttcgtataattacattctttgcctttctccttcttcttctttagatcctaagtatcttactttcctttttcatcatcttcttcgatcatg

SEQ ID NO: 4516 - DNA, 3000 bp, Unknown
  misc_feature (1)..( 3000): cDNA_ID_1824623_gDNA_ID_1620712_Annot_ID_49023 3000 nt of promoter + ATG
gaagcgccgccgccatttctggtgcccattctgagaaaagcagaagtgggtgtggagaaaggaccggttcttgtaccgaagaaggcacttctcggcataaaggtaccgcctttaccattgagatttctcttggaagaagaagaagaagcgaatccaattccgccgagaacgtggatttgggcggctgaagatgccatttttcgagctaagcaatagagaagtaaaggtaacggagggaagcggagagtgcaaggagggtttgaagctgaaaaaccctaagggaaagtaggaggaagagatatagaaggcagagaagataagaggaaggtgggagaaagagggagagaaattgtggaccccacttgaagtttcgagaagagaagatggatgggcttcaataggccaacaagtgtttgtgagtttgacacccattactagagacttgtggtgagaaacatctacacttttcactaaagcccaccatctcttaaacctctcaaatgccacggatcacttagcttgagattttgaggtacgttttgggtgaaccaaccaagaaagagaaatgatgatggtatttgatgggttgtttgctagaacctttatacgaccgtttttgttcatatagacatagtttacactaccgatccagtttgatgtctgagacaatagcaatagacttttttttaactcttggaatacttgttggtaaatgcggtggcgacatttttgtcataaacttgtcttttgattatgggtattatccctaattactgtatatacctcaaagttcatggaccaaagagttaccaaataaattcgaataaaaataaataaattcgaactccatgtgcaagtgcattgggctggacgactctctctcgagttttacacaaaaggacaatcttggagtcaaggatcctcatcatcttccaaataaagtaatatttagtttattcatcttattgcttgtatgataatttgttaaattctatctttacacagttttctttctttgttatctttcgacggattcagacgcacaaaccacaatgggtctactactactatagttatagaagtaagtgggttgtgactttcagtaaaagatacataaaagaaaatctaaatcgtgtaatatatcacatctcactagtcatcaagaatgcaaaatacgttaaaccactgatccaatacacaaagcgatcgataaaactataaagaaaaatttcttgtattaaacgtttcatgaaaaagatggactctaatcgaaaataacaatgagatctattatatgatagatatggaggtagaggaaacaaaaactggtttcacgagatcccaaaaaaacgcttacaagcctttacgaatgcttttttcttgaagttgttgctcttcttcttcttgtgcaccttctctttatcatcatcatcttcgtcttcatctccttcatggaaaggaagcggccaagtcgtggcagagctctggtcatagattctacagtagcgttcagagacagacgaagatcttctcatagacatctttattggtgaaggaaccgcttgtgctgatgcagacactgacctgttcctgctcagcttcggtttcatttcagcaggttcaagatcgggcttctgaatctgaggatcgaccaccgggtggtccggctcaagtttctggtctgttgaatccatcttggaatagccactcatgatttgttctctctttcttcttcttcttcttctgatatatgttttgatagtgaatggacttctaagctatagtagtatcgcatatatatataaatgtgtcgagaggttcatgaatagagtaatttttatcagaatgagatccgcacaatattacagctggtggagattgtaagcaacgtttttaacacagggcatgtgcacttgtctggcaaatgtttggcattacatatagcattcatacttggtgtctcaaaaatgtgttaaaataaaataattgggagacaaacaggtgaaaagatttacgttatgctagctgctcaatagtcaattactcaataatagtgtagattagagacaacttttacttattcgttactctgtgatttattcactacaactacaagaaaacatgctattaacaatagaaatatctgttgtctctaattacttattcgttactatatgatttatatatatatatatatatatatcactacaagaaaacatgctattaacaacagaaatatccgttgttaaattttgtcgtttataaattatagcaacatatccataaaaaaaaaacactttgtttgagtaataaactaacaacgaatttcaaatgtaatatggcagagaggaataaaagacaaactaattgaagatattggttttcatatcctaagaggctaagacatatttacagtgttcctaattaatccaagtgttagaaaaaaaattttatttaaaaatatagattttttttaaaaagaattattttaagttcctatgcattttattaattaataatgatgaattgtatactccaagacaaataattgaatactattgaaatgatgcatctgtaatcaaattttaatttgtttgcttaatatgtgtgaaaatcttagaaacttggatttataaggaataaaacggattattagttttctcatttattaatagtttcatagtttgtggtatttgaagaaggataacatatattatgtgctctttgaatatagtttttgaatttgtggtattttgaccaaaaaacaatttgtaatatttttacagtaatcttcgttatttttgattttacaaaaacctataaaatactatacgtaaaaagaataaatagtgaaaaatcttccgaaatgaactgaaataaaaaggtctaaatgtgacgcaaggactagtggtgtttgagaggaattgctatttgcaaagttgtatttggagcttaaaaccctaaacccagaaatccccaactcttaaacttgagaagatg

SEQ ID NO: 4517 - DNA, 3000 bp, Unknown
  misc_feature (1)..( 3000): cDNA_ID_1824619_gDNA_ID_1620712_Annot_ID_49024 3000 nt of promoter + ATG
tcgtagttgtaaggattagcggagagctccgactccaaggttacaatctgctgattcgactcggcttcatcttctgagtcggaatcagaatcgccggaatcatccgatgaggggggatcagctcgggcagggttttcggctgaagcgtcttccatcttctggtcagtgttactgacgagttcagtgtcatcagccatcatcttctcaagtttaagagttggggatttctgggtttagggttttaagctccaaatacaactttgcaaatagcaattcctctcaaacaccactagtccttgcgtcacatttagacctttttatttcagttcatttcggaagatttttcactatttattctttttacgtatagtattttataggtttttgtaaaatcaaaaataacgaagattactgtaaaaatattacaaattgttttttggtcaaaataccacaaattcaaaaactatattcaaagagcacataatatatgttatccttcttcaaataccacaaactatgaaactattaataaatgagaaaactaataatccgttttattccttataaatccaagtttctaagattttcacacatattaagcaaacaaattaaaatttgattacagatgcatcatttcaatagtattcaattatttgtcttggagtatacaattcatcattattaattaataaaatgcataggaacttaaaataattctttttaaaaaaaatctatatttttaaataaaattttttttctaacacttggattaattaggaacactgtaaatatgtcttagcctcttaggatatgaaaaccaatatcttcaattagtttgtcttttattcctctctgccatattacatttgaaattcgttgttagtttattactcaaacaaagtgttttttttttatggatatgttgctataatttataaacgacaaaatttaacaacggatatttctgttgttaatagcatgttttcttgtagtgatatatatatatatatatatataaatcatatagtaacgaataagtaattagagacaacagatatttctattgttaatagcatgttttcttgtagttgtagtgaataaatcacagagtaacgaataagtaaaagttgtctctaatctacactattattgagtaattgactattgagcagctagcataacgtaaatcttttcacctgtttgtctcccaattattttattttaacacatttttgagacaccaagtatgaatgctatatgtaatgccaaacatttgccagacaagtgcacatgccctgtgttaaaaacgttgcttacaatctccaccagctgtaatattgtgcggatctcattctgataaaaattactctattcatgaacctctcgacacatttatatatatatgcgatactactatagcttagaagtccattcactatcaaaacatatatcagaagaagaagaagaagaaagagagaacaaatcatgagtggctattccaagatggattcaacagaccagaaacttgagccggaccacccggtggtcgatcctcagattcagaagcccgatcttgaacctgctgaaatgaaaccgaagctgagcaggaacaggtcagtgtctgcatcagcacaagcggttccttcaccaataaagatgtctatgagaagatcttcgtctgtctctgaacgctactgtagaatctatgaccagagctctgccacgacttggccgcttcctttccatgaaggagatgaagacgaagatgatgatgataaagagaaggtgcacaagaagaagaagagcaacaacttcaagaaaaaagcattcgtaaaggcttgtaagcgtttttttgggatctcgtgaaaccagtttttgtttcctctacctccatatctatcatataatagatctcattgttattttcgattagagtccatctttttcatgaaacgtttaatacaagaaatttttctttatagttttatcgatcgctttgtgtattggatcagtggtttaacgtattttgcattcttgatgactagtgagatgtgatatattacacgatttagattttcttttatgtatcttttactgaaagtcacaacccacttacttctataactatagtagtagtagacccattgtggtttgtgcgtctgaatccgtcgaaagataacaaagaaagaaaactgtgtaaagatagaatttaacaaattatcatacaagcaataagatgaataaactaaatattactttatttggaagatgatgaggatccttgactccaagattgtccttttgtgtaaaactcgagagagagtcgtccagcccaatgcacttgcacatggagttcgaatttatttatttttattcgaatttatttggtaactctttggtccatgaactttgaggtatatacagtaattagggataatacccataatcaaaagacaagtttatgacaaaaatgtcgccaccgcatttaccaacaagtattccaagagttaaaaaaaagtctattgctattgtctcagacatcaaactggatcggtagtgtaaactatgtctatatgaacaaaaacggtcgtataaaggttctagcaaacaacccatcaaataccatcatcatttctctttcttggttggttcacccaaaacgtacctcaaaatctcaagctaagtgatccgtggcatttgagaggtttaagagatggtgggctttagtgaaaagtgtagatgtttctcaccacaagtctctagtaatgggtgtcaaactcacaaacacttgttggcctattgaagcccatccatcttctcttctcgaaacttcaagtggggtccacaatttctctccctctttctcccaccttcctcttatcttctctgccttctatatctcttcctcctactttcccttagggtttttcagcttcaaaccctccttgcactctccgcttccctccgttacctttacttctctattgcttagctcgaaaa

SEQ ID NO: 4518 - DNA, 3000 bp, Unknown
  misc_feature (1)..( 3000): cDNA_ID_1824615_gDNA_ID_1620712_Annot_ID_49025 3000 nt of promoter + ATG
caccctcacacgtgccaagttcgaagaattgtgttcagatttacttgacaggtaattttagttacagttcttatggctaatattcatagcccgtcaagtaaacagattgccacatgttcattttgtagcttttgattaataatggaggcttaagattcttaccatgtatctatcttatagggtcaggactcctgtcgagaattccctgcgggatgcaaagctcagcttcaaagatattgatgaagtcatccttgtcggtggatccacacgtattcctgctgttcaggaactcgtgaggaaggtgactgggaaagaacctaatgttacagtaaatcctgacgaggttgtagcgttaggtgctgcagtccaggtgtgttctcctgaacttgtatctttcaccctatttaggtcttgaatttaacaatatgcattagtcattcctttgataaccttttggcaaagaagttgtgttctactaaaatgaattcttatcaagtaccattctcttctggctccaggctggtgttcttgctggagatgtgagtgacattgtgcttcttgatgtgacaccgctttcgattggtttggagaccctaggtggtgttatgactaagattattccaaggaacaccacactgcctacttctaaatcagaagtcttttcaactgctgctgatggacagacaagtgttgagattaatgtgttgcagggtgagagggagtttgttagggataacaagtctcttggtagcttccgtctagatggtatcccccctgcaccacgtggagttccacaaatcgaagtcaaatttgacattgatgccaatggaattctatctgtcagtgctgttgacaagggcacaggaaagaagcaagacatcaccattactggcgcaagtacattgcccaaggatgaggtgcgttcactttaggaattaaaccgcattgcttcattaacaataacttgtttttgtcagtcccatctttgaggtttagtgattttctactgattatgaaagtggtagccataccataccataggttaactggtagcattctcgttgttgctatcacttaatggctgtagcaatctccatcatcataggagtggttatttttcgttagtattcataatcatggtaacaaaagttggtgtggatggatgttgcaggtagaccaaatggtccaggaggcagaaagatttgcaaaagatgacaaagagaagagagacgcaatcgacacgaaaaaccaagcagattcagtggtgtaccagacagagaagcaactgaaagaactaggagagaaaattccaggtgaagtgaaagagaaggtggaggctaagctacaagagctgaaagacaagataggaagtggatcaacccaagaaatcaaagacgccatggctgctcttaaccaagaagtgatgcagattggtcagtctctatacaaccagcctggagctggaggtccaggtgcaggtccttccccgggaggcgaaggtgcttcatcaggagattcatcttcaagtaaaggaggagatggtgatgatgtgatcgatgctgacttcacagacagccaatgagaaaacaaactaggaaggctttggaattcatacatgggatgcgatgggagagacaaatgattttgtaggttggatttgagaacacaaatgaatttaagcaatgcttgtggacaacatttatttgtcgttagaaggaagcagtgtggttacagaggatgatgtttaatacataataatatgcaagccttctcttacacggtacttgcggatacacacaaaatgtacaaagtgggggcttttgaagcaatcctccgcaattatagtgactcaaaccttaaaatgcttttggtcattaactttgtactttttttggtatccaattatagcgactcaatcaatctgagactatccaacgcaattttagtatccaatgcacaacgacgtatgctttatctaccaaatcttatatgattttggaatgtttatcaaaatgcgttgattgcttatttatcttttctaaattctggccaatagttaaaattgtcacatcgtgttagtgaagagatctctctttgaaatgctcgaagttttgtttcgagcaagaaaaatattttttgtcgttgttatgggttctttgttttctactaaaatcccttcagacagaagaaaaaaacataaattaaatcccagcgaagcatatgtaataatgtaacaacaataaaatgtaataaaataaaaaagtaacaacaggctgtcaaaatgataaacaaataacaacggaggaagagtaaagtggggaagaagatcaatgggcccacacacaattcccaattctttgaccaatagttgacttttcttcctcgagtctttttaactcgcttcacctgttaccatctaccttcttacattattattacttactctcttaatcacttttgattaacaaaactaatttaccattgagggttttcttcttccttcttcttcatcctctttgctgctatgattgagctccatggatctgcaatcatagttcttcgatttaggattcgtttagatcgcggtttttgagctcggttggtgaagacatatgcttgaaaacgtactttaagctccaacttcgtctatttacaatattcctttattactttcatattcttctttcaaagtctttaagggttattttgcagtctttctatttgacttttgcgcttttattgaattgattttatatggtgacattttggacttggtcttctgttcaagattcctaggtcatctagcttcagtttttggtctatatttagaaactatgatttcgattgagatcttattggtcagattcacactttgtgtcagcaattctcagaaatatctaaagtggtgacttttgattgtttttgtgtgttgttgattctgggctctaattctctttctttgattttggtctggccaacagagaagtcttgtactgaagc

SEQ ID NO: 4519 - DNA, 3000 bp, Unknown
  misc_feature (1)..( 3000): cDNA_ID_2999587_gDNA_ID_1620712_Annot_ID_49029 3000 nt of promoter + ATG
attttatttttaacgtacgtagaaaaactagggaaaatacagattcaaacatccataatgataggttacacgtaggaattatgacggtgggagctttttaatgaactctaaaacagctttggcagtgttagtggcagccaaagatccaaactttcgaacagtgttatctcctactcctgctaaatctgataatcctcttatcacaattaggggatacccatttgacacgcaagtctggtcgaatccaaaacacatgcaaacaaaattaagtgaaagttcaatgaaaaaaaaaatggagtgaaaggaatgaatcacaatgttagaaacgtgaataattaccatggccacagcagaactctccatgtctgaggaggaaactccaaaagtatcgtataagaaatttctataggctgcattatccacaaatatgtcagcagtggctgcttttaatccaactactactttgggtttatttggaagacacagacttgcattcacacactgcaatagctccatcttctacattcatacaacaaccatcaaccatggaataaagtcttttgttagaaaaaatatattctaatctaatcatatgtcattcttaacaacctcaagatcagctgcaagatgaagccactcttgagttgtattaatccaaaacactttctttggtgaattgatgtgaccactgactgaatataattcctcgtaactgtatccaatagttcctaacttattgtttccttgtggaacattatagttcccgacatctaagtacgctacatcctcatttccttttgctttgcctggattctgtttgacgatcagaactaaaatcatcagacaatatgaaggagaagcaattatttatcaataacaaaacttgtgcatgtaaattttgtatataccagccaatcccacaagccagcattcgtgatttgcttagggatgctcacatctcctatggacatcgagttgtttatatttccagcaatcccaaaatgcacaatccctttcacactgaacacatctatcatttgttgtgttgctgctgctgcgttcaccttcaaataaaattcaagaaaaatttaccatctcctttttatagaaagttttggtttgatacttttaatataaatgttttttagtacatcaatttattttgtgattttaatataaatgttttttaattatcatttcaattttttattaggatccgtgaaataacattacaataaccaaataaactctttttcacgttgtacttttttattttggggtcaacttactcaccattcctatcccacatctgacatacacaaccttctttccatgaatcttccctatacgaaaacgtcttcctgcattcatttactcattaaaatcagaaactacttacattttcatctcaaaggaacaagagtctagagactctctcaaggtagaaaaacttaatagaaaccaattcaagtggtaattttagggatcagtgtagataccagagagatcgaggaaaggatgcgtaggatcgagtctgaaatcaacactgccgagaaaagcatcttcttcggtctcaaagaccgtcacaaggccaatgtaaggtcctctacggttgatttttctaatggtagtggcggattttagtttgtgtgagtgtgaaggtgtggtcgaagcacgcaaaacgtgcaaggaagagatgatgatgatgaagaggagaggaaaaagaaaatgattgtgatccatggaagccatctgatatattggttggttggtttgagataaatgcctagctcatgtctacatatatatagcatccaagtcaaacctctacaaggctcacatgagccgaaactagtatgaactttcttctttacacatgattctcgtttcattaatattttttattcgtgatcaaagatgataacgtattttattcgtcagtgtgagaccatgcataaactttttaaaaattcttaatagcttaatgccttaagaccatcgtgttttaatgcttctacatatattaacatgtcctccttattaatcagtcactcaaaatgattaattagaagggatgttttgctttaattgatacatcctaataaactcagtaaaccttagggtatgattttatggatagaaagaagatattaatttggctattaaattaactttaaacatctatatatacatttttgcagccattttgtgaaataaattctgtagttgagacttatttacaatggttgccactggattttaatatttgtttttaataattagaaaaaaaatcttcgaattaaatatttgacatttaacaatttttctaaaatctctctacattaactacacgattggttactaaaataaaactttcaaaatatttaatatcatttaattactacaaaattatcattattgatattgtttttctgcatgactattacaattcaattataatcatcaaaccgcagagatatttgatagcatttaattactagataattttaaaaataaatgattcataaacatatgataaataagatcaacattaataaaataaatgagtttttttacgggacgggttggcgggacgggtttggcaggacgttacttaataacaattctaaactataaaataaaaatattttatagatagctacatagatagttacaaattgcaaaattttatatatattaattttaaagtataaattgttcccgcgatataccgcggatgaaaatttagttagggtatgatttttggtagaaatcttaatatatcctatccaacgagaaaatattataactcaaccttattcttattttcctttaatatttttaatttgtcagatgaatttttggaacaaaaaaaaaaggatctggtggtggtggccaagcaaggcttaggctatagcacgacgactcaaccagctaattaacaagttttaaactttttctccggagctctgactcttcttctctccggatccaaaaatg

SEQ ID NO: 4520 - DNA, 3000 bp, Unknown
  misc_feature (1)..( 3000): cDNA_ID_1824601_gDNA_ID_1620712_Annot_ID_49030 3000 nt of promoter + ATG
tgtccacatctacagacatagatagcaagagtaggtgacgctaatcatgcaccaattgaaaggcaactgtgtcactattgacaaataaaattgagatatatttttaaaatttacgagaatgaaacagtagacataccgcagcaacggcattttcaaacatcagagaaaaacacagtattcaaatgctcttttgaaacttttaatgtaagcgagaggaacattatacacattacatactagtgcttcacccatatcacattcacaactcaggtagtgatcctttaacaaatccatcgagccaaaatatatcatgacaaggggaacctaagaaatttttcagtacatcataattattcaccctacatttctacacagtttgacaacgaggctaggcagttggattcacaccaaaataagaagatgttatggaacttagcaaaaggaactgcccagctatagttctaagctaagtgatcagtgatcactggagttcttattctgatcaagcgcctccctttggagtaaaaagagctcatttttcttattcaacatgattagagaaaatcaaagtcaccaatgaggccagggcatatagggattggagtcaaaaccagttactctctcaaaacttcctatgaactttcatgttcatccataaatcaaatgtttaggctgaagtccaagaagaaactaaactaaactgctaagattgtcaatcatcaaacaaacaaaaaagcatctgacctgatcaagtacaacatcggtgatcatatctccagctacctccttagactcagagaccacagctaactcctccgttacccacttcctcccgccaggactgggaaccatccctccaaatctctgcagatccctcagctccttgtgcatcgttttagccgccttcttcctcgccatagcaaacacaatgtgatccatggcttcatcattcatatacacctcaaaactaatctcatctttacaaggcacgacagagttgaatagccttgagatcagatcgtgtctactcttaagctccaaagtcgccaaaagcccatggcaatacctacgcccactggcatagaacttaaacacattcgtcgcttctttcagcaacaaaggagagtcttctccttcaccaactccaagcaaactgaagttcttctcaaaaatcgtatctttaagaccaaatttggaagcccaagccaaagcgaggttctcattttcacgtttaccagtgaagtaattgatagcgtaaccaatcaatatagagacgcaaacgatctccacagtgtacgattgcatcttcttcggaatgtcagtatctggagtttctgaagcagactcaagatccggcgtctgtggatcggcaggagaggaggcgtcatcggaaaaaaccggagactccgtagatttctcgtcctccggcaatccttcgaactcatcttcatcccagtaatcgaaggagatggaggacgaaggcttcacggtctgagtgggaggatcagatttagatgcaggagtagaatcagaatcgggagatgggtccagatccagaaccgttgactcagactgagtcagaagaggaggacggagagagtggtgaagctcagtggaatcttctgaaacatcgtcgtcttcagcatcgaaaccttcgaagtcggaagaggaagaagcgagaacatgatggtggaggcagaggaaagcgatcagagctatggagaagagagaaaagagacgattcatttttggatccggagagaagaagagtcagagctccggagaaaaagtttaaaacttgttaattagctggttgagtcgtcgtgctatagcctaagccttgcttggccaccaccaccagatccttttttttttgttccaaaaattcatctgacaaattaaaaatattaaaggaaaataagaataaggttgagttataatattttctcgttggataggatatattaagatttctaccaaaaatcataccctaactaaattttcatccgcggtatatcgcgggaacaatttatactttaaaattaatatatataaaattttgcaatttgtaactatctatgtagctatctataaaatatttttattttatagtttagaattgttattaagtaacgtcctgccaaacccgtcccgccaacccgtcccgtaaaaaaactcatttattttattaatgttgatcttatttatcatatgtttatgaatcatttatttttaaaattatctagtaattaaatgctatcaaatatctctgcggtttgatgattataattgaattgtaatagtcatgcagaaaaacaatatcaataatgataattttgtagtaattaaatgatattaaatattttgaaagttttattttagtaaccaatcgtgtagttaatgtagagagattttagaaaaattgttaaatgtcaaatatttaattcgaagattttttttctaattattaaaaacaaatattaaaatccagtggcaaccattgtaaataagtctcaactacagaatttatttcacaaaatggctgcaaaaatgtatatatagatgtttaaagttaatttaatagccaaattaatatcttctttctatccataaaatcataccctaaggtttactgagtttattaggatgtatcaattaaagcaaaacatcccttctaattaatcattttgagtgactgattaataaggaggacatgttaatatatgtagaagcattaaaacacgatggtcttaaggcattaagctattaagaatttttaaaaagtttatgcatggtctcacactgacgaataaaatacgttatcatctttgatcacgaataaaaaatattaatgaaacgagaatcatgtgtaaagaagaaagttcatactagtttcggctcatgtgagccttgtagaggtttgacttggatgctatatatatgtagacatgagctaggcatttatctcaaaccaaccaaccaatatatcagatggcttcc

SEQ ID NO: 4521 - DNA, 3000 bp, Unknown
  misc_feature (1)..( 3000): cDNA_ID_3073490_gDNA_ID_1620712_Annot_ID_165487 3000 nt of promoter + ATG
ttcttcgcttacattacttatataaaaccctctctcgcatccttcctcagttaatcatcactgctctcttctccatctcgctttcactcgctctctctcttgccctagcttcccttttctcctgaatcggcctcacatcacggctttttccgactgttttccgtcgaatttcaatgggatctcgtgacggcgatccgccattttcgaaattcttgagctgactcgtctccaatagttcatcggttagtctgattccgtgtatatctattcttaacctgcaatttgatttgattgtacacattttttgttgagtcgtttttgtgatatttgtttttatccgtgagattagtttcgtagttatggcgtttatcatcgatagatcagctgcatgagctttaagattatataatttctgagctgcggatctaattttagtaatgtatggaatgattttgagtactaatgtatcataatttggttttgcatgtccagatttgtgagagcttttaaaatctttaagtggacctgtctcatgtattgaggtttgttttctcatctatattatttgtgtttgatgcatttacatatatgtatatatcttatgatctgttttattctacaagtattgtgagtgtcatttgttgattgttacttagttagtctatatattccttttacttagttagttatgagcataagataaaaacaaataatagactcgactcaattgatctgaagaaacacagaaaacaaatctatacccagatatttagttactgtggttattgatatctgcaccttctttagttagctactgtgaataagagactcgactcagttgatctgaagaaacatagtttgttactgtggttttttatatctgcaccttctttagttgtaattcctgagaagattttgaaagcatcattagattcttacttgagcccactttaaggtaaaaaggagctcgtggaaagtctatacccaaattatatgaaattaagcaaaatatgcttgttcgttcttcttcttcggcaaactaacactaattcacccactaaagagttttcgagtttgtctgagtatggtctttttttgtttaacatggtctgttaagtaaaaccctcaatatggaaccttctgagaattcaagcgtgatcatgatatccttgtcactcaactttgattcttggtcaaataagacttttcaaaaaactatatgataggctccttttagagaccatttattggatagcttcatctgtgtttgcagtctctaaatgtacaaaaatgcatttgcacaatgtcttcaaagaagagaaagtgaagaaaacttgctttactatgaggagattaagaaaaattttattgattgaatgcaagacaattttgtctcaaatcattaaaataaaaaatactactttgctgttgcataaactagcaatgcataaatatcaggtttatatctgcatatctttgtaattgtatgctgttcgttgtttttataatatgaattttaaatctgaaaattcatcttcccttgttaatgcagtggaaaactgctacagttgactgagataaggttctgacagtccagctgagatgctgagtatcaccatttgtacttgagttgtctctcatgtctagaccatttgtgagaagggagtttttgtttacaccaataccccccagtctctaaatttgtaagaagtattatgctcaattaaggaacatagctagttcgacataccatactaccctttttaaaactatcctatatgtttgatgctagcatagcgtaattttgtgttctcatggtgcagcagggttagtttattgtgtacctctagatatatattctcttgctgcgtagggttcccaagctgccaaaaacttttaaaaattagtgatctgttccccaaacccccattcaataagaaaggtctacctgtagctcacagtcacagctattagagctgtccttgcttctttgggtttactgttttagttaattagttaccctatgaaagtctgatccttcagaagttaggtatagaagtaagtcgattaagttcattcatgacttttccagatgttgcatacataactttttttatttgtattcgaactagtccaagccgattctcaaaatcatataaaatcatttacaccttggtcatggtagctaagaatattgtatctaaaattggggagtggggagatgtttggttatattcccttctcatcgatggtctagatgtgcgaggtgactctcatggaggtaaagaacaatggtgattttgtgaagaacccaacgtaatggtaattcctaaaaaggttagaagttttttcagcttgttgtattgctaaaatggggttgatgtactcaacgacatccaagtgtacttgagtgagcttttttggggttgagtacctcgacccattattcaaactaatgtaaatggtgaatgcagcagtgactttgttgccttttgcaagaactaaagaagacagaaacaggttgtaaaagagagccaagtgtgtgtttatggtagaaagagcaaagtgaacgaaaggtgtacctttttgacttgttgtcactggttttctcccacttcatccgtttcatgctgcatcagaaaacaacataaggaatgaatgacgtaacgcgaagcattaggagttgcttgtaaattaatacattgccattactaacgtaattcagtagattctaactacaaatgaagtcaatgtatctatttgtctactttagccaatgtatgataagaccaaatagtcttctcttttttcagaaactctctaggattaaaaagtttgtgggtgaaagaaatattatcgtgtggatgataagaataattgatcttgtgttagtaaattaggaatagatatacaagtaggtttctctctaaataaaaaataaaagagtttaaattgcatgcgtataaaagaaaaaagtaagaagaaaatatgttccggtta

SEQ ID NO: 4522 - DNA, 3000 bp, Unknown
  misc_feature (1)..( 3000): cDNA_ID_3073497_gDNA_ID_1620712_Annot_ID_165483 3000 nt of promoter + ATG
cgtccattggctttcctgtcacgtggtcaggcctatggcgacccattatgcaaagtctaaacacagtaagctgcgggcagttctccgacatggctgtcacagctccattggtcatattctggcaaaagtacaggatagattccagtttcctacagccctctgaaattgcttggaggcctactcccgagacaggaccttcactgtcttcacgaggatcaaaagggaaaatccgaagctcacggagctccttgcatgtggcagccactgcctgtagtccttcatcacgtatcgagtcaagagcctgcattataaaagtttcaagatacgcatgtaactcaaagtcctcggttaaaggatattacactatactatacaatgagatcaataaagatacatacccagaagactcggatattgtgacagttgcttatgatgggcttgagcatgtgaggagaaatgttagcataactgaagttaagagaggtgagattagcacaaactgaagagatggctaggaggtattccggtctaaattccctgaatcctgagagacaaactatggatttacaagcacgaaaagcagctgcataatccggttgttgttctccctgaggcacattgtctggactaaatgaccccgtcccaagactcgttaactgcggcgctcgaaccattagtcgatgcagctcttcaagggaaacaaacctgttcgttctaagtttcttcaagaatggtgacctaaccacgagctcctccaatgccttgaaattgataggggattcaacacagtcaaaagacaaagactccagatgagtttcaccctcaggaaaacaagaaatccaatccaactcatcatctgtgacttctgactccatcaaatcaaggacctttagctgcctgaaaacaaagtcccacttgataagcatttctagaagactctgagaacaaacaaacaaacaaacaaagagaagagatctacaaagtacctgcatttgttagcaacaatagcaataccactagtcccaaaaccttcacagcagaccaaagtaagctctttgaacccaggaaacgactcagcaagaagagccaaatcatcatccgtaacaaacatacgcttcaaatgaaccttctcgagccaaggataagccttagctgtagcagcaacccaaggagagaattgagctccccaattaggaggcatgagattaaaatcagcaaacctaggtttccctttaagcacaagagacctaacacgcttgaaccggtgaataagccgagcaggagagagcgagtaacagtttccaataaaaacctctaatcgagtctgagcctcgacgcgataccacgatctgcagaccaatgagactgcgttgcgatcgcatctggaagtgaggaactgaagcacgttctctaaaacgttctcaaggacatgatctggacacggcgggggagaagatttgaaatttcgagacttgttcgtgaatgtagcggcggaggaagaagaggaggaggaggagcaaggtggatttaagttgagatatttctcaacatcctctgacattttagctgagctatcttcttctgtcatacaagtaagtgatgaaaaacaagaaagactctgactttgatcttatccagaatttatgagctcaggtgctctctttctgatacaaaatctgattcagatgaagaagagagataggtgaaaaaggagctggtcttggtgtttggactctctctctctctccattttcacctccattatttaggagactatgtaaaagaaaaaaaaacaaatatttttggttttgcacattatttttgttgatgaagaaataaaaagaatcatcaagtattttgtgaccaaacatgatttttaatcctattaaagatttgtacttctattttaaggtgtgacaggtgacatttagagttttatgtaagtggtaatcatgtaaacttgttgaatcttaaccaaaattaaaaggatttaaaagtgttttgtactgtttctttaaatgaataatactaatatctaaagtcactttcatccttttttaagttaatgcattttacatgaatttaatttttatcatacaatcaacttttcgattgtgttctcttaagaaggcctcaaggctttcgtgtaaaggaaaaatgtttgggcttattatatctcataatatggtggccaaaacaagatcaaaggtgattaatggttggtttactgccaataatgggttttgaagataagtgtactgtatgccttattcgattatcttttcaaaaatgtgtttgcttaattttccacaaggcaaattgttatagatatcttcaaatatgcttcttaaaattttcaaaaggcaattatttagaatatggataaatttcaaataagttccctaaaagaagaaatttcgaagtcaagttttatagaataagtcataacgacgttgtatccatagtcttggtcactaactactaataaatgggtcataagtctatagatatttttcaaaagctaggagtcgtattagtgtgaaattatggtataaatatactgaccttccattacaaagaatgacgtgtaaacaaccaaatattagaatgtggcaagtagtcgccgaacacgtctccttcgtcaaagtctccttttctgacttctctttaacccccaaccccttgttactttaatttggctctacatagatttgtaatcaaacacaaatcacaaatctatatattttcccttaattactttggctttctattgattaaagcttctttaattccaatttgcaatttaaacacctatctctttcccaaatttgagactttcctaattaattaaaagctttgctctgtatatttgtcgttataaatttaattttaaaattcgaaactttttttctgcctttcctctttctctctctctatctatcaaacactagacttgaagaaatgcagtgaaattgaaattgagtagaagcagaagagaat

SEQ ID NO: 4523 - DNA, 3000 bp, Unknown
  misc_feature (1)..( 3000): cDNA_ID_1824593_gDNA_ID_1620712_Annot_ID_165482 3000 nt of promoter + ATG
gctatctgcacggaaactcaaaacttacagtttctggatttggatccaaaattctattaatcaaggactttgcccccagggcaaaatatgaggggcaagagaactcagctttgtcgatctgaaaaatgttggacaataagaagaaaaggaaaccatatcagaaagaaagtacatagatgccttacaagcacataacacggaaggtttagagaaagggagtcttgactacagtgaaaataatttagccataacgatttctattacaggttctgcagatattgcttgttcaatcctagtgtttaattgggataattaaactaggcagcaacaagaaactttacaaaacaaaatatcaagaatcaagaggcaacaacagcagagctcatgccttactatataaagttggtagatccatttcatcaaatggaagatatcctgccataagaacataaaggatgaccccacaggaccaaatatctgcaacggcaccattgtaacccttgtgactgagaacctaaaccaaaacggagaagaacacataagctatgataagaaagacattaaatttcaaaacattatgatatttgatttacctcaggagcaacgtaattgggagttccacatgttgtctttaggatggtaactcccttcagatcaaagtaagataatttagtcaataatgatccaataacaaactaaattctcaaaatttgaaagaaaagatgtcactgagaacccccattacttgttcaggtaatgcactgaggccaaaatcagatatcttgagatttccttgagaatccaacagaagattttccggctgcaattaacacaagacaatcatcagatcaagaacaagtggtagaaatgtattaattcttagcaagtattcacctttagatctctgtggtaaacacctttactatgacagtaatcaactccatcaataagctggtgaaagtatttcctagcttctgactcactaagtcgtccattacgaacctatagtagcaatgaaacaaatgaatcattcaacaatatctgacagagtaaaacgctgtaaaaatcatcaccaagagctactcacaatcttatcaaacagttcaccaccagtaatgtactccaggatgatataaatctttgtacggcttgctagaacctaaaaaggaccaaatatcaaaatcccaaatggaaagcaagaatctttcagtaaattataaagcaaagaagaagaagcaaaacattcacttacctcataaagacgaacaacacaaggatgacgaacaagcttcataatcgagatctctctcttaatctgctaacacatgtcatcaatctaatcatatctcagccaaaatgaaatcgaagagagtaagtagtaagaagatagagacgggacctgatccaccatcttgcgcttgatgattgtgctacgatccacgattttcatggcgacgctctcaccggtctctgtattctgagcgaacttgactttagcgaaagtaccttcgccgattgttctacctaattcatacttgcccaccttccttaccaccatattctcttctgcttctactcaatttcaatttcactgcatttcttcaagtctagtgtttgatagatagagagagagaaagaggaaaggcagaaaaaaagtttcgaattttaaaattaaatttataacgacaaatatacagagcaaagcttttaattaattaggaaagtctcaaatttgggaaagagataggtgtttaaattgcaaattggaattaaagaagctttaatcaatagaaagccaaagtaattaagggaaaatatatagatttgtgatttgtgtttgattacaaatctatgtagagccaaattaaagtaacaaggggttgggggttaaagagaagtcagaaaaggagactttgacgaaggagacgtgttcggcgactacttgccacattctaatatttggttgtttacacgtcattctttgtaatggaaggtcagtatatttataccataatttcacactaatacgactcctagcttttgaaaaatatctatagacttatgacccatttattagtagttagtgaccaagactatggatacaacgtcgttatgacttattctataaaacttgacttcgaaatttcttcttttagggaacttatttgaaatttatccatattctaaataattgccttttgaaaattttaagaagcatatttgaagatatctataacaatttgccttgtggaaaattaagcaaacacatttttgaaaagataatcgaataaggcatacagtacacttatcttcaaaacccattattggcagtaaaccaaccattaatcacctttgatcttgttttggccaccatattatgagatataataagcccaaacatttttcctttacacgaaagccttgaggccttcttaagagaacacaatcgaaaagttgattgtatgataaaaattaaattcatgtaaaatgcattaacttaaaaaaggatgaaagtgactttagatattagtattattcatttaaagaaacagtacaaaacacttttaaatccttttaattttggttaagattcaacaagtttacatgattaccacttacataaaactctaaatgtcacctgtcacaccttaaaatagaagtacaaatctttaataggattaaaaatcatgtttggtcacaaaatacttgatgattctttttatttcttcatcaacaaaaataatgtgcaaaaccaaaaatatttgtttttttttcttttacatagtctcctaaataatggaggtgaaaatggagagagagagagagtccaaacaccaagaccagctcctttttcacctatctctcttcttcatctgaatcagattttgtatcagaaagagagcacctgagctcataaattctggataagatcaaagtcagagtctttcttgtttttcatcacttacttgtatgacagaagaagatagctcagctaaaatg

SEQ ID NO: 4524 - DNA, 3000 bp, Unknown
  misc_feature (1)..( 3000): cDNA_ID_3091764_gDNA_ID_1620712_Annot_ID_165479 3000 nt of promoter + ATG
gccaacccgtcccgtaaaaaaactcatttattttattaatgttgatcttatttatcatatgtttatgaatcatttatttttaaaattatctagtaattaaatgctatcaaatatctctgcggtttgatgattataattgaattgtaatagtcatgcagaaaaacaatatcaataatgataattttgtagtaattaaatgatattaaatattttgaaagttttattttagtaaccaatcgtgtagttaatgtagagagattttagaaaaattgttaaatgtcaaatatttaattcgaagattttttttctaattattaaaaacaaatattaaaatccagtggcaaccattgtaaataagtctcaactacagaatttatttcacaaaatggctgcaaaaatgtatatatagatgtttaaagttaatttaatagccaaattaatatcttctttctatccataaaatcataccctaaggtttactgagtttattaggatgtatcaattaaagcaaaacatcccttctaattaatcattttgagtgactgattaataaggaggacatgttaatatatgtagaagcattaaaacacgatggtcttaaggcattaagctattaagaatttttaaaaagtttatgcatggtctcacactgacgaataaaatacgttatcatctttgatcacgaataaaaaatattaatgaaacgagaatcatgtgtaaagaagaaagttcatactagtttcggctcatgtgagccttgtagaggtttgacttggatgctatatatatgtagacatgagctaggcatttatctcaaaccaaccaaccaatatatcagatggcttccatggatcacaatcattttctttttcctctcctcttcatcatcatcatctcttccttgcacgttttgcgtgcttcgaccacaccttcacactcacacaaactaaaatccgccactaccattagaaaaatcaaccgtagaggaccttacattggccttgtgacggtctttgagaccgaagaagatgcttttctcggcagtgttgatttcagactcgatcctacgcatcctttcctcgatctctctggtatctacactgatccctaaaattaccacttgaattggtttctattaagtttttctaccttgagagagtctctagactcttgttcctttgagatgaaaatgtaagtagtttctgattttaatgagtaaatgaatgcaggaagacgttttcgtatagggaagattcatggaaagaaggttgtgtatgtcagatgtgggataggaatggtgagtaagttgaccccaaaataaaaaagtacaacgtgaaaaagagtttatttggttattgtaatgttatttcacggatcctaataaaaaattgaaatgataattaaaaaacatttatattaaaatcacaaaataaattgatgtactaaaaaacatttatattaaaagtatcaaaccaaaactttctataaaaaggagatggtaaatttttcttgaattttatttgaaggtgaacgcagcagcagcaacacaacaaatgatagatgtgttcagtgtgaaagggattgtgcattttgggattgctggaaatataaacaactcgatgtccataggagatgtgagcatccctaagcaaatcacgaatgctggcttgtgggattggctggtatatacaaaatttacatgcacaagttttgttattgataaataattgcttctccttcatattgtctgatgattttagttctgatcgtcaaacagaatccaggcaaagcaaaaggaaatgaggatgtagcgtacttagatgtcgggaactataatgttccacaaggaaacaataagttaggaactattggatacagttacgaggaattatattcagtcagtggtcacatcaattcaccaaagaaagtgttttggattaatacaactcaagagtggcttcatcttgcagctgatcttgaggttgttaagaatgacatatgattagattagaatatattttttctaacaaaagactttattccatggttgatggttgttgtatgaatgtagaagatggagctattgcagtgtgtgaatgcaagtctgtgtcttccaaataaacccaaagtagtagttggattaaaagcagccactgctgacatatttgtggataatgcagcctatagaaatttcttatacgatacttttggagtttcctcctcagacatggagagttctgctgtggccatggtaattattcacgtttctaacattgtgattcattcctttcactccattttttttttcattgaactttcacttaattttgtttgcatgtgttttggattcgaccagacttgcgtgtcaaatgggtatcccctaattgtgataagaggattatcagatttagcaggagtaggagataacactgttcgaaagtttggatctttggctgccactaacactgccaaagctgttttagagttcattaaaaagctcccaccgtcataattcctacgtgtaacctatcattatggatgtttgaatctgtattttccctagtttttctacgtacgttaaaaataaaattaataaaatctgtttttcttttctttaatcagcttcttgcatggaacactttaatttcagccttcaaaactagaattacaggtctctttgttcatatcaacgatcccgtgacagcaacaattcaaatatgggcaaaaatattttgtgtttataaaatagtatttttttggaaatttgtagagcgtgtattatcgtccacaaaatttattttagtggtattgtaggatatttgtcaaaaaaaaaaaaagtgcgcagccagcagcccctcatgtttaatgcatacacaaaggttatatcagctagtctagagacgagaagcacgtggaaagaagaaactatcaagttggacttggatgatatatatatatatgcagctgtggatttgaatcgtaaaccaaccaaccaatcag

SEQ ID NO: 4525 - DNA, 3000 bp, Unknown; identical to SEQ ID NO: 4519
  misc_feature (1)..( 3000): cDNA_ID_3073501_gDNA_ID_1620712_Annot_ID_165477 3000 nt of promoter + ATG

SEQ ID NO: 4526 - DNA, 3000 bp, Unknown; identical to SEQ ID NO: 4518
  misc_feature (1)..( 3000): cDNA_ID_3073509_gDNA_ID_1620712_Annot_ID_165474 3000 nt of promoter + ATG

SEQ ID NO: 4527 - DNA, 3000 bp, Unknown; identical to SEQ ID NO: 4517
  misc_feature (1)..( 3000): cDNA_ID_1824619_gDNA_ID_1620712_Annot_ID_165473 3000 nt of promoter + ATG

SEQ ID NO: 4528 - DNA, 3000 bp, Unknown; identical to SEQ ID NO: 4515
  misc_feature (1)..( 3000): cDNA_ID_1824635_gDNA_ID_1620712_Annot_ID_165464 3000 nt of promoter + ATG

SEQ ID NO: 4529 - DNA, 3000 bp, Unknown
  misc_feature (1)..( 3000): cDNA_ID_3091760_gDNA_ID_1620712_Annot_ID_165490 3000 nt of promoter + ATG
cccgagatgggccaacagtgtgggaaatagggatacctgaccggtctgcagctgagttctttgttccagacccaaatcccaaatacatcaacaaactatatattggtcatcctgataggtatgtccatgatcaaagatatcacaacattaaggtttcagattgttaaaacagtagagagctaaagtatggttgtacgtaagcaggtttaggcaatacgggctatgggaaagatacacagaactatatcctaaggaagatttggtgttcaccattggcgtcagtgattacaaaaaagattggttctttgcacacgttaccaggtaacaaatatttcacattttctaagaagagtaaaacaaagaagcctcacatttattttaaatgatgataggaaaatgggagatgatacatatcagaaaacaacatggcaaatcaagttcaagctagagaatgtacagaaaagttgcacatacaaaatccggatcgcgctagcaactgcaaatgtagcagaattacaggtgaggatgaatgatgatgacacagaaaagactactcctatattcacaacgggtgtaatcgggcacgataacgcgattgcaagacatgggatacatggaatctataggctttataatgtggatgtaccaagtgagaagcttgtggaaggagacaacactttgttcttgacacaaaccatgaccaccactggagcctttaatggtctcatgtatgactatatccgcctcgaaggacctcctttagattcatactctcactaggacttttagtcacattattgtatacgcaattttgtattgcgggttactttactaataaaaaaaaagacattatatgggccttgtgttgggccttctttctaatctcagatttgactttattacaaacgaaagggtaagaatgtaatttttcgccgactcgatctatcgctgcctatatatacagttacctgcaaaatctagggtataaaagcccctaattttttctccgcccaagagacaaaaatccttcgcaatcgagcaacggaagctcctgcatccaccgtccaaatctcttctaacgtcgccggagatcggtaaaccggttcttcatcccgtattcatctcttattgaggtcttagattcatctagcaccttttttttggcgtcgaaactttcagattccctatttgtaattagttgcgaattttgattcgacgatttgttgctcgaatttgaatcaacagatcgttggggaagtagagaatggcgacgtttgagctgtacaggagatcgacgatcgggatgtgtctgacggagactttggacgagatggttcagagcggtacgctgagccctgagctagctatccaagtccttgttcaatttgacaaggtttcaatttaacttttatttgactgatcttggcgtcttgattcgtttttgtggttttttttttctttcctctttttgatatctgtatgcttgttgtagtccatgactgaagctctggagagccaagtgaagaccaaggtgtccatcaaggtgattttcagttcttttaatctcttagtcagcgtaattgggtagaagaaaatatccagttcgtgaattgggtggaagacgattaagagtttctaaactatcttgctctattcggttatcgttaagagtttctgtgagtaatgggttgaagctggatatcaaataatttagtgttaaaaagttcaacttgatagtaagatgtggattcagttatctgcctgataaggttattagatttgctagcacaggaaatactaacactgtcatggattcaatcaagttcatagtttctttggatgtcatatatgaataataggttgcagattcccattcctagagttaagtgtcaaccttagattaagctgtatggatttcagttatctggctaggagcttatatctgttttacctcaagaaatacttgcaattttatgaatactctcgagtgttgtagactcgtagtttatttgtctggacgttgtatgttcttttggaagctgactgatcaattgtttttggtgttcatcactaatctggatagtcaaaaattgagcttattctttgctccgaagacacttttttttaaaaaaatcatatctggatctcaaaataagagaaaactttggcagatgaaacaatcagattcttactatcgtttcttatttattatttcagggacacctgcacacttacaggttctgtgacaatgtctggaccttcatattacaggacgcaatgttcaagagtgacgatcgtcaagagaatgtgagccgggtgaagatagtggcatgtgattccaagctgctcacacagtgagatgcaaattgtctgcagggaatttactttcctttgtactagattttgagttttttcactttgtaaactcagcacttgctatatatgttgagcacttgctatatgttgagctccatctgcagccatcaatttagcctatatgtaaattctcggcccaaggacataaggatacattctgttgctatgagaaagttcttgagcttcatcttgagttttttttttttttttttttttgtcaagagtgttacttttatatatataagccagtacaaaccgagtcagtacaaaagtggaggaaacaaccatgaacaaaagcatggactaaagcctaacctatcaactattacagatatgattaacaagaacaaacttgacaaacactagagaaggttaaacttgtatcataaacgaaactagtctaaaacagaatccaaaaggtgacctaatctgttcttatgaccttttatctgtaaaattccgaaccacttgatattgatttggacaaaactttgtctcatggaactgattggtctcaaagccattggttaatcttagactctttctttctcttggctcacttcactctcctttttttaggtgagagtgagttattatatgtatgtgtcatttttgccttttcag

SEQ ID NO: 4530 - DNA, 3000 bp, Unknown
  misc_feature (1)..( 3000): cDNA_ID_3073486_gDNA_ID_1620712_Annot_ID_165489 3000 nt of promoter + ATG
gtctttatataaatgtttataaacttggctgaggcaggatcaaaggcacaagttttgaagtagtagtggaaaatgaagagctggtagaaatttccttctcaaggaaatgggattcttctctccaagacagtattgctcctattaatgttgacaagaggtatgtcattttaatacaacatgcatttatgtgtgagtgtgacagagagtttgatttggatattgtatcattcaggttcataatgcgtaaagatgtaactggattctactcatatgcgatatttgagcatctagcggaatggccagcttttaacttgcctcagacaaggattgtctacaagcttcgtaaagacaagtaactaaagttcaatatcaatctttcccttaaaaccaatattagtatatactcatgtggaaagaaaacttgcaggtttaaatatatggcgattgctgataacaggcagaggaaaatgccacttccagaggatagattggggaaaagaggaagacctttggcttatcctgaagctgttcttcttgttcatcctgttgaagacgagtttaaaggagaggttgatgacaagtatgagtattcaagtgagaacaaagatctgaaagtgcatggatggatctcacataacttggatttgggttgctggcaaatcattcctagcaatgagttcagatcaggtggcttgtccaaacagaaccttacttctcatgttggtcccatcagtcttgctgtatgtttcttttctctcttcctccttgaaacatgttctcttatctatgatgatgggttcttacttaatgattgtgtaaacacagatgtttttgagtgctcactacgcgggtgaggatatggtgatgaaggtgaaagcaggggactcatggaagaaagtgtttggtcctgtctttacttacctcaattgcttgcctgacaaaacctctgaccctctttcgctatggcaagacgctaaaaaccaggtttatccattaaccaaccttctaccttttgtgcatattataaaaaacttatctaacattgtaggaagtggtgtttgattagatgttaactgaagtccaaagctggccttacgatttccctgcttcagaagactttccagtgtccgataagcgcggttgcatcagcggtagattactagtatgcgacaagtaagcctcacattccaccatttgctctgcttttcttcgttttactatcattcactcaccgttgttttcttatgtttttttgttaaaattccttcagatttcttagtgatgattttttaccagcaaatggtgctttcgtagggttggctccaccaggagaggttggatcctggcaattagaatctaaggtcagccatgcaaattatactcttagaccatataagaatatacatgtaaacaatgaacttatgcttgcatgaatttaacttatatacatagggatatcaattctggacagaagcagattctgatggttatttcgcgataaatgatatccgagaaggcgagtataatctcaatggttatgtgacaggatggataggagactatcaatacgaacaattgattaacattactgcaggttatattttctttaacttacaatgtaatcaagatttatattaggctgtatcaagaagtgcaagttaacttaacattagctacactctgcacacaaaaaccaggctgcgacattgacgttggcaatatcgtgtatgaaccgccccgagatgggccaacagtgtgggaaatagggatacctgaccggtctgcagctgagttctttgttccagacccaaatcccaaatacatcaacaaactatatattggtcatcctgataggtatgtccatgatcaaagatatcacaacattaaggtttcagattgttaaaacagtagagagctaaagtatggttgtacgtaagcaggtttaggcaatacgggctatgggaaagatacacagaactatatcctaaggaagatttggtgttcaccattggcgtcagtgattacaaaaaagattggttctttgcacacgttaccaggtaacaaatatttcacattttctaagaagagtaaaacaaagaagcctcacatttattttaaatgatgataggaaaatgggagatgatacatatcagaaaacaacatggcaaatcaagttcaagctagagaatgtacagaaaagttgcacatacaaaatccggatcgcgctagcaactgcaaatgtagcagaattacaggtgaggatgaatgatgatgacacagaaaagactactcctatattcacaacgggtgtaatcgggcacgataacgcgattgcaagacatgggatacatggaatctataggctttataatgtggatgtaccaagtgagaagcttgtggaaggagacaacactttgttcttgacacaaaccatgaccaccactggagcctttaatggtctcatgtatgactatatccgcctcgaaggacctcctttagattcatactctcactaggacttttagtcacattattgtatacgcaattttgtattgcgggttactttactaataaaaaaaaagacattatatgggccttgtgttgggccttctttctaatctcagatttgactttattacaaacgaaagggtaagaatgtaatttttcgccgactcgatctatcgctgcctatatatacagttacctgcaaaatctagggtataaaagcccctaattttttctccgcccaagagacaaaaatccttcgcaatcgagcaacggaagctcctgcatccaccgtccaaatctcttctaacgtcgccggagatcggtaaaccggttcttcatcccgtattcatctcttattgaggtcttagattcatctagcaccttttttttggcgtcgaaactttcagattccctatttgtaattagttgcgaattttgattcgacgatttgttgctcgaatttgaatcaacagatcgttggggaagtagaga

SEQ ID NO: 4531 - DNA, 3000 bp, Unknown
  misc_feature (1)..( 3000): cDNA_ID_1824581_gDNA_ID_1620712_Annot_ID_165488 3000 nt of promoter + ATG
tgattgaataattattattattattatagttggtatatcgacgttgaaggattcgacacttcgcttcctgaggatgagatgaaggaggccttgactaatcatttcaagtcatgtggagtaatcgctatggtttctttccggagacaccctgaaaccgatgttgtcaacggccttgctactattaccatgatgggaaatgacgctgatgagaaggtgatgctacttaatggaagtgaattgggaggaaggaaacttgttgtcaaggccaaccctactcccagactgaaacttgaccatcttaaccttccctttggcggctcctctgtcccaggtacatcataagtttggagtctctttggtgttttcagatccagatacaatgcaacctgctttcttttcatcactcgttgggtccttatgaactgtgagacaatgaaaccccctttgggtctttctttctttgccatgtttaaatgtaagctccatatgtatgacgtttgtgtgtggatgattaaagtaagctctattatcattatctagtttgacatttgtgtgtggatcattaagtaaagctctattatcattgtctagtttcacatttgtgtgtggttgatttagtaaagtttttcaattatttatccagctctttgattcggttgtcaaaatctgctcagatttagtatctcgacttggttgtcttatgtgaaccaccagtttactgtgttactcaagacagactgagactttagcttgaggacctcactgcacatatccaaattcttagtctcttccttaggctctcagtgagggagatgcgaacttccgagttgtagctgtgtcctcctcattgtttcctttgcttctgcttcggtctttgtgtagtcttcttcctcgtagacagattttccggaattgttgcaccgtttcctctattttctacacaaggttttaggtgcgcagtctcagggttgtgtcttcttgaaaatgattccatgtactgcgtaactctcttctacttgtgccgctgcaaccgcctacttgttcccttgtttggacattgctaaataaacgcatacatacaattttggttaagagatatctaaaaatgtgttcctatcaacctttgtaataactcttctagattcttttcgaacccatgaatgcccatctcaacctcctcaagtttcttttgaagatcatcacaaaagcagcataatatcgtgaatccaaactctccaacatgttctcctaaggttttaagttcttcttaaaatctgtttcatcagcccgatggtagtcttgcttttgttcacttacctacaaaaatcacgcctaaatgccaaggttttttgcttgacacctttgcatatatctcatctaacaatctcattatcatagctttaaataaagaggtttccgtgaatacatactttaaaaatcctaaaatcatactcttaacatattgataaaggtaccataagtcatcacaagtaataacaaaagatcacaacaaatggcaaaatgtttaaaagatctgaagagatgttttcatgtccatgtccttcaatcctctttatgatctgaaaaaatgtattttgaaatatgaattacaaatctgttgagacaaaaacaaaccaagaaaccatatatacaatgctcaactgggctgagaatttaacttttaaaaccaagaaaccacaaacataccacactacccttttaaaaactatcctatatgttagatgcttattgcatagcctaattttgttttctcatggtgcagcaggttagtttcttgtgtacctctagatatatattctcttgctgcctagggttcccaagctgcccatttttttttttaaactgttccccaaacacccatccaataagaaaggtctactttgtagctcaaagctattagagttgtgctcgcgtcttggttttactgttttagttaccccatcgatggtctagaatatgcgaggtgactctcatggaggtaaagtgaattggtaattttgtgaagcacccaacataatggtaattccttacaaggttaattaaaagttttttcagcttgttgttttgctagatttattctagaccaatggatctgccaatgcaacttaggtgatgcttccaagtatacttgtgtgagcttttttcgtaaactaataatgtaaatggaagtgatttgttgcaaaggtgaataagtgttgttgccttagcaagaactaaagaagacagaaacaggttttgaaagagagccaagtgtgtgtttatggtagaaagagcaaagtagacgaaaggtgtacctttttgacttcttgtcactgattctctctcactcatccatttcatgctgcatcagaaaacaacataaggaatggttgacgtaacgccaagcattaggcgttgcttataaattaatacattcattccattactaacgtaattcagtagattctgactacatatgaagtcaatgtatgtatgtatctatctaatttagccaatgtatactctcttttaagtactttcataaatatggatacaactacttttttttatacatacatggactatatatcaaacaagtgaccataaatgatcctattctttttaacaaagtgtgaccatggttttcaataatatgtgacatgagaaaaatctgattcaaatgaacgatgttaaacatatttatttcaccttttcaattaactttgccggggatagatttatgggtaacaaatgtaacttcttgcgtgagaatccatcaacaaatggaataatatgttggatatacagtacttacccaaaaagtaaataaaagaagctcaaagcttaaagataccacttgtccaatcttgaagaagaatcaaacgatctctacaaattgaagatgaatcaaacttatccacagattgtttctctacaaaagcttcaacctcatatctctgaaaacaacacaattagaaagaaagattgtgagagaaagag

SEQ ID NO: 4532 - DNA, 3000 bp, Unknown
  misc_feature (1)..( 3000): cDNA_ID_1807774_gDNA_ID_1620712_Annot_ID_49032 3000 nt of promoter + ATG
gtgggataggaatggtgagtaagttgaccccaaaataaaaaagtacaacgtgaaaaagagtttatttggttattgtaatgttatttcacggatcctaataaaaaattgaaatgataattaaaaaacatttatattaaaatcacaaaataaattgatgtactaaaaaacatttatattaaaagtatcaaaccaaaactttctataaaaaggagatggtaaatttttcttgaattttatttgaaggtgaacgcagcagcagcaacacaacaaatgatagatgtgttcagtgtgaaagggattgtgcattttgggattgctggaaatataaacaactcgatgtccataggagatgtgagcatccctaagcaaatcacgaatgctggcttgtgggattggctggtatatacaaaatttacatgcacaagttttgttattgataaataattgcttctccttcatattgtctgatgattttagttctgatcgtcaaacagaatccaggcaaagcaaaaggaaatgaggatgtagcgtacttagatgtcgggaactataatgttccacaaggaaacaataagttaggaactattggatacagttacgaggaattatattcagtcagtggtcacatcaattcaccaaagaaagtgttttggattaatacaactcaagagtggcttcatcttgcagctgatcttgaggttgttaagaatgacatatgattagattagaatatattttttctaacaaaagactttattccatggttgatggttgttgtatgaatgtagaagatggagctattgcagtgtgtgaatgcaagtctgtgtcttccaaataaacccaaagtagtagttggattaaaagcagccactgctgacatatttgtggataatgcagcctatagaaatttcttatacgatacttttggagtttcctcctcagacatggagagttctgctgtggccatggtaattattcacgtttctaacattgtgattcattcctttcactccattttttttttcattgaactttcacttaattttgtttgcatgtgttttggattcgaccagacttgcgtgtcaaatgggtatcccctaattgtgataagaggattatcagatttagcaggagtaggagataacactgttcgaaagtttggatctttggctgccactaacactgccaaagctgttttagagttcattaaaaagctcccaccgtcataattcctacgtgtaacctatcattatggatgtttgaatctgtattttccctagtttttctacgtacgttaaaaataaaattaataaaatctgtttttcttttctttaatcagcttcttgcatggaacactttaatttcagccttcaaaactagaattacaggtctctttgttcatatcaacgatcccgtgacagcaacaattcaaatatgggcaaaaatattttgtgtttataaaatagtatttttttggaaatttgtagagcgtgtattatcgtccacaaaatttattttagtggtattgtaggatatttgtcaaaaaaaaaaaaagtgcgcagccagcagcccctcatgtttaatgcatacacaaaggttatatcagctagtctagagacgagaagcacgtggaaagaagaaactatcaagttggacttggatgatatatatatatatgcagctgtggatttgaatcgtaaaccaaccaaccaatcagatggaccacactctttctcttcttccatttctcttcatcataatcatttcttccttccatgttttgcctgtttcacccacaccttcacacaaactaaaatccgccactaccatcagaaaactcaaccgcggaggaccttacatcggtctcgtgacggtcattgcgaccgaagaaaatgcttttctccgcagtgtcgatttcagacctgaccctactcatcccttcttggatctctctggtatccacttgaatcaaataactttttcaagttttctaacgtaaatagagtcttttgttttgcttaaatggaagttagtacttttgagatgaaaatattagtagtttctgatttaataaccttatgtatacagggagacgttttcgaatagggaagattcatggaaagaaggttgtgtatgttagatgtgggagaggaatggtgagtaaccacaacattaaattatccaaaacagaacaaaaaaaactacaacaaaataaagaagtttatatggctcttatttcttatctaaaagtagtatacaaaaagggaatgggcacacaccaaaatatcctgatccgtatacaataattgaaatgatgaattgatgataaaacttatattaagttttaatatagttagtaagtagtatagtatattaaagatgcatattagtaaatgtaatccatatgaaaagtagcaaacgaacacttatattaagacaaaagaattgcaggtgaatggagcagcagcaacacaacagatgatagatgtgttcaatgtgaaagggatagtgcattttgggattgctggaaatatgaacaactcaatgtccataggagatgtgagcatccctaagcaaattacgaatgctggcttgtgggattggctggtaagtataatagttacacaagtttgattgcttcttcttcttcatattgtctgatccatgcttttggttctgagtaaaacagaatccagacaaagtaaagggagttgaggatatagcgtacttagatgtcggaaactataatgttccaaaaggagatggcgacaatgagttagggagtattggatataattacgagcaactatattcagtcactggtcacatcaatgcacctcagaatgtgttttggatcaacacaactcaagagtggcttcatcttgcagctgatctagaggttgttaagagctatacaacatactgattagattatagattataaacaataacggttccattgttaacaacggtttttcgtgtggtatacggtggcagaag

SEQ ID NO: 4533 - DNA, 3000 bp, Unknown; identical to SEQ ID NO: 4523
  misc_feature (1)..( 3000): cDNA_ID_1824593_gDNA_ID_1620712_Annot_ID_49035 3000 nt of promoter + ATG

SEQ ID NO: 4534 - DNA, 3000 bp, Unknown; identical to SEQ ID NO: 4522
  misc_feature (1)..( 3000): cDNA_ID_1824589_gDNA_ID_1620712_Annot_ID_49036 3000 nt of promoter + ATG

SEQ ID NO: 4535 - DNA, 3000 bp, Unknown; identical to SEQ ID NO: 4531
  misc_feature (1)..( 3000): cDNA_ID_1824581_gDNA_ID_1620712_Annot_ID_49039 3000 nt of promoter + ATG

SEQ ID NO: 4536 - DNA, 3000 bp, Unknown; identical to SEQ ID NO: 4530
  misc_feature (1)..( 3000): cDNA_ID_2109345_gDNA_ID_1620712_Annot_ID_49040 3000 nt of promoter + ATG

SEQ ID NO: 4537 - DNA, 3000 bp, Unknown; identical to SEQ ID NO: 4529
  misc_feature (1)..( 3000): cDNA_ID_1839312_gDNA_ID_1620712_Annot_ID_49041 3000 nt of promoter + ATG

SEQ ID NO: 4538 - DNA, 3000 bp, Unknown
  misc_feature (1)..( 3000): cDNA_ID_1824573_gDNA_ID_1620712_Annot_ID_49044 3000 nt of promoter + ATG
taagatactgatatagccaagaagtttgacatttagaattgttcaattcttgtagggtacattgagggatctctcaaagaaaacagaagagaatcagttggctttaatgaaaccggtaagctcttataaatatcaccctgtgtttctggttggtttatccacataaggcggagcttgaatcatcatcgcttatttgtaggatgatggtgggagtgttgctgatgctgctaacaacttaaacactgaagctgcaagtgttgaagaacacacttccatggtttctcttgccaatggggataattctaatctgttaggtgatcactaaatactgtgataagaatcagaagatagaaatctttgtagaatcagatggtcttctctatgaatttatcttttcaccatcacatgtattatagaaaccgtaaccgaacctcaaatcaaataccatatcagatgtctttggtttcagagtttgttactatgcttgcaaccatacccattgacatggtgtggttaaaaacgttaaagtcgattctgaggggaaaaaagtttacttattacgttacatcctcaaaagatatgatcagattaaaaagacttatcaatgtctcatacataaatcaaatactaatctactcaaaacttgaaaggtgatttcttcttctttttggttgtattgaccaactaacaacactacgtatcaaaatatccgaaaagattttaaaagtttcattggaatgggacaatgcatcttagatctcaatcctagtttacaagattagtttattagaggatgtatgcatacgcatcatataccaaaaccatgtggattactaaatcgggctcaggaccactaaatagattagattatctacaaatcacattattgtgtacataacaaatagaatacattatataaatcacacaaaaatgtatcgaagaaaagagaaccgtcgaaccagtttgatggtaatcaactaagataatgtttttttttctgatgtcaatagtgtttgtttatgaaggaatttatgatgagattattcgagaaggagtcgctttaagtgacccgatcctcgtgacgactcgttgctctttctttctttattatagattatagttgttcaaacaaatgaaaagtatctgagacgaataaattaatgggtggtctgtttctgtactataaagaggtccatgcatgtaccatatcatcttattatgtactattaaacaaatagattaatgattatataatgttttccgatatattgaaattagtttatgagtcacgagttaaatctgaaggcttcaccaaacctaaagttaaaagtctcaaaacagttaaacactcttgtgatatcatccctgtatataatctttaatgaaaacgtagaaaaaaagattatttgcaaccagaaaacatctgaacaaatatccatttctcgtggttttatgttaaaacatttgtcgtgttgggaaataattgaaacttttattttccaacattgaatttttctttatgttaaaagtgatgtgaactttgtataaaatgaaggaaaatttaaaagcactcccctatatgcgatgcgagaaaagggagagaagatatgtatgcacttgtttcttgtcacgttccgtttccacaaaatcagtagatatgccagtaactgtgttatcttcttcttttcgtgcgtctgtatccaggagacatataaatgatgctgaatttcctaactatttttaatttataaacatgagaagcgttaaatgggtagcagcaatcaaacgtttggtgcttaaaagcgcttatttgaagtataaacaatttgatatttataagataaaacagcattacatatgaaatatcatgattcataactatatatgcaaaatttgaaaacttctaaatcccaaaattacacaaagattaactaaactacattataatttataaataaataaaaagattagtatcaaaactaaaacgttaagaaatatcataagtgatgattagacgacagtcaaaatgttaaatttcatgatgaaaaaacaaaaaaaaaagagtaatttgtccaaatacaatcagctgactatatattttgtcaaatcatatatcatatatactaaaactaagaaaaagataaccatcaaaccaattcaatttatatccacctacatatgactttgatacattttttgtgtagtttgatcagtgataagattttcaatcctctatagtaataaaaattgctaatttcgataatttaagagataattacaaaaccaacaagcacctagacacccctaagatctaggagaatgcatcctccttagtcatcacttccttataaagtaaaactataaaaactgagatcacgagagaaaccgagaaagagagccaagaaatgcatgagttaggatgataatccacgtgtcactatcctattgcatgaagagtatacgtgtaagctcgtcacataaagtttccctcttcttcttcctcagagtttttaattggccattttattacttttccataaataataatataaaaattcaaaatatttaattccccatttgctgttgtctttccttttcttcttcttcttcttccttccttttctcgtgcaatctccaacaccttgactacgcttcttcatcccaccaacaaaaaccctttctctatcaaaaccaaaccaccgttagtttttctttcccggtgatacgtttagatagcttctttttttttccggtggttaacgttgacgattgactacttcaattctaaacggataagtattagatagcttcctcttcttcttctccagtatctggcgacgaattcaactagagattattttctctttttcttgtctcctcttgatcgtttgtttttgtttgtatctggattcaatgacgggatttggttaaacgaagaagattcatttctctgttcgttcgatctgtaaatttttgctttcagagtgagattttaacgaa

SEQ ID NO: 4539 - DNA, 3000 bp, Unknown
  misc_feature (1)..( 3000): cDNA_ID_1817265_gDNA_ID_1620713_Annot_ID_49052 3000 nt of promoter + ATG
gcgtttgttactcacttcaagctccttagctttgttctcatgatgcaacttaatagcctcataagcttcctcagcatgcttaatcctctcctgaagactctcataatctttcaacagagtctcatgattctccttcagaatttcatgctccaaagtcatcgttttctctaaaccaaacatcatcttcttctctgatttgtcctaaacccaaacctgaaacaacatcaaccaatttctacagattattaccaaactcataagcttaatcaaaaattctgcaaaaaccctaaatatccaagctttatgttctctttatgactgaaatgcaacgaagatgagaattaaaccagatttatgagctcagattgtggaaatcgaaatgggtttcggaggattcagagagaaaatggtgagtaacagggaagagagagtgtggttaaaactcagattctttcaagcattcaacaatgtaaacagaatcagatagaaagaaatggaattttctcgagaaaatcttaccaggattgcgaacttgaagaacctaaagagagaagaagacgaagaagcaaagtcctcctaaacgttggttaatgataacgtaatcgaagatgacagataatgtttgtatgtatttaagtaatattattcaaattaattaattgtttattccatgtgaccaaaaaaataattaataaattgttcattcttaagctaatttaacccaaacctttttttaatttaatccaaaccttgtaactgatgcgatgttttttttactagaactttaattttctgtttttaccgttttatatatggcattcagtaggtctgggtacgaaacggatatccggaaaaattgtgatatttgttattcgattcgttttaaacgaatacttgattttgtgatttgctttgctttgcttcgaaaatttccggatatccggaatttcgaatatccagaattttttgtgatatttgcggatatccgctttgatatatttaaatattaaaaaaaatctatatactatataactatatcagatattcaaagtttttatttaacatgctttcaaaataaaaactaaatacttgttggtaccaccagtctacaaaatgttatcaaactaattccgaaaactaaaacccgatagtttttgatgtcgttgatcaaaacataacatgagaaaaatgatcaaacaaacattttaacataaaaacgtaaaatagcaacaatacacaaactattatgatatatatatagatataactatattttctaatatatatataaaaagatacggatcgaagcggatattcggttttttttttttaaaatttgttatttgattcggtttttacgaatactacattttcctatttgctttggtccaaaatcttacggatattcggatttttcgaatcaaaccaaatcatataccgaatcaaagcggatcgaacgaatattttgcccagccctaacattcaggttaacaacagaaattaaaggtattctaacattgtaacattaatgtatgttttcgtataaaaatgaaagtttaaatatcaaattgaagtttaggttaaatcaactgtggtataatacgtgtataaatgcagcatagttcaaactaaagatatgaaaaaaccaattttccgttttttacataacatttgtgcaaattcctatactattaaaagagaaatataaatttgtttcaatttgaattggatcgggttatgttaaaaaattaacataaattgacctgaaatttaagtaattggatttttggcaaaacaaaattcggaatataatatgaaaatcaatgtttttaaacccgatctggacagtgaaccggacaacagttttttttcttctacgcatcgtttgtttgtattatttatatatatatatatatatagtgatatgataacttccctaaaattagctgaataattaaatgaaaaaaatttcagttgatttaacattgaatttttttccttgttttttttaacccatttctccacatttttttgtagtagtttagtttcgtaatttctgcagtcacaacttttagtaatgagttataaacaattacaatcaaggtttttatagtaaacacatcttttactaaaaccacgtagaataattggaaatcaaacataatttttctaaagctcctaaatttttttagtttgtccttagaaatcaaatatatttttgaatcttttttatctaattaaccgcaatatctataatctgaaagtgttaggaccgattggtaacaagtgttatttctaactatatcaattttggttgtagaaaattttggtgtaaggaatttgaccgtagaaaatatagagacttttgcagttaaaattgcagatgtgaaaattttgaaacaattggtaaaaattatgagtttagaaattaaaactttaaataatataaacgattagattagttgtgacatatgcgatacaattttttttcatctctactgaagagatcgtttttattgatattgacacaattgatgacggtttcatatcattaaaaatgataatttagagaatgttttttccgattttaaatgatgctttcaactttcaatataaaagttaaatgtatttaatattttttgaccaataatattctatagtatattttttattggttgacttagatatagttacttatgcaaaaaaaggtaaattaaactaaacttttgtaatatgtgtaaaaaaccttaaacattacttaaaatcagagagagaataattacggttgtttagaatcctcattaatcattctctgtttcatttattaactttctgtatatcattaaccccacaagcattaaattactcactaatctttttggattctattattcattggtttatcgcttaggcaataagtacggaatcaaaaacattccactttctgaccaaaaaaaaaaaatcgtatatctctcagcgcgagggaagaagaagaagatg

SEQ ID NO: 4540 - DNA, 3000 bp, Unknown
  misc_feature (1)..( 3000): cDNA_ID_1817289_gDNA_ID_1620713_Annot_ID_165538 3000 nt of promoter + ATG
ctttttgctatttagtcatttaattagaaagtttttgatgttttacaataacttaagttcaaaattttaataaaaatcataaattttgtcttaaatctatagttttatgtatctatattattaattgggaagcattgtgtgaactataaaattgtaagggtagtttaaaattaactaaatgaatttttgcatgggtaatttagtaaattaacaactagtacaactaaataaatatcttggattttgttcttttaaaaaattaaatttaaaatcaataaatttgtaactacccaatattttcagaaatcatttaaaaacgtttccataacatatcagactattttaattcgaattgtatatatgtaaatttatttattttggtaatatgttattagataattcaaaaatttcaatctaatttaataacaaataatcatttagtttagattttaaacaatttccttaacaaaactatgttaattgtttctcattagtacacttaaaaagaagattttaaattatgatttagcatattcaaaagataatttttggattttagatttgtaaatatctagaagatattatgagtatagattaaaatatttaacattttaattagaatttaaatcatataaacttttcaagtatttttttaaacatgtaattttcattatttttaaacaagtaattttcattatttttaatgctatgcatatattcacattgcctcacaatcaatctagaatatcgattctttaaaacaatagatagagattcataagtaaattacttcatgttctaatgagtttatctcctaatattactatctatttatgcgtattcttatggatttttctttcaggctaaacactagattacaagaaactagattatagttatacaatcttaaacaataaacaaaacaaatataacttaatttaattttttatttttaactaaaatcaacaaatttattagtttataaaaaaccaaaaactattactcaaccatataaaaaccaaatactattatactttaattataagaactacatcttatggaaaggtatacactaaaaatcggttttatatactagaatatcataaatatataaatcacaaattatttttaaatatattaatctaacatgtaccacatgtcaacccctcgatttttttatatattacaataacaatatttaaaaataacaaaatagtttttcattttacggaataaagttatatggtggaactagtttgggttgatattaatacgggacaataatctacaagtgaaatcttagaattaataattataacataattatacaatcttaaacactaaacaaaataaacaatatttacaaaacaactatatcttaaaatttgagtttttagttacaaacaaatcgaccaacggtgtaccgcggagtaaattttacattatatcatctaattgatcaaaaatttcaaacaaaaataatcaatttatatatacatcaaactaacaaaaatacacaaattttccaaatatctctatattattccgcaactcgaaacaaatataacaatctatttactatgctaaatacaaataaaatataaataatataaattaattaaaaaaattagctattttatcataaataacactatacactttctatgcatattataatttgtacactataatatctttcactaaaaatgtattccaatacatttcttaaaatatgaaaccccgcacgtatgtgcgggtcagaatctagtttactataattttgaaaacaatactagattaatatgtttttaaaacattaatataatcctaaaactaatctcgtttaatctccgattttaatctccgattttaatccgatttatcgattaatagctagtcccataccgagcgcccgattaacgcctaacgcgattttttaacaataatgatatatatatatatataaatgtatatatgatttatatattctagtgaattttacttgtaaactaaatctacaatttaaaagttaattaataaagtagtttagaagaagaagaagaaattgggttgtcttccctaaagattttttctacatatgttcgtagagaactattttttctaatgacaaaaaaatatttatatttaatatttttaatataggtttcaaaatgtatcattcataaactgcaatactaaatttaactaaaatgaatgaatttttaatttcatgctcaagtctaccgaaaaagataaacaaaccacaaaaaataaaagaatattatgggggtgattggggaggaggactttgaaaactgtaaattctattaacaatttttacagttttaatttatccgatcacacttttttgcttttaataatttaaaaattctcacaaccttttttctcattttgttctttgatttcatgtttttgtttaaatcgcataaatctggctttaaaatgataataaacaaaagtcaatagtttttccttttcgttcttctccatatttatgaaaactcccatagatgaattattcctttttaatttttttttacgtttatttacaattgaagtctttttcttgttttattaagttccatattttcaataattatttaaaatcataatttatgttgtcacaacctatagtatatagttatagtttttaaaatattaaaaattttatagcaaaaatttatgcagcaaaagtctttacagccaaaagtaactttcgagatgcatgttttaatttgtcttatttacttgatgatatacaaaagtcagcctaggcgacctttaatgagatgcatgttttgttgtctacaagggtctagttgcaatataataataaaaatgaaattaccatgtcatttcctagaaaatctcatattacaactttgacacgcaaaggcattccatagattctataaattgctctcccaaaacactccaaacaagtcaatataacaaatttttatcttcaatcctctcccc

SEQ ID NO: 4541 - DNA, 3000 bp, Unknown
  misc_feature (1)..( 3000): cDNA_ID_2144432_gDNA_ID_1620713_Annot_ID_165537 3000 nt of promoter + ATG
tggtcgggctcagcctggcggaaaaaattgttatgggtctaaggcccataaagtggcccagaaataaactcgtcgtatttacacacgttgtcgtttctcttatcttctagaaaactgtatcccgtttttgttcttgtactctacacaaacagacaacttcaaattactcaacaccacgtcgtgaaaatccgatctacgtctctgtctctctccaatctctctgcgccacagaattgtgcgatttacgaaaatctctgaaacctccgatcgttaacggcgaccgccgattttcccggtaaaaatgaacgacggagatgtatcgaggcagatccagcagatggtgagatttatccgccaagaagcggaagagaaagcaaacgagatctcggtttctgctgaagaagtatgatctttagtgtttctgtttccatttatcagatcttatgatatgaatctctaattcaatcgtaagcggtttatctgattgttatcgatttggtttatttgaataatcgtaggaattcaacattgagaaactccagcttgttgaggcggagaagaagaagatcaggcaagattatgagaagaaggagaagcaagctgatgttcgcaagaagatgtgagttttctgatttcaatttttttgatcttggttaagttttaagttagatcgcttgttctggattacaatatctctgaactttgaaaaaattagaagtttatgatttatagatttgaagttttgacttgattgatttcaaacttgtaattttcttcattgatgaataagaaacatagtctggtttagtctaatcggcaaaactgaagactaatttagcaattagtctgatgtaagattatggtgtagtagtgtactgtgttgatctagctttcaaattctctaatattgttagttctctgtgaaaattatgttgatcttgttcatttactgtgttatcgtgtattactttgccagaaaataactgtcatacatgttttttcagtgattactctatgcagctaaatgcatcaaggatcaaagttcttcaagcgcaagacgatattgtcaatgccatgaaagaccaagcagctaaggatcttctgaacgttagtcgcgatgagtatgcctacaaacagctcctcaaggatctaattgttcaggttggtacttaaaacaaatccctgatgcattcaaataaatatttgatatttggaacttttttttgtatatcctactggagattatgtaatcgtgtcggatggcaatctttttttgtgtgttttgatccgttctgctgatgtcattttgcatttcgaataccttttggtctgttaaagattctctcttgaattgttgcagtgtttgcttcggttgaaagaaccttctgtgttgttgcgttgtcgtgaagaggacttgggtttagtggaagctgtacttgatgacgcaaaggaggaatatgctggtaaagcaaaggttcatgccccagaggttgctgttgacacaaaaatattccttccccctcctcctaaatctaatgatcctcatggtctccactggtaaaatttcatgtttctcatcattactttacatttaaatttttataaaagaacattatcagtgtttagatccggtttgatagtgtattttgaacatgtaatagctctggaggtgttgtgttagcttctcgtgatgggaaaatcgtgtgcgagaacacacttgatgcgcgtcttgatgtggcattccgtatgaaactcccagtggtatgaaaaacaaattctctaccgcatagattacttgttatgatccatcactcactgtctaggtttacttttttactttggttctctgattcactcattgttgttaacagatccgtaagtcgttgttcggccaagttactgcctgatgaaagaaaggaaaagagaaaagagattattcaaaccggtttgcgtttggttatttacctattttgggagagatttctctttgttgtgattctttgtattttgcaaaatcttactttggtgccaaacccatcgaacgcttctttttttcgaattcctttttttcattcctcctcgaatgtgtgttatcatggctatacaaataaataaaatgaaagacttcttttctttttcttcactttttctattcaatgtctatgctttatactagtggtttttcgtcatcatagataaacacttaattcataaaaagacccttgaatttttattataaggttagcaatttatccaacacgatcctgaaaatcgtccatcctagtatttttttcgtctaaacacctttaattgcggagttttgataagtttttaacagaaaaaaactcgaataagatatttttttggtttgggctaaaattgttatagacttggcccttgggttttatcccaaatacattttaggtatcacaaacaagaaaaacatagaagtaaaaaactagaagttttttgcgcttttgatctttgtccttttttctacaagttttttctccagactaatctcctcacgattgtctgaagacaagagtctacaagaccggagattcaccgttcgacaataatttccgtacctttcaaggttagatgttcttgcgcttaatttgacttgtgttctttttgtgaattttggatgcgcgcacaaggtgtttgttcatttgcctagacaaagtaaaattgatttagttattcttctcattcatcttctatagtatttgtacttgagccaatcattattcatctttggtgcaatctgaatctgacccatttgagctgttttgtctccttgttcaaattttgtgtgaatgtgtgtaaagaacgcagaatctaatagaagcttctctttagggtttgggttgttaggacatgcgtttcatcctctcaaattttgattttgtttcttttaatgaactcaagggttagtttgatgcttatcaaattgagggtttttgttttggatgcagagactgatttgacatatga

SEQ ID NO: 4542 - DNA, 3000 bp, Unknown
  misc_feature (1)..( 3000): cDNA_ID_1817281_gDNA_ID_1620713_Annot_ID_165536 3000 nt of promoter + ATG
acttcattttttttaatcaaaacaactaagaaagtaaaataatattttattaattctagatttagagagatattttttaaaagaaaataaacgctattattcggtgttactacaaacaaatgatacttaatagtgatacacatttatttatttgtctcatttttactggaaagtaatttgctttataagaatgaagtatttgccttataccctaaggcctaagcaatatatggatgtgattagtaacatatatgttatgattgatttaatttgaggtatggatgttatattcatagttagcttaaaaatattgctaagtaagaattcatttaaactttagagttcgcgttttgttgagtattaatggttgagttacaagttttagttatcacttctggaaactttatcttactatatagtattgtgtaagaaagctcatcttctgtatacattggatgatatacttattcatgctaagcaagaactaagaaaataatttacacagcaaaaaataatattacaatttataactatgttgatagcggcaaaagctgaaatctttgtaattcatcaccttcacggggtacacacgactctactaaaataattcatgtaaaatcttgagtcaccgatatccacacgtgtcccttatgtttaaattttaaaatgtggatattgcttttcctaaatttggttagtatctctgactagtgactatataaacttttagttacttatcttagccgattggataaatttggctgacaagtttataataaaaaaaaaaccacttcgttttagtttgttatcttgatgttattacatagacaaattgaggttttggcctaaaatcatgttaaaaaagacatcaaataaaacatcaaaccccatttttgaaaacaagttagctacccaatcatttgagagtccaataaaagtggtagtaatagaaactaggttttcaaagtttcttcgtgagaataaatagcatatgattaaaggtaatgatgagccttcttcatgacacgaaaataaaacaaaataagtaatgatgtgcccttggtccatgtaatattatgattatgacaaaatcatagagaaagtttttttaatagcggtaaattacgataatcgtaataatgtatacttaggttttgaataatgactcaaccgcacattaccgtgcgttttaagtagtaacaacttttttttaatatatatatatatatattttttttattactatttaaaccacaccagattttatctgcagttgaaccgtacattttcatcgaagccttaaaacatattagctcacgttattgggagatgtagctatcgatatggattaatggcttaggaagtaagagtttgattaattttgaaccaagtataagaaaaaaaagagaccgtacggataaatgtcgaagaatataaggacaagagttggacgttagctagtaggaagtgggcctcacttaccgctcgcaccgttagtcccgcaaacggcgccgttctctcgtttcgagccatcatcccacttgtttgttgtttcatgtgacttcttcgtctcgaggcaaacttgactcttcttcactttcgcttaattacccatttgtctgccaacatctcttttggctatatactcatgaaactttaaaaaatcttcttatttgtatgttcgaaactccctgaaagtttcagtcttcttatgtatgacaagaatcgcgagagactatgcaatgaacctaatcaaatataactcttctcaagaaatgatatgaaaaagattcatgaacataagagttggtccttggaaagcgacctcttcaagtcttcattaattagacattgattcaggtgcttaggagttaggacaatgtaaattaataaacaaaggtggtgcttaaggcggtccatgacgttgtagaaagtatttttttttcgtataagccgactatatacatatgtgtttttcatttacttatcgcaaataagaaacacacactaatcaactatttgtaaattcaaattcaccaaaattatttatgttatatgttgaacctacgaaactcatagacacagaataaaacataagtgaaaagactgaattaaacacttacttataagtgaaaagactgaattaaaataacaaagaattatcaatagtatttttaataaaattaaacatttaaaaaataaacttatttgaggacgtaacctaaaaatctctatatagttgtttttgacgaatatgagttttattataagactaatttttccaagagataaatttataaaaaatattaaatacgtaatattttttaactccaataaaatattgtaatttcaaaccaaatatttattaattaaaatgtgtaatgagatacttacatatcatctagacaagttgagattttctttatagggttttgtaaaaatttgatgatttttaacaagaagaaatccataggaactaataataaaaaatacaatgcaatgatatttaaaaaaacaacaactgcattgcagtgaatttcatcaaaatccattaaaacatttccaaactcaaatagaaacaacttcaaaaccttaatccaaaatgttatagatagatatgcaatagctcttaggcctagtacatagctagatcttgtaactcgtgaaggcaaatgattgggacgttggttcggttctagtggtcgggctcagcctggcggaaaaaattgttatgggtctaaggcccataaagtggcccagaaataaactcgtcgtatttacacacgttgtcgtttctcttatcttctagaaaactgtatcccgtttttgttcttgtactctacacaaacagacaacttcaaattactcaacaccacgtcgtgaaaatccgatctacgtctctgtctctctccaatctctctgcgccacagaattgtgcgatttacgaaaatctctgaaacctccgatcgttaacggcgaccgccgattttcccggtaaaa

SEQ ID NO: 4543 - DNA, 3000 bp, Unknown
  misc_feature (1)..( 3000): cDNA_ID_1817277_gDNA_ID_1620713_Annot_ID_165531 3000 nt of promoter + ATG
gttggaaaaagaaaagaacaaaccttagatagaacacattctcagagagattgcagtagaattagacatttctcttgatcgaatttcgattccgaaacacaattgagaagattcacagcttcttgtcgtcaaattggtaggggaagctttttctccattatcataaaccctaaactaaaagtttctgcaaaaacaactattttatcgaactcttaatgggccatcaatgggcccatacttataaacttaaacccttttccaatttcagtcgtattttacaaaaaccatcaccgtcgttatcacagtaaccaaacaactttcatcgccgggtaagctccattcccaagctatttcgatctcgtttcacgtcgatctatttctagtcaagttaatctcttcttttagggtttaattagttaagacttgcgtttgattatctcaagttcagaatttgtttcttgatgatctaaaggaaggaattttatacttatcaaattgaggatttttgtttttggatgcagagaactgattaacatataagaaaatggcgtttgctagagcagtgagaagaccaattggagtcttttattatagtgttagtagtagatttagttctggaaatgagtattctactgtggcaagcaaattcgaaactttgtctcagtacaaaagctctgtaccgtctggttacacaagccttgttcgtggttttgggaatttcatacggagttttagttcggaagctcctcctgctgtatctgaccaaatgagtcttattaagcaacttagggaaagaactagtgctcctattaaagatgttaaggcttctttagttgaatgcaattgggatcttggtaagaatttggtttaggttttttgttttggtgaaggttgtgtatgttttgttgtgttttgaagtgggtttttttggatttgacacagaggctgctcagaaggatttgagaaagagagggaaagttttggcttcgaaaaagtcgtcacggactgctgcagaaggaatgcttgccgttgctcaaaatgaagggaaagttgctgttattgaacttaactgtgagactgattttgttgctaggaatgagattttccagtacttggttagtcccatagcaatttcacattggttgttgctgaatgatgggctttttgtttattttactgttccttgtcttctaaaattgacatgtcttgcaggctttagctatggcaaaacatgctttgctggttgagagtagttcgcagcaagtttctggtgtcttcccctttgggccggagctttttgaggtcagttttttatgtactcgcttgtttccttttttgttatttaaatttatggatttatgttgtttcctttgcactgtctgagatattgatatcaacttttcatttctaatcactctaatggatgctatcaggagttcaagcttaacctcgatcatccaaaagttaatggtgaaacaacggtttcaaacgctgttacagaagtagctgcaatcatgggagagaatgtaaaatttaggagaggtttcttgatgtcaaaatcttcagcaggcgtcctttctgcatatcttcacacaagtcctcaaccaggtacaatttgttcaatatacttcccattgtttctaatctctttttttatgatatttctgtgcatttctaactttaaaaaaaaaaatgagaatagggttgggtcgtatagctgggattgtatctctcgaagtagaaggtgaaaatactcaactagaggctattcagcgtgtaggctcagaactggctatgcatgttgtagcagcaaagcctttgtttttaagcaaagaccttgtttcttctgaagcaatggcaaatgaacgcgagattctaaagtctcaggttagtgtcactttatgttatgaaattgaactgtaatttgtaaaaagtacacaacctgcgttagaaaagtttgcttatcaaatgttgtatatgacaggcagaaagtacaggcaagaatcagatggcgatagagaagattgtggaagggcgtctccgtaagtattttgaagaagttgctctaatggagcaaaagtttattgtgaacgatgctataaacattaaggtatgtgggtcttagcttaaaacacctagtttaccgttttattacctctgcatcgcttgttgaattcaactcttgggctcctattccacagacactggtggataatttgtccaaggaggtaggttctccagtgaaggttaccgattttcttagagtcgaggttggggaaggaatcgaaaggtaaactaaccgtcacccgtatgtccagtacggcttatcattgttgtaagattagtcgcttatgaattttgttttttttgaaggcttgaagcatctgatgaaccagttgctcaaactgcttgaagacaaagaatcaacgacatggttttagatttacagaactctttccttctttggttcctttagagttcatggcttcaacgccttcttgagattatagaatctttctcatgattttgtttctcacacaatatggcaataagagtgattgtgcctaggaagctatgaccagaaaaaaaaaacatgtttgtgttctcctactcctactaagatcattatacaaaaaccttcacttatgtgtttgattttaaggtactcaagtatttgaataagcagatagtgagttcttggctcctccggttaccaacggtcgaaattgacggtttaatataattcatagacaaaaccggtcaactttatattatccacaatcaacgatcaagatcaacgagaactaatcttacggttgatatcatacatctgtattgagttacagtacaccacaaaacactcaataaacactaagcactcttcttctaccttttgattttcgaaaaacgcaaactttctgaaaaagcaaaaacttctgattctctcgagaatcatttactcttcacactgtccccgtctctctttctcttgggttaatc

SEQ ID NO: 4544 - DNA, 3000 bp, Unknown; identical to SEQ ID NO: 4539
  misc_feature (1)..( 3000): cDNA_ID_1817265_gDNA_ID_1620713_Annot_ID_165525 3000 nt of promoter + ATG

SEQ ID NO: 4545 - DNA, 67 bp, Unknown
  misc_feature (1)..( 67): cDNA_ID_3071783_gDNA_ID_1620713_Annot_ID_165515 3000 nt of promoter + ATG
cttagcacaagccacttgtgagattatctggttgcaacagctgctcaaagacttgcatgtgactatg

SEQ ID NO: 4546 - DNA, 3000 bp, Unknown
  misc_feature (1)..( 3000): cDNA_ID_1824665_gDNA_ID_1620713_Annot_ID_49054 3000 nt of promoter + ATG
ttaagttgcatcatgagaacaaagctaaggagcttgaagtgagtaacaaacgcttgcttgaggaatgtatgaaagagagaagggagaaggctaaggttaggaagacttttgaggagatgaagaagacaatggagagtgagagaactgctattgttgatgagttgaagtcgaagaatcaggagcttttgttggggaagaagaaagaggaagaagagttagtgaagatggagaataagtatgttgagttagctgagaagtttgatgttgttgaaaaggaatgtgcttacttgaagtcactctatgatgcggaagtagtagcttcggttactcaaagtgctgtaatctcaggggttggagagactgataatcttattggtcaaggagagaacgaggctaatcagaatgtgaacaatgctgtgacaggtatacatagacatctctgtacccaagtgttgtttagtttacaatgacatttcttttgaatctatctttgtgtgcagatgcgataatgataagtgatgatgaaaatgataataatccacctattgagagtaacataagctctcatcggtctggtgatagaaaccaagaagaagaaggcaggaacagaggaaactcagcgactgagaaccgagcttcgggagaaacctttactccggtatctgctaatcatccaccgcctttttctccttcatcgtcatcttcatcatcatcatcttcagacggcgctgagattgtgcttaagctgcctcgtaattggcctgaatgggcaatcccgaaaggtcccgggaaggattccaacaagccttagaacatttcagatgcaacagagagccaaaagaagtaaatttgaagctgcactcttaagttaagctagttatggaaatcttcttacatattgctttctgtttttgtcaggagtttatttaacaatctctggaactacaacaaactattctatctactatcaaatcaattattcattcatgagtataataatagctgaaactttctgtgttacaacaatttcaccataactaaaattgcatttgcatttgaatactgcaaacgcaaattggctttgtatacgcatcttgtttatatatggattagttttttctacataattaatgaaagcttttgtaaactaactcttgagtactaactaataagaaagttccgtggcaaaataatttccgaatcatcggataatcatccatttacgaggttaagttccgggaactgctggtgttaaggttctggaagatctccggaagattggcattagtgagtttgattctcttgctgatctgttgtttgccatgccatgaatatgtgcaacagctcttctctgtgtagtgttcatcacacatgcttcaaactaagcttatgcagctccttctcgactagcttgtcgcttgagttgtctatgccgcggtatagaggtttaaagtcgtcataaacctgaatctgacccttgaaatcagcattagacagtccttaaacttttagagccagcaaatatgaaagacaatcctgaaaaatggataatcataagaccacaaaagtcttttgaaaccatttaagatcaggagccagtacactatccgtctatcagaatctggcaataaatattatcagaagcttattgattatgaagttaatacatcttaaatagaatcagttaagcgttttttgtaaatctaaatcacatgtgaaatttctttatgtcacgttttcatttgtgtaaaacaatatcttttgatttattaagcaaataatttgcagctaaagctctcaagattcaaataaattgaaatgtaagtagtgtaagtagtgatttcttatagaaatagttgaaatctaaaagtattaggacactgatgtaagtattgttaaactaaagagatctatcaggaaatcaaatcactatagttttttttttttttttaaattccttgagtttatcaaacaaaaaaatgtaaatgtccctagcaagtactgtaggttcattttttttgtttcaaaagagtatgttatttcttaaaaatcgccaaagatagataagattcgaaatttgcataaatgtggcaataaatattatcagaatctttttattgaataatgaagttaatacaccttaaatagagaattaagcgttatttagatctaaaaccacatgtgaaatttctttatgtcacgtttttgtttgtgtaaaacgatctctttgagttaatttgcaactgaaagctctcagcattttacattaattgcaatataaatagtgatttctcatagaattagttcaaatcttaaactattaggacagttacgtaaacattgttaaactaaagggaccaatatggaaacacaaatcactgtagttaatttttattattatcttgagtttatcgtctatcgtgttcgaattctctgtcgcttacttaaacacagtcaaattcattttctgccttagaaaagatttttatcgaaaatcgacgtttttgaaaaaactcaaattatcgtcgttttgttctcagatttcttctgctctcttcttcttctccttcttcttcgttccaccgcctctgttgctttatcttcttcttccttccttcgattgttgattacgtcggtggatctttgttctcctctgtgttgttttcattgctagatttcgtcaatgattggcttctcacgattcgatttttccggctcctgttcttaatttcctctgaggtagattagtaaaactctttgtctcgtaaacattgttcgatgatgaaattagaaagttctcactcttgtttgccaaatttgggatatttctggaattgaaaatgaatcgtcatttttttcaatttctgaggattttgttacaattgttttttatttatgttagaattgagattgtgtgatgaatatcagtaaccctagacaattgtgaaatcaaagctatgaaaatcttttgatgctatgtttcctatgatacagagaatg

SEQ ID NO: 4547 - DNA, 3000 bp, Unknown; identical to SEQ ID NO: 4543
  misc_feature (1)..( 3000): cDNA_ID_1817277_gDNA_ID_1620713_Annot_ID_49056 3000 nt of promoter + ATG

SEQ ID NO: 4548 - DNA, 3000 bp, Unknown; identical to SEQ ID NO: 4542
  misc_feature (1)..( 3000): cDNA_ID_1817281_gDNA_ID_1620713_Annot_ID_49058 3000 nt of promoter + ATG

SEQ ID NO: 4549 - DNA, 3000 bp, Unknown
  misc_feature (1)..( 3000): cDNA_ID_1817285_gDNA_ID_1620713_Annot_ID_49059 3000 nt of promoter + ATG
acttgttatgatccatcactcactgtctaggtttacttttttactttggttctctgattcactcattgttgttaacagatccgtaagtcgttgttcggccaagttactgcctgatgaaagaaaggaaaagagaaaagagattattcaaaccggtttgcgtttggttatttacctattttgggagagatttctctttgttgtgattctttgtattttgcaaaatcttactttggtgccaaacccatcgaacgcttctttttttcgaattcctttttttcattcctcctcgaatgtgtgttatcatggctatacaaataaataaaatgaaagacttcttttctttttcttcactttttctattcaatgtctatgctttatactagtggtttttcgtcatcatagataaacacttaattcataaaaagacccttgaatttttattataaggttagcaatttatccaacacgatcctgaaaatcgtccatcctagtatttttttcgtctaaacacctttaattgcggagttttgataagtttttaacagaaaaaaactcgaataagatatttttttggtttgggctaaaattgttatagacttggcccttgggttttatcccaaatacattttaggtatcacaaacaagaaaaacatagaagtaaaaaactagaagttttttgcgcttttgatctttgtccttttttctacaagttttttctccagactaatctcctcacgattgtctgaagacaagagtctacaagaccggagattcaccgttcgacaataatttccgtacctttcaaggttagatgttcttgcgcttaatttgacttgtgttctttttgtgaattttggatgcgcgcacaaggtgtttgttcatttgcctagacaaagtaaaattgatttagttattcttctcattcatcttctatagtatttgtacttgagccaatcattattcatctttggtgcaatctgaatctgacccatttgagctgttttgtctccttgttcaaattttgtgtgaatgtgtgtaaagaacgcagaatctaatagaagcttctctttagggtttgggttgttaggacatgcgtttcatcctctcaaattttgattttgtttcttttaatgaactcaagggttagtttgatgcttatcaaattgagggtttttgttttggatgcagagactgatttgacatatgaatgacgtcgaggcacttaggcaagaaggtgctctttttatactctttaccttttttttttagtgaatttcgtcgagtgtttctgaagaatttcagcgaaaagtttgtagctttagcttccatttcgttactattttctggtatttttcccaagatatgcatagctttaatgcaaattcttggtgtatttatgtttgctggtttgattagaagttatggatgatggatgattattaaatgttgtattcttagttctcatgctgtttatttattggggtttaggcctttagcttggatttaaaagtctatctgacattttatagtgaagcaaatttgcatatgtatgaatgtgactagacatacgagtatgcgtttatcattgtctaagctattggtattttaaattcttgatgtgaaatattactatttcggctgtctttcgaattgttgattctaaaaatcgttagacgctactctgccggtgaagtagcgcttagcgcctagacggtcgaaacggggattaatcggggcctaggcgttaaagtaaactataatgaatttatattgttttataagaaattttatgaaatttattatattataagtgaagttgtgatgtgaagttatgttggtcctgtggctttctgctcaaattttattgctacagcccttggttcgatacttttcacgctaaaaaaatcgaatttcccccacttaaatgataggggcaaaattgtaatttaaaaatgttggggtcatcttcttcctcaaaaccctattcgcttgtttgatcgttttttcgcttatactcaatttttttcgtttttatccgcttgtttgatcgttttctcacgtaatcaaaccaaaataacacagatctaccactaaaatacatattcatgatcaaaaagaagataattaagtagattctcatgaacgccgatttgttcaccgattgagccaaaatcgcggcggtccacgcagaaatagcgcttttttcgacgcctagtcgaccgattagtccgatgtttagaagcgtttgttttagagaataattatgccttcatttttgtcaagtttgtttggtttggtgagtagtagttacacaatgttcttattgctttgcatatgtttatggatgtctcaagaaactttatgaaatttgcagggcattcaagcctcttttagaataggtttggttcttcctcgagtagtagcatctacagagagacagatttcctctacggttttaaaaagagcttctgaaagtgtctctttttcattcgctccgtacataaatggtaagtgtcactcacaggcgattacaatttttcttagattgttagaaaatgaattagaataacgagtaatctcacccttttgttcatgtttagggtttggttttagttcgttatcaaattggtctcgtagttatgaatctttccctactgaaacatccataaggtaaaccattcgcctagacttttctgtcatttctctcttaaatttcatcctcagagcactcactatgtgaatgtttgctggcttgggttgtgtttcttcttgaacaggtattttcatgcgagtcgagaaacattggcgaaaagaaaagaggatgctgatcgactgctgagtcatcgtgaacgcaagaaacagactgtgaaaacgaaaggaaagttctcaaaacgggagaaaaaaacagataagccacctgttgaagctccttatgtgcctcctaggctgaaaagattggcaaagggattgcctgggaagactgtcgacatatttgaaggg

SEQ ID NO: 4550 - DNA, 3000 bp, Unknown
  misc_feature (1)..( 3000): cDNA_ID_1824733_gDNA_ID_1620714_Annot_ID_49066 3000 nt of promoter + ATG
tcttttccaagaaattcttccatgaatacagtcttcgaacaggtaatgcttgtttcatcagtagctgagttctctcatattgtcgatgcctaacgtctctttcgcatcttttatgtatcttacagaaagaaaatgtttcaacagagtctgcagcaccatcatatctatctcctgcacagttgtctctttcactagcttcacaaccatcatctttccctacgtcaccactttcgtcccaaagctacttgcaccctgcaagttcatctacacttaaactgacacagcaccctcgtctatcaaagcaagtctcagatggtcaaatctatggtcagaactcactaagtagaagctcagcaactgaagagaggcagggaactcctacgagatatgattcgtctcagtctggaccatctgaaggttggtctctacaagccttttctgaaatgatgtcatcttctcgcagcaacaaggctctgtcttatgacaattatgacaatgattgttttgggcttcaacgtgacaagattgaccatcatggcaaccggatgtccaagcatcagcagcatacctgcggtgcttgctctagacccttgtcggagaaatccttgtggagcagccaaaagatctttatgaccaacgagctctctgtatctgcaattctagcttgtgggcatgtctatcatggggagtgtttagagcagatgacgccggaaattgataaattcgacccttcatgcccaatatgtacaatgggtgagaagaaaacagcgaagctgtcagagaaagcgttgaaagtagagatggatttgaaagcgagacacaacaaaagactcagaaaccgagttttggacagtgactttgattgcgatgattttgtaatgtttgaccacagccacaggacagcagcagcagcaagcaagagccctagactcgtctcaagttcgagtgctaaaagctattcagcaaagcctttcttggctcgacacttctctttcgggtccagaagtaactataaatcccctaaagaaaatcttcctgtgaaaaagaaaggcttcttctggaccaaatccagcaaaatatgaacttgtaagcctttctctctctgtctctttttcttgctatatatatagttgaaacttgaaaatcaaatcagtgagtcgcaagtaagactttgtggttgttgtatcagatttcgccgtgctctgtactttgactgctgtctgaagcatagaagtcgacacacaccggggcacgataccattcagttaaaagcagtctatttgctgttacacacttgctcaacaaagtcttctcattgtttttttttttaatgaatactaaattttcacacatgtaaagttacaaatttagattacaaggttggggacaaaaaaaaaaaaaacattggatcattaatctattgatttgttctggctatgcatagatcagaactgggctctgaaggcagccgattgggtatagtttgttatgtattatatctaccagcttgacctctcaatcaaacttcttttatgtaaattttgatttgtttctccctctattcctggtgattgtaataaatagacagatcgataagcttttaaaatattatacgtgaattattacaccatcatttctctactaccaatattaagcaaatattgaaacacgggttatatagaaatcagagaaatcgatttcaagcaatcattatcgactacggtcgttcgttaaagatcatgcatgtgcttagtggcaataccctacgcatcttgattcgttactgcggcacgtgtcatgaccatgcacatgaatgatgattaatgtttagtacatataatgttcacgcaaacgcatagtgttaggaaaagagaatggcggatctgaaagacgaacgaggaaatccgatatatctcacggacgcacacggggagccagctcagctcatggacgagtttggtaacgccatgcatttgacaggtgtggcaaccaccgttcctcacctgaaggagagcagctacacaggtccacacccaatcactgccccagtcaccaccaccaatactcctcaccacgcacaacctatttccgtgtcccacgaccctcttcaagaccatgatctccgctggttcggcaccagttcggtacgattaaatatctattacatagttgtattgagattcaatatctgtatcactcgtaagtaagttctaaaagcatgtgaacgcaattgtctaatagtttgcgagtagaaattctacatccatttcatttttatttatgtatgcgtgtatattattttaaaaattattatcaagattcactgtccatggtacgtataaaaatgtagacggaggagaatggcgaaggagtagggaggaaaactaatataacggatgaaacaaaatcgaagctaggcgtcgacaagccatcagctgcgaccgtaacaggatcaggatcaggatcggttcacgagaagaagggtttctttaagaagattaaggagaaactttctggccaccataatgatctttgaaagcttccatacggatggtcatgattacttgtgtaatcacaatcatgttctaatttcttgggaacaaaaaaaaaaaaaaaaaaagaaattgtgtaaaatgttgttggtaattcaaagttgattacattatacggtccaatatcaaaccgaaccgaaccgaaccaagtttgagagatgtaaagttgatccaacggatgagattgcataatcgtgatctctctattcaaaccttttccgtcgttgatgactggctgttccgtgaacttcccactcatagcaaaatgttagctcagtcgcacttcttctctaagtccttcgatctgattccgccacagtctccggcgttgcggtctgcaaatccttctcttcgtatctcttcttcttatagtaacagccgcttatcctttctttcttcttctgcaattgctgttcccgtctcccgccgtcggttttgcctgactatg

SEQ ID NO: 4551 - DNA, 3000 bp, Unknown
  misc_feature (1)..( 3000): cDNA_ID_1020484_gDNA_ID_1620714_Annot_ID_49067 3000 nt of promoter + ATG
attttattcttcgggtattgatttgattttaggggttttgtatctattttgggtcatctcaacatgttttgcagattctccggccttaatctcggatctgtttgatgctaattgttacttcaattactacttctttgatttcctgatttttttttcttaattacggattctcttagtgaagagagtcatggcagttccagtgagcagcagtatatagatcgatatgattccttttctatatttccttatttgatccatgattagtagtaacatgggggctctactaatttttgcttgcaagtgttgcaacctgagtctttgattggggatctcctgactctatgatgatttgattgtcttattgaatttctggtttctcagctattgatgatgctgattgaattcctgtatcttcatttcttaaattgattttgtgttttttttttgcttgttaattttgtagctagaaagggattgttgtgcctgtgttctactgaagtgtctctcgtcaaataatttataagcactgtctttgcatagtgcttagtaggtgctagttatggggaatgcgtgttgtgttgctgctcgagacaaaatggtggtgcctaattcatcagctggtgagaatttgcagaggagcaatatcaggcattctccgtcttggagtttccggtgggataatagagggcgtgtagctggtgaagaaacttctctcagttggttatctgatggtattagtcggaacgatggctctgagatcaaatttgaatctgctttcgtatcatctgaagggtcccctttggacagttttcggacacagacattgcaaaaatctcctgcctcaggtatattatttcagcttgttaggaaatagttaacattaaaaatcgttttcttcactggctcagcttttttagtggaacttgtaaacttgagggaagcacatgctacttggtgttactcacttgggactttagatttttttttttcacagaacctgttaatgcccctctagagtcatgattagcaaaaagacgtggttatgtttaatgataagagttgtcttctgattcttggcttgcttcttcacctgtcttgatcaaattctattgtggcagatctatcttttccaagaaattcttccatgaatacagtcttcgaacaggtaatgcttgtttcatcagtagctgagttctctcatattgtcgatgcctaacgtctctttcgcatcttttatgtatcttacagaaagaaaatgtttcaacagagtctgcagcaccatcatatctatctcctgcacagttgtctctttcactagcttcacaaccatcatctttccctacgtcaccactttcgtcccaaagctacttgcaccctgcaagttcatctacacttaaactgacacagcaccctcgtctatcaaagcaagtctcagatggtcaaatctatggtcagaactcactaagtagaagctcagcaactgaagagaggcagggaactcctacgagatatgattcgtctcagtctggaccatctgaaggttggtctctacaagccttttctgaaatgatgtcatcttctcgcagcaacaaggctctgtcttatgacaattatgacaatgattgttttgggcttcaacgtgacaagattgaccatcatggcaaccggatgtccaagcatcagcagcatacctgcggtgcttgctctagacccttgtcggagaaatccttgtggagcagccaaaagatctttatgaccaacgagctctctgtatctgcaattctagcttgtgggcatgtctatcatggggagtgtttagagcagatgacgccggaaattgataaattcgacccttcatgcccaatatgtacaatgggtgagaagaaaacagcgaagctgtcagagaaagcgttgaaagtagagatggatttgaaagcgagacacaacaaaagactcagaaaccgagttttggacagtgactttgattgcgatgattttgtaatgtttgaccacagccacaggacagcagcagcagcaagcaagagccctagactcgtctcaagttcgagtgctaaaagctattcagcaaagcctttcttggctcgacacttctctttcgggtccagaagtaactataaatcccctaaagaaaatcttcctgtgaaaaagaaaggcttcttctggaccaaatccagcaaaatatgaacttgtaagcctttctctctctgtctctttttcttgctatatatatagttgaaacttgaaaatcaaatcagtgagtcgcaagtaagactttgtggttgttgtatcagatttcgccgtgctctgtactttgactgctgtctgaagcatagaagtcgacacacaccggggcacgataccattcagttaaaagcagtctatttgctgttacacacttgctcaacaaagtcttctcattgtttttttttttaatgaatactaaattttcacacatgtaaagttacaaatttagattacaaggttggggacaaaaaaaaaaaaaacattggatcattaatctattgatttgttctggctatgcatagatcagaactgggctctgaaggcagccgattgggtatagtttgttatgtattatatctaccagcttgacctctcaatcaaacttcttttatgtaaattttgatttgtttctccctctattcctggtgattgtaataaatagacagatcgataagcttttaaaatattatacgtgaattattacaccatcatttctctactaccaatattaagcaaatattgaaacacgggttatatagaaatcagagaaatcgatttcaagcaatcattatcgactacggtcgttcgttaaagatcatgcatgtgcttagtggcaataccctacgcatcttgattcgttactgcggcacgtgtcatgaccatgcacatgaatgatgattaatgtttagtacatataatgttcacgcaaacgcatagtgttaggaaaagagaatg

SEQ ID NO: 4552 - DNA, 3000 bp, Unknown
  misc_feature (1)..( 3000): cDNA_ID_2998676_gDNA_ID_1620714_Annot_ID_49068 3000 nt of promoter + ATG
acaatgtttaagttgaatttggggtctgcttttgatttccaacaacggaggatcaaacggaaatctttttttttcttttcgcgtaggtgcggtcaacttacttctgttgcaggatgaagtgagcaagctgaatcagggagagaacaaagaagagaatattcagaaagccattgaagctaaaaaggatgcaatgcttcaatccctttggcaaataaatgttgttgacatcgaatcaaccttatctcgtgtctgccaagcggtaagatacaccatgatttgtgtcagacattaatgatcctatattattagtttattacatccactataatctcactgtaatagtaacgatcttgtcatctcttttgtttgttctcaggtgcttaaagatccaagtgtttcaaaggatgttcttcgagctagagctagaggattgaggaagctgggtaacgttttccaggtgagtcatattacaaaaataaagtcttggctctctaacataacatactgaaactcagctaaacattttacagggttctaagaaagcgtattctagagaaaacagcttgcgtcatgaagaagaaacaggagtgaaagtccacaccggagattcctcgaagccggcaacttaaaccaaggttcgaatctatcggttcgaaacagaacaatcaggttttgtgagaattcttgaatgtattgtaacgattaatattgttttattcgtatttatattcaacactaaataaatattgttatgggaagtgatggtttcgtctttatattcccttcttcgttttcgttggatctttttcttccgtgttggcttcacaaagctccaggttgcgtatccggtaagatatagtaatagacagggacgggggattttataaattggtccctctattattgttaatttataaaactggaatctaattttttaatttctaaacggccccatctaacgacgtcactgcggaaagttgccggttaattattcgttctccctctctttttgtcctttaacgtgacgtggcactactcaccgtaaagtcactataactccgctaactctaacggcgtcacatctaaaccggcttatcttgggttattttacacaaaccggcttatcttggttcgatcatggcaaaactgttctttgattttcttttaaatctttcatataggctaattctttcccttgacacattagcacatgaaagcttgtcacctaaacttcataagataagaatacataattagtaattaattcaacataacaactaaaacaggaggatataattaatcagaacttgaaccatcactcattctacatttttttaattcaatgtatcctctttaattttgagatccacttaagtagctaaagtgatcataaaatccaaacatgttacacatattttttgcctaaaaattagacgattattatgaaagaaactaaatgaatatgcagattaaatatatctaagcttttcgagatttatgttaagaaaacaagtaatttgaaagatgtttgaggagctatccttataactaatacttaagatataagattatgataagaacttaactaaactttctaagaacatcaagttgaatatgattagattgaatatgcagaaacatggttaataaagacatgttatatttttagtgtaagaaataaattttctaaaattttaccgtctcacaatttaaaataaaacaaaaagataagaatatataaattaaaaaaaaaaactgagaatctagaacaacaataaaaaataactcaaacacattcatttttcagatgaactaatatagttggacttttcaaaaacaattacaaatcatatttatgtttcaaaaccgatgaattcaactttattttatatgaacagacattatataaaacaatttgtaaatagtaatacataaacccggacgtagtgggtttactttgcatgattgatgaatttgagaagttattatctatgtatatgactatttcactttgcatgattgatgaaaatctatataaaaaaatcgaaataaccagtatctgttcaattcggtttgatttgattttgttatttggtacggttttagagctctgatcacaacagacagtcacagtacacacacctaccggaacctgacggcgtgaagtaaaccgtcagaaaagacttgtattcgtctctttccctctcttcgctctctctctctctctctaaaggaggaaggaacaaagcagtgctctcgtttcatttttctccctttctcactctaacagacccatccatcgctctctctctgtgaaactatcatcttcctcttctccggcgacgttttggaagttctgggagcaggttcgatgttcgtgactctcttagcatctagtattttgctttttgttttgttatccttttgtctctttcggaattttattcttcgggtattgatttgattttaggggttttgtatctattttgggtcatctcaacatgttttgcagattctccggccttaatctcggatctgtttgatgctaattgttacttcaattactacttctttgatttcctgatttttttttcttaattacggattctcttagtgaagagagtcatggcagttccagtgagcagcagtatatagatcgatatgattccttttctatatttccttatttgatccatgattagtagtaacatgggggctctactaatttttgcttgcaagtgttgcaacctgagtctttgattggggatctcctgactctatgatgatttgattgtcttattgaatttctggtttctcagctattgatgatgctgattgaattcctgtatcttcatttcttaaattgattttgtgttttttttttgcttgttaattttgtagctagaaagggattgttgtgcctgtgttctactgaagtgtctctcgtcaaataatttataagcactgtctttgcatagtgcttagtaggtgctagttatg

SEQ ID NO: 4553 - DNA, 3000 bp, Unknown
  misc_feature (1)..( 3000): cDNA_ID_2998684_gDNA_ID_1620714_Annot_ID_165582 3000 nt of promoter + ATG
gtttaggatcaggttgtttcccaattttatgttatcgtttagactttagatcttttttgagcatggaagggagtttagcatcattttttaagtattctagcgaattacataagaattagtcattctaacgaacttaaaacccgaccaactaataattgtgaatccaaattttcttgcagtgtactcataaactcattcttggtcaccaactatgtatataagtaagtaactatataatattgatatttttgaaacaatatactaccaaacatattcgagagccccacattcaccagacaattcgtccaacgccaatctcgccagcctttagcttaaattaccaaagggacaaaaaaaagttaaagatgaagaaaaaatataatacaatttccgttaaatttacttataaacactaaattgctagtcaaaatttcattacctatgaataatatttagaaaaaaaatactgtataagttggatttcttatacaaagatacatgactcagccttccgttacaaatagtcggaaccaaactaagaatttgctccataatctcttacttgtggcattaattagtcatttgaacgtcatttctattaagtggagagtaaaagtctgatgctaaaaaaataatcgatttactttcgcctttgtgtctctttgtatccccaccacctccttatctagttaaccgcgtaacgagatggacgggcacaactatatacatacaagacgtgtgtgtgtgtgttcatgcctatataatagctaatgttcttgtaagttataactcgaacaagaaacagtaagagaacttataaatagagaaggctatatggggaattgtgcactaaagccaaaagttctgtcagaaaccggagctccggcgccggaggagctcaaggattcacttcttgaataccataagatggacgctgcaaaatctcttagcaacttgttccttcaagtaagtcactataaaattaaaaacaagcacaagaaattatgatgttatattaagttatgttattctttgtgtctcatttgtgttttcttttggttaataggacaaggcagataagataacgaaagaagacgagaagatcacaccggaaaagataccggttactgatgatctgaaaacagctttggaggaggaaaatactccgaccaaagaggcaaaatctccggcaacagagacaaagtattcggtaacagagaaaagagctccggctgacaagaagataacaccggaaatgatgccggttactgaagatctgaaaacagttttggaggaggaggcaaaacctcctgcaacagagacaaaagctatggttgatgatcagaaggtgaagaacgaagtggccgttcgtgaagagaaaatcattgacctcgtgactgtgaaagagaacgaaacagaggcgaaaacagagtaggtgggaaaagaataaacacagtgaaacagccttgaaacgctagtttctgcgttcttgatagcaaaatgcttgtttttgtttagattatatttttcctcgatagataaacgcaaacgctgtattctttatatgaattgaaaacttcaaatttcctattgaccgatccgtcaacccaaaagaatgtcaatgtaagaggctacgaagaacgtgtttttccgttttcgttttctgcgattgcgtttcaaagagaatgcatgcgtaaatcggtgcccgttacaacactttcgaaagttttggtttggactttaacgggccgatacgggccgtattataaaaaatttgtaaaataagcaacagtttaatggaccgaacttcgtcgatcgagatctaacgggcgagtaagaaccgggtcggaaatacggatccggattctgagcattaaattgtgaaacaactaactcgacaaaccttttaattgcagcaatttaagaggccaccgaactctcgcgcctcgacatctcaattatacatgtagtgaacagccaataatatttagccacgtgttcatagtttgttggtagttataaacttagactaataaactcgaccacttctaaccaccaccggttcatggacgaccgacctgacctacgaaagttaaagtgagttctttaataaatgtgagaccaaacgaagaatttttgttagcatcaaattaagtccaaaacatgacttttattgatttcatatgattcaattataaagcagatcagataagtgatgtgtaacgaggatgaagacattaattgttatggcgagttcggtataataattcgaattttatcaacaacgtccaaccagatttatccataatggctttaacttcaagtttgaaccatgatgatgtgaattataagaagaagaaaaaatcacaacctcgcatagtcatatattccaaaaatagagaaagtgaaaaggacatcttaattatacatcatgtattttttctttttatccatagctaattgacgtgctttaaaaccgtgagagtgttatatgccagtcataaattcccagcaaataaatcggccatgcaagaaaatttgaaatcaagaatcaagggcagtgaattcagtaacgtgtcaattctgacagtaattttttctctctttttttcaaaaaaaaaaaagaaaataatcgcatacaaaacaaattatatggctattttctgttaaattttataaatgatagtaattttagtcaaccataatttaaaatgtgattttgttttaagaatttttccctaagatggcatttcagtcaacattcatatatggtattatatataatgaaaataaataactttcttaatttcacgaaatggaaaagtttagtatagaaacaaatctttagtctcttaatttactggtggcagcaataaaagggatattaatatctctatctacttctctcaactgtaactgcccatatatgtaccactccctcgagagtatcacacaacataaacccaatctctcactcagactaagacagagtcagaaaca

SEQ ID NO: 4554 - DNA, 3000 bp, Unknown
  misc_feature (1)..( 3000): cDNA_ID_3073609_gDNA_ID_1620714_Annot_ID_165578 3000 nt of promoter + ATG
cggggtcacaaaggcgttgcaagtcctatcgcattaagtagaagaaccacaagtcagagaaagaagcaaagttttagaaaaatcagaaggagcaactaaataatctaagaccaactagacatatatctcaacaagacatgattgtataagagaagtaacagttcctttcttcaaagttttgatctttatcaggctttgtcccagtcgaaactatatctagtgaagccacaatcttttgtacacttaaaaaacatatctttcacagatatcatccagtttcacatctaatcagtattgtttgagctaaaaaaaaaaactttgaatccaacgagtgtagactaatgaaaaatctcttgccacaattatgctgctattcaagaatatcatctaatacttgctatctttttaagagttgtgatcccatttcataagagagattcaagcttactaagaaattgatctcctgtttcaatcttattctcaaaaactttccaaatgcacaacagataaagcagaaaacagaatcaacccaccaaaaagacaacaaatttaaggataatttgcaagaaaacagcaaaaaaatagaggaaaaaagataccctgagaaagcaagctccaacaagaggaatcagcagcgatgcttgaccggagacgagctgaagcaacggcactgtgaagtggaatcatcgtttcaacacttcccaaagcagagagaacccttcacataaaatgtttctgattaaaacgagctgaatattttctctaaatttcctttttccaaagttgagcataagagaaaatgagttaaacttcttgaatcagctgaaaggtgaagtagttacctcgaagcgcgagggatggattgagacattgaagcgaaaggagatgaagtagttgtgggtttaagattgagggacttttgagttacggttctggatcttgatactaagtttctggaacctgccattaacgctgatctgcaaaacgatgccatctttgatcttaagatttcgcacaaccgaaagtttcgtttttcttttcttacacagcgaaatggaacaagtgaacagagcacggatgcactaaaccctacaacccaaacggcatcgtttaagttttgcagaagtagcacaaatttgccctctaacttttaatttatgcattatacaccctccctagtttttatttttgtgcgttaaaaataaacataagaaaatattatcatgtcatcctttttttatttttgtcaactataaaatattaccatccctgtaaatcagttttagataaaatctatatattcgtaacagtacaatttgttaactaaatcttttttttttcgtcatatatcgtttgtaaattaaatctttttaatacaaattagttttttccactttccaagggatacgagttttaatttttgtgcatatatactgtatttgtggcagtggatttaggattattattagagatcgagaggaagcgaaaacgtacgtacgaagctttcgttcacgtatcccacaattatgttaatgtcgaaggaagatgagtcacagatgacgttttcgatgcttcctgatgatttggtattaaactgtttagcccgtgtttccaaagtgtattaccctagcctttccttcgtttccaagaaattccggtctctcattgcctcaacggagcttcaagagcttagatcattcttaggttgtactagcagtggtctttacgtgtgtttacggttccgtacgaatactgattacagacaaatttgtttcaccctccgccaaaaaataagtagcagcgccaaaattttggtcccaatatcatctcttgattctccttttgactacagatcaggtgttgtagcggttggttctgatatctatgctattggtggacgaaacttaaataatagtgcatcgtctaaggtcatggtcatggactgccgttctcatacatggcgtgaggctccaagcatgcgcgtggcacgtgatgactttccatctacttgcgtccttaatgggaaaatatatgtaataggaggctgcaagaatctcgattcaacaaattggattgaagttttcgatacgaagacccaaacatgggagtttttgcagattcctaacgaagaggtatgcagaggttttaattacaaaatcgtagggtataaagaagctatccacgtaagttcattagaaaataatcgtgcaactttcatgacttacgagatacacaaaggtagatggagagagccacacttatcgttaagtcatggatttcatttctctaattgtgtgatagagaacgtgttctaccgttatagttacgagatgctccaatggtatgactcatgtagaaaaatatggaaaaatttgaaaggattcgtgcgcaggtcgattatgaatcctcgtggtgaaggtgttaaaatggtgaattatggaggaaacatagttcttttgtgggaggagtgcgtgactattaagaagaaactaatctggtgtgaagaagttgttattgaaaaaaaacatcaaggagagatttgggggttgcttaagtggtctgacgttgtctttataaccgatgagaaaaatcaattagtgcgtgctcttgctcctgatgtttgatgcaatggcttatcagacatgtgtttaattagttgatcattcactgatatgtgcaagaaggactattatttggttttatttgttcattaactcgtttggagtttgctttcctcccataacttacatattttactatagtgaaaaaatttttagctttcatttttcttttaaaagtatttgggtctatgttgcaatttcaaaagtaattggagactattaaaaacgcactctaaagtcaaacccttaaaaaccaatttaatgcaaatactattctgcggcgttactcactctctgtttttgaccggaggagatagaagagtagggcaaagctctttcgattaaaaaaaaaaaaaaacacttcaagagattacttatg

SEQ ID NO: 4555 - DNA, 3000 bp, Unknown
  misc_feature (1)..( 3000): cDNA_ID_1824700_gDNA_ID_1620714_Annot_ID_165577 3000 nt of promoter + ATG
gtaattattgataagaaaatcatttgaatcctttagctgctgttcgattaaatacatgtgtctaacaagataaattatttgagggaaaatctcgaatctggttaaaaggaaacgttataaatttagtaaacaacacgcgaattaacatttcgttccagacaaagaagacttaaacgaaactgtttcatcaaaaaagtaaaccaaacgaacgataaccaaaccagaagtggtgacacaaaaccaaatctaaaccaaaaacagagcagcagcacgcaaacaactctatctttgattaccagccgccaccaccgcctccgtaacttccaccatcaccgcctccgtagccacctccctcacggcgtccaccaccaccgtatcctcggccaccaccgcctccaccagatccgtaacctccgctacgtctctcgtaaccaccaccgcctcctcctgagtatccgccgccaccgcctcctgagtatccaccaccgcctccgctgcggtaaccaccaccgcttccaccacggcctcctccgccaccgccgctacctctcgactgagcctcgttcacggtgatgacacgtccatcgagctctttaccgttcatctcttcaatcgcatccctcatggctttctcgtccttgaaggtgacgaatccgaatccccttgatcttccactctcgcggtcgttaatgatctgtaaacaaacaaaatcatacacatcagcaaaaacaatcgtggaaggaatataaaacaaagcgatgaatataaagcaaaaatcgatcgatctccgagctcatagaagcaggaagatgaacgtaccgatgggacaaattaagtaacagtaacaaagaacgagagagaacatagtaacagtaatcgaatcaagtaacagagaaacagatcggaatcagatccgtcgaggatcagaatcatcggaatcggctcgatccgggagaccgatctctcgtgtaacagaccttagaatcgataacgtcgccgaactgtgagaacgtcctttgaagatcttcatcattggtggcccaggcaaggccgccgacaaagcaccggtactcaacttcagacatttttttttggggaaaagaagagaaattagggtttcaaaatgtaagagagagacttatgtgatttgaggtgataagacgcagccttaatttatagaacaggtgtgacgtaataactagggttaaacatgttttctagggtttgctgaaagatttgtttcaacttactctgattaagatgtgtggttaattgggttagtggttaggcccacatcatgtgagcattttcgataactaatgattttttctcctcgtttcgagcaaaaaatatctttgtaagaatatcttttattccttaaatgacaattttgtccttcgtctcgtcgtcattatgtcatacaatagttgggtctgagtttcgtttattgggcctatctaatttaattggaaagattataacttccggcccaatgaatctgacggcgaaattagtaaaacaataaaatgaaataatatgcaaagactatgacgataatgtgctatggatttacatatttgttttgtcattaattatgacatgcaataaattcatatgaaaagattcttatcgcaatagcatcgtggacatgttacagtctgtaatatccaaactttagcatagacgttttttgttgtacaaatattttggtatgttaagtgatattcaaatgaaagctagatgtgcagatatgtgaacatataaatctttcaatggaattcaattttcaatcattgaatatttggatacactcgctctgtacttgaaatattttgactgtctgaatattatttttttacaggattaattattttgtataccaaaattagacggatgaagaatgaagatgtagtagttatacaaagtcaattacaaatggttcagtatcttgatttcgatttttgtgctgaaaatgctgactaaagcgtgtagaagagctttttcaacaagaaataacctggctaagatttttttaagaaatctgattattaatatatcgcaggtaatatgaaaaagtatcgtcgactttttataagagtgacaactaaatcattttgctcataataaagccacaattattattagtatattttggtcgttttaatacgaggaaaaataattgtcatacaaaatttacagaaatggagtagcatcgtagctcctaggaattcaattatttatttgcaaaactactaaaatggtggttatcatattaaacgtcagcagaaactttaagtatttttgaaatgatattaatttaagagttcgttaagctgtcttgggcgggatcgttgagagtcaaactcctcaaacgacgccgtattcagaacttcactttcaattactgtatctgcgtctcggtcacgagatcgaaccataaatcttgggaacgtgcacgtatacaacgaaagatccaccttctctcactttttttattttcttatactttcttctcttttcttcgaacggccgctgttcttgaccagtctgaagctttctctgtccagaacagttctgtaagaagaagtttttatcaaatattatataaaaatatctgtttcgtattatatcagactttccatctttctctctctaaatctaggacaaaaaaaaacatggaagagttagagagagagagaggcagcagaaaatgattggtaaacaacaatgaatcgtttttgattctgaagtgcacagagaaaagtaattgccagagaaagtcgcagaggtaacagagtgaagaaccttttttagtatatatctttgttgaataatcacaaaaagaaagtttcctttattgatcggattcgaaggaaacccaaaaaaaaaagagatttgattatttccataaatcgcgaagcttttttccaattgaatcttaggcaatgaatggctttaagtttttcgaagtactagtcgtcaccagggtttagagaaacc

SEQ ID NO: 4556 - DNA, 3000 bp, Unknown
  misc_feature (1)..( 3000): cDNA_ID_3073627_gDNA_ID_1620714_Annot_ID_165576 3000 nt of promoter + ATG
acaaagtcaggaattttaccttcaaaatagttttctgacaggtcaacaacttggaaccttgtcagtaaaagtgtgagattgccgtaaaacatgttcccggatatgttaagcatggagacagtagaatcaaaactgacagtggtattaggcagcatgtcagagaagtgatttccagaaatatctagaaacttgagctccggtaacgaccataacctggacggtaaagcgcctatgaaaccactgcctctgaagtcaatgatctgaagtttactcagcaaactaaacagatcaggaggtagggatcctgaaaggcgatttcccgcaattaccaatgtctgcaagttccttagccctttcaaatctgatggaaccgaacctgacattccgttgaagctgagatcaaggtcaattaaaacagagaggtctccgagtgatggaggtattgaagaagtcaaggtgttacgcgaaagattcagacgctggagctttgagagtgccccaatattagcaggaatcgaaccaaacaccgagtttgaggaaagatcaaggattgatagattctgaagagaggtaagagacagaggaatatccccattgatcgcattctttgaaagatcaagaactttgagatgtgataaccgagtcaaactttcagggatggttcctgtgattgaacaggagctaaggtccaacacctctaaagtcaacagactcgatccaaacaaagccgggattggacctggaagatagaaccttgaggcgttgaaggaagctagacgggtgagattgacgagagaaccaactgagaattccgggttttgattcccaatccttgtccttctgaaccctgaaatgttgatcttagttactctaccattctgatcacatttgatgccgttccagttcagacaaggattgccttttacaggccaatctctgcttcgtaacccaagagaagaccttaacagcagaagcgccgatttctcattcagagaacttgtctgttgctcaaacgttgactctaacaacaagaggaggaataagaagaagaccaacaaggatgtcttcctcagaaccaccatggtttctctaaaccctggtgacgactagtacttcgaaaaacttaaagccattcattgcctaagattcaattggaaaaaagcttcgcgatttatggaaataatcaaatctcttttttttttgggtttccttcgaatccgatcaataaaggaaactttctttttgtgattattcaacaaagatatatactaaaaaaggttcttcactctgttacctctgcgactttctctggcaattacttttctctgtgcacttcagaatcaaaaacgattcattgttgtttaccaatcattttctgctgcctctctctctctctaactcttccatgtttttttttgtcctagatttagagagagaaagatggaaagtctgatataatacgaaacagatatttttatataatatttgataaaaacttcttcttacagaactgttctggacagagaaagcttcagactggtcaagaacagcggccgttcgaagaaaagagaagaaagtataagaaaataaaaaaagtgagagaaggtggatctttcgttgtatacgtgcacgttcccaagatttatggttcgatctcgtgaccgagacgcagatacagtaattgaaagtgaagttctgaatacggcgtcgtttgaggagtttgactctcaacgatcccgcccaagacagcttaacgaactcttaaattaatatcatttcaaaaatacttaaagtttctgctgacgtttaatatgataaccaccattttagtagttttgcaaataaataattgaattcctaggagctacgatgctactccatttctgtaaattttgtatgacaattatttttcctcgtattaaaacgaccaaaatatactaataataattgtggctttattatgagcaaaatgatttagttgtcactcttataaaaagtcgacgatactttttcatattacctgcgatatattaataatcagatttcttaaaaaaatcttagccaggttatttcttgttgaaaaagctcttctacacgctttagtcagcattttcagcacaaaaatcgaaatcaagatactgaaccatttgtaattgactttgtataactactacatcttcattcttcatccgtctaattttggtatacaaaataattaatcctgtaaaaaaataatattcagacagtcaaaatatttcaagtacagagcgagtgtatccaaatattcaatgattgaaaattgaattccattgaaagatttatatgttcacatatctgcacatctagctttcatttgaatatcacttaacataccaaaatatttgtacaacaaaaaacgtctatgctaaagtttggatattacagactgtaacatgtccacgatgctattgcgataagaatcttttcatatgaatttattgcatgtcataattaatgacaaaacaaatatgtaaatccatagcacattatcgtcatagtctttgcatattatttcattttattgttttactaatttcgccgtcagattcattgggccggaagttataatctttccaattaaattagataggcccaataaacgaaactcagacccaactattgtatgacataatgacgacgagacgaaggacaaaattgtcatttaaggaataaaagatattcttacaaagatattttttgctcgaaacgaggagaaaaaatcattagttatcgaaaatgctcacatgatgtgggcctaaccactaacccaattaaccacacatcttaatcagagtaagttgaaacaaatctttcagcaaaccctagaaaacatgtttaaccctagttattacgtcacacctgttctataaattaaggctgcgtcttatcacctcaaatcacataagtctctctcttacattttgaaaccctaatttctcttcttttccccaaaaaaaaatg

SEQ ID NO: 4557 - DNA, 3000 bp, Unknown
  misc_feature (1)..( 3000): cDNA_ID_1824713_gDNA_ID_1620714_Annot_ID_165570 3000 nt of promoter + ATG
ccgtatagatattgacctcaaacttagggaaaccctaatataagagcaaaccctagcagcgctatctccctcagcctcatctttcacccactactattcgccgttcgcttttccctcgccgtcgaaatcaacatggtatcgttttctatcatccttttctctaactaatcacctgtattcattttcttctttctcttgtctgaatcgttactttcgttgtcatggttacaggcgccgaagaaggataaggttccgccaccgtcatcgaagccggcgaaatccggaggtggaaagcagaagaagaaggttcgtttccgaatataatttaggtttaattggaatgtgtagagagatctggtttgtagtttctgaaattgtgttgtttaagtgaagcttgtaaatggatttgttttgcgattgatgttagattagtgttggagtttgcattgtctttgtacttaaatcgttgctctctttgtttgatggtaaacaaaaaaacagaagtggagcaagggaaagcaaaaggagaaggtgaacaacatggtgctgtttgatcaagctacttatgacaagcttctcactgaagctcccaagttcaagctcatcaccccttccattctctctgaccgtatgagggtatattatcaatctatcaactccttgtttcctcaattactaatccagatctagaaaatgatagttatatcatctggcagtgaattggtttgagcttctattgaatctagtagagaatattgtgaggtgttgataacttgatctactttacctaaaagctgtctgatgttgttggtatgcttgttcaggatatggttctttactttcacataggcttactgtgtgtctaagtagatactcatgtgttatataatgtcaatttggagcttgtcctcaacgtcaagcttattttattctctgtttctcctccctgttttttttttttttctttccataacttaacagatccaaacttgatgtgtttgatgttgttgaaaattcagatcaatgggtcgctagcaaggagagcgattagggagctaatggccaaaggtgtgatcaggatggtcgctgctcactcgagccagcagatctacactcgtgccaccaacacctaagatgtttggtttctttatccacctaagatgtttggcttctttttcttatctcttgttgtttgattcttcaggaacttgttagaatcttttgtttcgtattccgtttttttgagatatatggttatttaaaacgcatcaagacttctaaaattgagtcaatcctttgatatatccgttctagaattcggtaatggagttgttccggtttagttatgcatcaaataatttaaaccgtagttctttattatagggatttgaactaattgaacgaattcattcaaaatattatttgaatgcttggatttattttataaaggaggttatgtaatgtagacatttagattgatggactaatatgaatgaatatgatgaaatgaaaataacgcctacagcccatttgacaagtttcagtgtcccttaatattttgttaataaatacatttacttttcttatttttgtcttctaactaaagaattttagtgtttataattatgctaattggttttgcacttaaagagtaggatttattcaaataatttcccgacataatccatgcgtgatatgtcctttcaatttcgtcttctcacccgttaatcaaatgggcccagcttttcaatccatttgctaatctgatcaaattttcctataacgcttacaaataacaatttgcaaaacatcgtcgtcgatcacaggaaaacttccctttagacatttatttcgccatctcggaagcttagacgttggaatatatatctattttcttaactaaccgctgatttttgtattttcattacaaaaaaaaaaactattgtaatgccatattcaaaatagtatatgctttggtacagtagaaataatatcaaccaattaggataaattttctttccattatataattagtctccctagcttagaggcaaatttgtagtttgtgttacgacgtgtacggactatatagcacctcaaagttgggccaatgagatgaaaatgggcctgggtccacatgcaagcagacaaaagaaatcgacgtgtcccatatgagtctcgtagcaagagtatgggagaaaccagagtcgtccattttttgggttcagtgactgtcattgtcagatatctatagctttgttggtaaaatttcacatgaaaaaattacataataaatagagaagagattttggaagagagaaaatgcaatttagctcctcacgtattagcaatttaagttcttgtcttggtcttccctcgatttcaaacgacattaaccaaaaccagagaactacgaattattcggtgagttctctcattgatacgatcctcttctatatatctccgtgttcttctagcttgaaagcattttaaaagtttttacttttggaggtttcacattctctccctgaacgattttgctttattttgttcagcttcggttctcgtcgaatcttctgtttctctgtcgattcattgatctgaaaatctaaaaatggattcattctgatttaacttttatcttgttcaaactcatttatgatcccaaatttgttcgtttcattctttataaattagaatccttttttgttcttgtggcaattatcttcctccttttctctgttttgaaagatttgttacctgcagaagttaattccattgatttcttgaagatgcagtatctcttgctacttaaaagagttagattttttgtctgatacgttaaaattatgagaggctcgttcgttctttaatctgtgtggtcaaagtttcctactttccgagaatttctttattgttgtgttgttcactttgcatttataatagtttttactaacgagctttacgattctgttcttgtctcattccagctaaaaaaag

SEQ ID NO: 4558 - DNA, 3000 bp, Unknown; identical to SEQ ID NO: 4552
  misc_feature (1)..( 3000): cDNA_ID_3073652_gDNA_ID_1620714_Annot_ID_165556 3000 nt of promoter + ATG

SEQ ID NO: 4559 - DNA, 3000 bp, Unknown; identical to SEQ ID NO: 4551
  misc_feature (1)..( 3000): cDNA_ID_1020484_gDNA_ID_1620714_Annot_ID_165555 3000 nt of promoter + ATG

SEQ ID NO: 4560 - DNA, 3000 bp, Unknown; identical to SEQ ID NO: 4550
  misc_feature (1)..( 3000): cDNA_ID_1824733_gDNA_ID_1620714_Annot_ID_165554 3000 nt of promoter + ATG

SEQ ID NO: 4561 - DNA, 3000 bp, Unknown
  misc_feature (1)..( 3000): cDNA_ID_3073590_gDNA_ID_1620714_Annot_ID_165584 3000 nt of promoter + ATG
tatctttttttttttttccacatatattggtatctatatatcttatcttacactttaccaatattttcatacttaatcctatgaaattctagtttttctggttatggcactaacttaacatatatattttatattttcaatgtttttaagaaaatgaaaatagtaaataataaacaagagtaaataaaagaaagcaaacaaaaaaagaaaatagcaactgaaatgagaaacaagagccaagaataattaaagaaaagtacgtaaaagtggtaaaaattaaaatagagttcaaaaagaagtgactaaaacccatactacaactctataacctcgtttgggtctcgctagttggaactttgacttttgatggctcaatcattaggatttatgcctaaccttaattagttaactcctatgattggatgatctaattataattaatcggtaaaggcacttttatcattggaattttaattaaataactgcgtacctatattagtcgttacatgtgattactgtatcagactatcagtgataaacataggtttttcttttttcttaacataacaacatggaaagaggttaagcgccaaaaataaaaaagactttctaatcgtaaaatagctagtagctaccgacagattgtgagtgcgaaacacacataacacagtagataaaataattgaaaagtagttaaaatagttctcttctgttttttttttgaaccagttttaacacgaaagaaaaagacaccagtcattgacctatcataataatatacacaagatttggcttatttaaatgtaatcccgaagagcgaatattaaatactcctctggatagcacaataattcgattctaacaataaattagaatatattgggaaaagtttaacaataaattagtactaactttttcctgtggatagcacaataattcgatcctaacaacaatgcctgtctattttagtcgccagtttcaaaatactgcaatacagtgaaaacattttaaaacacatgcttcatcttatctttttggctattcttcacagtggtaagtttccgtcggtgccgatattatatgtttgtgctattaattaatcatgaattgtataaatttccagatttgttggtggagccttgtaggccatcaaaagcttttgatttttgaacaaataatggcccatatatcgaccgacgaatatttgtactcccatgaatacaacaatctagtttcaagtaaaaagtgttcaaaatatttcagatttttgtatcgtagttttaaaagactaaaccaattgtataattacatttctattttccagctgcttggccggctgatatggcaatttttagcaacatttatataggagcgtattgtatatttttgttcacctgtggctatcttgtattcattttgatagaaagactaactttgtaccattcaaataatgattcggttatcatttcgccatcaaataatcgatttatacctaatactgcgaagatagagacattttaacaatactatttacgatagttcggtagaatatagtaatctatgcattgatgacatcgtcggctctaatcagcttttataatgcttattaacatcattatggcatattcataatttaatcgaagtaacctagtttattttaatgcatttagatcaattagatgggggaaaaactatgtgatctttcaaatgttgtttgttcaaagcagaatgatttatgtgttacgaattcgccagaataattttaatttagccaaccaaaaaaaacataatttgtaaactttttccacgttttaaactatttgtgaaatgtctccaaaatgaaagaaaaaggttatgccaccgacaatattttctaccttgtacaaagaaacaaattgtttattcaaagttggtttggaaaagatactgatccaacggtcacggatttgaataacattgtttagttaatacaaccaaattattcttatgctatgtgtacctacttagaagcttacacagaaaaaaaaaaaaaaaaaaaaacttctaaactttggttttcttttttttcccatcatttataatattcacgtgttacataataatttggatgtatataataaatgatccaataattaacaaaataaatctgatcatccaatcataataaagttgcgcatactaaacaatattttattttcctaaacacaacttctttgatatatggattggtcgataagaataataagatatgggttttaatagaagacaatcaatcttcaggggctttcttgaaattacagcgtggtaaaaaacaatgacatcaatctggacccgatcacgaggacccggatccgtatcgataaacagtgtagctttcactaccccattttcccagaaacacctctcaaaaatttctcaagaacttgtataaatatctcagtttcgttcacgcagtgtcttttttatttttgtatttcttttttcattgttcaccaactcctcttgaaggtgggacagagtccagctccaccaccaccatagccatcgcgtcgttttctccgggacccacttatttcgtgacgtttctctctttgtatatacatacaattgttttcagtctcaatttgctgtccacattttaacacaactctatctcaggggtggtgtctgaatctcgtctctctcattcctatttatcccaatctaatctatcacaaacccttccacattgcttttgtcagtctgtaaaattctctttgaatcagtgaatcactcacttaaatccaaaacagtttttttttctttctttctttatttgcttgttgtggaatcaatagctgtctccgggaaaattcgttttttttctccttcgggatctctttttttttttttttggttttatttaataattatccccgagccaacatttattgtcgattcggtttatttcgtctccttcgtcttccactcttactagtgcatgctctgaatctgtatgta

SEQ ID NO: 4562 - DNA, 3000 bp, Unknown
  misc_feature (1)..( 3000): cDNA_ID_1580932_gDNA_ID_1620714_Annot_ID_49074 3000 nt of promoter + ATG
atggattaggattagcttatattattgtaagaaaatattattactttttctaaagtacattttttgtatttcatgagaaaattataaattcaattccttcttcactaagagatggaaaaatggcttgtaggtcaacaaatttttgttatttctttaatgtcttgtctctttctaaccaaaagcatacaagaggtggtctcatgatttcaaatttaaattttcattattggatacactttgacaaaagccccacttcttttctgtaaaaagttgaaatgaagattcattattggtgtatcataatattattcagaacatccacaagcgaaacgtgtcttcatattttgatcggaactttcgtattaatgccgcagtagtaagaaacaaaaataaaatttgatcacttagacaaaaatgagttcgctacatacgctttagttatagtcatcactcatcatgtatatctaaaataacaatttaaaaaaatgtaagaatttgactcaaaaaaataaaaagggaacaaagtccgacctgccggaatcgaaccagcgacctaaagattacagcaactactacagtcttccgctctaccaactgagctaaggtcggataattattagtatactcacactatagaaatatagcgcttatactttaatatgggcccctaatgggcttgattagaaggcaaattatatgcgtcagcacaatttgaaaagaaccaaattagtcaagtgatgatggagttcgaccctaattaggactcccataaacaaaaatccagctagcggactacatacatcgttaaaagactattggcttgatagttgatactgaacaacaatatgaatttttaatttatttattttttgattaaaacttatatattaatatttaaagacccatccctaatatgctattttatgatgctgctaacttatttaaactaaccaatttagactaatggatgaacaccaagaatttggacttggaccacaaaacaatgcatagtatatttggattcttgattaatcaataaatttgaagttacatgcatgatgattatttatttttcgtcacatgcatgatgattaattaagatggcaaactccacgtgattaattaagaacttggtgcgtcataaatttttttaaaaaatatcaggggtgattcgactaacaaaatacgacgaaccagacatgttttgtttttttttacatttggaatttcgaagttaacttttaagaacccacttgataaatcatatgtacaaattaatgagaaattgtagaatgccaataaaaattgtgatatccaagaaaactaagcaaaatatatttattttctaagcaaaacatgtacactttttgagcaaaatatgttgaaacagcagccaagcgtaggactttgatttcagctgatggagaaggaaattcaaagtcatatccaatttattatgattatcacataattttagctgtaggattttcagataaaattttaccgaaattctcggcatataaattttttagaaatctacaatctgttgtaaagattttataaatacttatctgaccaagtcactagctcgtcaaggagatttcctcttcatattcattttcaaagacaagtgttttgttttctcatcgccacctaagatgtagataaaacaacatattttatttattttttctaaaaccgcgtacaacatgacatgcctagggagttctaacaatgggaaatgagcattcatgggggatggttgaagacattcctcctcattctcctacatgtgatgagatgtgcatcaatggtattttgtattatggagcttttattgacacaaattctaactgaacctgcaatcatgagttttgatgttaggtctgaaaagtttcttcttatcaagggactcgtcaatgccggtgttaactttcttacttcttaagagctaagaagatcttatgaggggcagctagctgtacttttttttgaaaattgagttatttgtatgtttgccttgtgggttttagaagatgttgtgaatgaggaatggtcatacatgagttttgatttctctagtttagctgggttgacaagagacttggaacttcaactgtttagtgcagccaacgcatgaaaagttgtttacgcaccattttgtgtgtatgcattgacatatcatgttgtttattatgatccaaaaaatgaatttacttttgaaaatttgagagagaaagaattatagaaaaacttgttcctaaaaactctcaacctagattgaataagtattattttccacttttagcaaaacacacttacaaattgaaacatcttaggtggataagaaaccaaacaaatagtcacaaaaatatcaaacaaattttttaagaataaaaagactacttttatgtaaatagacgttagactcaattaaaataaagggaagacacaaatttatatggatttcaactttcaataacgttaaatgtgatatgatatgctcatggcaactaggatcagaattccagttgtggcaaccacacaaatttctgagcttcgcagaatccgaatcggtgtttcacctcgtaacttagtcttgaacgcctagaagcaaaccaaatcaatttaagttgtaatattatatttattttgtgtagattgctttaatctgtgtatcttgtaatctttatatttctgtcaaaaaaaaaaaaatagtactatttaaccttttactaaaaaatgaaaatgtgatatgggaaatttcaattgtaatattactattgtagagaaagaagtcagaaattcaaaagaaaaaccaacgtaatgcccaacttaataaacatgggctttgtttttgaaagaggcccgtatagatattgacctcaaacttagggaaaccctaatataagagcaaaccctagcagcgctatctccctcagcctcatctttcacccactactattcgccgttcgcttttccctcgccgtcgaaatcaac

SEQ ID NO: 4563 - DNA, 3000 bp, Unknown; identical to SEQ ID NO: 4557
  misc_feature (1)..( 3000): cDNA_ID_1824713_gDNA_ID_1620714_Annot_ID_49075 3000 nt of promoter + ATG

SEQ ID NO: 4564 - DNA, 3000 bp, Unknown; identical to SEQ ID NO: 4556
  misc_feature (1)..( 3000): cDNA_ID_1808757_gDNA_ID_1620714_Annot_ID_49080 3000 nt of promoter + ATG

SEQ ID NO: 4565 - DNA, 3000 bp, Unknown; identical to SEQ ID NO: 4555
  misc_feature (1)..( 3000): cDNA_ID_1824700_gDNA_ID_1620714_Annot_ID_49081 3000 nt of promoter + ATG

SEQ ID NO: 4566 - DNA, 3000 bp, Unknown; identical to SEQ ID NO: 4554
  misc_feature (1)..( 3000): cDNA_ID_1824697_gDNA_ID_1620714_Annot_ID_49082 3000 nt of promoter + ATG

SEQ ID NO: 4567 - DNA, 3000 bp, Unknown; identical to SEQ ID NO: 4553
  misc_feature (1)..( 3000): cDNA_ID_2998684_gDNA_ID_1620714_Annot_ID_49087 3000 nt of promoter + ATG

SEQ ID NO: 4568 - DNA, 3000 bp, Unknown
  misc_feature (1)..( 3000): cDNA_ID_3073590_gDNA_ID_1620714_Annot_ID_49089 3000 nt of promoter + ATG
tggttatggcactaacttaacatatatattttatattttcaatgtttttaagaaaatgaaaatagtaaataataaacaagagtaaataaaagaaagcaaacaaaaaaagaaaatagcaactgaaatgagaaacaagagccaagaataattaaagaaaagtacgtaaaagtggtaaaaattaaaatagagttcaaaaagaagtgactaaaacccatactacaactctataacctcgtttgggtctcgctagttggaactttgacttttgatggctcaatcattaggatttatgcctaaccttaattagttaactcctatgattggatgatctaattataattaatcggtaaaggcacttttatcattggaattttaattaaataactgcgtacctatattagtcgttacatgtgattactgtatcagactatcagtgataaacataggtttttcttttttcttaacataacaacatggaaagaggttaagcgccaaaaataaaaaagactttctaatcgtaaaatagctagtagctaccgacagattgtgagtgcgaaacacacataacacagtagataaaataattgaaaagtagttaaaatagttctcttctgttttttttttgaaccagttttaacacgaaagaaaaagacaccagtcattgacctatcataataatatacacaagatttggcttatttaaatgtaatcccgaagagcgaatattaaatactcctctggatagcacaataattcgattctaacaataaattagaatatattgggaaaagtttaacaataaattagtactaactttttcctgtggatagcacaataattcgatcctaacaacaatgcctgtctattttagtcgccagtttcaaaatactgcaatacagtgaaaacattttaaaacacatgcttcatcttatctttttggctattcttcacagtggtaagtttccgtcggtgccgatattatatgtttgtgctattaattaatcatgaattgtataaatttccagatttgttggtggagccttgtaggccatcaaaagcttttgatttttgaacaaataatggcccatatatcgaccgacgaatatttgtactcccatgaatacaacaatctagtttcaagtaaaaagtgttcaaaatatttcagatttttgtatcgtagttttaaaagactaaaccaattgtataattacatttctattttccagctgcttggccggctgatatggcaatttttagcaacatttatataggagcgtattgtatatttttgttcacctgtggctatcttgtattcattttgatagaaagactaactttgtaccattcaaataatgattcggttatcatttcgccatcaaataatcgatttatacctaatactgcgaagatagagacattttaacaatactatttacgatagttcggtagaatatagtaatctatgcattgatgacatcgtcggctctaatcagcttttataatgcttattaacatcattatggcatattcataatttaatcgaagtaacctagtttattttaatgcatttagatcaattagatgggggaaaaactatgtgatctttcaaatgttgtttgttcaaagcagaatgatttatgtgttacgaattcgccagaataattttaatttagccaaccaaaaaaaacataatttgtaaactttttccacgttttaaactatttgtgaaatgtctccaaaatgaaagaaaaaggttatgccaccgacaatattttctaccttgtacaaagaaacaaattgtttattcaaagttggtttggaaaagatactgatccaacggtcacggatttgaataacattgtttagttaatacaaccaaattattcttatgctatgtgtacctacttagaagcttacacagaaaaaaaaaaaaaaaaaaaaacttctaaactttggttttcttttttttcccatcatttataatattcacgtgttacataataatttggatgtatataataaatgatccaataattaacaaaataaatctgatcatccaatcataataaagttgcgcatactaaacaatattttattttcctaaacacaacttctttgatatatggattggtcgataagaataataagatatgggttttaatagaagacaatcaatcttcaggggctttcttgaaattacagcgtggtaaaaaacaatgacatcaatctggacccgatcacgaggacccggatccgtatcgataaacagtgtagctttcactaccccattttcccagaaacacctctcaaaaatttctcaagaacttgtataaatatctcagtttcgttcacgcagtgtcttttttatttttgtatttcttttttcattgttcaccaactcctcttgaaggtgggacagagtccagctccaccaccaccatagccatcgcgtcgttttctccgggacccacttatttcgtgacgtttctctctttgtatatacatacaattgttttcagtctcaatttgctgtccacattttaacacaactctatctcaggggtggtgtctgaatctcgtctctctcattcctatttatcccaatctaatctatcacaaacccttccacattgcttttgtcagtctgtaaaattctctttgaatcagtgaatcactcacttaaatccaaaacagtttttttttctttctttctttatttgcttgttgtggaatcaatagctgtctccgggaaaattcgttttttttctccttcgggatctctttttttttttttttggttttatttaataattatccccgagccaacatttattgtcgattcggtttatttcgtctccttcgtcttccactcttactagtgcatgctctgaatctgtatgtaatgggagttcaacagtctggatccattatcctagccgggtcgggtcaaggtctttgagtaagagagacaattcgttttgattcggtgtagaagacatc

SEQ ID NO: 4569 - DNA, 3000 bp, Unknown
  misc_feature (1)..( 3000): cDNA_ID_1824798_gDNA_ID_1620715_Annot_ID_49092 3000 nt of promoter + ATG
gaggttcatgaagcttgatccatgactatatggatccatagactagttctctggttggtgtaagaaggagcgggaaagattgtttttggtgtgtgtttctagtgtgtttctggttaggtgtttaaataacaagaacaagagttaatagtgtctggtaataatatctggttggtgtttaaaagttaatggtgtctgttttaagtgtgacatgacaatcaactaccaagtatcaaccacataccgacaacaagcattcaataaaagccatatatagtcatctaatataattcatgaaaagtcagaggttcaaagatataaggttaagattgttttaccttctatgagccttccattcggtaattgtatccaattcttacacaacagacatcaatcattctagcaactgtatccacttctccatttaacctcaacaaaaacagcataacaaaaacaagtgttatgtcatgaacgtaagacacaataaatctacaatcaaatacaaaacaagtctgtaatcaaatacaaaacaaatctgcaatcaaacataagataaatttacgataacaagcaaacatatatgtacttaaccaacataaaactgtaatcaatcaaaataaatctgtaagcaaattgataaaattaaatctgagtgtactaataaacaaaattgcaaacaaatccaacgacaaaatcctagttctacgaacggcaaacgacggcaaatcccaagaaatagcagcaatcaaaggaagacaagacaaaataaaattgtaacaaaaaaaaatacagattcgttggaaaagacaactccatgagaacagagaattggacagcaacctatgagaactaattttcctatcatcaattcccaattgtgaaaacccctaatttctgaaacaaatataaaccctaatttactatctacaactgaaaacaaagagaaataacacagatttgtaccatttatcatgcagatgatgataatagcggctcaaacaagtaattatgacttgcaactctctcaattcgaaggatgaaatgttggagagattttgccggcagaagcgagagataaatatcatgatggagaagaacaagaaagagagagagagagatgaatatcacgatggagaagaacaagaaagagagagatcgtcggattacaatggtcgccggcgtcttgagagagatggagagaaagagagaggaaaaacagaaagagaaacacgagtgtttttttgtttcctccttttatttattttttctacccactcaaaacacaacatgtgtactcttcttagttttaagaaaatatcttaattaagatgtttatcttagctaagatttgttgatctcattaaatttaatcacttttatacttaagaattagctaagaattgtctaagaaccaaggttggagttgctctaaagtcacaacgtatttctgacttccacgtcttctatctatttacaatttacaaaatcaatcaagcttttcaaatgcggtttaaaattgattaaatcatagttttagatcacataatctaaatcaaatttatgcttgtattttcatttgattttgacagaaaccaaaattttggaaatgaaaattgcaaacaacaattacataacaaaagaactgttatggttttgctgttctttttgggcaaactagttatattgatagaagaacaaacttgaagtagcagacaagtagagagtgcagttttagccaaaacgttagctaaccgattagacttgcaggaaacaaaagagaacttgatatgaaaaaaaaaacgactaagaaaggcaatatcgtggagaatcccttgtagattgttcgtagaggtctttgtatttagcagagatataaagacttgagagtcggagaaaacgttgatggaggtcaattccattctagtcgctgcgatcaacactgatttcatagctaaagccgaggtgagtgtgtgcgtgttgcagctccatggtggaagactcgattgttctaagttttgaaaagccaccccattccgcacaaacctgcatttgcagtctagaccgtatcaataaagcaagaaacaacctctctaggagataagatatgtatggaatcctccgtacaaggaagaaagatcaaagaaaccttagtaataaaaaaactgcatggatctggatttttggtgtcaacatcctccattacatgtattctgtatatttctcaacaaccttgaaataatgaaattttcaaattggattttattaatttgagtgaaagactactaacaaaaagttcttatccacctttatcaaattttctccattgttatgtaatccaaataaacattgtcctgcgtacaacgcatcaagaacgtatgaaatcaatattgcaatttgcaattgtattagcttaatgaaaaccaaatttggtgaggattatattttgaaatattgtggtttaatgaaaacccgtaaatcttgacaaaaaaacaaaacaaaaaaatgagaacccgtaaataaacgttgtataagtaaacgtggcattatattttagtagatttacgggtttgagatattttggttgaggtttactatatcatttaaattgggattctatactaaatttggtgatttgaatttaaaaatctttcaagaaatctatcaaaaatattctcatataatatgagtatttgtttttttttgtaaaagtgttggtcatatagaattaaataattaaaaattggccatctttccagttgccgttgccagccgtttcctacttgtgctttttcacttttccgttctctcaaaccttttttctctgcttccgtttcgtttctccgttcaaaacaagatcgaatcataaaaagtttcctcctttttttcttctcgaaacaaaagagaattcttgacgtcttctactccattttccatcaatacccatttcttctatcgctctcgtttccaagaaaaaagagggttttagagagaagcaaaactcaa

SEQ ID NO: 4570 - DNA, 3000 bp, Unknown; identical to SEQ ID NO: 4569
  misc_feature (1)..( 3000): cDNA_ID_2166753_gDNA_ID_1620715_Annot_ID_165608 3000 nt of promoter + ATG

SEQ ID NO: 4571 - DNA, 3000 bp, Unknown
  misc_feature (1)..( 3000): cDNA_ID_1824794_gDNA_ID_1620715_Annot_ID_49093 3000 nt of promoter + ATG
tccattttgagtgtaccttagtttggtctttcttccatttttatttgtataccatgggcatcaatcagttgattaatatattgcaaatttggaataatcaatcaagcgctcgattatttatccatttagatctgacaattttatcactatatctcaagaatttctaatcaatggaaatgattcctataaataattttatagtctacagacagaaatttgtctaggtatcaaactatatggtaacccgtctctcttcccatcatgtaatatctttatatttagataataaataacattcgttttattgaagtaattaatattttctccaaaaaattccattagttaattatggttacaccaacaattgagaaaaaatatatttttaatttaattcattaaataaattgtaaactaaaagtttgttttttaattaagaagttagaagagaaaattggactttgattccaaattccgaacacgtattgtctatttttaaatcgttattagatttaatctagtaatagatttttttttcatatgtggattgttttacatttttttattattttattttacattttcatttgattttatttacagttttaagaaaataaacgatttcttttttgtattattcaaaaaaattgctttctttttatgtttacaccagaatacttaagttatgaatctttagatcaaaaaacaaaataaaaaatcacatggactcatgactcattagtatatcattacccgataaaatatgtttaatcatttgtgtaacaattattaaaattgtttttttttttttttgataaggtgaaacaataaataaaagttatacatgtacattacatccgtatatgagtgttcataattttggaaataaattagagacaattcctcttttgacagatcaaaacaagcacatcttgcaaactatgtgattaaattaaattttttggtcgtctcaacttgtgtgattaaatatgtatatgtgtactttcaaactactaacttaaggtattgttttggttttttataatccgtaattaaaaatccgaggattaaaagaaactataaaatgtaacccaaaaatatccaaataataatatttgtgaattgtgattaactaatcaatatacggtactattgcgtggtcagcttggatctcagctctcgtcggggcacatgagtttttggaatatacagcgaagaatcacgatgtgtactctcttttaatttagtttttatttctttggtttaacttttctaatataatattaatttttagcgtacggtatacacactcaattgattacaagttctcaagtctacttctcattgtaataatcagttctgaaatttttcaaatgtaaacagaaactttttttttttttaacagaaacttgtttcttgctaaatgtcattgctccacttttttcattccaaataatatcattagatgattaagattatgtattacaaaaagtagagaacctaaaacagagatgatccgtgccaaacaaaattataagaaatacaaaggacattagaaatacacaaactaagaatccttgggaaattagaatttttagcccacactaacacccaaccaattttcgatgttgtgtgttttttatatccaaccaagtttagaggttgtacacaaaaagaaaacacatgaaatattgtttttgaaagtgtgaagaaacccaagttgaaggagtctttaaaatattgatagaactttattagattttagtacgatagaattccaagaaagattacggagatctctttgccatatggtttctgtctcaatgattcgcttctatgttattgtgtaagatgatttatatatacaaatatgtacgagactcaatactacacatttccttagacaactcgaaatttattgtttattttaggaatcatatgtacttaaatatacatgcgcgtgtacatcacactctcggttttatatgaaatgcatgcaaaatactaatcctgagtttgctggtgcgattccattgattaattatcctaatttggcttaaaagaatggaaacaatgtcatcaaaatcctcaaattgtttaaaacgttaatttaaatcctcaattttccacgaaacaaaataaatatcaaatttctgtcgatttttcaaatactgtaaaataccaaacttttattgactttccaaataaataataaaattttgttgatatagccatattagacataccgttaagtgggataacaaatcctgctatcaaagttcattttctcttaatagactcgttaattgaaaatgacaacgttctctctaagaataaaacatcgtctttttgtcataacgggtcaattaaatttttaatttcaagtcatataggaatttaaggttaaagattttgctcgatttggggatccatgattgattgaatttggagattttgctcgacgtcactttgttttttttttgtttttttttcgctttgttgttatagaaaacaataacgttttgttgttatagaaagcaataatgttttgaattaacgggtatgttaataaaaaattaattttgttaacggaatctgttaatctacttaacatcatgtctaatatgaccattagcaaatattttgtatttattaagaaagtcacataagtttgatatttattagaaaaatcaacataaatttgatatttatttcgtttcgttggatgttgagaatttaaacaaatgttttcaaataaaagttggagattttagtgataattttccgataaaagaatgtcatttctttgagaatgccattacagttttaatttacttgatatgttaaaaacatttttgtgggcttaaccagggcccattaatccgagttaccaaaactcgcaactcgttaacactccgagtcattgactcagtatcttcttccaacgaaatttcaatttttcattgttcttgatgaaactgaggccacgacgaatcgcaaatg

SEQ ID NO: 4572 - DNA, 3000 bp, Unknown
  misc_feature (1)..( 3000): cDNA_ID_1824787_gDNA_ID_1620715_Annot_ID_49095 3000 nt of promoter + ATG
tggattaattaagatatcatacaaactaatcataatttgtagtctagtaccaaagtttgtattatcaccaattccagaatttatgcaagtttgccgataagtatgacaaacatgcatacatattctctttgtcttataaacccaaaatgttttagtatactctattcgtgccaaaaaaaaatatgaaagaaggtatcctccaactataatcaaacatcaccttttaaatgatttactaaaatggcacaagatcactcttgttctgaagttggttactagtgaaacatatatagaaaaatgaaaactggattagcaaaaaaaataatgtggaattaaaatgaattttaatcttctattttataatgaattgtaattggataaatggaaatgtttttcctatataagtttaaaaacataacgagacgaaaattttctaccgttaacaacaaagatgttcttgcaaataagataagcgtttttttattgcacaaatatatctataaattttagataaaatataaattcttacccattgagatttgcataatactattcagagtgttttttttccctttcgttaaagactactagtcagagtgttaatctagtaattcaccaattaatttaactatacttaaaaatattacagtttttaggaaacatgctagaaaaaacatatataattttgcaattatattattccatgcatacacatgtagagccaaaaacggagaaaaatcttctatataaacacaagttgaaaccattcatgtttattttaagcagttgcagtagactcttccacttctgtattcaattcttccttcttttttctcttataatataaataacatacaaagaaaatacttgcactcacaaatattgattaaagttaattagtgaaccctaagatttataaatctctagctatactctaccatatcatatatattacataatgtctagcagaaaatcacgttcaagacaaactggagcttccatgatcacggatgaacaaatcaacgatcttgtcctccagcttcatcggcttctccccgaacttgctaacaacagacgctctggaaaggtacaacgttctaatcaatttttcattatgattccttttaaaaaatttaatttcctctttcaaaccttaaatcttttctaaacctttttaaatcttccttggattagtagtgggtacttaaaagaacaaacctccggtttaaaaaaaataaaaataataactaatatatatcctccatcaaagtttaacagtaattctttcatctttctgttgttgcaaacaaacgagagtctttagttagaattataaataaatattaaactaatattccatatattccaatattgcatgtatgtattgattcatttgattgtgatgcattttgtgacgagtgctaaattttaatttccaaactaatcgacaataaatagcatgctgcatgcatgataattaaattgttaattatatataagatccttcttcttatcaatatattggttactttcaggtttcagcatcaagggtattacaagagacatgcagttacataaggaacttgagcaaagaagtggatgatcttagtgaaagattgtctcaacttttggaatcaactgattcagctcaagctgcactaatccgaagtttgcttatgcagtagaattagtgcaataaacgaaggatatttttttcttttcttttttttgaaaaaatgtcttctcagttttaattccccttcttattgtatttataatgtctggcagcttgtgtcccctgttaattatgcaatgttttatttttaatatatgtagggttttgtttttgtcagttgttgaacgaagcaaatggtttgggtttacgttcacattatttaaggcaacacactcaatatatgggcttaggtatttcttagattctaggcattccaaccaaatccatcacattttagtagcaaaaacattgattaaattttgaatttacgagaagaacaatgttttctagtgtcatgcatatacgattataacggtgtttttgtagttaatatcgataggaactaaactaacgcaagtcaaattttctgatcaaaattagtcgttaatttcgcttaatggtataaagtatattttaagaaggaataaaatatgctaataagcccccacggtttccatttctggtaacaagaataccattcaacgtctcgatcagcagcaacgttgaatcgttgatatctatatatagaagtatagaaccaaggggtaatttggtcattccagttctaacccacttctattacaagagcagtttactacgtaaaaacgaccggccttccactttcccgaaaacagccagcgcccgcacgtagagatttactgcatattcagttttcagtaaataaatagtccacaaaattagtggccttgcgtgtaaaaaattaaatttcgagatgctgtttaataaatgtatttattgcaaataagaaatcagatagcctttaatagttgacaaaaaatagccttttatatttacaagttcgtgtatttgttaataacgtgggattaatgagtttaatgtaatcgtgacaaaaacaaaagtgggattagtgtaatcgtgtgaatgtggacacttctccttcacggcaaaaggcacaagacgcaacaaatattttaatagaaaagaaaaaaaacgaaaacagacaacaaaacccaaaacaggaagacttaaacaaatcagaacacagtgtaagaaaaatcttttccataactgtatttttaactattcatatatatatgtttagtctctctgcagtttgaattcaaacatttgtgctctctcatctcaaaaactacactaaagctataaatcatcaatcatctaaaatcttcaaaaaggttttgattctgacttcttggttttcttttttgtaacgaattcatgatttttgagtctgattctgtgtttccttttgtttctcagca

SEQ ID NO: 4573 - DNA, 3000 bp, Unknown
  misc_feature (1)..( 3000): cDNA_ID_1824783_gDNA_ID_1620715_Annot_ID_49096 3000 nt of promoter + ATG
tttatgataaccttcgaaaagctcaagattcacctcaatggagttatttctccaaagattcaatccttgaacacatctcatatctggttccggtacaaaaactaagttaatatcacaacaagagtaaaatatcctatagcataaagtaaagtatgcatctcaagtgatgtctaaaggattaaaacctttatacctttcgtaaaattgagaggtgattgtccgattgagattgaaaagttagaatttggaggacaccgaggttgaatattgtatatgctaccatctgagacaatccctgcatcaagataatttgttgcacttcccttaaatgttgtagcctgaaaaaacacaagttaaaaaagtataagacagagagatttcacacactttcataatgcagacattgaactagaacatgaaacttaccaaaacattattcgctaaactaaacaaaaggtcagaggagttcattgcaaaaggcctccttagaagatttcttgataaaactagagaaaacataaacattagttccaatgagaaaacaatgtagaattatatgcttcatgataaagagaaaaatacctgctccaagagaatgattattcccagtgaaaagtatagttacagggcaagagttttttcgtctgcacgagtcattagtgaaattagcatcaagagcacgatactcaggacgtggaattagaatcaatggaggccatggttgtggttttgggatagcacaaaagaatccttgatcccgagtcgaatattctaaaccacaggtcatttggcatttaccatctccgagtttgtcaatgcattgacaaccacattgattatctaaagagttattgacttgtgaatcaaacaaagcttgaataaacacaagaactatgcagaggtagaaaggaatcataataagtcgaacattgctccatatattccgtttctgcaaaaaaaaaaaccaccaaagaagacaacacataaaaactaatccctagagttcccaatactacagagaatttacatgtaacaaaaatcgtacatggtcgcatatttacatgtaatagtggaattactaagggaaaatgaaaatgtcgaacctgataggttaagttttttctaagtatagcattggcacgcgtccagaaactggctgggccagaatctgccattgatatgaaagctttggtagctttcccttctttgttcttctcttttaatttttaaccatcgccaaaatacttttctttaacaataataatttagtttgatgttcaaatattttcttaggttttttatttcatttgaaaaaataaataaacattggaacttcattatatatttacaagaaactgcgaatgagtgatcctcacgaccctttcgatttgccaacatgcggatttaaaatatatattttgagagttactaataaaagatattattactattatattatagctaggtgttacgtgagcgcactatcgatataattcaaaaaatctaccaaatccttcctaagttcctatgtctatgtgatggttacttgaatgacaagtaatgtacggtccaacaaaaataatagaaaatatatgatatagttggaattgcctttttagtagacgaattgcgcgaggctttgcggtttactaatttttatgatatacttttagcttaatatcatcaacttgttgaagactcaaaagtgttttttgagtaaattttcttatttaaaggacaaacaacagaagcaaatttattctcttaagaaaatagtgaaaaaaagcctggaaaaatggttcaatgctctcttttctcaagtatttgattttcatttaaaaatcttttatttatgtttggccagttttgatggtatcatgcatgatgtcacaaccatactaactctggaattatctcttcaattttagccatggttatctgttattgataacaagaaaatcagatgatccaatagttcaatttttttattttagaattacagatcaaattttaaattttcacactgcaattttaactatgaacatagtagatcataaaccttacaaaggttcatttttttattttactttttttttttgattatacgcctccatattatgtgttttatagcaatttattgtttatacaaatcttatagaaaaacagaaacaaaataaattatagaaaaagaaaaacacaagaaattaatcatttatatgtagatgaacgtgtttattttgtccacaaaaatgtcttcaattttatattttgtcttttttgataaagattattatttttgatgaatgattttttataacatatttttgtcggccatatatatataacatttttttttttcttactaagaccataaatacaacatttgtttgctaattttagtacacagaaaagtacacattaagaattggatctcttgtttgacaaaatatactgaacaacattctttgacattcaaattaaaaatgattattaagtttgaacatggctagcttgttggactgttccaattatatcaatcaaatgtcacacttcatcattttcctatgtgaaatctacgaagccaaattttaaactaatgttgaatatcaaacgattacttcgtctaacttagaaaatagctcaaaagatctacaatataataattttaattatgtttttcaactctaataataacataatagtaatgattgcttacagtcaaagcctcaaagtaataccttttcctggtacagaagtaaatacatttattactacacggtttttgtccagaagttacgtttttccaggtagtttcgcaggcaaaatacgagaggcaaattcgtaattactcacaactccagagtcataaatataaaaaaaaaatcttacgcctctcttaaatcgtcccctccaatcaaaatcagatcacagtaagattcccaaaattcgaaaaaaaagcttcccagagagaagagaaaaaacttctctgaggcggccatg

SEQ ID NO: 4574 - DNA, 3000 bp, Unknown
  misc_feature (1)..( 3000): cDNA_ID_1824771_gDNA_ID_1620715_Annot_ID_49099 3000 nt of promoter + ATG
tcgcactcattgcagcatactatatggaccgagtttcttcatccgcgaaagacccttttttattcttgaaaaatctcatcaagaaatctccttctccacaaaggcatagcttgcagagactaggatcttctgtttccgtagaaatggagaaactagatgtcgttgaggaggtataacataatgattcacaatacatcatatgttctagttgttttgataaaaaaagaaatttattctaatcagagagcaaaagtcgagcagttgatgcttgagtcgagcacaagccatgcgattgtttgtgacaagctgaaaaaggtgtatcctggtagggatgggaacccacctaaaatggccgttggagggttatctatagctgtacctccaggcgaatgttttggcatgttaggccccaacggtgcagggaagacatcattcatcaatatggtgagtacataaatggatagaaaatcagttttgctgagcttcttattgaaaaactctcatgaataatacatatttttgttaggaaaaatagtggttaaaattaataggttttagactataaaacaattaacaatgaatggacatatgctcatatcttttatatgttagtgattaatcatctccatttttgttctggaatattccaaatatttatatgagtagatgactgggctagtgaaaccaacatctggaacagctcttgttgaaagtttggacatatgccaggatatggacaaagtatacactagcatgggtgtttgcccacaacacgagtaagtattcttgaaaacatttgaatctattccattgtatatgtgtcatcattctcttgtttctgttgtgtgctagcttgctatgggaaacactaacaggaagggaacatttgctcttttacggaagacttaagaatctcaaaggctctgatctcaaccaagtatgttatcatcttacttgtttcctacattaatactccaaaagtatcaaaacgttaactcatggttactaggctatagaagagtctcttaagagtgtgaacctatcacgcgaaggggttgctgataaacctgctgggaaatatagtggaggcatgaaaaggcgactaagtgtagctatttcacttattggaagtcctaaggtacaccattttctcttatggctaacccttaattcatatgatttaattagaaagctagctttaacaaatatattttttacatttggcttaattctttaaaaggtggtttatatggatgagccaagcacaggacttgatccagcttcaagaaggagcctatggacagctatcaaaggcgcaaaaaaacacactgcaataattctcactactcactcaatggaagaagcagagtttctctgcgacagattaggcatttttgtagacggaaggttacaatgcgtagggaatccaaaagagctaaaggcaaggtatggtggatcttatgtgttaacaatgacaacatcatcagaacatgaaaaagatgtggagatgttaattcaagatgtttctccaaacgccaagaaaatatatcacatcgcagggacacaaaaatttgagatcccaaaagacgaagttcggatcgcagaattgtttcaagctgtggagaaggcaaaaggaaattttagggtgtttgcttggggacttgcagacacaactcttgaagatgttttcattaaggttgctagaactgctcaggcctctaatgtcttctcatgaattacattatcatttttttatttgttcaaagtcaatatttgattgttcatgtttgatcaaattgaccatgcataggtttgattcatgtatattatcgtaataaatcgttttcaaggttgtaaatttctttgaggttcttataacttgtttatttgtagatgatttatgtataacaaattaagtaaattcctacaaaaagagaacaacgacacggagatgttagctcacttggttacatatggtatttcaattatttacagtttgcaccattattcttaaacatatggtagatcatttggttaaagttacgttgtacccaatatataattaaacaatatacggtaagcgtatatctcacagcattgtttaactttggacacttgacgttatagagatcgacgtcgttctaacgaaaaggccctatagtcaactaaattctttagatcgtaagatcttcattattttatcatcattatgtaacgtgattacgtacagatacgagaacatattttcccataaaaaattcacgtctccccgtaatcttacagtaataattaacattataaattattctttgtaaaataaacagctcattctccacataggttgaagaatttataggtcgtgggatcattcatttacttggaaactttcttgtaaaactacttggaattatttttctttgtcgacacacttaattgaagatttcgttggttgaaattacaagtaacaaatcattaataccataattcatggacacaactttaaaaaatgcacactagtggaaataaaagcgtgtcatatggatcttattgtgaattcatcaggacccaaaacaaaaggaaagataacacagaaaaacaaacaaaatcaagattacaagattaagcttcatcaatggggaatcatgttcccgcgggtttctttacgcaggctaattccttgtttagaaagaacttaacatatcaggtttggccaaacaattcatgtgttatattttaagaataatggtgcaaataattacttgatacaaaatccattgtaaaatgtaattatatcttctttttttttttggtttaaaatgtaattatatcttgatactaaatatccataattggtttagaaacggaacatatggagcaacgttcggctcatcgtgatccctttctacctctgcgtactgctagttggcattcaagtcttgttcgatacacaagttaataactctgctgataatcgatgtggttgtcgatgcatcgacaaaa

SEQ ID NO: 4575 - DNA, 3000 bp, Unknown
  misc_feature (1)..( 3000): cDNA_ID_2993832_gDNA_ID_1620715_Annot_ID_49101 3000 nt of promoter + ATG
gaaacactgacagggaaagaacatcttctcttttatggaagacttaagaatctcaaaggccatgatctcaaccaagtatgttatcattatcaatcttacttctatcttatattagtgcaagagtcttaaacgtcaattcatggttaaatattaggccgtagaagaatcactaaagagtgtgaacctatttcatggaggagttgctgatatacctgccgggaaatatagcggaggaatgaaaaggcggcttagcgtagccatttcacttatcgggagtcctaaggtacaaaattgtatcttactcatctcctaacaaaaaacttattgaagcccttatttgaatgtgatttagagagctaaagtttttcaagctttaacaattatttttggtttttatattaaataaaaggttgtttatatggatgagccaagcacaggacttgatcctgcttcaagaataaacctatggacagtcatcaaacgcgcaaaaaaacacgcagcgataatcctaacgactcattcaatggaagaagcagagtttctctgtgaccgattgggaatttttgttgatggaaggttacaatgcatagggaacccaaaagagctgaagggcaggtatggtggatcctatgtgttaacgattacaacatcaccagaacatgaaaaagatgtggagacattggttcaagaagtttcctcaaatgcaagaaagatatatcacatcgcagggactcagaagtttgagttcccaaaggaggaggttcgaatttcagaagtctttcaggccgtggagaatgcgaaacgcaatttcactgtatttgcttggggatttgcggacacaactcttgaagatgttttcatcaaggttgctaaaaccggcctttaactaatgtcttcttttgaatacttttaagattattagttatgtctgttccacgtcaatattttgcttgttcatgtttgataaattgataatgcagaggtttgattcatgtacattgttggctcttcgcctgcaagtttgcgaattagtctgaggtcttgtattagtttgtttgtggatgatgcatgtaaccacaatttttttatttaaacgtggctatatttaattgtggataaaccactgaatatgaaattttatttcatctaccattcagatcctaaatgtatatcttaccatttaattcatatagggtttacgatttaaaatttagaatttcgaaaatagtatctatattaaaagatagtaattaggtctttttttcattgaattttacttaaacattggtaaaatttcatatgccatcgaaaaaagaaaatatcactgaaaactatgttagctgccggagacaacatttctaaaaagaaagacaatttttaaaaaagactacaaaatactctgttgttcctttttgtttgattgtttagaaaaaaaatttgtttttaagaaattaattttttaagttttccatgcaatatttattggttaatattggtgaattgtaattttcaagaaaaatagttagttatcattggtttagagttataaaaaattgtaaaacactaaaaataatacatttataatcaaaatttaatatgttttcttaatatatgtgtttttctaaacaatataaaaaaaggaacagagggagtataaatcaaaactgttaaaccaaattttttaccaattaaatcttaattatatcaattggttcttctccgaaataagaaattgtcttgatgtctatgaaaatcacaaatttcactaaaaatttatggaggattcctaattaactttagaccaggaatttttcaaaaaataaatttaaagatgacattatcatgaacacattcaaactgaaatcaaaccaaagtaaatttattttccctgtaatggaccatagagtataaagtatttaaaactgctacttattaaatcaaagacttttgtgttttttattgtgtgcaaagactttttatgtttgaaaactgaaataagactgctagtaaaaatataaactgaaataagaatttttcttaggacatcataacatttttgcttcttgtccaagtaactgccacattggaaaaaaatgtttagatttgaacaaatctttttaaaatggtcaaaaaattatcatagtcaaccaaattacccgacacttttacgtgagacattaaaatagactagtttaatcgattatgttcacacgtgattacgtctgagatgacgtatgaatcatctttatacaaatacaaatatacagtaaacaaataattgaaactcacctcttccactagtcgaagaatctattggtcgtggcatcactctccttcgcagcttcctaccaaatttacattgaaaatattctccattgtcactttctcgatttcgtaaaattacctttttgttatttgaccaaaagaataaccccaaaaaaacaatactaatatattcgagaaaaataactaattaaaggtatacttaacgagaaattaaagcgtgtgcacaagggtattactgtaatttcacattccgtatctgatctctgttcttctttcctccgcctgctataaaccaaaaggcggtgactcgatttgttccttctaagttcaaaaattgggtttccattaggattcaatttttactaaccctaaaaaacagaatctaatacacagagaaaagcgaaggttgttaccttcatcaatggcggatcctggtcctgccagtttctcaacgagagccaatgccttgcttaggaaaaacttaacctatcaggtactttttccgttttcttttcctctacgcaatccaattatacacatacaaattttcgtttaatgtgagtaagattctgttctgggattttcgtttaatagatcagtttccacaacaaaattagtggctgatttattgagtagattctgttctaattatgtctttgtgtaaattgtgtgttggtgtagaaacggaatctatggagcaatatacggctaatc

SEQ ID NO: 4576 - DNA, 3000 bp, Unknown
  misc_feature (1)..( 3000): cDNA_ID_1838776_gDNA_ID_1620715_Annot_ID_49104 3000 nt of promoter + ATG
caaatatggcaagtcctggatagaagaaaatcaaaggcaagtgctgtacacagtacataatgtttctaaaatgacgtgcagaattaaaaacaagtttgtagcaattcagcagatttgcattcgcatcataaaagttggtttgtgtgtctgagattctttagacgttcaaaaatacatgcatgttatcctagattataccaaaataaagttcaaatactttatgcttagagacaatttcctcgaatagatccgatttctatagagaaatctcattacaagcaaaaaaaacagaattttcatttttctttattgcgaaacataatcattcttacttttgctcctgcaaattttttataatcgagcttatcaaccagttcatgttctatagatatcagcgccaaaccattcaatcgctcttgagatatagtcgaacgtaaataattttttatgagttttaattttaaaaaatttatcttcgtggaagcaactgaaaccagaatggtgagtagtatacgataaacgatcaatgtgtttggataacaaccatccattcttttcaaaagttccaacacttcgactagaagatagaaaacaactagtgtaagagattaatgtggagaagaaactaaaatatattttttatagagttttgatagtgatgaacaaagaagaaaaacaaatcgttgtagaatagagagaattaatgttttgaaattaaattgtttagtaaataattatttaatttttattttgagttttcgtttttgtttaaatgccaaaataaacattataaggaggacacaccactaaaccactacactaaaggaccttctcaaatttgatgcccctaattttttttataaaatctgctgtcggaaacctttgctttttgggcttctgcttcgggccgggcttgtgcgctatagaagtaaaagagtaaaattcatgaaataaagctattagaacatatccattcaaaattccaagttaagatattcccattaaaagtaattaaattaaataaataaaactatttttcaagacaaatcttttagaactagtttttatttgagaattctatggttctacattagaaacacactctctctcatacacatttttttagtggctaacattgtttgtgataaatcaaaattttttttaatttaaaatattaattagatagtttagatatcattagttttaattctttcttttatatatcatcaaaaaaatttatctatatattcaagctccattatgcatgaatttaacttgtatattaatattatttttatttatagtattacttaagattaatgcaatattaaattaacattgtcttagtgaataaaataatataatattaaaacaacttaaattttgcgtattaaatatcaaaatgttgaagggcaattggcaaaactaacgcacaaaaatattataattaagaaaatgacatcaacaaaagagatggctgatatattttgtattttgtatactatttccaattttgcccatttctctcttttcttttcctctttcctctctctttttcgatattttttctccagtctaattgtaactctctttcttctctcttctctctctctctctctctctctctctctctctctctctctatccgtttgcatcaccgatgacgtctattaaagattccaacttctttgatttgcccagaaaatgtttctgtaattctattaacttatcctacaaacaaaccaattcattcgatttcgatttgtttgtctgtttaaactattgattaacgaatgggtaaaaaaaactgtcagaatgttaccatcgtcaacgtcaccgctacaattaatcttggttatttgggttgccaatgttgtatcttagggtatagtattttttgatcaaagcggtttaattcagtcatttggatctacgttttgttctatactatttagtttcattctatactattttatttgtctgttttatacaaaacattattcactattttaaataatttgtattaaattataaaaaatttatgtttttataaaactattttaaaatttaattagttatttttatagcactaattcaacaattaaaatcatttggagtaatattatttttttaacattggattattgtctcttcttccacacatctcatcacatcctctttagcgcgtgtctctcaatgttgtaccattttgtcttttcactacttcaatatgttagtttcttaatatttttgaatatagtgttatattattaattttatattagattttggttatacagcaaattcacgcaatgttgaaatatatgaaaaaataatttttaattctaaaatctcagtctttttaaatattgttttgcctttcctaagatcatcgagagagaagaaaagggaaaacaaaggatcttccatgggcgatcgctgagaagatccgcaagaacaaaaacatcaaattccttgaaatcaggaatcttattcgatagtctatttgagcccttgatctggtaagctctgtctgatcttctaaagtttcgctttttaacttttggggaaatcatccacctttgtatcaagtttctggcaatttcttctctgtagttagaatcattcaataagccctttaatctcttcgacgcagctagtgttgaattacatctgggttttgtctactttgtgtcaaaaccatgcttttatgtttgattttcgcgaagtatgatttaggttcgattttagtgaaagaaagacttaacagttgtagttaactgaaactatgcgatatctgattacgttggtgttatgattttattggaagggttttggaaatgattccacattgtattgtagatctcattgacttttggtttttgatctgtttctcaatccagattctttatactttagtttaacaagtgacaaactttgatctttgattggttcaccaacgtctttgaaggttttttatttggtgaaagttttgaaatg

SEQ ID NO: 4577 - DNA, 3000 bp, Unknown
  misc_feature (1)..( 3000): cDNA_ID_1824753_gDNA_ID_1620715_Annot_ID_49106 3000 nt of promoter + ATG
tagatataaaatattcgaatatcctatgatcatttctatttgacaacatatccaatgattatcataataattattaaatttactaactatgttaaagagtaagtagttaaataaatagtttggtagttagtatcagttatcaaaccagagagaatcttttagactcgatcaaacaaagaccttccattacaaaacctcaaaagttgaagtcaataaaaatctcttacaaccacaacaacttctcagattcttcttcgctttgttgttcgttctcttcttcaagctctctgtctctccaaatgggcgacaccggtagacacaaatggttctccttccaccaccaccgttcagcctccgccacaactatgccacaacacaacagccccggcgaaactccaacagagttcctctgtcccatcaccggctttttgatgtcagaccccgtcgtcgtcgcttctggtcaaacatttgaacgtatctccgtccaagtttgccggaatctcagttttgctccaaagcttcacgacggaactcaaccagatttatccaccgtaatcccaaatctcgccatgaaatcaacaattttaagctggtgcgatcggaacaaaatggaacatcctcgtcctcctgattacgcttacgtcgaaggtgttgttcgtacccgaatggattcacttcctccgggttcgggtcatcggatcgctaaatccgaaatcttaccaccggtggctgagaattcaaattcaaattcagattacgattccgtgatgggagcgattcgatctcgttcaaggacttcattatcgtcaactacttctcttccacttcaccaaacccgacccattaatcactcgacccggatccaaagctcattctctacatcggattattcatcttttcctccgatgtcaccggaagaagaagagatctacaacaaattgacaagtgttgacacaatcgatcacgagcaaggtctgattcagctaaggaagacgacgagatcaaacgagaccacgagaatctctctttgtactgatcggattctctcattactccgatctctgatcgtttcacggtacaacatcgtgcaaacaaacgccgccgcgtcgattgttaatctctcgttagagaaacctaacaaattgaaaatcgtacggtcaggattcgttcctttgttgattgatgttttgaaatcgggatcaacggaggcgcaagagcatgtaatcggagctttgtttagtttagcggttgaagaagagaacaagatggtgatcggagttcttggtgcggtggagccgcttcttcacgcgcttcgttcatcggagagtgagagagctcgtcaagacgcggcgcttgcgctttatcatttgtcgttgattccgaataaccgaagtaggctggttaaagccggtgcagtgccgatgatgctgtctatgatcagatccggtgaatcggcgagcaggattcttttattactgtgtaatctggcggcttgttcggaaggaaaaggtgcgatgcttgacgggaatgcggtgtcgatactggttgggaaattgcgagaaagtggaggagctgagtcagacgcggcggcgcgtgagaattgcgtcggggctttgttgacgttgagtgtagggaatatgaggtttagaggattggcgagtgaggcgggtgcggaggagattttgacggaaattgtggagagcgagagcggaagcgggcggttgaaggagaaagcttcaaagattctacagacattgagaggcggagggagtgaattcggtgaaggagcggaggcgcgtgagtggaaccgtatgttggaagcgagtgggctaagtcgttctcagtttcaacaaggagggcaaaaagggggttttgcttattcctctcagttttagctctattcaatttttttattttcattttcttatctcttttcttgttggtaaatttttttctcaaatatttgtttttttttcactcttttttgtgactaatattttgggagtgaatttgtaatatctgattttaatcttctttaatttgtcatttctaatgaaacgacaaacagtaaaatgttgattatttcgtttgtaaagagttgctcttgtttaatttgtgaaaacgttagacaaacaaaagtcgtctcgtggagagttactctgtttggtgtaccgtcttcagatcttttgattaaagtacgtaatataagatttggaacgaagatttagtcgttggtcaaataattctaaggtcaacgtttcaaagtgtaccaagttggaatattctacaattattttgcctgaagtcatgtaatccaatcgccaatttgccattcgtcatgcaaacacgtcatgggtacatagccacacatactctatggaccctatttatatgttacgagaatagctggacgtgttgaatcttctttctgctagagaattaaccacgagcgaattacactagtgttagacagtgtctggtacaaccgtacaagtgacaacattccactattaattagaaattaaactcttgttgcatggtaagaaacaatttgtttttaggttaacttttcaggagttatggactgagaggcccatacatctctccatggatatgaaacaatttttgatcttttgcttgatgccttaacatgccagaaataaaaatgctaggtgacattttctttcttttttatttttattatgctagatgacattatcattgaggcataaccgttgtattggtttagtattgccgttgttgcttctcctgaactcagggactttaattttattgaaccggcccctggattgaataaaaaaataaaattttgcacccaaaacccaaaacaaaaaaaaaaggaaccggatctaatttataccgagaatttagtcaaccggcccagatttcactaaattttgtgggtaagaaataaatcacttcaaaacaagaagagtaaaccgatctgaatattgcaccggtcagtcgttttcctacgag

SEQ ID NO: 4578 - DNA, 3000 bp, Unknown
  misc_feature (1)..( 3000): cDNA_ID_2992641_gDNA_ID_1620715_Annot_ID_165628 3000 nt of promoter + ATG
agataaagaaaaagaagtgaactcttccttatcgctctgaaactcctccaaatacgctgaaaatgctggccatttggttgggaaagacaccatcttcattaggtctgaacagtctgtgaaaaacctacttcttggttgtcggcaccaatcatacacttcattgtccagaataaagcgtcgacttcaaattatctgttaatgaaaacatttacactatttctttgaattttgcatttaaattattttgttaaaaaatcaaaagtcaaaaacttaaatcttttagatgataattcttgatattaaaataaaatgtcagaacaaaatttatgaaattcactcaaaattcatagaaaaaaaaaacactgaaactattcaatatattttatttgttttgagataggtgtcaaatgttttattcgaataacacgtctagttaacgtgaaaggtgaagccatgcactaatcacatcgttaatatcccctaatactatcctaatactatacactagaatttttcaaaacgacagtgtttttctgtgacaaggtaaagagaaagaaatatctcccaacctgtcaacacttaaaaaaagacataaaagtctgtggcgaccaaaagaagtgagagagaaagagagagatatgatattattaagtagtagtataagcctctcaagaccagtttcttctcaaagcttctctccacctgctgccacttcaacaaggtatggttttatgttttgaatcacaacttcattagctccgattaacctcaagatcattaatttagttataggtttaggaacaaagttacagaatcagatcctggaatggaactatcttggattatagagattcttggtttactgatctcagaaattctgttttctcttggtttcacttatgacaggagatctcattcctctgtcacagtcaagtgctgctgttcttccagaaggttgttgaagaatcctgagttaaaatgttccttggagaatctctttgaaatccaggctttgaggaagtgttttgtttcagggtttgcagctattttgcttctctctcaggcaggccaggtatgttggagccgacattgctataagcatgttcgattgcaaccacaagcggtctgaaatttctgagtttcttctggcagggtatagcgttggatctctcatctggttatcagaacatttgccaactagggagtgctgctgctgtgggagaaaacaagctgactcttccatctgatggtgactcggaatcaatgatgatgatgatgatgagaggcatgactgctaagaactttgaccctgttaggtactctggaagatggtttgaagtagcttctcttaagcgtggatttgcaggtcaaggccaagaagactgtcattgcactcaggtaattgtttcttcaagtccacaaattgtgaaaacacatcctctgctaacatagtgtgagaacctttcaactgttgcagggagtatacacgtttgatatgaaggaatcagccattagagtagatacattttgtgttcatggcagccctgatggatatataacaggaatcagagggaaagttcaatgcgtgggagcggaagacctcgagaaaagcgagactgacttagaaaagcaagagatgattaaagagaagtgtttcctacgatttcccaccattccttttatccccaagttgccttatgatgtcatagccacagactacgacaactacgcacttgtttctggagccaaagacaagggctttgttcaggtgattctaagagaaagaactcatgagtttgagaaatatctcttgcactgatctcttatataaacctaatgtgtttgatatgttaggtatactcaaggacgccaaatccaggacctgagttcatcgcaaagtacaagaactacttggcacaatttggctatgacccggaaaaaataaaggatacaccacaggactgtgaagtgactgatgctgagctagcagccatgatgtccatgccaggtatggagcaaacactgaccaaccagtttccagatcttggattaagaaagtcagtccagtttgatcccttcacaagtgtgtttgaaaccttgaagaaacttgtaccgctctatttcaaatagagcaagcttctttgctcaaattcttatgtagactataatcactgtccatatatacatatcttccagaatcaaaacactcttctgatcataacaccattgattagagaagttgcatacactccacagagaaaccaaaagtactaatcttgatgcgccaaaagacaaaaaccatcaacaacaaacacaaagatatctctttagtattagcgattttatcccacatcggatcttaagtggtatatataagatatgggtctctccacatattgtcaattggttttaggttggaagtccacaatctaatatggtaccagagcccgatccgcacatactcaacccaatccacatcggccggacccaatacttggatcggatcttaagtggtatatataagatataagcctctccacctattaccaggtaggttggaagcccaccgtctaatatttagtactcacaataccatataagtaaaccaagcaagatactcactttcggagtttggatatctaagtgagatcttcttctgcttcttcgttagatcgcactaaaataatctggagaataaatcaaaacggagaatatcaacgttgagaactaccccgtgaagcactgatacctagcactaccaaacccaaaaggtgtatcaaaattcttgaatattaaatgggctttttaaacatatattattgggtttgcaagggtgaaaggcccaaattcgtcggtagatacttaaaacaaacgacacacgtttctaacctctcagagcaaaacgtcatgcaagtcgaaatcccatcgccgtatgatcacggaagcagaaggcaacggcgaattcgacgaacggaagaaacccaaaagcagaagaagatg

SEQ ID NO: 4579 - DNA, 3000 bp, Unknown; identical to SEQ ID NO: 4576
  misc_feature (1)..( 3000): cDNA_ID_1838776_gDNA_ID_1620715_Annot_ID_165620 3000 nt of promoter + ATG

SEQ ID NO: 4580 - DNA, 3000 bp, Unknown
  misc_feature (1)..( 3000): cDNA_ID_3073689_gDNA_ID_1620715_Annot_ID_165617 3000 nt of promoter + ATG
actcataagtaacaaattaagcattcattttttttttggctagatgactggactcgtgaaaccatcatcagggtcagcttttgttcaaggtttggacatatgcaaggatatggacaaagtctacattagcatgggtgtttgcccacagcacgagtaacaaattaaattcttgtaacatatttgttgttgttgaatgaagatcattattaagtttacgtgtttcctaacaatcatatagttattttattgttctcttatagtcttattgttcgtcattgaccagcttgctctgggaaacactgacagggaaagaacatcttctcttttatggaagacttaagaatctcaaaggccatgatctcaaccaagtatgttatcattatcaatcttacttctatcttatattagtgcaagagtcttaaacgtcaattcatggttaaatattaggccgtagaagaatcactaaagagtgtgaacctatttcatggaggagttgctgatatacctgccgggaaatatagcggaggaatgaaaaggcggcttagcgtagccatttcacttatcgggagtcctaaggtacaaaattgtatcttactcatctcctaacaaaaaacttattgaagcccttatttgaatgtgatttagagagctaaagtttttcaagctttaacaattatttttggtttttatattaaataaaaggttgtttatatggatgagccaagcacaggacttgatcctgcttcaagaataaacctatggacagtcatcaaacgcgcaaaaaaacacgcagcgataatcctaacgactcattcaatggaagaagcagagtttctctgtgaccgattgggaatttttgttgatggaaggttacaatgcatagggaacccaaaagagctgaagggcaggtatggtggatcctatgtgttaacgattacaacatcaccagaacatgaaaaagatgtggagacattggttcaagaagtttcctcaaatgcaagaaagatatatcacatcgcagggactcagaagtttgagttcccaaaggaggaggttcgaatttcagaagtctttcaggccgtggagaatgcgaaacgcaatttcactgtatttgcttggggatttgcggacacaactcttgaagatgttttcatcaaggttgctaaaaccggcctttaactaatgtcttcttttgaatacttttaagattattagttatgtctgttccacgtcaatattttgcttgttcatgtttgataaattgataatgcagaggtttgattcatgtacattgttggctcttcgcctgcaagtttgcgaattagtctgaggtcttgtattagtttgtttgtggatgatgcatgtaaccacaatttttttatttaaacgtggctatatttaattgtggataaaccactgaatatgaaattttatttcatctaccattcagatcctaaatgtatatcttaccatttaattcatatagggtttacgatttaaaatttagaatttcgaaaatagtatctatattaaaagatagtaattaggtctttttttcattgaattttacttaaacattggtaaaatttcatatgccatcgaaaaaagaaaatatcactgaaaactatgttagctgccggagacaacatttctaaaaagaaagacaatttttaaaaaagactacaaaatactctgttgttcctttttgtttgattgtttagaaaaaaaatttgtttttaagaaattaattttttaagttttccatgcaatatttattggttaatattggtgaattgtaattttcaagaaaaatagttagttatcattggtttagagttataaaaaattgtaaaacactaaaaataatacatttataatcaaaatttaatatgttttcttaatatatgtgtttttctaaacaatataaaaaaaggaacagagggagtataaatcaaaactgttaaaccaaattttttaccaattaaatcttaattatatcaattggttcttctccgaaataagaaattgtcttgatgtctatgaaaatcacaaatttcactaaaaatttatggaggattcctaattaactttagaccaggaatttttcaaaaaataaatttaaagatgacattatcatgaacacattcaaactgaaatcaaaccaaagtaaatttattttccctgtaatggaccatagagtataaagtatttaaaactgctacttattaaatcaaagacttttgtgttttttattgtgtgcaaagactttttatgtttgaaaactgaaataagactgctagtaaaaatataaactgaaataagaatttttcttaggacatcataacatttttgcttcttgtccaagtaactgccacattggaaaaaaatgtttagatttgaacaaatctttttaaaatggtcaaaaaattatcatagtcaaccaaattacccgacacttttacgtgagacattaaaatagactagtttaatcgattatgttcacacgtgattacgtctgagatgacgtatgaatcatctttatacaaatacaaatatacagtaaacaaataattgaaactcacctcttccactagtcgaagaatctattggtcgtggcatcactctccttcgcagcttcctaccaaatttacattgaaaatattctccattgtcactttctcgatttcgtaaaattacctttttgttatttgaccaaaagaataaccccaaaaaaacaatactaatatattcgagaaaaataactaattaaaggtatacttaacgagaaattaaagcgtgtgcacaagggtattactgtaatttcacattccgtatctgatctctgttcttctttcctccgcctgctataaaccaaaaggcggtgactcgatttgttccttctaagttcaaaaattgggtttccattaggattcaatttttactaaccctaaaaaacagaatctaatacacagagaaaagcgaaggttgttaccttcatca

SEQ ID NO: 4581 - DNA, 3000 bp, Unknown; identical to SEQ ID NO: 4573
  misc_feature (1)..( 3000): cDNA_ID_3073693_gDNA_ID_1620715_Annot_ID_165612 3000 nt of promoter + ATG

SEQ ID NO: 4582 - DNA, 3000 bp, Unknown; identical to SEQ ID NO: 4572
  misc_feature (1)..( 3000): cDNA_ID_2166760_gDNA_ID_1620715_Annot_ID_165611 3000 nt of promoter + ATG

SEQ ID NO: 4583 - DNA, 3000 bp, Unknown; identical to SEQ ID NO: 4578
  misc_feature (1)..( 3000): cDNA_ID_2992641_gDNA_ID_1620715_Annot_ID_49108 3000 nt of promoter + ATG

SEQ ID NO: 4584 - DNA, 59 bp, Unknown
  misc_feature (1)..( 59): cDNA_ID_1824741_gDNA_ID_1620715_Annot_ID_49111 3000 nt of promoter + ATG
ctttttgttttcataaaggagcctaaacttgggcgtcatatggtggacaggctcagatg

SEQ ID NO: 4585 - DNA, 3000 bp, Unknown
  misc_feature (1)..( 3000): cDNA_ID_2157010_gDNA_ID_1620716_Annot_ID_49112 3000 nt of promoter + ATG
cacaagcaaccagaacatcaggcttcccgccccatttctccatcgcttgtttccttgtttctttaccaatcaccgcgtgaaagtctctgaccatcataggataaggatgaggacccgcaacggatcccaatatgtaatgtgtagtctccacattggtcacccaatcccttatagcttcagaagttgcgtcctttaaagtggctgttccagagtggactccccttacctacaagcatcagacttagataacaatttgaaagcattgcgattttgcaaggtttacgcagagaattcacatcacctcagcaccgagaagacgcattctgaacacattaagagcttgtctctccatgtcttgagcacccatgtagataatgcactgcaaaccgaaacgtgcacacacagtagctgtggctacaccatgttgaccagcccctgtctcagcaataattcgtttctttcctagacgcttggcgagaagagcctgagccacagcgttgttgatcttgtgagcaccggtgtggttcaagtcttcccttttgaggtatatgagcggcccttcaccgttttcacggcggtaatgctccgtgagcctctctgcaaagtaaagaggactttcccgaccaacgtagtctttcaagatctctgctaattctctctacagattcatcaaacattagttagacattgcccaacaaacgaactaaccaaaaagacttctaacttacatcacacagaagcatgtaatgctgaagaaactaagaatatgaaatgaatgtcgtttccagatttctggaaaaatacaacactttcccagaattacatcctacatcgcaaacaaatcgatttgtcccatacggcttaacattgtttggcagattattttttagaattggaacaaaaaaatccgttttttaaactttatcactagccatggcaatgacaacgcttgaatcagaaactcacaaagccaaatcatttcgaatcgattcaaaaactatgaacaagatggaaacaaaatcagcaggcatacctggaaatcttcgtcggtggcgagcgaatagaaagccgtttcgagttcagagagggcgtgcattagagtttcggggacgtacttgccgccaaacttcccgaaacgaccgaatgaatcaggtcgttgccacatagtcggatcagatccagcggccttaatcttctccgagtccgccatgacaacagctgggtccttagcgatggtgcaggagacggagaacgaagaagaggaccgtgagcgagccgatggcagaggcgtaaatttggggagtttggagggtgatctcagatgggttaattcggaagaagctgaaacggaggagggtctgaaagtagcagcggtgcttgcggtggccatttagtgaatcttttatctagctttcaaacacgaagacaaatgttttgctgacaaaaaccttgaaagtgagggttctttttatagattcgttatgtaacacttaagttttttgaccagaaattcaataaaatagtggaggaaatcggtagttcggtaccacgttaacttatttgtgaacaacagaaaatgagagaagagtcagaagaggttggtgagaatagggcggtgtacattttgggggttggagtgtttatcacatgcctaattttagtgttatctattttcttttggtaaacgtcctctttggacaaaatgacgtatagcagtttttgctaatatgattcaaaggcttctaatagtgctaatgaacgacgtactactactcgttttgtttttggtggagttgataaataaaaggattacaaagacatgtacttatggttaaattaatacaaatgaactaactatatagttttagtttaatttcatgatttttaaacgttttccaaaactttattaagtttcttgtattttttattttgtacttaaaataataaaatgtggttgatcttttaatgaccaacatgcaaatagtcaaaatgacactaatcgattacatattcgaaccaaaaaaaataaatatcaaatcggtaaggtttgtctcttatcgattttaccgtcttaacttgtcatttaggcagaccttgttggtccgatgaaccaccagcctctgatccatttatgatttacacacgtgcattaaacaccagacgaaggcctttgagtcgttgaagctaaaaaatgaatggtatatgcatgcggactcactcggaagcctctccaatgtgcattgctcgactctaactccaacaaagtgtacgtaacgtaacaatcttaacgacaacctaaacaactaatagcaatcacaattccttaaagcattcgttagtgtaccatgtaaaattccttgaaccattcattattgacttatagtaccatgtaaaaaattccttaatccatatatcaagccatgtttttgtacaagaaaccaatttgacattttgaataattagattctttatttttattttttttaacttaaattttgaaataaaaattaacaatccataatgtagaacgtgatgtctctaaatttgataatgtccgaacttatttgcatggatgtttatatattacactagaactcgtattattgattattaatttaaacgaagtatcacgaatttaaactatattttcatactttgtctttcacacccgattttccgcgacaaatgcaaaatccagatactgaaaattatgcaatattaaaatttgaaaaaattgaaaaagtgaaatactaataaaattgagcgacacatttctgattccagtcttaactgttacactttcgagtgtcagatctcgtctttcttctccaactcgtctatcttcttctccgattaatctaatctctcgtcggagatttagaaatgagcacacctacaacttccggttcggcggcgaaaccgacgagaccagcacggtcgtcgagtttagcaactaggtcatgttccaattccggttccctcacttcgttccaagcaatg

SEQ ID NO: 4586 - DNA, 3000 bp, Unknown
  misc_feature (1)..( 3000): cDNA_ID_1455932_gDNA_ID_1620716_Annot_ID_49113 3000 nt of promoter + ATG
ttcgtgagaatttcaagctacttgcttgtgcgtttcatcagcatagcaaatgaggagaaaggtccaaaagcactatcaaccactaacagatatgtctgagctgctgatgacatttacaaggaattgaagagcttatggggtttacgtttacttcactacaggaccactttagattactagaaaaatgtagctaccttgtaaaaaatgacgtgtctcaaacacgataatagtggaattagattaattagagaaagaaaagatagctaccttgtcaaaccggcaggtctcaagcacggtaatggtggaatcggttttttccttaattaaaccgcttgaatgtgatgccaatgcagtcagggtctcagccgcagcttttcgtgttacccaatctgtacttccaaggcaatcatggatgctttctagcaatgactccaagctctgaggtgcaatggctcccacctgaatcaaagtaattgctctttacttctctttttcataaacagatttaaccactaaacctactagcattgaactaccagaagtaaagagagagagagatattaaacccctcaaaatttcactgagacttgtatgctcaaatcaaacaataaacttcagcaacacctaacagaaaaagtgtcggattaagactaaaacctcaagcagtgttatttactaaaactttgtgttctacttactgacactgatattcaaaattcaccatattcttccatttgctgtctatagcatgacaaggaggagattataaggattctgggcaaacctgagagagacttgaaacaactggcaaaagggaagccttagcaaggaaactggaattgctcaatagcttgcaaattctagggcaaagcttttggaaagaagtaactggaggactagcagctgattcaaccatcctagccatacacattgaagctccagattgtaccactttgttctgctctcccattgcctcaaacaatggcttaacgaacaaacccaccgctaacgacgctgaaccagtattagtcccctcttcttttcccttgagataaatcccagacaaagcaccaatcgtatctctacaagcatccctaactccagaatcagaatccttcaaccgtttaactatctgagcgatgattttagtgagatgcgcagccgtcgaatcgcaatggagactacaaacgtaggagagaagatggagacactccttcttcactgcaggtttcggatcggagcacgaatcgtagagacaattgagaaacatcggtagggtttcgggagtgagagattgaatagttttctcgagatcctcgacggcgatctggtatgtatctcgatcggcgagcttagagattgaggtaaggatcttttgcttcagctccaccattgcttggaacgaagtgagggaaccggaattggaacatgacctagttgctaaactcgacgaccgtgctggtctcgtcggtttcgccgccgaaccggaagttgtaggtgtgctcatttctaaatctccgacgagagattagattaatcggagaagaagatagacgagttggagaagaaagacgagatctgacactcgaaagtgtaacagttaagactggaatcagaaatgtgtcgctcaattttattagtatttcactttttcaattttttcaaattttaatattgcataattttcagtatctggattttgcatttgtcgcggaaaatcgggtgtgaaagacaaagtatgaaaatatagtttaaattcgtgatacttcgtttaaattaataatcaataatacgagttctagtgtaatatataaacatccatgcaaataagttcggacattatcaaatttagagacatcacgttctacattatggattgttaatttttatttcaaaatttaagttaaaaaaaataaaaataaagaatctaattattcaaaatgtcaaattggtttcttgtacaaaaacatggcttgatatatggattaaggaattttttacatggtactataagtcaataatgaatggttcaaggaattttacatggtacactaacgaatgctttaaggaattgtgattgctattagttgtttaggttgtcgttaagattgttacgttacgtacactttgttggagttagagtcgagcaatgcacattggagaggcttccgagtgagtccgcatgcatataccattcattttttagcttcaacgactcaaaggccttcgtctggtgtttaatgcacgtgtgtaaatcataaatggatcagaggctggtggttcatcggaccaacaaggtctgcctaaatgacaagttaagacggtaaaatcgataagagacaaaccttaccgatttgatatttattttttttggttcgaatatgtaatcgattagtgtcattttgactatttgcatgttggtcattaaaagatcaaccacattttattattttaagtacaaaataaaaaatacaagaaacttaataaagttttggaaaacgtttaaaaatcatgaaattaaactaaaactatatagttagttcatttgtattaatttaaccataagtacatgtctttgtaatccttttatttatcaactccaccaaaaacaaaacgagtagtagtacgtcgttcattagcactattagaagcctttgaatcatattagcaaaaactgctatacgtcattttgtccaaagaggacgtttaccaaaagaaaatagataacactaaaattaggcatgtgataaacactccaacccccaaaatgtacaccgccctattctcaccaacctcttctgactcttctctcattttctgttgttcacaaataagttaacgtggtaccgaactaccgatttcctccactattttattgaatttctggtcaaaaaacttaagtgttacataacgaatctataaaaagaaccctcactttcaaggtttttgtcagcaaaacatttgtcttcgtgtttgaaagctagataaaagattcactaa

SEQ ID NO: 4587 - DNA, 3000 bp, Unknown
  misc_feature (1)..( 3000): cDNA_ID_1807240_gDNA_ID_1620716_Annot_ID_49114 3000 nt of promoter + ATG
atcaactccaccaaaaacaaaacgagtagtagtacgtcgttcattagcactattagaagcctttgaatcatattagcaaaaactgctatacgtcattttgtccaaagaggacgtttaccaaaagaaaatagataacactaaaattaggcatgtgataaacactccaacccccaaaatgtacaccgccctattctcaccaacctcttctgactcttctctcattttctgttgttcacaaataagttaacgtggtaccgaactaccgatttcctccactattttattgaatttctggtcaaaaaacttaagtgttacataacgaatctataaaaagaaccctcactttcaaggtttttgtcagcaaaacatttgtcttcgtgtttgaaagctagataaaagattcactaaatggccaccgcaagcaccgctgctactttcagaccctcctccgtttcagcttcttccgaattaacccatctgagatcaccctccaaactccccaaatttacgcctctgccatcggctcgctcacggtcctcttcttcgttctccgtctcctgcaccatcgctaaggacccagctgttgtcatggcggactcggagaagattaaggccgctggatctgatccgactatgtggcaacgacctgattcattcggtcgtttcgggaagtttggcggcaagtacgtccccgaaactctaatgcacgccctctctgaactcgaaacggctttctattcgctcgccaccgacgaagatttccaggtatgcctgctgattttgtttccatcttgttcatagtttttgaatcgattcgaaatgatttggctttgtgagtttctgattcaagcgttgtcattgccatggctagtgataaagtttaaaaaacggatttttttgttccaattctaaaaaataatctgccaaacaatgttaagccgtatgggacaaatcgatttgtttgcgatgtaggatgtaattctgggaaagtgttgtatttttccagaaatctggaaacgacattcatttcatattcttagtttcttcagcattacatgcttctgtgtgatgtaagttagaagtctttttggttagttcgtttgttgggcaatgtctaactaatgtttgatgaatctgtagagagaattagcagagatcttgaaagactacgttggtcgggaaagtcctctttactttgcagagaggctcacggagcattaccgccgtgaaaacggtgaagggccgctcatatacctcaaaagggaagacttgaaccacaccggtgctcacaagatcaacaacgctgtggctcaggctcttctcgccaagcgtctaggaaagaaacgaattattgctgagacaggggctggtcaacatggtgtagccacagctactgtgtgtgcacgtttcggtttgcagtgcattatctacatgggtgctcaagacatggagagacaagctcttaatgtgttcagaatgcgtcttctcggtgctgaggtgatgtgaattctctgcgtaaaccttgcaaaatcgcaatgctttcaaattgttatctaagtctgatgcttgtaggtaaggggagtccactctggaacagccactttaaaggacgcaacttctgaagctataagggattgggtgaccaatgtggagactacacattacatattgggatccgttgcgggtcctcatccttatcctatgatggtcagagactttcacgcggtgattggtaaagaaacaaggaaacaagcgatggagaaatggggcgggaagcctgatgttctggttgcttgtgtcggtggtggttcaaatgctatgggactcttccatgaatttgtcgatgacacagaggttcgaatgattggtgtggaagccgctggatttggattggacagcggcaaacatgctgccacattgacaaaaggagatgtcggtgtactccacggagctatgagttacttgctgcaagatgatgatggccaaatcattgaaccacactccatcagtgccgggtaagagattcttctctgttcaaagttggttttaagccacatgtatctggtcacctgtatctaaagagtaaaagttgatgttatcagattggactaccctggagtcggacctgagcatagtttccttaaagacgtgggaagggctgaatactttagcgttactgatgaagaagcattagaaggtacttacttgacacttcatttttctccttttagatgtttctttcacaactcatgagaacttgcattgtgtattctaatctatgcgtgtagctttcaagagagtgtctcggttggagggaataatcccggcattggagacatcgcacgcattggcccatctggagaagctttgtccgacgttacctgatggagccagagtggtattaaacttcagtgggagaggcgacaaggatgttcagactgcaatcaagtatctcgaagtttaaagagtgtagattactttcattttcacacagtgctatttcttttatgtagtttgttagttctccttgcttatggtcgggaatccaaaagtttggatcaaagggttaagaagagaataagtgttatgaatgtatcatataaataaaaatgttctatggaacgtttgatgttcttataagcaattcgaactgttttgttcttgacttagctggttttccctttcatatcttaatttcaccaatgcttagaaaaaacaactctgatcgaatgatttataaacaactctgctctttaatggtgatcattgtaaattcaaacttgtgtattgtttgtactaatttgttctgatagaaactattttgggttaaatgggaaacgggtcaaagcatagggggctagtgttgtaatttagtagattggggaggagtttcaaatctgaacgctgaagataaatcacaagggaggtgcttcgtcctcgaagcttttagaacttagccaagcagctgttgtttcttagttgactccctctccgacgaaa

SEQ ID NO: 4588 - DNA, 3000 bp, Unknown
  misc_feature (1)..( 3000): cDNA_ID_2109168_gDNA_ID_1620716_Annot_ID_49115 3000 nt of promoter + ATG
cgagggcccacatcatctgcaggaatagtgtttggcatgagatcaaatacatataagagagagtgagacaaaaaatcagtatcattacctcccaaaggtacagagagtcgcaaaatgagaattctcttcggaattgaaccattagcatccggatggcaaagagatagtcacctcccccaagtttatctgcatttatgacccagcactcgattaaccgctgaatatatacatatatgcaaagaaattgcagtagtagtagtactgtagtacctagatgttggtgaagtttggggtcaacaacctgagtaattgaagacaaatgagtaagttgagcttcaactccaacagatctcccggtactacggaaatttcctcgcttttcaattcgaaaaaataaaacatgtttaatacaacctgattgcagagagacagatgtaaacagtccataccaaaaacacaaatacattgagaatatgtgtaaggtgagtaccaatcgacgcatgagccgttcaaaacaccaaaatgcatcagcttcgtcttcaagaagaataatcattggggaacaaagatcactcattcctgatcagatcaccagtatatagataagaatttctcaagtaaaactggttttcaaacaaatgatacaatgatatatacattcggttttaccttgacaatacccgacatcgttgtctatccaggcgtaaacagacagaatatcccagagcttcgataagttctcctttttctcataaaataccaaggccctgtctgtacggttcacatcaagacctgaaaaacatacattaagcaactgagtgaaccagatattcagtatagtctagccggcgataaaggaggccatgatcagtcgctaacctatctggtgaagtgttagcagccattggataatttttttatcaagaggtccacgacttgtgagctctttaaaaaaaactgaaccatttgagtttgtacctgagaaagccacatgaaaacttcaaatgcctattacaagtttatgtaagagttcaacattaaatttccgtaatagaaaggcaaaattttacctaaatttatttcctgaagtacaagaggatcatagttgggttgaccattttcagtaattacaggtgcggtagtaaatcttccacttccaatgacaggaaacatttgcttacactcttccttccaagaagcatactgcaatctgaaagaagagaattagcggtaggattcacaaaactgaatcgatggtttatgaatgaactgaaagaaacatgtaattatgccaaatgcgatacatatatataggatatgaggacaaaattctaccttctgcgttgtcgaatttgctctctttcttcgaatgtgctcattgggtcataacaaccaagtaggaattcccatacttcgcctctaattgatggatggattccctatagattgattgtaaaggaatattaaagtaacataagttatcaaagatacagaacaaatgaaaggataaatcagtctttacaaagacttatccaaacaaacatacccctcttcggatgcgtcttagagtcttgccaatatggagagacccttcttgtacaaatacagcctgccattttcttacacttagagttttaccaggctgcacaaacatcataaatatgacccgtgttgtcagcaacatagcaaaaacttcctggcctcaacatgatgcaattattcatgatacattatgaccacaagacatggaatgatataggcttttatggcctgtaatgtaaaggttcaaaattattcaatctagttccaaattagtaccagtcaagcacataacctatcttcctatcttatgtatcttcctaaagaccctggagtcaagaagttaaaatcctttcaagcttatgtctggaaaaagtgacaatctcactaaaacaatcattcatgtgatgctactgagaaaaagatccagtgggatcaagaatatatatgagaccctgaacagctcctaagatcaatatctcctcataaggaatcagatttatgaacattacaatgtcaggaacaaattcacaacagagacaatgcattttcgaaaacatagataaccagagaatctggatgtaattggaaccgaatcagcaatcacatatcgtattcgtaatcataaaacagagacgacccaacgaagaagcaaaactagaataagcaaaaatcggagaaaatgaagaagaagggatcgaaagaagtaaccttgattttgaatctggtcttggggacatcggtgcactcaggacgaacttggtagtaagaatctgctggctcacctgcgcctccccacatctctatcaaactttcccgggaaaaaaaagaaatcaaatccaaatgctgagcaaaacagaaagagatacactttggatcggggtcccctcaaaactcagaagatcgatcaatgagcaatgatcaatgaagaaattaaaggaaatttagggagaaaaagattgagaatttaaggggacccagcttggagcttagtggattggagtctaaagacagaaacttttttttttaggtttctttctgcgtatattattttcctgtcgtctatctatcaactaagtttcttgtatcattccttttttctggagatgatgattgatgagctggtctcattacacaatagttgttgcctccacaaataacggagtttctccatcacttctctctaatttatcttcttccacatgaaagagacactgtgtctttttttttttttcccccaaaaatatccaacataaaacgacgccgttttctctctttaccatattgggcgtttaatgttgggcctttgtgatatttatttagtaaagataggcccaaaccacaaaaccctagaatgaagattatatatagtgcaaaacctaatcgattttttcctctgctgtcgctcgtctacatttacactcggagcttagaccttccaatctaccggcggcgaaaatg

SEQ ID NO: 4589 - DNA, 3000 bp, Unknown
  misc_feature (1)..( 3000): cDNA_ID_1824837_gDNA_ID_1620716_Annot_ID_49116 3000 nt of promoter + ATG
aaatagtaaagactgaggtagtgaaaagcaatggacaggcattggttgaggcgtatgagtacacagcacatagcagcgttgctcatagttactatttaccagtggccaagtttcactttgagctctcaccgatgcaggtaggcttaaacattttttgtttgctgcctttctcacatgtgttacacagattagggatggtaagatgggttggaattacactctgctcatctttctctttgtttgtttgcaggttctcataacggaaaactccaagtccttctcacatttcatcaccaacgtatgcgccattattggtggtgtcttcacggttagtaaagaagtttgaagcctcttcttcttgtaactattcattaatgtattcccatatgactcgtatttttgcctcttttcaggtggccggaatcttggattctattctccatcactccatgacactcatgaaaaagatagaacttggtaaaaacttctgaagctccctaagggttttatttcgttttcctctgtaacgagtcagaaatttttgccctagttataccagacgtcacttaaataattcggttatatatattcacaaactgttatccttttgaacatatataagtattatcgatgtctctgaagtctttgggagttttagtagaacaaattgttatcacttaaatcaggggaatttacttccaaattctccaataccaaaatacagcttcttgtgagttggttcatactgatgatggagaaatgtaatttttagccaacaaggtttcaactttcaacgtttgaaactagatttgagcacaaatatagcaatcaactttcccccatggctgcttatagcaatcatcgacggaagtcacagcagaacggagagtcctctcgttccctttggacagagttgcatcctctactagaattttacttaggtagaagtaagtatccacagtaaagaatctccttcttgttacaattttcaattttgtgttctcttcaagctaattattagtttagttagcttagcatgattcaactttagccttggtatagaatcataacatagaaccatataaacgaaaataagactaagatcaaaagaacaaaaaactttgagttttgcaaacaaggtttcaaacttgaataatgtctgataattgagcacatactgatattgatagttccaaaaacactaatttccgaatccaaaatcaaaaaagaaagacaacagaattgtagataatatttgatcaggcagtgatctccttcttgagttttgcaagctcttgcctgacaacaccagctttctgcaaacagcaaaaaaacccattaacatttcagttctgacatgaatgaacactaccacagaatttcaaacatctaacaatttaacacactgaccttgatcttggccaacatgatcttgaacctatcaaagtcgttaaggttagccctacgtttctgcacgataagcttcctaccccatgagcttttctcccacttgttcttcacatctgcaagacttttccagttaagattgaaacacttcaaaattcaaatatttacattacgcagcactcaccagccttttccattgcctcgatcaaagccttcttctttggcacacggttgatgtcaatgacaatatcggtaagagacaacctcttgaagttcatctggatcctctccatatcaggggcatccaccaaagcctaaatgacgagaacataataagaactccataaaaacaactagacaatattcagctcaatattcaccaaggaaatgcaataggctccaatcaatgatgcaaactgagttataactgtaagccaattatgcaaccaaagtctcaagctaaatcaaaattttccttaatcaaacaatttaccgaaacatacacagtagcattacggaatcaagcattaaaacagctgaaactcatcaatacatacatgataaagagatggaaatcttcataacctaagaatgaaataaacttactctgttctggtcaacaacgtcgacgataacgacgagctttccatgatcttctccgtagttcacaagtgctactctcccgatctcaacgtacctcttgaaaccctaaacaaccaatcaccagaaaatattaaatctaacaactttggactctaacctatacacaaacgtaacttgattgagaacgtcaaaagcctaatccccaaaaaaaaagatctagaagaaagaaatccgaaatgtgctatgaacatgagctaaatacaggagataatcacgtagaacacagacgaactaaccaaggtattagctcaataagagagtatatctcaccattttcgccgccggtagattggaaggtctaagctccgagtgtaaatgtagacgagcgacagcagaggaaaaaatcgattaggttttgcactatatataatcttcattctagggttttgtggtttgggcctatctttactaaataaatatcacaaaggcccaacattaaacgcccaatatggtaaagagagaaaacggcgtcgttttatgttggatatttttgggggaaaaaaaaaaaaagacacagtgtctctttcatgtggaagaagataaattagagagaagtgatggagaaactccgttatttgtggaggcaacaactattgtgtaatgagaccagctcatcaatcatcatctccagaaaaaaggaatgatacaagaaacttagttgatagatagacgacaggaaaataatatacgcagaaagaaacctaaaaaaaaaagtttctgtctttagactccaatccactaagctccaagctgggtccccttaaattctcaatctttttctccctaaatttcctttaatttcttcattgatcattgctcattgatcgatcttctgagttttgaggggaccccgatccaaagtgtatctctttctgttttgctcagcatttggatttgatttcttttttttcccgggaaagtttgatagag

SEQ ID NO: 4590 - DNA, 3000 bp, Unknown
  misc_feature (1)..( 3000): cDNA_ID_1824833_gDNA_ID_1620716_Annot_ID_49117 3000 nt of promoter + ATG
ttattcagcttcaaggcgatcagaggaagaacgtctccacgttcctagtccaggtaaaaatcacactctttcacaaacaggctaacaaaaagattgttactcgatcatgtttctcatacgtctcaatgaacaggctgggcttgtgaagaaagataacatcaagatccatggtttctgagcagcttctgttgcatttcccgtaggccgtttaagtggatcattactctatcgtgcagttacaaaacatatcttcacctttcccttcgattacttgttacttgtttctgttttagcgttggaatgatactaagagaccatcatcgttttctttcacatgttacttctgtaatacgagattgttaagcattctccattaacgtttgactctactctcagtatatcttgttaccagggtggatcacaacacttaaactattattcttgttatgtgccaattaagacaaaaaaccatcagttaaaaacacagtagtcgaaatcgaaagtcaataaagttgaccagaggcctggaagactcttaggcgtccagagtgtttcaaagtcgctgggaaattacgaaataaccgcttgtcttctctatcgagtccaaagtggagctctgcaaatcctcgggcaagacgacgatttggaaaacgaaattaggttaagagtttagactaatctgaaaccgatattctttcaatttcaatattctagttcgatttcccaaaatcccctcttcggttattttggatcacaggtaaacgatggaggagatatttgctctgatagtctcaatgattctcatagttgcggtgattcctttgttcttttggaaacgtcggagagatgctagatcacgggaggaagttgctgaaccaccacaggtaatttatcattgtttgcgaaaatggatttgaattttggtaatgtctcgttttttttttccttctgggatttgattggttgttcatgtgaaatgcaaaggttcaacctcgtgaaaacgtggcacgtgctggtggtggacggaggatgcgtaggagacctgcagcttctggtgctagctcctctacatccaatgttcaaggtttgtatttgacagcttttgtttctctttgagttttgaggattgagtttctgctatctttgtaatttgaagcaaccttatgtagatagttgtgttattggttagagtttactatagctagcgaacactcgaaaccatcatttattcaagaatactcgataactttttagtttcatttgtaatctatcttgctgtgaatgtagtttaagtttagaaaagtcttggaactaaatgaacaattggccttggaacaaaattattgggtatgtgtgaaacagaaaacggcagtgggagtgaagatgaagatgaagatgaagctggtggaactcaagccagagcatcaaagaagaaagagaagaagcgacaagagcgggaagcacaaagacaagtgagatttttctatttattctactagaatttttggcaggattaaggatgagaaattctaggaatatcagttggtaagttacattgtgatagttttagattccgacttaaggatagagcattggcagaatattacatctcttttgggacgactttcctgattaagttctgttctttttttttggtataggctgaggaagctacacgcgagtcaaggaatacaaaacaagattggtatgcagaaatgcggaggaagaaggatgaagaacgcgaggcagaagagctgaagttggtaggtcaatcatctcagatttcgttttgttatagtcttcctgcttttgaaatactgggcttggctaattgtgacattgttacgtaggaagaagaagaaaaagcgcgacaagccaaagaagaagaggcagctgcgttagagtttgacaaatggaaaggggaattttcagttgatgctgaaggtactacagaggaagtgcaaggtgggaatcaagatttgctttcagaatttgttgaatacataaaggtatatctatcttgaataaccctataccaaacactttttgatcttcgattctaatcgttattctgtgaatataaacaaacgaaaagtaaagtggagatacaaatgttgccaatagaaacacgctcacaatgaagtatagatgtaaatgttgtttcagcccatatcaatgtacccacatgttgagccttccttttgctgtgtgatgtgattgcagaaacagaaatgtgttccacttgaagatctcgctgcagaatttcatctacgtactcaggtatcatctggctacatatttatgtggaaaactaaagaataccttttgtcatggctttctagtctgattcaactgtttgtcctcttaggaatgcatcaacaggatcgcctctttggagagcattggtatttttctctctatccaattataaaaagagcatttgtctcatctggcagtctgtaatttgcgatgggtatagtaaacccgaagcaataggaataagcaggtgagacactgatgtgaaacaatgatgggacgcttaagaactgaacccattctcttttgttcagggcggctctcgggggtcatggatgatagagggaaatacatttacatatcaatggaagagatgaatgcggttgcagattacatcaaacgtcaaggaagagttagtatctcacatctagcaagcaagtcaaaccagttcatcgacttggagcccaaagtacagcatcagctgactgaagaaattagcggcatggaagagatctcagtttcttagttgtgtttctcgggtaaaatcgtttgtcaaaaacaagagttaaaagccttaggtgctcactgcaacatgatggtgtttgggtcatataccttcttgttcttattttactagtttgagatccttaggcttgcatccatatacagtacatgaaataccatatgtttaaaattgttgtttgtcttaccattagaaaataaaataaacacacaaaagaaatg

SEQ ID NO: 4591 - DNA, 3000 bp, Unknown
  misc_feature (1)..( 3000): cDNA_ID_1824809_gDNA_ID_1620716_Annot_ID_165653 3000 nt of promoter + ATG
cactaaaccattgtcaggggatcgaagcaatgatgaagaaattggtaagtgacaacaagggtttcaagaatttgaaatctctgacgattgagaacgttatcatcaatacgaattcttgggttgagatggtaagcactaacacttcaaaacaatcctctgacatactagaccttcttccaaatttggaggaacttcatctgcgtcgtgttgacttggaaaccttctcagagctacaaacacatctcgggttgaaactggaaacactgaagataatcgagatcaccatgtgtcgcaagcttcgaacactactcgacaaaagaaatttcttgactatcccaaacctggaggagatagagattagctactgcgactctttgcagaatctacacgaggctttgttataccatcaacctttcgtaccaaatctacgtgtcttgaaactgagaaatcttccaaatcttgtgagtatatgcaactggggagaggtttgggaatgcttggaacaagtggaagtgattcactgtaatcagctgaattgtttacccataagctctacctgtggaagaatcaagaagataaaaggagaattgagttggtgggagcgtttggaatgggacgatccctctgctttaaccactgttcaaccatttttcaatccagtgagggaagttcctctactcatagcggatgcaacaactcaaatgctataagagccgataatctagacacatcctaagagtgtcaccatctccgtttctctgttttgttcttttcattaattttgtttgagtctgtgaagtgtgaatgtgcaaaactaaacaactatgttatgtcaatgcataaatattgtgaatttgtgagtcagattcaagtttatgttgcattcgtttagtccccattctccaaggaccaatgtataataacctcatgcatctattgaaccaatggttctttatatcagtcgcatataacttgaaatcgttggatatatgagaactagctaacaaaaattgcaatccgatatctaactaatgtttagccacatattataaataatgatactatatgagtatcacctataaccatgctctaaagtcttgtccaaagcaaaagatcacctaactttatgcattccaaaaacccacctataaggaacttgaagcaaatgcagaaacaatacttaccatttgatcattgacccttccctgtagctgcggccatgaattgtgtgttaaagaaagtctcgtcttttcccaagctatccttcaatgtgttatcgctcaaaacatatcattgacccttccctgtagctgcccccatgaatttagaaaatgtcaatatcaagtttaacatgaaatatgaatttagaattacagagtttacctcactgcagggacctttaaagaatcagaaacaatttttgtcttcttaaatttcacatgaaacactgacacattgcgagagcctgagacagaaccgatcaaaaagagaatttggtaattcgacaattttagcccatacctttgggtgcatgaacgtgaacatcctgtgaaaatttgaaccagtgaaaagggtgatttaggtcaaagtaaaaaaatccactttttgaaaagaatctatcgtctgaaaatgccaagttgccgacgtttactgtttttaccgacacatgctttacctatttttatttttttttctggcctactcgtgaagtctttattagcttataaaaatagttcacatttatgatttgatctttgaaattaccagcgtgtatgtaagctatgaggagaattttttatacattactccatatgctcatgaataacaaagtacaacttcttgttgtaggtactagacaacataacttttcaacttttgacaaaaaaagataacttttcaactactacgtagaataaaatctactagctatagtttatttccatataatttaatgatataaaaatcgttaaaatacttcatccaaaaccgatcgatatatagtaatgtagttgtcgcctacacaagttgtgtatgagttagttaagttcagtaatattcacatctgaaattcaagatttatttagtcgcatctgaatttcaagatatatggaactcttactattgttttctttagatatagatttttaaaatttaaaattagcaaaattttcaaacttaaataaatgctataatacatgagaatcagaaaaaaaacataaatacaaaaaagtaaggggatcgtttgacttcatccgagttattcgaagaaatggtttcacttttgtacgtttcagtaacgtaaatgaaatttatatttgtattgctttcaaacatataaacaaagtaaaactgtatttgacaaatgtacaacaaacaaattcaatttatttgctgaaaaaaaggaaataaaaaaagcaacggatgggatcgcactagctcggcgaatttgagatctaatcaacggccctacactcatctctctcactctcttgaacaaaaccaaaacaacagaaatagaagtagcgagcgacgggagagcccaacggagagacatatcgccatttcaaagctaaacaaccagataataatactgaggtgttttcttcttttctcactgatttctctatgaaattgccacacccaaagtttgagtcttttatgttttgtttcctcactgatagtgtttttgttgtttagctcaaatcattgcttaattttttttctctttgtaacaactttactgtctttgaaaattgaaagaaaaaaaaacccaatgattcacgggtttcaatccttttcgatttaatctttatataagccaccattgaatcattaataaaataaagatctttgatgagaagaagaaaataaaaatcattttttttgcaggtttttatgcttataattggggtgaaagagacaaatccagagtgtgtgtaaattaggtacgagaagaatttcagctaactcttttgagagaggagaaaaaagtaatagatg

SEQ ID NO: 4592 - DNA, 3000 bp, Unknown
  misc_feature (1)..( 3000): cDNA_ID_2107235_gDNA_ID_1620716_Annot_ID_165646 3000 nt of promoter + ATG
aaactgtagtatagtcgtttatggtgtcataccattcataaacaaatcacaaatggtatactattctcagatggattcttaatctcaaatccacaattgtacatgattcgtaaatgaaacttttattttttaagtgttcatttttacatgcttcgttatagctttttttaaaagaaaaaattggacatcagttttttaaaattgtgctattagccacaactcaataattaaacacatttattacttttttttgtttgataaagacatacgtaaaccatttgttaaaaatatcaagaaagatcaaattgccaagtcataattccatttgtctctacgcatttgaagtcttaattacgatttatatctctgggtagtactagtctatgatctttccgtggaggtggagcggtactctataatttttccagttcactggagtaaagttatttttatgtaagcgtcatgactttttagagagcagcaatgtaacaaacaaaaaaaatataaacaaaactcttatttattaagtagtgcttacattaccctcaaacatccaaaagcttacatttatcataaaacacacgatgaggtgtggtatgtgtcaagtgtcaacatgtatatatcaacaaccacactctcatacgctttgagggtttgtttgagatttagtagaaagaagggaatgaagggatgttgaagggacaaacatcaacttgcgggatgtcgcaaacgttgggcaagtgcttggctgtctggtaaattttcctgacttgcattggttggtgctgtccctggagtctaacggccttggcagcttgtttcaaggtggggcaaacacaatctggctcttcctggcgaagctcgttgcagcactgctggaatagctgttgttcctgctgttgtccctgtgggttctccatgtcgtcttcgaaatcaaactcatcgctacggccttgccttgcttgctggagcatcaattgctggcaagctcttaggtgttgttctttctgaaactccttgcggcatttcctcatttttgggcctatggggttagtggcgtcatcttcttcgaactcaacgacggtgcggtagatggaagcgttggtgaggaggaagcagagagcgagagctgcgcagacgaggaacaacttgtttgccattttttgctatgtgtgtatgttttggttcgagtgaagaatgtggtgaaggtgtggttggtatttataggtgagaaaagagacttgcatggagttcacgtgtaagaatacatgcatatgtttgtttgtatgcgagagctatatgattgttgtcgtgattaggtgttggaaactcaaatgtaaaggaagtgacaagtttccgcgtctacttgcaatatgcaaccatgtgtaactcatgttctgacatgtcaattattttgaaatgactagttgagagtcaatacggaaagagtagtagtgtgtcaataaatgtttttggaggttaattctgaaatacataaaagttttagcatcttgaaaaattacttatacacgcaggtcaccggtccattggatattgtctattgatggtaagacaatatatggataaagataagcttaatgtttttcactcccaaagtaatgtatgtctaagaatgttatggacgggtgacaaaaactagtcctctcacgtttcaccgtgacaaaacatacggacacgagtagttaggatatttagaattattattccaagtgtctcttaaaatacatatgttggttattcaggtatcatatacatgaaaccactttatgaactaccactaaatcggataaaagtgagattttgattaagaaatctcatatatataacactaatttttccaaaaatgcttaaaaatcaaattttgtttttaccgaaaacgaatcttggtttaatttggtaccaaatatatatcactctaaaccgaaccaaaatccaccgcatcgtaaccaaaacaaagctctgtttcgttcaaattgataaaataaaataaaataccaaaccgcaaaattgaaattccaaaatctccaaataaccggaatgcctagctctctctatccatggaaaaaataaaataaatatctaaagaaaagctgctaaagagactgtgagacaaaaacgacgatattttcctcttcctctcattatttttgttctcgccaccgaaacaacagaagttgcagactttatccgaatttagggtttcagctcgttctctcttctccaattatcagatccacgaaactctacttttcggatcaggtaaaatcttatcttcttctgattgcgtttgtcatcttcttaagcagatttcacaaattgcgttttgctatttctttgatttcggtaatttcgaggtgaagtttgttttcattgcccgatccatataattttggagtttgttgatttgttttcgttcgtcagattggtatatcgtctttcgtatgtccctgaagattgtacgctagcttttgtttaggatctgtcgaatttgctgctgactttagaaaattggatcttcctttgatctgctgtggattgatgtaatttgtttagatcatatcctgtaattgagctggacctgcttaactaggttcctgggactaggatacagaacatacaatttatttatgaagatggcatcttgctcatttcgaatcttatgttgcaaatgataattctggagttggtttcttagctgaggttttagtttccccatctggtttatatatcactaatctctagatgaacatggcttgtatttggattgtgtgttttatcttgctatgtgtattatgcgttccctgtgttctttaactgttttctaagaccttattaatacttattttgcttttctcgattgtggtgtagcacttgtttattatttgtttatgagtgtgccaaattcttatcctccgatggccttcatgttcaggtctcagcttctctatcgtttgcccctcagatcaacaaagtttcatg

SEQ ID NO: 4593 - DNA, 3000 bp, Unknown
  misc_feature (1)..( 3000): cDNA_ID_1824833_gDNA_ID_1620716_Annot_ID_165644 3000 nt of promoter + ATG
agttaaaaacacagtagtcgaaatcgaaagtcaataaagttgaccagaggcctggaagactcttaggcgtccagagtgtttcaaagtcgctgggaaattacgaaataaccgcttgtcttctctatcgagtccaaagtggagctctgcaaatcctcgggcaagacgacgatttggaaaacgaaattaggttaagagtttagactaatctgaaaccgatattctttcaatttcaatattctagttcgatttcccaaaatcccctcttcggttattttggatcacaggtaaacgatggaggagatatttgctctgatagtctcaatgattctcatagttgcggtgattcctttgttcttttggaaacgtcggagagatgctagatcacgggaggaagttgctgaaccaccacaggtaatttatcattgtttgcgaaaatggatttgaattttggtaatgtctcgttttttttttccttctgggatttgattggttgttcatgtgaaatgcaaaggttcaacctcgtgaaaacgtggcacgtgctggtggtggacggaggatgcgtaggagacctgcagcttctggtgctagctcctctacatccaatgttcaaggtttgtatttgacagcttttgtttctctttgagttttgaggattgagtttctgctatctttgtaatttgaagcaaccttatgtagatagttgtgttattggttagagtttactatagctagcgaacactcgaaaccatcatttattcaagaatactcgataactttttagtttcatttgtaatctatcttgctgtgaatgtagtttaagtttagaaaagtcttggaactaaatgaacaattggccttggaacaaaattattgggtatgtgtgaaacagaaaacggcagtgggagtgaagatgaagatgaagatgaagctggtggaactcaagccagagcatcaaagaagaaagagaagaagcgacaagagcgggaagcacaaagacaagtgagatttttctatttattctactagaatttttggcaggattaaggatgagaaattctaggaatatcagttggtaagttacattgtgatagttttagattccgacttaaggatagagcattggcagaatattacatctcttttgggacgactttcctgattaagttctgttctttttttttggtataggctgaggaagctacacgcgagtcaaggaatacaaaacaagattggtatgcagaaatgcggaggaagaaggatgaagaacgcgaggcagaagagctgaagttggtaggtcaatcatctcagatttcgttttgttatagtcttcctgcttttgaaatactgggcttggctaattgtgacattgttacgtaggaagaagaagaaaaagcgcgacaagccaaagaagaagaggcagctgcgttagagtttgacaaatggaaaggggaattttcagttgatgctgaaggtactacagaggaagtgcaaggtgggaatcaagatttgctttcagaatttgttgaatacataaaggtatatctatcttgaataaccctataccaaacactttttgatcttcgattctaatcgttattctgtgaatataaacaaacgaaaagtaaagtggagatacaaatgttgccaatagaaacacgctcacaatgaagtatagatgtaaatgttgtttcagcccatatcaatgtacccacatgttgagccttccttttgctgtgtgatgtgattgcagaaacagaaatgtgttccacttgaagatctcgctgcagaatttcatctacgtactcaggtatcatctggctacatatttatgtggaaaactaaagaataccttttgtcatggctttctagtctgattcaactgtttgtcctcttaggaatgcatcaacaggatcgcctctttggagagcattggtatttttctctctatccaattataaaaagagcatttgtctcatctggcagtctgtaatttgcgatgggtatagtaaacccgaagcaataggaataagcaggtgagacactgatgtgaaacaatgatgggacgcttaagaactgaacccattctcttttgttcagggcggctctcgggggtcatggatgatagagggaaatacatttacatatcaatggaagagatgaatgcggttgcagattacatcaaacgtcaaggaagagttagtatctcacatctagcaagcaagtcaaaccagttcatcgacttggagcccaaagtacagcatcagctgactgaagaaattagcggcatggaagagatctcagtttcttagttgtgtttctcgggtaaaatcgtttgtcaaaaacaagagttaaaagccttaggtgctcactgcaacatgatggtgtttgggtcatataccttcttgttcttattttactagtttgagatccttaggcttgcatccatatacagtacatgaaataccatatgtttaaaattgttgtttgtcttaccattagaaaataaaataaacacacaaaagaaatggatatcatggttgctttagtaaatctttattcctcaagttaaacaatgtttgccatttatggtgctcacaaggtgttcacacaaagtcttgtgtaagaatatgatatcatggttgctttagtaaatcttaattagggttctataacttttgtaaaaagtttaataaaaaaattctaatgaactaacttagaggaatatgcggtttggatcagtctaatccagattttctatagaatatagaaaaaatgtgacaaacatacagaaattggtacttatacatttactgattaacgttattagtatattctcttttgtataatatctctgtttctccggagaaacaggggaaaactagaggaagagaaaccgttatgctctgcctctctaattcgcttaagttttattaccatctctcttttctctgttttctctttcttgcgttcctaagaaacttgggaaacacgatagagatg

SEQ ID NO: 4594 - DNA, 3000 bp, Unknown; identical to SEQ ID NO: 4588
  misc_feature (1)..( 3000): cDNA_ID_2109168_gDNA_ID_1620716_Annot_ID_165642 3000 nt of promoter + ATG

SEQ ID NO: 4595 - DNA, 3000 bp, Unknown; identical to SEQ ID NO: 4586
  misc_feature (1)..( 3000): cDNA_ID_1455932_gDNA_ID_1620716_Annot_ID_165640 3000 nt of promoter + ATG

SEQ ID NO: 4596 - DNA, 3000 bp, Unknown
  misc_feature (1)..( 3000): cDNA_ID_2157010_gDNA_ID_1620716_Annot_ID_165639 3000 nt of promoter + ATG
cagcatgtttgccgctgtccaatccaaatccagcggcttccacaccaatcattcgaacctctgtgtcatcgacaaattcatggaagagtcccatagcatttgaaccaccaccgacacaagcaaccagaacatcaggcttcccgccccatttctccatcgcttgtttccttgtttctttaccaatcaccgcgtgaaagtctctgaccatcataggataaggatgaggacccgcaacggatcccaatatgtaatgtgtagtctccacattggtcacccaatcccttatagcttcagaagttgcgtcctttaaagtggctgttccagagtggactccccttacctacaagcatcagacttagataacaatttgaaagcattgcgattttgcaaggtttacgcagagaattcacatcacctcagcaccgagaagacgcattctgaacacattaagagcttgtctctccatgtcttgagcacccatgtagataatgcactgcaaaccgaaacgtgcacacacagtagctgtggctacaccatgttgaccagcccctgtctcagcaataattcgtttctttcctagacgcttggcgagaagagcctgagccacagcgttgttgatcttgtgagcaccggtgtggttcaagtcttcccttttgaggtatatgagcggcccttcaccgttttcacggcggtaatgctccgtgagcctctctgcaaagtaaagaggactttcccgaccaacgtagtctttcaagatctctgctaattctctctacagattcatcaaacattagttagacattgcccaacaaacgaactaaccaaaaagacttctaacttacatcacacagaagcatgtaatgctgaagaaactaagaatatgaaatgaatgtcgtttccagatttctggaaaaatacaacactttcccagaattacatcctacatcgcaaacaaatcgatttgtcccatacggcttaacattgtttggcagattattttttagaattggaacaaaaaaatccgttttttaaactttatcactagccatggcaatgacaacgcttgaatcagaaactcacaaagccaaatcatttcgaatcgattcaaaaactatgaacaagatggaaacaaaatcagcaggcatacctggaaatcttcgtcggtggcgagcgaatagaaagccgtttcgagttcagagagggcgtgcattagagtttcggggacgtacttgccgccaaacttcccgaaacgaccgaatgaatcaggtcgttgccacatagtcggatcagatccagcggccttaatcttctccgagtccgccatgacaacagctgggtccttagcgatggtgcaggagacggagaacgaagaagaggaccgtgagcgagccgatggcagaggcgtaaatttggggagtttggagggtgatctcagatgggttaattcggaagaagctgaaacggaggagggtctgaaagtagcagcggtgcttgcggtggccatttagtgaatcttttatctagctttcaaacacgaagacaaatgttttgctgacaaaaaccttgaaagtgagggttctttttatagattcgttatgtaacacttaagttttttgaccagaaattcaataaaatagtggaggaaatcggtagttcggtaccacgttaacttatttgtgaacaacagaaaatgagagaagagtcagaagaggttggtgagaatagggcggtgtacattttgggggttggagtgtttatcacatgcctaattttagtgttatctattttcttttggtaaacgtcctctttggacaaaatgacgtatagcagtttttgctaatatgattcaaaggcttctaatagtgctaatgaacgacgtactactactcgttttgtttttggtggagttgataaataaaaggattacaaagacatgtacttatggttaaattaatacaaatgaactaactatatagttttagtttaatttcatgatttttaaacgttttccaaaactttattaagtttcttgtattttttattttgtacttaaaataataaaatgtggttgatcttttaatgaccaacatgcaaatagtcaaaatgacactaatcgattacatattcgaaccaaaaaaaataaatatcaaatcggtaaggtttgtctcttatcgattttaccgtcttaacttgtcatttaggcagaccttgttggtccgatgaaccaccagcctctgatccatttatgatttacacacgtgcattaaacaccagacgaaggcctttgagtcgttgaagctaaaaaatgaatggtatatgcatgcggactcactcggaagcctctccaatgtgcattgctcgactctaactccaacaaagtgtacgtaacgtaacaatcttaacgacaacctaaacaactaatagcaatcacaattccttaaagcattcgttagtgtaccatgtaaaattccttgaaccattcattattgacttatagtaccatgtaaaaaattccttaatccatatatcaagccatgtttttgtacaagaaaccaatttgacattttgaataattagattctttatttttattttttttaacttaaattttgaaataaaaattaacaatccataatgtagaacgtgatgtctctaaatttgataatgtccgaacttatttgcatggatgtttatatattacactagaactcgtattattgattattaatttaaacgaagtatcacgaatttaaactatattttcatactttgtctttcacacccgattttccgcgacaaatgcaaaatccagatactgaaaattatgcaatattaaaatttgaaaaaattgaaaaagtgaaatactaataaaattgagcgacacatttctgattccagtcttaactgttacactttcgagtgtcagatctcgtctttcttctccaactcgtctatcttcttctccgattaatctaatctctcgtcggagatttagaaatg

SEQ ID NO: 4597 - DNA, 3000 bp, Unknown; identical to SEQ ID NO: 4592
  misc_feature (1)..( 3000): cDNA_ID_2107235_gDNA_ID_1620716_Annot_ID_49119 3000 nt of promoter + ATG

SEQ ID NO: 4598 - DNA, 3000 bp, Unknown; identical to SEQ ID NO: 4591
  misc_feature (1)..( 3000): cDNA_ID_1824809_gDNA_ID_1620716_Annot_ID_49124 3000 nt of promoter + ATG

SEQ ID NO: 4599 - DNA, 3000 bp, Unknown
  misc_feature (1)..( 3000): cDNA_ID_1823660_gDNA_ID_1620716_Annot_ID_49126 3000 nt of promoter + ATG
tgtgatacgttgaggtgacttattgttagcctcctcttgtcgtgccttgtacgcaaaatgtaacgagacccaactacaagttggaatttcttcaatcttttgatccaagtgtttctcttatttaaaagaaatggagaagaatggagcctgatggaaagaacctgtaaacgctggaggcatcctatctcttcaactgttgcttgccctttttgtgtttctccctgtacgctccagcggtagtgacttgacgtcatgtcaagtgtctccaaacttgataacctcgaaacaactctagctggaatgctttcaaggtgaagtgttcgtgaaagatcaaggtgtctgaatctctttaattcttccaaccctcttggaaattcgaggatatgtgtgccacagagatcaagtagctcaagtttggcaagggtttctagtgaaggtagtttcacaagtttaaaacaatctcttaagaagagagaatggagactgaaaaggcgcaaaagagagcaactgggaaatgacttaatgcgagtcccacttagattcaagattcgaagagttggaaatgcttgcaagaatccaatgggtacttcctttagaagaaaattgccttgtagcagtaagactgaggtttttacgcagaactcttctacaagatcaggaaggctttctagtttattgttcatcaaagaaacccttcgaagagaaggagcaagcttatcttgtctaatatcttgcaaacccgttccagacatgacaagggaatgggaatcatcttgtgaggaagacatgatccatatggcgaaatcgcggacaacatcatgcatcttcaccgtgtctctacgatcaccatcttctaacaaacaataatcctttaaactctccacagttgtgattccctcgttcatggagtcctcttgggaaccgagttcctccatgaatccttcagccatccaatatcttacaacctctgtaacttcaatcgagtagtcttctggaaacaaagcacaaaggagaaaacaaaactttgccttgtcttccaagaaatcgtagctcaatttcaatggctggaagatcttctcttcaatgctcttgatccaaggtactgatttacttagcttactcaagacatgattccatagcttgacatttttctttccccgcatagctgttccgactgtgatgatagcaagaggcaatccaccacattcttgtgaaacagcttttgcaatcttcctaacatggtctgacctcacaacatcccctgcatttttgcaaaacaattcccaagcgtcttcttcaagtaagcaatccactctaacatcaagatctgtcttcatgctgcgacagacctctaaaaacctcgaagtcagaatgacttttgaacctttgttctcttcagttcgtgggatgcctaaaagatccaaatcaatgggtttccaaacgtcatcaagaatgagaagaaactttctctctttcatcagtccaacataaatccttcttgccaacttctcttcactttcttccatttgggtatcaatatccagtctctccgcaatctgcttttggacttctcttggatcaaactctttggaaactattacaaagatcaccaagccaaatggttgagtagcaccctcttcccgaagcttattgttcagcgtcctgaccaatgtcgttttacctactcctcccatgccccaaacaccaatcttttgggctttctcgcttgtcaagccatctctaattttggccaacatatttgacgccatcgtttgatgaacaactgagacccctggaacatgttcaactctttccggtgtagactccacggaaagcatgtcgacaaactctattccatccttctcaagcattttcacttcatcgagaatcttgacaagtttcctactcatcctgggtctcaaggacataccgcatgaaactcgttcctcaagttttaaccttgctttagatataacttcttccgcctctctttgccaacgcattagcttgagtctcaagggtttatctttggtcagcaaagtttcatgatcttcactcatgttacccttaagctctgtcaatctctcgagtgattcattaagagctttgacgtttgatttgaactttatggcattagcgactcttgagaacgttgactcatacatcaaacgcaaaatctcaccaatgacaggggcgcaacactccatggtgaagttttagttgaagaaagggccaacaccagcttcaaagaaacctttgagatctgcaataaagaaagacaattagttgtaagttgaaactaaacctacatgttgtctcacctactacaatccgatttgtttcgaatgttcaaagatagactaaaaaaaaaaaaatcctaatctacatgaatcgacaatcgatctccgaggatcgtgttaataagccaaaacgaaagaaagaagaataatttgtttgttgggttggcaattattttaatacagattaagaaatagcaagagatttacatttccatgatttaagtgtgtgatcgttttctatcattgtttagtgcgttataattgatgataccaaatgaaaataagaaaaaaatcgtagacgagttgcttgactcccaacttaaatctccaatatgtttactctgacaagtgacaacaaaccttcaacaacgaaacaacctagaaaacatatctgaccttattcaactacgtgacgatagagccacagaactgaccatttcgattaaaaaaaaaagtaatgatgtggttgtaaatttagtaagaggaacttgatgtgagactagtatcaacaccattcaagtgaagcctcgacaaaactttgtcgtttcatcaaactcagcaaagaagcaaatgaaagcctaatgcaggcccaagaagcccacaactcaagtttggaagcaacggtcttctgagacaaagacagaaactccagaagcttcaccaagtcacgacaagaacagagctggcacaacttcaccta

SEQ ID NO: 4600 - DNA, 3000 bp, Unknown
  misc_feature (1)..( 3000): cDNA_ID_1824891_gDNA_ID_1620717_Annot_ID_49127 3000 nt of promoter + ATG
gttttatttccgaatcttaagctggtgggttcgatcacatgcaaattacaattgtctattagtattacgtaaatacgaatatacatccatatgtaagaacacgtgtgtataactgtgtatatctccaatatacgtgcatctacatctataagtttacattgttttcgttatcttctacctaaatttattaattttcatttgggtcctattgttatgtcgattaataccctttaatttaggctgatgttctaagtccaaacatacaaacagccaatcttaacacaaaatcttaatctcagcatgcgggcaaaattgcgaccatacaactattatgctatgatggttctagtaataaaagcaggcatttagtttggaaaaaaagtaaaatctccttagagtactttaattagtaaccagtgctataaacgaattgtaaccaacacgcaatggaatcaataacactctattaacttaatatagatatgagaaactcgtgcttttaatctttgttaaaacgtcgacaaaaaaaaagtttttttctgttaattagttctcctctttttaaagttttaaatttttgatttcataactcactattaattgcgatatgtggggtcacctaagatcctccaagaacttatattcttgatgaacatatattgttcacaaattggaatcataatcttatcgtatgattgtatgtatatgtgtcacgtagttggacttttaaccactattagatctttccaaatatcctctctctttttttgcttcaaatttgttttttttgtgcacacacatcttatattattaatatataaaattggatgagctttataagagttttaattacatataggaaaaatagaactaattaataagatttagatatatgtataaacgtatttatatattgacatgtaagttttaaaataatatatcgtcatgggaaatatttttaaaaatcttaaaatacagtatggacttatatattcatactaaaacctagtggggtttttttttgtgtgtacatgaaaagtggtaaaagtattttctcttttttaattttgttagattaaaaatatgttaaggtagcttgttttgtttatcgtcatgtgttaaagtgtactatatggtaaagatttatacagtagcatgtgtaagcgggttcatgagtaggagagaattaaattctgccttaattaaacaaaggtttcgattagccgtacgtaccgccattaatagggagcataattatcacccattagggagcatactttgaccactaggggaaaattagaaacctatggtaatcgtattaattaatacggccaaaattaattctaattaacatataaaactgtttcccacaactaatttttatagatatatcaccttttagataaaatatagaaattctttcttcatatatatgttactaacaaataaaaatcataccgatgcaatgacctacaatctgaccggttagctcaacaactcagtatttgagaaatgtaattttgttcgattaccataggtttttatttgtataaatctaaatataatcatattacttctttttttatcgaaatataatcatattaactcacgcgaagaaactataataatccatctgacttctggttcgtaaatattgtcatacttaattagagacgaattgttctcatggtaatcagcaaaagatcgaatttcctaatttctaatactagtccagaaatatggtatagatttttatcataattttttttgtctagatataataaagtgtaaatggatagccacccacccactcctctcgtataatgtaaatttctcatttttttaatgatgccaaatccatataatcggaatttcaaccaccgtatttgggctatagatcataactaaagttatggaaataaatgaataaattaaaaaatgttaagtagaaaaaataagtatcaacaagagagaaggaagaagaagacataagctaacagttgtccgaaattgattttggcaaaaggtgatctttgattttgcttaaaacatcgaatcagaacatttaatttagttgtttcctcatttctttcatctatggagtttagtatacccaataaatttgattagttacttattccagctcctattattatatttaacacacataatgtaaaacagacgcgtataatttatatagaaactgtatgtagttaaaaacgacatactagtactgatgactctttgtttacgtaaatttgtattctcaaagaaaaaaagtaactaccttttgttatggtctctaagaaaaaacaaaagtactttacagttttcttagtgaccattctgtaagaatatcaaatagtgaaaaataggtaaacgagaatctttttttctgtgtaacaatattgtattagtgaaggattattaattacgagactattatctaaaacgcattagtgacccttttggatttaaatcgtagcagccgactaaaccaaaatatttagaaagttttccaaaaacaaacaacattaaaacacatttaaactcgtacacaataatagaaactaaactatttttagcagactaaagtctaaacaacattacgtttaaaaattgataatcagtgttttatagaactggcgatctcctaaagatgaaccaccgagaagtttcaagataaaaacaaaaataaaaatagccaaacactcttatctattcatccatttgcaggtcaatgacaccgtatttttccacaatcgaatcttccttattctttacacaaacttcttctctgtatgtaagtaaactaatattaaaattgaacttgtcaaagactttcctcttggtcacgtctgctatatatactccttcattcacacaaatgtttaactccaacacacttctctttctctcaacctctctccctctctctctccgattgtgtttttagagctgtcacgtgtcacgtgtcaggttcgaagctctaagaaaaaa

SEQ ID NO: 4601 - DNA, 3000 bp, Unknown
  misc_feature (1)..( 3000): cDNA_ID_1009276_gDNA_ID_1620717_Annot_ID_49128 3000 nt of promoter + ATG
ttttcatacagacagtgcaagtttaacgaatcaaatatagccttttcattcataactaatgccgaatctaatctaaacgcacgatgatgcaaaatacaatcaaaaccccacgacttctttcaagaattatgaggccatttactttctcttttgtttttctttggtacgtaaatttacaaatgtgattgatttgcctactaaacgaatttttttttatctacccttatgtattctgatagtaaatgttcaaattcaatcttacttcttagaatcaaaaatgtgaagaataaaaaacctcatccacacgtgtgtcgcggtcgttaggattttccaacccaatgctactttttgagggtcaaaggtcaattgaacagctggaagaatcttagccgtcagatcagtccccaccgcacacgcgtatcacgctgacaggctggcgcctaaaatcattggccaagtcccacgtgtgaactaatcatcaacgtcgtcattagttttactacattggtctcgtcttcgtgtcgtattacgatcgagctgcttcacaattatgttcttatggacttatctatacaacaacccgaaacctataaatctttattgtcaaaaggaaatacacattacacactatacacgtacttatattggacccaaaagtggttaggttaaaagtgtttgtatcagttctagtaattactaaattagaatattggtatagttccgttttttttctttttctaaatgataattcaataattcatatcatccattgtatgtaatctgtaaaaagtacggacagaaattcattgatcagaaactttttttttttaataaccaaattttgtggcatcatcattaattccgaacacagagattgatatatcacacttacatatatagattagttggatgattgctatatcattgctattgaaaaattgcaaaaagttcttctaattcagatgatataaaatgtgactgtacatttacttattatttaataaagtcgaatttgtagttgaaaataaatacttgtaatcaagtggtttgtactactagtagtctagtacccacgtcgtatcataacttcattcaaatttgcaagtgtatgtgttggagactttgaattatatactaaaaataaataggcaaaaaataaactgaatttccaaaaattctttaaatgatttcgtacgtgtattattgcttgtgatctttgtttttgtttagatgattttagtgagacgagaaaaaaagagaagaagataaaaatgcatgacatcacatgtcagtggatccagagtattatttgatgacaatctagtcagattaggcattcggtgtttaatcaagtacttgtatatgatagctagctaatcattaagcaaaaaaatgagatccaatgactaattaatatatttgattagcgtgtttaatgaagatgacatataattataatacggtgttgggtgagatatactttgttactcgctttgtacatacaacaagtgtttgcattattttattcctcttgaatatattgaatattacggatgagtctgattgtttctcaatagttttggaatggcaataattttatcaggaaacaaaaaaaacgaaaaacaaggtgataacaaaaagaacaataggaatatgaatgaaaaaaacaaaaaagaacaagaaaaacagaaaatgataataagtaggaaccaagagaaacatagaaatagaacaaaatgattatggtaaatggtaacaaaaaaggtgaattaatatttaatataataattactaaataatcatttatttgaattttgtttattattttcatttaaaattaaagttctgtataaatttaaaataatttatattataaatttttcttcaaaacatttatttattttatagtaaaattttcaattatattacaaagttaaaataagtttcactttaaaacatttatttatactaatttaaaataaattcataacattcattaaattgaaagtttgataaatttttttatatatatcaatatatactaaagatatgtaaaatattatatttaaatataaatattatcataaaagctattttaaatttatttaataaataaaaacgaattttatttttttgttcctcttggttcctctacaattttgttctatcatttttttttttttgaggaatgatgaggaaaaatgtaagacccatatgtataaaaatggaacaaaaataccttgcaaatggtaaaaaaaactgaggaacaaagaggaatacaaactttcctactcattcttttcctaaaaaatggttatgaataggagccaataatttagtaatttacacaaatcgaatatttctatgcgtgagaggtgagacctaacaattcaattcaaatttgacattatttgggcctccttcttaagattcgcctacgtttgatcaatctaatttcatattgggctattaagagttattaaaggctcatatgaggcctgtaatgtttttttcgccgcattatcggaaaaacctcaagaagaagagtggtgacataacaaaaccccaaaagctcccaagcctagagattctgttgttgatccgattcccgctctccttctccggtagtacaatctccgtcgccggttacatcagccaggtaagagacattagtttttattttgtttcgaagtttcatctcttttctttccactttatccccttcaaggaatttgtgctagatctacgcttttaggtcgctggcatttgattgattttggaccaacaaaagctaatttaaatgttcatgaggtcttgagatttgatgattaggcttttattttgtcgagactgatgttaggtcgaactatgttgatttaggtttgggattcgatttgattttatggaattggattccttagatagatcctttatatgcatccgttaggtcctcttttaatttgtaattctaaactgtgtcttagggaagagttttaagag

SEQ ID NO: 4602 - DNA, 3000 bp, Unknown
  misc_feature (1)..( 3000): cDNA_ID_1030940_gDNA_ID_1620717_Annot_ID_49130 3000 nt of promoter + ATG
atagctgcactttttggtctggaatgctttgcgtggtactgtgcaggagagattgtaggaaggggcttcactttcaccggctactacccttgaagaaagaaagcaaccccctcataaacaaacatgcgtttcagatccattgaataccgaaaagcctttttatatcataattagcggcttattatctatctcactgctgacattagaagcaaagttaatttctgtttctctggataatttatacacaaaagttttgaaggtgaggcatcatcactcgtgctagctctaataatatcagtcgactaatgttggccatttggttttttctttgtcattttcatttatgtgaataaccatttttcttgggtttagagtctataaaccgtttggtaagatgtatcattcgtgaaacctcagcacataccaaccttaccagagaagagtaagacggcattatattataaaccgtttggtaatatgtatcattcttcttctatcacaaaaaaggaagaaaatcctatatttttgacaattgtctgaaaatacgattaggttcagagtatttcaacgttgtctctgtcatttgtctatcgcaatttcgcataaaagcaagccttgtaggtgtagaagccatcacaccagattgtagtggatgatcggaaactaagacttcagtcatctggtattctcctctctctctctcgaccggtcctcactataagtcttctctttgtaacatttttgtgatcattttggatcgttagttttgtagttgttctttttttttatgagtgttttgatagtgaacataaacttgattcataagtcaactgtatgctcaatcaattggtttttgaagaagttagttctaagaatcaagcaattggataagataaaatcagataaaatctacacgccttttatcaaggcaaagcttatagtgtttaaagctgttttccttgaaaacttgaaagatctacactttcagaaaaaagttgtaaactgcagcaacccataatcaataaagaaccagtagtagttttcttcagttatgcaagcaaagattatatgaattagcatggctatttaatatatgcttttttccttgagcagagactttacagtgtttgaggaacgaagattgtgagacacaatggctaaggatgaagccaagggattgctgaaaagtgaagagctctataaagtttgtccttacatactcatctctacgttagttcacttctccatttctctgatacatttctgtgaaaaatgttgtagtatatactggagactagtgtgtacccacgcgagccagaggttctcagggagcttaggaacattactcataaccaccctcaagctggtatggctactgcaccagacgctggccagttgatggggatgctgctgaatctggtaaatgcaagaaagactatcgaggttggggttttcactggatactctcttctcctcactgctcttacgctaccagaagatggcaaggtatttgcatagatatgaccaaaccaaaagaaaaagtgtcatgatgtttttcgttgttttgcttctgtatcatttctgcaactgatttggtacacgagctctgcaggttatcgccattgacatgaatagagactcgtatgaaataggattgccggttataaagaaagctggtgttgaacacaaaattgatttcaaagagtctgaagctcttccagccctcgacgagcttttaaacaatgtacaacttcatacttctttgtctttcaaaaaaagaattagtatgtatcctgagatggtctttttgttttgatgtttgtgatgcagaaagtgaatgagggtggattcgacttcgcatttgtggatgcagacaagctgaattattggaactatcatgagaggcttattagattgatcaaggttggtgggatcatagtgtatgataacactctctggggaggatcagttgctgaaccggactcgtccacgcccgagtggaggatagaagtcaagaaagcaaccctcgagctgaacaagaaactctcggctgatcagcgtgtgcagatctcgcaagctgcgcttggcgatggtatcactatttgcaggaggttatattgagcgagtattgttgttctttgtgatctttagggtcatatgattgtgagccctttatattgagctattgtgatgcaagagtgttattgttctatgtgatattttggttcctgtgtgaatgtgaaccttttctatcaagtttgtggatttcttcaaatttcaagattataacagacagttacgaagaaacacaactcattttatgttttgtgtcttttggcaaaactccaaattctgaacattgctctaaaatctaatataaaaagtaaaaaaatgaatggggcgttccgagaatcgaactcgggacctctcgcacccaaagcgagaatcataccactagaccaaacgcccacattgatatatagtttgctagcttttaatacaatgtatattaaataatttagttttgtgatataaacagtaaacagaacaagatattttcacccaaagttaaaaaatccaacgtttgttcaaaaataagaaaaaaactatccaaagttaaattatcaaatgttaaaaatcgttagacgttaatcacaatataaaggaactcttttttttttttttgagttaagaaacacttagttgggccataaaaatataggtctagtagatgaaaggcccataaaatcaactagggttagttcttcttcttatagagcgccgcatataagcttcatccttctccgtcaccaccggctctgtatttcggcatttgtggagagaagaaggtactctcatccctttctctttcttatcttaatctccttttttaaaatttgtgacaaagtaaaatgagctaatctcgtctttaagatcatatgtcaaaactgaatttgagttttgatatattcaggtaaagagagaagatagaaacataaa

SEQ ID NO: 4603 - DNA, 3000 bp, Unknown
  misc_feature (1)..( 3000): cDNA_ID_1824872_gDNA_ID_1620717_Annot_ID_49134 3000 nt of promoter + ATG
ggttaaatagcagagaagagtatgccaacaaaattacccttcccgccaactattacacacaagctaaaatgaatcaattctcttatggttacgtcaaacacttaaactaacctgttaaccagcttaaaaaaaaaatatatgaaagttgcagaatgttgaacctataatctaacttagacattatcttgcgataggaatatattaaaatatttaaataattaatgctgacattgcgatgtcatgtacgtttccaatataaacactctcgattaaagtgaataagtgatgccctaagtgatatgtataggtcaggacattgtatattattgaatcatcaaatgaccattcgggcaggctgaggtacaaatagataaaaatcgatggtagataccagttggaaagtgaatggaatccttggcagcagaaaagataattttggaatctttggattttaatgtcctattatctcatagacaaagaagacagaatttttacttttaaaaatatcaagtttatagttatcgtatgctagttataggaagacatacttttcacgagtaaaagaacttttttttgtatgtattacacttctagtataaaaatacatgcactataatttctgattcataatttcataatcccctaccacgttatctctctttttgtttttgtacgtcactattgcctctcgatttttgagatacatgttcgtaataaaataaaataaatatttttaaaagtgatgtgtaaacgttttattggatcatatattttaacattttaatataaatagtgatactaggggtttgaagcaaacacagcattcaaaataagtcgctaaaagtaaaaacaaaagaaaaatggagaagtggatgaacttgagagacgaagacttaacggaagaaacaaagactctaatctcttcactttcttcagagaaagggtacctcggtcgaaacctctgcaagtaccaaggctcttggtattactacaactttctccaaggtgttctcaatttccagagaggttttaagcctcaagacactgatattatcgtcgcatcgtacccaaaatccggcaccctgtggctcaaggcactcactgtcgcgctttttgagagaacaaagaacccttctcatgatgatcctatgagccatcctcttctatccaacaatcctcacaacctcgtacctgtccttgagatgaatctttaccgggatacccaaacaccggacttgacctagctctcatcatcatctccaaggttgttctctactcacacgcctttccacacgctgcaagtagctgtcaaggactctccttgcaaggtggtttacatctgcagggacgcgaaagattcgctggtgtcacgttggcatatcgtttgcaggagtctgaataaagaagaggacagaaccattcttgagtctatgtttgagtccttttgcagcggagtctgcttgtttggtccgttttgggatcatatcctgagttactggaaagctagcttggaaaagccaaagcaagtgcttttcatgaggtatgatgagataaaaacagatcctcatggtcagctcaagaaactcgcagagtttttgggttgtccattttctaaggaagaagaaaagaacggatctctaaataagatcttggagatgtgttctctgcctaacctgagcagtttggaggttaacaagaccggaaagtcaatcaatggcatagagtacaagaaccatttccgcaaagggatagttggtgactggaagaatcatctaactccggaaatgggtagcaaaatcgacatgatcatgaaggagaaactcaaagattattccgaggtttggtttgaaaatgcattgtaataattaataagtgacccttctgatgttaaggtgcatggttttaaaattctgaattagtgatgtttatgtgttgtttgtgttttgttttcctttgaaatgcattgtaacaataagtacctgtatcctttgatcatgtaaaggttcatggtttcaaaattctgagaaataataaaccggatcggttatttcggttatcggtcggaccgtattaatgcatggcttgaccttgacttgataaccaagcccaacagttggaaaaaatcaataaaaggtaacaaaatagaaaaccaataaacaaatatcaattctagaaaaatatcgatctttctctgcaagtacttgtactagtcgtcgttactgtcaaataatctacaaagcagtgaccaaaaccaccatttccgcacatagctaagacctttaatggtttcctctctctctctatctctacctggctttgtaatttgtttaccgactacaatggtcaaaatttctctactcctataaaaatgggtcgccttgtttttgatcaacggatttgattcatctttctttttacctttcttcctgctttcgtattcaatttgtagttgaccagttcaaaagtctctataccagaaaaaaaaatcgttttttattatattataagacttttcccctgaaattgttgttcctctgtttcgagcgttcgttatgagtactgtggagagtagcaaaccgaagatcatcaatggctcttgtggttatgttctagaagatgtaccgcatctctccgattaccttcctggtcttcctgtatgtttacctctctctttttttaatctgatttgattaaagcttttgcttttgagctttaactgttgcaaaaggttgaaactttgatctatgttgatagatatttatatatcaattttttcagctgaggactgtttagtttttttgtttggaatttgagatagatgaaatgaatttcccagattctgattagtataagatagcccagggtaaagaaaaaggggtcttttgtatttgggtctcaagaattatgaacctggatcaaaatctgtagcatggtttaagagtttttgtccttttaccatgttatttttgggatcgaatgatggttaagttttgattaatg

SEQ ID NO: 4604 - DNA, 3000 bp, Unknown
  misc_feature (1)..( 3000): cDNA_ID_2051556_gDNA_ID_1620717_Annot_ID_165686 3000 nt of promoter + ATG
acctttttgagctcacacgagtaaagatgatctgtgtccatgttcgcactctgatttcttggtttgttaatttcagctaagggcaggaaatgtaattgagcgaacaggttagctttttgaagttttctccttacatctgaacgtttttggatgagtatgatttaacaaaattttgatggaccattgcacattcagggcgtacttttcgggttagtcatttggacgtttggttttataccttcagttttttttagttccaggtattgagaaacgctaattatctttttgtttgatgttgtaggttgtagaagcagagcataagcaacaaggtagaggaggagcttccatacaggtatgcatacctgaaactctttaatcaacagtctaatgttttgatcgattatttcatatttttctgttgttgatattccgtctcttagcctaaactctcttctctgtggaaaacaggttgagcttcgtgatgttgacactgggaataagcttaacttgcgttttggatctgaggagtcggttgagagtatgttgcttattccatagcttagtgttaattcatcagttacctactaaaagttgttttttttgggttctctaaccattttggtattagcatcgtaggataggtcgattactttttttgtgatattgattgattgcatcaatttactgcagaagtttttgttgaagagaaatctttcacgtgtttgtatgcagagggagatactgcatatctgattgagtgagtccatatttttttgtgtaatctcattacctgttttatatcaacttaaacactgtaggatcttgtgttgctaaagttgatttccttgattatgtaaatccaacaggcctaatacgtttgagcaagttgaagtgccattggacatatttggaaaagctgctgtatatttaaaaggttggtagcaagatgatatctttcgtggtgcatgtcatacttatttcctttgttgatggttgtctcaacaacaatatggatactcttgagtgcagacagtcattgttgagcaagttgagtgcatgtgctagaaatactaacatatttgtcatgtatctctttgtcccttctttcctcgtgattgacagaggaaatgaaagttcagttgcagctgtatgatggaagagctttatctgcatctatccctaagcatatcacatgcacagttgtagaaacacaacttccaatgaaaggcctaacatcagctcctcggtatgtcctttttctcaaaagtcaggaacgctttttctctatacggtataagcgtttaacatattattgattaacacatgtaccattttgtttaacacatgtaccattttgtttccttaacaccatgaatcaatcgtttataagttatgagaaaacgccttatttcttaaaatgcaggtacaagagagctctcctggataatggttccactattcaggtaagatgtcgttctaggaagttggagctattagtattgtttgatcttcaaatttcatgtaacaggaactagtctggttcatctaaataccaaaataactcttggttccaccttgaatacctcaggtaccatcttatctcgaggcaggtgaaaagattgtgataaacactgaggatgactcttttgttaagaggtattattaagtcaactctttgattcattactctgttcattgttgttgatatgggctttgctcacgttagtcctcttcttgctttcgctcattacagggacaacaaatgaaactattgcgtagtcgtttaatacttctcctatggaggatacatcggatatgttgagaaacgtttgatagaaagattaggggtttagtgtttatgaagctattgctattattattccagttctcataatctcggagcttctgagacttgtgtcgattgtcacaagttctatatgaagaagacttccgttgtgtacaaagatttcagaatcataaaggttaatttttatgatttattaatttttcggcccaacacctattaatgccttcaaacactaccgccgtgtccttcaaccgtatcaacggacagtgttgtgttggtcgtacttttcagatttatgtccagagctcacccaactttgctgagcttcttgaggcatgaaagcttcaacatggaaagcaaggactttcctatatattctcgcttatccagacgattttgagtcatccagagggaaaaaggtagatcaactgatattagaagacgatgctcaaatttacattagaaactccatccttgagtcagtgatgagtttttcctcatctcctcttgctgatgatgaaagtaaaggtctaatccttcaggtgctactttcttaccttaatgtcacttggtgtttatcttgcatctatatgcagttgcctcttcagtatcaataatataagcttgattctgagagtatatttgcttcatctgttcagacgaaaaccagattctgaatagccaatttgacgtaaaccgcgctttagttggtctatccgaatagtccagcccggtttaattaagtttgcaggttcgggtcgatcaaaatgtctattaccccggtggttaagagacatattcaacgaattaacaaggaaataaataatcaaaagaacccttaaaattcatcatcatatgttcattttcccaaaagacgaaaacagaagagaaactttaacgacaaagctccgtttctccgccgatcatctgacttttaccaccgtggtatgattctccatcccttcttatttatttaatcttcctcaaattcgccgttgatttgttcaactttagcctaaatgttcaacgaatcggatcgcattaataaacacagtaacctaatggcataatgggcctaatattttttcggcccaacacgaaaattacctgaacaattaaaaaaaaaaagaagataaaataaaaaaataaaaaaagggaaacaaattaaagagagagacagaaaattggaaatg

SEQ ID NO: 4605 - DNA, 3000 bp, Unknown
  misc_feature (1)..( 3000): cDNA_ID_3073751_gDNA_ID_1620717_Annot_ID_165683 3000 nt of promoter + ATG
atcagaaattgttgtgaatgctttaaaggaaattgttgtaattatggtgaccatttgaacgttattaactttatccatgttttttatgctatcaatgatgtcatgtaaataactattctcctggacatgccaacgtgttccgtgagttctaatttcgttccaacaatctagtcttcttctttagtttagcaccataatcacatctaccctaacatgttacatatggtcatctcttaatttctaaatgatggtttgaattataaatggagattttatgcattaattatggtgttgtgcaattctacgagtataaaaattgtaagctaatgataaattatatatacacgtaaattttacaaaatgttacgtaaatttgctccctcaattttgtatatttgcttatgaactgtgtcaatgtcacatccatatttgttattcaagccctggttaaatagcagagaagagtatgccaacaaaattacccttcccgccaactattacacacaagctaaaatgaatcaattctcttatggttacgtcaaacacttaaactaacctgttaaccagcttaaaaaaaaaatatatgaaagttgcagaatgttgaacctataatctaacttagacattatcttgcgataggaatatattaaaatatttaaataattaatgctgacattgcgatgtcatgtacgtttccaatataaacactctcgattaaagtgaataagtgatgccctaagtgatatgtataggtcaggacattgtatattattgaatcatcaaatgaccattcgggcaggctgaggtacaaatagataaaaatcgatggtagataccagttggaaagtgaatggaatccttggcagcagaaaagataattttggaatctttggattttaatgtcctattatctcatagacaaagaagacagaatttttacttttaaaaatatcaagtttatagttatcgtatgctagttataggaagacatacttttcacgagtaaaagaacttttttttgtatgtattacacttctagtataaaaatacatgcactataatttctgattcataatttcataatcccctaccacgttatctctctttttgtttttgtacgtcactattgcctctcgatttttgagatacatgttcgtaataaaataaaataaatatttttaaaagtgatgtgtaaacgttttattggatcatatattttaacattttaatataaatagtgatactaggggtttgaagcaaacacagcattcaaaataagtcgctaaaagtaaaaacaaaagaaaaatggagaagtggatgaacttgagagacgaagacttaacggaagaaacaaagactctaatctcttcactttcttcagagaaagggtacctcggtcgaaacctctgcaagtaccaaggctcttggtattactacaactttctccaaggtgttctcaatttccagagaggttttaagcctcaagacactgatattatcgtcgcatcgtacccaaaatccggcaccctgtggctcaaggcactcactgtcgcgctttttgagagaacaaagaacccttctcatgatgatcctatgagccatcctcttctatccaacaatcctcacaacctcgtacctgtccttgagatgaatctttaccgggatacccaaacaccggacttgacctagctctcatcatcatctccaaggttgttctctactcacacgcctttccacacgctgcaagtagctgtcaaggactctccttgcaaggtggtttacatctgcagggacgcgaaagattcgctggtgtcacgttggcatatcgtttgcaggagtctgaataaagaagaggacagaaccattcttgagtctatgtttgagtccttttgcagcggagtctgcttgtttggtccgttttgggatcatatcctgagttactggaaagctagcttggaaaagccaaagcaagtgcttttcatgaggtatgatgagataaaaacagatcctcatggtcagctcaagaaactcgcagagtttttgggttgtccattttctaaggaagaagaaaagaacggatctctaaataagatcttggagatgtgttctctgcctaacctgagcagtttggaggttaacaagaccggaaagtcaatcaatggcatagagtacaagaaccatttccgcaaagggatagttggtgactggaagaatcatctaactccggaaatgggtagcaaaatcgacatgatcatgaaggagaaactcaaagattattccgaggtttggtttgaaaatgcattgtaataattaataagtgacccttctgatgttaaggtgcatggttttaaaattctgaattagtgatgtttatgtgttgtttgtgttttgttttcctttgaaatgcattgtaacaataagtacctgtatcctttgatcatgtaaaggttcatggtttcaaaattctgagaaataataaaccggatcggttatttcggttatcggtcggaccgtattaatgcatggcttgaccttgacttgataaccaagcccaacagttggaaaaaatcaataaaaggtaacaaaatagaaaaccaataaacaaatatcaattctagaaaaatatcgatctttctctgcaagtacttgtactagtcgtcgttactgtcaaataatctacaaagcagtgaccaaaaccaccatttccgcacatagctaagacctttaatggtttcctctctctctctatctctacctggctttgtaatttgtttaccgactacaatggtcaaaatttctctactcctataaaaatgggtcgccttgtttttgatcaacggatttgattcatctttctttttacctttcttcctgctttcgtattcaatttgtagttgaccagttcaaaagtctctataccagaaaaaaaaatcgttttttattatattataagacttttcccctgaaattgttgttcctctgtttcgagcgttcgttatg

SEQ ID NO: 4606 - DNA, 3000 bp, Unknown; identical to SEQ ID NO: 4602
  misc_feature (1)..( 3000): cDNA_ID_1030940_gDNA_ID_1620717_Annot_ID_165678 3000 nt of promoter + ATG

SEQ ID NO: 4607 - DNA, 3000 bp, Unknown; identical to SEQ ID NO: 4601
  misc_feature (1)..( 3000): cDNA_ID_1009276_gDNA_ID_1620717_Annot_ID_165675 3000 nt of promoter + ATG

SEQ ID NO: 4608 - DNA, 3000 bp, Unknown
  misc_feature (1)..( 3000): cDNA_ID_1824891_gDNA_ID_1620717_Annot_ID_165672 3000 nt of promoter + ATG
aagctggtgggttcgatcacatgcaaattacaattgtctattagtattacgtaaatacgaatatacatccatatgtaagaacacgtgtgtataactgtgtatatctccaatatacgtgcatctacatctataagtttacattgttttcgttatcttctacctaaatttattaattttcatttgggtcctattgttatgtcgattaataccctttaatttaggctgatgttctaagtccaaacatacaaacagccaatcttaacacaaaatcttaatctcagcatgcgggcaaaattgcgaccatacaactattatgctatgatggttctagtaataaaagcaggcatttagtttggaaaaaaagtaaaatctccttagagtactttaattagtaaccagtgctataaacgaattgtaaccaacacgcaatggaatcaataacactctattaacttaatatagatatgagaaactcgtgcttttaatctttgttaaaacgtcgacaaaaaaaaagtttttttctgttaattagttctcctctttttaaagttttaaatttttgatttcataactcactattaattgcgatatgtggggtcacctaagatcctccaagaacttatattcttgatgaacatatattgttcacaaattggaatcataatcttatcgtatgattgtatgtatatgtgtcacgtagttggacttttaaccactattagatctttccaaatatcctctctctttttttgcttcaaatttgttttttttgtgcacacacatcttatattattaatatataaaattggatgagctttataagagttttaattacatataggaaaaatagaactaattaataagatttagatatatgtataaacgtatttatatattgacatgtaagttttaaaataatatatcgtcatgggaaatatttttaaaaatcttaaaatacagtatggacttatatattcatactaaaacctagtggggtttttttttgtgtgtacatgaaaagtggtaaaagtattttctcttttttaattttgttagattaaaaatatgttaaggtagcttgttttgtttatcgtcatgtgttaaagtgtactatatggtaaagatttatacagtagcatgtgtaagcgggttcatgagtaggagagaattaaattctgccttaattaaacaaaggtttcgattagccgtacgtaccgccattaatagggagcataattatcacccattagggagcatactttgaccactaggggaaaattagaaacctatggtaatcgtattaattaatacggccaaaattaattctaattaacatataaaactgtttcccacaactaatttttatagatatatcaccttttagataaaatatagaaattctttcttcatatatatgttactaacaaataaaaatcataccgatgcaatgacctacaatctgaccggttagctcaacaactcagtatttgagaaatgtaattttgttcgattaccataggtttttatttgtataaatctaaatataatcatattacttctttttttatcgaaatataatcatattaactcacgcgaagaaactataataatccatctgacttctggttcgtaaatattgtcatacttaattagagacgaattgttctcatggtaatcagcaaaagatcgaatttcctaatttctaatactagtccagaaatatggtatagatttttatcataattttttttgtctagatataataaagtgtaaatggatagccacccacccactcctctcgtataatgtaaatttctcatttttttaatgatgccaaatccatataatcggaatttcaaccaccgtatttgggctatagatcataactaaagttatggaaataaatgaataaattaaaaaatgttaagtagaaaaaataagtatcaacaagagagaaggaagaagaagacataagctaacagttgtccgaaattgattttggcaaaaggtgatctttgattttgcttaaaacatcgaatcagaacatttaatttagttgtttcctcatttctttcatctatggagtttagtatacccaataaatttgattagttacttattccagctcctattattatatttaacacacataatgtaaaacagacgcgtataatttatatagaaactgtatgtagttaaaaacgacatactagtactgatgactctttgtttacgtaaatttgtattctcaaagaaaaaaagtaactaccttttgttatggtctctaagaaaaaacaaaagtactttacagttttcttagtgaccattctgtaagaatatcaaatagtgaaaaataggtaaacgagaatctttttttctgtgtaacaatattgtattagtgaaggattattaattacgagactattatctaaaacgcattagtgacccttttggatttaaatcgtagcagccgactaaaccaaaatatttagaaagttttccaaaaacaaacaacattaaaacacatttaaactcgtacacaataatagaaactaaactatttttagcagactaaagtctaaacaacattacgtttaaaaattgataatcagtgttttatagaactggcgatctcctaaagatgaaccaccgagaagtttcaagataaaaacaaaaataaaaatagccaaacactcttatctattcatccatttgcaggtcaatgacaccgtatttttccacaatcgaatcttccttattctttacacaaacttcttctctgtatgtaagtaaactaatattaaaattgaacttgtcaaagactttcctcttggtcacgtctgctatatatactccttcattcacacaaatgtttaactccaacacacttctctttctctcaacctctctccctctctctctccgattgtgtttttagagctgtcacgtgtcacgtgtcaggttcgaagctctaagaaaaaaatgggtcttcctctaatg

SEQ ID NO: 4609 - DNA, 3000 bp, Unknown
  misc_feature (1)..( 3000): cDNA_ID_3073773_gDNA_ID_1620717_Annot_ID_165667 3000 nt of promoter + ATG
aaatttgaagaaaattagatcaattgtctcttaagacaattgatctaattttcttcaaatttaagagacttatctaatatttaaatcatataaaatatttattatttgtttagagttttactaagagtccactattgtggatgctcttaatccttacacattaaaatccctacattaaaataataattatttatttaattttgaagataataaaaaaattaaactaattaataaaaatatatagtaattggcagtatataactatatatatagaaaaacataacaaaaaacaaattaatacttgagaagataaagtaattcactggcagaaaacataacaaaaacaaattaatacttgagaagataaagtaacactggcagtggagaacttgtgttgcagagtacggcaacgtgttcgtacaaacacgtttgaaatattcttgcatgtcataacgcgttttgcaatattatactgtactactattgttttgggttctcattgaattcaagaattaagaaattaaaaatgccaatatataaatgcaaagtttgaaatacgtatttggtaactcgtttattggtatacgattaaatattatttagtatggtgattgatctgtatacacacacacgcacacggaaaactaatgattgtatactaaagtttgttctccattttgatatcaatatgaagagaaataaacttagagcagcaaatagtggtttgtgttcgtgttcttgatgtgtcattgctttgctacaattatgtatagtactgcatgtttgctaaccaaaacaattagagaagccaaatcattaatagttcccttcttagtatagggtttccaacataaaatttgatgttaacacttgcattatcagtccaaactgaagcaattgattagaattattatactcatcatatatatggtgttggaacttgtgaaaaatggatttgtatatacaattggggacttcattaatttttcgacagatatggctgtgtttttttatatgtataaatggctgtataataattgttgattagttgtaaatataatcaagaacacaaaagtgcctcgagaattaaaaacacacatggagtatggtcaagttgtaaattttgtaataatatcttataattaaggagtacactttattacaatcttcaatcattgctgaataatgcatgaatgggtcacatatatatgaagctttacatttgcacatatacaaaatgaattatcaaccaacatagctaatagcttccacttggacactgattctcatgcccaaaatataaataaaaaaatacgaacgaaagaaaaacaaacactttcgtgtaagaaggtaaaatacgacagtcagtctattctcacgtatgtatgtataatctactcactgattgagcaattaacttttattgaacgattaattagattgatataaagctttagaaatgagaagaatcaccaaaacgttacaattagctgtgtcaagtagtttaagaacaccaagccgttatgattagctccaatttgcccaattgtgttaaaatgtgcttattgtacaaatgcagataaagcatgtgatagatggaaattgttgctacgcgtgcaacttagtttttttctataaagttcaagttgctttacaggtttattggcagataatttcaaataccgagttatacaataaacccattgtgatacttaaagaaaacatgtgttttggttttggagcatttctatatagagataaggtatgttgctacctttcttttacagatttactgaagactcgaaagcaataatctatagacttgagaacacaacactgatcaaaatcttcaggggtctctcttttagtcaaatatacagtatgggttttattggtcaaagagatgcaaggagcttaaatccaaaactttgacggttacaaaaagataaaactagtactttgcagttcttaaatcattttttgcatgcttcgtttacaaaaaaaaaaaaaagtaccatttacttgtatgaattaaacgtgagtcacgaactttagtatgactttgaattttgatgatcaatatgatgagtaaatttcttgatttgatgaacagaatcaaaatagatatataaatgggccacatatatgggcctaattagttgggtttaaattaaaacatttcagttgtgattcacaaaccaaaaaacctggttatttggagtcatgcttgtaaacctgaatggttattgataatgttttggttttcaatataaaccggaagttttaacacaaacgaagattcagttaacccttgctatcgaattcgccgcgcctcttcgtctccttcacagagatactcttcgtcaatttgaaaacttccaggtaatctcatctttttcttcttcttcttctccttctatttgtattaagcgtagcctgagaaatctcctggtcggttttgagacagtgccctgtgctctaatttcggttgataccttgacatgtccgtctcttcttcgagggtgatttttgtttttcaaattcagatttaagatgtgacccagttactaaaacttctggttttaaggttgccatcatttatgtggaatatcctcagctcgattgaatctggcagtttttcgtttttctcttgttaatggtttttgttaagaagcgttttggtgttttagtgaataagaacactgccaatcatcatttcacgaacaatggtattagaaagtgcataattttctggatggctgcttctttggttggaattgtttgattcacatttaatacatagtctctattgctcagtttccaatcacttaagagctccgtgttgggttttctagagctaccgtttgatggatttatgtgaggcatcttaatttatccgttctttgtgaatcatcacttcacttgtgctaaacttgagaaaacgtttcccttgatagttttgaactgcagctgatttccgactaaattaaaggagtaatg

SEQ ID NO: 4610 - DNA, 1882 bp, Unknown
  misc_feature (1)..( 1882): cDNA_ID_3091862_gDNA_ID_1620717_Annot_ID_165665 3000 nt of promoter + ATG
aagcgttagctgctgaaaccgaacagccaaaatggtgggagaggaaagcagggccaaacatgattgacattacctcagctgagcagtttctcaacgcgttaaaagatgcgggagatagattagttatcgtagatttttacggaacttggtgtggttcttgccgtgcaatgttcccaaaggtaactttcccgttagctacttaacgattgtatctcttcgtgtatactcgatcatctctcatttcattcagttcgcgagtcttgaaccattatgtttcttaagcttgctcaaattatcggcttgcttattctaaagctgagactcttttcttattcttttccagctctgcaaaacggcgaaagaacaccctaacatcttgttccttaaagtaaactttgacgagaacaagtctctctgcaaaagcttaaacgtcaaggtgttaccgtatttccacttctaccgcggtgctgatggccaagtcgaatccttctcatgctctcttgccaaggttagttcttcttgtcccagctttctttaatttcaaacgtcacttgtctatcacgaaaccagagaatagttactgcattgtatagtcttgatggcgacctctaagtctaataagcgtctgcaaacatttatgcagttccagaaactgagagaggcgatagagagacacaatgtaggaagtatcagtaacatctcttcttcagcttctgagaaagttgaagattcaagtgaataatcaatgcctggttcagattgatcacagattattttgttaaatcgcttccctgtatatatgttgactgcattttccatgtggtgcatcataatttttgtacataaataaatgagtctgacttcgagttcatcgcctatcaagtatcagcttccctaaaccgagtaaaaccgggaagtgttgggtttcaaaattaacttggtgagttaacagttaacacacacatccaccgtttttagatagataagaggatgccctaataaaaccactgctttgtcttgggtaagaagaaacgttaacatgttagttgtcctacaaattcattcatctataaacgttaaagtctgtattaacgaatgaaagtaatcaaaagctacatatttattacacaaacaaaaatgcatcagttgcatctcgtctaagaaagcattttttcttcactcgaagaaaaataacaagaagttgaagccttaggctcacgagccaactcctttaacatgtcgagtttctaatccgagtaaaggatttgtatttcgtcgagaaagttgccgcttcttcaaatgtttggcatttgttaagttgcaacttgtctctcttcttcacgttgtccattgtatccttcccactggaatctttgtaggtggaataacaaacaaggaggaacagaaatcggtttgctaattggcgggttaatagttttgtaaaatggtagattaaacatgcgctctatcctgtaacatttctgagcttgagaacttgtagttgaggagaattcagtagcaaattcgttagtagcttccaccgctcgtttttcctagtattgtagctccaaatgtacatcattaatagatcatataaaagaaaattataatttcaaaaaaggctcaagttgaagtatccaacggtggtcaatttaagactataccaacgcctgtacttcaaaagtttctgcaagtattcattagcagtgacgaattcaaatttgaaaaaaaaaacttttatctgtaaattctccatccttaacggtcaaatttagtcgggcagcagacaaactctcaagtccgatcaggaaacgaaacgagaacaaaagaaaagagattggattttggtgacggcgtttccttcgccgtcgtgttcaccatg

SEQ ID NO: 4611 - DNA, 62 bp, Unknown
  misc_feature (1)..( 62): cDNA_ID_2051606_gDNA_ID_1620717_Annot_ID_165663 3000 nt of promoter + ATG
aagcgttagctgctgaaaccgaacagccaaaatggtgggagaggaaagcagggccaaacatg

SEQ ID NO: 4612 - DNA, 3000 bp, Unknown
  misc_feature (1)..( 3000): cDNA_ID_1815332_gDNA_ID_1620717_Annot_ID_165696 3000 nt of promoter + ATG
ccgattttcgattctttttcatcatggcgcacaagctcatcttcttcttcttttgtttctgttttaactgggggtcctccaaagctcatgtggttgtattccaacaaagaactcttgtcaaactcgtatccaggctctgtacaaaccgaacaatatgcattgaagttatatcacaagcagttaaatcacgaagaatcaagcaaatgatccacagaagttacaatgagattcctacattcatgactgtgttgcagatggaaacagaacatgataacaaaaaatacgtttggttgatacttacctcttcttgcgtttattctcttctcaaagagacgaattgggtcagagccttctaagcatgcggcataaagtattacactgtcaatatcatccagcaacatgatcagagagggtagatacatcattcatattgataggagataatcatatcaaagttcaattttttggctgaaatcaagtaaaaagagagaactaatggcttaatacttctaccctcgagaaaaattgactgttgagtgaggcaaggttctgggtttagggttttaggttaaaccttaaaacccagacaatggaacactaagttgagacttattcttgtcacaccaagccgcatagatgactgaatcgtttccaattctagtaaaggcgaattttcatttgcagctaaaatttccaatttttttcaaatcaacgaaacgattacgatttcagaaacgcttaaagtgagaaaacgaagcttacagagcgagctcgcgtgcggctcgaggactgcttaatcggccgctcttatcaatcttcggcatcgggacatctttcacctcctccgcggaaatagtcggcgtacggagagcgcttctagtcggagagagaaatagccgtagtgaagacgatgacgaacgtttatttcccgttcgcagggaaaccaagttcgttggccggagcgaatcaaccaatgtaaatcctatagaacggtgagaatctggtgaaacattactggagaagtaacagaggttcgaagaagaacgtaagcaaagcggcgagaaggttccctccatttttgtttcgagctctttttctgcttcgccgtgttagtgtgagaagcagataacgatatccgtaaaattgaaaaaaaaaacaaaatatctccggaaaaaaggattaaaaaaaaaaaaaaaaaaaaaaagaagctgaaacacacgacaacgttttagtctgatcaaaatgaaagccaaaaaatgtggcctatacagggatcgaacctgtgaccttcgcgttattagcacgacgctctaaccaactgagctaataggccactacgtttctaagtggtgcacttagatatttctctcggaatttcgtagattgtgattctgtgacagttttctttcaagacaagtatcaagtgcaacaaaaaaacatcggatatgggactcgtactcgtgttcatgaagataataaactctcatataactacttgactaaaacgatatattcgtatgcattagaaaaaacaattgtatataactaataaacatcacatgattaagttttaactgcaaataacgattttgttaccactgttaacgctcgttaattcggatgtctgattttgtcaaaaaaaataaaaaataaaaatatttaaaagacataaaaactaatttaggtattttggacaaatttagtagcacggatattaaataggcaaattaaaattaaatggagatttttcagcttttttcccataaaccgacctaaataactcgaatataaattgtcatgaccttttaacatcgtttaggtttctaatctttaaatccttcattgactttgcgctcgcctgtaaactttaagatgatctcatgcttttggttttagtaatcatctcaaattaagcattacaccaagacaaaatccacaagctacgggaacaatattatagaactcaaaagttgatatatgcgattgaacaaatatcaagtattcctccacttggaagattattgtttaatgtttactaaagaaccgttttaaaattaacacttgtcgcgtattagtcacgaaactgctgtaattctacacattgtggttgttgaaagtggttttgatttggtctttcgttagatgaagtcaatgtctactgttaactaattatttcaaacctttgttgagctgtttctttaccacataatcagattccatgatctttaatatcactagcagaaatcgacatgcaaaagtgtttgtttgacgatttctctactttaccgctggttcactgtaactgcttgatcaaacatattagtattatcctttgttaatgatatatattaccatttcgttaatcataacttcttcaataaaaatgtgaaaggtgcacaggccgacctaacggtaatatacgtatgagcttaattaatgtagtctagaaactcgaaaaatataaattgttaattagaggatctttatctctaaaaatcgatcattgacttttcgttcgaacgacgtgactaaattgtaatgccgtactgcttcaattatttccagttatgtataataaagaaagacccgcaagctacgttcggtaaaaaaatagacctatgtcacactatgtggaaaaccctaagtttaacgttcatgacgctatcaaaattcagagtttatcgtttaaatgatttgaccaaaactaaaaacagtacacgatcattaataaggcaatcctgttttcgaataaaatatgaaataagataggcccaccttgcctcacatctgatgctaaatttctagtcgttatataattgagatattattatctctctataaattgatggcttgacttagtattcggacagctttgaggttttgtcacgtgatccgacaagctacgagttctatatatacatacagagagcagtaagtttcttatactcaaaataatcatctctcataccactcatcaatattcaaacaatccctttctct

SEQ ID NO: 4613 - DNA, 3000 bp, Unknown
  misc_feature (1)..( 3000): cDNA_ID_3091954_gDNA_ID_1620717_Annot_ID_165695 3000 nt of promoter + ATG
accagatagatgattcgaataatgagagatatgatcttggggtccattcctgaataaaaactccaagagttgatgtgagacattagttgagtgatgcttgatatgagccttgactctggctttcgtccctcctctgcgtcaacgaggtcgtgtatttgattaatgagtgatgccatctccgaatcctccgaatcctttatttccttgaggatacgagatattttataagtgactgacgtgagcctccattgtgactccgtgggatccaagtctgtagagctggtgatagagataattcgagtcacgagtgataccaactgtgactctggtccagaaacaaccttgctgagagagattatttgcctaacgagtgatgtgatcttcggctcctgcttcggctctgaattcgaatccatatccagtgattcgatgagaggaataagttgattagcgtatgctatgaaatctcttgccacctcttgacacatatcctcacctcttaatgtagatatcattttagaaatgatatagaacatgagctccgactcccaattcatatcatctgtatagccgtagataagatcatctttttcttcttcttcggtggtgagaggcggcacttgttggttattgatgagcttctgttcctccgtctggacgagactggccacctcagaaaggagtgaaaagagctccgattcctcgtccattgccatgatgagagcgaatatttgagaagtgagtgacatgagctccggctctgactccttgagatcaaaatctatagagccgatgatagagatcattttagtcaccactgataccgactgcgactctggtcctggttctgaaacagagttgctgacataaattatctgcttaattagtgatttgagcttcgactccggctccggctgcgaatccaaatccagagagttgaccagagagattagttgacaagtaagtgctatcaactttgacttcagctgtggtgtatgtgtgtcttccccaccgcctaagatagataacagttgagaaataagagatatcatgagctccgactcggaatccatagagaaagggattgtttgaatattgatgagtggtatgagagatgattattttgagtataagaaacttactgctctctgtatgtatatatagaactcgtagcttgtcggatcacgtgacaaaacctcaaagctgtccgaatactaagtcaagccatcaatttatagagagataataatatctcaattatataacgactagaaatttagcatcagatgtgaggcaaggtgggcctatcttatttcatattttattcgaaaacaggattgccttattaatgatcgtgtactgtttttagttttggtcaaatcatttaaacgataaactctgaattttgatagcgtcatgaacgttaaacttagggttttccacatagtgtgacataggtctatttttttaccgaacgtagcttgcgggtctttctttattatacataactggaaataattgaagcagtacggcattacaatttagtcacgtcgttcgaacgaaaagtcaatgatcgatttttagagataaagatcctctaattaacaatttatatttttcgagtttctagactacattaattaagctcatacgtatattaccgttaggtcggcctgtgcacctttcacatttttattgaagaagttatgattaacgaaatggtaatatatatcattaacaaaggataatactaatatgtttgatcaagcagttacagtgaaccagcggtaaagtagagaaatcgtcaaacaaacacttttgcatgtcgatttctgctagtgatattaaagatcatggaatctgattatgtggtaaagaaacagctcaacaaaggtttgaaataattagttaacagtagacattgacttcatctaacgaaagaccaaatcaaaaccactttcaacaaccacaatgtgtagaattacagcagtttcgtgactaatacgcgacaagtgttaattttaaaacggttctttagtaaacattaaacaataatcttccaagtggaggaatacttgatatttgttcaatcgcatatatcaacttttgagttctataatattgttcccgtagcttgtggattttgtcttggtgtaatgcttaatttgagatgattactaaaaccaaaagcatgagatcatcttaaagtttacaggcgagcgcaaagtcaatgaaggatttaaagattagaaacctaaacgatgttaaaaggtcatgacaatttatattcgagttatttaggtcggtttatgggaaaaaagctgaaaaatctccatttaattttaatttgcctatttaatatccgtgctactaaatttgtccaaaatacctaaattagtttttatgtcttttaaatatttttattttttattttttttgacaaaatcagacatccgaattaacgagcgttaacagtggtaacaaaatcgttatttgcagttaaaacttaatcatgtgatgtttattagttatatacaattgttttttctaatgcatacgaatatatcgttttagtcaagtagttatatgagagtttattatcttcatgaacacgagtacgagtcccatatccgatgtttttttgttgcacttgatacttgtcttgaaagaaaactgtcacagaatcacaatctacgaaattccgagagaaatatctaagtgcaccacttagaaacgtagtggcctattagctcagttggttagagcgtcgtgctaataacgcgaaggtcacaggttcgatccctgtataggccacattttttggctttcattttgatcagactaaaacgttgtcgtgtgtttcagcttctttttttttttttttttttttttaatccttttttccggagatattttgttttttttttcaattttacggatatcgttatctgcttctcacactaacacggcgaagcagaaaaagagctcgaaacaaaaatg

SEQ ID NO: 4614 - DNA, 3000 bp, Unknown
  misc_feature (1)..( 3000): cDNA_ID_1824862_gDNA_ID_1620717_Annot_ID_49137 3000 nt of promoter + ATG
gagcgagaatcagttttccgattgcaagggttaaacggagatgagagggctgcaccatttcaagagaatctcaatctctcgatctctcttctccttctctaatgccacttctcctggggcagtaacgactaggaggtctctttattctttgagcaggtcgttgttgtcatcaaccccgtacgccgccggtggatgctgccgagaaacgcctccgcttcattctccgtggtctgctctgcaacgccgcggtgttaaggttaacgcgattcaggtaaagtttaactgcagagattaaagtttcttactcatttgactagcgaataaactattattgaacctttttgagctcacacgagtaaagatgatctgtgtccatgttcgcactctgatttcttggtttgttaatttcagctaagggcaggaaatgtaattgagcgaacaggttagctttttgaagttttctccttacatctgaacgtttttggatgagtatgatttaacaaaattttgatggaccattgcacattcagggcgtacttttcgggttagtcatttggacgtttggttttataccttcagttttttttagttccaggtattgagaaacgctaattatctttttgtttgatgttgtaggttgtagaagcagagcataagcaacaaggtagaggaggagcttccatacaggtatgcatacctgaaactctttaatcaacagtctaatgttttgatcgattatttcatatttttctgttgttgatattccgtctcttagcctaaactctcttctctgtggaaaacaggttgagcttcgtgatgttgacactgggaataagcttaacttgcgttttggatctgaggagtcggttgagagtatgttgcttattccatagcttagtgttaattcatcagttacctactaaaagttgttttttttgggttctctaaccattttggtattagcatcgtaggataggtcgattactttttttgtgatattgattgattgcatcaatttactgcagaagtttttgttgaagagaaatctttcacgtgtttgtatgcagagggagatactgcatatctgattgagtgagtccatatttttttgtgtaatctcattacctgttttatatcaacttaaacactgtaggatcttgtgttgctaaagttgatttccttgattatgtaaatccaacaggcctaatacgtttgagcaagttgaagtgccattggacatatttggaaaagctgctgtatatttaaaaggttggtagcaagatgatatctttcgtggtgcatgtcatacttatttcctttgttgatggttgtctcaacaacaatatggatactcttgagtgcagacagtcattgttgagcaagttgagtgcatgtgctagaaatactaacatatttgtcatgtatctctttgtcccttctttcctcgtgattgacagaggaaatgaaagttcagttgcagctgtatgatggaagagctttatctgcatctatccctaagcatatcacatgcacagttgtagaaacacaacttccaatgaaaggcctaacatcagctcctcggtatgtcctttttctcaaaagtcaggaacgctttttctctatacggtataagcgtttaacatattattgattaacacatgtaccattttgtttaacacatgtaccattttgtttccttaacaccatgaatcaatcgtttataagttatgagaaaacgccttatttcttaaaatgcaggtacaagagagctctcctggataatggttccactattcaggtaagatgtcgttctaggaagttggagctattagtattgtttgatcttcaaatttcatgtaacaggaactagtctggttcatctaaataccaaaataactcttggttccaccttgaatacctcaggtaccatcttatctcgaggcaggtgaaaagattgtgataaacactgaggatgactcttttgttaagaggtattattaagtcaactctttgattcattactctgttcattgttgttgatatgggctttgctcacgttagtcctcttcttgctttcgctcattacagggacaacaaatgaaactattgcgtagtcgtttaatacttctcctatggaggatacatcggatatgttgagaaacgtttgatagaaagattaggggtttagtgtttatgaagctattgctattattattccagttctcataatctcggagcttctgagacttgtgtcgattgtcacaagttctatatgaagaagacttccgttgtgtacaaagatttcagaatcataaaggttaatttttatgatttattaatttttcggcccaacacctattaatgccttcaaacactaccgccgtgtccttcaaccgtatcaacggacagtgttgtgttggtcgtacttttcagatttatgtccagagctcacccaactttgctgagcttcttgaggcatgaaagcttcaacatggaaagcaaggactttcctatatattctcgcttatccagacgattttgagtcatccagagggaaaaaggtagatcaactgatattagaagacgatgctcaaatttacattagaaactccatccttgagtcagtgatgagtttttcctcatctcctcttgctgatgatgaaagtaaaggtctaatccttcaggtgctactttcttaccttaatgtcacttggtgtttatcttgcatctatatgcagttgcctcttcagtatcaataatataagcttgattctgagagtatatttgcttcatctgttcagacgaaaaccagattctgaatagccaatttgacgtaaaccgcgctttagttggtctatccgaatagtccagcccggtttaattaagtttgcaggttcgggtcgatcaaaatgtctattaccccggtggttaagagacatattcaacgaattaacaaggaaataaataatcaaaagaacccttaaaattcatcatcatatg

SEQ ID NO: 4615 - DNA, 3000 bp, Unknown
  misc_feature (1)..( 3000): cDNA_ID_1824941_gDNA_ID_1620718_Annot_ID_49143 3000 nt of promoter + ATG
agattaaaaatgatatatttggtaatgatgttaaatatttgtcatttgttaaaattataacatgggcattttagtcatttttattagaatgagaatgtagatgaattacaaaatgatcaaacaaaaaaacattcagttaaatgcatcatttagataaaataccaaatcatcaaacaaacatcattcaaatgcatcatctaaatggatcatttggatgtaaatgccaaatgatcaaacaaacaggactagaagagaagaaattgattcgtatgtagttggatggaggggttaatgactgtgcagcttaattaaatgtaatgtgcaaagcccaaagacattgcatgtgttttgagtgtatcaatttttgcaatttcttttacctaacgcgtttatctcttgactcacacatactcacattacgtgttactctcttattttgacatgctttaatctaatctttatcccccccaattagtttgctatagaagtttcagtttcaaagaagtcttactattgttttcgtcaacacaagtcatttattattttgccaacaacaagattttgtattttataaaccacacgtcaataaatcaagtcacctgaccaatcatattttgacacgtctcatttttataaaagtattgttattgatacacctcaatagattatataaatacttacattgcttccattacaagttgtataaaaatgtacacacaaattatcttgtaatgaattgaatctcgcagaaaaaaaagattcggacattttgaagatagcaacaatggaattattcgttgattccttccaataatactattttcatttattttagggaaatttacatttataacatacaaaaatattataattagataactaaccaaaaaaaaatagtccaatgatattgtgtgtatttcctatattttagacataactgaccctaagataaaaccaatcaactcgccggtaccgattacaacgtcgtcaccaccacaaagtcaccatcaccatcaccgccatcatcatcaccaccatcgtaatcaccacgtcgtcactactaaaaccaccagaccgttactatttatcacggatatcaccgacaccacggcaccaccatcattatgcccttagtccctcaccatcaccatcgcaaccaccacggcaccaccatcatccccatgaaatcaccatcatccctatgtcatcaccatcacaaagctaggttaccaccaccatcacaacgtcagcaccgccaccatcaccaccacaaagtcaccgtcaccaccacaacgtcatcaccgccaccatcgtaaccactacgtcgtcactacctaaaaccaccacacgtccacaccgttgctttatcatggatatcgccgacaccacggcaccaccatcatccccttgtcatcaccatcacaaagtcaccaccaccatcacaacatcatcactgccaccatcgtaaccaccacgtcatcactactaaaatatcgtcaaatttttgacaacagaggttaaaatcgtcattgataaagtccatatattattcttttaatttcgcaagttatagtgctatatccttaaatattttatcataaatagttattgccttaattcaccctttattttattcttatttatttaacataaaataaaaataaagctttgaacaaaaatggcgatcattttggtaaccgtctaaaaaaaaaaggaagaagagaattttcaacaattgcactataaagaaaacaaagccacgtgattcgtttctacgcctgcttgactccattaaagaagagatcattcattgatattaataatcttctcctctgtaattccaatttctcaaaaagcaattttttctttttagggttcttttgaattttggggtaagctctctcttaagcaccaccactacattgatttgactgacttcatcaattagagaattcgatttatttgatttagctggaaacagagatttaccttgattcgtttcttcttcggtccgattctccgctgcgtaaaggtatggtttttatcgattctcgagttcaataaagtcttgggctttgaaattggattgtgtttgcatgttactgattttcaaaatcttaatttattgcgattggttttcgtttttgatgggttactattgaatttaagatcatctaatgatgtaagttttatttttttcccatttttgggattctgcaacaaaagagtcacagggttgccaattctggtttgttctttagctttctctatggagttagttgtgtgttcttagtgattctgtatgatttgtatgaagatagttacttgttcagttcttagttgaagtgttttcaccatttcctttgataaaaccgaggagcttaagtaacttcagggttgttgacaaaaattgtgtaattgggaatatgttgattagatataactggcatacaagaattatgaggaaatttgagttcttggctaacaatttgggttgctttatgctgttttcttcgttatggtttctagtatgtttcttcatcttcgtgggtgttgtacagtggctagtagctgttctagtatcagtgacgaacttttggaattaacggatcaagagtatcttcatttcagatagcagttcagcttctctttaagtgaaatttgatgccaagtatctttgttgttagtgttggcactagtgtaattcaggatttcattgaatttgtagctgttttctccatcattattaatttgttgcatcatggatactgtattactgttaatattactgaatcacactgctgactttattcttttctttttcttgtttcattaggcacaaggttttgtcaaaccggaagctcaaatttattcattaacctttccttgccctgtcaagatttttactgtcatcaagaaattcaaggccgaaacttataggaatcacatgctatggtctctgaaaggcattctgctcgtttatataattccctcccaatg

SEQ ID NO: 4616 - DNA, 3000 bp, Unknown
  misc_feature (1)..( 3000): cDNA_ID_1824937_gDNA_ID_1620718_Annot_ID_49144 3000 nt of promoter + ATG
ggttctaccaagtccatccaaatgagtttcacaaattagcctaaatttacaaagtcattcacatggaacatccaaatgattcatctaaatgatctgttaatttgtaaaaaacaaacatcatttttcatctccatctagatgatccatatggatggagaaacaaacaaggcctagtaactttttggatttgagctctcactttttatttttgtcaatatcttttagatttcgattatgttttcatggattcaaatcatttgaatgagatgttaacaatgtttaaaaaggtttcttaattatatcatcaactattcaactttattcttagttagttatatctgtaactttatattttagggaactttatacattattggctttagaaaacaaaacaaaagtcttacgagttttaaagttatattaagctatcttctaatccacgtgggtgcattgctcaaacaaagaacagaagaacttattattggcttattaatttactactacttttgatatctttttcatcacatgactgatcactagtcattgtttttgttaccaccgatattgcgaatcgtggaattgtcagagtaacatgtaggatcattatatcaatatctaatactgatagctcgaatatattgtgtttcttctggttgttcgaattttttttgtacataacacaattcgagattcaaatgatcagattttagatttctagttactcctaagaaaaaaaaaatgcttagcaaatcagattttataacattactactataccttttttgttttaatgattacttcgaatgattactttcgctgatataaaaaaataaatcgtgatctaaactttcatatatctactggaattttacaaaagctacgtaacaaaattgataaagtgatgagcatgttacgttgccacgtttcattttttctataataaatagaactgttcattcgacaatgggttagtggttgtacgtatatatatatatgctcgctaattggacggtgcgcaacttcaagcgttttaaattatgtggcacttaacttgtctgtcgaattagtaattactttcgctgatatatatcactctccgagcataattaatttcatgctatcaaacaaaaaaagattcatgttatacttggtttggttgaatagaaactgcgtggactttaaattgatagataactttaagtataaaaataagaaaattaaactgctgatgtctccaaaaagacaaagtaacacatctaaaatctacgtatgtggatgtcatttgatacacgtataaacaaggtgtagttaatccaattaattaaaggaggagaaagtggtacaatggaccaatatggatatattttatgctttacaacgattgatgcaaaggtatcttcgtgttacacttcattattacatttatagattggacttgggcctttgctgattgtgaggactgatgactgatgagaagcatattggttgggttttatttgaatcataaagaaattaaaagagactagaatatgacccgcggtatatcgttatattctgtagtaaaaatataacgattaaaagagattacatataattgcattttggtaaacaagaaaaaatattataattgtaacttgttatttagatttctgtataatgtcttataaatatttgaatactgtaatttactcgatataatattgtaacgaaccttaattttttgtagctataatatttttgacaccgatacatagaatttaagaaactataatcgataagttaacattacatggtagttaaatttaagttacctttttaacaatgcttgtccaatattactacctaagaagatattcaacgaaaaatagattgttacaaatctaaagtttaattttgaaaattttcttctcaatatatacacaaaaagatacttattcaacaaaaactcatatctctcctatctcaaaaaggaaataaaaataaaaggataacgacacaaacatgaatctctatccgaatctatctgtcccgtttataaattaccccacagagctcagggccattgttttttttttcttggtgaaaatagggttaagagaaaacccgaaatattagcgttattgataactaagcaacagagaaaatctggggctctctttctctctgggcttttgctatataacttttgaggtatatagtctcttgatttttttttctgtgcatgaaaaaaatgatgagtttttcagtaatctttcgaagccgaatttgaattctttgaagattgtgacatttattgtagttcctcctccatttaaagctggtaaacaaaagtgctcttcgttgtttgcattttggttttccccattttgctgccggagataacgagggaaattataactcactaggatacatatttttttttggttttattgaattctttcatttgttttcttgttgcttattttattttataattttgtttttcctctggaatctgttgtatatgctgagaaaacactggaagatgccaataaaatagaaaaatctcgtttctttttgttaaaagtcgtcgttattacttatcacgagtattatgtgatgctagacactcattatcaaatagccgttttcttaaaagttacaatttgtttaaagctgtgtatttaatcgaaattttcaatttatttctctttgtgtactaatttcttctgcttttttcagaatctaaattcaccaaaaatacgaagaagaacgagaacaacaagaggtaccacacatttgtgattttgcttaacttttgtttgattataagttgactctttaattaaagaaaatcaacaatcaagttaataacttttgacttgaaaattttaagtccaaattgatacaaaggtataaacaaagaagtttgtagtatatatatacttgtataacaagtttagtcttaatgtaactagtctttctctagacatgtctctgattcttgttttgttgtagaaa

SEQ ID NO: 4617 - DNA, 3000 bp, Unknown
  misc_feature (1)..( 3000): cDNA_ID_3000039_gDNA_ID_1620718_Annot_ID_49145 3000 nt of promoter + ATG
gccactctcacatcaaagagctcgtagtaaaaaaatggtgacattttttgagtccatcatcttttagtaatgccacacatctacttcttttttcacttctttttcctttggtaagttattttaaaatcttatctctaattaaattggcgtgattaaccaacaaccacatagatgaatatagatgatcttgaagattttcaatatttattgcaatatttcaattgatctatcatagtgtgttttggatatatattttttggtttaaactgctacttccggtctgattatttgtttacaaaaaaaattatttttattttcaatagattaattttaaatttaaatttgtttctatataaaatgaaatttatttaaattagttttatctattgattaagtaaaaaatattaaaaattgtttcaaaataatatttactcaagcatcaagatatatcaatgtgaaatttaagacatattgtttcgagatgattaagacgtcataaactcttgaatattggcaggcttccccaacctaaaagatgaattttattagctttgaaatagatttcttaaaattttatttttaatcgtatgaaatttgggactaattatttagtttgttactttgtttagccataaacccataaccaattttaagggggcaaatgttatgggccttcggcccgataacaaccgttggtaatatatttgttaaagtgtgtatctttcttttaagcgaagatagtgaaatagtatcgaacctacctaccccgctcacgtgtataaccacgagttttgtgcaaccatcgatcgtgtcatcacttttatgtcccacaaaatcgtgacgtcagcgtaatccgactcatctctcagagacggtctgaaattggtacattctttaatgatgtttgaccatttttagtaaccaagtcggacggtcaggatgataatgagatctcaatcggacggtggcggagattccaaggtcttagggagattgttgttagctttaggaaaacgacaatgttttcacatgtttcaaagtccaaactcattgattccaaatcacaccatgttctgtctgatctagttaacagctaatcaccaaaatattactgtatcatgtataaatttttcgaattatctgaaaggaatcgatctctgtcctacacttacataaaacaatttacacctaaaatgggaaccactaatctataaaacttaagttttatttatttaattttttggttgagttttttttgttgttaataatattttgtttttacgtgatgtttccacttttcatgttgttgaggactataacatttcaaaatctccctattaataaactagattacaaagagaatcaatactagtgttagaatataaaaaacaaaattagttaaggaagtttattgatagtgtgaattaatgtataactcatgactttttcatggtgttgagttggttcggagttaatctaatcaattaatggtatcggacacattagcaatccaccaggtcgtaggtttaatttaccgaatatcatatcttaaattacttctattttttcagaaaaaatcaatatttctaatcgcatgtaaaatgagtgtatttaattaagagagaaaaaaaaacatatctaatcgcatggaaaatgagtgtattaattaatcctcttctttaaatcatattcttttttttttacaaaatctttttccatttaatttaccgaatatcatatcttaaattacttctatttttttagaagaaatcaatatttctaatcgcatgaaaaatgagtgtatttaattaagagaagaaaacaaaaacatatctaatcgtatggaaaatgagtgtattaattaatctccttctttaaatcatattctttttcttttacaaaatctttttttatttaaatgaaagttgaagttcctaacaaaattaaactataatttaaatctatttttctctttctaatttatgatttcttaaatatgaaacaaaaaagaaaagataaaaagcaacgaaaagaaattcaaatacagacttataagtaaaattatactatatttctaccaaaaaaaaaaagtaatttatactatattttttaattatctttaatacttttttatccattttatttattcaaaaacaatccttaattccaaatagattgaacttaactccaagttatctcaccaagttacatcagaaagctactctatcatacttatcaacaaaccaattgaatccaaaacataaaccaaaccaaaaaccataacaagaaaaccaaaaccaaaatttaggagtagcgaattggtaaattaacgaataagaaaagggtaaaaaaggaaacaaaaagaagcacgagggagagctaactcacgaagtctgcgttgtccagattccggactgcaccaatctctcacaagtcacaacatatccattttccaggtaattattatttgacacctttttttttttttgttcttgttttttttttggtaggcttttttgtttgttcacatgtagttgtccccagaaaaatataaaataggttaattttgaaccaaaaagtttctttaattacacaccaaaaattttataattaagtattgattccaccaataaatatatctggcatgtttcagttagtttaaacaaaaccatcaaatttgaaatttaaaatttataactaaaaaaatgaagaacaactgtacaagtattttgttgaccaaatttaaaaaaaattcacaactaattataaattaaatttttttattaggaaaataaaaaataaagaaagaaaatctgctaatttttctcgtggacttgtttattaaaaacaaattgagttttcatcatcaaccgattcatatctttcttcttcttcctctacagcttcttcataaatctctctctcttctcctctcttctcaaagatcgaacctttcgatttcagtctcttcagagttctttcgttttcatcgaaacaatg

SEQ ID NO: 4618 - DNA, 3000 bp, Unknown
  misc_feature (1)..( 3000): cDNA_ID_1824933_gDNA_ID_1620718_Annot_ID_49146 3000 nt of promoter + ATG
atatcaaccagagatccttggaaggaactagagacactgaaatcgctatgggagggtatcagccacaccattcatgggctaagaaaggttctcgtcctcgtggtcaggtaaataagactttcagagacttctacttctcaatctaggatagcattctaagacgaaaatctagaaacccaccaatgtatgttctctttaacatgtctgaaccctggtttgtctcaatttcttgcagatctttggatatagaatgtcgttatgggcagaacatctagggtttctagagcaagaattcgaggaaccagagaacatggaatgcgtgagacgagttaggcaattgagtgagctgaattggagacaatatgcagcggaagaagtcacagagatgccaggtcatcttcttaagtatccagttcaagttgatagaacaggcaaagtgagttctcttcctggatacgagacattcccagatctcggtggcaagatcataggatcgttccttgtagtagaagaaaacctcaccatatgaaacttaccttgtaggcttgtagtgatcaacatttgttctttatttccttcacttcaagaaatctatctgagtgtgatctgattgaaagtgtgcctttagggtctagtttttcaaatttatgagctgtaaatctatttattacaatatttcaattgatctatcaaagtgtgtgttgtggatttttactatatgatttaatttagtaatgttgtcatatctttagtactatatgattacaatatcacattggcttgtagaaaatgaaaaatgtcatcctgaaagagcttttgccaaatcattcataagatcatgcatcacaaagcttgtcatggtgatatccaatctctgaaaaaaagatttgagcaaactaaatcaccaaggtaatttttccaatcttgtgctgctccttggttggtataagaggtctattgccatccatagcagcagtaattgagcagagggcaaagcatcgcttaagttgaggaggaagagagtcatagcttggtttaagtactggaaggatactgttagtgtagcttgagaaattctttgatgcaatggctcgttcaagaccttacactgttctgcaatccttttcccaattccttctagttcttggttgattatatttccaaaaggaaatctagagatcagctcccaacattcttcatttggtagattttttcatcctttgctactgtggagacaatttcacttgatgtggttagaacaatcttgcttccttcctcaagaaactttcccattctgaatctcagaccaaaaatcatccagagcaacaggtaaaagtcttctgtttgccaaaagaatctctaagagacgggtgacgtgtcgttgtgtgagtgggtgaagggaaaatatataaagagaaaataaaaatcgactcccgtgtttctctctctctttcacgcgtttctcttcaaaggctacaccggaggcgatttggagtttaatcggaaccactcggacgagtctccgatgtagaaacgaggaagattacttcaattgagattaagaggcatagagagagagatttgtgtattcgatcgaatcaagcttgggtttgttagtaatggcgagaatagctatagttttagatctactgaagaaatctcaatccaagcacagtcttcactcatcttccttctcttccgccgccactgctccctttgcgtctaggtttctattcgggtatgtattctctctctctctctgatttgcatttgtttgactttcactggatcgtggtggatataattattggattgattactagttttctgattttgttcgagaaattagggtttagaaattcataattgatcatcttctattgctcagttgaataagaaaggttgcagatttatagtttttatttgattggaatgtgtcacactaattcaaggctatgtcagttactagtaaaggtgaatattttgcgatccagtttgaaatgtagtttatcaatgaatagttttacaagctctgtttttattctaaatagatcttttgataggtttcattcatgtgtcttttcgatactctcggtgattagcacttcatagaggactagttggcatgatttgttgtgttacgacattgactacacgtttcagttataacctattatcaatgactcagattgtttatgttacagttctttcgagcctcgagtttcgtatcgtggtgttgctgctggaatagacgatgattaccttggtgctatacggaaaatgtctgcggatggaaacttctaaagggtaacatcatctttaatatgatttcatttaaagaaaatgtcatgctttatttattaattacactactaaatgatataatttagtgattatgtagaatgtttaatttcttgttgatatataagaatagtaatatcaccaatcaaaatgaagttgcatcaaaaaagggccagagagaaagagctttgtgagcagccaaaaaccaaagtgggcaagtcttctttcttagtcgtcgttactaaaacacaaattgtttattcggcatttgtgtttaattaagttctttaattaatgattaaagatcttaaatttgtgttattaatggctaaagttaaacgattcaacaacggcatccaaaatctttaaatttttccgattcttccgttgcaagtcaacgttttccttcgcttcctcctaccttcttcttcttcttcacaaaaatctgaactttaaatttgaatttgcccatatttttagacccacatttattcatatagatttgatctgagtttgtattatctcaaagttttatccttttgttgaatcttgatctttcgattagtccccaccaagcaccaagtgatcgatcttttgtctcactgaacttggttatgcttgaaatttgatctgacaactaaaagtttcctgctttggaggtttttgattttgtatcatccagtttataacgagactatg

SEQ ID NO: 4619 - DNA, 3000 bp, Unknown
  misc_feature (1)..( 3000): cDNA_ID_1824929_gDNA_ID_1620718_Annot_ID_49147 3000 nt of promoter + ATG
caaagcatcgcttaagttgaggaggaagagagtcatagcttagtttaagtagtaactactggaaggagttcgctatgttttccctcgtaacttgttggagccaaggagttgcaacaagtcagacaggaaaaactcaatacaattattagaatagggaagcagataaggatttgttgacttgctcttctctatgcaatttgtcagcaaatgataataatgtcaagattcttgagattttcttcttccatttgatcatgagtagattcataagtttgcagacatttttccgaattttttttacttacatccccattttctgaaagtgttattacattttcttgcagtggccatggagcattcaacgcgtcacaccatcttttttcctttctatcttctctgatctatctatattatctctaaaagatttgagagatggtgttgaattcaccacaattctgcattccaacctaaatcaacagatcaaaaaaaaaaaaaaaaaaattgaataaaaattatcttttatacaatatctttttggtcatgacatatatccctatttacaagttttgttcctttataagaactaagaagtgtgtgtctttttttttttgtgtgcaaccaggtgtgtgtgtctttaggttagagttatttggtatgttaagaggcgatgacgtgtcgatacaccattggtgggattataatgacaaaacccaaaaaaaaaagtactcacgtgacaaattttgtttgtttccccatttcatcgtctctctctttttgtcgaccttcaacgcgaaatcactcgatccgatgaattatgaggagatatgcgtcggatccgatctgtcgttatattcatttcaacgtcggtggagaccctcgacgatttcaaatcggagagtatgctccaatctatttcccatggtacgtatctctctgttttcatttttttcagttccttttagccgagattgatgattggaattgaaaccatcaaatttcgaaactgggttttcttagatcttgtcaattggaattaattttagtgagtctggtagttaacgatagatttgggtgatggtttgtgtttgaacgttctccttttcctgcttaagcatgaaccttacttaatcaagctctgtaatgctggcatttattttggtgaatatattgattcaatgtttctttatctctctgagtgatctgtatttgaagtcgtaaaattttgtttatctttcatcggtttttaggatgggaatcccaggttgtcttgctttggactcatgaaaagtagcagagatgggaagagttatatagcactaacttggcatttactcctacagagaaatttgctaacgggtaaaactctctctgcttcatgtttatatatgtccaaaatatttcagggcacaaagttcccaaagctaaatccactttcttcatcttgtgtcaggtagagttacaccagagagtgtattatgttttcagttttggaaccgttttgctcgatctcattagtggaaaacatattccaccgagccatgtaagttctctactaatagaagatatataaactttagatgtaatgtaggacctggctctttgtttcttgctggatagttcttggaaggaatctctagttcagtccttactaaaatctaaatgatgatcatcatcgtttttcctgcctcattctttctcagacatcctttggtgatgatgcatgcttaagagtgaatcttacagccatacaggaaatactgcttaagaatggatcttacagccatacaggaaatacttagtaagattggatacaaggaattgccattgaggtgttaatctattccttcctctcgcttactacttagtcttttgcattagggacttgttttgaatatgattttatttaccttcttctgcagctctcgtttcaaatgtggacaacccagatgcaggaatctctcttttcaaagaagcaaggggacttagctttccgatccaaagattttacaaccgcaatcgattgctacactcaggtaatatctctaaatgcaacatacctctttaattacatgccaagagccatcatagggctagacattcagtcatcatagggctacacataactggaatgattcatgggccgaaaaggatgaaaaaagtttgtatggttccttgtattgaaagacatctaaatacaaaaatttgatttttgtcccttatgaaccttaaccattggaggactatttttataagatactctcattttgttcttagcttagaaataacaaaactttaatagaaataattgttaagatccaaggttaaccattagagatgctcttagtttacatgtctaatctgggatccaaaaagacatagtagcaaaaaaaaaatttaaagcttgtaactgatttcatttaaagaaaatttcatgctttatttattaattacactactatatgatttaatttaataattatgtcaatcaaattgaagttacatcaaaagagggaccagagagaaagagtttcgtgagcagctaaaaaccaaagtggggaagtcttctttcttagtcgtcgttactaaaacacaaatagtttatttggcatttgtgtttaagtaaagatgaaacatcttatatatgtgtcattaatggctaaagttagacgattccacaacggcagccaaaaatccttgaaattttccgattcttccgtttcaagtcaacgttttccttcgctccctctcaccttcttcttcacaaaaacctgaactttaatttgaatttgcccatatttttagatccacatttattcattgatttgctctgagtttgtattatctcaaagttttatccttttgttgaatcttgatctctcgattattccccaccaagcaccaagtgatcgatcttttgtctcactgaactgggttatgcttgagatttgatctgacaactaagagtttcctacttttgcgttttgagttttgtttttcatg

SEQ ID NO: 4620 - DNA, 3000 bp, Unknown
  misc_feature (1)..( 3000): cDNA_ID_1824925_gDNA_ID_1620718_Annot_ID_49148 3000 nt of promoter + ATG
gaagggagggctacggatgggctcacagcagaagaaggtaaattatactgtgtctgatctacttgtgatacacttgaaatacattttcggaaactcatacatgcatgccattgtggttagagctgctctctttgctctagttcacatttttccatatattcttgcaattattaaatagttgttcttgagtttttccaggtgaactaatcaggaactttatgaagaatagtgcaagtcaattaaccttttgtgggtgcgtgatcttattcatagttaggaagttatattttaaattgactgctcatgtattatcttacattgattattgatcatatcttacagactctttcgcttgcaagaaggcctcaaagaacgtgaactctgtgtttttttccggaacaatcatttctgcaccatgttcaaggtttgtttagtttgcggttatttccatctttgaattgcaacaggttaatcccaactaaattcttcttgttgctgtcatattttcagtatgaaggtgaactttatcttttggctacagatcaaggttacctgaatcagcctgatttggtttgggaaaaactaaacgaggtatcagcaaaagttacttactcaccatttgtcttatctgctaattttggcttcttaggagatatctctatatccacaatctctttagagctatggctgttgtgaccactattgacatgcaatctggtttcaggttaatggtgacactgcattcatgactgctaccttcaaggacttcacgatcgacagcagcacaggtggtgcaagtggcacatgggatgaacgaaacgcagtcacaaatactgctgtatgttctcctcataatatagtcactaatccacattagatctccttcttttacctttttaatcattttttttcttttggttctccctacacaggattatcttgccagcatcaacaatgtagcggatgcaggcatagatgtcaagtaaatatttcatacctttctttgaccactaacccattggttctcaccagagacacatttatgcatttgttataactgtcctcttaaaaacatatttatgattgtttaattttaattcccatggtactatgcagttctgatctgcaactagcaatagctttgcaacaacaagagtttgaggaccagagcccacgtagtaacccaactccacaaccaactagcgttgctgcctcacgattggtcactggtccacaggtatttcattcctactcataacactatattcttaaaaagcaggaatcgacacaaatggttaacaatgattataagaaaaggtaaattaccgtgtgacctgcacattgcaacaatatacaacactgattattaaaatagtaagagagtatagccttaacaagcacatctgcaagtcctgtttagtacatttgttttctgtccatatactttaccgactaagatgagtttacaagtaccaattgcgagtgtaaaacatcgataatgatcatacaccgtaatcagaagctcattgaatataatgcagccttgcttcttgtggtgtttggatgaatgttaatgatcagatattgtactgaccattgcaggtaccaaggagcagccacaggccatcatcagctgcgtcttcgagacacgacggcaaatcccctaaagataaagatagcaaatgtagaatcatgtaaatcctcatttcacttatgtaaatttccaactttttcttattccctaactaattttaatccttaaaagctttttggttttaacaaaaaataaactgtaattgcgctttgactaaactattttttgttgctcataaaaaatcagagcttttctttatccttttgagaagtgggagacgaattagagtttgtgttcacgttttggctttcgttctgttaagttactctgatcgccgttacttttttgacggagtaacggctattgtccgtgatgccttttataataattctgcttagccggctcggtttgactaatcgccaactttttcaagttgtaatcggagaatgtgattattaatccctaattaaaatactttttatctgcattagctaatcattttgactagttataaacttaaaataataaataaattatatcctaatccctcaattcgaatttcaaactagtttgtatttctttacaagttcaacttttttcttttcactataagataatgatgtgctaagaccacgactgatagataatatgaatccactagagctgttgaaaattatagttcaaaattgaggaagacttcaacaatgaaaatgtcttctccattgaagaaaatgtcttgatttattattcaatacgcaattatatggtttaatttagtgatttttcgaatgtttacttcttgttgataataaatattaaatagtaatatgatttcatttcaagaaaatgtcatgcttaattattacttacactattaagtcgaatgtttaatttctagttgatatataaaaatagtaacatcaccactcaaatgaagttgcatcaaaagagggaccagagagaaagagtttcgtgagcagccaacaaccaaagtggaagtcctcttagtcgtcgttactaaaaacaaataatttattagtttaattgaagattaatttgtgttattaatggctaaagttagaacgattcaacaacggcagccaatatctttaaaatgttccgattcttccgtttcaagtcaacgttcccttcgtttcctcccaccttcttcttcacaaaaatctgagatttcatataaatttgcccatatttttagatctccatttgatctgagtttgtattatcacaaagttttatcttcttttttttcactcttcagtcttgatctctcgattattgcccaccaagtgatcgatcttttgtctcactgaactcggttacgcttgagatttgatctaacagctgaaagtttctgactttttgggtttttgatttcgattttcatg

SEQ ID NO: 4621 - DNA, 3000 bp, Unknown
  misc_feature (1)..( 3000): cDNA_ID_1824921_gDNA_ID_1620718_Annot_ID_49149 3000 nt of promoter + ATG
ttttatatctgtaattattgttctactagcacttagcaggtgcttagccactattggatgccttaattttttcaattaattagcatttattctgattcatctttttaaatctcgatacaggtgttgcacgctgtgaggaccacaagcattagccaaaatatatactgtattaaagtgttgttatatattgtttctttctcataattatttagaattttggaaattggtatgtgcatatgtattacaagcgaacggatctaatttttacttgcttcgttttcttatgtgaacatatcccaaatttcagttgtaaacttaagtcgttgttgttattatttttttgtttgttaagggttgttattatttttaatgagatattattattgttaatttttccactttatcgagtcagcaagccttatttcgaacttcgtgtaagaggttactgtggctttggaccactatgccatatgtgattaatgaatgagtcttttttttaatgtctactgtatacatcttatttttcaattaaagaaagcgttagtgtaagaaaaaatttataacatatttacagtaaataattaagaaaataacactatatatgtatcaattaactaactaatctaaagggtttattaaatgattataggtggtggcggtgactctggcgactgcagcggctccggcgacggcggtgacttcggtgatggctccggcgacggcggcgactccggcgcgacggtgattccagcggtgactccaacaacgacggtggttccagcgataacttcggcgacaacgacggtgacagctccgacgatggcagtgactccagtgacaatgggaaccccaacaatggagtaatggctcaggtgatggcattcattccggtaaggacggtaacggcggcagtggcggcagcggcggcggtgacgtcgaaggtggcggcagtggcagcagcaacagtggtggtggtggtgataattattgtgggggtgaggacaaacttgtaatattatatattacataattattatagtgtaagttttttgcaatagattagtttcttaattaataagttttttttaggttatacatgcaaatttcgcttataaaaataaaatgatcaaaaagaaaagaaaagaatgaattagatataatgaatactgagaacaaacgaagatatatgaacaaaaaagttaaaaatgttaagttttatggtttctaattcgaaactagttaacaatgaataaagagatttatattttttatacactagtcaagtctattctatatttttaatgtggaattttttctatacgcttcttggaaataatgtttttctagttatttcgacagaatttagtttttttttgaactattaattagtaaagatgaccagaccactttccggactggattagtgaatcatgtgtttttggactctgataccatgttaagttttattggtttttaactcaaaattaattgacaataaatggaaaggtctatatctcttatatacaactcaaatctattagattgtgcggtttcaactcaaaactaattgacaataagtggaaaaactcataacttatatatataccacttaaaattatactcaacttctaatgtggaacaatattcctaatatgcctcattgagatcgatggtttttctagccattgatcacgatatatttggtatagatcgatggaccaactactaaaccggaccgatgtgtattgggttgaatatcggctgactcaaaatgatgcaaaagccatatgcctcgaagttttataattggatttcatcatctatacgcgtgatagtataacaattaggtttcaaatggcctgttgggcttttaactattcaattacagcccatatatatagtcaacattaaaaataccaacacattgtcattgacatgtttgtacaagcgtggtcaaacagaaatgatgttattctgctgcttcatcaatttatctcccttgtgaattgagattgatggttataatgttatgttactaacatcttaatatataaagtttggtttctcaaaattagtcattaatgtgataatttataaaacataatttctacagtattttcatgtttttaataaaaatacatgcttatatattgaagtgaaataattactaaacggaaaacaattaaagtgaaaaaacacaccattgtttagacgcaggccacacttttattttggttctgtttttcgatttaaacctcaaacctcataattctttaaacattcaaattgtcccaccgtttttatagattccttctagatcgtcaaacacttatattcttccttttctttttgtcaacacattctgacattcatataacttttcgtgtaaaactataatataaataaatgtgataaatacacttctaattctttcgtaaatgatatatcaagaaatttcccaaaattttttaaaatgttacgtgttataaagaaattaattaggaataaaaaaactattaaaagatgacttttaaggaaatgaaatgacggtgttatgataagaaatgaagaattttatcatttaaattgacctttccccgagaagatacgcactaaagatacccaattggtttatcaaaaccgtaataatcgaaccataattcttctcatacatcaaataccggaataaatttgaaaaattggtcgttactatatttggttcaatagcaatttaaacaataccggaatttcgatttggtacgtaccggtttggttatgtgacacatttcaatatcaaccttcccataaaagttctttctcgtaatataaattaaatcctctttgctctctcgctcgcttcctcttttcgatttggatcagaaaaaataaaatttcttcggaatttccaataatctgtctctcttcttcttcgatcgaaaatttgactttttttcgaatttgttttttcattagctttggttgatatcatcatcgtcaatg

SEQ ID NO: 4622 - DNA, 3000 bp, Unknown
  misc_feature (1)..( 3000): cDNA_ID_3073792_gDNA_ID_1620718_Annot_ID_165726 3000 nt of promoter + ATG
tatttcattttgcagataaagaagatgggccagctaggcctacttgtaataacttaacgcttgaattcagatttgggcttgaggagaattggctgaggcccttaaatttagcatttatatatgccttttacttatacctagtttggaagaatggagtaaaatagagaagatgtattttgagttttgactgataagagtgggagtaacagagagacaaagagaagcagaagtaaaaccatggaggcattgttgatatgttgtgtgtatataaagaaaaaataagtaatgataagaaggagaattaccaaaagtaataaaaatggatggttaatgagaaataagaatgagactacattgaaataactaacgaccaagaggagataattgtaataataaataataataaagatttgatatttcagacaagaaaatttaataccagaagaagaagatgtaacacaaacgatatcaaaaaaatgaaattacaaccacaaatttgtttttttttttttttggtataacaatcttgtccctatttttgcttcttcctcaatgggacaaatttcactttccttccatcaactatgcgcactttcgctgttctagccattgagataatatctcggcccacgtattcctcatcctcgtcatcagaaatcacaacaacctcatcgtcaggtcccggaccaacgttacgtttctccgggacaaacgaagtgtctttcgatggaacttcattgtttttctcctccacgggcaagggactctcttccgtttcctgaaactctttcaagttctctaatgctggcaaatcagaaaaaatgagactctccgcctttcgttttcttgtgtccacttcaccttcgctaccctctccgcaaagaggaacaccatcggttatgtcaccggtttggtcttcgattacaaggttgtcctcgctggaaatagacttatcgtacttcgccttagaggttggatcagacagaaacgaccaagctaacgaggctttaacacgagcttcctggcaaaacgggaaaggattgttactcgagttcaagagattcatcaacttctcgaagtcctcccctacaatcggtcccggctgtttcattcgaatgatgccgtaccaatcagtcgccccgttgggaagcggggtctctgcggccgagagaacatccgagatagctgccgctttctcaaacgtatctagccgttcactgattactgccttgttcgtgttgacgatgtctcgaactcccctaaaatctccaaaccgtagaagtaaatggcacgttcttatagcttcatcgtcgggtgttgtaaggtgtaaagctctttctccggatgacatgatgacgaacaatgttaaccgtgaaggctctggcgatggagacaagagagagagacagagaggtggtttggtgttttagacttagatatgatagttttgtgataaaagttttggagagggacacaatatgtttttatactgaatatgtgagaaaagattaaagagtgatttaatagtttgttgaagggaattaatgcaagaaatctagtcttacacaccaattaacatgtatctatttcagatgtttgtgattagattgactctcagtttttatttctattaattttttgaattaccgtttatttcgcaccaaataccgttggctgttacttttcaaaatatatatctatacgaaattgctttagttttcagaattttttattttactcagttaaaaagatactatactatgtttctaataaaaatatagactgtaattaatatggtaattatattttaaaattttgaaatatcgttgaccgttattgttctatttgttgaaatatctttctatacattgcatagtcaaaaatattttaaaattttgaccaaaatgatatttctaataacaaaattaaattattcttgaataacaaaacttggtaataagtattaaaattggtcataagtttcatatttgtaagaatatcaggtatgatttctctcttttaatttttttcctatttatatatattgggtgttcatatctataattttgttactactaagagtgtaaatttcaattatttatttatttattattattatttttgttttgatcaaaatcaattatttatttttattaatgcactttaaatggtaaaaatcctatttataaatctttctatcttatgtttcttgttttttagtggtccaatgtatctaagatagtcaaaacaatcaatatatgtctacttctggatttctatattttctaaaagttgcatttgcatatatagaaaagtatgaccttggaatctgtaaacttggccaatatacagctaagcaaatagtctttttttgctaagaagctaagcaaattatcattatctacaattactataagtctataactgtatacacaaatttgtttaaaattatgctaaaaaaggtcataattttaaaacttgcaccctctttgttgactaccttaatcatttacccaaaaaataaaatccgtttgtatcgaaatatagaaaaaaaaagaaaaaaaacccaaaaatttcgatatactctatatcttcaaaagcccaatgaaaacataatccagatccaatgaaaaagtccattaaagcccaacgtgaactaatgaaatttcactgaaatgaccatgttaatttaatacaactcctaagaatttaattaattcaacgaaaacataatttattattgggcttataacaagtttcaagcccaattaaaacagtccaataagacagtgtatctaccataaaccctaccacacatgatcgctcccttattttcgcaccaattcacttgacattttctgtttccctcaacaattttcccgggaaagaaaaaaaaaactttagtgaagaaacaaaaaaaaacagaaagatctcaacttttttcaacccaaatcttcaaatctggaggaacgaaacagtaagagattgaaatcaaacatg

SEQ ID NO: 4623 - DNA, 3000 bp, Unknown
  misc_feature (1)..( 3000): cDNA_ID_1824907_gDNA_ID_1620718_Annot_ID_165724 3000 nt of promoter + ATG
cttagatcttctagtggtgacacagagtgagctagtgctcagtttctctggaaaaactggtttcatcttcgatggtagtaacagatttgtagccaaactacacatctttgcttgttctcaaaaatatccgaaatttacagaaacaagattgaagaatttaataactaaatacagagaccctttttgcaagaactctctctaatcaagatctcgcgttattcttgcgtgttcgtaatcaaaacttgtaactttgaaacccacgaaatatcaagcttgctttcgctttcggtttactttttctttctttctcttttttgttgcgtgttgggttagataactatatatacgggtttaaacgaaggttggttctatttctagacttcttctcagttcttcaaagatctctttgaacaggtgagactgagagtgccacgaggacgtggtgttcagcttcttcactgcatgagcttagcatgtgtcgtgagattaaggttcacacgtggctttaattgcggttatagttcggtttttggataactgttcaccgtttacgaacatgataagtagtccggttttagccaaaatgttactttttgccattaccttaaatgttatccgtatgctccggttttgactggtttaaacgttaattatcggttatttctggtatgaatcggttaatttctcaaaaatacattgaattaattgagttaacaatgattgatccaactcgattaacttatctatttgcaagtaataaaatattactacagtagaattttttaaaattaatattctataaagttaataaacgttataaatgaataaattttattggttttaagttagattaatgtaaaaattaactgatattgataaaataataatataataattttattttattttaatgtaaaagtatagtttataatattataattaataataatttgtactattgataaaaaaatgaggggtagcaaattgtagaaatatctaaactaatttactaaacaaatctgtttgctcatttatttttattttaaaaagagtcacgctattgttgtaaaaaagtagtagaaaaagtaattttgcaaatctcttaatatttttcacatttttaatttagttttaaaaataaaaagctaactattataatatatactagattttaatccgcgatacaccgtggagacaattttttttttttaaattagtatatataaaattttgcaaattatatctatctataaaatatttttattttatagtttacaattgttattaagtaacgtccctccaaacccgtttcgccaaacccgtcctgtaaaaaaactgcgataccccgctaatttaaatttataattaaaacaaatattttacgggattgcaattgtgttttagtttgtcaaacaaaattttgttttaaatagttgtcgaaatctagttcaaattttggagaaataagatttagtgaattgataagaaatgtatttagttgcgttttgctcattttaagggattgcaattgtcttttgggttatcaaacattttttgttttaaatagttgccgaaatctagttcaaattttggaaaaatctgcgtgatatatgggattggaatatatttggaatgtttttcgtttgttaatcaatttattgctgaaaaaactaataattaaaagccagtggcagccattgtaaataagttccaactccaggatttatttcacaaaatggctgcaaaaatgtatatatagatgcaaattatatatatattgaatatagaatctgtttttttttattatacaacaccaaataaaaaatattaatattagtcgaccggttaacataaattctatctttacgatgttgaccacatgacgttatatatcgcgtatatatcgttatgtaatacatataggtcaggtagctcagcatcgtttagtttacttgatatatctagccatgcattttgtaacaattcaggtagctggcaattttttttcttaaaaatgactaagaaaatagaatagttcttgggttctcccctaggagtgaacttctcttattcacccccttttaagtagccaatcaaaatttcttatgtaatctaattaaatttactaaaacaaatactataatctaaataaaaactataatcttaaccattgttttataaatccaaaccgacatctaattttatttcattataaaaattaaaccactactcaatctactcttttataaatctaaaatgatatataattcgtttaattttaatatctaaatcctgattaacctcatttataaatccaaatagacatataaaccttaattactttttttataaacccaaaccagaccaacatataattttgtttaattataaaatctaaacttatcattttttgataactctaaactaacatataaatttgtttagttgtaaaatctaaatttaatctttatttataaacccaaaccgacatatagttttctttaattgtaaaaatctaaacgctaatactcgtttataaacccatgcggaatgtacttaagcttaaaagtatacatatttttttatttttttattttaatttattttatctttttatttttattttaatttatttttaattccgtggcatattgttaaaatttttttggctatgagtgaataagaatttgttgagaaaataacaaggggacatatcatctatatcaaattatcctttaatcgagatttttattatcccatttatttccctgaaatttggaagtttgctcttgacttacgctgctagtgagttgactcgagggtcaagaagactctttcattatgtaattatgttacataaacctcttttatcttcaaactatcgtgtggtgtagaaacgtggagacctgcaagaacaacttgttattcatctactctgtagtctagttgactcgtgagccaagaagactctttctgtcttttattttcaaaacaaacatg

SEQ ID NO: 4624 - DNA, 3000 bp, Unknown
  misc_feature (1)..( 3000): cDNA_ID_1824911_gDNA_ID_1620718_Annot_ID_165723 3000 nt of promoter + ATG
ttttttttgaagcaagccaagagggttaaaaatcaaaactaactataggtgttgtttacacatactgtatttacctgttaatcagtttttaattacttaattaagccatatccacatgactagaagatatctttaactcagattgcaacatttatatattatgttttagttattgatattcttacttcattataaatccaaaagatcagcagaagattgatacaatttttattagatcacaatactataagcattatcattaaattgtgagaaatctagcttagacatttgcttcttaattatttcctttaatttgacttgtttttgtttttgatatactgatttgatttttgaaattttaatttcagtatacctaaaacagtagaaagatatcaaaagcgaatacaagatctcgggtctaaccataagagaaatgataattcacaggtaaccaaacttcatagaattgttagtttatcatggttattttcatatatatacatttgctaaaaatatacttatccagagctcaagtaaaaagaaattctatatcaatatctagtacaattttatggtgtagatcctttggtgtaccacttttaaaaaattaatatacatgctaaagtgtatgctttatttatcgaacatgggtgataattttttatattaatatttgtacttacaattttggttaagaaaatatgttttgcatttctcatgatcaaaccttgttgacagcaatcgaaggacgaaacctatggcttggcgagaaagatcgaacatttggagatttcgacacggtttttgaactcaaaatacttatacgaatattttgttatgaatgtaacgtttacattgtaagcgtctatttaccatatgtttaaaaaatatatacatttgcagaaaaatgatgggagaaggacttgacgcatcttctatagaagagttacaacaattggagaaccagttggacagaagcttaatgaaaataagagccaaaaaggtaacttctagattattgtatatgtgatcatttcttagttttaaaataaaatcttcactcttatcatatggttattgtttcatcgagatttatgacaatgacgtggtggccgcctggttcgattatcacaaatgagttgattatgtaaacaatataaacatgggatcatcctataaacactccaaatacacacatacacacacacacacacacacacacacacttggaggcatgcatgcatgcatgcatatgtgttgagaaaagacttatatgttatcttcttcttcttttttgtcatcaccttatatgttatctttaatgagtcttttaccaactaatttagctatttaattccttaatttcagtaccagttattacgagaagaaactgagaaattaaaagaaaaggtaacatgtagcttttttattaatttagtacaaatgtattggtcaggtactaatcatatttcccataattaaacggttaaaccatatttcatggtttattgtcaatattttaggagaggaacctcattgcagaaaataaaatgctgatggagaaggtacaaattaatattaacttacgggctgatttatgttctcaattctcattctattattatgaaattatctgctttttttcaaaaagtgtgttttaatttgaggaaatgtgtgaatgaagtgtgagatgcaaggaagaggaataataggaagaatatcatcatcatcatcaacatcagaactggatatagatgacaatgaaatggaagtggtgactgatttgttcattggacctcctgagactcgacacttcaaaaagtttcctccttcaaactaacatatatagtacaatgcttatatagatattatgtagggaattacttttttccctgaagaaaaattgatgttacttactgaatttagcagttgcataaaaaaaaagattactgcatttaagctttgctttttttttctttttgtttttttcttttgtatcgtctcacccaactttgcaatcctaaaataatttcagaataaattgtttaacaggttttttatttaacataattttttcatatctttttaaaaataattgtttagaatataactaatttgatcgatatattatatgttcgggacaagttcttggagagtgaaaacaaatccgggtgcgtagctaggtcggttccctataatggctttgcggataagatctccatgtttcatgctagacatgaagatgatgtatgatttatatacgaataatgggtcagttggaaagatttttgaatcctagtagaggtatggtcttttgaactcgggaaaagttgcattgcaccgacctcttaaagtccttttacacttggtctagacccaaaaatcgttggctttctatgatcggtctttgtcagcgtgtcatttacgtgacgtggttggtttggttcgaaatttctaagtagctgaaaattcagttccgttccttccaagaacatcatcttgaagtagaattctttgtgacaaacaaaaaaaaatggtagaattctatggttatatatatatatatatatatatatatatatatgtttattataacaacagacctaatatcttctatgttttatgtaatatctatttattttttgttatttattgaacctacatacaaataaaacaaaacaaagtaaacttctaaataatatatttttcattttcattttagttgaaatataatttgattttcaataccaaactatataatatcaatattcagaataagttaattgttacgtattaaaaacaatgcaagaacaaatgaagaagccaaaatatccaaaatgaatagtagaagtcaaggtcaacatagtggactctaacaatatcaacgaagtcaaccgttgaagaaattaaataacttgtctaataagttcttcttttttcttggattaaatacttgtttgaagcaaattcagagacactgtcttcgtcttcatctttgct

SEQ ID NO: 4625 - DNA, 3000 bp, Unknown; identical to SEQ ID NO: 4621
  misc_feature (1)..( 3000): cDNA_ID_2990691_gDNA_ID_1620718_Annot_ID_165717 3000 nt of promoter + ATG

SEQ ID NO: 4626 - DNA, 3000 bp, Unknown; identical to SEQ ID NO: 4620
  misc_feature (1)..( 3000): cDNA_ID_1824925_gDNA_ID_1620718_Annot_ID_165716 3000 nt of promoter + ATG

SEQ ID NO: 4627 - DNA, 3000 bp, Unknown
  misc_feature (1)..( 3000): cDNA_ID_3089597_gDNA_ID_1620718_Annot_ID_165713 3000 nt of promoter + ATG
tggaattagaatccgctattcttgatccatgtaaattctgtttttcttattagactactgcggatgatggaccaagagaaccatggcatgatctgcacagcaagattgatggtccagctgcatatgatgtgcttgctaattttgaggaacgctggatgaaggcttcaaaacctcgcggaattgggagactaagaacttcttctgatgattctttgcttaggttagacagaattcctgacataatgggactttccgaagcttcttctgctaatgataatgatccagagtcttggcatgttcaggtaatttagcaagtctaatttttttgctagttattgttatttgtggtggtgacaaaaagaatctcattttttctccaatgatattaatctttaggttttccgttcaattgattcgagttcagttaaagggtttccaaaggacccaaaggaagctactggaagagtaagatagcaccacaactctgagctgtttttgtttgtcatcatgttgctatctccgactgattatgtattcatgaacagaaccttctatgtgggaagaacattctcatagatatgagcatacatgcagcttatgttaaagccatacgatctgctcagcacttcatttacattgaaaaccaatattttcttggatcatcattcaattgggattcaaacaagaacttgggtaagaaactttaaagcttttgaaggaaagcttagtaatcgatgcgtacaatatgtaaacaaggagttttggcattgcaggtgcgaataatctaatcccgatggaaatcgcgctgaagattgctaacaaaattagagcaagggaaaagtttgctgcttatattgtcattccaatgtggccagaaggtgctccaacaagtaatcctattcaaagaattctctactggcaggtaaaataattttttgattctttgctaaaaacaacccgatctcaccttctttttaccggaatttttcacaacctctgcagcacaaaaccatgcaaatgatgtatcaaaccatctacaaggcacttgtggaagttggtcttgatggccagcttgagccacaagactttttgaactttttctgtcttggaaccagagaggttggaaccagagaggttcctgatggaactgttagcgtatataatagtcctcggaagccacctcagctaaatgctgcacaggtatacatatattaaatgtcttcttttgaaatcttcgattttgccttaatgggttcgcttactgattaaaacgacaaaccaatctaggtacaagctttgaagagtcggagattcatgatatatgttcattccaaaggtatggtagtggatgatgagtttgtcttaattggttccgcgaatatcaaccagagatccttggaaggaactagagacactgaaatcgctatgggagggtatcagccacaccattcatgggctaagaaaggttctcgtcctcgtggtcaggtaaataagactttcagagacttctacttctcaatctaggatagcattctaagacgaaaatctagaaacccaccaatgtatgttctctttaacatgtctgaaccctggtttgtctcaatttcttgcagatctttggatatagaatgtcgttatgggcagaacatctagggtttctagagcaagaattcgaggaaccagagaacatggaatgcgtgagacgagttaggcaattgagtgagctgaattggagacaatatgcagcggaagaagtcacagagatgccaggtcatcttcttaagtatccagttcaagttgatagaacaggcaaagtgagttctcttcctggatacgagacattcccagatctcggtggcaagatcataggatcgttccttgtagtagaagaaaacctcaccatatgaaacttaccttgtaggcttgtagtgatcaacatttgttctttatttccttcacttcaagaaatctatctgagtgtgatctgattgaaagtgtgcctttagggtctagtttttcaaatttatgagctgtaaatctatttattacaatatttcaattgatctatcaaagtgtgtgttgtggatttttactatatgatttaatttagtaatgttgtcatatctttagtactatatgattacaatatcacattggcttgtagaaaatgaaaaatgtcatcctgaaagagcttttgccaaatcattcataagatcatgcatcacaaagcttgtcatggtgatatccaatctctgaaaaaaagatttgagcaaactaaatcaccaaggtaatttttccaatcttgtgctgctccttggttggtataagaggtctattgccatccatagcagcagtaattgagcagagggcaaagcatcgcttaagttgaggaggaagagagtcatagcttggtttaagtactggaaggatactgttagtgtagcttgagaaattctttgatgcaatggctcgttcaagaccttacactgttctgcaatccttttcccaattccttctagttcttggttgattatatttccaaaaggaaatctagagatcagctcccaacattcttcatttggtagattttttcatcctttgctactgtggagacaatttcacttgatgtggttagaacaatcttgcttccttcctcaagaaactttcccattctgaatctcagaccaaaaatcatccagagcaacaggtaaaagtcttctgtttgccaaaagaatctctaagagacgggtgacgtgtcgttgtgtgagtgggtgaagggaaaatatataaagagaaaataaaaatcgactcccgtgtttctctctctctttcacgcgtttctcttcaaaggctacaccggaggcgatttggagtttaatcggaaccactcggacgagtctccgatgtagaaacgaggaagattacttcaattgagattaagaggcatagagagagagatttgtgtattcgatcgaatcaagcttgggtttgttagtaatg

SEQ ID NO: 4628 - DNA, 3000 bp, Unknown
  misc_feature (1)..( 3000): cDNA_ID_3073812_gDNA_ID_1620718_Annot_ID_165712 3000 nt of promoter + ATG
accagagatccttggaaggaactagagacactgaaatcgctatgggagggtatcagccacaccattcatgggctaagaaaggttctcgtcctcgtggtcaggtaaataagactttcagagacttctacttctcaatctaggatagcattctaagacgaaaatctagaaacccaccaatgtatgttctctttaacatgtctgaaccctggtttgtctcaatttcttgcagatctttggatatagaatgtcgttatgggcagaacatctagggtttctagagcaagaattcgaggaaccagagaacatggaatgcgtgagacgagttaggcaattgagtgagctgaattggagacaatatgcagcggaagaagtcacagagatgccaggtcatcttcttaagtatccagttcaagttgatagaacaggcaaagtgagttctcttcctggatacgagacattcccagatctcggtggcaagatcataggatcgttccttgtagtagaagaaaacctcaccatatgaaacttaccttgtaggcttgtagtgatcaacatttgttctttatttccttcacttcaagaaatctatctgagtgtgatctgattgaaagtgtgcctttagggtctagtttttcaaatttatgagctgtaaatctatttattacaatatttcaattgatctatcaaagtgtgtgttgtggatttttactatatgatttaatttagtaatgttgtcatatctttagtactatatgattacaatatcacattggcttgtagaaaatgaaaaatgtcatcctgaaagagcttttgccaaatcattcataagatcatgcatcacaaagcttgtcatggtgatatccaatctctgaaaaaaagatttgagcaaactaaatcaccaaggtaatttttccaatcttgtgctgctccttggttggtataagaggtctattgccatccatagcagcagtaattgagcagagggcaaagcatcgcttaagttgaggaggaagagagtcatagcttggtttaagtactggaaggatactgttagtgtagcttgagaaattctttgatgcaatggctcgttcaagaccttacactgttctgcaatccttttcccaattccttctagttcttggttgattatatttccaaaaggaaatctagagatcagctcccaacattcttcatttggtagattttttcatcctttgctactgtggagacaatttcacttgatgtggttagaacaatcttgcttccttcctcaagaaactttcccattctgaatctcagaccaaaaatcatccagagcaacaggtaaaagtcttctgtttgccaaaagaatctctaagagacgggtgacgtgtcgttgtgtgagtgggtgaagggaaaatatataaagagaaaataaaaatcgactcccgtgtttctctctctctttcacgcgtttctcttcaaaggctacaccggaggcgatttggagtttaatcggaaccactcggacgagtctccgatgtagaaacgaggaagattacttcaattgagattaagaggcatagagagagagatttgtgtattcgatcgaatcaagcttgggtttgttagtaatggcgagaatagctatagttttagatctactgaagaaatctcaatccaagcacagtcttcactcatcttccttctcttccgccgccactgctccctttgcgtctaggtttctattcgggtatgtattctctctctctctctgatttgcatttgtttgactttcactggatcgtggtggatataattattggattgattactagttttctgattttgttcgagaaattagggtttagaaattcataattgatcatcttctattgctcagttgaataagaaaggttgcagatttatagtttttatttgattggaatgtgtcacactaattcaaggctatgtcagttactagtaaaggtgaatattttgcgatccagtttgaaatgtagtttatcaatgaatagttttacaagctctgtttttattctaaatagatcttttgataggtttcattcatgtgtcttttcgatactctcggtgattagcacttcatagaggactagttggcatgatttgttgtgttacgacattgactacacgtttcagttataacctattatcaatgactcagattgtttatgttacagttctttcgagcctcgagtttcgtatcgtggtgttgctgctggaatagacgatgattaccttggtgctatacggaaaatgtctgcggatggaaacttctaaagggtaacatcatctttaatatgatttcatttaaagaaaatgtcatgctttatttattaattacactactaaatgatataatttagtgattatgtagaatgtttaatttcttgttgatatataagaatagtaatatcaccaatcaaaatgaagttgcatcaaaaaagggccagagagaaagagctttgtgagcagccaaaaaccaaagtgggcaagtcttctttcttagtcgtcgttactaaaacacaaattgtttattcggcatttgtgtttaattaagttctttaattaatgattaaagatcttaaatttgtgttattaatggctaaagttaaacgattcaacaacggcatccaaaatctttaaatttttccgattcttccgttgcaagtcaacgttttccttcgcttcctcctaccttcttcttcttcttcacaaaaatctgaactttaaatttgaatttgcccatatttttagacccacatttattcatatagatttgatctgagtttgtattatctcaaagttttatccttttgttgaatcttgatctttcgattagtccccaccaagcaccaagtgatcgatcttttgtctcactgaacttggttatgcttgaaatttgatctgacaactaaaagtttcctgctttggaggtttttgattttgtatcatccagtttataacgagactatgtcaatg

SEQ ID NO: 4629 - DNA, 3000 bp, Unknown; identical to SEQ ID NO: 4617
  misc_feature (1)..( 3000): cDNA_ID_3000039_gDNA_ID_1620718_Annot_ID_165710 3000 nt of promoter + ATG

SEQ ID NO: 4630 - DNA, 3000 bp, Unknown; identical to SEQ ID NO: 4616
  misc_feature (1)..( 3000): cDNA_ID_3073819_gDNA_ID_1620718_Annot_ID_165709 3000 nt of promoter + ATG

SEQ ID NO: 4631 - DNA, 3000 bp, Unknown; identical to SEQ ID NO: 4624
  misc_feature (1)..( 3000): cDNA_ID_1824911_gDNA_ID_1620718_Annot_ID_49152 3000 nt of promoter + ATG

SEQ ID NO: 4632 - DNA, 3000 bp, Unknown; identical to SEQ ID NO: 4623
  misc_feature (1)..( 3000): cDNA_ID_1824907_gDNA_ID_1620718_Annot_ID_49153 3000 nt of promoter + ATG

SEQ ID NO: 4633 - DNA, 3000 bp, Unknown; identical to SEQ ID NO: 4622
  misc_feature (1)..( 3000): cDNA_ID_1824899_gDNA_ID_1620718_Annot_ID_49155 3000 nt of promoter + ATG

SEQ ID NO: 4634 - DNA, 1973 bp, Unknown
  misc_feature (1)..( 1973): cDNA_ID_1397552_gDNA_ID_1620719_Annot_ID_49158 3000 nt of promoter + ATG
tttgtagatgcatagtgtcggttttgttgacccggatgacatgaatgttgtttctggtagacgtaagtactcaagccttataggatactcaagcagcaagcttgcccaggtgagcttacagtaatgacatctgccgtagttttcatctgccgtagtttccattttctgaaagaggcttattttcagaaactggtgagttaagtctcgctctctgatcttccatcttccagattatgtttagtagcattcttttcaaaaagcttcctctggaaacaggagtcagcgtcgtatgtctatcccctggtgttgtcctaacaaatgttgtgagtattagcttcacttcatttcgttacaagtgcaggattcctctgttttctcagaaattcattgcgttgaactgcctatttctttccgaaatttacaggccagggatctatccaggattcttcaagctctttacgcagtgataccttatttcatattttcaccccaagaaggttgtagaagttctctattctcggccacagatcctcagattccagagtactgggaaacactaaaaaacgatgattggcctgtttgcccattcatctctcaagattgccgccctgcaaatccttccgaagaagcacacaacacagaaactgcacagagagtgtggaaaaagacgttagagctggtgggtcttcctctcgatgcagttgagaagctcatagaaggggaaaatatccaatgccggtatggagcacaacacgaatagtctttcaaaattaccacaggttaagtgacccattacagatcaaagggtaggtaattgagaaaatatcttttttttttgtttccttgtattaatctacacgatacagtggggaatgaatcccccaggcatgtagtttgcttgagaatgtttgattgttggataaaagtcaagctttagctaccattccattgcttttacttacaagtcttgttcaagtatttggttagtgtgtcttggagttattaagatgttcagtagtagagtatggtagcctgggttggtgggtagtttcttgtttgagtttagggtattttcgtaattttctttattgtttgtggagtcacgttgctcatatatagttatagggatatatatcaattagagtcatcatctctcttactctcatggtgacaaagtcacaaaagtgataaactctcctttccactttctaatgtttcttgcttaaatgagtattccatgtaaaaatgattcactcactcgtatgggtgggttgggttttctcttcatgagatgctcatttgagcaagcaatgtttggaagtgggactatttaatatcatgtatgagttttatcttttgttataagaaaaaaagttgggatttcattttcgtgcccacttcacgtgaatctaatgccttcaagtttgtggtctaccttattttctcttatggatacatgtcaatttacgtgtcgtatgagtcaagcctttaatcatcccaacaccatgcacgtcttctagatttgttttcgaccacgattccaccacaaaatttgacattgttattgaattcattaacttttttacgtgttattgtgaaatatttatttaattttgttggtaaaaggagcaaaaaagattagggtacaacacgtcgacttcttccccaattagacccatatgtgatctgtcgtcactcgtcgccaagtttttttatgtgtcgtcttttaaactttgatccaattcattaaaaagtcttaacgcccacaacgaaaaggaacttctctttttgtttggtgactgaatcggtggaaaacaacacaagtttgttcctttttgtctctccagatcccttggcttccttcttcttcttcatcctcctcgtgagactctgtgttgaaatttctctagggttttaattatcggcgttggtttttcgtttttgagaatttgatttcgtttttagaaataatg

SEQ ID NO: 4635 - DNA, 3000 bp, Unknown
  misc_feature (1)..( 3000): cDNA_ID_1824977_gDNA_ID_1620719_Annot_ID_49159 3000 nt of promoter + ATG
atgggtgggttgggttttctcttcatgagatgctcatttgagcaagcaatgtttggaagtgggactatttaatatcatgtatgagttttatcttttgttataagaaaaaaagttgggatttcattttcgtgcccacttcacgtgaatctaatgccttcaagtttgtggtctaccttattttctcttatggatacatgtcaatttacgtgtcgtatgagtcaagcctttaatcatcccaacaccatgcacgtcttctagatttgttttcgaccacgattccaccacaaaatttgacattgttattgaattcattaacttttttacgtgttattgtgaaatatttatttaattttgttggtaaaaggagcaaaaaagattagggtacaacacgtcgacttcttccccaattagacccatatgtgatctgtcgtcactcgtcgccaagtttttttatgtgtcgtcttttaaactttgatccaattcattaaaaagtcttaacgcccacaacgaaaaggaacttctctttttgtttggtgactgaatcggtggaaaacaacacaagtttgttcctttttgtctctccagatcccttggcttccttcttcttcttcatcctcctcgtgagactctgtgttgaaatttctctagggttttaattatcggcgttggtttttcgtttttgagaatttgatttcgtttttagaaataatgggtgattgggctcaacttgctcagtctgtgatcctaggtttgattttctcttaccttctcgctaagctgatctcgatcgtcgtcacgtttaaagaagacaatctctctcttactcgtcacccagaggagtctcaattggaaattaaaccggaaggagttgactcgcgacgtctcgattcctcttgcggtggtttcggtggtgaggcggattcgcttgtggcggagcagggtagctcccgaagtgatagcgttgccggtgacgacagtgaggaagatgatgattgggaaggcgtcgagagcacggaactcgatgaggcttttagcgccgccactctttttgtgactaccgccgccgcagatcggctttcgcagaaggtaccgagtgatgtgcagcagcagctttacggattgtataagattgctacggaagggccgtgtactgctcctcagccatcagctctcaaaatgactgctcgtgccaagtggtatctctctctttcgttgaatctgctgtgccattaacttctatgtatcattttctggtgtttttgttcaactgtttgagatttgatttgaggtggaaatttttgaggttttaggttcttcatagacaatcacctagtttgcttcttagcttatgcaactgctggacgatgatgtggtttttactgttgtaacagttgattgtatatggaattgtggtttgttgtaagattgcaatttcattgattgggatgtgccatgatcttgttctatctcaggcaagcatggcagaaactgggagctatgccacctgaagaggcgatggagaagtatattgagattgtcactcagctttacccaacttggttagacggtggcgtggtataaagctttttccccttttctttgtttgattgcttcggtttcttcctctggcctgttcatgtgagcttcactaacagaaagccggaagtcggggtggggatgatgcagcctccaactcaagaggaaccatgggaccagtttttagctctttggtttatgatgaggagtccgaaaatgagttgtaaggttctcttcttgtattctcatgtgttttatatcctgatccttgcgttcatgtctagattagatataagtatcctgatttgtgaaagaggctcataaactcggtgaatatgtaacattactgtctcgttctagctgtagcaaattttgatggtgaaatggctacaattgtctcatggaactttgagctgttcgtttcttcctgtctatctgaatgaaacactaatcctctgctcattgaacttttgttttatctctcaggaagattgatgccatacacggatttgctagagaaggagaagtcgagaatttactgaaaagcattgaaagcggcattcctgtaaatgcaaggggttagtctctgcttgtatattccgtttcttggaagttcattctcgtgatgttggatctgcattctaattttcccataaactgcagacagtgaaggtcgcacaccattgcactgggctatagaccgtggccacctcaacatcgccaaagttctggtcgataagaacgccgatgtgaatgctaaggtgacgaaagagaaattcctacccagtcattatctgcaaagttagcaacttctttatttatgtgtttttggttcttgtgttgaacaggacaacgaaggccaaacccctttgcattatgctgttgtatgcgacagagaagctatcgccgagtttctggttaaacagaacgcaaacacagccgctaaagatgaggatggaaactctccccttgatctctgtgaatcagactggccctggatccgagattctgcaaagcaggcagactaaacaaatactaaccacgtcttctctaaatccgcaatgtatatgatcaaatgacttagtaagaagcttttctttactttaaactttctttccatccctaccacatcactgggatgttccaacactatatcacttggatgttaccaagtcttgttctttgatttctttcttcttacattttaacaatcttttgttcctttaggctttatgatatgtcgtaaccggttttgttggtttgctataaatacacacatatagacagaggaagagtcattggatcctcaacgaataaataaccgactttggcggcaaaaacggttgatagaacataatttaatgatttaaggaaagcccccaataaagcaaatacaaaaacagaattagcaatcttcgtggccctttcgtcttctctccctaccccaccttggactaccggaaa

SEQ ID NO: 4636 - DNA, 3000 bp, Unknown
  misc_feature (1)..( 3000): cDNA_ID_1840737_gDNA_ID_1620719_Annot_ID_49160 3000 nt of promoter + ATG
taaatagattaataccgtgtccaagctgaacaagaaatccaaaacttgaaaaaacttcactacacactagtcccggtcaatttcatttaccaaagctcatacgttctaaagaagactatgggtcgtagatcgtaatagttagtttggtttaatggaaaaaagtcaattcttttactttattagaggtttggttgaaatttgtaactgattattctttcagtttcaattgattatcatatattttacaatttttatacttgcacaaaagaaattaatcgaagatttttttaaaaaaaatgatatttcttggtctcttcaaataaagcaagcccttgattacggtcaaacggagcacgttacacatcatcaagtcaataatctaatcaaatacatatattcaactcacagtcctgctaattaggccatgcatggactatagatacattatcttacctttatgtgcatctcttatcaggccatgcatggactatagatgcattgaagtatctaaacttgaatgggggctcacaaggataacatgatcagcctaatatcttctaaatctgtttaattttaccgtccttttttccatgattaaatcatttcactattctcatacatatctcatgcaacgacaagagcagccttttgacctttatcgtagcacattcctcactttcacccatttttgtttaatgtatatccatcaaatacagccttgatactctctttttgtatgaaaggctatttcgttttcgttgttttgagataaagatggacaattaatcagatttacagatagcaaataatgtggactaaactagatgaaaaaactactatattacatttttgttttcagtttatatactactgcatgtattacatctttaggcataactacggtccacaacacacagattcgaggataaacctacaacgacccacctctgtttattttaagataatttatttttgtcgacgaagaagacttcttcaggatttatatacattatttattgttaccactatcgcagctctgattatcattgtttttttctttatataataataacaataaataatggtattatttataggcaataaaggctcgacatgaaatttgaaaggacccaacgttaggaaaatcgtaatgtaggaccacccacccactttgtttatattttcttctcttctttgggatcactctcgtgaataagaagcgccacaaggagcgttttgttcatttttctctttcagcttcataaaatactacacacttcctcacattattcatcctctcttttcccttttcttgtgttcatataactcaaaccaaaatataccgtctctatctatctaaatcccaacccatttcatataacgtcaaagaaagtttcttattcagaaaaacaaggcgatggattttgaatttgatgatcaagaacggttttgtgcgactcctaagcttcctttgttctcgattccatttaacagagcatgtgacactccagggctagcgacgccgcctgtgaacatcgctggatcagtaccttttctatgggaggaagctccgggaaaacctcgcgtctctgatgagaacaaaccgctggcttccaagcagaacgaaagagaaggaggaggaggaggagtcgtgcggtgccttgagcttccgccgaggctattttttccagccgatgatgagccatctccgaccacagttcttgatgggccttacgatgtacctcgccggtctttatcagtgataaggagaagcgaaagagcctctgagggtagattcgagttttcacgttccaccaatagccgctgctgcgacggtggcggcggtacaacggtgaagattagtagagttagaagaaaaggaagcctcttgaatctctctcattccaaatcgcaattcttggtaagttttgaacactcatcaccttttctaacatcttatttttagctgtctaattacacactcttaccgggtagtttactagtaactagcaagttaatcgtattcttttgtagtcaaaggtagtcgatgattcagaattgcaaacactataattttcgttatcaaaaaaaggaaaatacattattacgttgttcaaagtaccaaccgttttatcaaaaatttcaaactttattcaatgatttctaactcaaaacaaaacttcaacatttttgggatttgaataaatgtcccttttgattaaaaagtttaggttttcccttcaaaagtctttggttactctatatagtatggagtgttttttcaatatgctttgtttttttcggcttgtgcatatgaattcatttttaggctcattttgattacataataataaaatgcaggcaagggtttaccaaggatttaagcaagtgatcccatggaggcggagacaagagaatcttccacggatgagttcttccaatatttaaatcaaatctcttcgatttcttttataaatcattaaatctttagttaattttatagactaatattaatatccatctgtatacatattaccacataatttacagacatgaggaaaagtttattcttaactttttaccaaattaaaccctgaaactacactgttcctctagataaataggattattgtaattatacttgaaaaaggtaaaagaatagggaacatcttaattcttaaatgaaggaggacaagagcattatgcaaaaccaaaaatttattatacaaaacataactacatgacctttctatttgcagttgctagcgacagcaataatactttcctgaaaaggaaagctataaaagttgattgatcacgatttgggcctaagcccaaaacttataaagtggaccgttaagttagttaagaagcccgcgttgatttctcttatcctcagatatttttttacgaaaatccacggccactaaccgtaaaggacactcttttgatttttctcttcttctacttaactcgctttgcctgactcactgagtcatg

SEQ ID NO: 4637 - DNA, 3000 bp, Unknown
  misc_feature (1)..( 3000): cDNA_ID_1824971_gDNA_ID_1620719_Annot_ID_49162 3000 nt of promoter + ATG
cagtttatagcttctaattaaaattttggcaaaactattaacaggaatcgaaccacatgttacactttaccactatgatcttcctcagtctcttgaagatgagtatggaggctggatcaaccgcaaaatcatgtaaaggataaaaagaaaaaaagattctgatctagcaaagtcaatttttaaatatgaagtgtaaataaaaatggtgtttgtttttatatattgcagagaagacttcactgcttatgcagatgtatgtttcagagagtttggggaggatgtgaagttatggactacaataaacgaagctacaattttcgccattggttcttatgaccaaggaatctcgccccctggacattgttctcctaacaaattcatcaattgtactagtggaaattcttctacagaaccatatcttgcaggccataacatattgctagctcatgcctctgcttcaaagttgtataaactaaagtacaaggtatatacacacattttttgctcttaaaacctgaacctcgtatgatcatagttcattatgatggtgcagagtacgcagaaaggatccatagggcttagtatatttgcattcgggttatctccatatacaaactccaaggatgatgaaatcgcaactcaaagagctaaagctttcttctatggctggtgagcaaaaagaaagctttctttctctgtgtttcaataacttgcggacaaaatctgaagactaaaatgataattcaggatgttgaagcctttggtatttggagactatccggatgaaatgaagagaactgttggatcgagattaccggtgttttcggaggaagagtcagagcaacttaaaggatcatctgactttataggaattattcactacacgacattttatgtcacaaacaaaccctcaccttctatctttcccagcatgaatgaaggcttctttaaagacatgggagtatatatgatttgtaagattagttttctttcatcattaaccaatagaaaaatgcttctgatcaattcttaaaactaatagttcttcttctttggacagccgctgcgaattcttcatttcttctggtaaggtcctgcaaatttgcataatacatatatattttttgccaaaagctcttcttgaatcaattgtttttcttgaagtgggaggctactccatggggtcttgaaggtattcttgagtatataaagcagagctataacaatcctccaatctatattcttgaaaatggtacaacacttcattctcttttgttttcttactctgttgtgtctgcttgaaagcacactttcttgttctttaagattcttcaacttgcaattttttaaatataaaaacaggtatgccgatgggacgcgactcgacattacaagacacacaaagaattgaattcattcaagcttacattggtgctatgctcaatgccatcaagtatgattctccttctgcatcttttagtcctcatattactacattatgattcatggtctaattccagttttacttactgatcaggaatggatcggacacgagaggttactttgtatggtcgatgattgatttgtatgagttactgagtggatatacgaccagcttcggaatgtactatgtgaatttcagcgatcctggtcgcaagaggactccaaagctctctgcttcttggtacactggtttcctcaatggtacaattgatgttgctactcaagatactattcagttgcagagcaacatctctggctcttcttcattgtaatatatttaaccaaaggatccttatttggtttatttcatctatacaaagaaaaatctcagtgacttggcaaaatgaatttataagaattgcatagaaaaaaagatgtaacttttgagaccaataaatgttgcatagattcttgaagataaaaactagataacggcattcgaacacaaccacaaaagtcacaaagacattaacaacttaaatttccagtacatagagatagagttgcattggaaatttatgtcagtcacatcacaaagattacacttacaccgaaaaataaaagaagatacatttctattgccttcttcacatgtatatttgtcgcgttttgtgagtggaagaagaatgaatagaaaagatcggtcacttgatatgtacttttctttttaatggtccaagaaaaccactaaaaccctttaattatattctcttgaactcagactaaaggaggaaaaatggaaatgaatcttatgtctcttttttccatttttctggtcatagttttgacaacaagctataagtgataaatagaagatcttttatcagaaaagaaaatacaagctatagtgatagaccgctcagaatcagcttataataaacgtaactttgatgtatatccgtcatactaatgttagaaaagattagagatgaattttataatatgattttgaattcacaacgcaagatatccaagcgacttacccttcattaggaaaaaaaaagatatccaagctaccaaaggagcttcccaactttagaataaagaataaaacgccgtatgaatccgaaacctataataatcataatttgccgagaattttgtaaattttgtcgttgttgggtcaaacgtataggccttacgttatgaaatgtttgggcctatttgggccaataattaacatcatcagttatagtgattggtcgctcccctcgcatggaaccacatccacatgtgagaacaaatttatgattgtagtgtacataatataagtggaaatatatgtcggtcacatcacaaggaaaccgaaaagagatatttcttgaatctttcttcttcacatatatatatttgtcacatagagaaaaagatcgatcacttgcgcagttttgctacggtcaagagaactccaaacaccttcattttttattattattttttcttgaaaaccaaatcttcaaaactctacactaaaacgaaaggcgcaaaataaaaatg

SEQ ID NO: 4638 - DNA, 3000 bp, Unknown
  misc_feature (1)..( 3000): cDNA_ID_1824945_gDNA_ID_1620719_Annot_ID_165750 3000 nt of promoter + ATG
tatgcttgccgtaaaagtacggttacgtacgtagcgggtttgaaccaatcactaatggtaatagccaatcccaattggcagataatgttataaccgtcagattcaaattcgaattaaagggagccttggcatctgaacggttcagatttgatctttcttcttttctctctctctctctctctctctctctcagtttcagagatcaaaagagaccaacgaagaaaaaagcaccgcttttgcagaatcggtgacgatagaaagagaaagacagagagagagggagggttagagagtcaggggctatttgattcccctggaaaatttcagatatttgtttcttcatcttctttccttatttctctctttctcgtttttaccagatttgtcttacgaatcaattctcaaagatacccaaaagtggtagggaagcaaagtactgttttattttgcttttgattctatcaaaatcagcggtgaaagaaaggaattttttttattatcagagaaagagagattcttgataatcgaatagacctagatttttttttgaatttagggcttttttgatttttgagaaattgattgtggtaatggagacagatagtatggagtgcgtctcatctacgggtaatgagatccatcagaatggtaatggccaccaatcttaccaattctcttcgacgaagactcacggcggagccgctgctgccgccgtcgttaccaatattgttggcccaacagcaactgctccggccactagcgtgtatgagcttctggagtgccctgtctgtacctattctatgtatcctcctatccatcaggtgaatctccgatgctcttttggttgtttggttctcaattgattcctaatgatacgttttagctttatgtgtttgtgttcttctctgcctatatgttgtgtagcgtttaatggggatatagattatataatgtggttgttcataggttttgatgttgcttgtatcctagaattgagccaggggaagtaattgatctgaaaagtgtgtctcttttttgttattgttgttgttgcagtgtcataatggacatacattgtgctcgacctgtaaagtgagggttcataacaggtgtcccacatgtagacaagaacttggagatattagatgtttagctcttgagaaagtagccgagtcgcttgagctgccttgcaagttttacaatctgggatgtcctgagatctttccttactacagcaaactgaagcacgagtctctctgtaacttcagaccttacagttgtccttatgctggttcggagtgtggtatcgtaggggacatcccttttcttgtagcccatctcagggatgatcataaagttgacatgcacgctggttccacttttaaccaccgctatgtcaaatccaatccgcgtgaagtagagaacgctacttggatgctaaccgtgagcatatccttctttgtctaggaaaacatgattctcttcaatgttttcggtaactaaactgactgtttcttatgtgggttcaggtattccattgctttgggcagtacttctgcctccatttcgaagcgttccagcttgggatgggtccagtatacatggcattcctgagattcatgggggacgaggaagatgcacggagctacagctacagcttagaagtgggaggcagtgggaggaagctaacatgggaaggaaccccaagaagcatcagagatagccacaggaaagtaagagacagcaacgacggtctcatcatccaaagaaacatggctctctttttctccggtggagacaggaaagagcttaaacttagagtcactggtaaaatctggaaagagcaacacagtccagattctggactttccataccaaacctatcttcttcctgatcattcttttatctttttgttttttctctctttgagaaggaatgttgtatgatgattcgtttgcactcttcttctttgtctgtatctaaaacatatcatgaatgaatgtttcatcttatagtctcatattttggcagatgcattacaatttagatacatggagataggagatttgatcaagtgaaacaaaaaaaaaactaagtgattccgtggtaacaagtaacaacttgttcaaacgcaactaaaatgtgtttatgaaaaaatggaggtgcggggaatcgaaccccgtgcctctcgcatgcgaagcgagcgctctaccatatgagctacaccccctgtttgatttctgataacattaaactaattctattttttgctaacactgtgattaccataatacaatatccaaatgtatagtgtgagacaagaccatatatgtaaaatatttagtctatgttaaacaagttgcccaatcgacaaattattaggaggattgttgatgtatatatgcatttatcttaaaaataaaatctaccaatattttcaaaagtgttcaaacattaaattgatatcaaattaataaatagaaaagataaggttaaatatgaagttattcaattcatataagttttaaagattatgtaagattttctcttaacaagatttcaacaaatctttttaaaagatatacgagtatgaaaacaaatcctaagcttttttattttccaacaaacaaattcttgagctttaaaacaatttaaatgtcctaaattgtataatctaatctaatgttagtgaattgcaattattcaaattattaacttaatagataaataggaaaaaaactaaataaggaaagttaggaattgaggaaaaggaaaaatcttagaaattgaattcgagagggaattaaaggaaaaaggcctaatacaaattgaaaagggtttttaacttttaagttctgtttcttctagaactttactttttagccttcgtggctttccctataaatttcccaatctttggccatcggacgatcaaagaaactcattctgatttttaatctctgacgagcaaagaaccctacagctaaaagattaaacca

SEQ ID NO: 4639 - DNA, 3000 bp, Unknown
  misc_feature (1)..( 3000): cDNA_ID_1824949_gDNA_ID_1620719_Annot_ID_165749 3000 nt of promoter + ATG
tcaatccatttatgatttaggcattccctgcctttagtactgcaaaacggtgattcccgtctgctaaacttcagtggctacttcggtgtctaggagaattaaatttgcaatgaatctccttttgtactcactatgatgctgaaggaggtttgtaacatttcagcattagcattgaatgtatttattttgtgttgtcaaggtggggcatcatctagtgtcttggaagctaatccgccaccacgtgagtccattgtcccagtagttaatccatcgcgtggtaacctaagtcctatgcgaaaggatacgacaggctcagccgttgttcagcctgatgcagccacttcgattcaaggtacatataagcaatgtcactcttagaaagtggaacccatgttcgtgtgttgtagtttgagcttttgacgttgacaagcaactttaataaaaataaaaaacgtgatagccaatacttcttctcttatttagcttttgcgtctctcgtttgacttttaaagactccagcactattttcttaatatgatggcagttgcaaaatcaaacgatacaagcgaaattgtaaacaatggagctattgttggagacgggcaaaagtttctggctcctatggtggaggagcaaacacagcaaaagattgacaatgatgattctagtacagcagacgggaatcacacgtcagacaaaggacgtctctccccaattcaaccatctcatggcatgagtatactaaacacagtgactaacggacccgacggattgaaagtagaaactacaattcatgaagaaggtgcccctcttctgtttgaaggaaaagacactcctgacacaagcacggcagattttggtctgaccaaagtaacaggtaatcttaattctggttataatgatgcgaggaaatcatattcatagcttcagtgccaaatacgtagaataaaaccggtttctgtctctcctttgtttgaagattaacttcttaccgttctgtctagtaattcctattcataccttgcaaactttccgcttctgtttaggtgtgatggacacaggtgacagaggagttattaccggtccagcaaatcctgaaattgatatttcagcagggaatttgctggaagaagggtctctaagggaaccgttaatgagacgagttgttgttcaaggacgtaaactggaaatcttgaaaagcattgtctacggaggtctactagaagccatcacaagccttggtgttatttcatctgccgctggttctggtgcttcaatgtgtaagtaccgcttacccctagctatccattttcatttgtaaaacacaaaacacttttttcttgcttgaaaatctaaatcttgcttgaaaatctcaacacatgtttgtattgttgtggttgcagtgaatattctggtcttggggcttgcaaacttgcttggcgggcttattcttattattcataatgtgagtgatcaataaaacctttgtaatgaacttggtaatgaaccatgtaactggcaaattcaagaaacttacagagatacttcttctgcagctccaagaacttagagaggaggaacccataagaacaacaacagaagataaccagactaacggtagagaagaagaagaaggtcggtataagcgactccttggacgaagagaaaatttcacacttcacgcaacagtcgcaatcttatccttcataatcaccggaatactccctcctgtagtctactatttctcattcagtgaaaaacacaacaaagactacaaagttgcttcagttttcggggcatctctattctgcatcgtcttgctcgccatagccaaagctcatgtgaggtacccgagaggcagctacctgaagagcattctgtactacgggtcaattgctgtatcggtgtcggggatttcttatgtggttggtaactttctggaacagttgcttgagaagcatggatggtctgatggatcggaaacacctgtgggacagatgatgctttcatcacttatgggaagaaaagccggctttggatactcatcatcgtactgaaactgaatcttgcctggagaatgatccaaactgaaacttgctgcttttctcttttactctgcttttgtgagctctcgttccaaatctttgttgtcggcaaatctttgttgtgacttgtgagtgtagaagaaagtcgtttccacttgtagaataaactaaaataagcataacataataatgatggaagatctgtgccttttaataagtttaaatcatttttaaaaaatgacaaaaagaaggttctaccgagaattgaactcgggttactggattcagagtccaatgtcctaaccgctagaccatagaaccatttgatgacagtcctgatataaactagtatatactaaatattatatgcttgccgtaaaagtacggttacgtacgtagcgggtttgaaccaatcactaatggtaatagccaatcccaattggcagataatgttataaccgtcagattcaaattcgaattaaagggagccttggcatctgaacggttcagatttgatctttcttcttttctctctctctctctctctctctctctcagtttcagagatcaaaagagaccaacgaagaaaaaagcaccgcttttgcagaatcggtgacgatagaaagagaaagacagagagagagggagggttagagagtcaggggctatttgattcccctggaaaatttcagatatttgtttcttcatcttctttccttatttctctctttctcgtttttaccagatttgtcttacgaatcaattctcaaagatacccaaaagtggtagggaagcaaagtactgttttattttgcttttgattctatcaaaatcagcggtgaaagaaaggaattttttttattatcagagaaagagagattcttgataatcgaatagacctagatttttttttgaatttagggcttttttgatttttgagaaattgattgtggta

SEQ ID NO: 4640 - DNA, 3000 bp, Unknown
  misc_feature (1)..( 3000): cDNA_ID_2170372_gDNA_ID_1620719_Annot_ID_165748 3000 nt of promoter + ATG
tcgtttcgaaaaaagatggaaaagagacaagagtacaaggttttagctgtttacgcagtgtctctactctgcatcgtcttgctctcaatagcgaaagcttacgtgtcgaagaaacgcgattatgtcaagactctgtttcggtacacgacgacggcgacgacggcgtcgggattctctcaatttgtgggatacttggtgagtcaatggcttgagaaaagcgggttttatgatgattctccagaaactcaacgagtttgaaacgagttcttgttcgtcttctcttcacttcccctgttcttttcgtactctttacgtggcccaatttattttccttaaaagtggtagaattgtttgattttgaccccaagaaaaaaaactttttttgtgtgctagacttggctctctttcaagttagttttggatcaaacacttgttgttgctgagaaggttccgtgaacaagaattctgtaacatgttctagtgccaaaaataaccagttcataaggttttatagtgcatgttaattaataaatgttgttaccttatgtgtcttttaaacaatggcgattacaaacaattagacatatgcatggaaatgcaaatagcactgcgtgcgaggagaaaattagggtttatcaattagattcaattggtcggacgcctactaaaaatgtggaacttaaagattggtggtggtggcaaatacagtttcatagatatggaaaacaactgatacacgttctgagataagcaaattttgtgactaaacaagttgtataatatatggagattgaacttatgttcaccttgataccaaaaaaagaaagaaaaacttatgttcaccaaaatacataatgtatcatcagcaaaaggggaaaaaattacggtgactgaatgatgaagaatcaaagaaaataagaaaaagttgatgaaaaatggcatcacatgaaaaacgcttggttaattatttcattttaatcatggatcaaattcagggatgagtgaaaacataaacaagcaaaaattattcagcacaaaaaaattcaactacattaagcaaatgatgagagtttttggcactttgtgccattccagaagctacagtttaatatctaatttgaactaaagtttaaccaacgtgtactattttcatcttgttgattctttctactcgtatgggaccatctaatgcgaatacctaacaattattatatatgatataaaattataaatccatgtgaactcaaggttacgttcacattcatgactcatcatattgagtgagtcgatcatataattaaattcaacctacattcttacacgattctaatatagagttaagattttaattaaaaatgatgacacaaattagtttgaacacaacataagcatgttagtaacgtgcttttggggttatatatcattattttaggtggtattattgatagaatggttaagattttaggaatcatggggatttgggcaaatattgtgtaactaagtatctatgtgtcacatttcttatttcctttcaatttctcctgataaacgtaggaaaacgaatatatactaatggtgatggtgattgatcacaaccatatcatcgagaaacttcacgttcaaacgtaaaagacgagaccattatcgaaacaaactagtatgaagaagttttttttgttaatgaagaaggttttttttgtgtgtgaagaagttatatatctgaatgcaaattataatgcaaggaatgtgtatctagccaattttgttgataaaagattagccataactgaattaaatatggattttttttttttcgaaaaatgaaatatggatgttattatgttagcatgattaagttaataatgttgacatgttgtaatggtactatgtcagcaaacgtgttgcatgaaaaatttatacggaatatttctatcgagtattaatttcaagatgcgactttcttattagaatattagtatattaaaaacaactagtggtggataaacaaacattattgtaagatgtgttgttaattcttaatttgagtactattattgtcttttattaatatttttgtcaactctatgtgtttgatgtagataagaattctttggccgtattgattattttccacgtttgaggcatcgatgtagttgggacgtgatcgtgaaatgaatgcagtcagtgtctccaatctgtcatccatgtgccaataaatccctgaaaagaaggtgacaaaatcttcaactaatttgtttgttaatttttactactaagtatacaattttactagttacaatatactatttcccataatgaataatcagttgtaaatttgtaataggaaaatatagtaggtaagcatttagatggtaaatttaaataaataatttggttaagaacaatactgataaaataaactatcaaatactaaacaagttatttaaaataagctaagttattttgttgtgtattttcgaaaagtctatatatctaaaggtgtcaaataaaagtcacataatgtttcgaaaatcccataatagtaggtggtatttttagaaataatgaaatttgggaggaaaaaatcactaatactacttactttgtcaactatatgtagtaaaggtaaatattaacaaaattacaaaagaaaacaaaaagtcctacagttttagtaactaactaacaaagagctttaaacacgtgaaaagtttttgcataaaactagtactagtatattagaactaggagtagtgctcaatcaacggccaagtcaaaacaaacaaatcaccatcaataatcatataattaataagcagaatcatcatttatgtatttgataatgttcaagtgaggaagaagaaggagacaaagacgaccccaacataatatctatcaccttctctatagatagttagatctcagaatctctccttttttgtttgctttacccttatttggccattcctgtcttccactttgtcatcttttccctttctg

SEQ ID NO: 4641 - DNA, 3000 bp, Unknown
  misc_feature (1)..( 3000): cDNA_ID_3073833_gDNA_ID_1620719_Annot_ID_165745 3000 nt of promoter + ATG
gagagtgacttggtgaatccaattagttattcttgtcaacttttggctttaatacaaataaacattaatggatctcaaaatggtcatgaagaaagctcgaaaggtcgatctcccgagaaggctttggaagagatacgtaagcaagacactcatgatctctattgccctaagtgtactagtaacatcactaaaacagctctaatcgttgaaaagggagatgatttttctcccgacgaccagaaacctttcgtgctctggatccctaccttcaagttcctttcaagttctcccaaaggtatccatatgtacacgtaaacatgtatatatattgttctctatgatgatgaagataactttttttctttgaatgctgagtgaccggttttttttatctgtaggatctgtcgaaagtaaaccattgaatcctaatctcagtggtatgtgtagacacacttttttatgatggatgcacttttgctttgaactattgcttatatgatcgattttgtatctgtgtaataccagtcgagaacatttgtttgtttatgatgaaaacgtacactttcgtctttaattcctgaatgatcgatttcctattttgtaggaccagacgaagaaaactcatctcaacctgaatccagtggtatgtgcactcatatttctttatgatggacacgttatatctttgaagtactcatggttaaatggtcgattttctatatgtagaaccagtcgacaaaaactcatcgtttaatcgtagtctcagcagtttaggtatacatttccttatgatgatgaacaaaaactctattaaaaaaaattccctttgtcgtccttcatcttcaatgacacaattgccatatatatatatatagctaaaaccttggaacgattgcctactcttttacggaattcaataattattcgtagagacgaaaatagtgctactcctctacaccaagatggtgcaggtcatcaaagttctacgagcacatcaggtcattcccaatgctttcgctgcttcatttctttccaatacaatataaaacaaagacatacgatattttcaaaagaaataatcccatttttcttgtcttgacccctggaaaatatgcagtgtctgagcaacgtggacgttggaaaattagtcccggtggatggataattcatcgttaaacgcccagcaaatagacaacgaattgactatcctctcttcttaccccctaaaatgaacgagttttttgtttgattgaaacccatagtaagtgattgatgatagtgtaatgatcattttgtactgagtttaaagcatagaaatcattgcactattactggaaactaattatttcttaaactaataagtttcataaatatattgcaaaagatgcaatagagtgctagagttttggtaattaattttttattttatgaatgaaatattcttatccaaactcatgtatagcttattggatattaacggttgatgatttgaattttagtttttacttcgctggaaacaaggaaatcatattgatcaaattttccatgtatgataccttaaaaagatcgtttataattgttttgaaaaatctagaaatttaacaaataaatattatacttttgagtaaacaaaataataataattgaacttatatattatcatttttgattccaatcttgtgaatttgaaacataccaccaagaaaaaatcttgtgaatttgaaatagaaattttccctcaaaaatcaacgaaacaaacaaatctaattaactaaaagtctaaaatacaacttaatgaaataaataataaatcctaactaaaactttgacaaaaaaaatcctaactaaaataaaatattagattattgttttgataaccaactccatttatatgcacgatgatcttcggtcatttgattaaagaaagacctcatctttagaaaagtctacatataattaagaaattaatgtgacaatgtcatatttcttattatatataattaaacatggttgatagcaaaccggacagaacaaattattaaataaaacccttttataaaacttctaacgaaaatccgtaattctaatcaagccataaccaaatagaagccacataatcccaatacaggtcgtatatgtattatttttttatgactcggtctgttaaatacaagcacaacaaatttaaagttcgaaatattatgttaatagtcaactctactaatattcctcaagtcacaaaacaatgacgaaaataaaattcacataataagaatattccccaagtcataaacaatgaatgacgtaaattctagaggcattaaaatgaaaaaaaaaaaaaagaagacattttcaaactctaaaacatacagtcacattcattgtacaaaagcttttgattgaataaaattttgcattcgattcaaaaaaaaaaaaaagacattgctataacaacttcttaaaatgcgtgacttttgcacccttgactttacagggtcataaaatattacgtataattaacaaaaagaccaacaattggaataatcaatttcttcctattattgaatgttaacttttctataaacctgaatcttatgatagaatgtacatgaattgtgtcccattgcataagaacttaaagcatatgcagtaggagattttcaaagaggtacaacaatataaaaaaaagtaggatagagataaaaatcggctattattgaagaactttttagtttttagccatctccattgacagaaacgagaagattttttcaaaaagaataaaccacaagtgatatgacaactgtcaattcagttgagaaccattttctatttgagaaccatctcattcacggtatattaaaagaatacgactatgaaaaatcaaatgttagagaagtagatcagcgaaatataaaaatgagatagtaagcaggtcgtgggcatataaataagcgtccttctgttttctttgtcatcattaattcattaccctcaaca

SEQ ID NO: 4642 - DNA, 3000 bp, Unknown
  misc_feature (1)..( 3000): cDNA_ID_3073839_gDNA_ID_1620719_Annot_ID_165742 3000 nt of promoter + ATG
acctttcgagctttcttcatgaccattttgagatccattaatgtttatttgtattaaagccaaaagttgacaagaataactaattggattcaccaagtcactctcaagaatggttaaaaataaaataaaaaaaatcacaaaatcttgattcccataactaaaaagaaatgtgataacgagtacattaatctaccatgggggtgccatttcaatggaattctctagcactaaaattctatgtaagaacaatgtacatcctactcataaatcaaaaacctaaataacaataaaggaatgattagaaacgtaccatatagaccatcgtcgtcgtcaagcacttggcgtttgggcacgatggattccattgaagttgaacctggtgtgaatgatcacaaagggagaaccagagaacaattatattttatatatctaacgcgttttttaatttttaaaatcgtactattgaacccaccatgagattaaataaagaaccatggaaaggctaaacaatgaccgagttttattcttcaaataaacattatgatcttatgactttttatcttcattgtttatgacttagtgaatgttaattacagttgactaatggaattattagcatagttagtactttgaattttagtatcgaagcagtctcaaatcatagtcaacttaatatgaaattaacttagagaaatagtattattgtggcgtacatgacctgatcactaaccttgcgtaaagtattgaagatttattgattatgggtcgttggacggaaggacttgtacttgaaagtcttttctgttaatattgggcttagaggcccatcattttaaaggctaagaaattctttatatcttctattctttttttttttttcccgtcttatatcttctattcaagcgtttcctaatgttatttatccgaacagactaatcagtttgggccaaaatcgaaataacaaatcgtcacggtaccagtaatcgctagtgtatacgtgtcggtagtccagcacagggatgaacgaagcatgaactaacttttccacgtgtcatatatccattacacgatctatgaaagctggggtattcttgtaaatataaattatcctgagggcactttcaccaaggtaatcgttattctgcttcccgttttttttatctttttccggtaaatttctgctctaactttttttttttcatcatctttttggtttcgccaataatggaactcttcttccaccattttcctggaaaatctcggtatcgagaagatgaatccctagacagataaatctagaatcactcaaatctctgctcttcttccgattcagatcgtatcgaattttgaattttgtatctcgctacactgttcgattgagaattctttttttccgattgattcgaatcggattttgtttttttcctcgatatagaatgacttcgaatcaacgtatgttgttctactcctgcattgcgaaaggaacagtgattctcgcagaattcgcttcaaaggaagagccaggaatcgaagatctagctttgagatgcattgagaacgtacctccacatcattcgatgatctctcacacagtccataagagaacctacgctttgatcatcgatggattgttttcgtatttcgcgattttagatgaggtcgtagcgaaatcggagtctgtatggctattcaatcgattgaaatcagctacagagtctctaatggaagacggatctactgcggattcgttggataatccgactcaacactgtctccaatcaaagctagatccagttttcgctgagattgctgctattggtggtaatcataataaggatttggaattggagtttggatcaccgaggagtatagcgagggagattaagagtaataatcagagtttggattcgtccaagggacgaaaaggcggtgcgttgatgccgcttttaggaaagccgttgagggtgttgaagaacaagaagagattgcagacggaagcgaaaagtgaaggtcattggaatgagaagaagatggacctaggaggaggaggtaaaggagtgaggaatggtttgattcatgatcatcatcatagacaaaaggcaaaacagatatggaggaaacatgtttggattgttttgatgtttgatctctgtatctgccttgttctctttggaatctggctttggatttgtcaagggtttcaatgcatcgatgggtaattatcttcgatcatctaagttatgtgtggttgaatgtttaaaaaaaatatccgaggtgttgtttccagggtttaaaaagaaagcctggtttacacgtttgtgatgatgtttttgtttgtgtttttttgaagttgttcttcatgaggtaaaaagaaaaaaaagtgtttgtaaaaatctcttttgtaatgatatctcttcgttttctttggatgttttgattacacttgatttgttgtgtgatattgggcgaaagatgtggtctatgcagttcaacgtctacgaattttaaccccaacatgaccaaaacactcatatttgtagttcttagatgtaaatttttactgcataacccatcttttccaaaatgtttgtcaaacgtaaattagcatttttgtccgcaagatacaatgactttagcatgaaccaaaagggaaataaatctcaatcaaccaccgtattaattattttccgaaattcatatgtgaatataggagttgtttagcaattcagaaagaaatactaatcaaggtttataattacagaaatctggaaatgtatgtcggtcacatcagaaggaaaactgaaagagatatttcttgaatcttcttcttcacatatattttgtcacattgtatagaaaaagattgttcacttccgctacttaacggtcaagacaacgaccaaggccaccaggccccttcacttcttttatcttcgaaaaccaaaattttcaattatttattctctcctccactcacacgaaagtagcaaaagcaaaatg

SEQ ID NO: 4643 - DNA, 3000 bp, Unknown; identical to SEQ ID NO: 4636
  misc_feature (1)..( 3000): cDNA_ID_1840737_gDNA_ID_1620719_Annot_ID_165740 3000 nt of promoter + ATG

SEQ ID NO: 4644 - DNA, 3000 bp, Unknown; identical to SEQ ID NO: 4635
  misc_feature (1)..( 3000): cDNA_ID_1824977_gDNA_ID_1620719_Annot_ID_165739 3000 nt of promoter + ATG

SEQ ID NO: 4645 - DNA, 1973 bp, Unknown; identical to SEQ ID NO: 4634
  misc_feature (1)..( 1973): cDNA_ID_1397552_gDNA_ID_1620719_Annot_ID_165738 3000 nt of promoter + ATG

SEQ ID NO: 4646 - DNA, 3000 bp, Unknown; identical to SEQ ID NO: 4642
  misc_feature (1)..( 3000): cDNA_ID_1824967_gDNA_ID_1620719_Annot_ID_49163 3000 nt of promoter + ATG

SEQ ID NO: 4647 - DNA, 3000 bp, Unknown; identical to SEQ ID NO: 4641
  misc_feature (1)..( 3000): cDNA_ID_1824961_gDNA_ID_1620719_Annot_ID_49165 3000 nt of promoter + ATG

SEQ ID NO: 4648 - DNA, 3000 bp, Unknown; identical to SEQ ID NO: 4639
  misc_feature (1)..( 3000): cDNA_ID_1824949_gDNA_ID_1620719_Annot_ID_49168 3000 nt of promoter + ATG

SEQ ID NO: 4649 - DNA, 3000 bp, Unknown; identical to SEQ ID NO: 4638
  misc_feature (1)..( 3000): cDNA_ID_1824945_gDNA_ID_1620719_Annot_ID_49169 3000 nt of promoter + ATG

SEQ ID NO: 4650 - DNA, 3000 bp, Unknown
  misc_feature (1)..( 3000): cDNA_ID_1825011_gDNA_ID_1620720_Annot_ID_49172 3000 nt of promoter + ATG
aaaaggcaagaaaactattgtcgaaaagacataaatgacactaaaattggattattaaaaatggtatatatgtttggtggaatttataatcattaccaaaatcaaaggaaggagagagggacctcttcgtgcttatgatttccctcctaaacaactgctcccactatccttttttacttccaacaaaatcattcacacgagaaaatctgtctcgtgatcactttcatgcaaaattaaactaaattttggtattttttgtcaagttcttgctgttttaagtcgattatttggtaatactatatgtgtggatatacacatccaagctaatcaataattgatctccttctcttatcaataaattacaccacattagctaatcaagctaataaattacaccacattctcttatcaatttttatatggtataaataaaacaaccgactataggctacagagttggtattaaggcattattgccttctagtcgaaggaatttttttgttatgataacactcgtgggaaaaaaatccagcctaatatgctcatttaaaggataattgatttaaatgctttaatcattaaaataaaaggtttttgcttttaaaggttaccaccgcttaattcatcattaggagaatattaactttgatcgaaattccaaaatacttttttaacacataagaaaattttcagcatttttaaataaagggtacatttattgggttcaataaatatgtttccacgtaaagtttggaggtttaaccacatgaatgttttttgatttaaaaaacacataaattttcttagtaattacacatttttaaccgtccatccagattgtaataagtgacaaatctgaaaacatttttttttttcttgaatcttgtttaaattctctctgctgcatacttgcaggcatttgaccaacgactatacatattgaaagcaaaatatccaccagggatgatagggttagatcccacattcaatatcttttgtctttgttatttatgaaaaacaaatatttatcaggaaaaaaacgtttcttctctagtggtataagataataacaaaatttaatacttagttaatgtatttactatcttcaaacttaccatccttcaacattaatattgatcaatttttattttttttactaaactacttccactaaaaaaatgcaaaagaagagatatatatttaagtcaaagtaattaaagatggatgggtgattcttcagcaaaacggcgccgtagaggtgtcttatcctacattacagctgggttgtggcagacatcatagggcctacgtatatttgagctttactgtacgtaaagctttaacatatctagttagttctcactgtacaaacaaaacaaaatccaattcgtaacatatatacaaatactactagtactagattacgctacgtatacatcgctttttcgcaaatttctaaactaatctatacaacaaacttgaatgtttgttttgtaatttatcttaaaccaaagttttgaattgtgcattgggagctacactctagtccccttttttccccaaaataatctccttacatcgaccggttaaagtatttaaaccaacaaattttaatttgttgctgaaggtacaaacatgtcacatatatagagacagcatcgtttatacaaataatgttcgatgtattggaaatcaaatataaatacgagtagcgactcacttggtttaatagtttggaagataatgaaataaaaagatgaattcaaaggatacagagctatatatgtcgggtcatttagagccgtgaccaaaagtttcgtcgtaatttctacggtcggtcataagaaattttggacttttcttcacccttttatgaacttctgtatagtttttgtcggattatatatttgtattcgtatattttttgtttctaataatgatacgtaaattcacgataagaaagacttctttttatttaatttgatttaaaacttttgtttttggaaatgactcatacacaaggttaaagtttgatggtatccaatttacaaaaatgtttcgagagtgcgttcgagtgtcctaccaccatcgtaccaactcgtatgggtttattattaggtttttttcttctttttccaatgtctttataattgaaccactctaaatttctttttttaaattaggttaagaatcttgaattttctgttgattttaaaccaaggttttcaattcttcttagcacaaaaaaaaaaaaaaggttttcaattattaaagaatctaaattttttgagttcaagagtttaatgatagctgaaaagttatgaatgattgcaagtttgcaacagaatggtcgatgtagtacatatcaaaaacatgcatcaaaataaatattcgtgcttagcaagagaaacgattgaaataaacagaacaatcgttaaccacttaaaaatcttagaataattttgtagtgataattttctgtaagagagaggtatcatatcttacaaaaaaaaactcatttcagataaaataatgttgtccaatcgttaccaagtatgtttttgctgtcatcagttgtattgtaactcgtctcttagccatatagttctaagttttaaatgttttcaaagactttacaaaaataaaataataataaggtggaatttgtagggctaaaagcgaaaaataaaaataaaataaaagtaaagaaacgtctttctcaataagaacacagatcccaacggattcaaacagcaaatttgtgctttgctcttctctcttattataatatcctctcaaaaaccctctcctatatcctcctaaagccccccttccttgtttctctaccgcaacaaagaaaaaacaaaagtttgagaaaaatggtgtgttcgttgtgtaaccaatgattgggttttagcttactacttcgagagattataagaaagaaagagtgaagatacattatagaaagaagagaagcagaaaccaaaaaaagaaacc

SEQ ID NO: 4651 - DNA, 3000 bp, Unknown
  misc_feature (1)..( 3000): cDNA_ID_1825007_gDNA_ID_1620720_Annot_ID_49173 3000 nt of promoter + ATG
atttgatgatcttcttctcagtttatctgggtaagtacacacttcaatcttcatggattcatgatttccccctcaaatttctcgggaaaataatgatggattttgacttctttatttttgtttgattaaatctttattaggaggttatgatatggaggagaaagctgctcgagcatatgatcttgctgcactcaagtactggggtccctctactcacaccaatttctctgtaaatcatcttttctaaactttatgtctctttgaccttgttgtatgatttatttatataatatgataatggatatttgaaggcggagaattatcagaaagagattgaagacatgaagaacatgactagacaagaatatgttgcacatttgagaaggaagagcagtggtttctctaggggtgcttccatctatagaggagtcacaaggtccttttaaattacatttatataactttatataatacatagtttaataatgtgaatattgactttgtgtgagttttttgtactagacatcaccagcatggaaggtggcaagcacggattggtagagtcgctggaaacaaagatctctaccttggaacttttggtaattcatcatgccgatgattttgattgttaaaacttaacattttcaattgcttgtgtcttacgaaatcttttgacactatcataggaacccaagaagaagctgcagaagcttacgatgtagcagcaattaagttccgtggcacaaatgctgtgactaactttgatatcacgaggtacgatgttgatcgtatcatgtctagtaacacactcttgtctggagagttagcgcgaaggaacaacaacagcattgtcgtcaggaatactgaagaccaaaccgctctaaatgctgttgtggaaggtggttccaacaaagaagtcagtactcccgagagactcttgagttttccggcgattttcgcgttgcctcaagttaatcaaaagatgttcggatcaaatatgggcggaaatatgagtccttggacatcaaaccctaatgctgagcttaagaccgtcgctcttactttgcctcagatgccggttttcgctgcttgggctgattcttgatcaacttcaatgactaactctggttttcttggtttagttgctaagtgttttggtttatctccggttttatccggtttgaactacaattcggtttagtttcgtcggtataaatagtatttgcttaggagcggtatatgtttcttttgagtagtattcatgtgaaacagaatgaatctctctataacatattattttaatgaatctcctttgctaagtccttctctcttcgttacgtattttcgatatattatacttattcatgtgctaaaaaaggtgaaaacaagggaaatatgttggaacaacacaaaaggttgcatgaatatatctaaactatgcgaactattatggctattgatagaaacatgaacatttagtagttgattttatggctttgatagttttggcaattgattagaatgttaatctctttatagagaaatagtaagaaaatatgtaaagagaatgtgcatggagctgaaatgacccatatctaataattaggtttcttgtcactttatttatctttttgaaacacattgttcttttaagtacagagaaataataagatgaataatggtaaatatgtaatgtctctccaataatgcgatatgctttattgaccatatcgttccacaacaatccaacataccttcaccacctcatttctaaattccctccttttgtctctttttcacacccccaccgtatcagcttttccctaaagtttcaccaaaattttaaaatattccctcctccatcatatttagtgattttttttctttttgatatttattaaagttagtttatactgtatctaaaaaatggagaatttattggttggaacttttaagagccatttactatgtcccaaaataaatatgggggcagcaaatttactgtaacccatacgtggggtaaatgaagtgagtagttcaaagttgaaacttgaaaacctttgatctttaaacataatgtccttcgcacgtgttttccacacgcgtggagtagtttgcagaaactcggaagcgaaagatggttattgggccttggaccattataatcacaaatctggcccacttttatcttttattcgaagcacgtttgcaggacattaatttgatcgtgcttttcactcgtgaggaagagttggtttagaatccggagagaaacgtagttattgggctccggcccaagtttaatttcaaaactcacttctcataaacccaaattttgggcatatgatttgagttggacaggatgtgattctttttttttttgtttctctaacaatataatgtcttgggttattttgtggtgaatatgttgtagggttcaaaacattatagtccacatgaaatcatatttttgggccttgatattttcatatcaatcaatcgaattaataacacattaattgcatcgaaaatgtggtttttgtttgttataccaaaatacgaaggcaaaactcttccacgcaaaaaactcttccacgcatgcctctaacttcatccagttctgttcgttatgataaaaaaaaaaaatataacaaaatctataagatttctaatttgatcagaactttataaaagtctaataacttttgtcacattataagcttttaggaaaaaataaaacgaccgaccttatttaattgcattgtcctaacttcccaaacgttttaatgagattttgcgtaatagagaaacaagccacgagttcgattcacagccacaataatctttctctaccaaataaagacttgatctttctcttctccttctatatccacgcgtcaattcgtaaaaccaacggcttgaaccaccggcaatagccgcgggattgcggcggaggattaatcaaaaaacgcaccacctgaaatctctctgtgtacgcta

SEQ ID NO: 4652 - DNA, 3000 bp, Unknown
  misc_feature (1)..( 3000): cDNA_ID_1825003_gDNA_ID_1620720_Annot_ID_49174 3000 nt of promoter + ATG
aaaaaaaaaagttttccctctctcataaaacattatacataatctaacacaatctgtaatttgtagagaatgggaagatcatgtctccaaggtaaattatctcaatgactacatttaatataattaaacataccaaagaaacatactttcaaagatcagttcattaattaaggctaagtatattctttgggatttgcactccttttggaattatacagcaacttgtctttacttggtgttgttgagcttaaaggtcgcaaagcgcatcaaaaaatcagatcaaagtaagttcgtgtcggaagataaacatatggacccatttttgttgcatcttaagaaaatataaggaccctattataatcctttggtgtttcttgttaattttggtcgagcttttgttatttacttactattttacgaatatggaaccatttgcaactaaaaattctagttgaaagaaatggagaggctaccagattataaataaataaaaatcatgaaagtatggttggatacatgaaaaggaaaatttagtttatatttgaaatatcataaaaactatttataatatgtatgaagaataaatatataagaactggttatatatatatgtgtgtgtgtattaaattaatatggtgtaaatttttgttttactgctgtattcgaaattggagagttttatttcttaaaattatgtgaaatatcaagtgatagcatcatattttttagattttttctgctgactttattaaagcataaaaaattaaccagagtatgactttgttgtgtcatttttaggtgataatggtaatgttttagtcgttatatgagaaattatactgaagaaacgaaaatatccatattatagtgatgtggtttgaaaaaatataagtatctcaagctgaagaagattttatggcaagctattaattctgaccatagtttttcttaaaagtaatcctcaccatagtttgactacaaatctacctataatcaatgaatatcaaactaaacatacacacatttggtaattccggtcgttcaaattatacaagagtattgttcaaatagtcaaaagtctgtcgctaaataattattaaaaatctataaattatgaacgtcaaaaaggcagagaacgaagcaactctgaacattcgtatgaaaacacacaacatttaaaagctgagaacacaacaaaaataatatatatatccctttttcttatatgtatatttttatcttactttttcgtccgtgtaagtttttttagtttgtgaaaatagtacttatttttgtaaaatgtttatgtattcgttaaaaagagaaaaagaagtctaaaaaaacgggtgtgtagaactggtgatcacgacgacgtgcttacaatgggacactctcattaatcagggagctataaactaagggcaagttactggaccggtttagtaagttgttgaacaattaataactgttgtcccaatttatttatttattttcattattatttttagcattttaccagctgggacaacatatatacaaacagaaatacttaagtagtatcaaagttacaaaattaattgaacaaaaagcaataggcaatcgttgagccgacatgtgtgttaaactttaaactgaaaaacacgttgttagtttatatgattcggtatcataagatggaaacatttttcagtttcgggaaatacaaatcgagaatgagaaatgaaagaagagtatgatgaatttcatacctctaaaaagttaattaattattggttccatgtcaactatttttattttgcctgaaataggcactttggcatttattattaataaattaatactatatataagtgagtggtcatcattatgccaaaagaagaagaaaaaaacacgaattgaacttggtaatggtatgttccgacacgtttccggcgagaactaactacatctttcgttcaaagatttcatcttgttcttgttcccattggttattaaaacattttaaacacgtcataaagcatatggtaattttaatatggttagagaaaacattcattcggatttttctgattctttttctcatacgatgtcaacaaccttttatttgcactatatattgtccaaaaatcatataaaaacatgttgaaacatggaagttagtcttacaaaaataaaaattatgtttgtgaatactcttacatacacagagagactattagctgagctagaaatgaaaaaaacagccgacacggttaacaatatgtttagattatggagcagcgtggtggaccaaacattacattaagacggtccaaagagtcccgaattgtaacaatgacaatttcacatattcaatttttttttgtaatttacttattattgtttatttttattttttaatttacttattattatttgttgccgatatagtttttgttagatttttaaaaacatttctttaattctctgtgggtcgcattatatcccatttacatggagatttcctgtcggtatgccatctcattactattatgtactaaatatttttgtttactaaccaaaataatatttataatctgacagtagtaataagtaaataactttaatctcacgtaatccacacaactttagagacaggcataaaccgttgtgttaactgcgataataactctttaagctgagctcaattttgagtgtgtttcagggtcggtgtggacggaaacgcgtgaattcattaatattcttaattaattaatacaaaagaatcgaattaaaaaatcgaatacctgactggtcaaatttctgtcgtgggcttggcatgaaaactatatataaacagccacacatgcctagagacctctcgatcgtagcttacctacaaacaacactcacaatccaatcaaaacaaaacactttttattctctctcaaaatcttcatatctactttattctcctactcatccatctctgtctctctatctctagagctaattaagaaa

SEQ ID NO: 4653 - DNA, 3000 bp, Unknown
  misc_feature (1)..( 3000): cDNA_ID_1016268_gDNA_ID_1620720_Annot_ID_49176 3000 nt of promoter + ATG
agaagtcgtttattcagaaatgattctggtaatcgcacgaagcttattattcatcatcgttatctttcatactataagataataattaagaagatcctagtaaaatttggtctttgaatctgacctcttttctacgttctatattttgtcatgtaatgcgattattttgatatgatcatgcgtcatagaacacacgctccataagacaaaatgtgataacatattaaattcgataacaataaataagacagaaacaaaactaatcatgacgacgtctagttacaggaagatcgcctaaatgactaaattaaataaattatcgggtcaatacaattactaatttgtcttctcgttctaactttgaaatatttagatattgggtctttgttgaaaaaatatgatttaatcatgtcatgatttttctaatcttgacacctcgagttttaaatacaacactaggactatgtaattattaaataatacatgtagttaataaatacatgtgtcgtcgtgttcatgagtttgcctcacctttcctcttaggagactggtctggccgtcggggaccaatgctctgagatacaaaattatttttatactaataatttatagtataataatacgtattctttgtatgcaattcaaattgttttcatgcatccctctctttaaatgaattgcagcttgtccaaatggttaaaagttctcgttagttggaatcaaatatctatatcttcaacattctcagaactatatatattctaaagtttcaataatttttgttccaaacaacaaaattgactctttaaataaagtcaggaagattttggtaatggcgattgcaatctttttagtcaaaagacaccagcaaaatgatcaaaaggcgaatttaaataacttcatttgtaacttctgacgccccgactattctagctgttacaagtgaccaaaatggctaacaatgtacacgttaaacttttgattttcacactaccatattttataaaaatcatgatgttctaattgattatataaataaaatgctttacatatgcatgtagttcacattttttttttttggtttgcaattgtttcttaaataaataaataaaaaacctaatttaaaacaaatcagaagaaaaaaaaattgcaaaccaaagtaatccaaataagctagtattttaatcggattgtgagtactttctccacttctccttcgaggccacgcttatatattaatttgtacaatatgggtaacctaacttggttggaaaatagaaagtgccaaaaaaaacaaaatatgtatggctaaaaccaataaaacgtcccacgtcgactttcaagttaagtccctcaacaatattatttctgtttgacgaatcacattccaccaccaccatgattaccaatcttcttctcccacccgtttctaattcaggccattcacaatatttgatacagaataatgaaacttaatgttgaactattccgccattttactgtttcaattaattaaatatttatctaaacgaggtgctgttagtaaaaaaagttccaatatttttctagctaattctataaaaagacactttgtactgtaagagcagagacgataaaaacagaaaatgtaacgataatttgttacgtcctgtaatgaattgtttaaattcgagtaatgatatttatgcattttctacatatatgctactagtaatcaataaaagcatagtattatcaaaactagaatgcggtggaaataaatagatagaaatcattggataaataagtcccaacacaatctggccagatcaagagaaccgaacctaaaacaagaaagtggagatcacaatccgaaaccctaaataataatacaagaaaggggaatataaaaagaaattagaagaaattaattaaaaacccaatgtgtagtgtgaggaagttgaagattggtaggcaagctgacatgttacccatatctaccttcttcaagcaaagcatggagtgggagacaattcatgtggtctcttatttaattaaagttgcctcttaattactctctattgacaacttattatgatactcctacttagataagttaaatgtatcatttgattataatctaatttattttaaggaagtcttcagttctgttagttatatttaacgcttcagtggtatattacaagaatatctgtactcgagtaaatattttaaaatatcaatcacagaacattggatctttgaatgtgggcatgggaggatatagaatcgtttcgtcatgtgctagtaattgtattgttgacttgaattgaatttgtggatatatatcccgattaacaaattgaaacaaacatgtaaagcaatgtataaatggtaaaagatagaagtaagtttatcaggaaatgcaaaccatcaattcggatataggagtttaaaagtctaatcgaaagttttggagagactaaaatctattacacccaaaaaaaaattgcgttgaaccgttttttttttttttttgggtttttaaaactaatttaattttcataccacgtcataaaaattatattctcagagtataaatttgtatactatgaataaacatactgaaaatttatgaagtgggaataatagttgcaagtggggtgcgcatttggtcaacctttgtaagtaagaaaatacaaaggagagagaattgtgctatcataattttccacattctttttttcgaaaattccatataaaaaagtaagcaaaataaatacattccttgattaattctaattattagccacccacccacccacccatcaaaaattaaaaataaaaattaaaaagacaaaataaaaactctcttccccttcttaagaagaagccatcttggtttcatttcgtcccataatcttccaaacttcaccagaagaaattcttaacaaacaattttcttcataatattaattctcaagatcttaaagattatattaatacgaagagaaaattcaa

SEQ ID NO: 4654 - DNA, 3000 bp, Unknown
  misc_feature (1)..( 3000): cDNA_ID_2990556_gDNA_ID_1620720_Annot_ID_165789 3000 nt of promoter + ATG
aacatttgtgttaaattttaaaactatgaaaataaactgaatttgacatttagtctttaaaattttgtttgcttttatgaaaaattataagttaattctgcttacacgtaatgtaaatttaaaatttcaatttctgattattattattttaattttttttttttaacttttgaataaagccacgaaaattaagatacaaaaaaagacaatagtttataaaaacgtccaagtcagataatcacaagctcgtgagaactcaattccaaaatttcataatcaattagtgttgaattttcgtttctgtctataaatagtgctattaacactttaaagtgtgtatagaaaactacatcgaaaccagaattttaatgttttatgaaaccactttaaatagaaaactatgggtactagaaaccacaaaacttttcaaaaaattaagatatcaaacatgcaaaaaaaaatctgtcctcgtatgaaaaatatagttaaaactatataataatttgataaaataaaataaaaacatcttctttgaccaaaacagaaaaaaaaaaaaaaaaaaaaacgttttctcagtttgctttcatcaaatcatgtatgttatatgttatcgaagatatagactctatagtgtgttttttcgtgtgattcattttatttgtttcaatagttgttaaaatacgagaaacccaccaaaacgaatatataggagaaaataacgcgtttaaattatgacatcagtagaaactctttttgcggactgtgaattgagatatccaagaaaagggaagaggagaagagtgaatcggcctcccccacaaggtgacaaaactggaatctataatgggaatgtaaataatcaataagagaaagaaccaatgaacattcaaaagtgaaagaaattgagagtacatacatataatagtactaattaaccactcccttgcacatggttaatctacagcgttggattccattatcaagtagtacctatgtcaagattcgagaagatcttcaatgaacaactattcaactctcttttttgtagccctactcgttatttaactatatgactaatggtgttgtctaaaatggtttaccgtatggtctgaatataaaaatggttgaaacgatgatagattagaatttataaatgcaaattaattcatcttttttggaacgtgggtcattgatgtgaacatctaatcggtcacggccgagaccgacaaccaaaaaaattgtcatgaaactttcacgggggtctctcgcgtgagtcgtgatctctctccatcgcgataatatatgtgccaacggaagactttttttcttataacaaaaagactcttattcctaaaaagctacaattcagcgaaagactttaagtttgcttaaccttttctatattctttttgaattttcaaaactcataaaaccaatagtaattaaagtccatcggccgattgggtccagactattaaagttggatcggattaatttttaggcattaacaagaattatggtcataaaatgagttgtagtaaacacatctttgtgatcagaatgcaaatcccgtgagactttgtgcacgagagtacgtggtgctttatgacttgcacctttttcatattagctttaatacaaaattaattatatgacaagatttctactaaaataatatccaaaccgtcgattattgccacattttattagaaaacctctttttaaaaatgttttattaaacttttgtatatattgttgtcttcattatcctgcgcccatgctagcatgcaaattgcagagtctttctgataaaaatattctccttcacttttggattcagaaagctggagtatctaattatacataaactaattacaatctaatgatgaacataaacaataacttccaaaacaacacgtgacgaaggttcttgtaattgtgaaataacaatcatcatgttcgtaacgttccttgtagtattcttttcctgattcatactgatacatataataatatagtgtgaatattaaaaaataaaataagtatacgtatatatatgttgaacctcattgcgtgtcctctcacgaatctacttactttgagatgcgtgcccatctcctaaaatacaatcggagctatgtctatcgttttcgatattccccggccgaaaccatcaaacgaatttttatcatcatcaaacaacttgataaaataagtgacacttgcgaaaattatttgatggagatcacgaatattagaccgtaaaatcaattaccaatatgcaagttacagattttttcatttatcaagttgaataaattaggcaagttggtcgcttataacacgttgatttctttaaagatttatttcccacatctgaactattttagatgaatatttttaattcgatttaatactagttgaaaaaggaagtcaaaccttatccttgatttccaaaaaaataagctgaattatacataccattataccaactacgtagaggtagccgagctatagagtttttcaaacaaaaaaaacacgtaaaaattcacatataatatcttacaaatttacaaaattatcttacacattttcgtgtggggtctatcataattaaatggtatagtcatctttataaaccaccggttatgttaagagagaaaataaaaataaaaaaggggctcttcctaggaagatagatcttaaccatggttaacactctcacggttcattattaaccatggttctaaaaatctaacctttaaaaaaccactttcgcttctcttcacattcgcatcattttgtatcatcccttgaaaacgttaaatgatcttctcctccgatcattagtctctttaatctttctcagcctcttcttgttcgtgatctctcttcctccggtaaaatttttaacgtcgatggtaattttaatatcagtacgagtgtaatcaacttcgtaactctgtcttttttttgtgttgtggttacaggaaaaagatg

SEQ ID NO: 4655 - DNA, 3000 bp, Unknown
  misc_feature (1)..( 3000): cDNA_ID_2051633_gDNA_ID_1620720_Annot_ID_165783 3000 nt of promoter + ATG
ccgatgtacagaagcatgagattccgatccctgacgatgttttaaatggttctttcaaggtatgaatagagatacaagatttcttgattaacacgttaggttacatgaagctggagttttatttggatccaggagttgtgcgatttcatatcattggagcttgttaaatttcttgcgatgaatcccggtggagaagcagaagaagtgaagaatctcgggtttacgttgacgcgctctgttgagcagattgggtcacattcaatctcgtcgatacataggaagagtttagcaaatgacgatgatgagaaggttttgaaagatttggtgaatgatatgaatgaatcactggaaacacacggtctgaaaattcggatgaacacagcgctggtaagcaagtctaaagataatccgcaatgacgattaatctaagacttttaatgtatcttttgagaatctggtttttgaaatcaggtggataatactataggagaattggctggaggaaggtattatcacaaggacactgtggctgcagtatcattaggtatgggaaccaacgctgcttacattgaacaagctcaagagatatcgaggtggaaatctgcgatacgtgagccacaagagatcgtatgttaagatactttcaacacacttagttcaatatcatagagctttccaaagtttttatatcaagtggttgtacttggtaagattataggttgttagcacagagtggggagatttcagatcttgccatcttcctataaccgagttcgatgcttctcttgacgcggaaagcttgaatcccggacatcgagtaagaacacataccgattagtactttctatagtgtgttttgagaaatttgtctgtttctctgtttgaagatatttgagaagatggtgtcaggaagatacttaggggagatagtaagaagagtgttactaaaaatgtctgaagaatctgctctctttggagatacactacctccaaaactcacaattccttacattttatggtaccttaactatatacttctcttagactaagttatgaaactatagactaaactgcggttttccgagcatgttttaggtctccagatatggctgcaatgcatcaagatatatccgaagaacgggagactgtaaacaaaaagctcaaggaagttttcggtgtaagcttcatagagactcattcgctttagaaatttcgatagtctttttgcgtttgtattaaaaacaaacaaatcttgaatatcttgtgtgaaccatatgcagataatggattcaactcttgcggcgagagaagttgtagttgaagtatgcgatgtagtcgcggaacgagcggctcgtttagcgggagcaggaatagttgggatgataaagaagcttggaagattagagaagaaaatgagcattgtgatagttgaaggaggattgtatgatcattatagggtatttagaaactatcttcatagcagcgtttgggaaatgcttggtgatgagttatcagatcacgtcgtcattgagcattctcacggtggatctgctgccggagctctcttccttgccgcatgtggcgacggtcatcaagattctgaaagcaagtgacgatgatgattcttttttgtagttcttacaatcaaataagaactaaattttattttgtttagtcatgtctatttaattacaatttaagttaaaattacaatataaattattttttattaactagaaatgaaaataaaattccaaatttattttggtttttagaaagaaataaaacaacagaaaaaaaaactttttaaaaaatgaatgtattattcactagtgaaagtgagaatctttagtttccaagcttctttatcatcccaactattccaatctttggttcggtttacatggttttaaaatcaaaattaatttgggttcggtttgcattatataattaatacggttttgagaaaaaaaaaaaaaaaaaatgctttcgagatcacgcgttggtattttggaaacaaagcgagtagattagaaataaacatgattttgtgggtttacccctacagaaattgatgacacgcgcgaaacgcgaggtcggtgcatctggttatgaaatggagcgcgtgaggtgaagttggtgcgagtgggcgaattccggagcactctgattggctgaaaaaatagaaatagtagtgatgttgctcctcctctcctcctctattattaatttttcgtcgttcttcttctgaaagttgtgtggtttttagaggtcaccaaaaaaaatctattttgagatactaaaaatatttcgttttgcattttgttgtgcagccatttgttacacaggttgaagcttataactgaaaattggattcaaagaatcgtagatgaagaaatcgaagtgagttgaatattttctgaacatatgaaaattggaacaagttttttctcattttgctagtttcctgtttttatgttttcttgactttaggagatgacatatggaggtgaactatacaaaggttgttgcaacgataacattctccttaattcagtttttgcaactcggttacaagcactcagtggacttttggccaagacaatttttttttttttttctctctctctaaaatgttatagatacgaatcctttgttgaataaaggaaaaagttgaacatttgattacacataagactttaacataatccaacttttttttatatgaagctacaaacaagatttaaaacatcaaagattccatctaaacttcattcatcttcaatcttcaacatccttcaatgactagtatgtatgtacataagtaaaattgttgataagaaaacaaaacaatgatgggctaaaatagcccataaaaggcccattaaacttgggtttagactttagattcaacgacgccagattagtgagtcacataaccctcttggaaagagtctcaacacttgcagagaaaaagaacaaggaagatcccggaaaatg

SEQ ID NO: 4656 - DNA, 3000 bp, Unknown
  misc_feature (1)..( 3000): cDNA_ID_1824997_gDNA_ID_1620720_Annot_ID_165779 3000 nt of promoter + ATG
ttagtatatacagtttatcttgttctcattcgagatgataaatttgtaatttttttttaattttcttacatattttggcattttgctccttttccaataaattatacattattgctttaatcaatgagagtataggtgcagtatttatgattgtgcatgaactttctaatatgattttctttttttttaaatgaaaataaagatatgaaagttgttaaatgtggagaggcgtgagagtagggatgtgtctatgttaatttatgaatatgtagctttcattttgttatccacaccacacaagtcgtgttcgatgaatagttcttatccccatcttcatttatatcatttctcactcaatattagtcccagctagcaaacatcgttaaaaaaaacaaagattctatgaggcaatttcgcattctagtgtcatttgacatttgtagtacaaccatttttggttggctaaatcgctctagacaggaccatctcaagtctcaggtcccaactcttgagctatttgttacttatgtgcaaaaaaattatccaatcgtataattaggatcttagaacaaaatattttctaattataaaaataaaatttggaatcctattctaagtgaaaaatacggttttggctatggagcatataagttgattagattcctactaattaatagagccaattgtatacttcaactttgaaaaactccggcaaaaaactattgatataaatggcaaggttaaactcacacattccgttttgatgcaatatttggctatgttaagctatcatgtaataacaatgtaaaatacaccctggatttttttgcatgaaaacgatggttatcaaaagaattaagtctaattaatatagaaggagacacaacattggacaaatccacatggaagtaagaactatggataagtaattgacagactccataaatttcatgaaacaaagctctatgtttttttgattaaaaaaaaaaagaagaagaacgaagactctattcgactcaaatttaatgtcatgtctttgaatgattttaacttttgcattataatttatttaatatgatatccatctttttcatccatttgccacctttttcttgtcgtacttgtttaaaaattaaaatagtaacataacacggccgacaataaaaatgatttgagctatattggaaacaaaaaacactagtagtagttttctttttcgttaatagtagatttggtaaacatatcttaaagtttttatagatgtcaatttctgtgaatatcaatactctgcacttaatgtcgacactctgatgtatccaaataaactgaaaaaaacaatttagttttcctacggtaagttttaaagcattttagtattttacacaagattggggatttttgtgggtttagccagttttgtatgtgctgtacaaattgaagaaattgcatgtactatattatatatgtaattgctgaatctgttgggtctttagaaattgagaatatgccaatgatagacttttcgtaaatgggctttcttcggctttttatacaatcatgggctttgtatgcccaacagagacatatattactcacatatattcaaccaaaaaaccttgtttacaaatgatgcatctttgttttgaatgttaatactcacatgatacttcagtttgaatgctttttttttttgttaaatagtttatcttaaaataaagcataatatatttcaaagttaatgtgtcttgtgcctgaatttcaaattaaagtatttcaaatatctataacagatgggtttatacatttttgctagtatcatcaattaaagaaaaaatgtttaacagcggttaactggacatatccattgagcatataattgattaaatcattggaaaaagcaattgggaagagtgagcgaaacgtgttgagacagttctatataaatattttagataaaatatgacccataaattacatatataaaatatataaaagtttttggttagaagaatacgaaaaggcaaagaggcacggtattggtcggtcaggtgaagtagggtcctttctactgctccagtcagtctattaccacaagaaaccgcagaaaccagaactcaaaaagcaactttcatatttttttataacaattgtacaatacaaaattcttatagacaaaaatgtattttagcatattgcttttatttatttttgtttgtgtgtattgtattgtcacttttaaaacaagaaagaaatatttatctgacgaccaaaaaaaaaaaaatttatgtattttgtcgtcttcaaaactttgattttactattggcttgggcttaagtatttaacattagaactgttcttttacgttaaaattaattattcatcctgctcttttgtacctacgtaatttccttttcacctgattcttgttttattcgactcttgtagtcttgtagacatacgtatcaatcaatacatacacgttaaatagaatctgactacagttaattatacatcaaattatttcaagaaaattaattttccttgtacttatataacataattacataggtcccgacatatttttgtttgtttattattcaaatactgactctgtaatagttttttatttttttttatttttgactctgtaatagtttaatacatactgtgtaaatctgtgatgatacaaaaaagtgtatataaataatattcataaaaagacattactattattaatgtcaactcatatataaaagagaaacgattacgtgtataaatatgatatatccatgcgtgtagtactctttaggaaaaatttatttgcccttcatagggtagtcactttcctttttcttctttacttacaaatcttcctctacacatcaacacacagagaaagagagagagagagagacagatagagagagtgagaatagaagtgagtgagagaaagtctaattgtttctcctgtaaactgcaaaccgatctcgtgtctgaaa

SEQ ID NO: 4657 - DNA, 3000 bp, Unknown; identical to SEQ ID NO: 4653
  misc_feature (1)..( 3000): cDNA_ID_1016268_gDNA_ID_1620720_Annot_ID_165776 3000 nt of promoter + ATG

SEQ ID NO: 4658 - DNA, 3000 bp, Unknown; identical to SEQ ID NO: 4652
  misc_feature (1)..( 3000): cDNA_ID_1825003_gDNA_ID_1620720_Annot_ID_165771 3000 nt of promoter + ATG

SEQ ID NO: 4659 - DNA, 3000 bp, Unknown; identical to SEQ ID NO: 4651
  misc_feature (1)..( 3000): cDNA_ID_3093661_gDNA_ID_1620720_Annot_ID_165769 3000 nt of promoter + ATG

SEQ ID NO: 4660 - DNA, 3000 bp, Unknown
  misc_feature (1)..( 3000): cDNA_ID_1825011_gDNA_ID_1620720_Annot_ID_165768 3000 nt of promoter + ATG
tttaaattctctctgctgcatacttgcaggcatttgaccaacgactatacatattgaaagcaaaatatccaccagggatgatagggttagatcccacattcaatatcttttgtctttgttatttatgaaaaacaaatatttatcaggaaaaaaacgtttcttctctagtggtataagataataacaaaatttaatacttagttaatgtatttactatcttcaaacttaccatccttcaacattaatattgatcaatttttattttttttactaaactacttccactaaaaaaatgcaaaagaagagatatatatttaagtcaaagtaattaaagatggatgggtgattcttcagcaaaacggcgccgtagaggtgtcttatcctacattacagctgggttgtggcagacatcatagggcctacgtatatttgagctttactgtacgtaaagctttaacatatctagttagttctcactgtacaaacaaaacaaaatccaattcgtaacatatatacaaatactactagtactagattacgctacgtatacatcgctttttcgcaaatttctaaactaatctatacaacaaacttgaatgtttgttttgtaatttatcttaaaccaaagttttgaattgtgcattgggagctacactctagtccccttttttccccaaaataatctccttacatcgaccggttaaagtatttaaaccaacaaattttaatttgttgctgaaggtacaaacatgtcacatatatagagacagcatcgtttatacaaataatgttcgatgtattggaaatcaaatataaatacgagtagcgactcacttggtttaatagtttggaagataatgaaataaaaagatgaattcaaaggatacagagctatatatgtcgggtcatttagagccgtgaccaaaagtttcgtcgtaatttctacggtcggtcataagaaattttggacttttcttcacccttttatgaacttctgtatagtttttgtcggattatatatttgtattcgtatattttttgtttctaataatgatacgtaaattcacgataagaaagacttctttttatttaatttgatttaaaacttttgtttttggaaatgactcatacacaaggttaaagtttgatggtatccaatttacaaaaatgtttcgagagtgcgttcgagtgtcctaccaccatcgtaccaactcgtatgggtttattattaggtttttttcttctttttccaatgtctttataattgaaccactctaaatttctttttttaaattaggttaagaatcttgaattttctgttgattttaaaccaaggttttcaattcttcttagcacaaaaaaaaaaaaaaggttttcaattattaaagaatctaaattttttgagttcaagagtttaatgatagctgaaaagttatgaatgattgcaagtttgcaacagaatggtcgatgtagtacatatcaaaaacatgcatcaaaataaatattcgtgcttagcaagagaaacgattgaaataaacagaacaatcgttaaccacttaaaaatcttagaataattttgtagtgataattttctgtaagagagaggtatcatatcttacaaaaaaaaactcatttcagataaaataatgttgtccaatcgttaccaagtatgtttttgctgtcatcagttgtattgtaactcgtctcttagccatatagttctaagttttaaatgttttcaaagactttacaaaaataaaataataataaggtggaatttgtagggctaaaagcgaaaaataaaaataaaataaaagtaaagaaacgtctttctcaataagaacacagatcccaacggattcaaacagcaaatttgtgctttgctcttctctcttattataatatcctctcaaaaaccctctcctatatcctcctaaagccccccttccttgtttctctaccgcaacaaagaaaaaacaaaagtttgagaaaaatggtgtgttcgttgtgtaaccaatgattgggttttagcttactacttcgagagattataagaaagaaagagtgaagatacattatagaaagaagagaagcagaaaccaaaaaaagaaaccatgaagtctttttgtgataatgatgataataatcatagcaacacgactaatttgttagggttctcattgtcttcaaatatgatgaaaatgggaggtagaggaggtagagaagctatttactcatcttcaacttcttcagctgcaacttcttcttcttctgttccacctcaacttgttgttggtgacaacactagcaactttggtgtttgctatggatctaacccaaatggaggaatctattctcacatgtctgtgatgccactcagatctgatggttctctttgcttaatggaagctctcaacagatcttctcactcgaatcaccatcaaggtcagtagtagtaatgttggagtttttagttttcttggtgttgatgttgttgtgtcttgtttgatgggaacatgtttggttttagggatttatgttttattttttatactaaggacattttctgttttttttggttgttatttagattcatctccaaaggtggaggatttctttgggacccatcacaacaacacaagtcacaaagaagccatggatcttagcttagatagtttattctacaacaccactcatgagcccaacacgactacaaactttcaagagttctttagcttccctcaaaccagaaaccatgaggaagaaactagaaattacgggaatgaccctagtttgacacatggagggtcttttaatgtaggggtatatggggaatttcaacagtcactgagcttatccatgagccctgggtcacaatctagctgcatcactggctctcaccaccaccaacaaaaccaaaaccaaaaccaccaaagccaaaaccaccagcagatctctgaagctcttgtggagacaagcgttgggtttgagacgacgaca

SEQ ID NO: 4661 - DNA, 3000 bp, Unknown
  misc_feature (1)..( 3000): cDNA_ID_2051677_gDNA_ID_1620720_Annot_ID_165764 3000 nt of promoter + ATG
ttggattaagcaaccacaccacaaatgagttgatcaaaaccccaaaactttcacaaacaagtgatcgctcaatggaaagttatgtgcaactagaaattgtgttaaagagatggagcttacaggaactaggaggcaaagatccgtaaggataaaaagacttcttgatagagatgagcaaactagaaggaacagggacattggctgtgatgtacttatagatcaacgcctgttgctctaactcagcccattgagtcaatgtaaaaggtcctttaacacctgtgaagttcccttgcatgctcatgttcatcatcattccaccagaaccatatcctcctgcattccacagcaaaaatgtaaaaaatttgattattttacacaacccatttcaccaaaatccaatcaataaagagaagacattatcaaacctgagcttctaaagtaagaaggtggaggaatctggtgaagaaacggcgagagagagttcttgttattactgctattatccaaaccgacatatttactgaaatcaagagcgtctggtttatctgagaagctaagcatttgttcttgacggcgagaatcagaggaaagaggagaagcagatctcatgagaggaatgccttggtgaaacgacatcgttttgcaataagcagctgcaacagaagaagacaagttttcttcttcttccgctctagttgtcgttcttgctagcttcaagcttcgttgcaagcaatcctcaccgatgaatccggatctatcttgtttagttcctataagctcttttagaccaagtgactcattttcattactagtaaccgacccaagaacatgaacaccaatatccataagaagtaagtaatataaaaagaaaaagaaggaaaaaaagttagataatgacttgagagatagttgccatgggaggaagatagctaaagatgagagaagagagagacagagggagaagaacgaggcttacttttgattttcttgaaagagatatatattattatgtgtttttaaaataaaatgaaaatagttgtggtgaagctttgggaggagacaagaatggtacctaaaaacacaatccggatctcggacatgttagaacatatttatccaatgctttttcattaattttgcttttagttcttcttctttgttttgtaaagttttctttgcttgctttaaaggtacaaacttagcttccaatttgtttcaagttgtgtaaatttatggtcccaaattagttgtataatatggtggtagtttctctataagaaaacgtaggctatttctgtattatttgcagtacatatttcccaatttgtaggcatttttctttatgggggttattattttagattttagtaattttcttttgttgtgatatatgtgcatatagggaaagctagctgtaacattgttaaaaaaaagggagaaactagctgtaacctgtggagttattagattatttttgtaatgttcaaaaggaaaaatattagtggttttagaaatatagcaacatttttacttatagtaatagtcttaattcatagaggaggtgaatatatattgatatattttgtaatttgtaatgcctgtttttaccagaatttgcagaagaaaacaaagggtatacttgaagtgagatttttggaatattatactatatacacatatattcacacttttagtgagatttttagtctaggaaacaaataaaagaattgtcctattcatataataaataatagtattgagtggagtaccaaatatttatcaagattcacgtggttccaatgatatttttggaccatcttcttggtcgtctccccgaggatttaagttacatatatcggatgggccaattctattcttgagtgatattacatcaacggttattgatccatgtgttcgattacatatgtaatcagtgcaagtaaaaagtagtttgggatataactttgctggattttttttttttttctttttttttcttcactggatttattttctttgttcattaaaattgctggactgatgcggttagtaagcgttatttgctttgaccataaatttagtgacactccgatttcagttatgccttcgggtaataatttgcgaattgtcttttatttatcataaaattaatctgatggttggatcattggtatgtcatataatagaaacagtaaaaccaatgaacaacaaaaggattagataatctttttttcacaatatagtatgaacttatgtgaatgatatatacagacgtcgtactcatgattttaacttgaaaaccattcaatatcattcacttccaaactttgctattgaactgtccatcacagtttctttataatttttgtataatgttgaaatatgaaaaaaaaaaaaaaaaaaaaaaacactaaaactatatcagcaaattgactagcttgtggagcaaagtgaatataataacaatggaaaaagataagagtgttactaccaataccatccaacaagaaacgtatatgttagttaaagctttgcgtaaatgtcctaaaaagaaactaactcacaaaaagtcacatgtggtgttcatgcatcgatgatgtaaataattaccactccacataatattatgtagttaaatacgacattttggtttaatttcataattacgtcagatctgattttcttttagtcatgctccattttgttcgtattatttttttctcttgtaactttaggattcgtaatattattgacgagagattaagttatagcaagttttaacttttaaagattttactgttttgcaaaatcaatggttgatagaaaccccaaagaagttagccaatgtactagctaataacattgttttacattaatttttgcgggctaccttttgtacgtttcttagtcccctctctctcgcataggtttcgacctatatcccctgcttacaaaaccaatgacaataaacaaaatcaaagataataaaaccaattatct

SEQ ID NO: 4662 - DNA, 3000 bp, Unknown; identical to SEQ ID NO: 3371
  misc_feature (1)..( 3000): cDNA_ID_2051688_gDNA_ID_1620720_Annot_ID_165759 3000 nt of promoter + ATG

SEQ ID NO: 4663 - DNA, 2193 bp, Unknown
  misc_feature (1)..( 2193): cDNA_ID_2051692_gDNA_ID_1620720_Annot_ID_165757 3000 nt of promoter + ATG
aagcttcatctgaaacaatggacaagaaacataatgtgaaagggaagaggttatggcagaaagtcaagtatcaattggtggagtttcattcattgcctgcttatttaagagacaatgagtacatcattggtcattaccgatccgaatggccgatcaaacagattcttctcagcatctttaccattcataatgagactttgaatgtttggacgtaagtgttgaatcatgtttcttgatgtatccttgtttaaagttcaagagccttgagtgtgtttgtgtgtgtgtgttctttgggatttgcaggcacttgattgggtttttcctgtttttggcgctcactatatacactgcaacgaaagtaccgagtgtcgtggatcttcattcgcttcaacaccgtttacccgatttgttgaggaaaacagatctccacaaacttcattctgagctcatggctcgccttccttctagtccatctagttggcatgtgatggaccttctttataactgtttgcctgaaagattttctcatggcaactacactgacatgtgtgttctggtaagaaaagactcaatctttctctctattcctgcagattactgtttcaaaatgtggccaagttcatatctttgtaattgcattgcagcattctgtgagggaagatcttgcaaacttgatagctcctttgatcttcaggccaattactcgatggccgttttatgcatttctaggtggtgctatgttctgtctattagcaagcagcacgtgccacctcctctcatgtcactccgagcgagtctcctacataatgcttaggcttgattacgccggcatcgcagctctaatagcgacttccttctaccctccggtttattactccttcatgtgtgatcctttcttctgcaacctctacttaggattcataaccatcttaggaatcgccactgtgcttgtttctctcctcccggttttccaaagcccggagtttcgggtggtgagggcgtctctgttctttggaatgggattctctggcttagctccgattcttcacaagctgataatcttttgggaccaacctgaagcccttcacacgacaggttatgagattttgatgggtttgctttatgggttaggagctctggtttatgcaactaggatcccagagagatggatgccgggtaaattcgatatagcaggacatagccatcagttgtttcatgttctggttgttgctggtgcgttcacgcactatagagctgggctagtgtatcttaagtggagagatattgaaggatgttgaagatgaagattgaagattagatggaatctttgaatcttgtttgtagtagcttcatataaaagttggattatgtaaagtcttatatgtaatcaaacgtttaattgtttcctttattcaacaaaggatttatattgttaatccacatatgtattactggttaaagaagctgaaggattcatatttttagatgattccagtcttgattgcagcattcaaagtatcataatccagtgtcaacctcatatagcctccttgtgaacctgacacaagcctaattgttccatggcagaggatactttgattctgatcttcttcttgaaggtttcccctgattggtatacatttcgaatgatccataagtgttgataaactacaagtacacaaaatatgaaacaaaatctatgcacatcaataaaaattcagaaatcaataaaatttactctgaaaatgcagaacatttataagtgtttgttattgttttcaatatatgagaggaggagctcccctactatttttatatttttagccaatgagagagctccacttcataccccacttttaccaatcgtgctatttcacagccactctcactcatgtcgcgttgagcgcgtgtctacgatttctaaaggggttaatccacaaaaatcatgcatttttggatccacgcacctcattctcaaaaacccatcgcgtgtcgtattttttttggttttcttctctaaaccaaattaaaccgaaccgagatcaatttgaatttcaaaaccaatgtaaacccatcgctgtgaaaacaaaaagctcggccactgtaacaacaaaaatggagacgacacaacttggaagagaaatcaactcgaaatagccaagagaatgttcgtaaaccccctcaaatccgatg

SEQ ID NO: 4664 - DNA, 3000 bp, Unknown
  misc_feature (1)..( 3000): cDNA_ID_3073882_gDNA_ID_1620720_Annot_ID_165756 3000 nt of promoter + ATG
atataaaaatagtaggggagctcctcctctcatatattgaaaacaataacaaacagtgtattttaaccactactagttatctttaactctatctcatatcaacaaaccgttgtgatatccttgagacacgtcctaacaacaacttacacatcaaccattgaacccagatgcacttcctgctgtaacctcagtctgcaatgctttgtcttacatgcaaactccaccagaacttagtaccatcatcattaacaatttccagactcaaactagagcctttgtcttctttatgattctctgatactttgaaaaaacgttcacttgactaacctgcaagtgaatttcccttgagtagttacttatgtaatcttctcatgatgcagacagctaactcaaactccttagttactgtcttctaaatgcagtttaaatttcttgcatttgcttccttctagagcttcttttcagccactgccaccagcattgagatgtgtcgtttatcaaactagatacatgacactttcacattattgaagtgagtagccttgagacagttcatgcagcacttgcacttgtctcttccattttcttcttcgaagaatcccactgaatcactccaataacctcttcttagcttactcagccctaaaaaacataataattcagaatcgtgcaacttattctaggatctgcaacttagtttcgaaaacctgcaattctctagagatctgcaattcgtttctgaatatcttaaccaatcaacgaccttcaaacaaatccgtaagagtctctttacccacagatttataacctttgaacttgttcataaccagttattcttggctttcctttcttttggtaaactcatgccagagttcaaaaacagaacaatagtatcaaagaccctgaactcaaaaacaccacgaacatgcttgaaagcagtctcaagtcttgaccactcttctgcaaaatttgcaagcagtgccctaccgttcctctccttgttaagaacttcaagaatttgaacaagcaacaagaaaggtgttttaccctttgatggtttcttagactacaactccaaaaccattagttaagaacaaccatcttatctttttctttgagtttgctgagcttcatcaacaagtagtgaagcaattccaagaataaggaacttttgtgccaaagcatatccatctgtcttgatgcagagcaagaatggagtagcaaaccaacttagaaaacatagaaaacctggtggaaatatcaaggacagccatacgaggtcacatgaaaaaacggatcttgatttgaatatgtagattggaagctatgacctctttcccaagataggtcaagaatgagggacacccgcgagcagcctactttggaaaccaattcccatcaaacaacacggaatcagacaaaaatctttgtacccttggaaagatctcgtttccaagattctagaacagctttaaatgctcaaatccaaggtccatagccaagtcaaacgaagaagacacagtcagacaaacaaaaacaacttcatccaattcacaactcttctgtcttctattaaaacactttctcctagaaatctgcttcagacttctttttctcttcttcataggtcacaaatacttctccacactgaagcatacaccatggtttgaaaagcagaactgattcatcctctcttgatatgtaaacttcatagaccacaaaagaagattcaatctgttttgatgcagaacacaaacaaagcagcaaactaacccagtaaattctaaggattggttgcagtaacaacatcaatcatacgaagccataggagaaaacggatctggatttgagtttatggtttgaaagttatggccaaaatccacgacagatccaaaaacatgtcgacctgcgagagaccaactttaagaacaatttccaaacaatccacaaggaaccagaacgcgatctttatatcattggaaagatcttgctttcaggttttcagaacatctttcagaactaaaatccaagctaaatagcaactccaaattaacaaagacagagttgataaacgccacttcatcttcttctcattcttagccaatcttcatattcatcattatgatgctagttcttttccctcatgttgattatgtgtttcatccaaggataaattgaagctaggaaacacacaatcaacacagaccaaaggtgcttattaacccaagcaaaaactccacgctcctcaactgagatcaatctcaatcatcacctcttttaaccaagcaggcattcttctaaacagagaagacaaaacacaatctatttctcgtcaaccacttgagaaacagcctcttctcttcttttgaacatgaatttcaaaccagatcaagcttcaagagtagacaacaaaaacaacaacttcctctcttatcgagaaaaccaaaattataagaaatgctttgtatctagccagagcttcttgcagaaagacgtcatcattatctacatgagctcttgaaacctgcaacaaagacacacaaacaaattcgattacaacaatgtggtttgggacaagaagctgaccatgattttacctgatagtaaaacgggccttgtctcttgacagctgaaagtctgaaacaagatcataatatttctcaagcgctgaactaacacaagtaagggaatggaagtgaatacttgttctatagaggtaccttgtaatactcctcgtttgagcagatgggcttttggaggttggaatcaaaggaagcatcggatttgagggggtttacgaacattctcttggctatttcgagttgatttctcttccaagttgtgtcgtctccatttttgttgttacagtggccgagctttttgttttcacagcgatgggtttacattggttttgaaattcaaattgatctcggttcggtttaatttggtttagagaagaaaaccaaaaaaaatacgacacgcgatgggtttttgagaatg

SEQ ID NO: 4665 - DNA, 20 bp, Unknown
  misc_feature (1)..( 20): cDNA_ID_1839219_gDNA_ID_1620720_Annot_ID_165755 3000 nt of promoter + ATG
aagcttcatctgaaacaatg

SEQ ID NO: 4666 - DNA, 3000 bp, Unknown; identical to SEQ ID NO: 4656
  misc_feature (1)..( 3000): cDNA_ID_1824997_gDNA_ID_1620720_Annot_ID_49178 3000 nt of promoter + ATG

SEQ ID NO: 4667 - DNA, 3000 bp, Unknown; identical to SEQ ID NO: 4655
  misc_feature (1)..( 3000): cDNA_ID_2051633_gDNA_ID_1620720_Annot_ID_49180 3000 nt of promoter + ATG

SEQ ID NO: 4668 - DNA, 3000 bp, Unknown
  misc_feature (1)..( 3000): cDNA_ID_1824985_gDNA_ID_1620720_Annot_ID_49182 3000 nt of promoter + ATG
gacttgaccatttattctttccctcttcttagggatcaaattgatgtcaacaagatttcaatctgaaacagggttttgaagtcttcttttggttcatttttgttcaaaactgaggattaggatgaagagtgctatcaaatccatagcaaatctacagcaaatccatcaattatagggccaattgctatatatttatcaaccaacacataatggcagagaagataataataaaaattgttcaagtctcactaaagtgtttcttacatgacataatgcaaaagcttataataaggtttctctatttttctgtatctactgtttgatctctttggtttcaattttagggttttgacttcaaaaactaattattctctcacgttacccaacgatacggatccaggaaactatttagaattagatcttgagaaatggacaataagattttaaaattaacaacctaatcatcatgtatgtgtacttggagctttagaaaaggaataatataagggcccctaatattaattattatttatttttatttttgacgccaacttatcagatttttttttttatgcagaagtaaaaaaaatacactaaattttgtttgcaagagccaagatgcttatatttcatgggatgtactgtcttggtgatgtgatatagtaatatagtgatatagatccagaaaactgttaaatatttagatgctttgataccatatcaggaatcttcaatcttctgtaacaaactcttgagagagagagtgaaagagaaagaagaaaaagatagaaacaaaataatcgtctatttgtaaatgtgtacaatgtactgtatatatactctatcacattttatactatagagtaaaatatactcatgataatattatagttaatttagtatttagatcttgagaaatgaaatactatataaaaatataaaattcgagggatttagtattaaatttttatggagatttgtaaaacactgaatttggtttgcaggcgccaagatgcttctgtcatggggcgtagtaatggaggaaaagagggagagatctagttgtaagtgaactggcttttatttctattttagtacttagattataatatcccaagtatattttgtttacctagcttaccatttctatgaagttcaacaattccgacaaatacttgacttaaaatatcaactttacataaaagagtttcatgtttgattgattatttttacctaatcgattatatattaagagtagcacgtttgcacaagacacaagacacatgagttccaggaaagtaaaaattatcttagtgtcgatcacttgtagtataatgtttgaatattctgattgaataaaatataaacttttgtgattttgtttgttcataatcgaacgtctttgacagtcatggtgattcacacatttaatcaaactgtgtataaaagatgagagcttttagaagagaacgccaatggttaaattcaaatcatactttaatcttttttttattgttgaatttacaattttcttgaaaaaaagaaaattcgtggaaataattaatgtcgtaaccaataccatataatataccataaaatcgtagcgagatctttggttggtgtcacatttttagtttacaagagaaaagtataaaactaatgggaatatgtattagattatattcaattggacccacaatttgattatggaaagtttcctgtcatcttctgtctatttttgcttatcataagttcgcttatcataagaaatttatgaaaattaatcatgaatgctttccttttattggttcttcaacaacatacatattcagatagtgagtgaaggacactttagtataaattacttgactatatatataagtttattactcagtaataatagcagaatttgaatacaagctttctatatacaaatgtttttacaattggccaacaacattttgatgcgcgtcataaggtttaatatttttatatgatgttagaaaatatttttttgaacagttttgatttttaattggtttcatattcgcataccacacctgatacataaattcatgtcaaatttggatgcattttgaaaaatgtatttatggagaaactaatatttttttaaaaataaaaccaagggaaacaagatgagtaaacatatatcaaaacaaaataaaaattgaggcgattttttttgtttctaagaagaaaccctaaaaatacacttaataatataaactcaaaaacctgatatattcaatagacgaataccctttttgtctccggcccgcaacatttttatattcattcaaataggacctcaaaatactgtatacgtcaatgagtaactttgaacaacctgtgaaatttgacaaatataaaacaatctataatataattaattagttttgacacccaaatgctgtgagaaaaaaggaatatttttagtgtgaaagttgagtagtattgcctttcacacgtgcaaattacttcatatgtgtgtccatctctatatatacatgtacatatatgcatgtgcattccactgttttcacacacaaatctctcttctctctctctcttctcctagaagctggtgagttttatttctttgtgattcaaaaaacataaatctcaacccttactaaatgtttcttgatcttgggtttttactatacgtcaaatcttgtatttgaaacccaagatgatctgctaatttatcttttttcttggttaaatacagtttcttgtttataaatcatacactaatattctttttaccattttcagattttcagaggcaacagcaatgagtatcttatccacaagatggttttctgagcaggtatatatgcgcataaacacatacactcatgtatatatgttgtcatctgggactgtttttcattgttttttgttcttttttcttttgggtgtgatgttatattttaggaaatagaagaaaatagcataattcaacagtttcacatg

SEQ ID NO: 4669 - DNA, 3000 bp, Unknown
  misc_feature (1)..( 3000): cDNA_ID_1824981_gDNA_ID_1620720_Annot_ID_49183 3000 nt of promoter + ATG
tagagcttaccattcattgtttatgcacaacatgtaagtaaaatcattattgactccttgtatgtcaatccattattgtgggtgaaagaaaacaacaaattagtaactggggagggtgtcaggtgtatccgaccaactcaggaggagcttgagagctttggtactccggattttactatatacaatgctgggcagtttccatgtaatcgttacactcattacatgacttcgtccactagcgtagaccttaatctggctaggagggaaatggttatacttggtactcagtatgctggggaaatgaagaagggtcttttcagtgtgatgcattaccttatgcctaagcgtcgtattctctcccttcattctggatgcaatatgggaaaagatggagatgttgctctcttctttggactttcaggtatagtagagacagtaccaactatggtgttgggtgatgatggaaggaacgataaatcaaatgatacaatacaattactgctgaactgacttgagaactgcttgcctctttgttgagtttagcgggtgaattgagattgatgattgtgttttttgttttctatgaatgatgattttaggtaccgggaagacaacgctgtctactgatcacaacaggtatcttattggagatgatgagcattgttggactgagactggtgtttcgaacattgagggtgggtgctatgctaagtgtgttgatctttcgagggagaaggagcctgatatctggaacgctatcaagtttggaacaggtagaaagacagtacgttggaattgtttttgagaaaaaaacataaagcagtgatataacaataagattctgatcttgttgcagttttggaaaatgttgtgtttgatgagcacaccagagaagtggattactctgataaatctgttacaggtaaaacaattgttatttctttcattctcttcgtcctcacaattaacagaatgatcattttcgattctctttggttgcagagaacacacgtgctgcctacccaattgagttcattccaaatgcgaaaataccttgtgttggtccacacccgacaaatgtgatacttctggcttgtgatgcctttggtgttctcccacctgtgagcaagctgaatctggcacaaaccatgtaccacttcatcagtggttacactgctctggtaaggccaaagtaaaagtctttattttgcacatcgtcttcataaatttcaaaagcataaccaaagatgtgcaacatatataggttgctggcacagaggatggtatcaaggagccaacagcaacattctcagcttgctttggtgcagctttcataatgttgcatcccacaaagtatgcagctatgttagctgagaagatgaagtcacaaggtgctactggttggctcgtcaacactggttggtctggtggcaggtatatatgtccttctatggaaatcgatacaacaaaacgctgccttgtaacacatgtttgtaggctattaacatgatctgtaatgttttatttcctgcagttatggtgttggaaacagaatcaagctggcatacactagaaagatcatcgatgcaatccattcgggcagtctcttgaaggcaaactacaagaaaaccgaaatctttggatttgaaatcccaactgagatcgaagggataccttcagagatcttggaccccgtcaactccgtaagtttctgcaaatctgtataatgtaattgcttaagtgatgatgaacaattttttgttgatttgggtttaatgaaaatgcagtggtctgataagaaggcacacaaagatactctggtgaaactgggaggtctgttcaagaagaacttcgaggtttttgctaaccataagattggtgtggatggtaagcttacggaggagattctcgctgctggtcctatcttttagaaaaaccaaactctgaatgatgttgtcgaaaagaaagaaagatctactattattaagaagaataaaatgagactttgtgtttttctttgctgtgataatctctctgaataatagagagaatttaatgttccaaatgtggtgcgatatggataatgatgatgactatatgtaatttattactatccatcgtcatatatttttgttgggcctttgccaacatttacatgatagaaccaagtacgaataatataaattctggtccaatctgatgatgattttcaaaatggatagaaaactttataactttattcattacaagtaaagtatagtaaattataatttatggtcgttgacaaaaagtaaattaatatatggttaatacataactccttttagcgactgaacacaaacatacatctgtatatattactttaattatttctttcgacttttgtgaaaacgaaaaaattgtagtgactgaaaaaaggaaatttgtaaaaaaaaagaaaggaaaactctatttgcgtataaaaagcgtctcagtgcctcaacgtctttttgtatttcttgatctctccattaaagtcattcccaagcaaaagcttcagagttcagactgaaaccagttttcgcttcattcgcgtgactacgtttctcaaacgtaagttatcttttctccaaatgtgtttctgtcgatttcaatgttacttcctcttaacgagggatttagtttagagattttgactaacttgaatcgtaagttaacttcaccttttagactaattcataaagattttagagttttggtttgggaattggcattagagcctgattctgtgtaagaaacagaacccgaaccctatttagttatggtaacgttctgtgaacttgattgatatgacgcagaagccctaattttgtggttgttcttgaagcagatcaatttctttttacagttgcttcttgtagatattttgacgtgttttgatgtgaatacacacatattgaattaaagatctttaaattgcaggcactaattactacgacaagttgtcttccaagaaatatg

SEQ ID NO: 4670 - DNA, 3000 bp, Unknown; identical to SEQ ID NO: 4654
  misc_feature (1)..( 3000): cDNA_ID_2990556_gDNA_ID_1620720_Annot_ID_49184 3000 nt of promoter + ATG

SEQ ID NO: 4671 - DNA, 3000 bp, Unknown; identical to SEQ ID NO: 3820
  misc_feature (1)..( 3000): cDNA_ID_2107732_gDNA_ID_1620721_Annot_ID_49186 3000 nt of promoter + ATG

SEQ ID NO: 4672 - DNA, 3000 bp, Unknown; identical to SEQ ID NO: 3818
  misc_feature (1)..( 3000): cDNA_ID_1825089_gDNA_ID_1620721_Annot_ID_49189 3000 nt of promoter + ATG

SEQ ID NO: 4673 - DNA, 3000 bp, Unknown
  misc_feature (1)..( 3000): cDNA_ID_3092031_gDNA_ID_1620721_Annot_ID_49194 3000 nt of promoter + ATG
atggcatcaacgtttcgattactctttcagggaactccatttttcttgcatttgctttttttgaggtagagtctgtgctcctatatgattccatggattcgtcgtatactttctcaactgagaatgtttgacttagagaatcttccatttttttttttgtctttctcttttcagtgttactatcattttagatcttttttttgtttttccttctctggttgactgtgtttgaggtaatgctcaaaacgtgattctttgtgctcattatcttttcatattctagtttctggaatctttctgggtattaagcatttgatgattttaaaattgtatatttgttgattttattgagttgacaccaggtttcttgttgacatatgcccaattcattctgatcgttgatgatgattgattcttgtatccgttcaatgtaggttatgtttggatgatagatacattttgactttctcatacaatgagtacacgaagaaatggcatttccaagcatcagcgaggtgataaattttgtggtgaagggccaaactggatactaattgcagggggtgcattgttgagcacattgtccattcgctttggatacaagctaaagcagtcgcttgattcgaaacctcaatcaaatggctctgctggattaaaacgtacttactttatcgctgtgttgcttaacatgttttataatttggttctagtttttttctatcactaaatgaaagcctcttgtgcagctaatggaacatctgagaggcaaaaatctacaagctgttgcttacactctaccacatcttcctgtacacaaaataatgatttttgttgcttccgctccattccaggtgtgactttgtaactttctgttttgcctcatacatatttgttcaatctactaaacaaacgctatatgcttgtttcttggtctcgcatcatgtcttactgggtttcctttcatgaagttaaaacgatgtgtgatatatagtaaaatctagttgggagaatgtgtagatgttgttatagagttctagcctctgttatcttacctcatgatgtatttgtcaactaggggaatccaattcgaagttatggaatgagtaaaatagttacaagatttgccaccttgcaataactggttgaatcgaatatctcttgtttcgttgtggcatattaccattaatttgcatcaattgggctggcaactagggaagcaggttttctccattgatggctgtgtctagtggctgaatgctaaaaacagttactagttttgttatctaccaagacctcgttaagcatagttacaagttttgtactattagatccagacctgagttatgttttctctttggaaaatctctgaatcctaatattcatgtagtccagagcaaacagtcgtgtatggatcttatcagcctttgcttctttatttttataggaactgagagtgtggaaggaaaagaggtgacaagcgagcaaatgatatccgcatctgacacttcactgcctcttgtgacagttcctgctccatcgagcaaagagaatggagtcatgtgggcaacttctcctgatcgcctggaacttcccccaagaccatacaatcacaattcaaactgctcagattctccttgcgtatctgaaaccagctcagacattttcagcaaacgagaagtaatacagaaactaaggcagcagctgaagagacgggatgacatgatacaggaaatgcaagaacagattctagagctgcaaaactcgtataacgcacagacggcacactcaagccatctccaggcacagctagacacactgaacagagatctgtttgaatcagaaagagaagttcaaagactgagaaaggcaattgctgatcacagcgtgggatgtggcgcggacagcaatggcaagacatctccggttggaccttggaatggcgggtttatggacagcgaaagcaattatgagtcacaagaaaagagcctaagggatggagaaagagtagagatgttgagaaaggaagtgagtgagcttaaagaagtgatagatgggaaagagtatctacttagaagctataaggagcagaagattgagctttcgcagaaggtaaaagagttgcagcagagactggactcacagctccaaaacttattgtaggtggaaaggttaggcattgtgcatacttgcgtctcttattttttttttcggttctttttcctttttcgagaaaatgaatcttagtatgtactaagaacggtggagatcaagattttcaggttctttctggctttctgctttcgtttttgaatgtcttgattctgttttttctttcaacatttggtgtaaaggtaaatagatagttgttgaagaatttaccgcgggaatagctctctactttttttttttttttattctccgtaattggtaactaacccgataattacaaacgccacgtataaggatgtgttcactagaagaattagccaattttaacacaaatgataaatagtataaacaaattttaaatttataaatagacgcaacatacattattatttttaagatacagttaaaataaaattgttagcaattatgcttattctgaaattttgggtttgaatataaataagaaatagagttttatcctaataagatttatataaataaacatataaagtcaaagtcatactttatcctctcagaggccgtctctcgggttttgctggtcttccttgctcctctcgcttttgaatggagatgtgagctttcttcattcaaagagcaaaactatctaattccatggcgttctccctcctctctccaattcctacctctgcctctctttttttcactctctccgccattaccgcttctaataatgcttcctcctcctctctctcccgtctttactctttatatcaccccaaaggaaccttacgaaccagaaccgcgacctcgtttttcggagcttctgggaacttgaggattgtttccatg

SEQ ID NO: 4674 - DNA, 3000 bp, Unknown
  misc_feature (1)..( 3000): cDNA_ID_1825073_gDNA_ID_1620721_Annot_ID_49195 3000 nt of promoter + ATG
gtacttatctggttgtttagtgcttacatgtcctagaattcgcttgtattctctatcttattggtaggttgttttgttgtgcagctaatggaacaaccgacagaggaagatttaagggctgctgcttgcattctaatgcatcaccctgtgaaaggaataatgattgttgctttcactgcactcccggtgagagtttgtgagtttgttattcttactactgaatttgcttatacataacttcacttcacatagtctcttactggggtttgattttgtggtatctttgaagtgaaaagagattttgggagatgttgtcaaatagttgaaagaatatggagatggttcttacatatttgtagcctctagtatcttgcataatgatctttgtaacccaatcaggaacaatatttgactaaagatgtctttgtaccccaatcaggattcatacttaagtagctacttacgttaatgagctggaaactatgaaggctgtagtattatcccccaatgatggcttgtgttatggcagaaaagttttgtgtgggtgttctgagagttggcttcttattttcatttatgcaggaactgagaatggggaaggaaatcatgctacaaatgagcaaatggcagagtccagtacttctctgcctcttgtgacagttcctgcttcatcatatagcaaagagagtgcagtcgtatggggatcttctcctgaccacctggaagtgccgatgaaagcataccatcaacattcgacctgctcagattctccttgcgtatctgaatccggctcagacatcttcagcaagcgagaagtaatacagaaactgaggcaacagctgaagagacgtgacgacatgatagttgaaatgcaggaacagattctagagctgcaaaactcgctaaacgcccagatgggacactctagccatatccaaacacagctagacgcaacaaacagggacctgtttgaatcagaaagagaagtccagagactgagaaaggcaatcgctgatcactgcgtgggacacacaggtagcaatggttggagtggcgatgtgaacagcgaaaacaactacgagtcaccagaaaatggaataagggatggagaaagaatagagatgttgagaaaagaagtgggtgagcttaaagaagtgatagatgggaaagagtatctacttaggagctataaggagcagaaaacagagcttttgcagaaggtaaaagagttgcagcagagactggactcgcagctcccaaacattttgtaggtgaagaaggttaggcattgtgcattcttaccactctcttttgtttccccgagtaaaaaatatgaatctttgttcaaaaatatctcaatttctccggggaaacttatcaactgactacattgttttgggtgtcaattatgattttatccaaattgtttttttctcttggtgaagtggatattcgaaagttgcaaactcatacaatatcgtgtctcaaggcttaaattgtagaattgcagttgaagttttttacaagaaagttggttacttgttcttaaggaaagagaaagaagggttgctaaaatttaatttggcacttatttcagtcaggttttgatattcataaggaagaaaatcgttagagaaggaaggaccaaatatttaattttgtagttgtcacatagtgaagaagacaaaagaaaaatgtatcatcacattagctggtagtgacttaaaatagaaaaaaaaaaataatcaacagaaagtgcaaacatttacacatggataaagatgtcaaatgttcattcatactcaaattatctattaaatttcattactaaaaaattgaaatcgtaaagaagaaaagaaagaagaaaaaaacatatgagctgagtttgttaaccaccgtgagcgtcatccatgggacgtggttgacgcgtgcgtgattttattttaataaatgaattaacagtggaaggaaaaaacaacaacggagctgtaactgtgaggcgccgtctctcttcaacctcttcccctccactttgcttctctctctcctccccgggggttttacagtcatatcatcgtcggagactctgcgattcttcacggaatcgtatttctctctcagcgatttttttcgattctcgaagctgcaaggaccacccatcaaacattgaaactcaagcgggagaaattttctggctcgggagggaaactatggagccctaatgcccattttctgctgtctatgaggttttttaaagagtcctttatactctccctgtttttgggtgcttcgctcgctcactgatttttgattcgtcggaaaatctattttcgagctcggatttatgtaattccttattctccttctgattgcgattgttgtgttcattaagggttgttgggatatcgattaacggcccctatcgaaaaaaataagggttgttattattttcatttcgcttcatgttcaaggcaagtatctatctcttcttcttgcttttgtagttttagaatctaaatcccatggcatcaacgtttcgattactctttcagggaactccatttttcttgcatttgctttttttgaggtagagtctgtgctcctatatgattccatggattcgtcgtatactttctcaactgagaatgtttgacttagagaatcttccatttttttttttgtctttctcttttcagtgttactatcattttagatcttttttttgtttttccttctctggttgactgtgtttgaggtaatgctcaaaacgtgattctttgtgctcattatcttttcatattctagtttctggaatctttctgggtattaagcatttgatgattttaaaattgtatatttgttgattttattgagttgacaccaggtttcttgttgacatatgcccaattcattctgatcgttgatgatgattgattcttgtatccgttcaatgtaggttatgtttggatgatagatacattttgactttctcatacaatg

SEQ ID NO: 4675 - DNA, 3000 bp, Unknown
  misc_feature (1)..( 3000): cDNA_ID_1825069_gDNA_ID_1620721_Annot_ID_49196 3000 nt of promoter + ATG
agtaatggtttattagatgaaaatatctcctatatctcttgtcaaatgttttgtctattgtaagtttgtaactgtgaactagtatttctaacttctctatttttcgtttgtcttatctgcagtctctacaaagtgtcgttttcaaggaggtattctcttgtccatgttttcttatacactttacaataaattcttgcagcgttatcatcatttgtttactttttacgacatggaatagtgattagcttgtttacaggcgggcacgaaagatcctgtcacgatgatgatcagcatattcttgcagttctttgatataggagtagatgcagcattgctctcacaggtttgtgtgactttggatttttgttgtatggagtagtagattcaaagaattgcaagcaggcttgttaatattctttctccttacaacatatcgtccagatgaaaagctataggattattgtttctcaattaataactctagtttcatagggcctttgatgggatgtgaattttctcatttcttagaccttgttacactagatggctttttatcttgatgcttatatggttctcaacttaccttatgtaggtctgatgctctctctttgtttattattttcagtatatttccctgttatttattgggatgttgatcgtgatatcagtgaggggattcttgacgaatctgatgaaggtgagttctgatttcagcttttaaatttctcccattcgtctttatacgatcttgtatgttatccacttgttttggagctatatagtgtcaatggaaaacttgctctggcattatcatgtttaaatattagacggaggctttcacttcttttagctggtgctaactttccttgtgacagtcacatagttacttaagcaaagtatatatgatgtatatcctaagagtggaagatgtagagtgattgaattaacgtatttgttgcagtagcattacagaacaactcaatgtaatttcagtctgatcataaaaacagaggctactttcttggttggcattagtatagtgattttacatctaagtaattgtaactcgcaatatactgaaagcttttgttttgaatactgttaaacgttttggtgattgaattggggagttttttttcaattcgcttgtacagttcttctttgcagtgtcgagggttggaagtggatcttcaagcaatgttgtgctcttcctatcagaaatcatgggaatgtactttttgtcttccattcttcttataagaaaaagcttgagaaatgagtacaggtacgtaagataatactataacaataattacaaccgttcttctgttgaaaagatgaaatgtggattataatcgaatggtgtttttgttggcacagagggataataacagatgtattaggcggagatattcagtttgatttctatcatcgatggtttgatgcaatattcgtggctagcgcttttctttctctgcttctgctttctgcgcactacacatctcgtcaaattgataagcacccaatagactaagcaagcatctgtgagttcccttgcaaatgaggtggttgattaaattttgatctagatgaaaaacttgaaacaatgaccactacttagcgttgacttatgtacattttcttgctttgaaaggatcagtcttgagttgttgtttttttttcttcctcaggtgtgtgtgattagttgtaaagagaatgagactttggggttttaccattcaataatatatatctgatataaaattcaatagatctctaccttatttatatgcatacattatttttcatgcagtactttaagaaacacatacacacacaaaaaagaaaggaaaagaaaaagaaaaagagtagtggccacaatgatttaatgaggcattaaccgaaaatgactgttttttttttttggttgattcggtgtgagagattattgtggtagagaaggagttggtacgtgtgttaggttcaatatctgcttcggttgattatatgcatgtaattgacttcaatgtcacattgtatccagtccaaggattttcaattccaaaatacattcatagaaaacaacgaagataaatctaaagaaatatatatatagaataatttacaacttcttagtgcagtagtagtgcataggttgagaacaaatttacattctctaggaatgagataacctctgtcatctgatcaccaagagtcactgccgccaataaagagaaatgtatccttcgttttgtcgtaatcttgatcctatattaatctcatttcttaatcgttactttttatttgtgaaataggttaaatcaactgttacttacattatacaaaatcatgaaggaattattcagtttaatatcaatcaaaaggcctaagtagtaatctcgattccacattattttatttcgccttttttttccgccaatttcgattcgacattcttgagaaataaaatatctagtaacagtactatacactatgaaaataagataatttgggacgcttcacggcgggtgaagaaaaaaaaaaagaagcttcaacggcctttgagtagttgtttctgcgccgcgctgtctctctaaaacagcctggtaagcttcttcgttttcccttctagagaccattgattatcataattgttctacaaactttagctttttcattagtctctcgatctacttgatcgttgtcacttagcaaccctaatttctgggagaatcgtccctgcagtattacccatcccgatgaggtttattttccgatttctgtttcctttttatcgtcacttttggtgttttgaatcgttctccgattttctttttgtcgttgagcctctgtgttcttcaattgtttgccatttttccttcgcatagggtttgattacgattaaaggcctctgttctgttactaaacttgagactgtggcttcctcttcagtgttaaggttggatgatagaagacattttttgaccttctcttacaatg

SEQ ID NO: 4676 - DNA, 3000 bp, Unknown
  misc_feature (1)..( 3000): cDNA_ID_1825061_gDNA_ID_1620721_Annot_ID_49198 3000 nt of promoter + ATG
atccaaggcattagttaacaaaattttttacatgcaatattccagaactcctcttctgtctccagtttatctcttaggcctgcatgtcagtttagtttagttcctatttatacgtggctgttgagacgaaaatgcattttttttataagattttcaagtctctaagacccttgtgtatccatcaacaagccttaacacgcctttgataaaccctccagccaatcatgcacaaacatgatttgtgacccgttaaggctttttcattttaaatagctaatgtttcagtatgtcatattgtcatgtgcttttgatctcatgttatcttccattttttcttccgggttcaaatttattgcacttgtcttatgcacagatcccgctgctagtgctgatctagctgtagttctaatgcaagaaggactggcacaaatcttccttgtgggcagaaggtactgattgcagtgacaaggtccattgtctgtgaaatttgttatttcctagtttttgttttgacaacatgtagttctcttatttcacctgggtggttttggctgaacaagtatgaaacgggtcaaagaaattcatccaattctgttcttgtttactttattgtcttgtttggcagtgtgacaagtagccgtgcacgaatagaaacatccattcctaggaagcatggacctgcaattgctggttacgagtctgtatgttccttcactgtttcgtcatatatgtgcccaaaattcgtttacatatttatcctttcaatttatgtcattttttgcttctctgtaggctttgaagaaattttttgagaatgttctgcaggtttgtcttttctcagaatgttgatgttttctttttgttgttttctaaaacataccacaaaaaagcggaaagagtttcacatatctaaaagtctattgcaatatcacaggcctttgtgaaacatgttgacttcagtgtcgttcgctgtgcagtagttgcaagtcccggcttcacaaaggttttttttttggtcactcaaagactttctaaatttacgtggtttattatttttcaaattgcagctggaccaggcttacaaatttcccatacatatatgacacagaccgtttgattgtttcatgtctccaggatcagtttcatcgccacttattgttggaagcagaaagaagacaactgagacctattattgagaataaatcacgtataatattggtgcacacaaactctggatataggtagtatttctgtgaaattgttcatgaagcctgtcaaaattttgttctgccatgctaaaatacattgagtgctcagagtcaaatgatataacatgcaatttatttattaaagttgtggaacactgatttgagatttatactgtcgatctgagttgatatctgctggataaacctaataatttctttagcaggaaacatacactttttttttaatttttgtataacaatgtccgaattgaccaggttacctactttagtaatgttatgattcatgttcatggtggctatcagtgttaacggttcactctactttgtttgtatttttttttgcttattcacttctaaactaaacagcctgagattctctgctcatgcaaattttcttcgatttctgacataatattttggtgcacagacatagcctgggtgaggttctccatgcccccaacgtgatgaatatgataaaagatacaaaagcagcaaaagaggtgatttagaatgttgcctatatttttgaattgctcattcgaaactgggttagcttgaaagtcacaattcacacgaactcaaataagtcctcactgttttgtggcttttgatctctatcatctgagttgtgctcttgaaatgtacctttgtcatctacctaactgatgtgaatttgcctatgtaggtcaaagctctcaatgattttcacaacatgctttcaactgtaggtcaaagctctcagcgattcttaatattctcatcaaattttaagaatctctcaatatgtgttgatatctttttgatttttaatccaggaaccagatcgggcatgctatggaccaaaacacgtggaagttgcaaatgaacgaatggcaattcaaacgcttctcataacggacgagcttttcaggtttagtaacggaagggaatatcccatttcaatgcgtttttttttttggtagttttaagaggcaaacgtgattgagactgacattacaaatatataaatttggtccaggaattctgacgtgaaaacaaggaagaagtatgtgaatttggtggagtcggtaaaagattcgggaggagatgcttttatattttcggcgatgcatgtgtcaggagaacgttagtgttgcttctttcttatcttagtgaatttgtgatgtgattatgttttttaatgtgctaaataagtgttgatgaactttgcagaattggcacagctgactggaatagcagctcttctcaggttccctttaccagaactcgaagacattgagatgtaaaaaaatcttcggcttatagaaaacaatacaacaaatcatacacatctctcataatttatagtttatttgtactcagtgtcataaaaagagatttgtaactcattacaaattataagataaccattcgttgctgttttgttgttaagcaatttttctacataaaattattctgttagaattttcagttccatacttaagtgaaagaaatttccgtaattgcttacaaaatttgctgttgtaagaatttggagtaaagtcaaacaacttaagtcaaaagtcaaaactccataataaagttttaccaccaaaaataataagataccgaccaatcgaaaagtgaattaaacaaaaaccctcgcaaattaaataaaagaacaaaaaataagaaaaaccctattcgctgtcttgctagttgctgctacaactagagcagcctctgtctctgcttgaggaaggaagagagatcaatcaacaaacaaactatg

SEQ ID NO: 4677 - DNA, 3000 bp, Unknown
  misc_feature (1)..( 3000): cDNA_ID_1825054_gDNA_ID_1620721_Annot_ID_49200 3000 nt of promoter + ATG
ccgtcgtaagtcgtgtaactagattgtgtcaagaagggcctttaataggccttcaattcagaatgttctaaaaccgaattaaagtactgttcggcgtccactagattttgtaggtactattgcatcatcatcatcttatatcagttcaatgtgtgtcttgttttttcttttttagtctattacatcatctgatcttattctagcagccttttgaaaatatagagaaaaatcattcaatgtttctaaaaccaaatctatacacaaaacataaagtcttttggatcattgaacatttgatcggattgcggattaatagattagagcttaaattttgtataattttataccaatcaaaattaatatagagtcatgtcatgctatttgtataatttatgtacaacaattattatataaaacgacttgaacaattctgtgataaagaaaaaaaaaaaaaaaacgacttgaacaattcaacatgctatagatagtttatacgtaagctaataagcctgtttgatactgtatatgacatacgtgtagctgatatgatcaaactagacaaaattttctaatttctcccgtagatatatatttttagtttacttgggcattccatttctcatatgtttctgcaagttagcacacataatggtgacttggtgagttgctttttttctctctctttttcaatatgatatgctttcttcgatttttttattttttttaaacaatatatcatctaatcatggttttttcgtaatcgtggtttttctaattgtagaaatctagtctttttttttcgtttattttgtttttattagttcatcacaaataaacactgattggcaagaaggaaaaaaagaagatggttcgggagaagatgagaaaacacgagaaaacgcacaaaggttaacaaatagtaaaatagatagatagaaaacaaaacgagtcgagaaacttcgtatcaaatcttcaaccttcaagacctctccttttgtcacttagagccttctcatcctcacctacatatatacactcacttctacaattgtagtagatactcaacaaactcagaactagaattttctaatcttcactcagcgatatttttggctcatactcgaaacaaatggcttctacactctcatttgctgcatcggctctatgttcacctcttgctccatctccttctgtctcatcgaagtccgctacaccgttctcggtttcgttcccacggaagatccctagccggatcagggctcaagaccagagagaaaactccattgatgttgttcagcaaggacaacaaaaagggaaccaaggatcaagtgtcgaaaaaagacctcaacaacgcttaaccatggacgtctctcctttcggtacgttcaactaactaaacggacttcacttgtataaataaaaactacatcctctgcttattacttaaaacattgctctgtttttatgaactcagcttttgtcaatcgaaaatctcttcctctgctttgaactgaaacaatgttctgttttaatctaaccacaggattgttggatcctttgtcaccaatgaggacgatgcgacaaatgttagatactatggacaggatgttcgaggacactatgcctgtctcaggaagaaacagaggaggaagtggagtgtcagagattcgtgcaccgtgggacatcaaagaggaagaacacgagatcaagatgcgtttcgacatgcctggtctctctaaagaagacgtcaaaatctctgtagaagataacgtacttgtgatcaaaggagagcagaagaaggaagacagtgatgattcttggtctggaagaagcgttagctcatatggaacacgacttcagctcccagacaactgtgagaaagacaagatcaaagctgagctcaagaacggagtcctctttatcactatccctaagaccaaagtcgaacgcaaagtcatcgatgtccagattcagtaggactcgatcaacattatcctcttgtttaatgtttcttggaggtactgtttgttgtacataagcatatgtttctctttatagcttaaagtgtgtgatgcaagtaaaaacaacaaagagagattttagagaagtcttttccacaaaagaaatgaaataatggcactaatatttggatatgtaattgctgaggagacgacactaaataatctgtgagtattttcttaaaatacaccaatcgagaaaaatctgttttgttttccaagtaaacgtgatctgataggagtaacaaccaatcagagaaaaatcttaaatcaaaaattcggttccattattttataattaaattagaaggtaatagtcaaaagaacatagaaacagtccttgacacatgttgaatccaatgaagaaatacgtcttcacacaaagccttaaaaccaaaactcatagttagtcgaacaactattcaaagccccgccatagacatgaatgtgacgtagagtaagagacaggaatattaagacacgtaatttgaagtttctacgaaaactccaaatgatgtaatagtctagatttaaaagtgttgctaaattaacttattcgggtgaatgaatgtccaaacatgattttggaatcgttcataagatatgctttggggacattcacaaacatatctccccccgatatgttcaatacctaaatgtattttgcatactttactgggctgagtcatgtctcattatttgggccaataaattgggatttagcattattacccatattgatataaaggtcttgaaaaggccttaactaattgtaaaccctaaaacactctcctctctaatcacgatttattcaaaaataaaatcaaatatttctaattcaaaaatgagatcaaatcctctgccaccgctgcttggggtgcttgtgtaggaacaacaacggtcatttgcgaatttcgaacaactctttcaataaaagcaacaaaaagatcgaaactttacagtcgtaggaaggaaaaaaatg

SEQ ID NO: 4678 - DNA, 3000 bp, Unknown
  misc_feature (1)..( 3000): cDNA_ID_1825050_gDNA_ID_1620721_Annot_ID_49201 3000 nt of promoter + ATG
ttgacgttgcaagaaccttctccaaatctaactgtgataatggcctagggtcctgcaaacgtgacaaactcataacatcagtaccttgaaactagtggatgcaacactgaacatttcagtggaccatgttttctttttaaacttaccaaacatggtttcccctttctctctgcatctaggatttctctgatagggaagtaagctgctttcttgcatagctcaaaaatgtctgatccggtatagccttcgcataagcgagctatgtgatcaaagtcaatatcaggttccaccctctctcctttcagagtcactttcaatatctcagctctctcccggcgatcaggtattccaatctcaaaggcctgaggaagacgccttaatattgcttcatcaagctctgacggtctgttagttgcagcaagaaccataacccttgcatgcgctacaaaagcaaccatttctattcataagaaacccacatactccaggttacactagtctgcatggcaaagtaagccgaacagtgaagaattcaacttacgatcagtagagaatccatcccataaagccataaactcagtcttcatgttggccatagcttcatgatctgttgaacggcgctgaccaagaaagctctcaacctcatcaataaaaatgatagcaggttggagtttgtaggccaagctaaacacagcagaaactgagagaacgaaacagaacagagcagctcatagattagaaacaccatcaacagaccaaaaaaagtgtaattgatataataaccacacacaaaaaacaaaaaactgccaacaaagttgcacaatgtgaagctgataaaagcacaggaagaaaacacgacgagcatgaagacaggcctactcaaagtgtgttcctttatcacacacaaaataataatatgcacttaccaagcttctgagcatctccaaaccacttgctcatcaggtttgaaaccctaacattaatgaaaacagctcctgactctttggcaatagccttagcaagcatagtctttccagtaccaggaggtccatagagcaagacacctttttgaggtccaagaagcttcccgtaagcaaaaagctcaggtcttttcagtggtaaaatcacaagctcatacaaagcctgcttgatggtctccaaccctccaatagaaccaaactccacatcaatgtggtctggatttatcacatcacatgcaattacatcctattcacaaaattagaaactagtgagcaatttctcgagctcatttcatgagtttgcgcaaaaagacgattggaactcaaaagtatccaaatttcaatattaaacagagagaccaatacaaattggttatcgaaaccacatatcgcattctcaggtagctaccaaccagtgaggattctaagatgcttaattcatagtagattacctcgtatggattggtctgaacaagaggacgacccaaacgtttagagatttccttcttatgctcgagagcttttttagaagcctcacgattaggatcgagatgacgaagacccgcaaagagaaccaagcagctgaaagcagcgctcgccgcgtaaagtatgagttcttgtaagatctttgtctccgacgaacctcccatgtctcttctaaaaattcaacctttcaattacagagtatctcaaatggataaataaaaccctaagttagtcaagaaattagggttcccagatgaaaaagaggatatgttagcagaagacggaaacaaatttggttgttcttgtggacgacgacagagcttttgccttggtgggggtttctcgaatacttggagatcgaggaaaggagaagctgaaattaccgaaatagccttagctgcaccgtcgtaagtcgtgtaactagattgtgtcaagaagggcctttaataggccttcaattcagaatgttctaaaaccgaattaaagtactgttcggcgtccactagattttgtaggtactattgcatcatcatcatcttatatcagttcaatgtgtgtcttgttttttcttttttagtctattacatcatctgatcttattctagcagccttttgaaaatatagagaaaaatcattcaatgtttctaaaaccaaatctatacacaaaacataaagtcttttggatcattgaacatttgatcggattgcggattaatagattagagcttaaattttgtataattttataccaatcaaaattaatatagagtcatgtcatgctatttgtataatttatgtacaacaattattatataaaacgacttgaacaattctgtgataaagaaaaaaaaaaaaaaaacgacttgaacaattcaacatgctatagatagtttatacgtaagctaataagcctgtttgatactgtatatgacatacgtgtagctgatatgatcaaactagacaaaattttctaatttctcccgtagatatatatttttagtttacttgggcattccatttctcatatgtttctgcaagttagcacacataatggtgacttggtgagttgctttttttctctctctttttcaatatgatatgctttcttcgatttttttattttttttaaacaatatatcatctaatcatggttttttcgtaatcgtggtttttctaattgtagaaatctagtctttttttttcgtttattttgtttttattagttcatcacaaataaacactgattggcaagaaggaaaaaaagaagatggttcgggagaagatgagaaaacacgagaaaacgcacaaaggttaacaaatagtaaaatagatagatagaaaacaaaacgagtcgagaaacttcgtatcaaatcttcaaccttcaagacctctccttttgtcacttagagccttctcatcctcacctacatatatacactcacttctacaattgtagtagatactcaacaaactcagaactagaattttctaatcttcactcagcgatatttttggctcatactcgaaacaaatg

SEQ ID NO: 4679 - DNA, 3000 bp, Unknown
  misc_feature (1)..( 3000): cDNA_ID_1383728_gDNA_ID_1620721_Annot_ID_49202 3000 nt of promoter + ATG
atatcaatatgggtaataatgctaaatcccaatttattggcccaaataatgagacatgactcagcccagtaaagtatgcaaaatacatttaggtattgaacatatcggggggagatatgtttgtgaatgtccccaaagcatatcttatgaacgattccaaaatcatgtttggacattcattcacccgaataagttaatttagcaacacttttaaatctagactattacatcatttggagttttcgtagaaacttcaaattacgtgtcttaatattcctgtctcttactctacgtcacattcatgtctatggcggggctttgaatagttgttcgactaactatgagttttggttttaaggctttgtgtgaagacgtatttcttcattggattcaacatgtgtcaaggactgtttctatgttcttttgactattaccttctaatttaattataaaataatggaaccgaatttttgatttaagatttttctctgattggttgttactcctatcagatcacgtttacttggaaaacaaaacagatttttctcgattggtgtattttaagaaaatactcacagattatttagtgtcgtctcctcagcaattacatatccaaatattagtgccattatttcatttcttttgtggaaaagacttctctaaaatctctctttgttgtttttacttgcatcacacactttaagctataaagagaaacatatgcttatgtacaacaaacagtacctccaagaaacattaaacaagaggataatgttgatcgagtcctactgaatctggacatcgatgactttgcgttcgactttggtcttagggatagtgataaagaggactccgttcttgagctcagctttgatcttgtctttctcacagttgtctgggagctgaagtcgtgttccatatgagctaacgcttcttccagaccaagaatcatcactgtcttccttcttctgctctcctttgatcacaagtacgttatcttctacagagattttgacgtcttctttagagagaccaggcatgtcgaaacgcatcttgatctcgtgttcttcctctttgatgtcccacggtgcacgaatctctgacactccacttcctcctctgtttcttcctgagacaggcatagtgtcctcgaacatcctgtccatagtatctaacatttgtcgcatcgtcctcattggtgacaaaggatccaacaatcctgtggttagattaaaacagaacattgtttcagttcaaagcagaggaagagattttcgattgacaaaagctgagttcataaaaacagagcaatgttttaagtaataagcagaggatgtagtttttatttatacaagtgaagtccgtttagttagttgaacgtaccgaaaggagagacgtccatggttaagcgttgttgaggtcttttttcgacacttgatccttggttccctttttgttgtccttgctgaacaacatcaatggagttttctctctggtcttgagccctgatccggctagggatcttccgtgggaacgaaaccgagaacggtgtagcggacttcgatgagacagaaggagatggagcaagaggtgaacatagagccgatgcagcaaatgagagtgtagaagccatttgtttcgagtatgagccaaaaatatcgctgagtgaagattagaaaattctagttctgagtttgttgagtatctactacaattgtagaagtgagtgtatatatgtaggtgaggatgagaaggctctaagtgacaaaaggagaggtcttgaaggttgaagatttgatacgaagtttctcgactcgttttgttttctatctatctattttactatttgttaacctttgtgcgttttctcgtgttttctcatcttctcccgaaccatcttctttttttccttcttgccaatcagtgtttatttgtgatgaactaataaaaacaaaataaacgaaaaaaaaagactagatttctacaattagaaaaaccacgattacgaaaaaaccatgattagatgatatattgtttaaaaaaaataaaaaaatcgaagaaagcatatcatattgaaaaagagagagaaaaaaagcaactcaccaagtcaccattatgtgtgctaacttgcagaaacatatgagaaatggaatgcccaagtaaactaaaaatatatatctacgggagaaattagaaaattttgtctagtttgatcatatcagctacacgtatgtcatatacagtatcaaacaggcttattagcttacgtataaactatctatagcatgttgaattgttcaagtcgttttttttttttttttctttatcacagaattgttcaagtcgttttatataataattgttgtacataaattatacaaatagcatgacatgactctatattaattttgattggtataaaattatacaaaatttaagctctaatctattaatccgcaatccgatcaaatgttcaatgatccaaaagactttatgttttgtgtatagatttggttttagaaacattgaatgatttttctctatattttcaaaaggctgctagaataagatcagatgatgtaatagactaaaaaagaaaaaacaagacacacattgaactgatataagatgatgatgatgcaatagtacctacaaaatctagtggacgccgaacagtactttaattcggttttagaacattctgaattgaaggcctattaaaggcccttcttgacacaatctagttacacgacttacgacggtgcagctaaggctatttcggtaatttcagcttctcctttcctcgatctccaagtattcgagaaacccccaccaaggcaaaagctctgtcgtcgtccacaagaacaaccaaatttgtttccgtcttctgctaacatatcctctttttcatctgggaaccctaatttcttgactaacttagggttttatttatccatttgagatactctgtaattgaaaggttgaatttttagaagagac

SEQ ID NO: 4680 - DNA, 3000 bp, Unknown
  misc_feature (1)..( 3000): cDNA_ID_1825043_gDNA_ID_1620721_Annot_ID_49204 3000 nt of promoter + ATG
actattaaattagggagaaatactttgttcaaaagcataatcaaatttagatagaatcgactatgaaaatcaagaaactaaaacaaccaccacatgttcagatttttattccttacttcactttgaatttgacttatccactattgaattatatcatctgaactttatttgtgaccaaggccaaatatagaacataacgtgaccaaatatccgttgagattcttggttttctcttcctcaccattcagaactactatccgagagggtgaagcattacgggtaggccgtattgcgggaagagatcgaagtgatcaactggcgtgtgcttatactcgggggagaggctaagctggaactgttgaaggatcatagtgagaacggtcttggcttcgaccatggcaaagtttttggcaatgcaagctcttggtccgattgagaacgggaggagagcgtttgggtgaatggtggcttgagaaatgccgttttcgaatctcaagggattgaattgttcggcgtcttcgccccatatggccttgtctctgtgcatcttcagtaacggtatgataatgcttgtgccctttgggatctccaagtgtcctaccttcatatcttgtgttgcctctcgggaaattttaatcacgggtccgtacagacgaagcgactccatcaacaccatgttcatctgcaagattaataggtgtaagaaaacccttttcttcacccgcaagtaacacaatgaaaatgaacattaccaatttgagtttagagaaggtgtctgtatctgggattttatctttaccacattcattaaaaacctcttctctgagtttctcttgccaaccttggtgcaagcttagtaacatcgtagtccatgtcaatagaatcgaagtagttccttgccctgcatagtagaaattcttgcattcctctatgatctcatccattctcatctttctctcatactcgttagatttcgcagcagtcaacatgacccctagaagatcgtccccatagccataggtcttacattttgattttagccttgaatctatgattcttttgatcgagttcttcactttcttatggagctcccatagtttaaggttggtaggcgtaggaaggtatcttgaaacacaagaaacaacgatcttcaaatctcaagaatattttagccaaacgaattaactgagagtagcagaagagtactgactaagtgactattatacttactgagttccggggatgaaaacgttagtgagagaactaatataatacttctcaagctctgtttgtgacctacacaattcgattccttcggcataactacttccaaacgcagtagttgctataatgtcagcggtcagtttatggaactctttgcttatctcaatcttgatcaacacttcaccatttcttctctgttttctccactcctcaaatatccgtaaggtgcaatctcccatcggttgtgtcatggcctgacaatttttaagcaagcaatatattagttcttttcaaatcaagctgagaagtatatagttaagagtaaaagaccttgagccgatccatggagaaagcagggttcaagattcgtctatggcgaatccaatcatcaccttggataaaggaaagtcctttaccgaaaagtatgaagacctcaggtcgtttcaccggtataatagtgaaaccgaacttgctcgacaagacctgtttcgctagctcatgatttgagatgtatatagttggttttgttccagtccagaatagaaatgtatctcctaatatatcatagacaacttatgtgtgtgttaagtaatcctcatctatgaaaagaagaaaaaaaaaacaagatggatagaaaacggtaccgtattgagacatccattggtgatactgaggaaacacacgagggaaaatatcattggaattgggatccagaacacaaaggtcagcttctttcttcatcttctttatctcgctgaggtttccgtacaagattttgtactttggtcctgagattccttgtttcttgaatctttttgatagcatcaatggacgcaaaaggaggatccaacaagctttccatatcttggaaacaacgaagagtagaagaacgattgttaagagattgattgtgcttataagttccattaaaagaaggaacacaagtagctcttttttttttctttttttttggtagcaagaacacaagtagttgacttatattttccgatctggataagcaaatctggttatagttaaaaacaaatgtatcttagtaatgtacacgaccaagttctggatcgaaagggaacaacataacatttactattgaacaatgatgtgatcggtaatacctaaaacataattaaagttgttaagaaaattgaacaacataatttaagagctcactaaagggtaagatatttttagatgaaagatagagagataaccattagtaagaagtacaataagattgatgaaaaaaaaaagtacaataagataaggcggtaaaaaaaactgaaaataacagcttttgtacgactaaatcttaccgttttaaaaattggtaaactagcaaatgggagtatgggaccattggttttgtaattgtgaaagaaaattaatcaaaaagaggtaaaccggtataaccgaaaacgtaaaaaccaggttaaccaaatctaagcgatccaatcaaaaactcaagaatggcgcaatgagaaaactaaagaagataagagaaatattttattttatgttttggtcgaaaagaagataagagaagattatgttgtgtcaacttttgatcgtttgaatacaaaagatagaaaatcgggaaaataaaataagcaccacatgttcagattttttcctaacaagaagaaaagaagtcgcagtttcatcgtctttcttccattatcgtgcaattaaattctctcattttcaagaaaatatctgaaaaaacagaaacttaacagaagcagcttcgatcaagagatg

SEQ ID NO: 4681 - DNA, 3000 bp, Unknown
  misc_feature (1)..( 3000): cDNA_ID_3073913_gDNA_ID_1620721_Annot_ID_165835 3000 nt of promoter + ATG
atatttgcagtcgcaggtccactcttcctagtttagtaccccatctaggcacatatatcgaaatagtttaataaattgaatcaaatactgaattgttactgatatatatactctgtatgtttctcgaaaatacttaaatttggtgtcatggagttgataaatttctgtaagaaattgaacgtctacagttcttatggtttagggtttctaagatggatccaaaaaaatgcaggaaccgaactatatacggcttttgagaacttaggttatcctttagacgtgactttcaaataagtatgtcgatgatttgataagacatgtcgttttatgatatgtagggacagggaaataaaagcacaatgtgaattaagactttagattcaaaaagatgcttcatgcttgtagaaatgatgacgattgcgacttgggacaatggacaagtgctatgtcattacatatactgatacacctaacctaatgaccaaataaggactctttacacgggttaactaaacaaatatatcccaactaacatttccaacaaaataagccgataaatgtaacatgtaccgaacaaaacattattaatcatcgtaacttttttttaggtttgaattaatcattataatttaaaaccctaaaaccaacttataagaaccataattgatcagaatccagtttaagtaaataacatagaaaattttgagtcagataaaaaagaggaaattgtatggttagcaacatttacattttacagaatatggatatggtaaatgagaagtgtgtggatcacaagaagtgaatgtgctttttctgctttttaaaggatgaatatgaaaacgaggctaccctcgttattttatttaatgtgaccactgtttagctggaaatcacttggagacgactttaaagtaggctccaaaatctaaagctagacaccagacaaaagactttctatattgtttgtcttaagataattctaaaaatatcagcatcgttactttattgaatgaatacttataagaattgacagtgaaaatgaaactagtgttgaaaagagatgtttggtcattaaaatcaaacaccgaccttaaactaaaaaagaatatcacttcatcggctcctccttttttcacaacttatatacaatatacacacacacaaactgagaattagaatgtacatgtgaatgggctggtgcagtaaatgcattattacgtgttaatgtacatgtgaatgggctggtagcagtaaacgcataatctcaaaaccaccggtcaccgatgcgtgtgcaagtctcagtcagaacgtgattggaccaagtctcggtgtataaagacacacagtccatcaccgctaaataatgaccacacggatgggcccatcaatatatcaaatttgtgggtcttttaatcttgtttcacaagtgaattattcaaatgggcctttatttatacaccataaatggcccattagtccaacaacatacaataatgcaagtggtcggggtcaacgcactagaaattccacaagaactaaacgataagaacaaataatcttcatagtctctcatccaatcttacaaactttctgatttcctttctacattcatcgaccaatggcagcaaacaaaactcttcctacgtatttttgcagaaactgcgagaatccactagctctcggtgaagatctcatctccaaaaaatttgtggtaacaaaaaaaaaaaactaaagaatgttatagctttaccaaaaaaaatcactttttcatttcttatcggatgattttctagagatgatcaagtctcttcataatctccattggttataaaatgcaaaatgtttttgaatatggattatagggagcttcagggccagcgtttatgttttcacacgcgatgaacgtggtggttggaccgaagattgggaggaaactgataaccggatcgtatgtagtggcagatgtgatgtgcagtaagtgtggtgagacgttgggttggaaatatgttgagacattcgatcttaaacagaggtataaagaaggcatgtttgtcatcgagaagctcaagttgaccaaaagatattgaaacctagtcaagaagaataatactcttggagggttaagctaataaataaatgaaggaaacttgaggattgtatatgtatatataacctttgttgtataaatgtcatcactatattggttgttctctataaagggatttgaaaacaaagtaaaaaagatttaatctaagataagattttttttttcttaaactatatagaaatttacagtaagaaattaaataattatgaaaaagtataagaaaatatgaagagattccacatttccattattcatcactgctgatacgatttactttctcaatttaccagtcataaagcaaaaacccagaaagaaagaagtcacaaggtagtcgctacacggcatatatgatcagagactaaagatcaaaactttcatccaactccaaccttattctcctctcaattttgtcttgcgtccttgttcgatctgttaaacccttgtaagatccctctgaaatttcctcagaaaaattcatttcaaagatcaaaatcgaatctttcgtctgatttttctcaatttcgttgaaccatatatcttactgcgtaatttcctctccggtaatatctcattttgtttcccttaccctaccaaatatatataatctgtggtctcttcttttgacccactcttatttgtttattattgaaattgaggtactatcgtggaatctctagtcttgcacgctaacacctgcccactgttcttatcctctatttttcagacattgacgtttgaagcttggtgaatttttggattctggtaaggtttagaaaccctgatttctggttttccatgtgggttctggatatattgatggatttttatgtttttggtgaaaaggtgagaacttggttggagcaattgatcacgccttgaaagtgtttgataaa

SEQ ID NO: 4682 - DNA, 3000 bp, Unknown
  misc_feature (1)..( 3000): cDNA_ID_1379043_gDNA_ID_1620721_Annot_ID_165832 3000 nt of promoter + ATG
tacttcttactaatggttatctctctatctttcatctaaaaatatcttaccctttagtgagctcttaaattatgttgttcaattttcttaacaactttaattatgttttaggtattaccgatcacatcattgttcaatagtaaatgttatgttgttccctttcgatccagaacttggtcgtgtacattactaagatacatttgtttttaactataaccagatttgcttatccagatcggaaaatataagtcaactacttgtgttcttgctaccaaaaaaaaagaaaaaaaaaagagctacttgtgttccttcttttaatggaacttataagcacaatcaatctcttaacaatcgttcttctactcttcgttgtttccaagatatggaaagcttgttggatcctccttttgcgtccattgatgctatcaaaaagattcaagaaacaaggaatctcaggaccaaagtacaaaatcttgtacggaaacctcagcgagataaagaagatgaagaaagaagctgacctttgtgttctggatcccaattccaatgatattttccctcgtgtgtttcctcagtatcaccaatggatgtctcaatacggtaccgttttctatccatcttgttttttttttcttcttttcatagatgaggattacttaacacacacataagttgtctatgatatattaggagatacatttctattctggactggaacaaaaccaactatatacatctcaaatcatgagctagcgaaacaggtcttgtcgagcaagttcggtttcactattataccggtgaaacgacctgaggtcttcatacttttcggtaaaggactttcctttatccaaggtgatgattggattcgccatagacgaatcttgaaccctgctttctccatggatcggctcaaggtcttttactcttaactatatacttctcagcttgatttgaaaagaactaatatattgcttgcttaaaaattgtcaggccatgacacaaccgatgggagattgcaccttacggatatttgaggagtggagaaaacagagaagaaatggtgaagtgttgatcaagattgagataagcaaagagttccataaactgaccgctgacattatagcaactactgcgtttggaagtagttatgccgaaggaatcgaattgtgtaggtcacaaacagagcttgagaagtattatattagttctctcactaacgttttcatccccggaactcagtaagtataatagtcacttagtcagtactcttctgctactctcagttaattcgtttggctaaaatattcttgagatttgaagatcgttgtttcttgtgtttcaagataccttcctacgcctaccaaccttaaactatgggagctccataagaaagtgaagaactcgatcaaaagaatcatagattcaaggctaaaatcaaaatgtaagacctatggctatggggacgatcttctaggggtcatgttgactgctgcgaaatctaacgagtatgagagaaagatgagaatggatgagatcatagaggaatgcaagaatttctactatgcagggcaaggaactacttcgattctattgacatggactacgatgttactaagcttgcaccaaggttggcaagagaaactcagagaagaggtttttaatgaatgtggtaaagataaaatcccagatacagacaccttctctaaactcaaattggtaatgttcattttcattgtgttacttgcgggtgaagaaaagggttttcttacacctattaatcttgcagatgaacatggtgttgatggagtcgcttcgtctgtacggacccgtgattaaaatttcccgagaggcaacacaagatatgaaggtaggacacttggagatcccaaagggcacaagcattatcataccgttactgaagatgcacagagacaaggccatatggggcgaagacgccgaacaattcaatcccttgagattcgaaaacggcatttctcaagccaccattcacccaaacgctctcctcccgttctcaatcggaccaagagcttgcattgccaaaaactttgccatggtcgaagccaagaccgttctcactatgatccttcaacagttccagcttagcctctcccccgagtataagcacacgccagttgatcacttcgatctcttcccgcaatacggcctacccgtaatgcttcaccctctcggatagtagttctgaatggtgaggaagagaaaaccaagaatctcaacggatatttggtcacgttatgttctatatttggccttggtcacaaataaagttcagatgatataattcaatagtggataagtcaaattcaaagtgaagtaaggaataaaaatctgaacatgtggtggttgttttagtttcttgattttcatagtcgattctatctaaatttgattatgcttttgaacaaagtatttctccctaatttaatagtgggaggtcgaccatattccgaagtatacaacagaacctagtggattaaaaaccaaatcactcgttgaaaatttcgactctttgggttgttcccacttccactacaattaaatcaaatactaggcgtacaactaaatcaacggcatcagccccattccttcaacgtatggggtcctctgtgtgtctgtctctccaccgacactctctttatcgttgatcactccaacggaccgtcaggataatgccacgtatatttcttctattatcctctgcacttaacacacggtggactacgtactctcacgctgcttcagattcgtacattgcgatttggaatgtttattatatacccaaagagcaaaactttaggtgggccttaaactaattaatggcatttacgcgtcagtgagagtggagtatataacaatctgaagctgaagaagaagaattgagagataacagagagatagtttcttcttcatccaaaagaatccaatcttttcctcaaaagatagtttctggatcgaacgaca

SEQ ID NO: 4683 - DNA, 3000 bp, Unknown
  misc_feature (1)..( 3000): cDNA_ID_3409406_gDNA_ID_1620721_Annot_ID_165831 3000 nt of promoter + ATG
gttcctttttccctacttactttaagagatgtcaataggcttccttatttactactcagagcgttcttaagctcatacaagattaaggcttaaatcagtaggatcatttgaggcacaatgttgaatcttactttttgtacagatggaagttggaattgaggattgcctgcacatcgagtttgagtacaataaaagcaagtaagacaaaatccgtttcatgatttaaggatttgactgattgattgggaaataagacagatatactctatgcctctggttgcaggtatcacctaaaagatgtcatccttgggaaaatatattttcttcttgtgagaatcaagatgaagaatatggatcttgagatcagacggcgggaatcaacaggtgcaggtgctaatactcatgtcgagacagaaactcttgcaaaatttgagttgatggatggaactccagttagaggtatatttggaatctgatgttttagtgatttctttaagatattagataactgagtgaagatttgcattacaggtgaatcgatacctgtaagactgtttctggccccatatgatcttacaccaacgcatcgcaacatcaacaacaaattcagcgtcaagtattatctgaatcttgtactggtagatgaagaggatcgccgatacttcaagcagcaagaaatcacgttgtataggttgaaggaagacgcatcatcttgatgataataactactgtaaggattctcattatccttttgagactttttttgtaaaaagctttagactttgtgtactcagattgttatttgggtcggtacttagaatgaagttttaacagtacttgtttagtttgttcatcaatcaagttccttttctctggattccggtcgagtttgctggatttcatggtaaagtctgaagttttacaaacctcaaaacactctctgaaaagccaaatctctaaatgcaactaactgaaatggacagatatacaaaactggacaactctagagtaaagaagttggttagtcttcttcaattgtttcaacaggaagaccttccttgccccatgtgtagattccaccttctaggtgaaatacgttcttatagccgttaaggaccagaagataagcagctatgagagacctgcaagaaccctaattatatgagcaccgaaacaaatgctttcttcgcacaaagttgtagacttttggcattacctcgattgttggccttcgggaagattttgtgtcggcttcattgtacccgcggatgaacaagctactatgatctttgcctctttgtcaagtttagcttctacacctgcaacatttccgaaacaaaacattcagccgctggattcaacggcattgtgtaaaaacagtccaaagcttattatctcatttcagtgcatactttgaataaactcagggttctcttctgtgccagagaagataccaaagaaagcaaagccaagacggcgagctatgtcccatgccgtccattcccttatgagtctgtacatctccacattgatagctcccggaggatgacccttcaaaaacaaaacaacaagacaaatgtcactcacatgaatttgccattaaaattacaagcgatcatgacacgacgagagagagagcatagtatcactcaccgccttgtactctgcctctggtcttacatcaagaatcacaaagttgttttctttttgtaaccgttgagcttccttcacgtccacacttctcacctacaacaacaactaaaagctaagctctatgttcacattttgatcgaaagttttagtaaattagagccaatcattgattacccttttctccaatagaagctctctcttctgtctccaatcgacttcagctaaaccctccaagagacacaaacagaagaacgagaggttaatctaaccgaactttaccattcacaagatcgatacacaagatcgctctcgctctacaagttgtatacctgcaggtttggcaggtttggttgaagtgcattgaatcttaagcgttttgtgaccggaaaccattgctgccgatcgaactccggcagagaaaagagtgtttccggaggatttcagacgcaaagcctgcgatgaagatgggtaaggcgtggctattgaagtaagtgaagccatctcttgatcgaagctgcttctgttaagtttctgttttttcagatattttcttgaaaatgagagaatttaattgcacgataatggaagaaagacgatgaaactgcgacttcttttcttcttgttaggaaaaaatctgaacatgtggtgcttattttattttcccgattttctatcttttgtattcaaacgatcaaaagttgacacaacataatcttctcttatcttcttttcgaccaaaacataaaataaaatatttctcttatcttctttagttttctcattgcgccattcttgagtttttgattggatcgcttagatttggttaacctggtttttacgttttcggttataccggtttacctctttttgattaattttctttcacaattacaaaaccaatggtcccatactcccatttgctagtttaccaatttttaaaacggtaagatttagtcgtacaaaagctgttattttcagttttttttaccgccttatcttattgtacttttttttttcatcaatcttattgtacttcttactaatggttatctctctatctttcatctaaaaatatcttaccctttagtgagctcttaaattatgttgttcaattttcttaacaactttaattatgttttaggtattaccgatcacatcattgttcaatagtaaatgttatgttgttccctttcgatccagaacttggtcgtgtacattactaagatacatttgtttttaactataaccagatttgcttatccagatcggaaaatataagtcaactacttgtgttcttgctaccaaaaaaaaagaaaaaaaaaagagctacttgtgttccttctttta

SEQ ID NO: 4684 - DNA, 3000 bp, Unknown; identical to SEQ ID NO: 4680
  misc_feature (1)..( 3000): cDNA_ID_3092028_gDNA_ID_1620721_Annot_ID_165830 3000 nt of promoter + ATG

SEQ ID NO: 4685 - DNA, 3000 bp, Unknown; identical to SEQ ID NO: 4679
  misc_feature (1)..( 3000): cDNA_ID_1383728_gDNA_ID_1620721_Annot_ID_165828 3000 nt of promoter + ATG

SEQ ID NO: 4686 - DNA, 3000 bp, Unknown; identical to SEQ ID NO: 4678
  misc_feature (1)..( 3000): cDNA_ID_1825050_gDNA_ID_1620721_Annot_ID_165827 3000 nt of promoter + ATG

SEQ ID NO: 4687 - DNA, 3000 bp, Unknown; identical to SEQ ID NO: 4676
  misc_feature (1)..( 3000): cDNA_ID_3073925_gDNA_ID_1620721_Annot_ID_165820 3000 nt of promoter + ATG

SEQ ID NO: 4688 - DNA, 3000 bp, Unknown; identical to SEQ ID NO: 4675
  misc_feature (1)..( 3000): cDNA_ID_3073929_gDNA_ID_1620721_Annot_ID_165818 3000 nt of promoter + ATG

SEQ ID NO: 4689 - DNA, 3000 bp, Unknown
  misc_feature (1)..( 3000): cDNA_ID_3092031_gDNA_ID_1620721_Annot_ID_165817 3000 nt of promoter + ATG
aggtagagtctgtgctcctatatgattccatggattcgtcgtatactttctcaactgagaatgtttgacttagagaatcttccatttttttttttgtctttctcttttcagtgttactatcattttagatcttttttttgtttttccttctctggttgactgtgtttgaggtaatgctcaaaacgtgattctttgtgctcattatcttttcatattctagtttctggaatctttctgggtattaagcatttgatgattttaaaattgtatatttgttgattttattgagttgacaccaggtttcttgttgacatatgcccaattcattctgatcgttgatgatgattgattcttgtatccgttcaatgtaggttatgtttggatgatagatacattttgactttctcatacaatgagtacacgaagaaatggcatttccaagcatcagcgaggtgataaattttgtggtgaagggccaaactggatactaattgcagggggtgcattgttgagcacattgtccattcgctttggatacaagctaaagcagtcgcttgattcgaaacctcaatcaaatggctctgctggattaaaacgtacttactttatcgctgtgttgcttaacatgttttataatttggttctagtttttttctatcactaaatgaaagcctcttgtgcagctaatggaacatctgagaggcaaaaatctacaagctgttgcttacactctaccacatcttcctgtacacaaaataatgatttttgttgcttccgctccattccaggtgtgactttgtaactttctgttttgcctcatacatatttgttcaatctactaaacaaacgctatatgcttgtttcttggtctcgcatcatgtcttactgggtttcctttcatgaagttaaaacgatgtgtgatatatagtaaaatctagttgggagaatgtgtagatgttgttatagagttctagcctctgttatcttacctcatgatgtatttgtcaactaggggaatccaattcgaagttatggaatgagtaaaatagttacaagatttgccaccttgcaataactggttgaatcgaatatctcttgtttcgttgtggcatattaccattaatttgcatcaattgggctggcaactagggaagcaggttttctccattgatggctgtgtctagtggctgaatgctaaaaacagttactagttttgttatctaccaagacctcgttaagcatagttacaagttttgtactattagatccagacctgagttatgttttctctttggaaaatctctgaatcctaatattcatgtagtccagagcaaacagtcgtgtatggatcttatcagcctttgcttctttatttttataggaactgagagtgtggaaggaaaagaggtgacaagcgagcaaatgatatccgcatctgacacttcactgcctcttgtgacagttcctgctccatcgagcaaagagaatggagtcatgtgggcaacttctcctgatcgcctggaacttcccccaagaccatacaatcacaattcaaactgctcagattctccttgcgtatctgaaaccagctcagacattttcagcaaacgagaagtaatacagaaactaaggcagcagctgaagagacgggatgacatgatacaggaaatgcaagaacagattctagagctgcaaaactcgtataacgcacagacggcacactcaagccatctccaggcacagctagacacactgaacagagatctgtttgaatcagaaagagaagttcaaagactgagaaaggcaattgctgatcacagcgtgggatgtggcgcggacagcaatggcaagacatctccggttggaccttggaatggcgggtttatggacagcgaaagcaattatgagtcacaagaaaagagcctaagggatggagaaagagtagagatgttgagaaaggaagtgagtgagcttaaagaagtgatagatgggaaagagtatctacttagaagctataaggagcagaagattgagctttcgcagaaggtaaaagagttgcagcagagactggactcacagctccaaaacttattgtaggtggaaaggttaggcattgtgcatacttgcgtctcttattttttttttcggttctttttcctttttcgagaaaatgaatcttagtatgtactaagaacggtggagatcaagattttcaggttctttctggctttctgctttcgtttttgaatgtcttgattctgttttttctttcaacatttggtgtaaaggtaaatagatagttgttgaagaatttaccgcgggaatagctctctactttttttttttttttattctccgtaattggtaactaacccgataattacaaacgccacgtataaggatgtgttcactagaagaattagccaattttaacacaaatgataaatagtataaacaaattttaaatttataaatagacgcaacatacattattatttttaagatacagttaaaataaaattgttagcaattatgcttattctgaaattttgggtttgaatataaataagaaatagagttttatcctaataagatttatataaataaacatataaagtcaaagtcatactttatcctctcagaggccgtctctcgggttttgctggtcttccttgctcctctcgcttttgaatggagatgtgagctttcttcattcaaagagcaaaactatctaattccatggcgttctccctcctctctccaattcctacctctgcctctctttttttcactctctccgccattaccgcttctaataatgcttcctcctcctctctctcccgtctttactctttatatcaccccaaaggaaccttacgaaccagaaccgcgacctcgtttttcggagcttctgggaacttgaggattgtttccatggcggagaataggcaattggtttgtaggattggtggcggagccggtgctgaattggatgatatg

SEQ ID NO: 4690 - DNA, 3000 bp, Unknown
  misc_feature (1)..( 3000): cDNA_ID_2156909_gDNA_ID_1620721_Annot_ID_165816 3000 nt of promoter + ATG
ttctcaagtttccctctcaacatctcaatttcagacttcagtttagacacaacctcatcatcttcattacttttcttttgttcatctgaaccaaccaatgcttttaaacggcttaactcagaagaaagaatctccgccttctcagcctgattttcagcaatcttagtcgcttcctcggcatgactgagagccttatttttagcatcagcagtcatagccaattcttgtttaatcctgtgaagctcttctgtggtagagagaagagctgagatgtccaaagcatgctggcttctaatagactcaacttctttcttccaagaaacttcctttttgtgaactgcttcaattcccgcctgttctagttcaaccgctctgaatttctcaatctcagaactcttctctgcgtgatgctgagctgccaatgcctctctcagtttctcattggcttctttagtcagtttctcagattctttaagatcatcaagagctttagctttatctttcttgagcctttctatttgctcattagctttccttaaatcctcttgagtttgttgaaccagtagcccagttcccttccctaaccgtgattgcgatttctgaaatgccatacaaatgatgatcaagaaatagtctttcaaagttgaaaatcaaaacacgtgaagcatcaagttattggatggagatggttttacttgcctcaggaggagtaggaactcttgcagtccgacgatcagaaacaggcttggagttaacagtttgcggtgaacggtctattgaaagacgagtgctctgcaccggagatggcgaattgccatcggatttagtcactgttggtttactcactcttggtgttggtggtgacggtttgctacgaggagtctccattaaaccagttctacatcatcagaaagataaaccacaatgtcacaatctcaccatttaacaataaagaaaacaaaacagaccatccatcatctccattcttcttagaatctttggattcatgattaagtaagctaggaacaggatcccatctcagtctagagatctatcaaattatcaataattaagatgaataaacatttaggtacacttcaactgtatccaaaaaatcattgttacatagtacatggactattggagaattccgttaaaagtgttgggagtctcacaaaacggaagatagagactttaaagacaaataagtctacaagtgactacagaagaagcttctgcaagatctaaaccaatttgtggaaccagaagcagggaaaatcagattaaaagtaacaaaattaatgcaaccaaaacaaaaaacagatgactgaataattccagaagaaaaaacaagggaaggagaaagtgacccacataaaaatccaacaaaacataactacatttccgacaaagaaaacagaagacagagatttcaaattgtcttctgagttaaaaactaaagtttggttaattatcctcacttggttctggacgccattgttgccgaagaagagcgtcctcaaaagaaaaaagaaaaagcgaattgttggctgctaagattcaggcattgatatgggagagactaaacagagactctacagatcgattctgtttctcttcttcttcagtgggtaggattgcttctccacaaagtcttcaacttttttaacacaacaaattcttttcatatataaatgcaaaaaaacaaaaagaaacaaaagaaagtgaaaaaataattgggtaatggggttatggtgtttcccagagtggttaccctcgttctctctctctctctcgtctttttctttctctttcccggtttattttttcaattatatttagtaaaatgataaaagtagaagaatacgtgggaagtgaaactacgaaaatggccatggcttaaagtgtttttgcattgcctgcatcaaagggaatgaatatgaatggacgttgctcattatgtggatagacaagtaactctcgtaatcttttttttgttaaaaatctttagatccatttgattttgggtcatgtggactgcatgtgccttttcaatcatttatttattttccaataattcaaccatacaactcttatagtattctgaaatcataatctgttttttttccctattgaaatcgttgaaactatattaaaattaagatttactagtatgttacatgttgctattttatgcatatgatatggatgcaatttcggctgtacacgtaaatataataaaataaaactggtggattacttcgtataccacattagtgatagaagaaacaccataatttattcatcttagtaaaaataatgacaattattttcaacttagtgttaaagtgttcaaaatgtaatcatatgaagggaagggattatatactttaatcatgggttttgtaaaggcctgggcgttttaaccgaaccgaaccgaaccgacccgacccaaccgaattcaaaccgacccaaaccaaacccaatctaagactcaaacaattcggttgtattttatctcaacccaaatgggtcggttcggtttggttttgaaccaaaccgaaccgacaatccaatgtctttatatacttaattaattaattctataaataatattacaaataactctaaatatttatttatctctaactaaaactctaaccctaaaaagtaaaaacctaaggtttacttctaacttcgtttcatttgttcttccgtcgtctctctctactctttacagccacggtatgatttttaactactctctagcaatacaattacgctcatctcaattttaattaaatattatgagtatatgatgattttttcaatctgtacgtacaccgcaaagtcatggaaaagaaaaatctgtgtttgcgttgtcttgtttcttctatttacttagattttttaatttttaagaataggtttcatgtaggttgggtgattttgtttgtttacaatatatataatatatcttagcattcataccaataatca

SEQ ID NO: 4691 - DNA, 3000 bp, Unknown
  misc_feature (1)..( 3000): cDNA_ID_1034215_gDNA_ID_1620721_Annot_ID_165813 3000 nt of promoter + ATG
agcaagcactgctcagtctcgaagatgagttctcaaagacaagtcagtcaaggttaccttcagactcaagaatctgggctctctttttacgctcagcttcagcttgcatttccatagcagctcgcactccatgagggggcataatatcccctggaaaaacatgaattagaaataggaaaaaacagatatgtaactatcaccggaaaagaaaaaacacgaacaacttacttatctcataacgaaggcactgaagaccccagtcttttgcagcaacattgatggcttcctgcaagaatatatatacatctcaaaaatccatcatatattttcttcttcaatggatatacttcctctaaccatcatgtctccttatgatttgaaaaagagacgcaaataagttcggatatccaacaaatacaacatgactaaatcccccagctgaatctaaattccatatacccaacttgtggtatacaaacacactgccagatgtgactaatttttccaactaaacagctcaagccgcaatgctcagtagggagtaacaccaacagcaatattcaagctaacgtgacttgactttgaaattgatcaacttagcggattctaaattctttgaaatgcacaggagcttaagtacggtgagtcctaacacttcaaaacagagataaagaaggctggagaacaaaccactatcttctcgttgagagtgtctcgttcctcaaaggtcttatcaagagtgatcttaccaagctcactacgcattgtggtctgagccagctgtacaacagcatagataggactctcaacgccataagaagctaacttaggatccacaatctgcaaaaaaaaattcccagatcaacaagaagaaatcagtaaagaatcacaaaagtaagaactcaaaacaaaaaaaaaaaaacaagaggaaaatggattggtgaaagaaaagaagatgaccttaacgtagagaacaccatcgatgtggatactaacgttgtctttagtaatcgcagtctgattcggaatcgggatagcttcttccttgagagaatgaacataagcaatacgatccacgaacggaatgaggaaatgaatccccgacggcaacgtcgtagcgtatttaccgaatcgctcaatcacaaacgccttcctctccggaactatccggattccccaattcgtcggcggcgtcaattgaaaactacaacgaacatccataaatcaatcctaaggttctctactctaatctaaaaccaaatgcttcaaaaacgaaatcgtaaggtgagaaacataaatgattcaaaaatcaatcctaaggttctctactctactctaatctaaaaccaaatcgtcaattgaaaactacaacgaacatccataaatcaatcctaaggttctctactctaatctaaaaccaaatgcttcaaaaacgaaatcgtaaggtgaaaaacctgttggaaggatagccggcggaagtgaactggcgaacggttgaagcggcggcggagaaaatcggaggtggagaggtaacggcagattgacggaggtacgaaacggacctcaaggcggagtaaccgacggagcttttacgaacgaggtggttcatcttcgtgggagaatcagaaaaatgatatgtgaagaaggaaaaaccccaaaacaaaacctcttataatgcgtagtcaatattcaggtactgtttcttcgccggatcacgaagatttcacgcaatatgcgtggagaggaggcaaatattttattgggctttagtggatagtttggtacctgctgttattattgggcttatctctagcccattcagacgcctgaaatatccatctgttattaatttattattcattgttttggttgttattttaaagagttttttttagttgaatccaaaattcattgtgaatcgagaaattgcaagaaaataatggctccgattggtaaccacttttgaggaaaacaatgaataggaaagtcgtgttcctttttgttcctcggtattttttaccatttgcaaggaatttttgatccattttcagacaggtggatcctacatttttcctcatcattcctcaaaaaaaaagaatgatagaacaaaattgttcctccccaaaattcctattgttcatttctttggtcaccaatcggagccaatataaaaaatttgggtaatggtttcttttagtttctaaaaatcatgtaatgatgtgagtgaattataatgaatatttatattgtaaggaataaaatacatattttatttcaagaaaataaacttatatcatgaaattttgatagttgtagatagtcattaattcattattatacgacgttttggatattgaaaaatttagacattacaaaagccatgaaggggtgttaaactttactataatggaaaaaagcggtttaaaattcagaatgcatggaaaaaacaagtctaatgggtttcacatggtgaagaactgtgtgtgagtcatcaaagatccggcgccgttcccttttagatataccgacgtcaagaaataaaatggcaacaattaaaagcttcgtaatgacgaagcgcatttcacctttcaaaagtgtcttctctttcttttgtctaatcttttctaagaaaataatttctatcttttgcttagatttcaaaagattcaatccaagttttcttttggtgggataaagtaaaagatgaacatgtaacatgggatccaaagtctaaagaaggttatattttgtgaactatatctaacaaagagaatagtggtgacacactttacactaaatccaagtcactagatcctaaaaagcttataacatgacgacttcaacaacatgcacctcatctcttctgcatgaaacccaatcactgtcgtcaatatatatatgcacacacctaagttcgtgtatctctactatatataaaggtaagtgtgcatagtttgagttagaaattggaattcgaccaaaatacatagttaaagtata

SEQ ID NO: 4692 - DNA, 3000 bp, Unknown; identical to SEQ ID NO: 3818
  misc_feature (1)..( 3000): cDNA_ID_1825089_gDNA_ID_1620721_Annot_ID_165807 3000 nt of promoter + ATG

SEQ ID NO: 4693 - DNA, 3000 bp, Unknown; identical to SEQ ID NO: 3819
  misc_feature (1)..( 3000): cDNA_ID_1380010_gDNA_ID_1620721_Annot_ID_165806 3000 nt of promoter + ATG

SEQ ID NO: 4694 - DNA, 3000 bp, Unknown; identical to SEQ ID NO: 3820
  misc_feature (1)..( 3000): cDNA_ID_2107732_gDNA_ID_1620721_Annot_ID_165804 3000 nt of promoter + ATG

SEQ ID NO: 4695 - DNA, 3000 bp, Unknown; identical to SEQ ID NO: 4683
  misc_feature (1)..( 3000): cDNA_ID_3409406_gDNA_ID_1620721_Annot_ID_49205 3000 nt of promoter + ATG

SEQ ID NO: 4696 - DNA, 3000 bp, Unknown
  misc_feature (1)..( 3000): cDNA_ID_2993806_gDNA_ID_1620721_Annot_ID_49208 3000 nt of promoter + ATG
tcatccataaccggcgtgaactctgttgctatctctcccatcgttttagaagagtgagtgttccgttctttgggggatgaatctttttttatatgtaagatcttgattgatactctatcgcaattattgaattttgatgtttatatccattaaggaagtctgtctttttccactaatatttatactattttctcactcgcatgttattactgaaataataaaaatatacatggcttgtaatgtttgaattttttgtagaagaaagagaataaatcagagtggaaaacgacaagtgatggccgatgggtcaagtgtgtaggagggaaaaaacagctaagacgatacatagttttgtaatttcaaaattagacaaaggaagccaacaaaaaaagagtcagattattattaatagattaatatacagaagcataagatatatatgaaacgtcgaaaaagaaaacaattggttttacttgttttcactcgagagtataaaaataataatgcatctggttgtaatgggtaacggagttcacggcacaaatgtggtgtatattaaatattattcaatatttaaaggtgttaaattcgaatactgatataacaacggttcaatcacattccattagattatttatgtgttctaacttctagtcaacgaaaccaatatgattatgaatttgtcatcaatggtgaagaatctaaatagactgaaataaatattttggtgatcattgccattccagctgtacacaaatttattgtcaccgaaaaccttgtatgtatctaactagaccgttaatgatatgtaattagcaatatatacattgaataattgattttagcaagtgtcaatgaaacttttattctaacggtaataacaagcaataaccttatggtcaactttggttagagatcacatcaaaactgtataaatacataagtcggatattaattcaaaacaaagacttttgggtcagtatgagtatttcgtcgtcttctaatttataaatggatcggaacacccaaattattatcgggaaaaacgtacggcaacttgtttatagaattcaagttgctactaaatcatgcgccacttgatatatttgcagtcgcaggtccactcttcctagtttagtaccccatctaggcacatatatcgaaatagtttaataaattgaatcaaatactgaattgttactgatatatatactctgtatgtttctcgaaaatacttaaatttggtgtcatggagttgataaatttctgtaagaaattgaacgtctacagttcttatggtttagggtttctaagatggatccaaaaaaatgcaggaaccgaactatatacggcttttgagaacttaggttatcctttagacgtgactttcaaataagtatgtcgatgatttgataagacatgtcgttttatgatatgtagggacagggaaataaaagcacaatgtgaattaagactttagattcaaaaagatgcttcatgcttgtagaaatgatgacgattgcgacttgggacaatggacaagtgctatgtcattacatatactgatacacctaacctaatgaccaaataaggactctttacacgggttaactaaacaaatatatcccaactaacatttccaacaaaataagccgataaatgtaacatgtaccgaacaaaacattattaatcatcgtaacttttttttaggtttgaattaatcattataatttaaaaccctaaaaccaacttataagaaccataattgatcagaatccagtttaagtaaataacatagaaaattttgagtcagataaaaaagaggaaattgtatggttagcaacatttacattttacagaatatggatatggtaaatgagaagtgtgtggatcacaagaagtgaatgtgctttttctgctttttaaaggatgaatatgaaaacgaggctaccctcgttattttatttaatgtgaccactgtttagctggaaatcacttggagacgactttaaagtaggctccaaaatctaaagctagacaccagacaaaagactttctatattgtttgtcttaagataattctaaaaatatcagcatcgttactttattgaatgaatacttataagaattgacagtgaaaatgaaactagtgttgaaaagagatgtttggtcattaaaatcaaacaccgaccttaaactaaaaaagaatatcacttcatcggctcctccttttttcacaacttatatacaatatacacacacacaaactgagaattagaatgtacatgtgaatgggctggtgcagtaaatgcattattacgtgttaatgtacatgtgaatgggctggtagcagtaaacgcataatctcaaaaccaccggtcaccgatgcgtgtgcaagtctcagtcagaacgtgattggaccaagtctcggtgtataaagacacacagtccatcaccgctaaataatgaccacacggatgggcccatcaatatatcaaatttgtgggtcttttaatcttgtttcacaagtgaattattcaaatgggcctttatttatacaccataaatggcccattagtccaacaacatacaataatgcaagtggtcggggtcaacgcactagaaattccacaagaactaaacgataagaacaaataatcttcatagtctctcatccaatcttacaaactttctgatttcctttctacattcatcgaccaatggcagcaaacaaaactcttcctacgtatttttgcagaaactgcgagaatccactagctctcggtgaagatctcatctccaaaaaatttgtggtaacaaaaaaaaaaaactaaagaatgttatagctttaccaaaaaaaatcactttttcatttcttatcggatgattttctagagatgatcaagtctcttcataatctccattggttataaaatgcaaaatgtttttgaatatggattatagggagcttcagggccagcgtttatgttttcacacgcg

SEQ ID NO: 4697 - DNA, 3000 bp, Unknown
  misc_feature (1)..( 3000): cDNA_ID_3073913_gDNA_ID_1620721_Annot_ID_49209 3000 nt of promoter + ATG
tgtacatgtgaatgggctggtgcagtaaatgcattattacgtgttaatgtacatgtgaatgggctggtagcagtaaacgcataatctcaaaaccaccggtcaccgatgcgtgtgcaagtctcagtcagaacgtgattggaccaagtctcggtgtataaagacacacagtccatcaccgctaaataatgaccacacggatgggcccatcaatatatcaaatttgtgggtcttttaatcttgtttcacaagtgaattattcaaatgggcctttatttatacaccataaatggcccattagtccaacaacatacaataatgcaagtggtcggggtcaacgcactagaaattccacaagaactaaacgataagaacaaataatcttcatagtctctcatccaatcttacaaactttctgatttcctttctacattcatcgaccaatggcagcaaacaaaactcttcctacgtatttttgcagaaactgcgagaatccactagctctcggtgaagatctcatctccaaaaaatttgtggtaacaaaaaaaaaaaactaaagaatgttatagctttaccaaaaaaaatcactttttcatttcttatcggatgattttctagagatgatcaagtctcttcataatctccattggttataaaatgcaaaatgtttttgaatatggattatagggagcttcagggccagcgtttatgttttcacacgcgatgaacgtggtggttggaccgaagattgggaggaaactgataaccggatcgtatgtagtggcagatgtgatgtgcagtaagtgtggtgagacgttgggttggaaatatgttgagacattcgatcttaaacagaggtataaagaaggcatgtttgtcatcgagaagctcaagttgaccaaaagatattgaaacctagtcaagaagaataatactcttggagggttaagctaataaataaatgaaggaaacttgaggattgtatatgtatatataacctttgttgtataaatgtcatcactatattggttgttctctataaagggatttgaaaacaaagtaaaaaagatttaatctaagataagattttttttttcttaaactatatagaaatttacagtaagaaattaaataattatgaaaaagtataagaaaatatgaagagattccacatttccattattcatcactgctgatacgatttactttctcaatttaccagtcataaagcaaaaacccagaaagaaagaagtcacaaggtagtcgctacacggcatatatgatcagagactaaagatcaaaactttcatccaactccaaccttattctcctctcaattttgtcttgcgtccttgttcgatctgttaaacccttgtaagatccctctgaaatttcctcagaaaaattcatttcaaagatcaaaatcgaatctttcgtctgatttttctcaatttcgttgaaccatatatcttactgcgtaatttcctctccggtaatatctcattttgtttcccttaccctaccaaatatatataatctgtggtctcttcttttgacccactcttatttgtttattattgaaattgaggtactatcgtggaatctctagtcttgcacgctaacacctgcccactgttcttatcctctatttttcagacattgacgtttgaagcttggtgaatttttggattctggtaaggtttagaaaccctgatttctggttttccatgtgggttctggatatattgatggatttttatgtttttggtgaaaaggtgagaacttggttggagcaattgatcacgccttgaaagtgtttgataaaatggctcaggcaattggtccaagactgtatagttgctgcaactgcagaaaccatgttggacttcacgatgatatcatctctaaggcttttcaggtgaatcaccttgatcatttcttttgttttgtttgtgtcccatatgattgatgtagaaaattaagtggagaatcgatgtaagactagctgcagctgagcttagaatctaagaaaacctgtgactttattgtctttcctgatcaacgatcgatgctactgatcatgattcagttttcctactaagttacatgttggtgttagagtcaaatcaaaacttgaaagttgatccttggaaatggaaacaaaacataagacacaaagtagcctttgactcaaattgttacaaatcacaaaagtagtcattctttgagtatgcttgtggtaggttgtggactcaattcaaaatcttatgttagacagcccggcttttgtgtttcttgattgtgaataccaaattcttaatcacggttcttcattaccacttaccagggaagaactgggcgagccttcctgttctcccacgcaatgaacattgtggtaggacctaaagaagaccggaatcttctaactggtctacacaccgtggctgatatatcttgtgttgactgtaacgaaccattgggttggaaatacgagcgagcttatgagacctcacagaagtacaaggagggcaagttcatattcgaaaaggctaagattgtcaaggaggattggtagagctgaggaacatgatgaattcattattggattggctcaaaaatgtatatagataaaatttggctttgtgatttcacaagtcatcatcagccatttttccagttcttcattgtctctctctgtatgttaattatgtcgtctcttgtgttcaaactatggatttgttcgaacaaggtttctctgttaataaagatgttaatagcttctcttgtgtttcgcctcagaaccttcctttgtaagtgtaatatgaatctccatactttgtctttgagtagcttggaagataacttactagggaaaaagaaaggtctgccgtttaaaatttagactacgtgctgctttatgtttaccaaagctaagtggttgtcgttttggcgcaataaatgtgattaccagaggagagggagagagaaaacggagcgagagag

SEQ ID NO: 4698 - DNA, 3000 bp, Unknown
  misc_feature (1)..( 3000): cDNA_ID_1825205_gDNA_ID_1620723_Annot_ID_49235 3000 nt of promoter + ATG
cttcaggtagcgttcattgagttttatcagaagcttcgacatcttaaaaactacagcttcttgaacgcttccgctgtttccaagatcatgaagaagtatgataaggtacttaatttctgttgataattttgacaagcttttacagcatttactctagtttaatatatatgctctactctttagatagccaaaagaaatgctgcgaaactgtatatggagatggtcgataaatctttcctcagtagctccgaagaagtaagtatccttcttctatctaggaaaatcgaaacatgaaactttagtttgaagctttaaacatgtgcaggttcataagttgttgctaaaggttgaatctattttcattgaacatttctccaattcaaatcggagggaagggatgagccatttaagaccaaaaataaataaagaacgtcatcttataacgttttccaccggtatatatatcaacactacaataaccaatcttttgacatgtattttcaagagtaattcatcattttgttctgttttttgttttgttttaggcttctttttcggctgtggtatttctctcattgtagctctgggtttgatcatccatgctcgtaatatcatgggtacaccgggacaaagaacttatatggaaacaatgttccctctttacaggtcagtaaaacgaccaaatataaaccaaacacactatctctgtctctgtgtaatattcttgagatatatacatttcatttgcaggttttttgggtttgtagttttgcacatggacgtgtacgctgctaatatctacttctggaggcgataccgtgtgaattactccttcatctttggattcaaacaaggcactgaacttggttatagacatgttctacttctcagctttggtcttggtacactttctttatgtgctgtcttattaaaccttgacatggaaatggatgctcaaacaaaagattacagattagtcaccgaacttatccccctctttcttctcgtagtaagttccttctatctctctctatttctcagtacattttacacaactcaatctttgtttttagtaagactcgtttctctgcatattgcagttagtgattatcattgttctctgcccctttaacattttgtatcggtcaagccgattcttcttcctctcggttctgttccgctgcattgctgcaccattttacgcggtaccaacaacatatcctcctctccattcatctgaagcataaacagaaatgttaagaagaatgtcttccatttttgcaggtgcatcttccggactttttcttgggagatcaactaacaagccaggttcgagaaaatctatactcgataagatagcttcatacttattttgatcgatgatttctgatttaaacaatcaatgctaggttcaagcactgaggagtctagagttctacatatgctactatggttttggagatttcagatatagacgacgaaacacctgcacatcaaatattggattcagaacattctacttcatcgtcgccgttataccttactggttacggtttcttcagtgcatccgaagaatggtggaagacagagatctgagtcatggctacaatggcatcaaataccttttgaccatcgttgctgcttctcttagaacagcttatactctaaaccgaggaagcaactggaatatcacagcttgggttttctcaggagttgcaacgttttacggaacttactgggacattgttcttgactggggattgcttcaaagaggatgtaagaatagtttcttgagagacaagcttcttgttcctcacaaaaccgtgtactacgctgcaatggtgagagcaaacagaaaacagcaataacctctgtttttgttttttctttatacatatatggtgaagattgttgcttcatgtacttggcaggtcctgaatgttttgttgaggttagtgtggttgcaaacagttttggatctgaaattctctttcttgcatagagaaactatggtcgcgcttatggcttgccttgagatcatacgcagaggtatctggaacttctttaggtaagctccgagactgagaagatggtgttttcatgcatgaatctacacaaaactaatgaaatgtaattgttgattaggctggagaatgagcatttgaacaacgttgggagatacagggcgttcaaaactgtcccgttaccgttcaactacgaagaagatggagatcatcataacaattagcttaacaagaaaatacttggtttcacaaaattacctaaacaacaactaaacttttcaccgctgttccggtatacaactgtaacgatcgagctttgcctctccgctgtattcttcagagagccaactcgaggctggctcactctcagggtcagacctaagcgatggtagaattatggagaaatcaagtggaaatctcttcgttccttggtaacaagagatacaaacacttaactaacttggttacatacaacaaaaagacattactttgtacacttacttcagattttgacaagaaagatagaaactcacgtcattgtacagtgtgtttaggtctcaatattgtattgttttgttgaaagataggtctcatattgttttatttaaaacaaaatttctgaatttgcgtttacatgagagaaaattatagatttttttttcaaattaactctagtaaaataatgaacacaaattaaatgttatcaaatatgaagagtatcttgacaataccatttactttacgatttatgacagaccaatatatgggcttcattggggcttcattggggcttcattgaatttcaaagtctgttaaggcccaaactgagagcgcggttgcacaaattgtcgaaatttctcgaaaccgctttaatctcgatataaagctcgtctgctaaaaaccttcgattagggttttagtctgtagaaacaaagttgccgcttcgattccaaggagtaacctagctgagaaaatg

SEQ ID NO: 4699 - DNA, 3000 bp, Unknown
  misc_feature (1)..( 3000): cDNA_ID_1825201_gDNA_ID_1620723_Annot_ID_49236 3000 nt of promoter + ATG
atttcgaattttgtaacattgctaatatttcgaattgtttgtttgtcacttcgcgttatatgacacaacgattgttgttttcacataaaaaaaaaaaccctactagtcatcatctaatgtaacactccagcatatgacaaaatcgccgaaatattatttattattatataggtaaaatagaattacaatatgctcttctatagtatatagtaatctaaaaagttgcatcataaaataaattattagaaaaagatcgaaaataggtgatatatcatatcatcattacaataggtgtgagtcgtccgtcgcctctgactggtccttcctttcgggcacgatagcaggcataagccactatcagtgcgatgatgattaatacaccgactgaaattccagaaattgcgataaacttcattggatcagtccccatgtttgttttaccacacgcacccagaaaaaagtttatttctactgtttttattttttgtcatgtcttcttgtgacacagtatgtttacatttatttacaattatttacatttctgttaataaagtccgtgaaatttgtaagttttacattttattatttaagaaaattaacaaggatgaactggaaaattacactttaaagaatattaattaggaagaaatagaaattatacatttttatggtactttgttgatcttcataccatcaaactggaaattgtacattttaatagaaaattaactatgaaagaatagaaaatttacatacgtgagcatgtagtaatttaaggctatcacaaaaattcgacattttatttcagaatattctaaaattttgatatttaggtagcacattatcaaatattgtaaaataaaataatggccaggcttatacgatttgagatttgattcgtatccatgaatgccatactcgatgagtagttactgttgtgtgtgtattatagtttttgctagttaatgttgtttttactcctaccgcataaaatgaaataatgaatcatctatatatacatttttgcagccattttgtgaaataaatcttagagttgggacttatttactaggctgccattgagtattaattattgatttttttccagcaataaattgattaataaactaaaaatattccaaatatattcagcaactatttaaaacaaaaaatgtttgacaaacaaaaatataattgcaatcccttaaaatgagcaaaacccacctaaatatattctttatctatccaataaatcttttttctccaaaatttgaactagattttggcaactattttaaacaaatatttgtttgacaaaccaaaatacaattgcaatcccgtaaaatatttcttttaattatatatttaaattagcggtgtaccgcggtttttttttacggggcggatttggcgagacgggtttggtaagacgttatttaataacaattgtaaactataaaataaaaataaatagatttaatttgcaaacttttatatatactaatttaaaaaataagttgtccgcgggttaaaatctagtcatggttattttaattaggtgaaatcagccttggataattttaaaaactaaaaccaattgtttgtaagtaaagaattaataaattagtgtaatttctaagttttcaaattattatataaataaaataaataaatatgtatttataagcacaaaaaaaggaaatggtgcgtattcctggtacaatagttacttgtcagatccccatttaaaacatctcaaattggttgaaaaaaagtcaccaaagaaaaactagattagcatcaaatgtttttaaaacttttaattcttccataactctttctaagaaataatttaaagagttaaatcaaataattcaaaagtcggttgctatttattagcgttaagtatacgtacttgttttcttatttttctacgtacttgttttctttatggacaaccgatatgtagtttgtaaaatttgtttgctaaaaatgaaaaaaattggtccgtagaatatacaatgcccaaatgactcgcttctgagctgatgcaataccagttgatgatacattgtggtcactacacagtgtagaagataccaatttgttttgtcaacgaaatgtagaagatacgggttttgcattgaataaaagacattacacattaggtggcgacaaaacagagaagctcaaaagataaaagtgtagaagataccagttttttttgtcaaccgatgtagaagatacgatttacgcgtatagagccaccaccaaggcattgaccaaaacctaatcatctcaagtgggaacgtacgttgatatatgtcatataataatttaataagcacattgacatgacatgtattgattgactacagatttaataagcacattgacatttcacatgtcacatgcagggttgattataaaaatatctaggatcctaatccataccgaaaacaggccataaattttattgaactataatcaaacttctagttatatcaataatttattggcaatggaaaattactcgatagatgtaacatgcgttttgcacaaaaacgatgtaacatgcgttgctaacgttacttttgctttaatttcatagtttttaaattttaatttacaacttataaaccttaattaagaatgatatataacaaaacgatatcttataacaatttcatatttttgttagtaattttttaagagttttgacttttgattgtctgtttttttttttgggtattttttttttattgtttaaaattgtggacgaaaacgaattcatatttttgttggctaagttaagactcaagacctggtctacctctctagaaaaactttcagcatcactcaaaacccaaaagtcaaaaagtcacattcttctttccaacttttgttccaaagacagagagaggccaagattcataatttgagattctgactgtagacttcgagcaagaaaaaaaaagatctgaaggttgaagaatcatg

SEQ ID NO: 4700 - DNA, 3000 bp, Unknown
  misc_feature (1)..( 3000): cDNA_ID_1825197_gDNA_ID_1620723_Annot_ID_49237 3000 nt of promoter + ATG
tacgcgtaaatcgtatcttctacatcggttgacaaaaaaaactggtatcttctacacttttatcttttgagcttctctgttttgtcgccacctaatgtgtaatgtcttttattcaatgcaaaacccgtatcttctacatttcgttgacaaaacaaattggtatcttctacactgtgtagtgaccacaatgtatcatcaactggtattgcatcagctcagaagcgagtcatttgggcattgtatattctacggaccaatttttttcatttttagcaaacaaattttacaaactacatatcggttgtccataaagaaaacaagtacgtagaaaaataagaaaacaagtacgtatacttaacgctaataaatagcaaccgacttttgaattatttgatttaactctttaaattatttcttagaaagagttatggaagaattaaaagttttaaaaacatttgatgctaatctagtttttctttggtgactttttttcaaccaatttgagatgttttaaatggggatctgacaagtaactattgtaccaggaatacgcaccatttcctttttttgtgcttataaatacatatttatttattttatttatataataatttgaaaacttagaaattacactaatttattaattctttacttacaaacaattggttttagtttttaaaattatccaaggctgatttcacctaattaaaataaccatgactagattttaacccgcggacaacttattttttaaattagtatatataaaagtttgcaaattaaatctatttatttttattttatagtttacaattgttattaaataacgtcttaccaaacccgtctcgccaaatccgccccgtaaaaaaaaaccgcggtacaccgctaatttaaatatataattaaaagaaatattttacgggattgcaattgtattttggtttgtcaaacaaatatttgtttaaaatagttgccaaaatctagttcaaattttggagaaaaaagatttattggatagataaagaatatatttaggtgggttttgctcattttaagggattgcaattatatttttgtttgtcaaacattttttgttttaaatagttgctgaatatatttggaatatttttagtttattaatcaatttattgctggaaaaaaatcaataattaatactcaatggcagcctagtaaataagtcccaactctaagatttatttcacaaaatggctgcaaaaatgtatatatagatgattcattatttcattttatgcggtaggagtaaaaacaacattaactagcaaaaactataatacacacacaacagtaactactcatcgagtatggcattcatggatacgaatcaaatctcaaatcgtataagcctggccattattttattttacaatatttgataatgtgctacctaaatatcaaaattttagaatattctgaaataaaatgtcgaatttttgtgatagccttaaattactacatgctcacgtatgtaaattttctattctttcatagttaattttctattaaaatgtacaatttccagtttgatggtatgaagatcaacaaagtaccataaaaatgtataatttctatttcttcctaattaatattctttaaagtgtaattttccagttcatccttgttaattttcttaaataataaaatgtaaaacttacaaatttcacggactttattaacagaaatgtaaataattgtaaataaatgtaaacatactgtgtcacaagaagacatgacaaaaaataaaaacagtagaaataaacttttttctgggtgcgtgtggtaaaacaaacatggggactgatccaatgaagtttatcgcaatttctggaatttcagtcggtgtattaatcatcatcgcactgatagtggcttatgcctgctatcgtgcccgaaaggaaggaccagtcagaggcgacggacgactcacacctattgtaatgatgatatgatatatcacctattttcgatctttttctaataatttattttatgatgcaactttttagattactatatactatagaagagcatattgtaattctattttacctatataataataaataatatttcggcgattttgtcatatgctggagtgttacattagatgatgactagtagggtttttttttttatgtgaaaacaacaatcgttgtgtcatataacgcgaagtgacaaacaaacaattcgaaatattagcaatgttacaaaattcgaaatatacgcaatgttatggtggtgttgaccgaagggtagtttcgtaactttacatcatcgcgtggtcgtatacgcgccgatgagatcacagacggcattaatgggctccggaagaagaaacaaatgattaatttaaggaataaattaccactaaattcgtttgattatttccggaaaacaattaactaataaaactataactaacctttgtttaattttttgatttcgcgtcttcactgttgtggatttcttctgaatcttctgagctcgcttcacctacaagaagacaacaaggatcattttctctaggttcgtagattctctttcttcttcttcttcgtttggatctgcttagtgaagaagataatcttctgaaaaattgtttgttttttttctgaaaatctgaatacgtaatgatttgagctgaatctgagttagattcacatttatattctggatttgtgctatttgatgatttattagatcgatcatcttgttttcttctttcgcctttaagtatgtttgctcatagtgttgctcttccagattccagatcctgaagaaggtgaaatcttatctgtgatccagtggaagattgaatcaagtaacagattcacttagttcacttgcgtattgcatgcccctgaagataacattttgaataatgttgatattgaattatcacctataagctctggttcttgttgcttgtattggttctgggtatctactagtgaagaaacc

SEQ ID NO: 4701 - DNA, 3000 bp, Unknown
  misc_feature (1)..( 3000): cDNA_ID_1825183_gDNA_ID_1620723_Annot_ID_49242 3000 nt of promoter + ATG
agatgtacgtaatctgtcgagttaggatataattaagagaatggtggaatttaattcgtacacatagaattaatggtataattaatttactattgttggtgtgagtagcatcaaatagatgatagaatagtattttgaacaaaaattctgatagatagtataagccttcaaactaaaattgtttccggacgaatacacgaaaagaaaaatgaaataatattaactttctaaaaactcatcgattgatgggtatacacaaaatggttaaaaagaaaaaaaaatgattaacagattttgagattatataatactgaaaatttgagtcggaaattgatttgcaatatgcaaaagacaagaaacatgaggcaaaggaaaaaccatttttcagagaaatctaaacatgtgaaattcgtttttctaaaagtaacaatttgcgaatttatcagcgacggatattttttaaaaataatatgtaatgtttctgttagaaagtacttttggttgacaaaaagaactgttacaaacttactttgttgtgtacgcactgttacaaaattatcaaatttgaatcttgaaaatggttaattagggttgtgtgatacgcactccagatctgtaatcacaaattagctaatgactataaagtcgatgcaaaaagtaaaacatagggaatgtatattatatgccgcttagttgaaaaccgctacatatctatgatcgatttaaatatttgaactctggaactgttgacttttctcttagacttaaattttggtaaacaatttcagcaactaaaatgagtgagaaaacttggttgttgaaaaaaaaagagagagtgagaaaactttggtttagttttctacagtgaccagctttggggttttgggcggaattaattagccaagtagggtctagaaaatgtgatcttttaacacatggccaaagtcgtttatatttggtgattctgtttaaaactcacaatttgtttttttcttttcttaaattttgaaatcatatctatttagaactaaagttcatcataaattttgatgaccctaataaataatatagcgtcaatatagagaacttagctggagatatattgtaaatatgttgttgtaacgatctattacgaataactattgaaatacaatacaattatttaaaagagcaatatataattgtataatttaccacatcattaggatacttcgccccaaacacatattttaattcgtttgaacgaacttaaataaaaaaaataaaaaaaatcattggttaaaactttttattgcagaaataattggttgttactgtagaaatagcggcttctattcgcaaccgtcagatatacaagtctaaagagatgtctttagtttagtcgtgactcctacaaggcatgtgtgtacgatcgcctgatagggaataatttaactttgcataatccatattttccgacaatcatcgagttgacatgattcgacatttggtcatacacgtaaatataacaacgtgcttctaattttaattttataagattaaaactatcagatagtactttttgggatataggaaaaatgcatctcatgtaataaaactatagcagaaacgtgtcttaaaaataatttacataataaatagttaacttgttttatcatgactataatatgcaaacattattgcggttgtacgcatgtaataatattactgtatataaactgttatataccagctcttataactttaaaactctatccattttcttaacgtaatgtatagtataagtgaatgaaatttttctctttttacaaatttatctggtttataaaagttgctaatatcaggcataatatggcttatggcgtatattgagcatatcagcatacaacacacatccctaaagaaaagactttggtcaaacatccaacgagattatcttttatagtatagtggctcttaatatgcgtatatacatatatataaaaaacaagggattcgtgacagagaagaaggatttgctttgccttgaaaggataacctttaccaaaaggattattttttaataatggaaactgtggagggatgtcatggtttttatattcaaagcatattatattgaaatagtatcttcttaagaacagtatatctttagcattatatatctgatacgcaatggatatggacgtttaataaacatgtgaaaagactagttgcagtgtgagcaggtgcaaataaaaagaaaggatcggagcccacatgcgaccatcgcaacatcatcaacggttgagatttgaggttttgttttcatgtatccgaatcttaagacatggttgcactttcacgtcgacatttgtcaaatagttatattctccagttcctcctagttgtatgagaatataattttgttttagagaaaatgtgcattatggtttttttttttttccaacagtttgcgttttagatactaattctgtatttcatggaaagagatggattcgcaatggtatttcacataaaggaaattttgtgttggatgatggtatgacaaaagctgtttggagggtataaattattaagttgacattaatttcaaaaatttataattatgtgttttaattctcttaattaaataaactgtagaggattttattttgttatgtatatatattgactataagttgtattctactagtttgttacaaatcaagcccgaggctcatcccataaatgaaataaaaaaaaactgataactatttcaattttatttaaaaaaaaaaaaagagtaattccgtaacctgcattatttggtcctcctactgtgtatctatttaatatttaaataatggtcctccctctcacctaaggagacatagagaaccatctggttctttaaggcaccatcattcaacaagtaaacaataaaggaaattaaattatcacaagacagaaccacaaaatcctttggagatctgacactggtaaagctcaaagtgtcaaact

SEQ ID NO: 4702 - DNA, 3000 bp, Unknown
  misc_feature (1)..( 3000): cDNA_ID_3073941_gDNA_ID_1620723_Annot_ID_165879 3000 nt of promoter + ATG
acaatttataaacatagacaaccatgattagtttcggaagtcaaaataaaaagcatgttaatcaattgtcttttatctcgtatccccaattttacttctcaaagtactaaaatagtctaaaaacaatcatacgtacgtaataagaaaataatttacttcctgctgtgtttaaacaaaacttctatgagatgtaaaaaaagaaaaagagtctacgatggatgatcaagcgtaattgctttgttacgtctaaaaggtgtttaacaaaactatagcgcagaaaataatcagtttaattaactaaacaaaaacatgttagtggattaagccaagaattagtccgatagaactataaaatctacaaaatatctcaaatctcaataatacgtatataatatctcaataatacctatataatatctcaactccaatcagaaagctaaataaaatatcagcataagttatattcgcttccaaaaaaagtctgcctcgttacctacctctcacactcaagtctctcacgttatttgagatatttaggagaagcaagacgacaacgagaagaaaaaagagtgggtatggtcaagaaaaagacaaattatgattttagtggaaaatagaaagtaaagagtgaagtgacgcgacacgtggtacgagactccacagcgagccacgtaaggggggacaaagaagagaaggtatggacaatggtttccgcggtcgagccacgctttcagaattctgattggcactgggttatcttgtggaacccatctgaaagatatttttggttgtcgtacggatttgtttatttcgggtttgttgaattagtttgtttcggttttatacactattttaggaaacttttttttatattctttatagtgaactgggctgaatttttttggttgctagattcgagacgagccaatttatgtaatattttgtggctttctgttgctaaattgtaagatctgtaacttacatgagatagaataaaataatgtaatgcaggttttgtggcatatttacaaacatcatccacgtgtaatgatctgtccacatattttgccttgaaagcaactacaatatgacttttaatatcttttttgttaaatatttgacttttaacttatgtgaagcaaagaagtagaaaacgatttgttttgtattgaattattttccactcgtttctacaacaataaaataaaataaaatgaaggaaccattctaaaaaaaggaactagaatattttcaaactatagtacaaaaatggaaacgactatcgaatattagtaactccaaagcgacacgtcaccatctccttcgccgtcataattatgattccattgaacagacggcggcggtaaaagcatgccttcagccatattatccaacaaagtcggcatcccaaacattgtctcctcatccatataaaacgcaccttcgctctgttccggtgtataaatagcttccaccatcgtctcctccatgtccaggccatgattcgtggtcgtcgtatcacacgtctcatcttgaaaagccaacgccgcttcagcagccgctttttggatatccttggcgcatgttgactccgggattcgtagccgccaagccgagtcagcgaagttgagacatgctgatcggccacggagggctaatgcagcgacgtcgtgagcacgagctgccatctcagcggtttggaaagtcccgagccaaatcctggttttcttgtttggctctctcacttcagaaacccacttaccggagtttctttgacgaactcctctgtaaattgggtgacgagtctcacgaaacttcttacggcccgccggtttcttcggacaactcgtggccaacgtcggacaataatctccgccttgaggctcgtaatcggagccaaacatttcagaaaaagctgaaaatgagttcattgatcagagtactctgtttcaagaaactggataaggtttaagtagtacgtagttactagagttctcagtctttttggattaataaaagatagtatatctgtcttggtaaagctatttatatctctctctcttttttttcttttcaggtagattctttttcaagtgtgtagttagtataaaaagtgagagtgagaattggtgtttatattggccggaggagagataacggatatgtggggagcacacggagtttttgtctctgtgaatgacacgtgtatagtacatagcgaagcaatcccacgatgttccactcgctgtctgacgtgtgtcctttgacccttgtaaagagacttttgactcttcactcgttaacctttatgagttctttaaattctatcgagtgtgtgcctgtgtggttggctggctgctgttgttacaatcgtttttaaattcctatgaataaacaaattgtcattaattgtcacccgtctataacataatagacataaatatctctgtgaaatgatattttaaatactcatgtagtatttgtattggaagtagatgtcctaatatttaaccaaaaataatactacaatatagaaaagcttgattttttaaaaaaattaatcagatttggtaatggataattatcaatttcgatggacggttaaaaatgagtcataaatgcatatgatgaacaaaattattcagtttaaacaaactataaccaaaaacatgtaaatggaccaggacaggactaagcgaaggattagaccaatacaaaatagcaagttatcttgaatcccaataattcccacaaaatatctcaatctcaataatagctatattgtattgacaaaaaaaaggtataaaaaatcttcacaataagatatgcatgaaatatattcgctgacaaaaatatctctctcgttacctctcgctctcacgttattgacatttaggagaaaagaagacacaacaaagagggaaaaaaagagtggtaaggtgaagaaaacaacaaaattggctttagtggaaaatagaaagtaaagcttgagagtgacgt

SEQ ID NO: 4703 - DNA, 3000 bp, Unknown
  misc_feature (1)..( 3000): cDNA_ID_2990367_gDNA_ID_1620723_Annot_ID_165876 3000 nt of promoter + ATG
agtgagaaggaagtgcgctggctggagagaaaagagagaaaagagtttcgagtgagagagagggcgttgagattgtgatcaacttaatgtaatatgttcttttattacattttctttttgtcatatactcaaaccttttactattttgtctcataaatctaacacaccccaccatttgttaatgcatgatggtagaaaatattaaatataattaactacttttatgtgatcaaaattaggtttcagactcgtttcgcgatccgatctacaattacaactgcatgcttctaattgatctaaattctaaattttttatacatattaaaaaaacaactttttgttaaattctcaatcatcatttttgtgattaacaattttttataactctaaaccaataatatttgattatttattttatatgtataatgatgattgagaattttaattagcagtctatttagggttttcctaaagttacaatatgttgttacccttctagttaaattttccaaaataccatatttcataacttttcaaactgtttattaattcaaccgtaaaaagcactaaaatgttacatttgatcattcacccaaattaaattcaaaagtttttccgccaaaactacttggtgacttacgtgcttatatacggacgactattattatgttctatacttttttatactttgttgcacaaatatctactctcccaattcatattctagaaggatgtgctataagaatgggagaaattacacaagaagagcatctttaaatatcctctcacaatctttatgtctaatacacgggtgaacaattaacgacaatttctttattcaggaatataataatgaataacggttaccctacacctagtacactaaatccttaacagccacacattcatacgcaaagagtttataaaactcataaaggtataataataacgagtgaataagtcaaaaaaagtcttctctggacacatggcagatcttaatgagtgaatccttaaactactcattttacaattgcttcgctgtgtatagtttacgtggcattaccagagacacaaactccgtcttcgccttttcttttgcctctaaaatatcttccgccattataaaacagcatgctctcactccaacttttatttatctacaaacattaaatccacctgaactagaacagaaagagagagaaactattatttcagcaaaccataccaacaaaaaagacagagatcttttagttaccttatccagtttcttgaaacagagtactcttctgatcaatgaactcattttctgctttttctgaaatgtttggctccgattacgagtcttcggtttcctcaggcggtgattatattccgacgcttgcgagcagctgccccaagaaaccggcgggtcgtaagaagtttcgtgagactcgtcacccaatatacagaggagttcgtcggagaaactccggtaagtgggtttgtgaggttagagaaccaaacaagaaaacaaggatttggctcggaacatttcaaaccgctgagatggcagctcgagctcacgacgttgccgctttagcccttcgtggccgatcagcctgtctcaatttcgctgactcggcttggagactccgaatcccggaatcaacttgcgctaaggacatccaaaaggcggcggctgaagctgcgttggcgtttcaggatgagatgtgtgatgcgacgacggatcatggcttcgacatggaggagacgttggtggaggctatttacacggcggaacagagcgaaaatgcgttttatatgcacgatgaggcgatgtttgagatgccgagtttgttggctaatatggcagaagggatgcttttgccgcttccgtccgtacagtggaatcataatcatgaagtcgacggcgatgatgacgacgtatcgttatggagttattaaaactcagattattatttccatttttagtacgatactttttattttattattatttttagatccttttttagaatggaatcttcattatgtttgtaaaactgagaaacgagtgtaaattaaattgattcagtttcagtataagtgtgggctattcttaaatgcaagtatttttagagcagtaacaaaaaaatgttgtttaaattagagtataaaaccgaaacaaccgattcagcaaaacctccaataatagaccgtacaccataaacagaaatatgggtcccacaagagagcactgtccgtagcttccccttcattggccctctacgtggctcctcttgtaaccaatgtcatgtcattttcaagttttactttctttttttatactaatatcttgtttgtcgttttctgtaccttaaggtcctaaaccactttctttcgcgcaccattccttgtcgtattatttctccgaatatgtcaataccgtgagacgacaattgatagcgagaggtagcgagagagagaaacgttcgttgtgaagatattttattgctgttgttgagatttgagatattttatagctattattggaatttgaaagtgatgtataacttgctactatatcggtctaatccttggcttaaaccagtttttatttagtaattttatgctcctgtattattattcggtggagtatttttttctcaaaaaatatatgagtcgagtttaagaaatatataagcgaaaaaacaaaaaaaatatatataagcggggttaatagatcaaccacaatcaatttaatttggactttagaattaataaaattgtttacttcgtaattattattatttttgttgttctggcaaatctgataatccagattattattagacaagtagcgaagggacggtgaacatttatgattttaatttgtatgttgtaaggaaaacaaaacaaataagttctgtaaaaaaggtttacctttctactttgccggaaaactcaactcacggtggcgtccggcgagttttcagaccaaaaagaaggttggaagaaatg

SEQ ID NO: 4704 - DNA, 3000 bp, Unknown; identical to SEQ ID NO: 4701
  misc_feature (1)..( 3000): cDNA_ID_1825183_gDNA_ID_1620723_Annot_ID_165865 3000 nt of promoter + ATG

SEQ ID NO: 4705 - DNA, 3000 bp, Unknown
  misc_feature (1)..( 3000): cDNA_ID_1021972_gDNA_ID_1620723_Annot_ID_165861 3000 nt of promoter + ATG
tctaggttcgtagattctctttcttcttcttcttcgtttggatctgcttagtgaagaagataatcttctgaaaaattgtttgttttttttctgaaaatctgaatacgtaatgatttgagctgaatctgagttagattcacatttatattctggatttgtgctatttgatgatttattagatcgatcatcttgttttcttctttcgcctttaagtatgtttgctcatagtgttgctcttccagattccagatcctgaagaaggtgaaatcttatctgtgatccagtggaagattgaatcaagtaacagattcacttagttcacttgcgtattgcatgcccctgaagataacattttgaataatgttgatattgaattatcacctataagctctggttcttgttgcttgtattggttctgggtatctactagtgaagaaaccatggcttttggttctcctaggaataattctatattagctgcggctggatttcctcggaaagtgtctacagttgcaattgctattggtggtttggcatcattctttgttttcggattgttgcttcgtctttcgtatccgaatagttcttcagttggtggcatattttatgggatagggaatcctgaacaagttcatgtccctttatctttgagcaaccatactgtcaatatccttcagaagagtagtgacatcaatgcgtttgataaaaatctgacttctgattctagctctggcttacctgttgttgttagcaaaagtataccacctccagatttcagtagtgataggaagttggagacacctttgacacaagaaaaagaggatttggtttcttcggatataactgaaaagactgatgttcaatcaggtgaacgtgaaaccaatgtttccaaggctgaagacactccaagtgcatcatctcctccagatgatgtctctgaaactgcttcagcagaaccaggtactgttgttatcttttaaacgcttatttccgtagcttttgtcgtatttggaacattttgagttatggtagcttaaatttcaataaacaaagactaagctagtgtgggaatgttatagaacatttagttttgcatttctatggaaaggcgtaagtttctgagaagttttaaagaaattcagcggctaaactcttagctatagacctactgtaattattctagccgaggactgaatatagcagattagagtaaaaacttggttagggagcagatagtgagtgctgggcttgtaaggtggtctcagcattttgttttaggggttagagtttctaggctttgtgggcatttggttgagagttctacctgttttggtgaattggaataagaagagcagtttcatagatctgttcttgtcagtttcccttgcttctcatgattctagctgttcgatgttttatatttctgttatgagtttgtcgcttactcaaatctttgattgcttgtagagtgtgatttgtatcaaggtagttggttttatgatcctgggggacctctctacacgaacaactcttgccctgtcctgacgcagatgcagaattgccagggaaatggaagacctgacaagggatatgagaactggagatggaaaccgtctcagtgtgagcttcctcggtttgatgccagaaaatttcttgaacttatgaaaggcaagacactggcctttataggagattcagtagctcgtaatcagatggagtccatgttgtgccttctttggcaggcaagtaattcaatttaatggtgaaaaccggtataagggatctattgtgttgctttattcagcttcaggagatcgtatgtattatattaaagtaggtttctgttttcaggttgaaacaccagtcaatcgtgggagccgaaagatgcagagatggtattttaagcaatcatcagtaatgattgcccgtatttggtcatcttggcttgttcatcagttcaacgaaaaattcgattatgctcctgaaggtgtcacaaaactaaagctggatcttcctgatgagcgcataatggaagctatcccgaaattcgacgtggttgtcctctcatcagggcactggtttgcaaagcagtctgtctacatattgaaagaagagatcgtgggaggccaattatggtggccagacaaatcaaaacccatgaaagtcaataacgtggatgcatttggaatatcagttgaaacaatccttaagtccatggctacacacccgaactacagcggtttgaccattgtgagaacattctcacctgatcattacgaaggtggtgcttggaacacaggtggatcatgcacggggaaagaagaacccatccttccagggaagctagtgaaaaacggattcacagagataatgcatgagaagcaagcgacaggatataaccaagccgtcgataaagtcgcggagaatttgaagctaaaactaaagctgatggatatcacagaggcatttggatatcgccatgatggtcatcctggtccattcagaagtcctgaccctaacaagatcactaaacggggaccagacggacggcctccacctcaggactgcttgcactggtgcatgccaggaccagtcgatacatggaacgaaatggtcttggagctcataaggagagacaggaaaagctcatcaacttgacttggtttgaaactcaaaggatgagagagcatattacacgacttatactattaatctgattcttggttactgataaactcaaagataaactcacttgtagatttgtgctaggcacggtgagttaggattagaatttgttccactatacttgttggttcgtttgtcctgagattgaaatttaagatttgggagttatgagttcaagtttattcatactagtcgaaatttcataaattatataaactggggggggcgcatttgcaaaatagctgagtaataatcgcctatctcactgactcacccaaagcccgaccaaaagcttttgattcctcaagagtgaaa

SEQ ID NO: 4706 - DNA, 3000 bp, Unknown; identical to SEQ ID NO: 3705
  misc_feature (1)..( 3000): cDNA_ID_1821583_gDNA_ID_1620723_Annot_ID_165855 3000 nt of promoter + ATG

SEQ ID NO: 4707 - DNA, 3000 bp, Unknown
  misc_feature (1)..( 3000): cDNA_ID_2170289_gDNA_ID_1620724_Annot_ID_49244 3000 nt of promoter + ATG
gatactcactaaaggattatgaaacccataactgtccagagtcccataaaacccataactatccacagtcccaactatagaaaacactctaaccaagatttaatctactttagtcacttagatattttctttaatatatcacatacactagtagagaatataataaccaaattttgacaaaaattggataacgcgaagacaaaatttgccagctatcttcgggtcagctattgaaacatagacataaaagcagtacaccacatgcatacaataacattttatccccgacggtcccatgatgctttggagcttggacctaccaataccaaattccatacccatagttattactacttatcaattattatacgtgcatggttccccaaatcttctttcttctttcaaaataaaaacttgatcaaaaagatgacattttgagaattcactccaattcagatccaatcaaataggcaaaaaaaaaaatgcaattctatttttagaatactatactttataaaaataataactatagtcaaaaaaatttgaaatgtaatcactcacagtatttgacagttaatcatcaaactcatttccagagagtagatatagaccactcaccaagaaagattagtaaccattaattcattaataacatttgactaatgagctaatttcaatttcaaatcagcaactaacgaattcgtcactcattactcatttcaaatcatctcataccaatccaatttcataattcaaaattcacagtgataaaccagaaaatttgaaattttacctgaacagctctaatcacagcacctttagctaagtaaagagtcatatggctagtgagattgaagctctccgtcaaatacactcccggaggtatatacaaaagcgtgcctcctctcctcttcagatgctgaatccgataaatcgccgccctaaacgccttagtattcaccgttcgaccatctccaacgcctccaaagtcggttatcgagatcttatcgtaccggtaccgtaacggaactataccggaacacgtcgcctccgaatcgcccaacgaagacgaagaaacgaagagacatgagaagaggaaaattgacacagagagtctccacattttcgatgaagagaggtttatttaggatgagagtaaaatctgcagaattggagctaagattagtatgatatagtcgacactcgacaacgttcaatagaagaaggcacgtgctgatacacgtgaatcaacgggccatataagctagaaacgtttgggctttagtggcccaataaggatgaacaactttttgttttttgtttttggcggatttttttaattctttgattttctattttatttagggtttttattcttattatataaaggttggatcggtttgtgaaatttggagctaagatcagagatttcagcgatttggagattggagatggagagtcctttggtgcgtctatgcttaaaggaagcttgtaagagcggagatgcggtggaacgatggcgacttcagcggcgtagtcttgagagtctgcctcctcaccttgctgatgctctcctccgtcgcctcctcaaaaagcggcttcttttcccttcgttactcgagtaaactcttcacttccttacatagttctgatcgtttctaatatgaatctgatttctgatctcgaaatgctgagctatatatatatatatatgcttcgatttgagatattgagtgatcgcttgggatcttagtttttaaatttgattagaattttttttttttctgtattcatgttgaaataattattcctgaagtgtttagctgtagaattgtgttggtcttggtacatcgttgcggaaaatgcaatgattgcatggacactgaactattgtatctgtatcacacaactaaacaagactcttttctgtgcagaggattcaaatattctgtagagaatatagatctccgaggcaaaagctcagttaacgcagaatggatggcttacattggaggcttcgttaatctaattactctaaatctttcagattgccagagaatcaacagttccaccctctggcctatcacaggtatgttgagtgatatactccgagttttggaatggaagtttaagagaaatttaagtgtttaatatgtgatattggattttcaggattaacaagtttgacagagttggacctttcaagatgtttcaaggttacggatgctggtatgaagcacctccaatctgttgtaaatctgaaaaagttgtggatttcacagacaggtgtcactgaagttggaatttctcttcttgcttcacttaaaaaattgtctcttttggatttgggcggcttacctgtaactgatcagaacttgatttctctccaggtattacctgtgctctttctttattgtagtcattagggttgttttaattgcatgatgtatgttattgaactgtgtagttcaatagttatcatctatctatctagttaaatttgttagagagctctgctaaaattgtaaagttctaggtactactactatgttgagtatagagtataatgtgcacagaaactatttagtcttcaggattctaaaattcaaatatcatttcctggttattaaacccattaatccctacaaatgaagttcaagtgtatgttcaatatagtttcttgcgtgaagatgtttgtatgcccgaattcacttattaaaaacatgcctatttttattttatttttgtcactgaaaaacatgcctatttgtaataacatttaatatgtagacgatcaatctttttttagtttttctgaccgccattttctttattgctgctcaggcactgacaaagctagagtaccttgacatctggggaagcaacgtaaccaaccaaggagctgtcagtattctcaaattttctaacttgagcttcctaaacctctcgtggacaagcatcacacagactccaaacattccgcaccttgaatgcttacac

SEQ ID NO: 4708 - DNA, 3000 bp, Unknown
  misc_feature (1)..( 3000): cDNA_ID_1825242_gDNA_ID_1620724_Annot_ID_49245 3000 nt of promoter + ATG
ggcccagcagactcctacaaaaccaacaacgaatcaagtctttttaaatgaagtggttcctgagaattgtaatcaaatttctttcatagatggtgacaatatataccattaaaccctggagtccgtcttggaagtctttgattccgtgaaggagctcaactttggatacgtggtctagattattcagaagatcaagtgcttcaccttcttgtttctccagtttctctgttcttttttccttcgccttcttctcgtattcaacaattgtgtcctctgcatcaagtagatagcttacctttctctgcttatacatctcaaggcacttttcgcatctgcataggatgttcctccagtttttggtcaaaaacaaaggtttcttctcaaactcaggacacgagtttagatcagtcctaataacacaaccagctgcaggaacattttcagagccatcgatcttctcagaacatttccgcacaacgaatttctcggcttcagtactgttctcaggctggccggcttcagattcatcgatcttctcagaacatttttgcacaacagatttctcggcttcagtgccgttctcaggctggccaggttctgagtcactgatcgtctcagaacattttcctacaacagatttctcagcatcagtaccgttctctggctggccgggttcagaatccatgtggtttttgtctaactcaattgtctctgaacaagcattagcagaaccagtggaatctactttagcaacaacccacaagttctcaggataaagtgtcagaaacgaacatgctggggagcagttttgacaaatgaaatcttcatagatcggctcactttcctcatcccttggaatctgttaacatcacataacaaattgcactaagcgccaacaacaaaaaaaatcaatcgtaaacaacaagattaagcactggccacaaacctggctaccaacactgtctgaaggtgtgagaccgagatgctcctcatgaaaccaatcctcacagagacaacactgaatcatctctacttgttcttccacatttgggtcagggtaaggtcggtcgcaagtgcagtacaagcctttgaaattatggttgtaagaattttcagagttttctatatctttgctcgggagaagcttacaagccaaagttccaaactttgagttcccgcaatcacatcgaaaatttctcttagtccacagctccaaaagcttcataaccagaacaatgttcaaccattaggaaaccaattaacactatgaaatcagatttcaaaatacataacctggctatatatcaaccatatttacctcatggccatcatgacaagataagcaacaagcagtgcaaattccagcattcccctctggtgtacatgtaatgcatgagaaaattgcttgccttttcatgtaaccctttgggaaagtacactcatctccttcatctccacccaacaccaaatccgctgccttaacatcaagaatcacaaaagcagttaatgaatattaaacccctaaacccaaataacataggattacagaaacagatacacactactgaaattaatagaaactaattaagagacacacactatcattactagctagccaaaacctcagagactgtacaataacaatccaacacactccactagcttcagaaaaggtagtcaatttaaggtcagaatccaatttcaagacgtttgtttacacttaaatctaaacgatttatcaccaaccaaggagtgaaaatgtggaagagtattaaactttcgtaaggatcagaaacatacataagctttaaaactgatcaagaggagaaagagaacattaccagctcttctgcgtcaagcctttcgatatattcattgatcgttatagttccttcagcttcatcctcgaaaacaccagatgccattgtcgcaattattcttcacaaattcccacctgaattcactactaaaaacatgaaattgggtaaaataaaagctattcgaaagactcaaacgagatattccctaaattccttaaaaaaaatgaaaccctagattattcgcaaaacatcaaacatgtcaatcggaccattaccaggttattgatggagttctcagacttgtaaaagccctaaagcttttcacttttcaagacatagataaacgaaggcagagagagagagaaattggggaaaacgaaggtggagcttaagggtttggaagaaagaaggatctagcggatgttaaaattcttaaatgcgagaaaatttatgtatgttatataaaggaagggactttatcgacattttcccgccattaaccctccaattctattacccttttccctccactatcagcaactaagcataagcacaagataagtattgttacttgataatgtacatgttaatattaatttgtatcgagattaaacggatatcaaaatctcaaattcttgcttatatggttttttatgaattgaaaatttatatttatttttttgttttgataactaatgtttaacaaatatcatatctgtgtgcaactagtcaaatctatccacaaacacacatactaatagagtaataagcatatttttaattatcgtagattaattgataacctctaaaaaaaaaattaaattgggggataaaatattgataaaatctaaagttatttaaatcaaaatcacacactttttgttttgtttcttgacatcttaattataaaatctaaatattggctaatataaatttcaatttggataatatgactttattgggcctaatatgatgatacgtatacggcccaataagaggttgaatatgactttgactttttcaggtttatggtcagtgagtagcaaccaatcgcagtcgtagttgaaagtctctattaacttcttctccgatctgagaaaacgcgtcagaagtttctcgttctacagatagagagagaagagaacgagaacgaagtagagagagagagagagagatcatg

SEQ ID NO: 4709 - DNA, 3000 bp, Unknown
  misc_feature (1)..( 3000): cDNA_ID_1825238_gDNA_ID_1620724_Annot_ID_49246 3000 nt of promoter + ATG
atcactccagcgattagagtcacaatgctttcgttagatatcatcactccctttgggtcaccagtggttccactcgtatacataatcgtgcaaatgtcgcttttctttttgattgggagatcatattgctttccttcaccctgggagaaatattcgcaatggaaagtataaacatgataagcatagttataagaccactggaaagaaatatcacagaatcagtatatttcaggacgagcaaatgtcaagtctcataccagcttcaaaaattcatcccaagcatatataaccaacccaaaagtttcagcttcttctttttgttcacgtgagacacccccgaagctcacaacagctgtaattataatcacgtacaattgatcataagcacactatgttaacggcctaacaggcctaacacaagaaaaaatcactcacttttcatgtactctgtcgagtttgggcatgtcttgaacaactgataatcaaaattcaaaagcaagtggtaagaagaggttacaaaaatgtaaaatttagcaacggtaatcaatgcatgaaagtgataaatatatatttcacacaaaatatatattcttactgtacctcagagatcttcttctcttccacaaagacaattgaaacctctgaatgggaaatgatgaattccacagcatcagcacctataaaattgacacgcaacaaaaatgacaaataagctagctaaaagatttgtagaagctcactggaaatctattggcgaatttatccttctagagtatattgggaaatactaaaaaaggcatacctagtgtatcatataacggtacacaatagagtccatgtgcattacaagcctacatcaaaagtgcactgtcagtcctctaacaaaacacaatcaatgacataatcatgattcagccgcaaaattacctccatgctgataatccactcaggagaatttgcaccatagataccacattttgcttcctaatatcccacatatcaggaaacacaagattaagcaagggaataatcacattgcgacaaaaaaaggaaataatgagactgaatatagatatctgaaaggaaaaagatggatcttacgtccttaactccaacacttctgagagaatttccaagtttcatgacaatgtcgtagacttcttggtatgtttgccagacatacttacccggctaagaacaatcaaaataacaagtgaattttataataacatgaaacgaaaatcacaaaatcaaaatcaataacaaacagtaacaacacctttccatctacaatctcgcggcgtcccagcattggattgtttggatacttctcaacagacatgctgcaataaacaataacagtagaaaaatgtaagtcaacaaccacaaaatatcaccaaaccacacacaaagcaaaacaaaaaatgtcaaccaaattcatgcaactgttaattaatcacatgccactcaaaacgatgttattatagacaaatggcaaaatcattaaccaacaaattatatttctatcgattagagcaacttaggtagatcttgcgatccgaaaaacttaaacaaacatgaatcaaatccagataaacactagacgaaattaaactatacgattcttactacttgagaatccataaagagcaaaaaacgcaagtcagaacaaattccatgatcagtcaacagatcaaggatcaaaatctcagcaagaatcggaaacgaggctcatgcaacacaaactccgatcggttaaacgagaaatctcaccggaaaacatcccaacaactatccattccttcgatcgggtcgggaaatccgtccttggcaaagatactccggtacactggaccaactgatggtcttccatcgctaccttctttgccttcttcaacttggaagatgtatttcttctgctgcgacatgatctctctctctctctctctacttcgttctcgttctcttctctctctatctgtagaacgagaaacttctgacgcgttttctcagatcggagaagaagttaatagagactttcaactacgactgcgattggttgctactcactgaccataaacctgaaaaagtcaaagtcatattcaacctcttattgggccgtatacgtatcatcatattaggcccaataaagtcatattatccaaattgaaatttatattagccaatatttagattttataattaagatgtcaagaaacaaaacaaaaagtgtgtgattttgatttaaataactttagattttatcaatattttatcccccaatttaattttttttttagaggttatcaattaatctacgataattaaaaatatgcttattactctattagtatgtgtgtttgtggatagatttgactagttgcacacagatatgatatttgttaaacattagttatcaaaacaaaaaaataaatataaattttcaattcataaaaaaccatataagcaagaatttgagattttgatatccgtttaatctcgatacaaattaatattaacatgtacattatcaagtaacaatacttatcttgtgcttatgcttagttgctgatagtggagggaaaagggtaatagaattggagggttaatggcgggaaaatgtcgataaagtcccttcctttatataacatacataaattttctcgcatttaagaattttaacatccgctagatccttctttcttccaaacccttaagctccaccttcgttttccccaatttctctctctctctgccttcgtttatctatgtcttgaaaagtgaaaagctttagggcttttacaagtctgagaactccatcaataacctggtaatggtccgattgacatgtttgatgttttgcgaataatctagggtttcattttttttaaggaatttagggaatatctcgtttgagtctttcgaatagcttttattttacccaatttcatgtttttagtagtgaattcaggtgggaatttgtgaagaataattgcgaca

SEQ ID NO: 4710 - DNA, 3000 bp, Unknown
  misc_feature (1)..( 3000): cDNA_ID_2999785_gDNA_ID_1620724_Annot_ID_49250 3000 nt of promoter + ATG
ctgaaccggttaatgcgtaaccggtgtttggaataatgatttaggagaaagagtaggaacatttgggctttgtcataagtttaacctggaccaagtttgaatattcttaagagatatgggcctagattaaaaacaatggtaatgtaattaaacatattgctaaatgctaataatgtggatttgtttgtttattaagaaaaaagcagcaagaagaagataaatcatttgggtcaacgacattaataattggaatcccatactcccaaatcataattagacatacacttttgtcttaggctgtcctttacactcatcggcatcaccaaatacttagttggcaactttgatcaattaatgtattaagcatgaatgaaaacaacttttacattgattcgataaattcattatattgtagataagattagtcaaaagtttacaaacattcgttaacaaattacaaaacttgtaatatctgcagcaatgcccatgtgggtagagctggctgacgcaacctaaccgggggataaaagcgtctttttggtaccaaatttaaagtttctttatgagtaaaattcccaaacccaacatcttcttcctgctgaagcagtaagcactcaaccaaaaaaccaattgcgtaaacactttcccttgaatacagagatcacattcgatcaggtaaaaacaaggtctcgatcttctcttcagtcaattttttcaaattattcgaggttcccgtcattcgattccgacttccgagcttctatttctgctcaatgtttttgtattttgttagggtttccagaaaattcgattctgttgtttttaatttgagctaataaaatctagaatgggaaaaagaaagagttcattttcgtcctctttctttttgtagaagctgaactttgtttttcttttacagcgagctgatttctcacaagggatatcaaaatttctggtgaagtgggattgtaaaattcggcgttgaaagatatataaagaggtatgtttgatcctcagtgaggaataaggatttttagtagttatatatctctccaagtgatgatacatacatacttgtggattagatctatgataagaataagcataagatagagactgagagacaagtcatttagggagattaaataatgttcatggaatgctaaagttcatataggagtttgtctcatatcagaatctagattagatcatgctcagatgacatctcttgaatggacaaaaaagtttttaactatgtgattttttcgacttcttttggggaatcaatgtactacaagctgagagttttagagtagtttcatctctggctaagctttgattcattttctagtggaaggttctggagtcgtttcaattcatggatgatggtactcctaagaagctaaacatattacctgatcactttagtgctcctagtcccacagcagaatcttctcagcacgatactccatcatcttcgcagccaaaggacgatagttctctgaggtaaattgttagcgaataaatatgctaagaagggaaattctgagctgaaatgaattgttttttcgggtggttttgtttagagtaggccttatagccagtcacggactcgcagaaacctgaaaagagcagcaactatgttgaatttgttcactcttcgccgtctgccttgggtttcagatggtcaagagaaggttccattctctcacacctttcttctttgtttttgattcacctcattgaagtttcagggttttctcctgaatcctgatcactctctcattggcaggtcgagctatcagcagcggagttagaatcacttagatcagaactttctgatatggaagaaagagaagcttacctcaaagcccagtaagtcatatactcaaatttgttccattctcagattaaaagcgcatatctcaatttcttcttgctgaactgctacataggttggaacatgtggatgaagtcttgcgctctgcccgtttatctggttatttgtttatcagaagtgtagggccttactctgaattacttatcattattgatccactaggatgttttacaaatttgccttatttttttgtttgactttagcgttgggcagctcttccgggtgaaccaccaccaatagatgatacagaagtagacgactggcttcctcggtttgtcgtccttcaaggcccttgtcttttcttctatttattgtcaacaggtgagttaaggttcagcttttacaatcctgtttcaaatttgtattcttcttgtaatgtctcttgaaattctctattgcagacttgagccctcaagattcgacattgctagcagatattgttgaaattggttcggtaccaagctacacgagagaattcgatgaaacccattattgcttttacatattaacccgtcaaggtctaagatttgagtgctcaagcacctctaaaacacaggtgaaccaaatacatatacatctttacacacagattgttgttgagagatcccacagcatttgaacgcaatgatttcgcggttttgtatggttttaggttgattcgtggttgtcggttttgcgccttgattgcaagtctgaaccagaagaaaggttatcaaatggatcagtcgaagctccagaataaattgaagagcggtcactgctctggatagttttcatttatatgtatataatgcttctttttagatgtagtagaattcacgtcaatgaaaggttcttttactgaactggtggttacaatatttttggtttacttcttttagctgctaaagacattggaatatattcgtttcttgaataggcaataattctagttggaaaacaaaagtgattagaaaggcaataaatcctgagcctttaagtccttgtctgatccgacccgatcaaaacatgttggtataaaatcttccaataggttcacatttttgaggtccctgtttgcacatcactcttctcagtcctcacgcatcgtatcagagaaa

SEQ ID NO: 4711 - DNA, 3000 bp, Unknown
  misc_feature (1)..( 3000): cDNA_ID_1825234_gDNA_ID_1620724_Annot_ID_49251 3000 nt of promoter + ATG
aggttgattcgtggttgtcggttttgcgccttgattgcaagtctgaaccagaagaaaggttatcaaatggatcagtcgaagctccagaataaattgaagagcggtcactgctctggatagttttcatttatatgtatataatgcttctttttagatgtagtagaattcacgtcaatgaaaggttcttttactgaactggtggttacaatatttttggtttacttcttttagctgctaaagacattggaatatattcgtttcttgaataggcaataattctagttggaaaacaaaagtgattagaaaggcaataaatcctgagcctttaagtccttgtctgatccgacccgatcaaaacatgttggtataaaatcttccaataggttcacatttttgaggtccctgtttgcacatcactcttctcagtcctcacgcatcgtatcagagaaaatgagctcccaaatctgcagatctgcttctagagcagccaggtctcttctttcttcagccaagaatgctcgtttcttctccggtacgtaaattttctctctgatcctcttttttcctgaaaatgtgataaacgtcatgggatgatacatctagatagacgtcaaatattttatgaatctacctgtggttttcttcgttttctagattctcgattgtattgaatcagtgatctgttgtatcgtttccaatctaaaatatttgatcgaagcttttacttgatcctacgtgtgttcccatcaagaaaataaattgtttgtttcttgtgagagaatacttcttgctaacacattttatgtgaaactattggatacacaaatttagactctcatattccggtttttgtctcatcgttgctttgcctacataagacttcttattgattttcccattaatataaagaggatgtttaagatctgttggttttattattcacatatgaacagaagtcacaaaccgtgtttcgtttacattttgctgatacgttgattattatatgttttcagaaggccgagccattggtgcagcaagtgtggtgcatgcgactggaaaagtccctcagtatgcatccaactttggaaaatcgggttctggcttcgtctctaatagctggatcaccggactccttgctcttcctgctgcaggttttacatgcataatgtttcctataaatctgtgatttactgttttatgaatatattctacaggacacattcaaatcttcacttttgtaacacagttagtgtaaattaagcctttcaacgttttgactccaaaatgatgtctaatatcagttatacgtgcaagacttatagctgatgagcttttttgtttatctatattcatgttttactttgatgtgatgattaacagagccttattatattcgccttgctttcttttttatcatttctgttatagccttcatgctccaagatcaggaagcacttgctgcagaggtaactgatcaccaaaccaaacacacatatctctatatctttctcttgtgttatccctggtttctctgtttaattggatttctctgttcgaatcagatggaacgcactttcatcgctatcaaacctgatggagtgcagcgaggactggtttgttacttgttattctcttgtaatttcatgtcttctttattcaaatgctcaaaactcttaaatctttaaactccctccagatatcagaaatcattacacggttcgaacgcaaaggatacaagcttgttggcattaaagtcatggttccttcaaagggtttcgcgcagaagcattaccatgatctaaaggagagacctttcttcaacggcttgtgtaacttccttagctcaggccctgttgttgccatggtaaagaagcaactctcacataaaaccgacttgttttagctctaatgatccaataagacattgtttttaggtatgggaaggtgaaggagtgattagatacggacgtaaactgattggagccactgatcctcagaaatcagaacctggaactatccgaggcgatctcgctgttgttgttggaaggtaccattctatttttatgacatatgtatatatgattgcttgtctgttttctcggagattatagttttgcttttgttttttgggaaattgcaggaacattatacatggaagcgatggaccagagacagctaaagacgagatcagcttgtggtttaagcctgaagaactcgtttcttacactagtaacgctgagaagtggatctacggccagaactgaactattccctctttctcccttattttcaaccgttagatcagacataaataattacttcttttgttttttcttttacccaaacactgaaaacgtaccgggaataacaaatttactgcatttgttatcaagtttgttctaatagacccaatgaaattaggccacgtgtgcgatcatgtaaccggtttaccgtaatgtggacttgaaatccgattagcaagcgtaatgttgttttaatttctcgttggaatccgccgactccattataaaatctcagagaactagttcagctgcgagttgactcgttcatcggcttcttcagaacgatactttagcttcgacctctctctccgatcatcttcttcgtcgctttccctaatcgttttctcttgcaaggttcttacttcataattcgtaagagtttcctcctttcttgacgagtcctgatataggttttgattcgtgttcaattgaattgttagggtttagtgcttctcagggattcggggaacatatacttaattgttttcatttcatgcttggattaaatttctttatcttccctggattcgattcttcctttatcttctatcttttgactctcttgactaatttctcactattgtaacggagttttgtttgatttgtgtcaaatttttaaagaacagtgtataatttcttacatatcgtataaaagtttgtgtttttttcggtaaaagaatttgctttgtttgtgcag

SEQ ID NO: 4712 - DNA, 3000 bp, Unknown
  misc_feature (1)..( 3000): cDNA_ID_3409311_gDNA_ID_1620724_Annot_ID_49252 3000 nt of promoter + ATG
tgaccaggagatctgtcaagagcatgcactttttctgtctagtttaattggaatttggagttgtgtcagtgtcttggcgcttttaacactgggaagtgaagtgttgcatccttataatgccatccttctttgttacttggataactggatttcgcttagatccttctatgtatgaagaggttcagcttttgttgctaacaactcgataacagatcattttatctgttgatgccagtaccgtctgtacgtcttttctcggttcctcagcacttcttctttgtttttttgtgcaggcttattgctccaccagttcaaaatatatctgtacaggctagagtcaacgcaaaggtaacttactcatgattatctgttaggttgcattagactagcttcttagtatctctcccttggacgagtattcgttttgatatgtttatgggggaccataagatgtgcattttagccttctgctgttctgcatccgtagctatatctgcctgttgatggtagggagtatctgaaaggtttatgaattgaatgtggttgtaaatctttatgggtttgtaaatcccagaccatggaatgtgataggggcttgatctggtaaatgcttggtgtgataactgaatcgaatatcactatatccaataactttatactgaatgtttggagggctaataacaattgatcttcttaatctgcagaggcatgaggtagatcagaaagtagaacacagaggagggaagaggaagacactggactctcgctttgcaagcatgaaagagcagagaatgacgattaacaactatggtgttacagtgcaagttccaagattaccaccatgggttagagccagaagattttcccaatgagaaaccacaaagcttttacgggttgttccagtttagaatttggcttttgggtttagaatcttgttaagcaaacactaagcaatgcaattcttttgtaaacatattgacttttagtatcatgaaagaattttttttgagtcttggttcattatatagtcgcatttccacatttctgtcaattacatgtttgcctctaagtgagtacgcgtcgtcaagaagaaagcctatcagccaagtatgtcttaactcttaaggaatgcttcctgtataatctagacaaatagagttgtaacatttaaatcttcaaaattgggggtgtagctcatatggtagagcgctcgcttcgcatgcgagaggcacggggttcgattccccgcacctccaattttgttttttgttatttctgtatcttccgttccttgtatatgtggcctcagttaattcaggcgaaagaaactcgcaactttctctgtttcctccattccactttttcgaagatgtaactaatttacttaaggaaaacaataaattatgatctttagtaaatatggcctattccaaaaactgaaccaaacaaaatatttatgtttgattttgagttaattacacattaaatttttaatcacacacccagaagcagctaaaagacttcgacctaactccatcatataattatcttttgaatttatcttgaagaccatatataattatggcccaaagactccaaactgactctttgtttttagtgtgacctaatcaatatcactttcatatgttgtccaaaaaaactatacgacatacaactcgttctcatattttacagtgtacacttaacactttggtcacacgtattacgtaccgacatatttatatgcatagcttgagtatggagactgcgtcaaaaacaataaattaactatatttaaagaaacttggcaatcatctagtataaaaatagtcgattttttttctcttgtcaatccacgttaattaatctatgctttattatcaagtgaattaaagaatttgacgtaaaactggtgtattcaatggattaacattgaagcttattcacaaagtggtcggctattgatttactccttagacttgctctaattttctttcttaagctttttaattttggtacgtcacttagtttgacaagcggagctgtttaagtgaaccacaatatattaattctctaaacgggttattgtacaatatattaaatcaaaggaagttacgatgaccaaattaactttcataagaaaggaaaacaaatattaatttggagtttcaagcaatattacatctatatacctttctattggtttcttataatgttcacgagaaatgtaggaaaactataaagtataaactgaaaacagagaaaaagttgataaaagaagaaaataaatatcacacatttcttggctcatcactcaagtcacggaaagtctttggagaagtgtagctaccatttttgttcattttattttggatagaaatttaacacacacttaatgatatggtttgaggaaatagcttatattaacttacctttccatgtatctatttatattttgcttaataataatgtaaacgcaataacatatattaaaacaaaggaaataaaatcttaatatatacctaaagttacacacaatcttagaatgctagcatactcaaatctcgtgaccccgaattttctggaaaaatcaattctacttcttctacctaaacagtttaggcttacaaatccatccaaatttatccattcgctttgttaaatcttaattgagcctaataaaataacatttgttaccaaaaaaagaagatcaactatataaatacacttccattaacaaaaacgtcaaagggtaattaagacaattcacaacattccggtatattcgcaaccaaaccaaatcctgccacgtagcaattatttcctcttcatttttctctctgtctccctcgaagaaacgtagaaatcagaaagtaaatcatacagtcaaaaccgcttcttctataaaaccctttttagctcaatcccaaaacgcaataaaaaacaaaacgctctccagaatttcgaaacttctaagatattttgttttctctcttaacg

SEQ ID NO: 4713 - DNA, 3000 bp, Unknown
  misc_feature (1)..( 3000): cDNA_ID_1830941_gDNA_ID_1620724_Annot_ID_49254 3000 nt of promoter + ATG
aagaacaaagaaatcaaatttcaatactgaaaaatcaaaattaggtaaatttaatgtaagtgaactaacaatttaaaagaacagaagacttacaaacatgatacgatcaaccggcagtaaagagatgacggtccaaacggttgcgtttgcaaacattgcaaaccctaccaagaacgacatatgttcgacgctcttagttcttacaactttcacttgcgtttatcattatttcgttgttaattttttttcgtattagtaatgcgaggatatttattaatctttgatattcataaactaaacttaccaatacagacaccggagaaaacgcaacagacgtccacaataacaaatcaccgaagacccaaagattcgatgaaacctaaagccaacgtggcaaatgtagttacagataccacctcgagtaccaaaatgataatcactaatcgctgcgtagagtgcttgcaaaatctaatatatgcggccaaatagatccccatgatcaagactccaatcccattagtgatgagggtaggagtcccaataaaaaaaaagacttacaaacataattggatccacatgtagtagatagacgatggtccaaacgattgcgtttgcaatgtttacatatttagcttgtttttgttccacatcataaaagtaattaaagaaatttttattaattaaagaacaagttctctcgaagatcacgaaggagagaagaaagtgcaatctttatagaaatatgaaaagattagatgatagtaaattataaagatatagatacatgcataacataagcaaaatatatacataacataagcaaaacataagcatattttgtttatgcgcatatcacattatatagactttgtttagcaatgtaaacatcataaaattgattcattatgtagagtaaataagaagaagacggagaaagcggtaaaaaaagatagataagaaaacataagtatatgtcttaaataagaaataataaatataggttatggtaggccttggcaaaaaaaccgtacctgaaaactcgaaccgaaaccgattcgaaaaaccggtttggggcgggtacgtatattagctatttaccctattgggttttagattgttgtacccgtggatataggataatagccgacccaaacccgatacccgaaagggtatcaacttatccgaaattacatatacttattcatagatttatacatataaaaatttattttatatttaatatttgaaccaaatacatttatatccaaatatccaataataattactaaaaactaaatgtacctatatttaaatacttaatactaaatattttatatatgcaaaatattcgtaaatgttttggatatttggacaaaatttcggttattcgggtaaaattcagatatttgggtaaaattttcgactatttgggtataatttcgggtatttgggtaaaattatcgactatttgggtacaaatttcgggtatttggtacaatttcgggtatttgggtaaatttttgggtatttggatataaaatacatgaatccgaaggatacccgtttttttcgagtatttaacggttctaaaattctatacccgaaccaacccaaacccgattagaaccgaaccaccgaagttttctatttactctattggattctagaacagtatacccgtacccgatcgggtattacccgaaccgacccgcatacccgaatacccggccctacgttatggctataagtgtatttactatacagaaaacgttaatccaaacaaagaatatggaaagcatgcatatctatgtagactaatgttaaggctattacaattggcaaccgaaaatttcgtgttaagttgtaatttagtatacgtacaaaatctaaaagtacaatagctttgtattaatatttgcaattttctaacttgatggattcagaaaagaacccaagaggtttcacttcacatacatgtatttttgaaaaataaccatgtcacttttacaattgttttttaatattaacaacggacggctacgatggaaccatcactcgaggaaatcgcgatcctacaattacatttagccgcgattcggtgagtaaacaaaccgagaacccgaacccgacccgccatctccagcttcgactctatttccactgttgacccggaccgatccgaattttgaaattgggcggcggagatttgagaactagaggccgccgcgagaggaaacgactgaacggagaaagtagctaacatacgcttggttcgacccgattcgatctcaccagcaggtacgaaggtataaccgatccggtttccatagtaaaagagctggattacattgttgtagtgtgagaaagctgcgcggttagggtttctaacggcggagaattgagaaaaggtgaaactaacggagctattagcgacggagaatgaaggaaccttgacgctagtgacggagatctcaggatctctcggtctaaagactgtgagataaacagtaagtgcggcgatgattaagaagactatgaagagcgtggcgacggcgcatgaagcgaggtttgaacaagacttcgacatttctcggtggagatgtttggtagcgatgatttaagtgttcactagttgggataaagagtttatttttggttaaagggaaagcaaaacgacgtgtaaaagcaaaaggatgttttgtttggacatagtgataacgttacaacggagtttggacttaagtgtgtgtgatgcagcgaaggtggccgactagagctaaataaattattttagtgaacaaacaatgtacccggaacagaaaccgggtttcgaagtcgggtcgaattgttgtaatttagagctaacagaacaaaaacctcctgagattgaataaacctccgattgctctattttcttatccagaacgaagagagattcaaatttcgcaatgcgattctagtgaagcttctttttcttctgtacatggttatcgtcgtaaa

SEQ ID NO: 4714 - DNA, 3000 bp, Unknown
  misc_feature (1)..( 3000): cDNA_ID_1825228_gDNA_ID_1620724_Annot_ID_49256 3000 nt of promoter + ATG
tccctgaacatctccggcgtgaatccggcgactttgtccttgttaatcactctaccgacgtcaatgctcaagtatgattccggcgtcccagagacatcaaatcactaagcttaggtttattcattgtccgtcattgtaacttcgactcaatctctgaagtttcggacagttaaatttacagaaataaagaaaaaaacttgggtcaaagacacttctttgatttgctaacaatagattagacaaacttaagtataaatttagaaacaaaaaaagttttaattccgaggaaatcgacggacaaaaagtttggttctttgtttcaaaccacacaagacagcaacaacacgagtcatgcactctctttcttaccttttttcttcttcttcatccgtcttcttttgctcttgttcctcgtgccctcttctcggtttctacagatacaggtcatagtcatacaaccaacgatctctcttgactctctccatctgtgcatgtcacacacgagtatagatctcttctctgctttatagatatggcgaggcgcggaagctgttcgacgatatgcctgaatgaaaaattgcaaaggtttcgaattgtcagaatctccgacaaggctgataattttaattccagaagcggcagcttcttcgagcgttctatctctctcgttctcttactctggtgcttcctcttcctcgtctactccaagcttggccaaagccatgatgattatggtaatgcaggtaagtgttcttccttgtttgagagagattccgttatcatttcaaatgttaattaaggaaacaaatttagggtcttttaacttggggggtatattccagagattgctatattgtgttcctctgaagaaatcaatttattttgtagatagaattgggaattacactgatggatcagtctcaaagacactgaattccacgagttctgtcttccctcaggccactgagaaagaaaacaacttttgtctcctgagaaaaggccagttacaagatgtgtatgagcatgttcttgtgaacaacgctttgttgatctgcaaagttgtgttgccagaacgaagaataagcaagaaaactctggaagctcgtgatcctagatatgtcaatcttgaagacaagagtctcaaagttaatggctcatcacagcttgtgaataatgggactcgttataggttagaaccagatggaaatgggtataactacgcttctgctatgaagggtgctaaagttgtggatcacaacaaggaagcaaaaggagctagcaatgtgcttggcaaagatcatgataagtatctaagaaatccctgttcagtgtcagataagtatgttgtgattgagctcgccgaggagacactggttgatacggtgagaattgcaaattttgagcattactcttcgaatcccaaagagtttagcttgtcagggagtctgagtttccctagtgatatgtggacacctgctgggagttttgcggctgcaaacgttaagcagatccagtcattccggctcccggaacctaaatggttgagatatctgaaacttaatttagttagtcactatgggtctgagttttactgtactctgagtgttgtggaggtatttggcattgatgctcttgagcaaatgcttgaagatctgtttgttccatcagagactcctcccagtaaaccagctatggtggaactaaaaactgcagatgaaaaacaagatggggaaataaaaagcaataggacagatcagattggcaaagaaactgaagctcagaagaagaaagatgatgttgtgaagacgattaatatcataggagacaaaaagtatgaagtcaaggagaagcataacgttttgaaagtgatgatgcagaaagtgaaattgattgagatgaatttatcgcttcttgaggattctgtaaagaaaatgaatgacaaacaaccagaggttagcttggagatgaagaaaaccctagtacttgtggagaaaagcaaagctgacatcagagagatcacagaatggaaagggaaaatggtaaattcaataatttcttatgattaagtctttgtccgttgaagaaactaccaatgaatttgatattctttgagcaggaaaaggaacttagagacctagagctatggaaaactcttgtagcttcccgtgtagaatcattggctagaggaaactctgcattgaggtcagtactcttttttattcctaaatagagaaaacagaggatttgaaatctcaagcggagagctatcccatgacttgaaacgtattcttagttgaccccatatttcttcttgtttcttgatatcagattggatgtagagaagattgtgaaagaacaagctaatctagagagtaaagagctgggagttctattgataagcctctttttcgtggtcttagcaacgattcggttagtctcaacacgactctgggcatttctggggatgtctattacggataaagctcgatcactatggccggatagtggctgggtcatgatactgctaagcagcagcatcatgattttcattcatttactctcttagatagcagagttaggcttaggtttttttttttataacagtgccttgctattaaagtttgtaaccctaggattaggagtagaaagaactttcattgataatattggacccaaactatcagtgacaactgattttctttagtgtttgatgttccaacttccataggtgtaaatgtaatctgcccggtgcttagaaaaccaaataaattgaaaaccaaaaataactaaaccgaaccgaaactgaattaaacgaatttcttcccaatttccaagagagacaacggttttgttttttagggttaaattttaaggaaccacaaaacaaaacaatccccttgatcctttgccctctttctcactattctcgactccaccaaaaaaagggtttaggaaatggtggtgtcgaagttcggtaatgataacgcggcgggaatgtcg

SEQ ID NO: 4715 - DNA, 3000 bp, Unknown
  misc_feature (1)..( 3000): cDNA_ID_1815496_gDNA_ID_1620724_Annot_ID_165914 3000 nt of promoter + ATG
aatggcttttacgccggataatgagaagctcgagtaaagtttttgaaaaaacgttagaatagtgattgacaaattgttgaatactataatattgaagttgatctttaggaattacgtcaatttagaaactggtcggtagcaaattaaaatgtgttgtattgttgtatacgtttggttacgtgagacttgtataaatttacttaattgatataactaaaaaaaaggacttggtgtggtcaaatacgtgagttaattgatgttgcgttgggttctttacacctaaagtttagccagcaaaatctgtttaaattttttaaaaaacttattaatttgtaagtaatctgtttcatggcagaacgatcatacatatatatatatacggaaatcttgaaagaaatcgagacgataattccagatcatgtgatgatggtctgatggatctcatataacttcccgaccactacttctgtattgatgtataaacgccaaagagaatggtgagggtgacatttcttgtctaaaataatttaattgaaatatttaaactcgaaattaaaagatgacatattctacaactaaaagtaaatgaggttgtgggttttctttacatttttaatcattttttatggttgaattttatgattatcataatcataatacacaaactatcgaaagtggaacccgtatcacgatttttttgcctttattttattcgttgcctattaaaattaaaaggaagactaatgatactatcgcctgttccatttagatcctacacttcatgcttttttatatttctccttttggacatctaacatgtttataattactatagcctttaacgaaattttaagaaataaagccagcctataaatgaaatacaaaacggatcatatttgaggaagaccaatgtacatatgtgttgttatttgaacaaaaatttgtttctaatttttttcgaaattaatcttaaaagaacaaatgattcttatcagactttcaacaatattgatcatagtcgaaactcaaaatttcaagccaaattagaatcttaaaacctaacaatgaaaatatatgatccctcgtttacaaaaaaataaaaaataaaaataaaatatatagatatgatccctagtccttatttccgtaccaattatgatattgagagatagttttgggataaccattttcgtttactcgagataaattcactcatcagtttaaaataaaccaaaaccattaccacataagattcttatcccaatttaactattatatttctgctaattaattgattacatgttgtgaagtataaattgggccaactatagaggaatggtgtttgtttatgttttattttggctgctagtgtggttttcttaacttgttagcaatcattttactttttgaaaaaattgttagaaaactattaatgtgaatagttatttactcaataaatcttattgttaaccactgagaatttaaagcatttaaacatctgattattttaattctatgttaattccaggcattaaattttaagcgtaatttatagaagaagaaaaaaaatctagttacattccatctaagataggggtacaaatccatacaagagtctatcttctgtaattcttagcaagttgaacatttcttaatttttattttattttatttttggtcaaacgttttctttaatacaagtggcaaagatattctataacagttataatcatttatagttagggattttttaatcattttgtagtatttgtttttctcttttttcctaacaaagtttttggaacttttgatcatctctcgattgaaagcgaacatataaataatttttactactgcaaatttttaaaaagttaatattcgactttataaaagagatgagagtcaacaaaacaaaaagcaactaattttggacgtacgaaatgctttgtaaatacattgatatcacttatgtttataatatcactcatcccaagtgttggtcaacatttctttgataaaaattaaactattcaatagaacgaaaaccacaaaaaaattataaagaattattgataacaactcttcatgttaatcttatatatttttttaaaaatatttgtttttaggttttaatacaaacaacatgattctagtttattaaactaattaacgcaacttgatggattataaaaatatagcttaactaatccatcaaattaacaagtgaatcgcactataattctaaaagaatcaggtaggtccaggatttgtcttttctccacttctcaatttcccattaataatcccgaaaaggcattacgtaataattaatattttacgctgtagtattattttatgataaacatttccaaattttccaacacttaatcataatttaaggattaaaggaaatttgattggtgcattcccaccacgagtttgcttaacgtgtcgttaaatgcagccgtcggacttgacaatgcaaaaatgctacataatctaaataattaactctcgcaataagattcactaataataacatttttaacgacgatatataattttacaataagaaaaaaaatatgaatctaatatttatttaatattaatttactccattatctgaataatctagaatatgtcaaatatccttttattattttgtagctgtcgaaactatggtgaataaaatctcgaggaatatattagaaaacaaaaaagatctagaggaataataatattttaaatatttggggcacagttgtattgtgaagcagagaatcggttctcaatatattatccgaaaatgtcttaattttaaattttgttttttgtttgattctgcgatattggaatcacacactctgccaatttgacctttctctctcgcttctctttctctatccaatcggaaagagatcaaccaacgatagaggagaagaagaacttgcatacgcaaaaaaactttcccgggaaaattccagaaactgctttggaaaa

SEQ ID NO: 4716 - DNA, 3000 bp, Unknown
  misc_feature (1)..( 3000): cDNA_ID_3073978_gDNA_ID_1620724_Annot_ID_165908 3000 nt of promoter + ATG
ggacctaactaatatatataagtgacatacacaaatccactaacgatagggtttttttttggtaaaacactaacgataggttatcgatagaaaatccataaaagttaatatggtaccagtgatatagaagtgacatgatctagatccgctcatttttaattgattttgagttgaaagtttatgaacctcaaaaccaaacaagtttcattctaggttaacttattagaattagtttttttttgttcgttccatgtaagtgaactaagaacaattagtttctctaatcttagataattatagctaatttttagaaacaaacttgatttcttgattgatacgaaacatagaaaatatcttctttcataattgatagtctaaagtaagatcattggttgtaaatcataatatatttgtttcctagtttgttataccgtataacttcattttatcattcaaaactatgcagattggattcagatatgggtctttagtagaagactactacacagggtataggctccattgtgaaggatggagatcagttttttgcagacccaaaagagcagcattttgcggagattccccaaaaagtctaattgatgtagtgagccaacaaaagagatgggccattgggcttcttgaagttgccatctcaaggtatagccccattacctatggtgtcaaatcaatgggtctagtaacgggagtaggctattgtcaatacgcatgttgggccttttggtcacttcctcttatcgtctatggattcttgccccaacttgctctcctttatcaatctagcgtctttcccaagtcatcagatccatggttttggctttacatcgttttgttcctcggtgcatatgggcaagatctactcgactttgtattagaaggaggaacttatggcggatggtggaacgatcaaagaatgtggtcgataagaggattctcttcacacctatttggcttcatagagttcactcttaaaaccctaaacctctccacgcatggattcaacgtcacaagcaaagccaacgatgacgaagaacaaagcaagaggtatgagaaagagatttttgagttcggcccctcttcgtccatgttcttgcccttgactacggttgccatcgttaacctccttgcttttgtctgggggctttatggtcttttcgcttggggagaaggactcgtccttgagctgatgctggcgagtttcgcggtggtgaactgcttgccgatctatgaggctatggtgttgaggatagacgatggaaaattaccaaaaagggtttgtttcgtagctggaatcctcacatttgtgctgattgtgtcaggttacgtcttcctcaagtaactggacccattatggttggttctgtcgtttcagttaaactaatattacatctgtattgtggtaattaggagagaataatgtgatgaatccatttctcacctcattttagaacatacatttcggtatattgcgtctgtattgtagtaattaggagagaataatgtgttgaatccatttctcacctcattttagaacatacatttcggtttattgtataagcttaaattagtaattgaaaacgacatacactatctattgatattttcactgattaatacgactgtattttttatatttcttaatggatgttttgagcacaatttagtaaatatgggccgtagagatatgctacttcgtcaaaatgttaaaacgtctttgagatattttgagatataatagacgataagacaacatttatcttgcttacttcgatctattgtatttatttgtatttataattgaagtttcaccgtacaaatactttatatttatcttaggtttataacaaattaattattccctaaagttttaaaataaaatatttccctagcgagctagtgggatattaattatcatactcaaagtagtcgattatagaaactaaatgattaaaattttacgtagtctggctctgtttttatctcaaatttctttgcaaataaaaacacaataaatcatatttacttgggagaaacttctatcacatattaatatttatcaagaaaacttcaatcatatttttcgtaaagtgttacttacctttatacaaatattccgtgtattcctcggtttacgattctttatgtctgattgtgtggaaaagtacaatcgatatttttgcaagaagttaagaagttggcacttggcagatgcgtgacgtgaatgaatcgtcaaggcagtgactctccaagccccagtcttcatccatttgacattttcgcatctttttcaagctagagaattttaacttaagttctccattgaaaatttcaaactatataaataaaactccacatatctcactaaaatctaacacgtgacaaaaatttaattacttaagtgtagtatatgttagtaattttctcaactcgcgagcaaacttcagttaacttgattttgataaaataaataacacatcaattatctgaattctttttaaaagaaacaaatatttcatagaattagtttttttttcattttagaattctaattgaatattacagaataaaaacttttacttactaccacacaataatagactttaaagttagttattgtaagtagaatgtattattttgaagttaaaatcgtgtatttatcgtgatgtaaaaatttaccgttctttcttataaactagtcaggctattctggtgttgaactacttcacttcacacgtgtcttttggagaagtagtttcattaataaacacttatctttaattttggcttcaacttttcaaaggcacataatgatcacactgtactgtatcatcttatctcataaatgagaaactcgaccataagaactgtctatagtgtgtatattcagaaaagttatcaatagttcaatactaagaaaccggcctatatatatatatttgtggtcactaatttctccaaaaaccagttgccttccgtaaaaag

SEQ ID NO: 4717 - DNA, 3000 bp, Unknown
  misc_feature (1)..( 3000): cDNA_ID_1825216_gDNA_ID_1620724_Annot_ID_165907 3000 nt of promoter + ATG
aaattgaaccgtttgtaaattcagaaaacgttcccaaatcagttatgctgaagaacaaaaggccccgtcaagttagtgaagtatctgcacttggtgaggcacaatctaaccgccactgatttgctagtacatagcttaagtttccttgctaaatctcacatgctgtgtttagatgtaggcataacagcttcaaacctttggagctctgttttgacgcaaccccatgagtttgcacaatcgtgcatcacctcacagtggagttctcctcagcaatgtcatcgtgatgcaaatgaggatgctaagaaatctgactggctaaataactcttactctgtgtcaaatgtagcaaaagactcaacactgaacgaccaaatggtttccccagtcgagcagaagaagcctgagacaaccgctaattatagattatttggaattgatctgatgagttcctccctagcggttcctgaggagaaaactgcacccatgcgaccaatcaacatatccaaaccgactatggacagccactcagacccaaaatcagagatttcaaaagtatcagaagagaaaaagcaggaacctgcggagggatcaccaaaagaggtccaaagcaagcaaagcagttctacaagaagccgtaccaaggtatatatatgcctacatggctaccgtgaagtgtatatacattgtgtaatctgtgagttgcaaaacagatacacattatgtataatgtttgcgggactgaacaggatcctgaattctttatcgctgaacaggtgcagatgcaaggcgtacctgtgggcagggctgtggatttaaatgcgctaaaggggtacaacgagctcatagatgacattgagaagctgtttgacataaaaggggaactgcggagtcgcaatcaatgggaaatagtgttcacagacgatgagggagatatgatgcttgtcggtgatgacccatggccgtaagtaacttactctttatctcttagtcaatagaatcactacacaaaactcatatctgttgacttaatttggtggtgcagtgagttctgcaacatggtgaagagaatattcatatggtcgaaagaggaagtgaagaaaatgacgcctgggaaccaactccggatgctgttaagggaagttgaaacaacactaacaacaacttccaaaacagataatcattccaactaatttttattctattctctatcagtcttcgtctccttcttatttgctttgtctttcggaattatcttgtttgtgtctgtgttttgttgcgcatggcttaaacaagaaactacatcccctgaggcaaaaaaaatggctcgtttttttggagcctcttatggagaaagggggtttatggggagagggttttctacttttaaaataggcttttggaagtttctttttcttctaggaacttgtgtgtaagagaaacaaatatgtaacgaacagaaagaaaaaaaaaaaaaaaaaaaaaaaaagagaatgagatttgtgaataacttgatgaaggacttttgggactctgggattataagagattaaagagggattatacctcatggctctcgtgttttctgattctttttcgtagttgtgttttctttgattttgtttttcatctaagttttaatgtatatataaaatttcaaacatggctttcttgtatttgtcaaatccccaaaggtacatatattatcaatatttaaaatgttaaataaacaaaactctagacctaaaactatttcaggttttcccactaaccttaacaatgattcaagattattgatgttttgtctgtgaggacatgtatgtggccgctcttgccaccatattcacaaacgtaattgtatgaagtatggaccaccttttcgctactacttctggatccccttatgtttgtaaagtgtatcattcccttatatcactattcactcacatgcattaaaatatcgaatgctgcaaaggaaaaaagagttatttttctctttagatatcatttgggttatgcatattacttggattagtccaatatgtcgtgtacaaccattctcgctgcaaaacaactacaatatgtcaacatagtataacacatgctgatctggtgagattataaattgtgaagtttgtctttataatatgtacatatagtatttctttgattatgacaagtgtgtagaaaatgttaggatattattctaaatcccacatacgaaagattagataatgattatccaacatataagttcaatctaattttaattagtgtatcatttggggaaaaaaaatcgtgcatatctggttgcttggtccaaatatctatattttctgacggtccaatatttatatacgtaccacataaatacacctatacgaatctctttactaatacgtcgataccgttcatagttaatgacgttatttactgccgagataatgaagtgatgatgtaggttatttattgccgagatttgtgaaggcagtggatctcacaatccctatcttttcctcttcttttttttctttttttctttccatatatagagaagtttaaatttaattgtaccattaaaagctcaccaaataccaacttatacatacagtcagtatctatatcaggaatttatatgtatgtgtgtataccgaataatagtaaactcattttactaataaataactttgttttattatatatttgataaacaacttgttataaattattttaatatgttaaatttgaacttattaaattttaagtaatattctagtgacggaagtatacattgtatttaaattgcatagatgtaattacttattttaaaaacttatagcactattcagtgatttacttttccaacctaaaatcgaggtgtagaatgtctactctggaaaaaaaaatcgcctataaaatatcaatatcaatggtgagttttgttctatgtaccaagtttctctaaaacaatttgtctttctattaaaaataaagagtaccacg

SEQ ID NO: 4718 - DNA, 3000 bp, Unknown
  misc_feature (1)..( 3000): cDNA_ID_1839324_gDNA_ID_1620724_Annot_ID_165905 3000 nt of promoter + ATG
tctgaacatatcatattttttttttttaaatgaacatattcattgcttctagatttttgctgtcaaatatgagtaactttctgtgacgtatgtttttatacagaggtgaaaacagggaatacgccatcaagaagcagggaatcagtaacctactattttaatagaagattcattaccttgttaatcacgaaattaccttcttgctcatgaatcaccaagtcaatgtcaatgtttttagagaaaaaaacacacatacataatcatcaagtcaatgttcttgcaatagttatacctttagtttcccccaaaaaaatattagccaattaaatcaaacaagaaagaagatattacttaaaaatctctacaaaacacatgactacatgagcgagtgaattcgataagggcttgaagaagtggtatgccgattgactattgggttaaaaatagatgaacaattgagattcttagaattagtaccactaaattgactaaaaatcagtaaatgattgaactcatttgagaccaaacatgtgggagatatatatgggaatgaatgctttctaagtggacacgaaaattctatattacagttgagattcgtttgaacaagctctggggaatatacgggggacaagataccaatttattactaaaataaatacgattaaaatagtctaaattgagaaagagaagatccggagatggtggtggtgggttttaaggcatcttgcttatttatatccttaaagggaacagaaattgtcaaaaatacgtcatacgtgacgttttctgtcataattagtaatatactaaacataattaattagaactaaacgataaagtaattagttaattggtatataaatatatggactatggagtataggctttttcatctttatattttgcttattatttattaaaaagtttggcattattcattgccaaatgactacagcaaatatacgattttgatgcagaaatttaaatttattgatcatctaaagatcgcacttagtttactatacgaaaatccatgcactacactactagtgatggtacaaatgtttaggaaataaaattattatgttaaattttgtattgaaataaatatttgggagttataatcttatcatataaaaaaactaaaataaataactaacccaacatatatgtatatctacattataaggatttgaatttatatggtaaacataactatactaacaaaaattattatattacatatcttggttaaattagtaaaatagatttatttagtgtttttcgtttgtcgcttgtcatactttttgagttccttcaatttgagtatcataagatttttaggaaacttaatcttgatgttataagtgatattaatcgcttatttataacatctacttatttatccatcatcgatcattttttaacggttcaaaagatttcacgtatattaatgttcaaaattctaaaaaaaaaacatttaatcaaaacatttttttctaagtatttaagtaatttttccggataatatttgtttggcaacgatcaacatatatcatgactcaaataaattttgatgtttctaattagtaaaatgtggagttggaaaaaagttcttgcaaaaggtgaaaagaacaaaaatcagagatggaaacacttcccacatgcttatgttagtcccaccatttagtggtagaaatgtaatttatccaaagaaggaggtcaaagctgcttcgtctctaatccaagtctagccagtattgttgcctgcataagagcaaacggtaaaagtgacggactcttaacgatgacgggtgttactgtttaatgtctcttgatcgacttttgttaccgtaacgacaacggcacgcgccctcacgctccgtaccagccttaaaagccaacacatttatgatttatccagtaactaatactaattccttcatccactaacgcaattgcatttaattgtttagtacgtatagaaaaaaagtaaaaagctatttataattataacttacaaagtctctttcaattagtacagtgtaaaacaaccaattattttctatattatacagtataaaggtgtttatcatagacccattatttatttgtttttgactaaaatatcaaagtgtattaaaacataaaccaaataaatttgaaattaaagttttttttttttttgtaaaattaaaactgatttttggtttaaatagagaagcaaagctacgcttttttttttgctagctctttttttatttaatcaaacaaaaattgaggaaaacaattattgttgtgctaagcatttctatcatatatttttttataaacaatacatttaatttcaaaataactttctactttcttcaaatcaagctatttcctagaaatttggtactgtctggataacaacatgtcttagaaagtatagtaaggaatttacaattggttatacaattaatgtatagcgtattattatatacgaaaaggtgtccaattttagacatacatataaaatcaatttattaaaaataaaagtattgaaaaaagagagagtgaaacggagataaaagcaaacggaggtgttaacttaaagacgggagagaagcgagtgagagattctttcttgtaacggcgttgtttgacgattatagtgacgaagagagacaaaaaaaaagagtttagtcttctttgtttgggagacgaagacgatagaagctggttttacgggagagaaattagagaggttacagttacagagcaggaaggattgcgttgcgttacgattcagatctctctcgatcgttacttacatgcattagagaacaagaaaacgtggagacggaatccaagggaccttcttcttcaatttaattcctcactttattacgcacccttcttttattttcgactgtttcagcttccggttcttcatcggagagagatagagagactgtgtgttttggtgtgactgatagaagatttaatcagctg

SEQ ID NO: 4719 - DNA, 3000 bp, Unknown; identical to SEQ ID NO: 4713
  misc_feature (1)..( 3000): cDNA_ID_1830941_gDNA_ID_1620724_Annot_ID_165902 3000 nt of promoter + ATG

SEQ ID NO: 4720 - DNA, 3000 bp, Unknown; identical to SEQ ID NO: 4712
  misc_feature (1)..( 3000): cDNA_ID_3409311_gDNA_ID_1620724_Annot_ID_165899 3000 nt of promoter + ATG

SEQ ID NO: 4721 - DNA, 3000 bp, Unknown; identical to SEQ ID NO: 4711
  misc_feature (1)..( 3000): cDNA_ID_1825234_gDNA_ID_1620724_Annot_ID_165898 3000 nt of promoter + ATG

SEQ ID NO: 4722 - DNA, 3000 bp, Unknown; identical to SEQ ID NO: 4710
  misc_feature (1)..( 3000): cDNA_ID_2170308_gDNA_ID_1620724_Annot_ID_165897 3000 nt of promoter + ATG

SEQ ID NO: 4723 - DNA, 3000 bp, Unknown
  misc_feature (1)..( 3000): cDNA_ID_3073985_gDNA_ID_1620724_Annot_ID_165896 3000 nt of promoter + ATG
ggcattgcagcttcagagggaaagagtcaggtggcaaatgaagctgatacattgttcttctccaatttgaacaacatccaaaagactactggcgggaaggcatcatcgcagccaaagcgcacgccagtttcaaacgaagaaatggaagccattttggtatgtaacttcattttgacatgtataacaacacttagatgaacatgtatctaacagtataatgtgtgaccaactactaagttataattatgtgaccaattacaagttgagagaacccttttcatgatttaataatattgttctgtttctaacttccttatccttttctgaattttttttacagttgggaggctgcatctgatcatttcaacatgatctgttgacaagaatggtggatcacttctcatctttaccatttacagaatatactcgatagtcaagaagaaactgatatggttgatgtttacaacaaccaatgataacaataaaactactccattgcagtttttaacttctatactgattcatcattgattgagtgcatttgaatctctattattaagtgctttatgattgaaattcatcgtttattcttttttttatatcacatgatgaagctcttttagaaccagtcagaaatattgtagcctaaaacgcaaaggtacgttacatatacattcacaggaacttacatacagagaagagaagatcacttatggtgctgcctcttccttttgcatctgttcgataagaggctcgagaatacaagactttggattcttacccggtggacctttttctcttcgttcaagctcttcaagcctgaaagtaatgagacggtcccagtttcctccttcgaacaagacaccagcttttccatcagtgatcctctgcacaattccacaatacatgtgatacggactgttctggttcttgactatagcaatcatccccggcatgagaaggggtagcttgggcgctttcggcttcttatctgtagcaaccgcggatgcatcgcttccttgttttgcaggtggtggtggtggaggaggtggtggatttttttcgataaacgtttttaaacccttttcgccaccgggaaatcctcctgtgagacccatcatctctttctcgaaaccatcttcaggtactttaaaagacaagttactgtcatcgctctctctctctgtctcgttgttctcagcctttgatgtctcttgctcgtcttcaatgttcctctggagctccttctcaatacctttctctccgttgcataatcctcttcctcccatcacttcccatagattgaatttacccatggcctttacttgatacagttttgactgctgttttggaggcgggaaaaccgaccggtttacagttgaaaattgatgtgtttggcctagaaattttgatcgatgaatcggagttctaatggtcgggatagtgatcgaagaagtcgccataactatttttgcctgcagagtagagtagaggtgactaagggagatatgaagaagatggaagaggaaggaagaagcgtgtgattgattcgcttgttataatgaccacatatcatgatttcagttagatgagttctatctatttccaaattaccagtggacctgaaccggttaatgcgtaaccggtgtttggaataatgatttaggagaaagagtaggaacatttgggctttgtcataagtttaacctggaccaagtttgaatattcttaagagatatgggcctagattaaaaacaatggtaatgtaattaaacatattgctaaatgctaataatgtggatttgtttgtttattaagaaaaaagcagcaagaagaagataaatcatttgggtcaacgacattaataattggaatcccatactcccaaatcataattagacatacacttttgtcttaggctgtcctttacactcatcggcatcaccaaatacttagttggcaactttgatcaattaatgtattaagcatgaatgaaaacaacttttacattgattcgataaattcattatattgtagataagattagtcaaaagtttacaaacattcgttaacaaattacaaaacttgtaatatctgcagcaatgcccatgtgggtagagctggctgacgcaacctaaccgggggataaaagcgtctttttggtaccaaatttaaagtttctttatgagtaaaattcccaaacccaacatcttcttcctgctgaagcagtaagcactcaaccaaaaaaccaattgcgtaaacactttcccttgaatacagagatcacattcgatcaggtaaaaacaaggtctcgatcttctcttcagtcaattttttcaaattattcgaggttcccgtcattcgattccgacttccgagcttctatttctgctcaatgtttttgtattttgttagggtttccagaaaattcgattctgttgtttttaatttgagctaataaaatctagaatgggaaaaagaaagagttcattttcgtcctctttctttttgtagaagctgaactttgtttttcttttacagcgagctgatttctcacaagggatatcaaaatttctggtgaagtgggattgtaaaattcggcgttgaaagatatataaagaggtatgtttgatcctcagtgaggaataaggatttttagtagttatatatctctccaagtgatgatacatacatacttgtggattagatctatgataagaataagcataagatagagactgagagacaagtcatttagggagattaaataatgttcatggaatgctaaagttcatataggagtttgtctcatatcagaatctagattagatcatgctcagatgacatctcttgaatggacaaaaaagtttttaactatgtgattttttcgacttcttttggggaatcaatgtactacaagctgagagttttagagtagtttcatctctggctaagctttgattcattttctagtggaaggttctggagtcgtttcaattc

SEQ ID NO: 4724 - DNA, 3000 bp, Unknown; identical to SEQ ID NO: 4708
  misc_feature (1)..( 3000): cDNA_ID_3073992_gDNA_ID_1620724_Annot_ID_165888 3000 nt of promoter + ATG

SEQ ID NO: 4725 - DNA, 3000 bp, Unknown
  misc_feature (1)..( 3000): cDNA_ID_2170289_gDNA_ID_1620724_Annot_ID_165887 3000 nt of promoter + ATG
aaatggtgagcccttaagaccttgaatagagccagcgtttcgaacgttaactccccaaacgttcttgatatgtattcccttaacaactggaagagcgttcgggttataattctcgtccggatgatctcccgtgtcgccggcgatcttgatcccatactttgcggtgtctacatagacgtctgatattttgatgtttttaatgtatcctccacgaccaatgtttgtcttgatgttgactccaactcccatattggagagagtgatatgttctgctataatgttcttgattcctcctgatgtttcgcttcctattgcgatacctgcgaacggggaagatcctgtgatgcggcggattgttatgtttgagcttggacggccataggcgattccgtactggtcccaaccgcttttgatggccactaggtcgtctcctgttgagatgtaggagtcttctatgcagacgttgtagctggaatctatcaacaaattcattttgttcagatgttaataaacagctttgattattatgcacacaaaaacatttccaagttcatatctagacatgtttgatcacagcaaccaatctagtagtctactgtggattggaaaaagagttaagagtaagatgaacctggatcgattccatcggtgttgggagaatcttgtggagctaagatcgtaacgtgatggatgacaacgttgctgccacggatcaaaacaagtaacaaagtcaataccataagaagaggaagatatattatatctacgtttgggagatctaaagggtattaactagtgttatatacctgcaatacacaggatgaatgttccagaaaggtgaattttggaaaataacattggagattatgatctccttagagtccttgaactcgattaagttcggtcttgtgtactttagcgttctactacgccacatgttccaccacacttctccttgaccgtctattgtcccattttgtcctgtgtacatagtgttgcaatttaatgtcaaaacagtgctgcaacaagaagaatatttcttgtaacaaaatatctattttgaactgtatcatctaagccatatagatatgactgaaatataagatggtcgaaactaaccagtgatgactacatcacgaagcccatcaccatgaataaagctcatataccgtccccctggtaactctctccctcttccataagacggcaaaggatcaatcaatggccaattccaggtatcctgaagtcaacacacaacaaaagccaaaaggtcacaaaacaattcacaagattcccactctgcattaatcacccaaatttcaacgaagtggccttgtcctcatttctgtctcaggacaaatgaaatggtcctgacttattaatgtttacaagctcaaaatcggtcataaggtgcacacacacacacacattgatatgcactacaatgacaagttttgtgttttttcttcactcacatgaagacaaaccaagcagaaaattaaatctgagtatttaacatagatggcagcatcctacttcattgatctgagatactcactaaaggattatgaaacccataactgtccagagtcccataaaacccataactatccacagtcccaactatagaaaacactctaaccaagatttaatctactttagtcacttagatattttctttaatatatcacatacactagtagagaatataataaccaaattttgacaaaaattggataacgcgaagacaaaatttgccagctatcttcgggtcagctattgaaacatagacataaaagcagtacaccacatgcatacaataacattttatccccgacggtcccatgatgctttggagcttggacctaccaataccaaattccatacccatagttattactacttatcaattattatacgtgcatggttccccaaatcttctttcttctttcaaaataaaaacttgatcaaaaagatgacattttgagaattcactccaattcagatccaatcaaataggcaaaaaaaaaaatgcaattctatttttagaatactatactttataaaaataataactatagtcaaaaaaatttgaaatgtaatcactcacagtatttgacagttaatcatcaaactcatttccagagagtagatatagaccactcaccaagaaagattagtaaccattaattcattaataacatttgactaatgagctaatttcaatttcaaatcagcaactaacgaattcgtcactcattactcatttcaaatcatctcataccaatccaatttcataattcaaaattcacagtgataaaccagaaaatttgaaattttacctgaacagctctaatcacagcacctttagctaagtaaagagtcatatggctagtgagattgaagctctccgtcaaatacactcccggaggtatatacaaaagcgtgcctcctctcctcttcagatgctgaatccgataaatcgccgccctaaacgccttagtattcaccgttcgaccatctccaacgcctccaaagtcggttatcgagatcttatcgtaccggtaccgtaacggaactataccggaacacgtcgcctccgaatcgcccaacgaagacgaagaaacgaagagacatgagaagaggaaaattgacacagagagtctccacattttcgatgaagagaggtttatttaggatgagagtaaaatctgcagaattggagctaagattagtatgatatagtcgacactcgacaacgttcaatagaagaaggcacgtgctgatacacgtgaatcaacgggccatataagctagaaacgtttgggctttagtggcccaataaggatgaacaactttttgttttttgtttttggcggatttttttaattctttgattttctattttatttagggtttttattcttattatataaaggttggatcggtttgtgaaatttggagctaagatcagagatttcagcgatttggagattggag

SEQ ID NO: 4726 - DNA, 3000 bp, Unknown
  misc_feature (1)..( 3000): cDNA_ID_1808099_gDNA_ID_1620724_Annot_ID_165886 3000 nt of promoter + ATG
ttaaactttgagcccttcttcttccttatcaagaattgttataataaagcacgttagtgagaaaagggcgtacctaaaaaactcctgggaacagcaacagaactctccggcctctggttgttcctccttgctacctttccaaaactctgtggagtagatgaccgaggaagaagttgattctggtcgagagaagaagagtcagcatgctcatgcctcaccttgatgtgagggtaccttttgcagagaccagcaatatcatctttggttaaaagccaacaaccttggaggtcgagtgttcttagcctgttaggtggtctaaacttctcaagaccattgctggtcaaaactccatctcggactccgagactgactaggtttggaagagaggagagatggtggagtgtggaatctgtgagggatgtgcttgttagggacaaatgtgttaatccagtaaggctacttagaccggaaagagctttgtcacccaggtacggatgttctagactcagggtttcaagggaagttagagattgtagtgctgctagtgacttctctttttcttcttgtggagatattagatagtagaatcctgaaaaaaatagagtcgtagggttatgatagggttaataatcactcgttagatcttagaaggctcatacatacctagggtgctgttcatgcccaagtcaagggctttaatgcaaggcatcgtggtgctgataagcaagatggaaagatcgtcgacaaatgtctgggacatagataatgtctcaagttgtggcacatgtccagcaagattcccgaccccagaaggagtgatttgtgtatccgagacattaagattctttagattctcaccaacacatgctacaaacccaacagaatcatccccgaaagctgtggagctcagatcaagatgttctaggttaaacatagtttctaagaagctgaagtttttgagggaagtcttggaaacgtctaagtaggttatacagcttttgttggtaaaggacaaggactctgtctcggcactgaaattagctcccgataaaactagctttttcaaggaagctaatgagctatgagtttttggttcggagacaatggtgcacgtgttcatgtgtaagcattcaaggtgcggaatgtttggagtctgtgtgatgcttgtccacgagaggtttaggaagctcaagttagaaaatttgagaatactgacagctccttggttggttacgttgcttccccagatgtcaaggtactctagctttgtcagtgcctgagcagcaataaagaaaatggcggtcagaaaaactaaaaaaagattgatcgtctacatattaaatgttattacaaataggcatgtttttcagtgacaaaaataaaataaaaataggcatgtttttaataagtgaattcgggcatacaaacatcttcacgcaagaaactatattgaacatacacttgaacttcatttgtagggattaatgggtttaataaccaggaaatgatatttgaattttagaatcctgaagactaaatagtttctgtgcacattatactctatactcaacatagtagtagtacctagaactttacaattttagcagagctctctaacaaatttaactagatagatagatgataactattgaactacacagttcaataacatacatcatgcaattaaaacaaccctaatgactacaataaagaaagagcacaggtaatacctggagagaaatcaagttctgatcagttacaggtaagccgcccaaatccaaaagagacaattttttaagtgaagcaagaagagaaattccaacttcagtgacacctgtctgtgaaatccacaactttttcagatttacaacagattggaggtgcttcataccagcatccgtaaccttgaaacatcttgaaaggtccaactctgtcaaacttgttaatcctgaaaatccaatatcacatattaaacacttaaatttctcttaaacttccattccaaaactcggagtatatcactcaacatacctgtgataggccagagggtggaactgttgattctctggcaatctgaaagatttagagtaattagattaacgaagcctccaatgtaagccatccattctgcgttaactgagcttttgcctcggagatctatattctctacagaatatttgaatcctctgcacagaaaagagtcttgtttagttgtgtgatacagatacaatagttcagtgtccatgcaatcattgcattttccgcaacgatgtaccaagaccaacacaattctacagctaaacacttcaggaataattatttcaacatgaatacagaaaaaaaaaaaattctaatcaaatttaaaaactaagatcccaagcgatcactcaatatctcaaatcgaagcatatatatatatatatagctcagcatttcgagatcagaaatcagattcatattagaaacgatcagaactatgtaaggaagtgaagagtttactcgagtaacgaagggaaaagaagccgctttttgaggaggcgacggaggagagcatcagcaaggtgaggaggcagactctcaagactacgccgctgaagtcgccatcgttccaccgcatctccgctcttacaagcttcctttaagcatagacgcaccaaaggactctccatctccaatctccaaatcgctgaaatctctgatcttagctccaaatttcacaaaccgatccaacctttatataataagaataaaaaccctaaataaaatagaaaatcaaagaattaaaaaaatccgccaaaaacaaaaaacaaaaagttgttcatccttattgggccactaaagcccaaacgtttctagcttatatggcccgttgattcacgtgtatcagcacgtgccttcttctattgaacgttgtcgagtgtcgactatatcatactaatcttagctccaattctgcagattttactctcatcctaaataaacctctcttcatcgaaaatg

SEQ ID NO: 4727 - DNA, 3000 bp, Unknown; identical to SEQ ID NO: 4186
  misc_feature (1)..( 3000): cDNA_ID_1823302_gDNA_ID_1620724_Annot_ID_165885 3000 nt of promoter + ATG

SEQ ID NO: 4728 - DNA, 3000 bp, Unknown; identical to SEQ ID NO: 4718
  misc_feature (1)..( 3000): cDNA_ID_1839324_gDNA_ID_1620724_Annot_ID_49258 3000 nt of promoter + ATG

SEQ ID NO: 4729 - DNA, 3000 bp, Unknown; identical to SEQ ID NO: 4717
  misc_feature (1)..( 3000): cDNA_ID_1825216_gDNA_ID_1620724_Annot_ID_49259 3000 nt of promoter + ATG

SEQ ID NO: 4730 - DNA, 3000 bp, Unknown; identical to SEQ ID NO: 4716
  misc_feature (1)..( 3000): cDNA_ID_1838553_gDNA_ID_1620724_Annot_ID_49260 3000 nt of promoter + ATG

SEQ ID NO: 4731 - DNA, 3000 bp, Unknown
  misc_feature (1)..( 3000): cDNA_ID_1825277_gDNA_ID_1620725_Annot_ID_49266 3000 nt of promoter + ATG
ttgttttgatttgcgaattttataggtgagggggtaatatttttgaacagctttagaagtgtagaaatatagattgatcctttgttgtgatgttcaacaccaagaagatgtgtatccttttggaacccattgatattaatacataatatcatattattgagcagacatgcaaaaaaaaaaagcttattaataattcccttttttttatatagaaataacttttgtagcttcagctatgaggaaacattgatgtttgaatttatcattaggacacgagtatggttgtgtcacaaaaattccctagacatcctcatacatgaagcctgatacaccttggttagttggttctattctataacgagaaaacggtacatgttcggcctaacaatcatcatatgaacttgcgtttactattatcaataaaactaagaatttaacccgcggtgctattatgctttaaaaaatataaatttattttttaaaagattaactgaagatatatcatattaatttgtattttaaaatatagatatctatccttgtattatttagtatatgattactattatttaggtttcaaattttgaagtatagatatgaaaacctatatttttttaagtaacaatgtgtggtagattttaaaattttgaatattttgtctgcagtataccgcgggtcaattttttatagcttgtattttgagttatatttgttttgttaatattgtatgtttttgtgtttaaggttgtatgattgtattttgattgttaattttatgatttcatccgtaatatacctttctttattaatattgatcaaaacccgtcatcccatataaatccgtatatattatctcgttagctaaattattagtgttataaaatccaagaaaataaattattattgttctaattccaataatttaggatctcacccgtggtataccgttccttgaatgatttaaaatatatattactaatatagattttaaatttatcatataaagtatatgatttcaagttttgtgcttttaatttaaataaaagaacggtttaagtgatgataaatatagttttttttcctgtatgtgtatatgattttttatgtgaatattttaattattataaattagtatttttattgctatgcaaaatgttaatataaatatttgctataaattggatttatgcatattttgtgaagtaaaattcacgattttttttcaaaaagatatatgaaaagattgtgtagagatttttagaaacaaattaggcaagatatagtttggttaatatcttttttaatttttttaactaaataataaatgccagtggcaagcattgtaaataagtcccaactccaggatttattccacaaaatggttacaaaaatgtatatgtagatattaaaataaattttaacttaataagataaaaaaatttctaattattcaaaaaatcagcaatgttccatttagttaatattttatttttcacaagagattgctttccttttttcatcttatatatttacccaattttattagagatactttcttttatttctattaaatatttctgttccaaactgtaacgcccgtgaaccggaaaatcggttagggtttgttcttaaatcatccggtttaattggttgggttaattggaaaccctagagtgtgcctataaaagaaggaaattcgaaattagggctttagttagccacttttcgttttataaaggagaaaaagagagaaaaagagaatgagcagaatcgttagggtttgggagaaatcagtttcgtcatatcaaatcgtggtaaaaggcaacgaaatttggtagagttatttccaagtcctttattgttattctccagtttacagaattgaatttggattaaaattggttgagttattcgcagtttcgtgagacacgttttctcagacgcgaattaggaccagcggagattgaaactgagatcgtggtctcgtctgttttccgatcggcacgagattttgtgggcagctttgtgacgtctgcagctaggatttcaccggagcgattgaattgttaacggttagcttgtattttagggtttcgtttttgagactgcttgtttctggtgttttcctgtccagtttgcttcaaggttgcttttggttgtggacttgttgtaggacgtttctggactgtttcagacgcaaggagagtctctcctgggttcaattgctattagaatcttgttaaggtgagtgcgtgaccatgagcttatctaagcgattgggttgtgtgatttgttttgtgtgatgatatgtaagtgtggtgaatgtgttttgggtgaattgttcaatgactggtttgtttgtattgtattcgtgattatacctttgtatttgcttgtgtgtatagctcgtagatgggagtatcgcctcactaagtatttatgataatacttacgcatctcattgtgttgttgatgcatgtaaagataaagtgtgatcgtggaatcatggcaaggaagagaggatgatctaggaactcgtttgttttatttttggtgtttttggttattggaacccggttaggattgtcagttattcttggttttgttggtcgaattatttatttattcataaaatagtatttttgacttgcgctttaattattatgttattggttggtttaattagatattttgtgggaatatttgattatattttttaaaaaaaaaatgggtcgggttgtttcaatttggtatcagagcgattacggttctaggatgtgtagaaaaattaattgatgaattattttcctgttgattgatgtgggatgagctagggtgttagcatattgaggattgattatggagtgtttagtcaattgtgtgttgttggagtcctagcatcatcttctccgagccttaaatgagattccacggtaagttgtttgtgatatattcgtttgttttagtttcttagccatttgttcttgagtagcgcagatg

SEQ ID NO: 4732 - DNA, 3000 bp, Unknown
  misc_feature (1)..( 3000): cDNA_ID_1817429_gDNA_ID_1620725_Annot_ID_165937 3000 nt of promoter + ATG
aagcttgttgctcaagccactgtttgtgctatttggaagcagagaaacaaccttttgcataacttacaagacattctaccgtctatcatcttcaagaatatagaccgtgagatcatcaattccatcaacgcaaggtgtcatcggagaaagtttagatcgcttatgagattgtggatcagatagttctgtcttttggttattataattgtttgcttccttgttttttctttctttttgccaaggaaccaaagctttaggtaatcaaaaatataaatccaactctatttcattttatatgatatttactcacttagcaaaaaaaaaaaaaaaaaagttatattacaatttgctggtactaattaatgacttttatttgtatgtttaactagagcccaacccaaatttatcaaacgcacatttttttttgacaacttcttttgaattttctatttaattatatggctttaaacaaaagaaattatgatattgtgaaattgttttaataggtcaaatatattcaaatcaagatatttaacggtttgagtaaaaataagcttatagcaaaacttctgaaaatatatatggtcacgtacatattttgcagctaggaagtggacttatattactagctaaccaaaaacttataggtgcaattacagttttagggagatttttttagttctttttatttttatattagataccgttatgtttcttttcccgcaaaatctaggtacttttgatccgaggaatgatttttccattattagttaaatagcgatactattaaataaaagaataacttctactatctatgttcattttaattgattttctagaaaactacatatattaaaaaatatatattaaaactgattagaaatgtattaatttttttaaattatattttttttataattttaaaccagtgatatttaattatttgttttaaagtttaaaattcatcaataataactaataaatagtgaataaaaaatctaaaaaattaacttttttgaaacaattgtttttcctaaaagatcaagtaataagtaacagaaatagtaataaactattttcttatctcaatcattgtaaatagttttaaaatgaaagtggaatacaagtttcagttataaattataattcacactcaataacatattttgaagcaaggaagtgtacctatattaaatttcaatttcatggagcttgaacatattttgcatcaaatgagatcatgcagttttggatgttattcaactcattcaacatcgattgctataattcatgattctccatcttttcaacctgcttttcaaagatggctactaccgaatatgttgcctcatacttcattagattctacatttttttatataataaccaggatgacctttgtatatttttggccaagacatatctttataacttattaaaatgtccataaaaagcctttgaaaaatctcatgagaaagtcacaagcccatgtaaacagtgagtaaggtagtagctacacatatagtataagccagagtcgtagatcaggatcaagtgtgccatgagaaaactttggcttgtatgcactaaataacaaagtgaactagcatgttagagaaaagaagattacggtggcaaaaatattgtacttagagcatggtgcggtgcgagaaagttttgacaaacttttcttagagagagttttacatcaagatcaaaattacgtcaataactaaaagattatggcaaatgagcaccgcaaaaaataaatctcagtataaacctcaccattatcggaacactcgccggaaatctaagaaatgaggactctatcaagttagcctctatcaagcttctccgatctttagtcgatctatggatcttgcagatttaagagttttaatatcagcagtttttcgtaatcggtctccagcttcatattgcaattctattaaagaaaagttcaaatttggggttcataagagttatagtccgaatgtacgttttacaaagatttctcaagacgttgaaaaaaaattgccaatagagaaatcaacctcaacacagctcaaatctaaacaatgccagctcaaatcgaccgactataacaacaagattgttttgatggttcatcaactactcatatgtgtcatgacataccatttttcggaaaaaaatgagagcaaaaaatgacaaaaagaaaatgtggttgtgaaacacatctcatgtctcgttggtgcataactcataaggggaaatcctagactcgaaattaaacttgcatatcaccatagcacattatgattagtggagtaattgccaccagcaaaatataaatagttgtatgttttatatgaagacatagtatgtaaggtggtagaatggtaaagaatgcccccattaaaaacaagaggtagtagctttgaacccttttagcaatattttgcctccattaaatgttttggttggatctgcccttgacaatagctaaggtaatgtctatgtgttctccttctaacacagataaagaagtaacatgaagaatgacttagatagataggcttgagatcgtactgtttgtggtttgtttagtgattcggtagatggtggaagatttaattgaactctatccaattttcacgacattatagattgtagaaaatttgcattaacagattttaaattgattttttttttcactaaacatataattgaagaaatttattacaagtcatctttacttgaaagattttattactaaaaatcccgtttagtttatagttttaagatttcccaaatttaatattttccccaacaatttgtttaatactcctaatttagatttgttaatgcaaccaaacaatatgagtacttatttacaaaacctaaatactacaggtaccttttcgcaatttcccaaaactaaacacactcttcttcttcctcccatagaaacacaaaagccctaaatctcattttcttattacccgtcggagtgaa

SEQ ID NO: 4733 - DNA, 3000 bp, Unknown
  misc_feature (1)..( 3000): cDNA_ID_2151380_gDNA_ID_1620725_Annot_ID_165936 3000 nt of promoter + ATG
tgattttcaactcatagaaacagcataaaacataggggtaattagaagaagaaaaattatggtaatgtaaatttaaaataatgtagacaaaatcaattaagatgttgtatttgtttaattcttgaccgccactatatgtaaagcctattcttgttcgacgagcagtttgctatttttgaaggctttaaagatttgtttgtcggtcttcaaaaattatatatgattcttttttgtgttttgttctcattcaaacactaccgaaaatcactttccggtagatcatctatcatgaaattgctccagcacaaacatgcttaactgtaaagttttttcgatatgtttaatcgaaaagataagtgcatttcgtggatatagatgatctaattaatttttaaaactcttttcattcactactatatatcctgaaatcgggatgttacaatttatttctgaatttttttaagtgtctcctacataactagatatgttacaaccactatggatcttatttctaaaaagtattgaatacatcatgtctaaattgattaattctcaaatatactacattttatgctattttctgtaacttccatcagaatccaaaatttttttttaacataccataaattttaattttatgatttatgaaatatttatagattttattattttaatatttttaaaaaaatccaaaataatagtatctttttagctaaaatttcttttactgtattttaggatatttctctatctaattgtacaccatacatataaccataatttggtgtaattcagatttaaattaggatgacatcaaaattagtcaaaatcaaaatagcatctctattttattcttatacttccaaggaaaaaaaataaaagagctttaaacgtgtcgttatagctgtaaagctggtgatggaactggtaagttggtaactgcttcgaccaccgtacgaatatggtggttactggttaggctacacggtaatttcttttatttacctgcagtgagaaaggtaaataataatgagtgagagagtaatggataattctgaatttgtaatgtcattgtcattgttttgtcagtaagtgatgctttagttaactcatgtttatccatatgggccattctatgtttcatatatatatatatatatatatatatatatatataatatgttattttactttttataattttgattcttagtctttatcagaaaagaaaaagaattgattcttagttcttggatttatgaaaagtaaataattatgtgcaaagagattctttgataatttttcaatataataaaatattaagaatattatttaaaaaaaaaaaattgagggaagagattcatttgattttacgaaaacgctaaaacgagatggattaaatgttagcctttttcatgacaaatatgttgtaaagcataatcatgtacaaggtaaaataattttgggtttttagtgtttatgtcgtaattctataatttttctcaactacttttttctttgtataatttagcatttttaatatcaaacacttttgattccaaatacagtttatttttattttcttaagactacttaccaaacacacataaacggtttttaatatctaaagttaccaaatgtatgtatttcaaaaaacaatcatcagcaaatttagatgttttgaatttttattagaagaaatgcattgcatggttataattagaaaattaaaataaaatataaatcaggattatatgaccaaaaattgttttaacttttacttagcatttacacataaattaacagaaatataatattttttaaaaaataattttcttataataaaaattgttatattgaaattcgaatattaagatttggcaagtcgccaaaatataatcacactcaacaaatttatattgtctcactaattatctgttcataatacatatatcaaatgtataaatcttaatataataaattttaaactaatttcaactgtcatactaaacaagagtttatacaagtctttacctagtgttatactccctctggaaatgttaaagcttattgtttaagaaaacatattatacacctaaagaaaactatgcattcgttttgtgccatgtgttgttttactagtcgtgactcgtgattctccatatcattacgttaatcccaactctcaactattattatgttattttttactatagaatggaaacttgtagattacttatatgaaggttgattaaaatgtaattaaaatctgtatcttttttataaaaaaagtctcttcatatatgttttagttgatgagtgatggacaagtaaaaataaataaaataagtacatacgttttgttttagtgatataaatatatgatgccaaaaatgtacatatattttctggataaatattagagttgtagatccaggtttgctatgatctagctctgtccgaaaattgcagagcgtgatcttttctctgtagtacgaccgatttgttttactttatccaatcgttttaactttttcaccacggttaaaaaagttaaaatcagatctctaaccattttctcaacgaacctcgctaatatttctcatttaatcaaaatttaatcaccattaatcctttggttgattactcttttgtcctcttcttcttctctcttctctttcttggtggctctcttcttatagccactgttccctttttcattgtattcctcaaatctctttacttgatcgttggttctctcaaaaatcagatttttatttctgggttttgttcgattttgtgatcatggcggtcattgagagcgtcggagctaatactactgtggaagctggtggtttgatctcgccgtcgccgccgtcttccgtcaccagtcaagaatcaggagcttcttctaacaacgatcacggtggaaatggaatccatgatgagatcggagtccacgtggcgagatccgacggtggtgagagttttaagcgtgat

SEQ ID NO: 4734 - DNA, 3000 bp, Unknown
  misc_feature (1)..( 3000): cDNA_ID_1024400_gDNA_ID_1620725_Annot_ID_49269 3000 nt of promoter + ATG
cagcattttaaactaaaagaataatctaaaaccactattttcagctttgattccaaaaacacaataattcttttaagaagatgtacaaaaattcgaaaaaactaggtagatttgctaaatttatccccaataattacaaaaccagataccaaatcaaaacacatgtatattatttccgaactggttcggattaattgattttcaactcatagaaacagcataaaacataggggtaattagaagaagaaaaattatggtaatgtaaatttaaaataatgtagacaaaatcaattaagatgttgtatttgtttaattcttgaccgccactatatgtaaagcctattcttgttcgacgagcagtttgctatttttgaaggctttaaagatttgtttgtcggtcttcaaaaattatatatgattcttttttgtgttttgttctcattcaaacactaccgaaaatcactttccggtagatcatctatcatgaaattgctccagcacaaacatgcttaactgtaaagttttttcgatatgtttaatcgaaaagataagtgcatttcgtggatatagatgatctaattaatttttaaaactcttttcattcactactatatatcctgaaatcgggatgttacaatttatttctgaatttttttaagtgtctcctacataactagatatgttacaaccactatggatcttatttctaaaaagtattgaatacatcatgtctaaattgattaattctcaaatatactacattttatgctattttctgtaacttccatcagaatccaaaatttttttttaacataccataaattttaattttatgatttatgaaatatttatagattttattattttaatatttttaaaaaaatccaaaataatagtatctttttagctaaaatttcttttactgtattttaggatatttctctatctaattgtacaccatacatataaccataatttggtgtaattcagatttaaattaggatgacatcaaaattagtcaaaatcaaaatagcatctctattttattcttatacttccaaggaaaaaaaataaaagagctttaaacgtgtcgttatagctgtaaagctggtgatggaactggtaagttggtaactgcttcgaccaccgtacgaatatggtggttactggttaggctacacggtaatttcttttatttacctgcagtgagaaaggtaaataataatgagtgagagagtaatggataattctgaatttgtaatgtcattgtcattgttttgtcagtaagtgatgctttagttaactcatgtttatccatatgggccattctatgtttcatatatatatatatatatatatatatatatatataatatgttattttactttttataattttgattcttagtctttatcagaaaagaaaaagaattgattcttagttcttggatttatgaaaagtaaataattatgtgcaaagagattctttgataatttttcaatataataaaatattaagaatattatttaaaaaaaaaaaattgagggaagagattcatttgattttacgaaaacgctaaaacgagatggattaaatgttagcctttttcatgacaaatatgttgtaaagcataatcatgtacaaggtaaaataattttgggtttttagtgtttatgtcgtaattctataatttttctcaactacttttttctttgtataatttagcatttttaatatcaaacacttttgattccaaatacagtttatttttattttcttaagactacttaccaaacacacataaacggtttttaatatctaaagttaccaaatgtatgtatttcaaaaaacaatcatcagcaaatttagatgttttgaatttttattagaagaaatgcattgcatggttataattagaaaattaaaataaaatataaatcaggattatatgaccaaaaattgttttaacttttacttagcatttacacataaattaacagaaatataatattttttaaaaaataattttcttataataaaaattgttatattgaaattcgaatattaagatttggcaagtcgccaaaatataatcacactcaacaaatttatattgtctcactaattatctgttcataatacatatatcaaatgtataaatcttaatataataaattttaaactaatttcaactgtcatactaaacaagagtttatacaagtctttacctagtgttatactccctctggaaatgttaaagcttattgtttaagaaaacatattatacacctaaagaaaactatgcattcgttttgtgccatgtgttgttttactagtcgtgactcgtgattctccatatcattacgttaatcccaactctcaactattattatgttattttttactatagaatggaaacttgtagattacttatatgaaggttgattaaaatgtaattaaaatctgtatcttttttataaaaaaagtctcttcatatatgttttagttgatgagtgatggacaagtaaaaataaataaaataagtacatacgttttgttttagtgatataaatatatgatgccaaaaatgtacatatattttctggataaatattagagttgtagatccaggtttgctatgatctagctctgtccgaaaattgcagagcgtgatcttttctctgtagtacgaccgatttgttttactttatccaatcgttttaactttttcaccacggttaaaaaagttaaaatcagatctctaaccattttctcaacgaacctcgctaatatttctcatttaatcaaaatttaatcaccattaatcctttggttgattactcttttgtcctcttcttcttctctcttctctttcttggtggctctcttcttatagccactgttccctttttcattgtattcctcaaatctctttacttgatcgttggttctctcaaaaatcagatttttatttctgggttttgttcgattttgtgatc

SEQ ID NO: 4735 - DNA, 3000 bp, Unknown
  misc_feature (1)..( 3000): cDNA_ID_2992375_gDNA_ID_1620725_Annot_ID_165929 3000 nt of promoter + ATG
ttgtttatgggtaagtagaggcctagaacaccatgtttggttcatttgtcttctttgttgtaaattcccgataactcctgttactagtaaatataaaacaaattatcagttcttgtaatgaaaaaaaaaattttattttgtttagtaaaacatagttgtgctacagatttttctgaatattaataacatatttacagtaacaatttttttcaattgtcattagttttgacgaatacataacattcttactaaaaaaattatataaattaaattttaaatgtcatataattttactttaaacaaactataacgtaaatattatgaaagcagaaaaatgtagctagacatattatcaaatagtttatctctaactaaaaaataaattatatagaggtactttcaaaatattctataaatttaccctttttaaaacaaaatattaatatttcttatacaaaacagatctagcttaatacattttctatagggcacaaaaaagaaactattgttaatgaaaatgaagcaaagaaaacatgtcgagaaaatgtatagcaaatataaattttcgtaatataataagaccattaatataagaaattaaccaaaaataggtgaagaaatttaaactatacgttttgggtatcggttttcttggtctagcacaaaatgttttactcaatttttatgttttatataaagttttcatcaaagagctttactcaatagtcaatataatgtagttagatagtgaaatttttaactttgaaacaaattttatataacataattgaacaaacaaaattattatatgatatttgtatttatttgttttaaaaagactatatgttacgtataaaataattacaaaccttgcacaaaaatgacgaagagagttagaacggtaaacgagaatataatgtttttattcatcttagctgatataaatgattatatatatatatatatatatatatatattttaatctgaaaattgattgtgtttaaaaagaaaaaaagaaaaaaagaaaaaaagaaaaaaagaacgaagaaagcatacatatatataagaagttaggtatatcccacattataacttatctatattaagccatctatctccttaaattccgattgagctttttactcatttgatatgttaaaagctttttaccagctagtcctatacaaaatatttttccaaattaagtaaaagtgataaattagtaaaattcatatataatttagagaatagatatactaaaatggaaaaggttataaaaatagcattttggttttcataaaaaggaaaaattaatttagaatgtaactattgaaatagacttttgtttttcagtttttttgtgcaaatacttgatttcattcattcaatcaaaacaaaccaaatcaaagtacaatgataggaatgattccaagatcccaatgtttataacatgaaaagatagagtgttccctaatgcaacataacaatagattaggtagtccgacttgtgattcataagcgcttggagacaaatgttagaaaggaaattggcacaagcaaatccatggtgagtcgatagtgacggttgattgatttcgtgatgttgaaaaaaattccaagactttgattcttgcttgcatgagacgttttacacagtttatcataaaggtaaggaagatcggtagcttacacagtttagaagccaaaagctgaggatgaaaacttgtaaatagagttctcttcgtataagagaaggagatggttagtttctccataaagaaaccaattgaattcatggtttctcattgagcgagggataaggattcggaagactctcatagtcggatagccttagctttgtagctctaagaaataggtcgggatctctcatggaagatgcaataattttttgtgggagcttgatctgatccgtaaagatgttggtgattgtgagatacttgagatcattttaaaatattgtcgacctaaagtgaacgtacatagaggatccattatcaaagtcgcaccaccgatcaaggatcatcaagtttatgctttcataaaacgtggccagagttgagtttagcgataaggttcctagatgataagcgcaagaccaattcatcaaaatcgattcacatctcatgtcatgtcctcggccacataggtaagagaatcgatgcatctatgtaatggacttgacaaaagaaaaaaaacaaaatttggcaaatcattctaaagaaccaaaattacttcgtaactagtgaaagtccttttaagaattcataacttagaaatttgtaagttatatgcgagcaacggaaacattcggatatttttctagtaaaattaaataattagagttttttttaaagaattaacggctagaggagaaattaaattactatgggtatttttttcagcaaaaaaatagttggatttttttttgttgagaaatttcccttttaacaagttccaaaataaaaactgattatagtagaaaaaaagattggaaattgataatactacttgaattttttatatgccttaaatagtatataattgttttcaaactttagaaacattaaatattaattagattttagacattatatagagtttaaatattatgaaaattataaacttttataaattttaatattattctattttaaaactcttataaagttaatatttataaatttgaatattttaaaatgaatatactaattcatagtagaaaattgatactttggaaattggccgttgttaattggaaaacatcacagaccataaattgggatcttgcgtgaatccatcaaagacctttctctgactcttattctttctcctccaatctagggttactccgaattcttcttcgtgtccctctccgattctctgcacgttgtcgctgttgtttcctctgaaatcgtctcgaattgaaggatcttggatcttttttttgctgccattgatcggttcatctttcaaatatg

SEQ ID NO: 4736 - DNA, 3000 bp, Unknown
  misc_feature (1)..( 3000): cDNA_ID_2158474_gDNA_ID_1620725_Annot_ID_165932 3000 nt of promoter + ATG
agagtttctaacctatattttaggaatttatgtttatctcttgatagagatcattgtgtataaataccataattagtaaatcaataaaagcaagtcagttgaatacctaattctacattataccaaatactccatgctccatgctcctgttaaaattataccaaatactccatgcttggcacatttctctacgtagcatgaaaaaaaaaatgaatgcatgatgaaaaaatcacgatggaattatgttggatcaagtcatatgcgaatcattcctcagaactatatgtaacattaaaatgatcataagtacaaatacaaaccttgcacaaaaatgtacaaatatatatatatttatatacattgtttttaatttatcgtaacaaaacaattacacccattattgtgctttatgattttgtagttggcaaaaaaatgattttgtatttttgatgcggattatgtctcatgttgaagacatttcattaatatttaaaatcattggctgctattcatatattgtacattataagtaaaaaaaaaattgaatgtaagataaaagtaatcgttcataaaattaattatatttttcataaaaatttatttgagtaacttttatcctcaatttaaaacgtaaaggttttgagaatgaaattttcttttaactttcttttatttcttcagtatcctaagtaatattttttcttttggcaactctaggtaatctatttttttataacaataataaaatttatcatctacaacacactaatccatacaagaatttggtaataacactaatagaaatgacaaatatttgtttgattttaataagacatattatataatacggaatatgaaatgatttttggatgtcagaaaaggagaaaaacaaatgattattattttaaaataaataaatgcatcaaaattatcggcaacgaaaagtgcaaagacatctattttcactagagcaaatacccattgccttgccccctttaaactcaaattgcttctgctccttacacctagccgaacaacggtcgttattacatggtcctggtttttggttaggtagaggccttttgcaccaaccttctaccgggtgtctttgtggcatactatccatcaatcctgttactgttatatattaaagatgaaatattagttttttttttggtcttataaatatagacgtttccaaaaaatttataatagcaaaaattgtaagtttaacattgaggtagttcaaatgtcataaaaatttacttataaatataagatatatgtatttaatgtttatgaaaacaattatcatggcacatttatctatgtggaaagaaaagaaaatgaatggatgatgaaaaggcaataaaacaatattaacgtatatgttcaatcagattatatcacaatacttcttcttaatatattatcaccataaaattacctaattaaattgaaaaataggtgaaaatattgttaaaaaaaactgtttggctatcaattttctaggtctagcactaaatagttacgtattaattttctagttctagtatgaaatttccataaaagtcctaaattcaatatgatgaaatttttaattgaaaattaattatgacacatattatataaatattgctgaacagattttttaaagaatttattcaaaataattaacttaaaataaataaaaattacatataaaaatgattataaatgaaaatacaaacctagcagaggaatgacaaaaagaattagaactgtaaatgagaatgtttttttcatttcgatgatagaaatcaattgattgttttttcaaaaaatgattgtgagtttagaaatgaaaaggaaagaaaaagttcacctacatatatagatgtaccccacattagaacatgtatattttaagctatctaactccttaaattactcgttgattatctaagataataaaagcataagactcgctctacatttacaaaatagttttccaatatatataacttataaaatttatatatttgtccatatattaaaatacaatttttagtgctttttgtggcgaatccttatttactctcaaccatttttattttttcctttctaattctaccattgctcttgccaaacgctttcattcttttatctttataattattaattataatatccttataatattgtaaaaaatttaataagctatgatatatatatatagtaaaaataaaataactggtttggtttcagtttggtcctatcgagttcggattaagactttgataatctataaatacttgagttgacttataattatcatgataaagttgagcggtggtagttcaaagaatttttagtctcaatccatataagaaaggataggaacagaatgcattgatccattaaaggaatgtcaaaaaatttcaatatcactacatttaaggaatgtcaaacttcttctaactacttttttaactaccaaaatctgaacaattatcagtttcaaaatcaatctcctaacaatccccaatttatgaaggcttatagcaaaaataaagacttgttttaattaatttggacacaaaaaccccatctttttaaattaaacttttgctatcatccttcataaactcttgtttattttttatccgtctttttagtgaaatagatcataataatatcattttaactcccaaaatttttctaattacctttttaactacccaacatcaatctcctaaccatcaacataatataacaaattatggttatccaccaaatttctttatatcgtcaactgttccaaactatccttcatattttaaaatatttaatttttacttattttaattttatttgatattaattgtaattaattaatcacaaaaaacataaacataattaaaataaaaaatataaaataatggtagggtaatgtgttgtaattttattaaacaaaactattgtagtaagtaaaaattatgtaggtattgaattataatg

SEQ ID NO: 4737 - DNA, 3000 bp, Unknown
  misc_feature (1)..( 3000): cDNA_ID_1843201_gDNA_ID_1620726_Annot_ID_49278 3000 nt of promoter + ATG
acaaaggccatggtatataattttgttactagttgtttcatgtttgtttgtgatcatggtttatcatcgtgtttgttattgttgatggttgcaatttttgatttaggtttcgagattcttgcgtttccgtgtaaccagtttgggaatcaagagcctggtactaatgaagagattgttcagtttgcttgtactcgtttcaaggctgagtacccgattttcgacaaggtaacaacttttcttgacacacgagacgaagatatgtgagaatgttgctagctcttagagcatcactgaataatttttggaattggatgatgtagtctgagtatcagtgactcattttcagataatgtttcgttttgagtataagttctctacttggagttgattctacctttgcactatgtaatgcaggttgatgttaacggtgacaaagctgccccagtctacaagtttctgaaatcaagcaaaggcgggctctttggagacggcattaagtggaacttcgcaaagttcttggttgacaaagatggaaatgttgtcgatcgtttcgcaccaactacctcacctctcagcattgaggtaatgtctctatcacatgtaatcatcaaaagcttgagttttgtttagagccacaaagtttctaattgcttgtcaaatcgttgtttcgcaattgcagaaggatgtgaagaagttgttgggagttactgcttaagcaaggcaagattgcataattagacaaataaaagctcattagtattgtattaccaatactgtgtagtaagctgagttcgtgagtgtgtgcctttgggaccgcgtacaattataatccgttttttagcggccaaactatgtaataatcgtagatctaaatatcagatttcccgttaccttacaatttggatcagtctttgttaccaaagcatgaaactgtgtctcctacaacaaccgaacagtctctacataatccggaaaaaccattgcttttgtttcccgatgcttgaagtcatagcctccgtgtacttcaaccttggtttttcttaaacttttcgtgtcgggattgtaatagataacataaaagctattagaatagaaccgtggtgccaaaataaactcacctgtatgagtagtgcctgtgataaataaatcacaaaataaccacctcctaacacctttgatactgaaacttttcttcaaccatccatgaatttcggcttgctgatccaaaacccacacttcaataccaataaataaagttttagtggctaaggctactttccccttgtacctcatcaaagtgaaaccatgtagaaatgcagctggaaagtccgcgggtaaactagtaaaaagatccaacttttcagaccccaaatcgaatctcattaagctcagctgtgacaaatcttcgcccgtaaaagcaacataatataaaacaccatctatgcacacactgttcagcacaggaccgtgaggagttgtataatcaatcattctccatggtttctttttaactcccaatgggaatacttgatgttgagatgatagttgtaatattcgagttcgaccgtcatgacgttgcattttttccttcatgcacaataccaatagtttgtattcatcattaaccggatcataccccaaaaaacattgcgcaaccttactattggtttggactctccctaaaactgtggatttaccggtgctagggttagttatgaatttctctagaccatatccatggcttatcaagccattaacataatgagaatagtgcacataatctggaaagggacatgtaacacgtgatagataagacgttgttgatgaagagagcgagaagaagtaccaatcttcgcagttccattgtttatttaaatcaataaacacgactagtagacgcggctgcaacgaagacctaacctggaaagacgtgatgaaatgtctacttcggataatttcggcccaaaactttgagagtaggagaaacctagctacggatttcacaggcaatctcataaatatctctatggctacgtccaaaggaacatcattgaagttcttctcttttaagatttcaagagactgagaattgttctctattaatttactcttcttgaattgacttgtcgtcatggtcctgaccgctcactcttgtttagagaaaccctaaatatctctacgtttcctgttctttataagttgaaatagagaggcaacaatagccctgcgcacaaggcgagtacttaatattttttaagtacttgtgacccgccttggtccgaacaagtaactgaccaagtagttgccaataggcccatatagtatgattaataactcggaagcgtgggatattttcggtatttttaacttttttggcaaaacgaaaaaaccctagttatcctcttagccacaactctccacgaacatgacctaagacctaagcaaggtagttctttaattccatctccttgctatagattgtgaatcattcctattcatttattattttcgtttgaatatattgccttgtatgatgctttgcttgaattggtgttctgtttgttattgttttcggagaaaggattttacaataccttttctaagtagataagttgcttacaattgaatctcaaatcatgaccgaatagtgagtgcttacaagcacagactattcgaaccttaattagatcctttttaccataacatagttgtagcaccattggttgtttacttctatttctttatagcacaaaactaaacaaaagaggagtagaactacagaagtagtgttgctgttctggtgttgtaaatatgtaatactggaacttctgtagcattatcttgcaagacactacaatgtattgcttctatatgttattaccattgacttactcttcttttgtttgataatgaaaatcctctctttctcttcaacaagatttgtattcaatgttttcaacctttttatctcttgtttctgtatgtagtagtaacgtgatg

SEQ ID NO: 4738 - DNA, 3000 bp, Unknown
  misc_feature (1)..( 3000): cDNA_ID_1825355_gDNA_ID_1620726_Annot_ID_49281 3000 nt of promoter + ATG
caacgagctaatgagatatgtcgcagctctgctagaagggcaagaatcaaaccctagttttctggattcattttcagaccagcttccacaagaagaagaagaagtgaaacgaagagtgttggagatggagaaacgatgcctctgaagcaaccgtgtactgccacgaatcgattgcatctctccgcaagaggaatcgacaaaaaggtgaactaacctaatttctcaaattagagattagggtttagggttttgatttggggatttcagtttgctctgtttacagggaattgcagattcgagaagacagcacggagctagaaaaaaagaacaccacgctgttttattgcacaataaacgtcgtgcattgcttatctaaataaataaaactatcacattcctttagtccatgtacattttttgtttacgttgacttctctagaagactagaaattagaaaacaaggtgagaaagagaacaagtggagatgagataagatcggcagagaatctaaatcaagttagaaatagaattgtataatgatcactgattaaatcttaaatcttcatatgatagttgactatttcttcactaaaaagcattttatatatgaactaaacagctaactaatctccaataaaattcttatgatgttaattcttaccattgcaatctttttttttattatataacattgcaaacttgttatccaacatttatggattcaggactatagggttgataactaaactattgattttgactgagacctcgagccaaattgtatatttttatttatctagtatgttttttttgaaggaacatagattttggacgtgttagttaacaaattttatgttattatatccggttagtggttttgcttagatcattcacacacaaaatacactatttattatcggttttaccattagtcaattttactaaaaacaataattatctagaaatctacaaatagcatggtatcaactagtactgtgtttattatatgaatcaagatgtatagaaaataaatctcataatctgcgatttccatttcaaccctcgttcatcgtgccatcactatctctctctagtaaaaaagtgagaagttcaaagcttgaatgttggaaacggaggcaaaaatgaattaaaagctttcccatctttctccttatacatgtgaatcaagatcagaggtttagtcttcagattaggattttgatgggatagtagttaaatccttgtatgtgaaattgtgaatcatgggaatccataaaaagatagagaccccacttctaaaatacgtgtataaatacatgcacacacatgtattttgtataaatatatatagcatttaataatcgtatcacttactgcggagacctagctagtagtttttctattggtggaaatttagatcttaagtagtaagagctatgtgctcaatttatataagtcaaagaaactcatgtgacataagcgtttttctaggatctttaccttagatatatgcatgcatgaactcttgacctcttttatacgcatctgcatttatgtgtggagataataatatggtttttcattatttttcctgaatccatctcatccaatcaacaaaaagagactaaagagttgaccttatttcttgtattccaatttataactctgtaaaatagatttggtttttgtaagtttgttttacttacaaaggaaaaaaaattatgggttgaggtcctagttgaggtacaccatatcctatttataactcatgtcaatatgttaaggcacaccatatcatattaatttataacaaaaatatgcattattgtacatgtataaattaaggtcggttctggatttttttcaatttttcaagatgagaaacatttaagaaaatcccaagaaactctgtctgcccttacttgaaatctaagttggtcttaccataattattcaatttttctccacaacttacatatacttatgaatgcacatgcatgtgcatataattttattatgtagtatatagttccaagaccctttatcaaaattgaagttgtgagcttgattctactctaagtctctctttcacttttaagtgttcgatcaaaagatcgacggtcatgatgatgagcaatctaaaactcggcgtggacgtgatcggagcacacaatctcttcccaaaagatgggcaaggaacatcgaacgcttacgttgagctttacttcgatggtcaaaagcaccgaacaacgatcaaagatcgagacttaaacccggtttggaacgagagtttcttcttcaacatctcagatccatctcgtcttcactatctcaatcttgaagctcaagcttatagtcacaacagatctactaatggacgttccttccttggcaaggtatctctctcagggacctcttttgttcctcattctgatgctgttgttcttcactttcccatggagagacgtgggatcttttctcgtgtgagaggtgagctcggcttgaaagtttacataaccgacgaggcttctttaaaatcctctgctgcttctaatgatcatccagataatctagatccggcgctcccaagaggtattaacctcagctttgataccatttgttatatgtactaattttccatataccatttttatttagggtagccatatgatatttttggttcgattcggatcagctattttgtttttttaggagttgagagtctaattgaagccaaaatatttcggtccagttgccaaacctcactttttctttcatcttacttttgaaatagtaatatagtatttgttttcaccaaattttgggttttgttcgatttcgatccggtttattttgcatagaaaataatttaaacaatgccgttataaataaatatcagttcaaatttttttttttgtaaaacattttggtttagtttgattttatatgctgatttctatttgtgatttacttggaattggttttgtatatgtaacaatg

SEQ ID NO: 4739 - DNA, 3000 bp, Unknown
  misc_feature (1)..( 3000): cDNA_ID_1825346_gDNA_ID_1620726_Annot_ID_49284 3000 nt of promoter + ATG
aaacctctgatcttgattcacatgtataaggagaaagatgggaaagcttttaattcatttttgcctccgtttccaacattcaagctttgaacttctcacttttttactagagagagatagtgatggcacgatgaacgagggttgaaatggaaatcgcagattatgagatttattttctatacatcttgattcatataataaacacagtactagttgataccatgctatttgtagatttctagataattattgtttttagtaaaattgactaatggtaaaaccgataataaatagtgtattttgtgtgtgaatgatctaagcaaaaccactaaccggatataataacataaaatttgttaactaacacgtccaaaatctatgttccttcaaaaaaaacatactagataaataaaaatatacaatttggctcgaggtctcagtcaaaatcaatagtttagttatcaaccctatagtcctgaatccataaatgttggataacaagtttgcaatgttatataataaaaaaaaagattgcaatggtaagaattaacatcataagaattttattggagattagttagctgtttagttcatatataaaatgctttttagtgaagaaatagtcaactatcatatgaagatttaagatttaatcagtgatcattatacaattctatttctaacttgatttagattctctgccgatcttatctcatctccacttgttctctttctcaccttgttttctaatttctagtcttctagagaagtcaacgtaaacaaaaaatgtacatggactaaaggaatgtgatagttttatttatttagataagcaatgcacgacgtttattgtgcaataaaacagcgtggtgttctttttttctagctccgtgctgtcttctcgaatctgcaattccctgtaaacagagcaaactgaaatccccaaatcaaaaccctaaaccctaatctctaatttgagaaattaggttagttcacctttttgtcgattcctcttgcggagagatgcaatcgattcgtggcagtacacggttgcttcagaggcatcgtttctccatctccaacactcttcgtttcacttcttcttcttcttgtggaagctggtctgaaaatgaatccagaaaactagggtttgattcttgcccttctagcagagctgcgacatatctcattagctcgttgaaaaatgcaggcttttcctcttcagctatacctgtaagccactttcgttctctatcttggtttaacattgtcgaaatgtagaagaggtttggttggtaatggagatcttatatcaaatgggtttgaaaattgcaattagtgtagaaaaacgcaaactttgctcttgtgtggtagtaagagttatgtagatatagaagaaccagctttgacacaagttttatgatttcacaagttgttctactttatatgtttgggtcacagtgatatctatctagtatgttaatgtacattaggtttctacgtgtttacgatgttcttggaaatattttggcagaaacaaaactttacgtatgcgtcgaggtgtttttccaccactggagattcttctgttcaaggatctcctgagtcagattgtgttgtgcctcagagaatcaagtttaagcggcttgataaaaccgctaagcatataatgcaggtactacaactcaattactagacaactgtcatggataaatcatgtcatatgacacaatcttctgcagattgtagacaaggaagcggttgaggaagtgagatctcttagagagattcctgagataaagcccggttacattgtgcagctaaaagtggtaatttcttttttcttggtgaatgggattgaactatctttgtctttaaagtgaaaccttttcataggcttgccatttacttttgtttttaacaggaagtgcctgagaacaagagacgtgtatcaatcgtgaaaggcgtcgtcatagcaaggcgtaatgctggtctgaactcaacatttagaattagaaggcttgttgctggagtgggcgttgaatccatgttccccttgtaagtaacttgaagctcaaactgcaactacttattctttttttctttctctcagaatttgtatatgatatgataactcaagccaccatgttttgtgtgccttaaattgatgtgagtgagggtgtttggtgacaggtattccccaaacctgagggagattaaggtggtggacaagaagaaagtaagaagagccaagctatattacctcagggacaaggtgaatgctcttaagaagcattaacaacctcagtaaaaaaaacaatctactcgtgtcttaaacaattttccaatgttttagttgcactctctcaaaaggagacgatttgcctcaaatttcacgtattgaatttgtgcaatggtgaatcttcttcaattctcttctctcccttgttggaaaaagcacatgggctaaagacatgttatagttttatatatggagacaagtaatccacgacgtttcttgtataataaaacagcgtgacgttcttttttttagctccataacacaacgctgtctttgagtaaatgtatctgtcctctcgaattctgcaatttcctgaaactgggcaaattgaaattcccaatcctaaaccctaagctcaaatttgagaaattaggtttgttttcatcctttctttgtctcagtcacttagtttttgggttttagtagactcctttgtattttttaacccaaaaattgcaatgtcaaaagtttcagtcttttgcaacttctgctgtgttcttttgtgatttgagacagaagagaaacttaatttgtctttaaagctaacatttttaggtagcaaaaattagtatattgagcataaagttaacaaatttgaagttatttaagatgattgaggatatggttttctattctgataagtaggaagttgatgaagtgataatgaagcttctttgaaatgtttttactttttagaa

SEQ ID NO: 4740 - DNA, 3000 bp, Unknown
  misc_feature (1)..( 3000): cDNA_ID_3089590_gDNA_ID_1620726_Annot_ID_49285 3000 nt of
acatattagctttttgaatcgagttccacaaacgcaaatccgacaacaaaacaagagaaacaatctcaaagacgttacaggcatcgaggacgagtcctcaccgagagtaaacatatatgagattcgcagctaatgacccagaacagaagatgaaatcggataaaattatttgggcatgcacttacctgcattgttgagccgtcacgcataatcgaagaagatggtggaagtaatggaagaaggattgatcattgtcagtcgtaagggagtagtacgaggaaattgaaacggtattgggaggagaaatcgatgtgtattgacattgagaagtgagaaagcaacaattatgaagatggaaacaaacagaaattgtaaagtcgtcgtgggggattgggtgagaaagagaggtttcttacaaattgattttcgtttagaaattaaaattaaagaattgaaccgaaattggtttgaagacaaaatggacaatttttatattagaagtgccttgtgttttgaaagtgtcgtatctcggaaattgtttgagaaaagtgtcttagaatgtaatattctctatttatttagttggagtagttgttaatttattaaattacccatgcaaaaaattcatttagttaattttaaactacccttacaatgttgtagttcacacgatacttcccaattaatagtatagataataaaaaaggcaagataaacacaataatatactatatacagtactttaataaaaaaaaaaatttgaaaataaatgtccataatacaactagaaataagaaagatgatgacctacaaatattatttatttgccaagtgaaacatattaaaaactacatatttatatataatattaagaaaattagattatttagtttggtttagttagaaaattttaaaaaatcttgaaaaaaatatattttaaatatataatttattatttaaagaaaaataattatgaccctcgtaaacaaaacttttggctgcaccactaggatgtatgtgtgccaatagatgtcacatgatttttcaagacgagtatcatcgttgaagaaatttttggaaaaagttttgaatataccaatggttactacgatgattatttttaagaaaatcaatgaataaatttgttaagtatgttgttttgttcacattaatctctctgtattaggataaattattatttacacaccgttgtccagtggcggagctaactcataaccaagggggtcagttgaccccataacattttaaaattcttatttacatgcttatttaattggtatataatggtatattttggcttgattcatctcagctgacccctatgactcatgttaaactaatatttgaccaccataataaacttttctggctccgccactgccgttgtttatggacaaaattaaaacgtgaagttgaaattatgaattcgtaacattcatttttttaacatctacgtatattactttcaaacaaaagatacaaacataatacaaaccatcaaaacacaaaataataacaaagaatgataaaatagtaaaagttatgcttacgtgtgaaaaattttactcgctaaagaattaagaaatccattactttccttcgtaattgggcaatgggctgcaccatgttttcagttgttggacatctgaaccaatcttgtgatataacttcgaagtcccaaggtccaagtatttacaacttaaattagtagatctctatacactcaagtctcaagatgttctctacactataattaaggacttgcattagaattttgttcgttcgagttgtaatcaagctgttgatcggcttgctaagagggttttttcctcttctctaattgttttagaaatataaatacttctagattggttgacgatataaaatatatctttgataagaaaataaaaatagtaaatgtccgatagaaaaaatttgaaaaagtaagttagtaaaatgtccacatcaatatacatgatagtcatcgaaacttaaaaactacaaaaaatttggactatataataagaaatgcccggtaatctcaaatgatatttatccttttttttcaacaacaaacttatatttatactatttaacgaaaataataaaattgacatcgatatttcatcatttatctctctaatatagtacaattacttaaattagtgtgcaccacgcatgatcgttatttcgtgcacgaatgaaatacttgatatagttgtggttatatatgttttattaaattataaggaagcaacatagtcagactgtaagacttgtgaaattacatgtggatacaaaattgattaaagaaagacaaaatcttgaggaaattctccatcagctcgatcgtgaattgaagatcttcaaacttgttctttcaatgttttgcttctcttatccaattgaaactccaaaattaagtgtgataccatttaccaaatctgacactttagttctttagttcgtaatctcaaatctacttcagctcgtaatcccactcaatcttgatttgtaatctcaatcaaaattaacaaaagttttgttatcttttttttttttgatcaaaattagttttcttatcatgcatttaaaatatgaattttttaagctatttcagtatttctcttagttacaacttaataaggttgtatctaaaattaatattgatttgttttatagtatttaactatagtaaaacagcaaagtcacttgtagtgtctcctaattctacaccccaatctagaaataagacttatgcgcaagttagcgcaagccatcaaacatagtcaagccgccccaacctattaaaatgattaaagcatattaacattcatcatctagataacttcaaaaatgcaaatactaattaaaaaataaaataatcaaactaatacgtaaccatttacctctatataaaatccatagtaatattatcaatagatcacacatacataaaagtagtagaactaaaaaatg

SEQ ID NO: 4741 - DNA, 3000 bp, Unknown
  misc_feature (1)..( 3000): cDNA_ID_1825343_gDNA_ID_1620726_Annot_ID_49286 3000 nt of promoter + ATG
accaaacaaacttaatcaagtgtaaactagttttcctcgtatagtttccaaaagtactatcattaactggtaaaagggttcttcagatgtgacaaaaactattttctatattaaaaggaagttgcaagtgtttcacttacaaagtagatgaagtgtcattaaaatagtgatgggtcaatgaatgaattaaggtcttattatcatatttatcatatttggtcataagaatgaagaattttaaaacctagttaaaattcttaagcattttgatgcgtttttatcggaggtgaccagaccaaccaataaagtttatcaaaataaaaaaaataatgaaaacatgcatattttaattatgttcgtattcacttttttttatttttggtattcactttcattgtatttataaagcagattctaaaactgaacttagagaagagaaagttgttgtaatacaatcttgtagtgacaagagaaatttgggtgtttctttctgcaatgtataatgatatgtttgacgataaaacattataccgcccggaaattctgtaatcgcaatagtaaaactggatttcttcccctcccacctggaaatgatgtatatcctaactactataactggatttaattttccagaaaacgattatataaatggatttatataaattatttttgataatttaaatgctcacataaaaataatatattttttttgtcatttcttgcaaatagtttaagacatttagattttttttttttaaagattaccgaaagttatacatgttaagtatacaattcaaattcatgactttcgactatgaaaatacatcataaatcgattgttttacgttttctggatttttttttgggtttcttggcaaagtagacactttttcataaataatttgtaaagtggatagttttttttagaaattagagagatagacacttttttgttttttgtgagatagaggatatgtctaatagattaaaaaaacaaaatacatatcaaatactaaaataccctttatcttgagagctaataaaaataatatgagagaccatttgtactttattttgtttgtctttattttttttatttttttattttagttttcttaaaatatttttttaaataataaattctttttaaaaaacattacattaacttttagagtaattatatgtcatcaatccaatgcacaaacatttcaaacatagttttgtacactaaccattattcgttggtgtacaaatgtgtatactgatatttcataaatcattaagtacaccgacttctcttataaacataatgattgtataaaccttatatgattactcaatataatagtgtacatgatggtgtacataattaaagtatttttgatgatgtacaaaatgattgaaactattatgacgattgatggatagaatgatgtatacaacttttaaatgatagcatacaagattattagacaaagtgtacaaaacttggtgtacacttctaggaaatgtataaatcattatttcaattagtggtgtatatctcgtacaccaatgttagtacactgtctcatagatctttaaagctgtacgatcatgtacaccatattttccatcatctctttacactattttgtacacaattatactgagtctatcacttctcagtattatatgttaatttttacattattgtcgtacactaacatttgtacaccagttttaacaatatcacatacaccgtcggctgggattaaataaaaaagtgttacatatttttgaaatatagcaaaattagactttttagattcacataaaaattttaaaagttaatatgattatgtggtaattttttatgaaaaattattatcaaacaaagtaaaaatatttaaataaaaaaaaaaagagaaaaagtagaatttgatttgagttttgtctatattttactacctaacaaataacaaaaggttatataagtatttttactaaaatttttattagacaaaaaattgtattagaaaggaaaaaaaaaattatctatttcttctttttctaaaaaaactacatattttgcaatttatttatataaaaagaatacattttccaacttatctcttttttttaaaaagtttttttatcataaaaactttatatttaaaatctggataatgacactattactacaattttgctaagatatttgtttcctttttacgatgattacaattagactataatattggataaacgaatctcaaatattgaattcataattaatgttgaacataaaacataagaaaagtaattaaaaaaagagtcaactcagaataatcaattcgagtctatcactttattccactcacattaattaccaaaaatgttatgaaaatctagatagcgtttcacatattcacagggtcaaaaaaggaaataacaaaaagaagaaaaaagagaaacttctggaaaaagaaaaggaagccacatacgctcttctagcgcattcctatactctttccttctttgtggtccccttttcacttttttaaattccaactttacccttgttcttcttcttcgttctcttttttttatttttgtttttgttgttgtcttctggaacttccgatctgtctctcctcttctctctctttcttatcaatacgttcctctcagaacattctggaacttcacaacataatctctctctctctctatctctagcttcgtgatcatcgtgtgtctctgtgttcaatctggattgtgacaatctctttctttcttggttggtgtagattacgtcaagagagagatagagaagtttttggatttggttctaatgggtctgtgatagacgtttcctttctcttctctgtctagtttctgttttgagatctctatgtttccaactttcttcaaagctcattcccattggtagatttcatcattatcttaatttgggtattgggattaaggaaagtttagatttttgatctataactc

SEQ ID NO: 4742 - DNA, 3000 bp, Unknown
  misc_feature (1)..( 3000): cDNA_ID_1825339_gDNA_ID_1620726_Annot_ID_49287 3000 nt of promoter + ATG
ttttaatcgaataaatatttatccgattggattgtgtttattttttactcatttgtttttgcttatgttagaaattaatcaaattatgattttcaaacattcatatatttcaatgtcaaacattttagcattgtaactcataccataccaaaagtcaattgctttgacacccaaatggcaaattcaaatggaccacaacactacaattagcaactataaatggtaaaaatgtaaagacaccgaaaacaggaggagagaccgagagagtatagggaccatggaaacatctccaaaacctttttaattttcctcacgttatcgtttctttatttctctctctctctcacttttctgaaaaagttgtacgtccaaaatctccaaacccttttttaagaacaaatctcaatccatggcaatcatcgatcaaaattgagaatcacacaagcttcacaatgtcatcatcatcatcaacgacgacgaacacaacaacagaatcagattcatcatctctacctactcacatcggtagatcaaattccgacggaatcatcgacactacaccatttcttcctcccaccgttacaagaaccataagcgtagatgaagaatccaatccaattcatcgatccgctagacgacaaggtctaagagaagcagcgaggttcctccgtcacgctggtagccggagaatgatgcgtgaaccatcgatgctcgttagagaaaccgctgctgagcaattagaagagagacaaagtgattgggcgtattctaaacctgtggtgtttcttgacattttgtggaatcttgcttttgttgccatcggtgttgctgttctgatacttagccgtgacgagaagcctaatatgccgttgagagtttgggttgttggttatgggattcaatgttggttacatatggcttgtgtttgtgttgagtataggcggaggagacgacgacgtcacccggaggatggtggtggttctgggttgacgaattcttcgtcgcagcaatatgtttcgttagcgcaattggaggatagaggagagactaggtacagtatctctgattgatctggaattggagtttctaatttcgaattgttcactgtatatacattgaaatgtggaatctaggtttttaggttaatgttagttgatggtattgtatctgtgaatcaatgtagctttttgtgtgacctatttttcatattggtgaatattgatatcaagcttgatgtgaagcaattggtcttgttgtggagtcttaagagatagtttaggctattttggtccttgtttattgtttgtctgagtttcttttgttttcgtatgattcttgttgatccacattgttttgatggtatcagtaatcctgcgaagcatcttgaatcagccaatacgatgttctcattcatctggtggataattggattctactgggtttctgcaggaggccaaacactatctagtgactctcctcagctctattggtaggcttctttttcagagtctctttgtgaagttgtatcgttgtgggagttatataaacaacttgtactttggtgtttttgacttgcaggctgtgtatcatttttctcggtttcgatgttttctttgttgtgttctgtgttgcattggcttgtgttatcggccttgctgtttgctgttgtcttccatgtataattgcaattctatatgctgttgccgaccaggtaagctcttttcccataacaaaatgttctttcatctacatagaattagcaaaatccagcttcaaagcatgatctacatgtatcatcttgtgatgtaaatctgttgcgcaaaacaggagggagcatcgaagaacgacatagatcaaatgccgaaattcagatttacaaaaactggcaatgttgaaaagctctcaggcaaagcacggggaataatgacggaatgtggaacagattcacctattgaacgctcgctctctccagaagacgcggtacaatcccatttccacattcttatcaagttgtacattttgaaagtgtgtaaaattgataacgcatggcttcttatgattctgcaggaatgctgcatctgtctctgtgaatatgaagatggagttgaacttagagaactcccttgtaaccatcactttcattgcacttgcatcgataaatggcttcatataaactcacgttgcccgctctgcaagtttaacatcttgaagaacgcaaacaacgaagtctagtaaaatctgttctggttctaggatcaatccgaacgaaccatcccagaccagaacgtttcagatatatgtaaactctggttcgtgttttagtgttgtgcagttagaaaatctagtccatatctctttctcctgatcttctattacaatgcgtcaatgcgcctattgatagtatgtaggaataaatcgttggattagtcctactttattttttaattttcttggtgtggaacgtggaaacaactgagctttgtgtttctcgtttattaattacaaaatcaaaaagatatttgaaaatcgtaaaccggcgtggtcaatgatcagaaacaatcggcgcggtcaccgatcacaaagaaaatggtcacagtataaaacaaacgttcttttaacgacatcgttaacaagaaattaaaaggacttaccaagaaattcaaaacgacatcgttaacaggaaattaattgttccgtcgttacgaatgattcaaaaacatttaaggacttaccaaaaagaaaagaaaagtcagattcatgtcagaatatgaaaaggatctttctaaggttattttggtcttttgctgatcagtcctcgtgctttttccgcgcttccccctaaacccaaagctctctcaccttcttccatggagaggggacaacaaagtacacgctgaaaaagcctctctgcagctccattcttcttcctggatttcaaattatacgctctaggtcagaggcgattttttcgtttcctgattctaacgggagtcaaagatg

SEQ ID NO: 4743 - DNA, 3000 bp, Unknown
  misc_feature (1)..( 3000): cDNA_ID_1825324_gDNA_ID_1620726_Annot_ID_49291 3000 nt of promoter + ATG
gaggaggtgagtctttttttataaggaatcacctgtgcatatatactttgcagcctgatctttcgtcgggtacagcttaaaagaccgagtagtaaccgctttcggttttataatgaaaaattgttcctgaaaacattatcagtttgtaatattcctctaaacaacgcttcttcttagaagttttaaaaagagttagttacctcaacaaaagccacgcctttggagcaatcaaactgcgcagaaggaagcgaaatgcgattactatatcgaaccaaactatcagataagattcagttttggatattaccgttaagctataagacgcttctacttcaccagtattcttgattatgactgcagcaactccgaattgtgtaagtgcttcgaatgtcggtatcgcgatgtttatgatcttaccgggactcctgcaaccatagaaaagttactaaacttcactttataatcagcatttctatatagctgaagagtttacctctggaaaacgtattcaatatcatcagctcttagttctatcattagatttgtgttgagtgtttccgtgactccaattgagaacgagtgaggccccgcgttctgtatcgtgtaaagcataatccgataagccaacagaaaatcttatcttatattgatttagaaactagtaaaagctagaacataactggatgttgattgatcctctcaaatcttccttcaagtccatataaaggaagttggtgtcggtcgattctgtttatatctgactgaaataaacttgttatcggttagaaaatgacgcggtaacgtgtttagaaaggtgtaacaaataaatactaacctcacggaagttccatagttgattatgcaagcaactccaatatggagaagagcagaaatttggttgggtgttgaaagcttcataaccaacaccgattttattacattctaagccatccaatgtaaatctcactctctcaagcagcatccacattgagtaatttgcgcctaagctccctggttgtcccgcttcagccgcctttttcaaccgattcatttagtcttacagcgcggtgcaagttaaaagagttcaaatggataagcagttacctctcttgggattacaagatagaagtcctcgaaagaaggaatacttgtgtaaccaccaaagtctcctatgagattaactttgagaaagttatcatttgcagtagctgtcctattttcaggaccaatgatcacttcctacgatcaaaaaaagaagaagcgtaaggctgagtatgagtgactggaaacaaaagggtatttagtgaagtaaaacatactgaaactctagttcctgttttcaactcaactcgcacactaaatcctagtgaccgttgtccaatcccgaaaacatggaacctacatgagagaaatcaatagtttctatctttgaacacaggagcagatgataaacatcaagtaaagatccataccagtcacctggaaaacgaaggcaatgcgcggtatttgccttccctttaatcatcttatcaactaatcacaaagtcaagagaagaaatgagaatccatatttagatacattccttaaacgtaacaaaagagaaacacatacaaatatctccacaagaagaaggcattcttcgttgcggtccacatggacaacaaatcggctgagtctgctctaaaacattacccttctcatctctcaacctgtatgatgatcatcaccaaaaattagtgaaagataaactcatcagaaacaatcacataagagagagatttaaacatttttttttttttgaatatatggaagttcaagctcaaagaccacacatcttctagagacagaactcacaccaagttaaatttatctccttcggagaagagatttaagcatcattacctctcacaaatttgtacaatatccggtccagcatcgtgttcacactttcgagtcgtgacatgatactcttgaggtttataaggtacatcctaaaacgttgattcaaaacttagattaaccttataactctagactaaattcatgataatcaaactctagatacttaccctaatgtaagtaagatcatagagagcatatgctgcagatttgttcactgtaataaccggtggaatccgtacggtttgcatattactactcgagttatcttcaacctccacgatctccgctacaatcgaagcctctcctccactcttagtttcatcaacaaaaccaaaacaagtaaaaacaaaattgatgaacacaaaaccaaaacaagtataaatgtgagttttagagaagaaaaaaaatcttacggatccactgggaacagcgagattcaagacgatcttagtggaacaattgagattaccagaatctgatgttttctcacacttttcgagctttgatttcgataaaatctgaattccgtcgacttcgttgaacattccgacgaaaattccggcgagtatacaagccattaaaatcgcgttcaccattttctctctcacggagacgcgaattgaaaattgttttcttcttgaagaactgctttcttcgtcttcttccaacggttactttgggttttttaatctttaaatccattggacttaaccggaaattactagagaaccgaattaaaccaatgcaataacctttttttgcagggcacgattgaagttcatgaagtcgtagagtgaataaaacttcaaagaattgtttatcatgcatcaactactttcatttgtcgttatcaaaataataacactactttcattaatcatgtgtgtttataagtagcactgatgcgagaatatatattaaatatcttccatcctaattagaaaaagagttgtggtatacattccgtaggaccttccctaagctatgaagagtaatataaatgaggcccaattaaagcccagaagtgaggtatataaatcgacccaaaaaaaacagaaagcaatgcatccatgcatccaacagccgaagagaagatg

SEQ ID NO: 4744 - DNA, 3000 bp, Unknown
  misc_feature (1)..( 3000): cDNA_ID_1825316_gDNA_ID_1620726_Annot_ID_49293 3000 nt of promoter + ATG
gatgagtttatctttcactaatttttggtgatgatcatcatacaggttgagagatgagaagggtaatgttttagagcagactcagccgatttgttgtccatgtggaccgcaacgaagaatgccttcttcttgtggagatatttgtatgtgtttctcttttgttacgtttaaggaatgtatctaaatatggattctcatttcttctcttgactttgtgattagttgataagatgattaaagggaaggcaaataccgcgcattgccttcgttttccaggtgactggtatggatctttacttgatgtttatcatctgctcctgtgttcaaagatagaaactattgatttctctcatgtaggttccatgttttcgggattggacaacggtcactaggatttagtgtgcgagttgagttgaaaacaggaactagagtttcagtatgttttacttcactaaatacccttttgtttccagtcactcatactcagccttacgcttcttctttttttgatcgtaggaagtgatcattggtcctgaaaataggacagctactgcaaatgataactttctcaaagttaatctcataggagactttggtggttacacaagtattccttctttcgaggacttctatcttgtaatcccaagagaggtaactgcttatccatttgaactcttttaacttgcaccgcgctgtaagactaaatgaatcggttgaaaaaggcggctgaagcgggacaaccagggagcttaggcgcaaattactcaatgtggatgctgcttgagagagtgagatttacattggatggcttagaatgtaataaaatcggtgttggttatgaagctttcaacacccaaccaaatttctgctcttctccatattggagttgcttgcataatcaactatggaacttccgtgaggttagtatttatttgttacacctttctaaacacgttaccgcgtcattttctaaccgataacaagtttatttcagtcagatataaacagaatcgaccgacaccaacttcctttatatggacttgaaggaagatttgagaggatcaatcaacatccagttatgttctagcttttactagtttctaaatcaatataagataagattttctgttggcttatcggattatgctttacacgatacagaacgcggggcctcactcgttctcaattggagtcacggaaacactcaacacaaatctaatgatagaactaagagctgatgatattgaatacgttttccagaggtaaactcttcagctatatagaaatgctgattataaagtgaagtttagtaacttttctatggttgcaggagtcccggtaagatcataaacatcgcgataccgacattcgaagcacttacacaattcggagttgctgcagtcataatcaagaatactggtgaagtagaagcgtcttatagcttaacggtaatatccaaaactgaatcttatctgatagtttggttcgatatagtaatcgcatttcgcttccttctgcgcagtttgattgctccaaaggcgtggcttttgttgaggtaactaactctttttaaaacttctaagaagaagcgttgtttagaggaatattacaaactgataatgttttcaggaacaatttttcattataaaaccgaaagcggttactactcggtcttttaagctgtacccgacgaaagatcaggctgcaaagtatatatgcacaggtgattccttataaaaaaagactcacctcctccctttaccttgcctgtttccttgcataacaatcctctgttttttttgtttgtagctatactcaaggactctcagttcagcgaagtagaccgagccgagtgtcaatttagtacaacggctaccgtacttgacaatggaactcaggtttcattaattacaatggaattcaaacggttttgattaatgttgatgttgataattaagtgatcattttcatcaacatgcaggttactaatccatttcaaattccagagactcaacctaaaggtttctttgattcgatcaggatactatggacgaaaatcatcaatggtttagtcgatttcatcaccggagatacttgcaggttacaacacttttcctaacctaacttgtcataataataacttgaaaagtgaactaatatcaataatattatgcagaaacaaatgctcgagtttcttcgacttcagttgccacattcaatacgtttgcttaagctggatggttatgtttggtcttctcctcgctctcttcccaattagtaagtgtttcaaccgcaaccgcaaccgcaaatcgctaacataatatcgaagactcgaactaacggttttgttttcagcttgtttgcttctttggctcttgcaccaaaagggactctttgatccatgctacgactggtgggaagatcatttcgatttagaccatcatcggagattattaccctccagagcagacgttgttaaccgccatcatcaccatcacaagcatcgtcatcaccataatcaccatcgtaggacacaccagagacacaaacatcatcatggtcaagacgacgacgtattgcagaagatgatgcttgaacgtgaccacagcgactctcactactaccaccaacttcatcgagtccataaagatagcaagcagaagcagcgtaggcgagccaagcacgggatcgtcctgccacgtgatgtgcacgtggaaagacagaggaaacaaagactacgtgagagttaaagagttaaaacttaaaagtgataatgtcagatttgtatatatgtgtattaaaccgaatcccaactggattgtgaagcaaaaatatatccgagttaaaaaaaaaaaaaaaatctctctattttctggtataaatagatacaccaaatagccaacgtagttcacatttatttttccccgaaaacttctggttcgtatcattatcatcgttacataaaaattttattttggtttgaccacggtagagagaaag

SEQ ID NO: 4745 - DNA, 3000 bp, Unknown
  misc_feature (1)..( 3000): cDNA_ID_1825312_gDNA_ID_1620726_Annot_ID_49294 3000 nt of promoter + ATG
gatgacgttccttcgttgaagaaagcggatgttggtatcgctgttgcgaatgctactgaagctgcaagagctgcttctgatatcgttttgactgagcctggacttagtgttatcatcgacgcggttctagctagtcgagccattttgcaacaaatgaagcactacacagtgagtgagcaatgctcttattaaactatacacagcgttttgtttttcattttttctgatgttttctcatgtatcagatttatgcagtttcaataaccatccgtgttgtggtaagttaatcaatcttgaatgttttctttaatatcatcaaataatctctgtttatataatctctctttgtaccttttttacagtttgggttcatgttcatcgctttaatatggaagttcgacttttcaccattcatggttttggccattgctttgttaaacgaaggtgagtttttcttctttataaactttgtttacttgctataaaagccaaacaataaaaaaacattattaacaattactcaacagaaaccaccaaggctatcacaatggataatgtcaccaatccttctcctacaccagatagcttgaaactcaaagagatcttcgcaaccggcgttgtttatggcagttacatggctttaataactgttgtgttcttttgggctgcatacagaaccgatatcttcccggtatgtataaacaaatctctcttcaaatctcccataacaacacaagcatactataaagttataacctcttgttttgttttttatatagagaacgttccacgtgagagacttgagaggcaatgaagcagagatgatgtgtgctttatacttacaagtgagtattatgagccaagctcttttcttcgttattcaatcaagaagctggttttttgtcgaacgacctggagagttattgtttctctctttcgtgacagtacaaactgtaagtatatagaaaaacatgattctgtttcttcttttttatttttcattataaagaagtcttcattgactcataaacttgaccttgtagattgcaacaacactcgcggtatacgcaagttgggaaactgcgagaatcgagggaataggatggagttgggctggagttatttggctctacaacatcatcttcttttttccattagacataatgaaattcggaatccgttacatactaaccggaaaagctcagagtctctttgacaacatggtacacttagttttgaacagttatgcaaaactcagcaatggaatatacaaccatactcaagctgaccatacttactcactcttggaagtgtcaactcctccatcccaggacttgagaggcgttgggtgggtttaatatcataccgtggtctagtttgttttgttttagttctttttatttgtttttggtgtaattttttttacttttttttttaattgaaattttagttaaatagaaattagcataatttttctactactccgtcttcaattttaattttcttcaactcttttttttttctttttaagtgtttccttaagttatatcactaaattgaaaacaatatatatagtatacttaaaacagcatctccagtgataacacaaggaagaaccaaatttggtgttttggtatctcaaatctcacactaaaactgaatttattattattttattattaaatctaaaattattttatattttgataaacattatttatttatttttttaaccctcaaaaatcatttattgattatgaatattttatctattttgtaacccacaaaaacaataattattttataactaatataatattataatcggtaattaaaaataataataaacaaattattttagacatgaaaaattgaaccctgcaaactacatgattaaataggtagaccagtattttcctattttgatttatgaatcaattaaaacttacaattacatactagtgtataacaataaacctcaaaaacttgtgatgaatgatgtaggaaataatagtactcttttgaatatcaacttaaatgtattttagcaatttgactaacaaacaattgttcttcacttttaataatcatccaatagaaccatagagaaacttcaagactttccacaaaaattcatcatcatcacataaccaagaaaacaaacgaggaaaaaagcccaaaaaataagagaaaagaccttaaaacgacgagtttcaccgatccaatcttccattgcaattttcacataacaaatctttttctttccccttgctcactccaagtctccaagcccccaaattttttcacaatcaatcatttctttgttgcgaaccaaacttgtgatatggcgacaccgaatcaggaagcaatcgacactttcatcagcatcaccggcgcttctgacgccgtcgcccttcagaaactcgaggtgattcgaatttcttgattcatgtccttgttcgcgattccttatgattcagatgtttgatttcgaagtttgtttagaatcggtaaagtgaaactgaaagttcgatgagacgacgatcgtttgattattctgatgctttttcccttactcgttttgatatttgatgttttggggttgaaattgaagttgattttcagaattttaggttataggatggtctgattgagtttctagaaggatttttgttcttacattgcttttttcgctcaaacgatatctcctgaattctcgcgtttattacttgttcattgatgattgtatgattgtctccaatgttgacagagtttttaattcgaatttgagagctgattttgattactgcaggagcatcgtggtgatcttaatcaagcagtgaatgcatatttcagcgaaggagatcgaaatgtgtatgacatctctatctcactgatgattattttattatccttctctcttgcaaatttatcaatttttttacgttgttatgctctttgtgtagagtacgtgaagcgccggttaatgatgatgatgaa

SEQ ID NO: 4746 - DNA, 3000 bp, Unknown
  misc_feature (1)..( 3000): cDNA_ID_1825293_gDNA_ID_1620726_Annot_ID_49299 3000 nt of promoter + ATG
gccaaaagaggagacattaatggtgaagaaagcagaagattgggttatgggtagacaagatgagatgtttatgagttgggaagtgaaaacgaagagagaggtttatgtgaaggaaatgaagtggggttgcattaatggagatgagagagagaatgtggttgaagagttggctaatggtttcttcacttcctttgtggatgaattcatctacgacttagtgttgtgataaagttagtgttttgggaggaaagttaagattttgattagattcataatgtattagatatatgctatctcaataaaactatatgtagttttgcataaggggaatgattcgtataaaaacttatgtaggtcatatgttcgttttccatttttaaaatctagaatgagagttaagagtccatagtcatttatgtgttgtttgtttttctaactagatcttaatatgaattattagttttctttatggtttatttttcgaattatctaaatcaaattcaatagccaaaatatttgaaagtcaaacgaaaactgtgtccttactcattgtatgatttaaaaaaataaactgaaaagacatttataatgtttcacaatcttataaaaccattattaactctaaacaaaatgttatgttcaaataagtgttaaactttgtataaaaaattttagtagccatttttgtaccagagatgtcaatcagctttcttacatcatagtataacttaaagacttgagatctcaatgaaatgaacacatttgaccaaagttatgtttttggaccttttcttgtttattcgagtattttcagtatctattaatatgtttttttcactattttcgaaatacatagatgcataattaattaacaaatgggtgtgctctgtataatgtaggcagtcacccataatccagcatctaaaacgtttaattaaagtttgttattttatacaggataagtgttatatcataatacaatatattttttttttgtcaaaaacataatacaatatataagatatataatctaaatatcttagattatttacggaattagtcaaatggttgatcagtagtggttgtgtttttgggaaaacatcgaatatactggattttagacccaaatatgagaaactcggtcgtgaaggaaaatcattctttatgatgcgatgccttgttgcatcttatttcttgggaagaagcatttgcgaggcccctaacatagtaaaaaatgcatctattcatatagagattatatctcaacaccaattgagggagatgatgattgtttagttgagagttaacctcttaaaagtctcgacaatattttttaaagcaaaccattcagattattttacgaatagttaataataataaaaaagtgtaaaggtatgattcaaacttctggtttagtttgatgtcgacttggttcagctggttaaattgttaaattacggtttaatgtcgcttagacattgattggagaagaatgacttcggttttggatttacaaggaatcaagagaaagactcttctggtatagagggtttgactttgacctctgcatataaatagtcttcgtcttcttcctttgttcgttgtaacagaaaattcttatttcaattcttctcccttgtaacacgtttttgagctctgggttttgagcttaagtaaacattgattcatagtggattgctggattgaatccggctccagacgtaggatcatcacaccggtgatctgaactgagtaaacaatcgtgtgttcgtttcgttctttgtttgattgcgttcttgatcgatctattgagtgttccgcgaattgaagcttgatcgagttgtgttgtgttgaatcgagttgtgttgaatcgatttttgagtcatcagattgtaacaaaaagaatagttgcaattttctaactttatatatctctatcatttcaccaattggctattttcaatttttacatcggacatacaaacctgaaacctatgtaaattggaaaaatcatttgtccggtgccctgatatatatttttcttcttaccaaaatcggatttgttagtaacaaacctgtcaatcaaagtgtttcagcttctccagcttaaacatcagaaaatgagtgtgtttttagtgtgtcagacaaatccccgtgaaccttgccttaaaaataaaataaaatcactccaaaatagaaattatttttacaaacaaaaaaatgaaaaagaatgcttattagtattttccacaattgaaatttaaaaagtatatttcccattatttttcacctaaaaaaaaagcatctaaaaagaagtattttttttgttcttctctttttaaagttcgtattttttttttaaatgtttatgaagaaagacacaaaaaaccctaaatataatttcacgcagctgcctctcttttcttcttccgatcctccttccgccgagtgaagccgcgactgtgaaatcatgagaggagtaaaacgcgccgccatctccgaatcgaatgactctcccgtgagtttttccttccgattgttttcgcagttttgttgattgaatctcgtgataaattcagtattgtatcgattctctgtttcgggggtagacgagaaaaattgacactttgggtatttcttggtggttgattgatgattggtttagctaagtttctatagattttgggtgattattgaataaagtcggcaactttataatataacaagttgtgggcattgtgcataatggtatggaactataggatttagctcaaggtatttgctttagatccattaccgagttagttgatgactggtttagctagtgtctacagaatttgagtgattatcagtaaagtcggcaaatttttaatgtaacaagttgtgggcatcgtgcattttgatatggaactataagatttagttcaaggtgtttgcttgagattcattactgagttcaattttgagcaattcgatattcaaatctgtgaggtcatattc

SEQ ID NO: 4747 - DNA, 3000 bp, Unknown
  misc_feature (1)..( 3000): cDNA_ID_2158683_gDNA_ID_1620726_Annot_ID_165967 3000 nt of promoter + ATG
ctcaacaagcttagtgttgacaagaatctgattaaggtttattctaaagacgttgagaaagaacaagtgttgctattagctgcaagagcttcgagaatagagaatcgagatggtattgatgctgctatggttggatctcttgctgatccaaaagaggtaagaaattttaaaaactctgtttttaaaatgtttttgtttcttgaagaaaaaggaactcttttttctttgtcaggcaagagctggaattagagaagttcacttcaatctagttgataaacgaaccgctttaacttatatcgatggcaacggagactggcatcgagtaagcaaaggaactccagagcaggtaactaaaactgactctgttttacttttaagtagagtagtactgtttccctctaactacgattaaccgtttattgatgattcagattcttgatctttgcaacgcgagagatgatctgaggaagagtgtccactcggcaatcagaaattacgctgagcgtggactcaagtcatttgccatatcttggttccgaaatacaaattgtaacactgtctttttttttccttaccaattatgttcagagcacaaataccatattgtgaacaagttgcaagagaggcatatttgtggtttgattggtgatggagtggatgacgttccttcgttgaagaaagcggatgttggtatcgctgttgcgaatgctactgaagctgcaagagctgcttctgatatcgttttgactgagcctggacttagtgttatcatcgacgcggttctagctagtcgagccattttgcaacaaatgaagcactacacagtgagtgagcaatgctcttattaaactatacacagcgttttgtttttcattttttctgatgttttctcatgtatcagatttatgcagtttcaataaccatccgtgttgtggtaagttaatcaatcttgaatgttttctttaatatcatcaaataatctctgtttatataatctctctttgtaccttttttacagtttgggttcatgttcatcgctttaatatggaagttcgacttttcaccattcatggttttggccattgctttgttaaacgaaggtgagtttttcttctttataaactttgtttacttgctataaaagccaaacaataaaaaaacattattaacaattactcaacagaaaccaccaaggctatcacaatggataatgtcaccaatccttctcctacaccagatagcttgaaactcaaagagatcttcgcaaccggcgttgtttatggcagttacatggctttaataactgttgtgttcttttgggctgcatacagaaccgatatcttcccggtatgtataaacaaatctctcttcaaatctcccataacaacacaagcatactataaagttataacctcttgttttgttttttatatagagaacgttccacgtgagagacttgagaggcaatgaagcagagatgatgtgtgctttatacttacaagtgagtattatgagccaagctcttttcttcgttattcaatcaagaagctggttttttgtcgaacgacctggagagttattgtttctctctttcgtgacagtacaaactgtaagtatatagaaaaacatgattctgtttcttcttttttatttttcattataaagaagtcttcattgactcataaacttgaccttgtagattgcaacaacactcgcggtatacgcaagttgggaaactgcgagaatcgagggaataggatggagttgggctggagttatttggctctacaacatcatcttcttttttccattagacataatgaaattcggaatccgttacatactaaccggaaaagctcagagtctctttgacaacatggtacacttagttttgaacagttatgcaaaactcagcaatggaatatacaaccatactcaagctgaccatacttactcactcttggaagtgtcaactcctccatcccaggacttgagaggcgttgggtgggtttaatatcataccgtggtctagtttgttttgttttagttctttttatttgtttttggtgtaattttttttacttttttttttaattgaaattttagttaaatagaaattagcataatttttctactactccgtcttcaattttaattttcttcaactcttttttttttctttttaagtgtttccttaagttatatcactaaattgaaaacaatatatatagtatacttaaaacagcatctccagtgataacacaaggaagaaccaaatttggtgttttggtatctcaaatctcacactaaaactgaatttattattattttattattaaatctaaaattattttatattttgataaacattatttatttatttttttaaccctcaaaaatcatttattgattatgaatattttatctattttgtaacccacaaaaacaataattattttataactaatataatattataatcggtaattaaaaataataataaacaaattattttagacatgaaaaattgaaccctgcaaactacatgattaaataggtagaccagtattttcctattttgatttatgaatcaattaaaacttacaattacatactagtgtataacaataaacctcaaaaacttgtgatgaatgatgtaggaaataatagtactcttttgaatatcaacttaaatgtattttagcaatttgactaacaaacaattgttcttcacttttaataatcatccaatagaaccatagagaaacttcaagactttccacaaaaattcatcatcatcacataaccaagaaaacaaacgaggaaaaaagcccaaaaaataagagaaaagaccttaaaacgacgagtttcaccgatccaatcttccattgcaattttcacataacaaatctttttctttccccttgctcactccaagtctccaagcccccaaattttttcacaatcaatcatttctttgttgcgaaccaaacttgtgat

SEQ ID NO: 4748 - DNA, 3000 bp, Unknown; identical to SEQ ID NO: 4744
  misc_feature (1)..( 3000): cDNA_ID_1825316_gDNA_ID_1620726_Annot_ID_165966 3000 nt of promoter + ATG

SEQ ID NO: 4749 - DNA, 3000 bp, Unknown; identical to SEQ ID NO: 4743
  misc_feature (1)..( 3000): cDNA_ID_3074040_gDNA_ID_1620726_Annot_ID_165964 3000 nt of promoter + ATG

SEQ ID NO: 4750 - DNA, 3000 bp, Unknown; identical to SEQ ID NO: 4742
  misc_feature (1)..( 3000): cDNA_ID_3074044_gDNA_ID_1620726_Annot_ID_165961 3000 nt of promoter + ATG

SEQ ID NO: 4751 - DNA, 3000 bp, Unknown; identical to SEQ ID NO: 4741
  misc_feature (1)..( 3000): cDNA_ID_1825343_gDNA_ID_1620726_Annot_ID_165960 3000 nt of promoter + ATG

SEQ ID NO: 4752 - DNA, 3000 bp, Unknown; identical to SEQ ID NO: 4740
  misc_feature (1)..( 3000): cDNA_ID_3074054_gDNA_ID_1620726_Annot_ID_165956 3000 nt of promoter + ATG

SEQ ID NO: 4753 - DNA, 3000 bp, Unknown
  misc_feature (1)..( 3000): cDNA_ID_1825431_gDNA_ID_1620728_Annot_ID_49332 3000 nt of promoter + ATG
taacattctatttttcaacagagacctgtggatccgcttataggtgaagatattaatgttgaccaaagttgggcagagtgggatgacgaggtgaaagacaggaaagtttcttacatgaatggtttgatactgacagctcatcaattcaaaaaaagtgattggccaggaggtgatgctacattgccatcaattaaaattccaaaggagaagtcttctgttgttcacaaaaagcatattgtggatcgtaagaagagactacgggtgaagtctgaccctcccaaatccaagcatagttattcaactcgttttaatcaagttgtaaggctatctgatgatgagaagtctaggttgatcgttgatctacaaaacaaggtggaagagctatcaaatcgtgtaatgaagcttgaaaagaaaagaaaaactgtcaccttcaagcggtccagaaatttggctttcggttttgttccattatcttctagatcaaagcgcaagaagtcattggaggtacctactcaatctcaatcctctgaggtaatcaagatttcaaacagttttataatatttgaaccttatcatctacttatacatttttcaagttttaacgcataacaaaacttttattttcctcatagaatccatctcattcacacacgctgtctgatgaacagaatgaggattttgatattgaggtctgctgttttaaccttatgtgtttattgtttattctgttaccacatctatatgtacttaatcaatttttatcaatcttgctagcatcaatctgagcaaaaggatgattcatgggatgtttctcctcctctttctcacccttctacgatagtccaagatgatgaattcaagaagtttcaagatgaatccattgatagaacaactttgacaaacacggttagtgtaatatttaatttccaatatctctttggtagaattgtttacgtcaaaatattttgtttcaggtgattactgatgaccccatggatgtcaatcatactccacatgaatcacaggattctgaaaaggatgatgcaacagaggacaatccaatttatgacactggtgccaaagatccaaatgacaatgaaccagatgatgagggaaaaatccaggtacttttataaatacaaacacaacacatcatacactttatttaacagtttataggatctgacacatttgactattctactttacaatcagtttgattcaagtgcaaacgtaagcaacaaaaaacaatcacctctcgaggaacacaatattatggaggtaagttaatacatcatttggtgcaacacatcggaaatggttggtgcatcacagaccgtaaacataataattgcacatctgcttagttattatggacaggattttgtggatacttacgagtgtacttcaacattcaggtcaatttggaggcgggtgaagcatctcaatcagtggtggagccgcaacccgatgaccctgtggaggtatacattttcaactagttccttgatttattggacaccggtgagggatgcttcatcactcagtccttgtccaaaaaaatatttacaggccaattctccagactgtaattctccacagggcaatgcagcatctcagtgcattctaaaagatccaaatggccatgaagcagatgatgagggaaaaatccaggtacaaaaatacaaacacaacacatcaaacaatttattttacaggttatagattctcacaaaattgactactgtactttacaatcagtttgattcaagtgcaaacctaagccaaaaagaacaatctcatctcgagcaagacaatattatggaggtaagcttatatataaaccaaattattgtcagaactttattaaaccaaattattgtcacagcccttaagacatatctgtttgtaattcataattcaggaaaccttggagacggttgaagcttctcattcagtgttggagacgcaacccgaagaaaacattgacgatgatcatatgacggaggtaagctaatacataatttgatttaacacattggatttagtccttaatataaataatgactcttgtgcatagttattgtggacatgattttgtggatacttactaatgtacttcaacattcaggttactttggagtcagctgcaacatctcactcagtggaactacctcaacccgatgaccctatggaggtatacatttttaactagttccttgctttatttgacactggagagggatgcttcttctatcagatcttttccaaaacaaaatttataagccaattctcaacagggcaatgcagcatctcattcattgctagagactcaaccagaagtcaacagcgacggtgattctatgaaggtatactgtaacaatcatcatcaagttttatgtgttgtggttcttgtgtaattggacatgattttcttgttacttcataaaatgtaggcaaaatttcttttatttattctaactagctacatgtctacatcaacattcaggttactttggagatgcctgcatcatcgcattcagtgtcggaggctcaacccgaagaaaagattggcaatgatcctatggaggtatacatttctaactagtttcaactaatgatttacattcattgatttattggagattgtagaggtttgatgcatctctcaggcattatgcaacaaacatttatagaaaaatgccatgttcactattataatcgacaggattttgtgtataccttaacatttgcagaaaatattatcttatgtttttctcaccatctttttgtgtacttcaactttcaggacaccatggagacgcctccagcagctcattcattgactgggattgcaatgttcttcaaaaagaaggtcatccttatgtctaaactaaattaggcttgcatgttcacttttatattggattagagtttgtgtattcgaaataatttgcaagttatatattcttatgtttttctcaccatcaggtcaccatg

SEQ ID NO: 4754 - DNA, 3000 bp, Unknown
  misc_feature (1)..( 3000): cDNA_ID_3090968_gDNA_ID_1620728_Annot_ID_166004 3000 nt of promoter + ATG
aagattctccaattctaaaccgaacggtacaaaaaaaagcaaacattctccaaattcttgtcaaacaaaatgtcattagaatcaatgttacattgtgttttcatgattcattatttcttcttaatttgcagacaatagcaaaagctgttggagattgggtttatgacagaacattgtttcagaagatagattgtccttacccttgtaaccctacttgccaccacagggttttcactcctctagatgctcctccaatttaagtgattctaccatatacagtatagatttattattattttgaaaagaaaatttgcttataaatgattcatttgttagatacatatagtgaaatattcctagggtttagctatagaagatgaaaaagaaaaagagtgtgattaattcttgagtgttgagaataagcaataggagtaattttcttcagcacttgtcttgtgtgctgtttaaattgctctgtttctcttctattctgatgtaaaatgcaaattgttacctttatcctatcaaataaagtataattcttttctcagttgtatcaatctttttcattctgaattagtgaattcattattttgtgaattggttgtttgtttggcacctggttatataccacattttttgtctttattttcaaattcttaaaagatttccatataatatggatacaacacttcgatgatcagatctcaggtttcttcggagaggttcggtgactaaacggtactaagaaaaaactttaattcgactctgtttacatgtttgggccctgtacacttttctccttttggcccaatcaaaaaaaaatgcaactactatttatattttcaaaacataacgtcattattggtttattggtttgatcttttgggaatgaggagattatttttttttgaatgaaaatttttctgaaaataaatttgatgttttgtgtttgcttttttgtaaatctattagatatagttagttactcagtgagcttaagtctcctttttctataattgttgtatacaaatttagtattaattgtcacagttttgtgattgaggtcatctcttatggcttacacgttgagcttcgttatatagtcgagccattttgtaaagaaaatttgagaaatataaatttgtattgctacgaatcttaacttttttgtattattcatgttttatgtgaaacccatatgcaattatgctatctgtattatttttcacccggtttcggatcgatcatttttccgaggaaatagtggagaaaatcaatgaaaaggaattacacttgagatgtaacaattattccttttatttcgtaaaatttaacgaattctaattatattttaattctagatcttaattactcgtgttataataaaaagatcaaaaagagaaaggtctgaactttaaaattttgttactttacgaaaaatctctaacatgttttggctgttgcgcagctaactcgatcggtgtgcagtgcaccgacacttttagtcctcgtgccaaaccatactttttatttcttatttaattgtgattcatagatttttgttttacaaagataacaagctaggatgaattattataacacgactgtgaaaagtttaacaaaagaaagacgcatcttataagattgatgataactttaaaaactgaatatctaaatgaatatgcatatagaatcagtattctcaaggtccgagcataatctcattttatttttatcgattggttaacatgaaagaaccaatttcgaaaacacattgataaaaaaaacaattatacaacttagtttcttgacgttggataacctggcgaatctactaacacatgtgcacgctatgccagtcacaagtatcttataaaaagaaaaaagaaaaaagaaaactttatgcaaattaaagcaaaagagtaaataaaaaagcaaattaaaaagaagaaaaagtttgattttttatttgcaacttgtggatatgtatctatatgatgaagaagacatcaatgactggcttccataaacttttaaagctctctctttcagattcctctctatccatttcattaacaccaaaacctttttcttctctctaaccaaacaagaagaggactccattttcgcaaggtatgcttcatttgtatcgatctttttatagttctgcaagtttgatatgtactcagaataaattgaatattttgttttagtcttgttagttagaactacagtatatattactattagccatttaggatttcaagaagattgcatattaatatcagatcattaatgtgaatgacatcgaaggttacttcggggaattgataatttgaaacgattcaacacatttctctgcgatccaacaagttgaatatgaataaggggatgatatgatttttcttacatagtaaaagttgagatgatgtgaaagggtatttttggtatctcaagatacaagcatcccataatagcgattagcaatttttttttttttttttttttttgtcaaaccgattagcaatgttaagtaatgaattatgatagatttgtaatgataataattgtttagtgctctacactctgagcaaggttataattacagacaactagaaaagttggtctgagaaaagctataagatatttaaagacgcacatggacgatggatgtctttttgtttgtttgttttgttcttggctagttatcacatttgacatttctgataatctacttttgaatagtctaaatttccaatttgtaataacgtggattcgaggaatcttaaaacaatggattacataatagtataattataaaaaatattatccactcgaaaatgtaggtaatttcaaaataaataaatttgtcagtccgcatgttaccatatgaaagcagtaattaattcgcattagaaatgtactattatattattattgaaattaaccaaatcgtaagcttgtttatttatttattttccaaaaaatgatagaatg

SEQ ID NO: 4755 - DNA, 3000 bp, Unknown
  misc_feature (1)..( 3000): cDNA_ID_1825448_gDNA_ID_1620728_Annot_ID_49337 3000 nt of promoter + ATG
ctcataacatggtttttttttttttttttggtttaacggatatcttctcgtaacatatgttcttctcacatgttaacactaaagcagacacaagaaaacaaattagtacgttacgttgttgcatgtattattttgatggctaactggagaaatacaagtcgttgtgattagccatccaatgggcctctaaaaataatgacttggtaaaactagacaacccaaaatcacaaaacaaatattctcttcttctattaagtaaaaaaaaaaatcttattaaaatctggtttaaatgtttgttcattcaaataaataatggagtgtattttagaatcaaataaaaaaaaactttatcaaatgatttatttggtagataacaaccaaatcttgagctaaaaagggtgaaaaaatattgagaattttgttaataaataaatagttatggtcaaaccggttttgactggattcgatttcatatttttaaataagtaaaatatttctattattctataccgttcacgccctcttaggtaaaagaaaactttcatattaaatttctatttaaaatgtttgtccattcaaataaataacctttactaaattatttatttggtagattacaaccaaatattgaaccaaaattataataattctgtaaataagtggtgcactaaataagtaaataataaatgtcaaaccggttttgataggagataataaagagagatcatcaaaaatatcaagaaaattcttgatgatgatggttcacacagagaaaaatcacacaggcttataacatcataaacacaagtcatatatattgttgtgataaaagtcacaatatagtaaaatatgaacatcttctgtaaccttggaaaatattttgcatgaattgtcgtcaaaccaataccaaagtacaaactcattcagattctcagtggtttacacatgaagcaagttattgtgactactgactagattgttaagactctataataaagtatatacaaatgcagggaatggaaatgacacgcttcttcattgcaattttctcgaaactatattggaggtagcttgtcttttccttcaaagtagccggagaccccggcattcagctgcaaaacgtttgacattttgaggacgattgaaacgaagaataactgggtttaagattctgagaattaaagaagttataataccttttcgattctgtccgctgtgcctgagagatcttgtgtttgttttttgagcatgctgatccgggcttccttctggcgattctgttcttcagcctggaaagtggatgaacacgagaagaaattatttttaagaaatggcaacataagcaaatgactagtttcttgtgccttctttttgagcttacttaccctttggagcaaaactgttaacttttgtatctcgttcttcttagatgttgtaagatcatatgctattgccattacatcagtcctgagatggagtcatggtgacagtaatatcagaattccaaaatgtggggacttgacttacaattgaggccaataccataaatggacaatagtaaacaaaatggattaaccaatatgcatgagacatacttatcagaaaacaagggatccaaactctgttcttcgaccagctcctcgactgtatcaagaattggtccgacctgcaaaggggaaagcgtttcagtcagaagaattttgaaaaaatctcttacttcacaagtgtgtggatgacaaagcaaataagatgtacctgagtttcgtgacattgttcatcaaactcttcctgtaacaatgatgaaaacataactaagagtttacaattcatcacactatgaatagccaaaaaatcacaaaaattcatgttttagaataaaaacaacaacttgagaaaatttcagagcaaagggttactacctctattgtctgatgcaaattcacaacaacctagaaacatgtcagagaaagaaagatacatgagaaaggcttctccttgattcatgtaacataaaaccaatggatcgaaagagaatgataaagagagatacatacccgagtatacaactgaaaaagcagttcttgctcagccccactgaatttcgagaaaatatcaacaaaatcctacatagtgatggttcacataaaaagggttactattagttagttagtacactacacataaacccgaaacaaaatcaacaagacactgctatagatagatagacagttctcaaaccagaaacaaaatcaaaaaccaaattcaattctaattaactcaggatccaatcatcgagaacacttaaaccctaaaacttcaattttacctaaatcagacagaacaaaacccaaattgcgatttaaaaaaaaaaaaaaacaatggaaaatgattatgacattgaagcatatacctgtttggagcaagcagtgagaagatgtcgaagagtggatttgaatgatttcttcagatgggttcgtcttgaacccgcaatatccgtttcatgacccggtttctccatcttaacccgaatgataacttttttttgttggtttaaagattccggaagaagaagttgctaactggttaaaaacaaatgtacaagttgacagagagatcaaggacggaaaatagaaaatatcccgggaaggcccagttatataggcccagttaaaacccataagattttagattcagacacaagacaggcatagtagtagtaattcacggcccattactttttccttttttcttttgcgccaattaacattttttttctttttgcgccaattaacatttttttttctttttgcgccaattaacatttctctttcctataaattaaaccagcttagaacgaaattttaaggcaatatttcaaatcgaacaatactgcaaaaccagagagagggagagcgagagagatcaaaaaaccctaatcgactaaatcctctcttcttcttcaaatttttggttaatttcttcggctgaagaataataatc

SEQ ID NO: 4756 - DNA, 3000 bp, Unknown
  misc_feature (1)..( 3000): cDNA_ID_1825480_gDNA_ID_1620728_Annot_ID_49338 3000 nt of promoter + ATG
tatttaagatttacattttagtcactttaactggtatgagtaaattataaaataaaggacatgagtgagttggtaatgacttggatatatttactgattcttgaaatttgagtccaaatgaaaaatatattcttagaccatatatggtaatggggtctatatggcccaatgatttacttgtggtggacctgttgaaagttcctcttcaacgaaactcgttacccaatgaatcccggagggaacatgaaacttgtcaacttgatataccatataactaactactaatttttttttaattattcctattgatttttaaaaattcaggttgatgaaaaaggaaggaacttggcgtggaaagcaataggttacaatggacccagccctgatcatagtgatcatgaagtagaactaaacgaggagaagaagaagaagaaacctgaggagatctttggaccactttacaatggcatcgttgatctaaaaagccctagagaagccgtggaaaagaagctagccggtcgtgggttcgcagtttcaaatcaaaagaggaatacaaacggatcatctatctctgacccggtgatgaaaatccagtgtgatgctgtggtggttgggtctggatccggtggaggagtggcggcaggagtgttagccaaggctggttacaaagtgttggtgattgagtcagggaattactatgcaagaagcaaactttctttacttgaagggcaagctatggatgacatgtatttatccggtgggttattagcgacgtccgatacgaacgtagtgattcttgcgggatccacagtcggaggtggttctacaatcaattggtccgcctcgatcaagacaccagaacatgtgatgaaggaatgggcagaaaagtcaaaactcgaaatgttcggaagtgatttgtatcgagaggcaatggatgttgtctgtaagaggatgggtgttcaatgcggatttgtagaagaagggtttaataatgaggtattgagaaaaggttgtgaaaagttagggttaccagtgaagaatattccgaggaatgctccatccgatcattactgtgggttttgttgcttgggttgcaagaaaggtcaaaagcaggggacttcagagacttggcttgtagatttggtggaatctgataatggtttaatccttccaggttgtcaagcgacggaagtcatgtacgactgtgaacaggggaagaagaagaaggcaactggagttgcgtttgcgtttggggaagagatttatgtggtggagtctagagtgacaatagtggcttgcggtgcgcttagaacgccgcatctgttgaaacgtagcggtttgaagaatagtaacattgggagaaacctttgtctacatccggttgttatggcttggggatggtttccagaggaagataagtggccggaaaagaagaaaaagagctacgaggggggaataatgactgcgatgtctagcgttgtaattgaagaaacgcatagttcttatggtgaaatggttatccagacacctgctctacatccaggaatgttctcagggatcattccctggacatcaagcaaggatttcaaaacccgaatgctcaaattttcaagaaccgcacacatttttgcgcttctgagagataaaggaaccggaacaatagattccaagacctacattgactacaacttaaacgatgaagacgaagagagtctaaagaacggtcttgaaagagtcttgaagattctggccgcagccggagccgaggagattgggacgcatcattcagaaggtaggagtctgaatgttagaacagcgagttcgttagagattgagcggtttgtgagagaagagagttcaaagccgttgaaggatttgtcaggtcagatatgttcagctcaccaaatgggaagttgtaggatgggaattaggccggaggaatccgcggtgaggccaacaggagagacttgggaggtcgaaaggttatttgtggcggacacaagtgtttttccgaccgctttaggggttaatccgatggtcaccgttcagtctattgcttattgtattggacttaatgttgttgatgttcttaagaagaagaagtgagggttcatcagtttgaaatagattttagttttccacatattttttaaaatgaaatgttttttttatacaattgataaaactaatattaagaagttctttgtcaaagtatcagttagcaataaatttccttttcttttaattattcgtaaactataactagtaaacactggtaggcagtagcagcttgataaataagaaataaagatgagcaaaatggataatatttcttaagctagtaggcaatatatgatatgaaataaaaaatcatattaaaatttcagattttaattctaaaacaaaacaaacaaaaaattatgtatacaaaaagtttcaagcctttaacttgggaaggcttaatctatactcaacttctatagtccatgccattatcatgcttttgttctttttattaaggccactttgtatgtaagtcaaacaatctacgtttgacctcgtctttagtaaacacaaatcatctatttccttttaatcgttttggaaaaaaattttattttaatgtatgataatattctcctctcttttatttccatattatttagttgacaaagaagatttctatgagaagttacctcacatagtcacatatccaaaattttaagtttgtgttgtgtacttgtatcaaaagtatacgccatcatctattttctttaaaatggttttggaaattttatcatttgatataattaagaattttattctctctctttattttccatccttatgtagattaaagaactttcctcaagcctattaaaagataattaaataaatccccctgagaatttgactcaaataatctaaggtgtagcatttatgttgcagaattacatatatgtaagtgcgtctgattgattttgtccactaaaaactatg

SEQ ID NO: 4757 - DNA, 3000 bp, Unknown
  misc_feature (1)..( 3000): cDNA_ID_1825476_gDNA_ID_1620728_Annot_ID_49339 3000 nt of promoter + ATG
atatgctcacaacttttattgatgtgatgctgatactgatggtatatacgattatttgtagatatatatctcctaggaactgtgatgttagtctttggattgggactttacgagttgttcatcagcaatctcgatacttcagagtcgcgcacacacgatattgtttccaataggtcgagcctctttggcatgttcaccttaaaggttgctccttttgataactttctccatctgtatagttggttaagatttcattttggtttatactaagactttccaactgtttattttccctccaggagcgacctcaatggttagaggtgaaatcggtaagcgagctgaaaacaaagttgggacatgtaatagtgatgctactattgattggtttgtttgacaagagcaagagagtagtcataacttctgtcacggatttgctatgtatctctgtttctatctttttttcttctgcttgtctcttcttgctctctaggctcaatggttcacactgaggagttaatggtgttgtcccaaaacaaaagaaactttgtatgtgtataatgttttagcaacgctccatcttctctttttgttcattatatattgtttctctctgactttgattttgaaaaatatatttcttaacgaactagaagtggaaacggataagacattttagaagaatcataatacatgtacgtgagcctacttcaatgaatgagtattactgtattagatttatgggcatcctactcaagtcaatatgcatcatagacttttgatatccggaaaaaaaaaactcggccactttcttgttatggtctatgggtttgattggtgaatttttttactgctgaaactaaccataccaaaaacgttattttcaaatgcatcataaacgttctacggctactttcttttttaaaatgggtattcaaattaaagaataagaaatcaattgtttaactggatctacatgtatatgacactgtttttggaagtccaaaaattatcaactaaaaaacaggatctacatgtatatgacactgttacaaagagaacttatatgtgttcaaatttttaaacttttgccgaaaataatctttcaaaatatgatttattcatatctccaccggcgacaccacattaaatttgtaagcatctttaataaacactcataagaattgaagtggttattatataatactaatactattgaaaaagaaaacttaataatacatttctgattagatatgaaattatgaatatcagaattcaaagttttcgacaaccatcgcactcatggggtatatctttccccaaactacatatatataagaagtctgaaccgatcaagatgagtataactagtaatcattcccaaacaaactcaaagaatttcaatctatacgcaataaatatacacacttctgaaaaaaataacaacattaagcacgttcaaaaaataggagatcataaatttttattaaattacatctaccacattatcaacttgcattggacaatcgatgatatcaatgcacctataatttacataaaaaagggggaagataaaactcaaaatctggaggagaatctcagaaacttaatgaatgataattatggaggacaggtattgttaactgtactgtcttctacattcaattcgcttttctttttttttctctctcaaagggtccagtttgataccctgatcactcactcgttgggtcctttcatgacctctctgtactttatttgattctatcatattaatgaacattgtcattttttcttacattattacctgatttgtgttctactaatcattcgaagttatgataaaatcattcctttatattttgagttcccatatctgtagacatccacacatgtctgaatcagcctctctttcaacgaagttcgaaattttgcaacttattcaatagttatttaaaaatttagtatgaaaatcagcttttatcataaaaatattagaacaaaaatgcgtaaattactttagtaacaaaactagaacggtattttacttaaaatgagttgaatctctaaaccataatattaatgaatagatcatttaaacttgaatactataaaaacaacgttttggttcataaatcgctagtctattatagatagacgaagtaataactaatatcaaatatataaataaatttaacttgcgttatctaatttaacagatttgttgcaaagaccaaaagtttatatacccctttgatatttcaaccaatgtacattacttggtaattccgtatgattgctcaaatgttttcccaaaccatatatgtaacttattgatataaatcatgtcacgatcacttcgtcatcacttgcaacacaaatctttacgtagttggaactaaaattacgaataaagtgggtgtgtgtaaagaatttaatacttttataaaaaaattctgaaaaagtcaaagtaaattatattcacacatatgtatgatatatctatatgaattataggaaataaattttctgaaatattaggctccacctaataggctaatacccattgttatagactacccctaaactgtcgattacccatcctctgatatttttgttttattggatttaggatacatacgaatatatacgaattcgtaaacaaatatttgtaagagttaatatatatttcatatctatatctgattcagaatatgcaatttaaaacttacatttcagaaagtttgacttaagtaaacaaatttgtctagcgttttttaagaatggtgtccatgttttctataaaaaaaagatcacaagcttataatgaaatttcgaaaacctaattcggatcagtgtacttgctagtatcaaacttttccttgctggtaccaaacagatagatatatatatatattatatttgtatttaatcctttggtctctatataaatacaacacgtcataaactttactagccacaacttaaagtattgaatacatg

SEQ ID NO: 4758 - DNA, 3000 bp, Unknown; identical to SEQ ID NO: 4756
  misc_feature (1)..( 3000): cDNA_ID_1825480_gDNA_ID_1620728_Annot_ID_165998 3000 nt of promoter + ATG

SEQ ID NO: 4759 - DNA, 3000 bp, Unknown; identical to SEQ ID NO: 4754
  misc_feature (1)..( 3000): cDNA_ID_1825465_gDNA_ID_1620728_Annot_ID_49342 3000 nt of promoter + ATG

SEQ ID NO: 4760 - DNA, 3000 bp, Unknown
  misc_feature (1)..( 3000): cDNA_ID_1841337_gDNA_ID_1620728_Annot_ID_49346 3000 nt of promoter + ATG
ccacacatcccaagtccatcaataacagtattaaaagtgacaacgtttggtgcaacacccgcttcttccatttttgagaacaacttaacggcctcctcaactttacctcccttgcaaaacgcattaatcgctgtagtgaacaagtaaacatccggagaaacccctttgcaaacaacatcaaaagcttcacaacacttctgaaactcattagctctcactagagaagtcaacaaaatgttgcaagtcgtcttagaaggaaacatacccttgtttgcaagaacaggaaatacatcaagagctaaataacaaccatcacgcttgaactgtgtgcaataaacttcaatcaacaaatccgacattttccttctgatttcttcatcaaaacacaaactcaaactcgccattgcatccgcaatcgcaactcgactatctctcaaaccacaaggcaaaaccggtacattcccattgatcaaacgaatcaaaactaccctagcagccgataacagattcgcatcaagcaataaacctatcaataaacaataagaacggagactaaaggagaaactaaacgaatcagaagctaatcggaagaaatccaaagccgtcttgggattaactttggatcgaaactcaggaaacaacctatcgaattcgagaggcgatagaacagttatcagttgtttacactgctcgtaatctagagatctcttcgacaaaactgaagataatcgttcgtgtaaatgccgatcagaggaagtctcttccgatttatccggccgatgaacacactgttgcaggtatcggcttgtatgaaagcattttcgagatttcgctatgaatttcaagcggcgagtgaataagtagcttgcgcgagaaagtctcctcaaatccattggtgagaaagagatgaaatgtgaggaagtcatttgcgaagagattttagggaaatagagaagagccgccattgatcaatgtcgaagaagaagaattgaagatggtgttgagccaccccattggagagagagagagagacggagaaattctcgagaggaggcgatttgggcaaaaacccagggttcagacttgggggacacgaacggggtcgataaaattgggccttttatgggcccgtaatgtttaatcattgggctgaaagctgcaacatagtagcccaatttcaactcgtaaagttttccgcgttttttcccctatcacggacaaaacaggcagccctattgacaacttgtttaaaaagaagaaggaaaaaaaaatccatatagagacgtaatccgatggtcgatggagacgttgtaagaaacaaaagaattgtagaataaggttagctagaaattgtcaacaatgggttcatagaaaaactcgtttgaatcaaaattgtgtctaaacaaaacctttgatttggtgcgtatatgacccacgcattgtaactttaatttaagtcatgataatatttaatatataatgtcatgtcatcactgtttagaataaaacgtttagcttacgattcacgtggaaacaaaattattcagagatttcatttcatctatttatagtaacattcgtcaatattaagtatcatacaattaataacgggtataaatggcaaaatcctagactaaaaaggtgaaactaaaaagaaaaaagtagagagagtatacgtgtcgtgaatgacggagtaataaattatgcaatagagtagataaaaatacaatgttttcgtcatactcttactctcttaatttaataagatatatcctttatgtaattgttctagtaattgatcgatattaacgcgataactccttacgaatctcactcacgattgcatttgcatacattatagatgtaggagatactcggtgaaaatcttagtagactagaaagcaattgatcaacatttagtaacaagctatcaccacaagttcactaaatatagtatatatttttaaaacaaataccaacacttgcattaaaagcacataaatggaaacatttaagaggacacatacaagtcccattgattatttttattttttgaccaaatactaacacacctttaaaaataagaaaatgctaacacttgcagtaaaagtgatactactaaatatagatattttaagagaacatgatacaattaattcttaaatactgtattgttttaaattttatacttttatagtttctaattattaaaatacatcataatacacaattttcataccatatgtcaattaagagtatcaataataatagtccacttatgtgtagatatgtcagacctatttttatgaagtatcataaataatgtatgcacacatcacaatcgtaaacaaattactactctttctatttcataaagtttgatgttttaagttttgcacataaattaaaaaaaaagtaacttttatatattttaattattattctgttagtttaataatattattattacctctgtcctttcactattgactacaaacaaaacttacaatcatatttttacaaaacatcaattttgatgaaacaagtaaaaatttcaaaacatcaaataactcagaacagaatgagtaaatttttagctcactgttttaaccatagtgcctactatctttaaccatctccaaaagacaccatttgtctttttaactatactaaaacaatcaaaacttttaaaaccaatcatatctcattttaagaaaataggttaaattatctaatataataaataaaaatctaaaaaggttgccacgtaaatagaagaattgattcttatttatttttttcaaaagtggaagaatcattttcttctattttaaatgtaaacagaccaaaagagaaaaagctcactcacacaaagcacctccaattctctctaccatacaaaaaaccaaacccacaaagtctctctctcttgctctctcggtgattcgattttcagaaccgaaactccggcgaaaagattatggcgggacagtcacgaaa

SEQ ID NO: 4761 - DNA, 3000 bp, Unknown
  misc_feature (1)..( 3000): cDNA_ID_2997344_gDNA_ID_1620729_Annot_ID_49356 3000 nt of promoter + ATG
tttacattatacatatattaatctcaatatgtaggtgtatatataacacatttatctgtcaacttttcatttcgtttttgttgggtatgttctcactttcttgaaagaatgaaacatatgtacgtacatttacgtggaagttatgtatatgtattaaaatgtttaagttaagtaaaaggttaggttgtataaatgataaatcacacatgtctaaattaaaaaaaaaaacactaataaccaacgagtggtggtacaattatatattttgagtggtgcataattttcttttggatttatgatagggttcgtctattttactattaactaacagtctcacatatttttactattaattcatcgttggtcactatcgacgctttaatttgcaaatttaaacttcatgtattatttagttaatgattaggtcatggattcttccaattacaaaaattatgcctcaaatatgttccttacatatggctgaaaatggttgtaaaaaaaagttaacgaatgtttttttttttttactttttccttattttgtttctttttaccattttggagaggagattaattattataatcatcaaaaaactgaaaataacgagaaagtattacaagacaataatgtggtaaaatgttgactgtctcaaaatacaaaatgtcgcttaagaaaggagctatatattttctactgctcgcaatcttagaattaatttttaaaaataatttcaaaattttagtaataatattatatgttatgaactaattaaaccttaatgtactgccaatcatattaagaatgaaataaatatttcttattgttctttgtcaaaaaaaaaactatttcttattgttttatatattttagtgaaactatataaatgttttttttgaagttttctttgtaaccgggaaattaaaaaaaccgtgattgcaattgcaaaatttgagattataaattcataatgataagcctaatcactgaaacaccatggttttattatttcacttttttttaccatgcaattaatttttttacctcattatatatccagtaatgaaagttagaacaattaatataattgcatcttcggagatcccaaatcttggtcttgccgtgaacttggccaaagtatgaaatgatggcgcatgtagcttagctagagtctccatttctctacaaaaataagaattaaacaacaaatactcacacttaagagttttgtaggaatcttaaatactactaatactttatatgtgcgatttagcttaaaagaaaggttaaaataactttttttggttgctcgttattttttcctttcattcttaaaattttttctattcaaaattaagattcaggtttttttttataatatagcaaatgcattggcaagtggcaaccgcaaccgcagcaatcgcaatctcactttggacattggaaggtgagcaaagaaagaaacgtctacaaatagacatattgagtgagaagcttagggtttttgaagagaaaagaatttgggtttgtttttgggattctcaaaaaactcaaaataaactttcctcattttttttttctttcttttgttttgttttctttataaaggagaaagaaagagaaagagagtttccgaaagctgaattgagttgggtgaagcaaattctcaggtctgtctgtcatgtctttacttcttcttctcataaaggaaaacacttcttgatctcatcaagttcccatctttgtacacatctcttcattcaaaaactctacatttatatctctatatatgcagattccaagcttgtaataattcttgtcatcatgggtttttttcttgccttgtctctccagaaaacttaattttcacaattatgaattattttccttatttttgttactttcttctgtttgatgctctttccccatgaaagaaagaaagagaaagaaagatcacaagggttttatttggtcaccagattaagaattaggttatcttttttttttttttagtttctcacatgtagatctctgctagattctctttcctttcttgtcagctaaagtggagtttttgagtctgaaaatcttccaaatctgttgtatttcttcttcctctcttctcgaaactaagcatggttttgtctctctcttctttctgtgtaataatgtttcttgtgtttcccttatgtactataacttcagtttcatgtgcatcagtgccttcttcttcttcctcttcaatatcaatttgatttgttttctctctccatatttccaattttttttctttatcaaaagttatttaatcttttgctctgtgaaaacaaactaaagaatgcgtaagaatgcctacatacatcagatcaatgaatttgtaagacatattacatatgtctaaagtatttacatcttccagatctaagatcattacgtatatgttgttttccattttgaccccgtgaagccttatagacatttattgaagagggagggagatagtacacgggatgggtcaaaattatttgtatctgggtaccaaaaaaccatgtaatatattgtcagattttatctccctggctttaaaaaaacaattcctgatgagttagttaagtatatagataatacatatagaacctatctagctaacaagaattacatgtaatatatattaataatcttgtaatttgaataaattcttaaactctagttccaacaacatcagattcagttgattcttgtctgtccttgagatcaatcaacaacatccttaattgaatttcccgagaaagttggatacagaaagaaaactttttttttaatatatataacaaaagtcgagtttggtatgtattaattaagtacattaattcaaaccctagctttagttttttttttatcttcttgcagtctgccactagtttgtgtgttaatatttatcttaccaatactgccgaaattgagcaattctaagtgttgtttgatgtttaaaatgaaggatg

SEQ ID NO: 4762 - DNA, 3000 bp, Unknown; identical to SEQ ID NO: 3852
  misc_feature (1)..( 3000): cDNA_ID_1011820_gDNA_ID_1620729_Annot_ID_166059 3000 nt of promoter + ATG

SEQ ID NO: 4763 - DNA, 3000 bp, Unknown; identical to SEQ ID NO: 3858
  misc_feature (1)..( 3000): cDNA_ID_3074137_gDNA_ID_1620729_Annot_ID_166056 3000 nt of promoter + ATG

SEQ ID NO: 4764 - DNA, 3000 bp, Unknown; identical to SEQ ID NO: 3861
  misc_feature (1)..( 3000): cDNA_ID_3089366_gDNA_ID_1620729_Annot_ID_166051 3000 nt of promoter + ATG

SEQ ID NO: 4765 - DNA, 3000 bp, Unknown
  misc_feature (1)..( 3000): cDNA_ID_1842369_gDNA_ID_1620729_Annot_ID_166046 3000 nt of promoter + ATG
actcttgggcagttcgttttatttcttctgcaaaatctgtatcatctttggatccgaaaatattggaatatcatcacgattttagaaatgaaatcaattacttctttaagcagacatggatattttacttttgtcagttgcagaactccatagttaaagtttgaaagtgttctcgtcaatgataaaacttcaaattcaacttcaaaataatttgtattttgcattatagttatcatattgtttagttcataaaagcttatatatataactataaaacatacattaaataaatattataagcaaattgattaataaataaaacattacattacaatataaaattacatataaataataataataaactcacaaattaagtcacaacttccaaatagaatacaaaaacactgaataaacttgtgcatcatatgtactctctaacatcacaatctctataaatgttttcatttcaaatcaatttaagtagagatgagggtgaattaaatttcatcacattgtccgaaagtaataaaccacatgttaatattttgttttcatcaaatgaataaattcttaatctactaataaaagtgcagcaactaagggaaagagctatgagatagctcaacaacatatgcaaaatctagcaaaataaaaataaaaattaatgagtttattcagtttgaactactaagaatgatacccaaaaacaaaattcaaaaaaaaaaaaaaaaacattcgatcacatcaaatttgtatatatataatactttggtgacctttgtattgttgtagtattttatttcttgtaacatttatgtgttcatgtaactttatttcttttattactacattttgtattaaatttgtttaatataatattgttatgtgaagaaaaaaaatatgtaggatttcttttctattaatactttaaatttattttgtttatttaattttatatgtataaaattaaatttataaggatatatgtgaaatagttatgaaatctaaaattaggaattaaattgataaacaataagattagtaaacttatttgtttgatgtataagtaagtgtaggcgctgaaatgcaaaaaaaaaaaaaagaagttatttttgggagtcaagtttaaagttttgaagttatttttctagtacaaaaaaaattcatatttgaaaataaagagtaattttgaagatgtcctaactcgttttggctctttttctcgattataatcatatatatgaagttggccaactctctccatatgaatgacacatcatcacacaagaaaaatgacatgtgtcattttatattttttaaattaaaaattaaataagcaacttaattgtatcatcaatcctactcttaattgattttttctaaataaaaataaataaataaataaaaaattatgttaaaaattaagcactacttttattatactctttttattttaataattttttattatcaataattactactctataatgactaaaattatagtctttatagtactaattgcccaactttcatatatataattttattttgagtctttgatgacattgacattcaagtttgttcaaatattaaacctttaagacattagagctaccaaataatttaatacacgatcatttcttttatatggatatatatatgcaatgatagaagatctaaaagtattgatttaaataatattttaacttttgctttctttttattcttttcatatgaatactcttgaaatcttattagtttatatcaattctatacatttaatcatgagtgtataacaatgttgttggaatactatattagaagaatacataaaaaaaaaaatagtttatatatatatatatatatattcaagttagaccgttttcaaatcatccaagacacgatcatatttctaatgatagaatattcaaaagtgttgacttaaatgacattcaatttttgctatatttttatttcttcatttgaatactcttgagatcttgttcagttgatgtcaattcaaactttaatcataagtctatcacaatttgttgcagtacataaaacaaggaattaatttatttataatcgagttagacaaattttaaaccatacaattaacatagttacacataaattgtatcaaaatatcatatattgttgttatatgtatttatgatagtgaaaaaatattaaatcttataaataatcagctttatacatgaaaatatataaattgatattttgagttacaaatgaattcaaccataaaaattgtaattacatattatagatctaattttattaacaatacaataataaataaagaataaacataaattagcaaaaaaataaaactcatctaattttttaaaaagttaaaccaaatcaattttagttttactatctctttattcagtttgataataatccttttttatccttttttcatgagactaatttttgataacaatcagtcagcttaacattgaaagtccgagcataaatggctaatgggataatcatggaaaaaaatttaaaaaagttaaatcaaatcaaatttatttactaggtttagttaggtttgtaggattaagattttgggactaaaatatagtttaacacccctaattataacgtttacaacattatttaaggtttgatacaagaaaaagagagatgtgagggtgtttagttaggtgagaaactctggaccgaccaagtggtcgattcaagtctgtgcaaagccgacaaaaggggcaaatctgtcattcactctgttttcaacctgagattcaccagaaacaaaaacatacggcggagtaaaaaacaaaggcgacggagataccaagaaaaaaaaaatacagaggaggaaaagaagcacattgtcgccgtctctttaacttccttcatcaatctccgtctcgtgaatctctgtttctttgatctgtaattgcgaattcgtcgtttcccaattttgaaattgttgtaatg

SEQ ID NO: 4766 - DNA, 3000 bp, Unknown
  misc_feature (1)..( 3000): cDNA_ID_2051733_gDNA_ID_1620729_Annot_ID_166039 3000 nt of promoter + ATG
ataattcactgccattagcattaaatctttctccaaaataattaattttactttaaattcttgatttaaattgttaaccacattatcaatcaaatttaatccaaacaaacttcaaatcaatcccttaaaattagcataaacatatttgttaacaatattttaaaacaaagtttttgtttaaatttaaataaataaatcatgtatttgaacttatttacaatgtcatgacactgacattaattatttaggaatgaaaatatttaatcttctaaatccttgcttttagaattattatgtcattacttaaaaggctcaaaatataaaaactttaaatattattatttatatatctaaactttataaaacattattaatatttaaacttataaaaagtttaatatatcatgattttttaacattattatataatatataaagtttaaaaaaatcttaattctttccgtcatattttgtgactcaaaattttaaaaatgaacatatattaaccaattggcgaaaaagtgtgagttctacgtcccacatcgactaaaatatttagacaatgattcataaacatatcataaataagattaacattaataaaataatggtttttttacaggacgggtttggcgggacgggtttagcagaacgttacttaataacaaatgtaaactataaaataaaaatattttataaatagttagaatttgcaaaattttatatataataactttaaaatataaattgtctccacggtgtaccgcagattaaaatctagttttttaataattttctaaggaagtcatggacctttgtcattcgtttatttcggttaaccaaaaattcacataaaaccaaaaaaaagaaaggatttagaatctttcttaacataatatatataaactatgtacggccacggcaatgttactaattcaacgtatttagggtgtgatattggttggggttgttactgaagtttttaactataaaattggctgcaagaaatttgattattgcaacttgtttgttgttaactatgacaaaaacaatgaaacaagaaaatatgaaccagaaataaaaatttgaactttgagtaacgttaagaaatgtgagaaattttagtaaataaaaaaattgattggtaaatcttccctatataattaataaacttatatcggtctttatatcaactcttaattaaaatataatgcctcaagatgtttcctaaggctttatatactagttaatcaaccaaaaaaatgtgattttagttaggttgaatttacatatgttttcttgtaatcgatcattaaaacaaagttgctcttcttgtattatgttcagacaacttggctgtattaatgacgagttagaaaagatgtagaagttgtgctcgaacttattttggaaacacgttttcataaagttaacaccaccggtctggcctaaacatagcaacccaataatacatagaacaaatactttttctttctaaacaaaactaagaagaaaatgattcttttctcctatagttttgtgtataacaggttcatcaaattaagtcttttagcacaaaaataaaacaaaagagatcatgtaatcgaggcaaatgagcttttgtttgcgaatttaattgatagagaaatagatacttgagaaaaataaaaaagctactagagaattgttacaaccttcatgttcacgaggatcttgtttctttttgttgaaccaacacatcaaaatcactcactgtccactcagcagtttcttgtctattgctaacatatatatctgtaacaacattgatcgatgtccacattcgctttgctggtttggttcccgggtactcctgtctacaaagacagattagtttaatgctaagtccaagtcttaagatatgtgcacataatcattataacctggtagaagtagagacggcttgatagagctccattgacctcccaagttcttgaatcaccaatccaaccatttccttgcttaattctcgggataaaattggctgtttggtcctgtggtgggtttataatgttgtagagaacattatagagacaaagaagtaaactaaaattggattctacaaactttaaaagactatttataaactaagtctcagtaacttcttgtacacgcaactcgaaatggtatgaagtatgaacacaatgattctcatgcttcatgatctcgtttcgtagagaatcgcaaaataaaatgacgaaagtaacgaatgatcggcgagcaatacctgcgaggatcaggcaagagagatcggcgcaatcagcgagtctagggttttccattgaaggagcttcgttatcaacttcattacagagattccaaacttctaatacgattcttcatccctctgtctcctaacgctgagacatatctctccgccgcgcagttttgaacggaggaagaagaactctccggtaggagaagcagagcaagcaagagtgaaatcgcaggcattgaaggagcaaacttaaaagcgcgtgaagttgaaggaatggtataggcgcgtgagagtggagaaattcgcgcgtgatttattgcggtaaaaaggtaagatgtcgcattctggaaaatctgaatgattgcttttctctgcttttggaagaatctcatttactccgtttagtatttatatttacatccctacactcttcataaattacaaatagacatataaatttcacttaattacaaacataacccggtactttttcacctagagatattccaaaaagcaaaaagaaacgtcattttcagaaacagaggaccctctgtttcgttcagtgagtgtttgagctgtctctataggcaaagaaacgataattggggaccatatgttcttctttttccagatgaagacgaagccttttagtccacgaagaagacaatgtcttctaagtggtggaacattttcctttcttcttctttaaatctttctgattgcctcttaaattttctgggtcc

SEQ ID NO: 4767 - DNA, 3000 bp, Unknown; identical to SEQ ID NO: 4761
  misc_feature (1)..( 3000): cDNA_ID_2997344_gDNA_ID_1620729_Annot_ID_166035 3000 nt of promoter + ATG

SEQ ID NO: 4768 - DNA, 3000 bp, Unknown
  misc_feature (1)..( 3000): cDNA_ID_1825516_gDNA_ID_1620729_Annot_ID_49357 3000 nt of promoter + ATG
attaaatagaagatttaaatctatatacacatttttgcagctattttaacaaataaatcctggatttggacttatttataattcactgccattagcattaaatctttctccaaaataattaattttactttaaattcttgatttaaattgttaaccacattatcaatcaaatttaatccaaacaaacttcaaatcaatcccttaaaattagcataaacatatttgttaacaatattttaaaacaaagtttttgtttaaatttaaataaataaatcatgtatttgaacttatttacaatgtcatgacactgacattaattatttaggaatgaaaatatttaatcttctaaatccttgcttttagaattattatgtcattacttaaaaggctcaaaatataaaaactttaaatattattatttatatatctaaactttataaaacattattaatatttaaacttataaaaagtttaatatatcatgattttttaacattattatataatatataaagtttaaaaaaatcttaattctttccgtcatattttgtgactcaaaattttaaaaatgaacatatattaaccaattggcgaaaaagtgtgagttctacgtcccacatcgactaaaatatttagacaatgattcataaacatatcataaataagattaacattaataaaataatggtttttttacaggacgggtttggcgggacgggtttagcagaacgttacttaataacaaatgtaaactataaaataaaaatattttataaatagttagaatttgcaaaattttatatataataactttaaaatataaattgtctccacggtgtaccgcagattaaaatctagttttttaataattttctaaggaagtcatggacctttgtcattcgtttatttcggttaaccaaaaattcacataaaaccaaaaaaaagaaaggatttagaatctttcttaacataatatatataaactatgtacggccacggcaatgttactaattcaacgtatttagggtgtgatattggttggggttgttactgaagtttttaactataaaattggctgcaagaaatttgattattgcaacttgtttgttgttaactatgacaaaaacaatgaaacaagaaaatatgaaccagaaataaaaatttgaactttgagtaacgttaagaaatgtgagaaattttagtaaataaaaaaattgattggtaaatcttccctatataattaataaacttatatcggtctttatatcaactcttaattaaaatataatgcctcaagatgtttcctaaggctttatatactagttaatcaaccaaaaaaatgtgattttagttaggttgaatttacatatgttttcttgtaatcgatcattaaaacaaagttgctcttcttgtattatgttcagacaacttggctgtattaatgacgagttagaaaagatgtagaagttgtgctcgaacttattttggaaacacgttttcataaagttaacaccaccggtctggcctaaacatagcaacccaataatacatagaacaaatactttttctttctaaacaaaactaagaagaaaatgattcttttctcctatagttttgtgtataacaggttcatcaaattaagtcttttagcacaaaaataaaacaaaagagatcatgtaatcgaggcaaatgagcttttgtttgcgaatttaattgatagagaaatagatacttgagaaaaataaaaaagctactagagaattgttacaaccttcatgttcacgaggatcttgtttctttttgttgaaccaacacatcaaaatcactcactgtccactcagcagtttcttgtctattgctaacatatatatctgtaacaacattgatcgatgtccacattcgctttgctggtttggttcccgggtactcctgtctacaaagacagattagtttaatgctaagtccaagtcttaagatatgtgcacataatcattataacctggtagaagtagagacggcttgatagagctccattgacctcccaagttcttgaatcaccaatccaaccatttccttgcttaattctcgggataaaattggctgtttggtcctgtggtgggtttataatgttgtagagaacattatagagacaaagaagtaaactaaaattggattctacaaactttaaaagactatttataaactaagtctcagtaacttcttgtacacgcaactcgaaatggtatgaagtatgaacacaatgattctcatgcttcatgatctcgtttcgtagagaatcgcaaaataaaatgacgaaagtaacgaatgatcggcgagcaatacctgcgaggatcaggcaagagagatcggcgcaatcagcgagtctagggttttccattgaaggagcttcgttatcaacttcattacagagattccaaacttctaatacgattcttcatccctctgtctcctaacgctgagacatatctctccgccgcgcagttttgaacggaggaagaagaactctccggtaggagaagcagagcaagcaagagtgaaatcgcaggcattgaaggagcaaacttaaaagcgcgtgaagttgaaggaatggtataggcgcgtgagagtggagaaattcgcgcgtgatttattgcggtaaaaaggtaagatgtcgcattctggaaaatctgaatgattgcttttctctgcttttggaagaatctcatttactccgtttagtatttatatttacatccctacactcttcataaattacaaatagacatataaatttcacttaattacaaacataacccggtactttttcacctagagatattccaaaaagcaaaaagaaacgtcattttcagaaacagaggaccctctgtttcgttcagtgagtgtttgagctgtctctataggcaaagaaacgataattggggaccatatgttcttctttttccagatgaagacgaagccttttagtccacgaagaagaca

SEQ ID NO: 4769 - DNA, 3000 bp, Unknown; identical to SEQ ID NO: 4765
  misc_feature (1)..( 3000): cDNA_ID_1842369_gDNA_ID_1620729_Annot_ID_49363 3000 nt of promoter + ATG

SEQ ID NO: 4770 - DNA, 3000 bp, Unknown
  misc_feature (1)..( 3000): cDNA_ID_1825489_gDNA_ID_1620729_Annot_ID_49366 3000 nt of promoter + ATG
tgacataacttatgtattaaaacaacaatttacatcagttccattagtgattctattaaatagatgaccataaactatgtataaaaagactacaattttttaaaaaatttatattaaaatatacacaaatggaccttggctttcgctttacaattcaatatccagttataaaatgccaaaacggtaaagaagaccggaatcggaaaaagagatcggacctctgctgatggacgcaaacaaaagtgaccagagccttagatccggcgtactcaagatttcaaacttctctgatgcctcgaaagatcgatgaccaccgccggaagagaggcaaagattgcttgggacattatttcctcatataaagctggtggtggtttactacttgaatgataaatttaacaatctaaaattgtgaatgtgaggttaaaagttttaaaattatgagatcgaaaaactcaaaatttgatgtgaatgctctaattgttgtttatttgtttttctcttttaaatgttttttagtaagacaataacttagtaacgtacaaaatttcacgtttatggtatgtgccttaaaatatagtttgtaggaagaaaatgtccactgtttttttttctgtttttttttttccgattttacaatatgccaaacctcaacaaccaagggtcctaccataccctatcttatttcttcaattgttttgctaccaaaagaaatctagatcttgataaaataaagcttgctattcttcaatatatcaaaccccttctctttgctttctcacactgaaatcaaactcctttggtaatactactctcacttttgcttaaatattaatatgatcttcttcatacatatatttgtgtcatcatcagtttcaagcttttctcgttttcttatttccctctctgtctctccgcaaataaccataattctcagcttttaatagtagttactctgcaggagttgtttctccactcaaaagctgacatcattttcttaataaatctcaatctcatatgcaaaattttcaaactttagcttatcttttggattttgttttccacttttcatggtacttatcaagctttctcatagtaaaaaaaaaaaatccttttgcaatacatgtttccatttaaagtttatgtatcttttttgttccatgtgttataaactctttccatgaccagagaatcttaatctccttataggtaattaaagatggagaagaatggtcacacggaaagtgaacttcaaactcaaatggtaattcatttgtctttttatatcaaatagttaaatctttcaaaaaaaataaaatcatcgtcatgtcacaatcaaattacgtgtctaaaagtattttggaccattcgtttcctaaatagtaatgaagaatgtgaactcttgctagctttttactcttgaaaagtatgtcagtgtcatttttatttcaaagaaaaaaaaaaaaatcttatttgtttcctttgtcaacacctgtttacttacaattttactatatttcacgttatctttgaatttgttttcgtgtagtttaacctcttggtggttcatatgagtttaaacatcagatcatgcgttctaatactaacttaataatgcaataagttttaaaaaatgttttatcacagaaagataaaacaaaatgaagatattaagtatctgcctacttcgaataaagtggaagatgatatataataaggtctctcgaacaaaatggatggtaattagaggtcttgaatatattaactctatatataaactaatgagactacattaaaattatccaccaagtggagtttgcattagtaaacatatatattaactaatgatatagttattaatctatcaaattaatatgaaaatcattagtgaaaatgacaataaaatgagctgaaattggtaacgttgcaccatcacgataaatattaccaatttaccatgctatttatggcactagttatactatattgtggtaaaaagttgatccaaaatagaagaattgactgtacgaaattgtatactaccacttttgtacaataatcatttgagactgtatatagtatacttaggtattatattttaagcctagtttaaaattttaaatttctttttctataccaacatttttactaatcaaatttatatttgtatcattctatggtcattttctttttaccgtcatttcttactcgtactatctttaatatctctccattgccatttttcttccgccaaaagaaattttcattcttgtcttgtccccaatggggattccaagagtggggacagtagagagttatggaagagcctttagagggtttaaagatgaagctttgttctttgctaaaataaaatttacactttcctaaagaacataattagagcaagcgactctggattaggcagtgttgcagttgttcttcgataaaccctccccactggccacaatgtcgtcgcaccgactcgccactgcctccgccactcgtaatctccccagacccgaaaccacaatatgtaatattagtttcgtcccaagcgtcattcgaaccgacgacttctaaacttcgcctaggatttttatcaattgagctaacaacacttggtcatctttattattcttttgtttataaaacatttcttcataatcaaaacaccatttttgaatccttaagttattaattcattatgcggaacggtcaaagggaaactgaacttcaaactcaaaatggtagtagtaattatatctttgtctttctatatcaaattgttgatgttctgtctcatgtcacaagatagttatgacttatgaacatgaaacatttggtactaaatacgacaattttttctttgattattgatataatcatgcatgttaagcaaaatttgattatgaaattttttaggttggaaatgagagactacctcaagtaacgtggcaacggaagttgaacagcaaagtgaagaacccttctgagttcaag

SEQ ID NO: 4771 - DNA, 3000 bp, Unknown; identical to SEQ ID NO: 3858
  misc_feature (1)..( 3000): cDNA_ID_1825485_gDNA_ID_1620729_Annot_ID_49367 3000 nt of promoter + ATG

SEQ ID NO: 4772 - DNA, 3000 bp, Unknown
  misc_feature (1)..( 3000): cDNA_ID_1807494_gDNA_ID_1620730_Annot_ID_49379 3000 nt of promoter + ATG
ctttaacaaaaaagatgggactgaccttaagagtgtcacaagacaagtaaaggatcttaacattgcatattctcatgagaaaggttttcaaactattcttgtctttgggttccaaaataagttcttcttcacatgttacatgtatgaacatatcaagtgtcattgaagtccgagactagcttcaacaaacgaatcaaaactcgcttgttgatacttatcagtcttaatatcaaagtattctaggttgaccatatttgaaatatcaaatgacagtgacacattctcattagccaacatccttaaacacataaaaagtttcagaacaaaaaaacttcagtttcttgagggttggaatagacatggtcacacgaaacaaggttgaggttccaaatagttcaagttccccttcaaattaattagtactaatttttcgagcacatgacatccagatagaagctttgttaaacgtcatcaaagtcaagatttggtataaacgtttaacaaacttctatttggatgtcatgtgctcgaagagttagaactatttaatttgaagcagaactagtacttatttggaacttcaaccttattcagtgaccgtgtttatttcaatcctcaagaggctaaagttttttcgttttaaaactttttttataaggttcaagatgttaatgaggctaatgagaatgtgtcactgtcgataatccaaatatggtatacatagaatattttgataatatgggtgatgagtatcaacaagcaagttttgattcgtttgttgaatttagtctcgaactttaaacgacacatgatcatattatacatataacatgttaagaagaacttactttaaaactcaaagacaaaaatattttgaaaaactttctcatgggaatatggaatgttaatatcctctacttctcttgtgacaattttaaggtcagtcccatcttttttgacaaaagttaacaattgaaaattagttagttatgatatatatagctaactcggttttaatttcaagtgcttaatgacagtagtgaaacaatatatgtattcaactacctgatactgttaattattgtatcatgtgtagagtagaaatctaccatatctactcaacaattatccaatctagaaactctcgtctttaaagtagcatacacattattcacattaacaattgatttgcttttacacataaataaattttgaaatagtctctttttatctgcataacgaatatacgtactaaacaatgtgcaacgaggatgggtgtttatgcaaacgttggaggggggggggaaggaaatactctttggtgatcttatgacgacgaagacatagagaagcaggtgaaacacttcctaaagacaatgtcgaatcttgaacaaaggatattgtgctacgatacaccaactgataagatgttaccactagaagttacttttattcgcttatgaattttaaattcattcttaaactcatgaaaagccttttttagtctggatgacacaagtgtttttaggagaaacaaacgttttgtacaacttcaaatgtgaaaaatgaaacaaatgtggaaaatcatctcattttcagattaaatgataaaagctttcatgtctgtgaagtcaagtaatcatgttgtgaatgtaaattagtgttacagatcactacatatataaaacataaagctctaacgtgtaaactctagtatgaacttgttaaatattgggtaaaatggggaaaatcaatttttttcaaaatgtgtgtggaagtggtgtaacaaaggtcatattaattaattgttgcgatataagatgaaaggtctctttgttttaaaatttgagtatctattggatgtaattttacaaagtcaatttatatttttctatttagaaatgacaacagattaagtgggagacctttgaagaaatgaaagaagttgaaaagtttgaaagtagtgaaacttagttttagtaaaataaataccaaagtggaagagttacattttaaaacttaaaagaagttcaaacctatattctaaagtaaaaaaaatatataaataaaatactttgttatatgttttttttctaagcgtggccgaaactctcctaaacaaggttcgaaacttgctatccacgacacacaatctttttcaaatgacactatattacagcagtgactatatttcaacattatattttattttcgtgttgctattttttggtaatgctatatttattactcaacaaagataatatctacaaaagctctttgaactgaaaagcgaagaataaccttaagtgtgctcgaaccaaaactgaagaatatcttgtagccaaactcatcttggaataaaatagggtaaactcatgtttgtgatataataaacgtttagtcatccatttactttagaataaaaaatcaatgttgagttggcttgtatcataactacgaaatcaaaaggttgaagtttggtcattaattccatcctaccaattatccttttttctttaatttctttattagtcgatctatacaaaaaaattactgactataaaagtgactttgaagttttaaattgtgattattgccgataaaaattagcttcttataaatttactgattcgctatcaactcaatgagataaccaggatccgtaaaaacaatggttttgctttctaagttttcattgttccaagtttggtttctattttggggagaataaaaactattatttgtagtatttttaatgtttaaagaaaaagtaaaagaagagaaagagtcaaagaatatgttaggaaccacaaatggtcacccacaattctctcaacatcacaaaaattaaaataggtcttattcactaatcactctaaattcaaaatgcaatactataaatacacttcgtatcaaaccaattcaatcaatcaaagctaaaagaacttattctctcacaaacttcaaatcctcatcatcctttttgaatcatcaatcatg

SEQ ID NO: 4773 - DNA, 3000 bp, Unknown
  misc_feature (1)..( 3000): cDNA_ID_3074199_gDNA_ID_1620730_Annot_ID_166086 3000 nt of promoter + ATG
atatatgagtccttaaatctatatatgtagaccggtgaatcagtgaagaacatggctcagggtgctcttgacggtgtgaagaacagtcttggcatgaacgagaagaaatgagaatttatacttctcaactattttatttaaaatatttatgaataatttcttgttttggaagttttgggtttctccaaattatgtttgtaataagattatttgttttgaaaggttttgtgatcatgtaatccgaaatctgagatgtaataagatgttgtaacatcacagcctttgtctattttaaaggaatgaaccaaattagcaaacactcttatcattagaacaaaccgtgtaatcctagtccgagccatgtacgaatatcgtagccgataatatatagttcattaaattagtaaaataattatatatgattaataagcttattggtaaacttgcattattatcatgatgttggtctatattgtttaaagtttaaaccgagcaagtgttataagcattgtaaaaatgaatttaatagatttttagtgaataaagcattagacttggtggtttccaaatcaacgaaaagtttgtgtacttacatacccaaatatgaaaggaaatggtgttcatgagcctaagatttattttcttcgaattaaacaaagtaataaggcctagttaataataatgaaagcaaattataatttatgattggtcttgaaaaagcaaaatggagagtttaacaacaaacgacgtctttgaagtgaagataatctcatgtagtacacaaagtttgtgtttcgttgcagtacataaagaacacgatctttttagtagatacgaaaacatgcattatttaatcaagaaaaaaaaatgaaaatgtttttgtattccaatcacatgaaaactaaaggcaactataattaaaaaaaatcctcaaaaagaatctacagcccccaaaaaataagatttagtacaattccttaatcgtacacagtagtacaagcaagcattgtactgctttcaaaccaaagacacgaccaaatgtcttataaatgatatttgtgtttatctccatggtaatagaaatgagcaaggagatatttttttcccctgggtttgaatgaacatcattgagtgcatcgttgatgtaattttacttattttattccattgttgaattaattaaagaagtatatatcagcgttgcattcaattatgtttttctaattttcaggaaatacaaaaaaaatgaaaaaaaaaaatcacttaaaagaccttgagagttcttttgactccaacatttagtttctattattttcgactcctacaacaaactttcaccatacaaaataatgaagaaaacacccaaaaaggtttgaatgtgtgaggttagtctcatttttaaaatagtgacttgttttttttaaaatgttttttaagaatgttttttcagctttttattttattttaaacctaaaggtagcgtgactattgtggagaaataaagaaacataagaaaaaatatttttggtttatagtaagatgttgttttaaaatatatatttaaaaacaatgtcactattttaaacggaatatagacattttctattaatgagattaacgtcgagcatttgaatttctagatttttttctaagttattttgtatgttgaaggtgtattgtaggaatcggaaacatcaattttcaagatttttataagactttaatctttatcagtttcagaatatacagtgtgggtaagtttctatcaaaatgattcgatgtatctggagtggtctaattcgtgaaagtttatgtattttatttttaggagatctaaaattttatatcagaaaaagcagaaaacatagataaatgtgtgctcgtttgctcgagttcgtagatacggggacttgcaacaagcacaaatcattttgttgtagaaacaaatcatgagcaatgtgcaatgagcttcttaaactatgagatttctttaaaattgaatttgtccatttatatgtttttaaatattatatgtttagtttttaaaattaatatatcaaatttttctaacaagaacaatacttagagaggaagtcatcgcagctttttttcccggtaacaacgacttcttcagcatttgttgaccggctatctgaccaaaatcctttgactttctcagcatagatgtctgattttctgcccgatgaggttttctatttacggtggtagtcggctagcttatggcatatgttggcttctatagcggcggttggctagtttaggtctagagtatcaccgcccatctccggtgtctcattgatcttttggccggattgctttctagtttagaataatgttttctttctcttgttttatattgtgtttcaattatagatccaaaatcataatttcttaaacttctattgtttaaaagactcgatttgtttttcaagcttatcgattttaattatttaagaacaaatcaaagttacggatcaagattttttttggtgtctttgggttgggtttaatgccattgtggctattatttctaaccaatctctggaagcaagtgtttttttttagttgctgctgaaagctccatagacttaatctctacgtcgatgttcctcgttgctggtgaaagctccagcgcccagcggaataattaacttacacaaaaatgtgtttaagtaaaaattatgtcatggagtaactaattttcttcccaacccatgtgttaaaagtatcttttaccagctcaaatgaaaccacaaagataacattaatgtcacaaagtatcttgtattaagcataatttcgttattaaaaagtgcaattttcttaattatattaatttcactgtcaattgaaaaagaaaccgttaatggtttcaattttgacaacaagacaatcagctccacagaattctccagaagaacacaaatcctcttcttcttcttcttctccaaatttctcgaattcaaatttcaaacgatg

SEQ ID NO: 4774 - DNA, 3000 bp, Unknown
  misc_feature (1)..( 3000): cDNA_ID_3074193_gDNA_ID_1620730_Annot_ID_166091 3000 nt of promoter + ATG
gaaacatggaaaattaaacactaatttagtaaagtttattattttagtgttcagaagaaaatctaaaattttaaaattatatgtttagtgtctttatatgtttagtgacactaaacatataattttaaaaaattggatttccttctgaaaactaaaattaaaacctttactaaaatatgttctattttacatataagatataatatagcttctagctagatagatttttaatttttaagttattttaaacttttgtgactttacagggtgatattttaactttttattttgttttagcatcttcttttccattgatattatgaaccagagttgtccagctgtaaggctgaggaaattacaatcggaacgtaagagtaaaatttaaattgttcattctggagtaagcgacccttggcaagaatatccgtcggtttgttctgttttcgattgacccatgtgaatctgcactcctgaaatcgtttcttcgaagcttgaacatccctaatccaattgaaaatatcaaaacgggattttctcttattttagttttacaattatattttaaaattttttaatattgtttgactactaaaaaacctacacgtgtataattggtgttgagattgtccctcatcagggtttttggagcccttctctcctcagtcccttcctttctattttttttttttttttgatttattgaaatagcatcttataagggactagcgttgcttatggtctaatctatcaaaaatagtcagatgaaaatgataaataatttcgatacagaaaacagcgtaaatcactgataagataaattgataagtatgaaccataaaccaaagtacaaacaatttataaacacatatacaaacatgtgttcttacaatattgttatctacatcttatataatgtatcaaaaccattattatgtcaaatgccaaaattattttaaaacttttctcacttatttattaatgaattcaaacagtttagtatttataaacacacctacctattatcactcttaaaattttcactgttttcactgcttttttttaacatttgactttattaatatggtgtcgttagtttaaatagtcacaatgtaaggcattcgtgatgatagaaggaacacaaaagtgagactgattgacttagtctatcttgatctttcaatatcttgcatcttccaataacttggctccaaagttaatcgttttgtgattgagtatatccaccaatgctccccaacagtcatcttcaaaattaaagcaaccttcttgtatcctctactccaacaatgtttcattcccatgaccaaaactcttacgtgaaaaaatacgggtggagattaatatagtaattaacattaatgttagatgtgcttgattcgtgaaggataataaattaaaattttatctaaaacttttaaccatagtgggacgttggatcatataatttttaaaagatagattttatgttgacattaaaattaacacacctacctattatatatcactcttaacattttcattcttttcaccactagttttttttttgttttaacatctgacgttattaatagtggtgtcaagagtttcaatagtcacaatataaggcattcgtgataatagaaggaacataaaagtgagactgaaaactagacagtcaccttcaaaaaataaccttcgtgtatcctttagtccaacagtgttgcattaccatgatcaaagcgcttgtagttagctttcgagagcattcatagttactctgcatgtgctttgacctgatacaagataagtaaccaaataatatttgataactcaacctgatttgactgtaatcttccattgacaaaggatcaatcatatatagttacactttgtctaattctttggccgtcatctccaaaacgtatggcttatttcgttgcttctttgatgattttgttgcttcttctgtaaacttccattgtttcatatcattcttggccagaaaaataacatttacgcagagagactctttcgttgaaacattaccaaattcctactcttccacaatctccaaaggatccacatggctaattattggaaatgtggctgagcttgattgctaaactttctttgacatcttcctctgcaagcactatcaaatttttgtttcgttccagctgtttcctgtggctttcacacagtcttagaccatataatttccatcagtttgattacgaggccgtggcagtcttggtggatgtgaaggcaaccagggatcggaccaagcgttgatcatcgagtcgtctccatagcaaatcatagaccttgtctttgcaaatctcgactttgcaacaacgatctccaagcgtatgaagtcttagcatttaacagacaatctggattctgtaaaattcaccactgcaaaatttattactctatttcacaacagaatttttttttggtatcacagttcattcatacattttcgaatagtttgttatacatagaaagaaatcttttaaaattagaatagtcctattattcaaattaatttttatggaaagaaatctttacatttgttgtccaaacaaaccttgtgataagattttagattatttgttgtccaaacacgttgtgacacatgccccctctgacaaaaaagataattagggtttacaaaccttttgtttcttctgtatagatatatatatcgtagcatagcaagacaagaacacagccgcccaaagaaccaaaaacttctctgatccatggttgaagatgaagcagaatccaaaggcgagaagatatagctctcggtgtaatcggcagtgtgtcaacgttagatttgcttttgtagcagtacgggaagaaggaatccatttcaggcaagcaatataaaatattcgatcaaatttcagatatacttgtcttaaactatttaacttttattgatttaggattaagaccaagcaagcaaagaaaaactgaaagaattctccaatg

SEQ ID NO: 4775 - DNA, 3000 bp, Unknown
  misc_feature (1)..( 3000): cDNA_ID_3089861_gDNA_ID_1620730_Annot_ID_166093 3000 nt of promoter + ATG
ctcgtattcacaagcaacttaagaacagagtttctgcacatagtagtgttggtgcgactgatgttgtctacatgacttcaatccttgaatacctaactacagaggttcttcagttggccgaaaacactagcaaagatttaaaagtgaagaggataactccaaggcatttgcagttggcgatcagaggagatgaagagcttgacacactcatcaaaggaacaattattggaggaagtgtgatccctcacatccactagtctcatcaacaaaacaaccaaggagtgatttgtttcttaagttaactaatatgatgtgatatgctagttaagtagcttatggtgtttcagttactctagttttggatcggagaagtagtttaagtgttaagtcttgagacatcataattttacgtctcatctcgtaaacgataggagaagttctttgctcctagagttttggtgctaaacaattcacagtgatatgcattccatgtggctccttaaaacactcaaccatgcatgcacaagcagtggaccatcttcatattcatgactgactaaaatattgtcatcaatgcttactaatatgtcaaattgtagtaactcggtggtttaattgaagtttcattgttatatatatggcgtataggcctaaagttgtatgaagttttgattgatgagttaagacatcgtattatataaagtaggattttcaagttactaactcaactgattaagacacaagtcaagtactttgaggagatatcgacatgtatcaaatttaattttgttaatatatttaaaataaaaaatagaaaattttctaatcctttcaaaaaatatatacataaatcacattattaataaaatgggtttaaaaaaaaattaggaacctattcaaaaatgtttttttttgggtgtatattttaattcgatatatttcagcttgacatattacacaactgtatttcacgaagcgagacatatttcaaaatttcaattaatcaattagattttaatgcgtgttttaatatttttcagttgtgaaacttaaataggcttatccttttattttcttaagaaaaacaaaaaataatattgaatacatatccatgtaaattacaatatttaattataaaatatatatgtaattgtgaaaatagtatcaaaatgaatgggggattaaaaatttagtcgtcattttttagtaagacatttaagataagctaatgatttcaatgttttccttacatagtatagacgtttagtaaagattttttttaaaagacataatagatagatagagtagactaattgagatgagagttacaacattaaactaactatatgttggttaagttttttttttttaatttaaactacaaaaccttttatatataaaatcaactcatactttttacacaaactgaaaagaaaatcatttgggcgcgcgcgttcaaactcaaatatataataaagttgagattgttctcatatttgaatcactgttagaaatgaaaataacatttgaaagacataaatttctatctaatcaatagaagtctcatatccacaaaagataaaaaaaaaaaaaaaaaaaaaatctcttatcaaatttctatctaactaatttgacggatattatgctaattaaaagtctcaaataaaaactaaaaaacaaaaacaaaagaagacaagacgtaccgtaccgttgacacaaagcatccgtgcatcatttctgtcactttttccgacaaagcacgtatattctgtctactttcatcacagatctacgcagtaattaacaaaatatctattaagaatcaaaaacacatagaaaaagagaataaaaaccaactgattagatctaaatctgtatcgttttcgctaaccatatcgacagtgtaatccattggagaattctttcagtttttctttgcttgcttggtcttaatcctaaatcaataaaagttaaatagtttaagacaagtatatctgaaatttgatcgaatattttatattgcttgcctgaaatggattccttcttcccgtactgctacaaaagcaaatctaacgttgacacactgccgattacaccgagagctatatcttctcgcctttggattctgcttcatcttcaaccatggatcagagaagtttttggttctttgggcggctgtgttcttgtcttgctatgctacgatatatatatctatacagaagaaacaaaaggtttgtaaaccctaattatcttttttgtcagagggggcatgtgtcacaacgtgtttggacaacaaataatctaaaatcttatcacaaggtttgtttggacaacaaatgtaaagatttctttccataaaaattaatttgaataataggactattctaattttaaaagatttctttctatgtataacaaactattcgaaaatgtatgaatgaactgtgataccaaaaaaaaattctgttgtgaaatagagtaataaattttgcagtggtgaattttacagaatccagattgtctgttaaatgctaagacttcatacgcttggagatcgttgttgcaaagtcgagatttgcaaagacaaggtctatgatttgctatggagacgactcgatgatcaacgcttggtccgatccctggttgccttcacatccaccaagactgccacggcctcgtaatcaaactgatggaaattatatggtctaagactgtgtgaaagccacaggaaacagctggaacgaaacaaaaatttgatagtgcttgcagaggaagatgtcaaagaaagtttagcaatcaagctcagccacatttccaataattagccatgtggatcctttggagattgtggaagagtaggaatttggtaatgtttcaacgaaagagtctctctgcgtaaatgttatttttctggccaagaatgatatgaaacaatggaagtttacagaagaagcaacaaaatcatcaaagaagcaacgaaataagccatacgttttggag

SEQ ID NO: 4776 - DNA, 3000 bp, Unknown
  misc_feature (1)..( 3000): cDNA_ID_3074187_gDNA_ID_1620730_Annot_ID_166096 3000 nt of promoter + ATG
ctgtaattatatttgtatagttagattcacttttgattcaaatatcaattatatttttttcatgtataaatctttttatctatatatacccaagattcttatcttttttaactattatgaaatacttatatcaaccatatatgataaaatggtatacaattatgttacttatttagtttgaaagttgcctaacttgattctaagcaaacaatttcttgttctatgtattctctcctaatctagtatccaatcacatcatgataggctcatggctaaatattggattgacataatttgaataacataatgtataactaattactcatttgctttaaaagttttcacatgaaagagaaaaaagaaagcaaaaattaaatagtcttttaagttaactcttataggtttctctctttacatttgcactagattttaacccgcggtacaccgcggagacaatttgtttttcgaaattagtatatataaaattttgcaaattatatctatctataaaatatttttattttatagtttacaattgttattaagtaacgtccttccaaacctgtttcgccaaacccgtcctgtaaaaaaaactgcggtaccccgctaatttaaatttataattaaaataaatattttaagggattgcaattgtgttttagtttgtcaaacaaaattttgttttaaatagttgtcgaaatttagttcaaattttggagaaataagatttagtgaattgataagaaatatatttagttgcgttttgctcattttaagggattgcaattgtcttttgggttgtcaaacattttttattttaaatagttaccgaaatctatttcaaattttggaaaaatctgcgtgatatatgggattagaatatatttggaatgtttttcgtttgttaatcaatttattgctgaaaaccccaataattaaaagccagtggcatctattgtaaataagttccaactccaggatttatttcacaaaatggctgcaaaaatgtatatatagatatagtcatattcatattggagagagagtcgtatatttaactttttggtatatctaacctctcaaaagaccattattaaaaaaaatatgcatgtcattattaatgttaccgattaatcatattttgcgcaaaaaaaccatatcatgtagacaaaaaatataataaaaagaaaagattaagttaaaattactaaactaaaaaaagttaaatagcaaacaactaagttacaaaacacgaaaaattctagtccttatcaagtaatgactattaaaaaatagcaaaataagaaaagtaaaatgagagtagtgtttgatacattaacatgatttttttgtattttttcttttatatgaagatatttagttaagagtgggattaatggatgattcaatgcaatgtgaaacttttaattctttatcactaaatttgtttttaataatattaatttagaatgacatgtgacattcactggtatgatgatgtgttactcatatggagagagttgaccaactttcatatatatgatttttgtactccctcttcagttcgcctatgacatagacttacataagaaaaattaataacctgagatctaaattaatagacttactttggttccaagcaaaacccacaaatgcataaaaaagaaagaaaggatctcccatttgttgagctccatgctgtccggaggattcctctcgattttattagcccaaacctcttgtcagcttgttgacagcactgccccattcgattccattatttttagtacttttgggtttcatttgcaagaattgtcattttgaggagttcaaaaatgatgattttagtgttaacgtgtgatgacattttttgctaatccactagcacaaatgaatcatatcagcccatcgatataggatggaatagttttttttttcttttgtaaaatctaccaaaccccgaaataatgttagcaaagacaaacatccttaacatatccaatattctggtatagactcataaccttacatatcttgccaatttttttcctacgtaagacttctacgagaaaaacaacggacaaaattataagtatgtagcgaagattgttgcggcggctttctacggatgtttgtctttgggtatcttccatctaacttgctcttttatccaattgaaccatttttttcttacaacatttagtataaaatcactacatatgtacttgaaccgattcagatgttattaagttgctaaaaagtaaaaacacatttatctctatcgttatcgaaacacacataaattactacctaatgtttttgaacttttctgttttattgattaataaagtgatttttgttatttacaataatatacatacacttttctatagacatttaaggaacacaatttttttgtagagtaaaaaatcaaatcttaaacttttaactgatattgttatttctattttttctctttttttaacgtatgattatttaatattactaggttataacttctgcaatatcgcagaaaattcattttcaacaatttttttttctcttcttctttctctaagataattatatatagtttcattttcaattaattatggtttacattcatgtaaaaaacaaaaaacggtttactgtgggtggtttaacatgatatcgccgacaaaaaataaaataaaaaaataacatgatatcatactttctcacttctcagtaaactataaaacgatgccgtttcgttatcttcgagaactcacaacacacgtggccaatctagagtcaaacccaaccgcacagacaaagagaacccgaaattgcaaatcctatctccatcaccaaaccattcttctcttcttcgatttgcagtaaaattcggaaaaaagtctcaatctttctttctgggtttctactttatcaaacgaaatcaactcaagcaatgtttcactaatatatctgcttccgtgaattctgaataaaaagatcatg

SEQ ID NO: 4777 - DNA, 3000 bp, Unknown
  misc_feature (1)..( 3000): cDNA_ID_3089861_gDNA_ID_1620730_Annot_ID_166092 3000 nt of promoter + ATG
cgacgaagataagtgcttttgaaaatgttcggatgattatggtggagggagagatggtatgataggagaagtcttttgctcatagaagtagagtgctaacagttcacaatgactttacaatctatgtggctccttgaaacaataaactatggatgtgcataactaatggacaatcttcatatttaggaatgactaaaatatcttaactaatgcttaaacactcatgtgtcaccaaataacaatacatggaacatgagtgtcaataatgaccttgtattgtaatgggtcgctggtttagttgaagttccagtagcacataccgaaactacattccttttttatggagtaattctgttttaggatatttttagggtttttggattttgtataagacaaaaaaaaacacaaacacaataagctacttaactagaaaataacatcatcatataatttgactaaataaacaaatcacttcttcgtggttttgttgatgagagacatgtggatgtgagagactactccttatccaccaattgttactttgataaatggatcaagatccctatctcctgcgatcaccaactataaatgcattagagtaatcctctttattttcttatcattgattgtgtttttcggtaactcaataacctatgaagttaggcactctaggattgaagccatgtagtcaacaacaatagcaccaagtcgaccatgttgtagatactctagtcttgagttgcatgtgaatacgacccactagaaattgaaataaacaaagaaatttcattttttgtagtataatttgataaaattttatactgatattgtttctttgtttctttcagtttcaagtggctcgtattcacaagcaacttaagaacagagtttctgcacatagtagtgttggtgcgactgatgttgtctacatgacttcaatccttgaatacctaactacagaggttcttcagttggccgaaaacactagcaaagatttaaaagtgaagaggataactccaaggcatttgcagttggcgatcagaggagatgaagagcttgacacactcatcaaaggaacaattattggaggaagtgtgatccctcacatccactagtctcatcaacaaaacaaccaaggagtgatttgtttcttaagttaactaatatgatgtgatatgctagttaagtagcttatggtgtttcagttactctagttttggatcggagaagtagtttaagtgttaagtcttgagacatcataattttacgtctcatctcgtaaacgataggagaagttctttgctcctagagttttggtgctaaacaattcacagtgatatgcattccatgtggctccttaaaacactcaaccatgcatgcacaagcagtggaccatcttcatattcatgactgactaaaatattgtcatcaatgcttactaatatgtcaaattgtagtaactcggtggtttaattgaagtttcattgttatatatatggcgtataggcctaaagttgtatgaagttttgattgatgagttaagacatcgtattatataaagtaggattttcaagttactaactcaactgattaagacacaagtcaagtactttgaggagatatcgacatgtatcaaatttaattttgttaatatatttaaaataaaaaatagaaaattttctaatcctttcaaaaaatatatacataaatcacattattaataaaatgggtttaaaaaaaaattaggaacctattcaaaaatgtttttttttgggtgtatattttaattcgatatatttcagcttgacatattacacaactgtatttcacgaagcgagacatatttcaaaatttcaattaatcaattagattttaatgcgtgttttaatatttttcagttgtgaaacttaaataggcttatccttttattttcttaagaaaaacaaaaaataatattgaatacatatccatgtaaattacaatatttaattataaaatatatatgtaattgtgaaaatagtatcaaaatgaatgggggattaaaaatttagtcgtcattttttagtaagacatttaagataagctaatgatttcaatgttttccttacatagtatagacgtttagtaaagattttttttaaaagacataatagatagatagagtagactaattgagatgagagttacaacattaaactaactatatgttggttaagttttttttttttaatttaaactacaaaaccttttatatataaaatcaactcatactttttacacaaactgaaaagaaaatcatttgggcgcgcgcgttcaaactcaaatatataataaagttgagattgttctcatatttgaatcactgttagaaatgaaaataacatttgaaagacataaatttctatctaatcaatagaagtctcatatccacaaaagataaaaaaaaaaaaaaaaaaaaaatctcttatcaaatttctatctaactaatttgacggatattatgctaattaaaagtctcaaataaaaactaaaaaacaaaaacaaaagaagacaagacgtaccgtaccgttgacacaaagcatccgtgcatcatttctgtcactttttccgacaaagcacgtatattctgtctactttcatcacagatctacgcagtaattaacaaaatatctattaagaatcaaaaacacatagaaaaagagaataaaaaccaactgattagatctaaatctgtatcgttttcgctaaccatatcgacagtgtaatccattggagaattctttcagtttttctttgcttgcttggtcttaatcctaaatcaataaaagttaaatagtttaagacaagtatatctgaaatttgatcgaatattttatattgcttgcctgaaatggattccttcttcccgtactgctacaaaagcaaatctaacgttgacacactgccgattacaccgagagctatatcttctcgcctttggattctgcttcatcttcaacc

SEQ ID NO: 4778 - DNA, 3000 bp, Unknown; identical to SEQ ID NO: 4772
  misc_feature (1)..( 3000): cDNA_ID_1807494_gDNA_ID_1620730_Annot_ID_166087 3000 nt of promoter + ATG

SEQ ID NO: 4779 - DNA, 3000 bp, Unknown
  misc_feature (1)..( 3000): cDNA_ID_3074203_gDNA_ID_1620730_Annot_ID_166082 3000 nt of promoter + ATG
taagaatcgagatatatctcgacatcgatgatataaagaaaaaaaaaggtatagtatatatttttaaaaacatacacttattgtttttagtgatgatactggtaaaacactttcatgcaatattattgaaataccacttcaaagactaattttcggtatcgatagagttttagttcgtcgacgtcgagaaattttatatcctcttcgatttctttacagtttttatcgattttttttgtatatacttctaattttcttctctctatatgacttttctctcaatttcttctttttcatatctactttttaagatattttaaagagtcgtgaaagagcatcccttcaatatgctcatgccattggtattgaattcaccaaaagagaagcctctcatcaaataagttcttcaatcccgaaacttgagcttagtctccaaatcctttgagttaagatgtcttatgaccctcgtcatttataaattaaactcaataaaattgatgtctacactttgatcggattgaacaagaacattgtcatgttcacttgcaatattcacataagcctttatcggattcagttgtccgcaaatattttgatatttactcgatgaaagatctgctataagggtgaataaatttgtaattcaagccccatcacaaatcgcggtagatcaactgcatctagcttggaaatcaagagtactatatgctcgttgacgccttcatcaagaccaaaagtaaactgtacattgttgcctctattccccaatcttggaatctaaatatctcttgatcaattttttatgcttggttctatcatatagttactttttaacttgatgaatttccaaacatgttttaggaaaactactttgtgaaaattttatattatataaatagaaaagataatttaacggaaaagaaacattaactttatagcatgtggtatgtggatattatgctcactctcaattagtcaattaagatataccaacaacaacctggttgagatatcacagaaattatcaattaatatcttataaatgaattcgaaatatgctaaatgcaaacatagttttgtaagtacgtaatttataatatattaatactcaaatctaagacttacttttgaaaacaaaagaatatcttgtcaaattgacactttttaatgttcaaaagagatagtaagaaatttcgcctaaccaagaaaacaataaaaacaaggaatttcagtctcaatactatatatatttttctgttattcacttatatatttggatgtgatagaatacttttttaagaacacacatatcttatcttcaccgatatattagctgatacattttttacattcctttttattattattattcttatttattttctattcacatgtacttacaaacaaaaacttaaagactttgcaatttgcgttacgaatatttttcgtcaggctgtaatttgaaaagtcttctagatgatttcaagtctctgcttaatgtgccaactaggctctatgtcactactttgtgttgtctctaattctcattcttcttgacaagaccaaacatatcactaatgatgaagagatgactaatatttgtttatacatttgcttgtaatgaagacatgtagtatagcaaagcaccatataatatagtgatagcattctattaatttgttcttttttacagccgaagaagaagagtataagaaacatgtttaagattcagccttaaacaagtgaagaaaaaacaaaaagaaaggctcaacgaatgggaactttgatccaaccattggcaaaagcaatggctaagatgacgaatggagttgacataccgaatatgataatgtaaggaagaggcgtcttcatcggattctctccttctctttctccaacgctttgccaatacctacaaaattccaatgcaatcctcatccataaccatttcttcaatcacaattgcatgtttatgaaaaatgaacatgcaagaatttaagttctttttctattttaaaagagtttagttcttttgactaaactacaacccaaatatttttattcttttgctaacacggatttgagtctggatattgatacaatactaacacaatgtcacaaaccaccagtctacatgtcattgacacatacaaaaaaaaaaactacttaaattctgcaatggagactaaaatttttgtattaaattggtaacctacatatcgttttgtaattttccatgttttcatcaatttcctaggtttgtttttctgtgattttgcaaaattacattaccattctatgagtttctgttattttctacaatctcatgatgaaaattgagaattaagattaacttactgttcaggttcttcctctttggttataaactttttcttatctttaggcttcacttctccatctcctccaccttatgcaataaccaaagattaacaaaatttacatctacaaacaaataaaagatataagagtacctaatttggcatgaagcttgaattctgggaatcctaatggtgatggtggacaaaagaattgaggtaaagcaagcaatgatgaatatgaagaagatgatgaagttgaggaatcactagccctgtggctaaacgaagaagaagaaattcgaaatttcgctgccatttccaacaactatatggatgtgatagaatatttttacattttatttttctgttattcacttatacatttggatgtgatagaatatttttttctgaacacacagatcttatcttcaccgatatattagctgaagcctgatacatttacattccttatttattttttattcacatgtatgtactaataaacaaaacttaaagactttgtattatgcgttacgaatatttttcgtcaggattgaaaagtcaaccctaggcctttagcttccttcttttatataaacagagaaacaaaacactttctttctcagcctctctgtttcatcttcttctctaaactctcaac

SEQ ID NO: 4780 - DNA, 3000 bp, Unknown; identical to SEQ ID NO: 4776
  misc_feature (1)..( 3000): cDNA_ID_1825553_gDNA_ID_1620730_Annot_ID_49382 3000 nt of promoter + ATG

SEQ ID NO: 4781 - DNA, 3000 bp, Unknown; identical to SEQ ID NO: 4102
  misc_feature (1)..( 3000): cDNA_ID_1822925_gDNA_ID_1620732_Annot_ID_49406 3000 nt of promoter + ATG

SEQ ID NO: 4782 - DNA, 2749 bp, Unknown
  misc_feature (1)..( 2749): cDNA_ID_1444629_gDNA_ID_1620732_Annot_ID_49407 3000 nt of promoter + ATG
cacagtagatgcttctgctcctcaaactctgtcctagtaagagatactgatgcatctgccatctgtattcacagttataaatatctatcaaattagctatttgaaatcaagagcatctgaaggtcatgtacatcattaacttccgagataaaattgatcctcctggtaccttttgcctttcattggcgattgctaattgctgctctaacatatttaaacgctccttctgcaacgaacatgtctcctgcagggtaaaactaaatatgagacaggaatgcgaaaaatgcacaactttgaactgacatccaatactaaaacaaaaaaagtactaacctccaacgatcctgattttgctgtcaagatgtctagctcttgcgatgactttccgacattctcctggtacttcctgatctcctcagacagcttctgtgactgtacaacttggcgatcacggtcatcccggacttgttggagctcattccgaagattagtaacttccgaaagcaatgaatccttctgttttatagcgtcatcttgcaacaccttgatcacaaaaaaaggaagaggaacaagttaagaagaaatgagaccaattaaagttagcacgcgacagtaaggccagtggtagagaagaaaaacttactctgcttgaagatagttgatcctgcagcgacttgctgtgtcccctaagtgtactaagattctccaggatgcttgacttctctttttcagcacgtgtgagtgcagctcgaactgtttcaagatcagtctgaagtttgctgttatattgttgcaaacttgtgttgtactcttgcagccttttgtacatatcctcaagtgacgtcacctataaacacaaaacaatttccatattaactaacagatcatgtggaactaacacgagaaacagaaatgaaacacctaagaaaacaccagaagacatatgttatataccttctgcttggcagccattttctcttccttaactttatcaagttcttctccgagagaagcctgcactttttcagctgcaactctagcttctttttctcttctatgacattcaatggcgtcctagtgttcaataagtaagaggaaagcaaagtcaagtaatgaatttcattaaaagaaaacattcacaattagaaaaaccaggcaccaaaacccttgcctgtgtactagactcctcctttgcaagcttttcatgtagtgacactacattctcttccaactttgagatagtggcctgtagctcttcctcttttgtcctagcctccaactctataagagtcaaaaagttagggactaccaccaaatgagtgaataacttgtttcatgtaaaaaaatcgcaagaagaaaataacctttgtggttgtatttttgttctgaagattccaaagaaaccttcaaattttccttctcttggacatgggtttcatcagcttgttggaaccattttacacaaaccttcagcctcttgataatatccgtcatttgctcaatcttagcctgcagggacagagacaaaaaaaaactccttctgagtgaaaccataaatgaaaacatctacaatgcttagagcacagagcaagtgtaactcaatcaatataccttagtatcaaactttccagcttttgctctctcactgagcaacgccaatatttcatcttttgtaaagtcaactttaccacattcttcaatgctccctacatcgctgttcatcgtgacatcttgtttattcacagccgaaaaagcttgtcttctcccagtacctccttgcgtttccactttccttcgcttgtcaaatgaaatgccaccgagaccctcctttttctgaaattgaatcaaaagccacagatttttcatcagtttcataacaaaaccaatatccagctacaagaaatgtagaatcccagaacccacgaccactctaaattctattgataacacccatcagagtaagaaatgcaaagccgatgaagataacaccttaataaattcatctggtaagctcacaaacaaaacccaaaatgcgaaattaataattcgaccagtcctagggtttttctcaaacccatcctccagaacactcaaaagtgacgacgaaatgtagtggaaaagcatgaaaaagggagcttacggcgtttggactgcgaggaggacgattctggttgcgagaagccatctccgagactcaaaattgctacaaatttcttctcctttcgctcgtcaagtgcataaaaatcccaaaatggtagtcttctccctaaattcgggttaccgacaataaaatctccgattgattctcaagatcttagagaatcaaatcgaaaaccttctcaatcgaagtcgagaaactaggattcttactttttcctaatttggggatttttgtgtgtgtgtaagtgtgtgactgaagcaggagcctgtagtttcgaaattcgaacgattttgaaattagatgtggcggacttctggaattatcataacgttatcaatcaataaagtatttaaacatatgggctaactttgggcctacaattcggcccaaatgtttaaataatcttgccacgtggctttaaggcggacaaaaatgacacgtggttttatatgagtggctacaaccatatccaagttatctaaagtacagataaggcgctctgtgtcggagaatgaaaccaaccaatcatataagcataaccaataatcatcggcttcaattttcgtcttgagaaagaaaaacaaaatg

SEQ ID NO: 4783 - DNA, 1265 bp, Unknown
  misc_feature (1)..( 1265): cDNA_ID_2140779_gDNA_ID_1620732_Annot_ID_166134 3000 nt of promoter + ATG
ttagtcgttcatcaatcctcaccccattgattgtgttactttcattatcacaaactgtttcctaattaaagtcctcttatttcgaatttatttcagtatagtacttgtgtgttaaacttaacaacgttgaaacaactatttccttcatttgcatttgaatgtacaatgaaactacatatttctacattttagtatgagtttttttagtttagtatatttaatgattatctttgtatacaattcaaatccaatatatataagaaactctcattattaatctcgaataagagtacgtacacattaaatcttatatgctaaaactaggtctcgttttagggatgtttataaccatctttgagattattgatgcatggttattggttagaaaaaatatacgcttgtttttctttcctaggttgattgactcatacatgtgtttcattgaggaaggaacttaacaaaactgcacttttttcaacgtcacagctactttaaaagtgatcaaagtatatcaagaaagcttaatataaagacatttgtttcaaggtttcgtaagtgcacaatatcaagaagacaaaaatgactaattttgttttcaggaagcatatatattacacgaacacaaatctatttttgtaatcaacaccgaccatggttcgatttacttgcttaaatatatgacatttgcacttttgagatgcatgttatttacaccttataaaacttacttgaactttaataatatttgaccatatatcatcttggaaatataaaatgtaaacacgaaacacaaaaggaagttttcgttgtatttgcatctatatttctatatttccaaagactaaaacactatcaatgtgttgtgttcaattttgaacgtttaacatgtaagcataaaaacaaactcagaaaaagaagaaaaaaagaagaaaaaaatcatcaaggcatgtctcgtatagctgccacaaacgtaaaaataaaataaaaagcatccataataatggataaaagcatcgtataaacgcaaaatctattagatttttgtttttatgggacacgtataccaattgataaacagaggacggcaccgaaccattttgacttccctcttcttctctccctataaatactttgtacttccccttacggaccctacgaccttttgtttctctcttctctattaatactatagttttcctcaaactctctgattagctcataaatactaaaccagttgaccatttttttctgataaacaatcaatg

SEQ ID NO: 4784 - DNA, 3000 bp, Unknown; identical to SEQ ID NO: 3325
  misc_feature (1)..( 3000): cDNA_ID_3074219_gDNA_ID_1620732_Annot_ID_166129 3000 nt of promoter + ATG

SEQ ID NO: 4785 - DNA, 3000 bp, Unknown; identical to SEQ ID NO: 3323
  misc_feature (1)..( 3000): cDNA_ID_1825652_gDNA_ID_1620732_Annot_ID_166127 3000 nt of promoter + ATG

SEQ ID NO: 4786 - DNA, 3000 bp, Unknown
  misc_feature (1)..( 3000): cDNA_ID_1825656_gDNA_ID_1620732_Annot_ID_166125 3000 nt of promoter + ATG
agagaaagaaaggtactaactacgttctttcttgatttcttagtttggttactgcatcataagatcttgttgatttacttctctttattatatgcagatgtttcaggagcatattgtggtaagaacaccgatacatcggttgttgttgctgatctgaccaagagcaaagaaactacttcagcgttttcaggatcagtagacataatgattgaagggaaagctgttaacacatccgagttacctgtcttttctctgaatgctatagccatagctactaatgatttctgcaaagaaaatgagcttggaagaggtggattcggaccagtctacaaggttggttgattactttggttatagacaagagtctttgtgtttaatttttgtgatttttttgttgatgattgtgatatttatcagggtgttctcgaagatggacgtgagatagctgtgaagagattgtctggtaaatcaggacaaggagttgatgaattcaagaatgagattattctcatagcgaagcttcaacatcggaatcttgtgagattacttggatgttgcttcgagggagaagagaaaatgcttgtttatgagtatatgcctaacaagagcttggatttcttcctctttggtatgtttccttttttaaagatccaagaaagaataagcacttcctttcattcttcttagttttgctcttttgaatgtacagatgaaacgaaacaagcgttgatagactggaaactgcggttttcgataattgaagggattgcgagaggattgctttatcttcatagagattcaagattgagaatcattcatagagacttgaaggttagcaatgtgttgttagatgcagagatgaatccaaagatctcagattttggtatggcaaggatctttggtggtaaccaaaatgaagctaacacggttcgcgttgttggaacttagtaagtaaaaactgaattccaaaaaacagagcaaatgttttatttcaatgaatcatgttcttagcaacttactttacatttgatatttgtatattgtagcggatacatgtctcctgaatacgcgatggaaggacttttctcggtgaaatccgatgtttacagcttcggtgtcttgttgctagagattgtaagtgggaagaggaacacaagtcttcgatcttctgaacatggaagtctcattggttatgtaagtttcccaaaaactaagagtaaaaactgttgttctctcttaatgagcatttgaaattttggtttggtttggtttataaatggtctaattagtggtggaaactgaatgcttgcaggcttggtatttgtatactcatgggagatcagaggagcttgtggatcctaagatcagggtcacatgcagtaagcgagaggccttgagatgcatacacgtagcgatgctatgtgttcaagattcggctgcggagagacccaacatggcttcagttttgcttatgttagagagtgacacagcgacgctcgctgcgcctagacaaccaacgtttacttccaccagaagaaactccattgatgtcaactttgctcttgattcgagccaacaatacatcgtttcttctaatgagatcacttcaacggttgttcttggacgataagattcttttgtttgttcttttgtaaagtttttttttatataattgttgtgaaaacgtataatattttttggttaattaggataatggagtaatggttgttgaaacttgaaattttgttcataaagtgaaacattacaaatggggttttattacagtatgatgttgatattttgaaaaaatcaccacactattctttttcaaaaatatcacaatggatcaatttacaagtataaacaaatgaaaacagataaaatatcaaaaagcatttatctgaaataaatcttcaaataaatcgtttatactataacaaaggtggtagtcttaaaatatttaggttagttttgaaatgaggatcataataattgtttttcattctattaaatataggtgagttgtttcaaatattgtaggattattgtgtttaatttaattaaaatgtgattgatttttatgtatagagttattatatataaatcaaacgaggaacgaagaattatgaggatgttcaaaaataagacttttggagcgttgactatggtaattagtactgttttgatggtgaaaagagtattcggtcttcgtatttcatacttatataatatacctaaaaccgtgttaacataaattttcctctcctccaagctccaaagccaaaaatcgtcaaacaaaatgcataggacaacattatatttggtgatgaataattcaaatgtagactcattattaaattgaatggaatgatgaattatttagagttagagaaaaaaagaaaaagtcaggaaaacgtgaaacgacccctttcttttttgtcttcggagaatgcggaaataaattaaagtagggtttgtttgatgaatactaacattgaagttcttattgggaaggataaaaaaaaaattgagttatttattacgaaaaagaacactgaaatttatataactctcgaagcatgcatacaaaaggttgactgataataaaatacgaaaaagcaatatattaagtaatttattaaaaaaaatggtcatcaataatatcatattttgaagaaaaattctgaatttatgaagtaaaaatgactattggaaaaggaaagaaagcctgacaaaaaaaaagaagaagaagactttttatttgctaggtcaactatgaattggactgtacacatagtacataactagatattttttccaaatgcgaacaagaagaccaagaaaagaaaaaaagcaaggtaatatattattgacagaaataaaatcggttacgtaaggttcacacattacacaaaacatgtccgatatctccaatggaaataaactctcatacttttctcaagaaagagtgaaaaacaaaaaacttggtttagagaaatg

SEQ ID NO: 4787 - DNA, 3000 bp, Unknown
  misc_feature (1)..( 3000): cDNA_ID_3091315_gDNA_ID_1620732_Annot_ID_166124 3000 nt of promoter + ATG
agtgatgattcattagcagacaaatcccgaaactctaagctaaattggcaaatgagatttgatatcatcaatggtattgctcgaggacttctatatcttcaccaagattcacggtttagaattatccatagagacttgaaagcaagtaacatcttgcttgataaatatatgactccaaagatctcggatttcggaatggctaggatctttggacgggatgagacagaagctaatacgaggaaggtggttggaacctagtaagcaatcattctccaaaatattaaaaatctttgtttgaaatctgaattaaaaaaaaataactcaaaactttgagtctaatcttcgttattcagcggttatatgtctcctgaatatgcaatggacgggatattctcgatgaagtcagatgttttcagttttggggtcttgcttcttgagattataagtagcaagaggaacaaaggattctacaattcggaccgtgaccttaaccttctcggttgtgtaagttaaaaacctctcaaacttgatcttgttttacactcaaaataatgataacactagaaaaatttcgatcattatacacaggtgtggaggaattggaaagaaggaaaagggctagagatcatagatccaatcatcacagattcttcatcaacattcaggcaacatgaaatcttaagatgcatacaaattggcctcttgtgtgttcaagaacgtgcagaggacagaccaactatgtccttggtaattttgatgctcggaagcgaatcaacaactattcctcaacctaaagcgcccggttattgcctggagagaagtcttcttgacactgattcttcgtcgagtaaacagcgcgacgatgaatcatggacagtgaaccaaattactgtctcggtccttgatgctcggtaatgtgactgtcaactagccaatcttctatactaagatgactaaattgagcgacaataagaatcaactaggaaagatggtattagttatgtgcatagtattttctctgtacgtctccgttgcaaaggttactacatgattcaattgtcttaattaagcatgtattctgtaattgctttatggataacccaaatagtcctgcagttataggacatcaatgtgatattttgaaagattctcagactttcatattataaattatggctactagaagaggcaaatattgttggttagtagaatttcgggttgtacgttttgagattaggtttgtacatgttgtaatagattttttttttaataagtacatacgttataagaattttttatgatcagcaacacctatttccatcgctaaccatggccaaaatccggtggatttaatttatgggctttaggaagatcatgggggtatagtggattttttgtttttaactgatgacagagtaaatccttcatggttccttcattttaaggtgatttcaaattttccttcatttcaaggtgatttcaatgtttgtagaggcttgattaaaattgttttagatcataaggatttttgtgcatcaaaagtgttcgcaatttcaatgtttggagaggcttgattaaaattgttttagatcataaggatttttatgcatcaaaagtgttctgtcaaaattccttaattaacctttgatgagtagctcgtcctttaataatgatagttgatatacagaattgtgatttatgagcacattaatattgacatgaatgcttgctaatttaaattttaaatgagagtttagaaatttagaatatttagcatagataattaatttcttgagagatgattttttttggtcgggttcttgagagatgattagtgttatatattcgtgatctcttaatggttgtccttacttcttatttatgctttgtttccctaatctttatgataagttcctaagtccatgtctatcttgatcgattcttgtgaatcatgatttatatattttaagttaatcttgtttcttgtttgcgtattgcatgatttttttttgttccatttcggctgtctttagtttagttactgtttagtttatctttttttccgaacacttaattttattaatcaatctcagcggaaaaaaaaaaattctctttagtttatcttatttgacaaagtattttttcgttgacagaattttttatattttatcttggagaaactatttattttcttccttttcacttgtgtggtgtcaatatatagactagacaaagaaggacatcttgtgagtaagtaggttcagaatttgacaaattcaatttgtttatttattattattttatttttgataaattcaggatttgacaaattcagtttgtttatttattattgtttttttttttgagaaattttccatcagtttggtttttagtaccattaattgtttacataaaaatttcgtaaataatatgaattacaaggctggttaaatttagtgctattttgtttaagttcagttaagttaaactgaatttggcaccctattttttttttttttcctcgaaacaacgactaaattttgctattttttttttaatatagaaaatggccgaacaaagtcacacaaatcttctaattacacatatggccataatctagaaggctaacattttcaatgtatcgaaggatgcacttgcatgcgagaacgataccgtgtgatgtgggctttcgtgggacaaggataatggatgaatatatacttggtgaactgcatgtgctatgttgcatggaaattaatttcacacgtagattttctggtaaattgttgaccatgaaaaaagttggttgaagtaattttaattgaagcgataaaaagtcatggaacgtggaataacactactctttgtcgtgtgggtaaaatataaataagattcatgggttagataaacctgaaataaatatgtgaaaaatcgtataaataaagaaagcaaaaggaaaatgaacaacatatgagagtggtggagagagatcgagagatg

SEQ ID NO: 4788 - DNA, 3000 bp, Unknown
  misc_feature (1)..( 3000): cDNA_ID_2140795_gDNA_ID_1620732_Annot_ID_166115 3000 nt of promoter + ATG
ttatggctctgcgatctcatgtccccattgtcaccaacgtaagtcccaaatctcgattattattttatgggtattttggtgatgattgttgttgtttttgtttcgttttcagatgactaaagcaagtattgttgaagatgcgattacttacataggagagcttcaaaacaatgttaagaatctcttagagacatttcatgaaatggaagaagctcctcctgagattgatgaagaacaaacggatccaatgataaaacctgaagttgaaactagtgatcttaacgaagagatgaagaaactcggaatcgaggtttttaaaatttctctaatcgatttttgattcattttctttatctttcttgatgattttttatttttgggacaggagaatgtgcaattgtgtaagattggggagaggaagttttggttaaagatcataacagagaagagagatgggatctttactaaattcatggaggttatgagatttctcggattcgagattatcgatattagtctaacaacttcaaatggagcaattcttattagtgcctctgttcagacacaggaactctgtgatgttgaacagacaaaagattttcttttggaagttatgagaagcaatccataagtattaattatatacatcttggaaatttcttgatctaataacatttccattggtttttattacattgttgttccattttaaatatgatatgattcagatgaaaaagagtttgtgttacaagccaatgagcttcttcttgtcttcatatatgttgctgcaaaatgttcatgatcctctgtttgaggtcaaagaaagaaaacactagatattatctctaggatccgagcaatgggggtttctttttaaaatgggcttagaatgaattagctcttaaatgggccattctcaagttgagcccatttaatttcaaccatccaaatggtgagtagtgaatagtgatgttcatttgtgtaaggttggaagttggtagaaacctaagtttttttattcaaatatcaaaactattcaatagagccaaaatcaaaagacattttcctaacctattaactatttttttataaaaataataatatacctttatcatctctgactttccctactccacgacatatttgattaacaatataaaataatttatagtttccactctcaatgaaataaaacgatggaccgtttcctcatgtcaaatgaatcaaatcaacaatctctatatagtcttaagaatgttggtcttaaaattctattgaactcaaatcgtatgaaaacaagttaaattgtatataaacagaaaaaccagtgaaggttgattaattaataatttacttggttaaattcttcttattgaagttggtgtactgtaacctaagtcactcgaagtctacaaatatttaatatatctattgactaaaaatattaaaataatttgctgagtcaaaccatatgacatgagcacatattttgggaatctttctaaatttaaagatcaaacctaaaataacccaaatggattggaggggacggtctgacttaatccatttatacatttatacagttgtttgttagtgattatatccgaatatcaacaattcattttaataaatttcagaaagtaaaaatatatattttaatcatgtccattacaaaacaaaaattataattaaagaaagtcttcattctttggtgaatgcatatatggtatacgtcttattaactacttcttttcaaatagttgtattaatttatattttctgttcaattagggaaaaaaaacttatttcgataactctctttttgttgtcatatccatatataaagcacaatgaaactcaattaagtgtaatcctaattcctataagttatgatatcatttggagaggcttgaagcaaaaccaataagctattttctccaaagagcaagattgatctaaatccatatatttcaaaaaaaatttgtttacaatgtaaatccatatttgtttgaagtttttacatttttttttaaagagtcgacacgtaggtcagatatgcgcacgtaactgtgtacaaacaaaagacgtccggagtcgtatagatcaaaacgaggccagccaacaactacccttttgcgatggatttggtaacgctgactttcttttccttgtacgtattcatcgaccatcccaaaaatgagattattttttggacgacaaacatattctttctatattgacatatataactgtgacgtcatttttgtttttaattatttgaatcagtaaacccccaaaacagtagttaataaatatgcattgctatacaaatatacaatttgcaagtaaaataaataccatatccgtacgatgacttaattaaaaatatattcacattatttgtttaactaaaattttattacttttttccccttgacaagttaatacttcaactgcgttcaacacataaaaataaataaataaatatatatacttcaacatatatcaaacattttagtattaccatcccatatcaaagagtaagaaaagtagtaattatgatgatagtaagaaattaactctgttttacaatgtttgagaagatagggtcacaactcacaaactcacatgtacatcaaagtttttatttgattaaccaaaatcaaaactaaactttacattgtacgtacgttggtaaaaaaaatttgtcatcttttaattacttaatttgcttgacctaacttcctatcgactactctgataaacatacattatctaaataattaatagattaattagggaagtaccaataacatataaaactcttgtacaaaacttttttttaacaaatattataactttgttagttgacttaaacctcatcgctacatataaatacaatccccatcatcaacatcattactgtctcatgcaaactctgacacttacgaagaaataagtctacacaaactaaaccattgtctacgtaaccaacaaaac

SEQ ID NO: 4789 - DNA, 3000 bp, Unknown
  misc_feature (1)..( 3000): cDNA_ID_3074235_gDNA_ID_1620732_Annot_ID_166113 3000 nt of promoter + ATG
agacacccaccaagaaaattagccgttacatgggctaacaccaaaaggatgcacgcagctaaaccgtacttgaaggctgtgtaactcgggtctctacactcgaatatccacatcttcaaatgcttcacctgcacccgaaaataaacaaattagtgaaatctgcatctcctatcgacttgtggctgtgtaatgtaccttgttctgagctatttcggcttcaatgccgagaattccagccgaaacatccatggctaggatcaagatgcagatgaagaaccctacattcctcgccattgtcgatgaaacaagttcttactagcaaacaaagaagcaggaagtattgttgttgaagtaataacttgttcttgtaatttataggcaattagagttttaagctttgagagactctcttcgttggatggaataagaataaagttcaacataagtttccttttcttgcatttgtactaaagatcatgttaagagaataaaatttagctgggatcctctctttttcaggagaaaattttaacttttataaaatcatatttgatgtttctgaggaattgaagaagtttattagtaatgtgcaatgtcctcgaaaagatttgttttctttattcctctcttccattccatgtttaataataaaaccttttcaatattcgattcttgacagagcagccaagcaaagaagaggacgtttgcgttttgaatcgctgttgaagacaaaaatttcgttttccagtcgctctggcccaataaatttaagtgggcctttacagagacttatcctaaatcccgtctcgttgatgataatgacgtggctacgtacaaaagagtaacaaattcgagaacatgacgtggcatatttctctagaagcagctccattcttcgacttggacatttgtcttcttaaaagttttcgagaaatgttcgattcttcgagagttcgaattctcaggagaagaagaagaagaagaagtgaacagagaaaatggcggcttactacagatggaagagtttcgaggagaacgaagatcgtccagagaagcctcgccgttacggtgttacggagatgcgaggtcctcattactccgttctcagccagaaccttcttcaggtccctacacgttaattattccggttatgattcacaattttgcttgagattaaaccgaacatttagcggatttaggctcttacaaatttggttaatcgttttgttaggaaatttttgaatcgatgggacagtttgttgatgggttaaagttctctggaggatccaacagtttgattccaaaatcattcatcaaacaagctattgaaatggctcatgaacatggtgtttatgttagcactggtgattgggctgaacatatgcttcgtagtggtccttcagctttcaaagactatgtggaggtaaaaatctttgacattccataggaaatggttggtattggagaagaattaggtttttgtgaggttaaattgtgttttatggcgcaggagtgtaagcagttggggtttgacactattgagctgaatgcaaatttgcttgaagttcctgaggaaactcttctacgatatgtacgtttgattaagaacggtggtctcagagccaaaccaatgtttgctgtgaaattcaacaagtctgatattcctggtaggaatagagcatttggttcctatgttgttccagaacctcggtcaagcggtaagaagaaacaactaggagttatttgttggatttgcagtgagagtttcagatttatatgcttactgtgagaatgcctttgtttcacagagtttgtggaggacatagatctcttgatcagaaaggctgaacggtgtttagaagccggggcagacactattatgatagatgcggatgatgtctgcaaatacgcggattcccttcgagcagacataattgctaaagtcataggacgtttgggaatagagaagactatgtttgaagcatctgatgcgaagttggttgagtggttcatcaaacgttatggtccaaatgtatttgctgatactctagtcctctctattatttttaaccttctgtttgaatggtcaccctcacaagattcatatctcttcgtcttggtttttcaggtgaatctctatgtggatcattctcagattatggatctcgagtgcctccgtggtcgtcatctgggtaaagatcaccaatctgttctcagttcctcctacttcttgttttaaagtagtagctctcgcactacatctagtgttgtgtgaatttcctatatatgtattatgtcgtatgtgtctgatgttatgtgcttctttgatgctgtaagaatgcaaatgttttgagaataatgtgatatgcgatttttcggtgatcacataatatcttggtccatctcctaagttaagtctctcagaattgatacaacctagtatagtaataatcgtaagccttggttgttctcgtatgtcttatattattaagagttttactcactgaaacacgtgagcaataaaataagctgttcattatcctttaagttatgaacccaagatatcaattctgtaaccatgctttgtactattttgatagaaacctctctgtaatatcttttgaaaatagagaagactcataaattcctaccaatcataatcagtggcctaattttaccccaacacatgtgtcatgatgaaatttcagtatatttttttgcaactattgtaaccatagtcatcataattatattctaaatatagcttgtgcctaactgtcatatgacaatagcacctattttcgtacgttgatttttgtgcttgttagtagttacaacgtttatttactgcaagatacaatcagtatgtgtattaattggttattctgtcattttttggagccaaagtttgttaatcagtttagcttaaaaagtaaaaacaatggagatctatctataaaacaaggaaaatcttttgagaacgaacactttcgttgaaaa

SEQ ID NO: 4790 - DNA, 2749 bp, Unknown; identical to SEQ ID NO: 4782
  misc_feature (1)..( 2749): cDNA_ID_1444629_gDNA_ID_1620732_Annot_ID_166109 3000 nt of promoter + ATG

SEQ ID NO: 4791 - DNA, 3000 bp, Unknown
  misc_feature (1)..( 3000): cDNA_ID_1825678_gDNA_ID_1620732_Annot_ID_49410 3000 nt of promoter + ATG
tgatgctatcacattttctagtttgcttccatcagtttctaagtttgaaaaccttgagtattgtaagcaaattcattgctatattatgagacatagcatatcgttggatatcttcttaactagtgctcttattgatgcctattttaagtgtaggggtgtttctatggcacaaaatattttcagtcagtgtaactcagttgatgttgtagtgttcacggcgatgatctctggttatttgcataatggcttatacattgattctctggagatgtttaggtggcttgttaaggtaaaaatcagtccaaatgagataactctggtgtctattttacctgtaattggtattttgttggcattgaaactcgggagggaacttcatggtttcatcatcaagaaaggtttcgataataggtgcaatattggatgtgctgttatcgacatgtatgctaagtgtgggagaatgaatcttgcttatgagatttttgagagactctccaagagggatattgtttcgtggaattcaatgatcacacgttgtgcccagagcgataatcctagtgcggctattgatattttccgtcaaatgggagtttcaggaatctgttatgattgtgttagtatttcagctgctctctctgcttgtgcaaacttaccttcagaaagttttggcaaagctattcacggtttcatgataaagcattcacttgcttcggatgtatatagtgaaagcacattgatagacatgtatgctaagtgtggaaacctgaaagctgccatgaatgtgtttaagacgatgaaagaaaagaacattgtttcatggaatagcatcattgctgcatgtggaaaccacgggaagctaaaagattccctctgtttatttcatgaaatggttgaaaaaagcggaatccggcctgatcaaatcacatttcttgagataatatcttcttgttgtcatgttggagatgttgatgaaggagtccgcttcttcagatccatgactgaggattatggaatccaaccgcagcaggagcattacgcttgcgttgtggatctgtttggacgagctggtcggttaacggaagcttatgaaactgttaagagcatgccgtttcctccagatgcaggagtttggggaacattacttggagcctgtcggcttcacaagaatgtcgaacttgctgaagttgcttcaagcaagttaatggatttggatccctcgaattctggttactatgtgttgatttcgaatgcgcatgctaatgccagggaatgggaaagtgtgacgaaagtacggagtttaatgaaagagagagaagttcagaaaattcctggttatagttggatagaaatcaacaaaagaactcatttgtttgtttctggcgatgtaaatcatcccgagtcttcacatatctattctttgctaaattcgcttctcggagagctgaggctagaaggatatattccacagccttaccttccattgcacccagagtcatcgagaaaagtatatccggtttcaagattcattgagaaagaaatgagagatccagacaaagtatagaaaaccaagtatatatctcttttagacaagtttaaacattgggttaaatttatagaaaggaaaaaacgggtagaaaatttttcaagcgtggcctgcgcttgtctgttctcgtgttgaagcagttgcagagatgtaataagcaacagcaaagaggccgtgaacgaaacagaggatccctcctatggacagaacccgatggtgtgatatcccacagttttttctcgatcttgagtttgccatcgtccctactatcaacatcgaaaatgcaatcgccaatatgatcctgagacaaacaaaaagggatcttaatcaaatctctcggtagatttacagttgttctgtttatgtcgtgttttgacttaccacgtgaatatcagagaagccacagcgagctgtttattggcagaggatttttcaaggtcttgtcttgaggcaacacagagacacccaccaagaaaattagccgttacatgggctaacaccaaaaggatgcacgcagctaaaccgtacttgaaggctgtgtaactcgggtctctacactcgaatatccacatcttcaaatgcttcacctgcacccgaaaataaacaaattagtgaaatctgcatctcctatcgacttgtggctgtgtaatgtaccttgttctgagctatttcggcttcaatgccgagaattccagccgaaacatccatggctaggatcaagatgcagatgaagaaccctacattcctcgccattgtcgatgaaacaagttcttactagcaaacaaagaagcaggaagtattgttgttgaagtaataacttgttcttgtaatttataggcaattagagttttaagctttgagagactctcttcgttggatggaataagaataaagttcaacataagtttccttttcttgcatttgtactaaagatcatgttaagagaataaaatttagctgggatcctctctttttcaggagaaaattttaacttttataaaatcatatttgatgtttctgaggaattgaagaagtttattagtaatgtgcaatgtcctcgaaaagatttgttttctttattcctctcttccattccatgtttaataataaaaccttttcaatattcgattcttgacagagcagccaagcaaagaagaggacgtttgcgttttgaatcgctgttgaagacaaaaatttcgttttccagtcgctctggcccaataaatttaagtgggcctttacagagacttatcctaaatcccgtctcgttgatgataatgacgtggctacgtacaaaagagtaacaaattcgagaacatgacgtggcatatttctctagaagcagctccattcttcgacttggacatttgtcttcttaaaagttttcgagaaatgttcgattcttcgagagttcgaattctcaggagaagaagaagaagaagaagtgaacagagaaa

SEQ ID NO: 4792 - DNA, 3000 bp, Unknown; identical to SEQ ID NO: 4787
  misc_feature (1)..( 3000): cDNA_ID_3091315_gDNA_ID_1620732_Annot_ID_49415 3000 nt of promoter + ATG

SEQ ID NO: 4793 - DNA, 3000 bp, Unknown; identical to SEQ ID NO: 4786
  misc_feature (1)..( 3000): cDNA_ID_1825656_gDNA_ID_1620732_Annot_ID_49416 3000 nt of promoter + ATG

SEQ ID NO: 4794 - DNA, 3000 bp, Unknown; identical to SEQ ID NO: 3323
  misc_feature (1)..( 3000): cDNA_ID_1825652_gDNA_ID_1620732_Annot_ID_49417 3000 nt of promoter + ATG

SEQ ID NO: 4795 - DNA, 3000 bp, Unknown; identical to SEQ ID NO: 3324
  misc_feature (1)..( 3000): cDNA_ID_1820428_gDNA_ID_1620732_Annot_ID_49418 3000 nt of promoter + ATG

SEQ ID NO: 4796 - DNA, 3000 bp, Unknown; identical to SEQ ID NO: 3325
  misc_feature (1)..( 3000): cDNA_ID_1807702_gDNA_ID_1620732_Annot_ID_49419 3000 nt of promoter + ATG

SEQ ID NO: 4797 - DNA, 1265 bp, Unknown; identical to SEQ ID NO: 4783
  misc_feature (1)..( 1265): cDNA_ID_1840725_gDNA_ID_1620732_Annot_ID_49422 3000 nt of promoter + ATG

SEQ ID NO: 4798 - DNA, 3000 bp, Unknown
  misc_feature (1)..( 3000): cDNA_ID_1825723_gDNA_ID_1620733_Annot_ID_49425 3000 nt of promoter + ATG
gcaatctctggtgctggaatggatggcttctttaaagccattgaagcaagtgctgaggaatacatggaaacttacaagtaatgatgcattcttctcttcaattcaccctcttttgtctgcaagttctacgctcatgatttgtgttttacttcagggctgatcttgacatgagaaaggcggacaaggagcggttggaagaagaaagaaagaaacatgaaatggaaaaactaagaaaggatatggagagttctcagggaggcactgtggttttaaacactggtttgaaagacagagatgcaacagagaagatgatgctagaggaggatgatgaggactttcaggttgaagatgaagaagacagtgatgatgccatagatgaggatgatgaagacgacgagacgaagcattactacctatgaattaaactcaaagaccaggcttatcaagacgcttgtactggttttgtttgcgtccttcccttgttgtcccagttgtgtagttaaaacataagaattgattctctttgtgagacattgtctaatgatctaatgacgaaactataaactagcacttttgaagactttgtacacaatttgagttcatatgcacaaggaggaaacacatttgtatcggacaagaaaagcagacagaaaactagggaaaaaaatcagagccaacactatctcacttccacattatccacaactataaaggtcaagagtcaataacattatctgagtacacttgaactgtgcgttgtggctggtgttttgtggaggatcaagattcagtcttggtggatttcatcaaaaggcgcatgagcaaatctcacatcttctggccttgcaatcacgactggctcatcagcaaatagggccttgaggaaagatggagttttcaagggacgtcgatccgtcattcggggatacacaaatgccaagaagtagtatgcgtggcccgctatcattccctataaatttggataaaggttacggataaggatgatgatgcacagaaagggaagaagatatatgtgaaagcgaattaggagagatagcgtaccagaaaatccccccatgcacttgcaccaacaaggatagagaatccaagaagtacctgtaatttcagaatttggtaaaagaggcgatttaaagcatcaaactagttagggaacttccgtgaagagaatgcaaaagtccaactaacccatggtaaataagctgctgtgaaagtgaagaggccaaggaaactcatgtggatgtaaggattttgtttactccatacatagacctacagaacataggaaaagtgttatagatggtcttgagatgaattcaaaatcatttgagtattcgtaaaaatagcggtattgagaaatagaatttaccatcatgaaagtcaatgaattgctgaggaagatgattttggagaatgaaacagacaaataaggtatcattccgccaatgagaacaataccagttagaacagttgccccgaataagagcatgtaaaggaaatccgtggtctttcccctgaaggagttttcttcgagcagtttgcagtatcgagctagaaaaaacatatggaacaaaaagtccaaatctgcaaaagattgataacaagaacaagtcagcttctaattaacaatcacaaagaaaataaatccttacagggagcatagtactagagatgtcaaggagcaatggagcatatcacaaaaaatgaatcttcaaaaacttaaaagcccatcaacaagttgtagctagaccttatccgtagctagaaacataactatgacacttctaagcactaaattattcagacaaaactaggaattattcatcacttatgtgagtttattagcaatcatgatcattcctagtaatctaaggaagactatatcatatgaaaaacagcacaacaatagtccaagatgagaaagatatgaacatttctcagaatactaataatatataaccaacacaaagagctgaagataattttacccatctttcggaaataaaggaaatttgtgacaagacgccagaactggtattgcttcaccacaagggtaggatttaggtagagattataaggagatataatctgcaaaacaaaaaaatgttccacaaaatgttacatcataagccataacaccacaacacttagctctaaacttaaccattcgttagccaccccaattccaataaagagttaccttttacatcaaaaaaacaaaaccatccacatacataacagaaacacaaagattcaatttttcaaggaaaaactaatcagatcaatcagagcaaagctaaaggctttcatgagtcagagaacttcaaacctcgagcgaacacccgacggtggtgactacagccgccgtgagatacgaccgggttataatcggcatctgcttgtaccactcttctacggcttgagccataattccctcacaatcacaatcacaatcacaatcacaatcacaatcgattcagtttcaatcaccgagcaagtgaccgagaagctttaccaaatccaaaaccaaaaacacccaaatcgaatctgtagaagcttctacgttgaaatgaatttgggatttaaatcagcttcttctacgttaaagctttgaattaacgaaagcgactggttaaaggttcgctcttttttttcgcatgtttatctgttgtgacagtagctcaacgaataagaaagcgcgtgttttacacgaaccaattataataagcatctgacgccagcgtttctttgcagtgaaaaaaaatcttaaaaacgtctcggcgttttcagcttactaaaacgtcacgatgttcatatcgaataaagtaaagcggcgagatttgcaaccttatttctggaaccgttagaatatcaataaactccttttagtgttcactccttttagtgtcactccttttagtgtttactgtctttcgaattttgaatttgaacaaacgactctttctctctaacaaatctccg

SEQ ID NO: 4799 - DNA, 3000 bp, Unknown
  misc_feature (1)..( 3000): cDNA_ID_1384329_gDNA_ID_1620733_Annot_ID_49426 3000 nt of promoter + ATG
aacataagctaatttcttcctcttgatctctctagcatcattacataaccaaatcatattctcgacatggcaatgaccgcggctgcagttccatcaagtggatctttccagaaacaagacgaagagtggcgtgctgttctgtctcctgagcagtttagggttctcagactaaaaggaacagagtaagtcctctagggtttttttatttatcttatttttctgtttacttgagaagtttacctgaacatgttgttaatggttaatttggtgatttagtaaacgaggcaaaggagagtttacaaagaagttcgaggaagggacttatagttgtgctggttgtggaactgctctttataaatcgaccactaagttcgactccggttgcggttggcctgcgttcttcgacgccatccccggtgctattaaacaaactgtaattcgttgactctctttctctatagcaaataacatatttcgagcatccatattcgtgaaactcatttatatatgtgcatttaattttgacgtttttttagtttggacctaactgatatattggcggaacaacatgagacatcacatgcaattatgcaaattaaagtactttttgttgtttttataattcatcttttggcttcttcttttttatcgtatgactttttatagaagaacccgccaatttgattggccaccacgtcaagattctcgtatgtaaaaaagagttaattagttttttggtgttagaaaagtaattccaaaacaactttaaagattgactattttagcaaaaccggcaaaaccatttaaagattgtaattacaataactaatttgatgtttttttaaatgtatatagccagaagcaggtggaagaagaatggagataacatgtgcagtgtgtgatggacatctaggccatgttttcaaaggcgaaggttactctactccaaccgatcaacgtcactgcgttaacagtgtctctctcaaattcgcttctgctgattcttccaaataatcatcactgatcggtcggaccactttacctcatgttatcaaagaattatgatctacgatacgtgagatgcttgctagtttacattcctactcatgtaatattattgtaataaagcttcgtttaatcatcaatgctctatagttataataaattttggttactataaagaaaatttctatttatctgttccttactttcttctacttgaagaacatattacaacttcttttactttaagattttgtaacaataaaataaagctgggataatagacgtacgcaattaattgcacagcctattgatgtgtcaatcacagagaaattgcttccgctcaccagctttggtagattcgctaataaaaatgaaattgaaattgtttgtgacatcactctgctcaacaaagctagtggtttggatgtcggtgttctagtccctgatgataatgaggatattctgatcatctctttctccttggaaaaattccgatctcccttggcgtttgtacctcttccaagactaagagctaaagaagaagaactcactctattgtctcactatggtaactggaccagacgatccatgcatccctaagaaggaggacaaagaacaaaggtaaatgaggtaacaaaggtgaaatgtaaaggtgaaggaggtaataaaagtaaaggaggtaacaaaggcaaatgtaacggattaatattcatagaaaagacatagacaaaagacatttatatgtacacatttttcttttggtttcttttttttttccatgtagttgaggatcctatctcaagatctgaagacatgaatctggttcatgtgacattcatataaatatatgacaaacgatatgatgctgaagaagaaactgtcatgttatgtcaagttctgaaatcagcaaattcaaacaacacaaacacaagtatgaaacaaaaccaactgaatgatcaactgaacagatcatctatgtttgctgccgaagtttccatacttactctcaggtactgaaattgagcctttgcgtgtgagataacctcaacagtgtgactgagagattttcaagggtaaatagaacttgaaaatgttagctaaaaagaaagctaaaaattactaaaaaacaaggacaaaagataaatagtaactctggccattaagagtatgtatcataaaatcacaatagaccatttttaatctaattttagatatttttttatttaatagaatgcaatatgcgaatttgaattgtactatcacactagattacataacctagttgaacttctaaatatcttacgtacaatttttttttttggttttggttacatagtagtatgtattacacattttcattattttaatacgtacaaaagcttttaaacatgtatgaatcaggtggagtatttgactacgctttgttcaacttgtctgagtctaaactgtgtgtggtaaggacgtaatgcacttaacttagttttttaatctgttcaacgaaaggcttttgatcaaggagcccgatatttaagagggaaaaaaacgtgaccaataatacaataaaatggaaaacaatgtattcgcaacgtgatcaaatgaatattaaacacagtcaaaagtctacatgctgacatgcacaacctcgattttaatatctccctctctctctctccttgctgcatgttaattattttagatctagatctattgcgtaaatgagctgttacctaaattatttgtattattgttatttgtttagtatagtttctttggaagattctcatcagttctttaagaaatactcttctctaagcctatttataccccgacccattttcactttgaatcaccattaaaccaggtctttagtacaaaacttcaaacaaaaggtcaaaagctaatttcttttttttgctaagaaaaactaatttcttcctcttcgacctctcaagcatcattagataaacaaatcctattcccgtcatggcagcaatg

SEQ ID NO: 4800 - DNA, 3000 bp, Unknown
  misc_feature (1)..( 3000): cDNA_ID_3091322_gDNA_ID_1620733_Annot_ID_49430 3000 nt of promoter + ATG
tcatttctcattctcggggagaaagaaacaattgccaatgtaaatgtggtcgacactaaagaaattaaataccaaaagttaagaagagagatattatttagctagaaggtcttaatggatcaaggattcacgttactttctcacagaaagcttgggatcaaagcgatttaacacactctagttatatctacttcaataccaaaaaagatctaggacgagagttgggtgcaagaaacattgtcaatgaacaaaaatcaccatgctaatgttaaaatttgatgcaaatattctaaaaacaaaacaaggaaaaaccagagttaacaaccgcatcaataattttgcaagcaatatatatagaaagtcctcaccgttgaatttgggatgcaggttgcatagctgaatatgagatttgaaactgtctccactccatctggacatagcaagaaacaatgttacaatcctaataaaatgagtcatcaacgaacatttttagtttgcatcaaatatgaactggtcactccaactatatattgagatatgcatccaccttagaaattcataataccaatacggtaaaacagcaccagattatttcgattgattggtaaaacagcaccagattatttcgattgattggtaaaacagcaccagattatttcgattgattgatatctcacctttacgacagtctcttagttcccaaagtagcttcattgcaacagactccaacagcgattttccaaggtatccaaatatgctcttcaatgcgtctggtgaagatactgttgttatgtcgacaatttctaacagcttctgaaaattttccttactgtctttctcgcacagtgcaaccaaataatattctgttttcaaggaccaaaaggttactttgagagtagaacaaatgaaaaaccagaattccaaaataacataatatacatgtactgtggcataccttgtaggattgataaacttagcccactatcatcaactttattgcaaagtttgtggatcttctcttcgtcgttgacttggatccaaagaagcatttcatagtagacaagtctcccacaagactcaggacatgcctccttaataaaatccttgagaatttggaactccgctaccatttccatatcaactaagtacttaaaaaaagggccataagctccttctccaatagagaatccaagctgtctcatttctttgagatgttcaatagccttcccaatttgatcaagagcatattctgcatcattgcttctcctcgcacgttgtatgcaaagtttagtcattgcattgtattctttctcacccgcttctttccccattttagtcaacacctcaaacatagtctcagttcccaacttccgaacacatcccttggcaagcttctccataatctcagactgtttgttctggtaattttctgtcagcatcctaccacgtgaagcctgctttggcttttgcgacgaacaacctttcctagacagtaaatctaaggtttccaatacgttcttcggaaaaactttctcgccatttctttctcgaagaagattatatccaatagatttaactggaacaatcattacatcactcagtgccaaagaaaaactaccaaatggacaacagagagagctcataaacaaagaacaagcacgaggtgtacataccatctaacgcagacgagacctgacccgcaagtgccggttcaccaaaatctacacaaaggtactaagattcatgatgaaccaaattgaaaagagacaacttttaaacattatccaggcctaaaaaagcaagcaattccgaaaatgattcctttattccactagcagagacgaaagaggtaccttgaccaatgttggaagaatcttccggagacttaagcgatgagagaaaatccggtattaaagacattgacactgttccacaataacaaggaaagtctcaattttgaaatggctcaatgggagaaatctgcatagcagagacattacctggtccagtgtctgaaatcagagaatctccggctacggctttggcttcaacttcggcagttttggcagcgtttctcatcgcaaagcgaaatatcgcgcttaagcttttcttcgcctttaaagccattgttttttcacatttacaacagttaacaaaatcgaatcaaggcctagaacgaaatcccccaataacatgagatcggagaagaagaagaagaagaagatgaatcattcggaacaagtgtttgataaaccctgcaagattttgtggtagtggcacttatgtaattaatctttgtaattgagggtaattgagtaactaaatattcactaagatgggtcgagtaaaatttctccttttttttcttacggtactgcaaattttcctctttggtaaataaaccgcgataaagttaatattatattcttctttctaaaaattgcaaacattaatatcagacaagtggctatttatctgcaacttgcgatgtcgaaccaaaatgagtggttgaaaatatttgtaatcgatagaacattaatatgagaaactaaaaatatatttatttgaagggaaccatagtattatctagtggacaataatagtataaaatactttatcgtccaatcaatctttaagcttgtcgggggaagagaaaaaacactttaaactaattttagcaagtatttctttttcgagaatacaaagaatttctccactcgtgagtgagtcgacacaattgttggattttttctcataaatcaatcttctccccaccctattatcgtcttttcaagtgatttgtacttaatgtttcatttattatcgactttcaagttttttatattttcagggttaaagatcaacttttcaagtttagacagcaacttgctcaaatggttcatgtggggtcatttttaactataaatagaaacccaaaaatcaatcaatccacaagaacaactgaaaaaaggaaaagaaagaaatctataaaaaaaaatg

SEQ ID NO: 4801 - DNA, 3000 bp, Unknown
  misc_feature (1)..( 3000): cDNA_ID_1825712_gDNA_ID_1620733_Annot_ID_49431 3000 nt of promoter + ATG
tttctctaaattttccttattttttgttcttggaatttttgtagtgtacccgaaagtgaaaattgacaatgaagctggtagatacaagcagaagggttcttgtctgaactcgaactatctccaaactcgtgtctctggtaatttctctctgcttcttttttttttttcctttgagtttgactctcatttagattttgagctagaattttagggttgactctgtttttttttttttggttttagcgttgactatgttttagctatatgtttaggaattaggaacattgacttggtttttgagagagatcatgtctgtgtggaagatatgggttctttgttgttgccaatttaaccgaatgcaaagtttcaaaagaatctattctgatgttctctctttctcgttgggacagagaataatcaagaagatgatttacaaatatacgtggctaagattcctaagatttacataccaagtgtcctcatgtctcagagtgaatccaaagaaatgaataagcctattagaggagctgacattgaagtaaaaccaataaccaaagccagtccaaccctacgtccacgcgctgttgtatcaagtcccggtatggtttatttttagctgatttccatctccaatgttttcatttgctggactgtttccatgtgctttagctatagtgtcacacaatgttgaactcaaatatgtcaaaaacaatgacttctgcttttgaattttctcttcttttagataatgatgcgatgatcggcaacatgaacatgattgaagaaaggaaagctaagaagggtttgaagagtaaagatcatattaagagtagggcttctcagcttaagaatgttaataccaatgtgaagatttctcatcgtatagtcgctaagctaccgggagtcaattcaagggatcacaaatgatcagcttctctattaatgatgccggtcagatggaagtcatggaaccacatagtcaccgttttacgttttgaaaacgtaattccactattttttacctttcccaacatttatattcacatttttgagtagtggtatcttatatatgatgcacatgttaaaagtataactgaaattaaataaaagtcattcatccataaaatagttagtttttctttggcattatttagcataaattttgttcagttcaaatgtttctatcttatttttgatgaggataagcgacgatgtagaagctgctctttatcacattaggaaggccattgaatatctcaaagagataaacaaatgcggatccagtataggaaaaggaacttatgtgcctcttcttaagttcttagctgatatgggaatggtagaggaattccaattttccatggatgttattttagaggcaaataatggttcgataccaagatggaaccactctcatataaccattttttttattaggatttaaacataaacattggatttggattaatatactaactacacataatagttcgataccaagaaaaaaaaaatacacattcttttttgttttcctttaaagacgtttagataaacaaagattgaactcgtgggggacaaggaagaacaatgtaacgcgttattaagcagctctagcaagaagttgaagactttcaggaacatcagaaggatcaatgagcctccttgtcataatcctcttgggtacaatcacagtcaacacaccatcttcgtagccagctgatattccgatcatatctatcgattccggcaaccgaaatttcctcttaaaagtcttcaaaggctgatccggaggcgacataggggttgcctccgttcgtatgattaagtatatcgaatcttcgatctcaacttttatttcttctttccttaaccctggttgggaagtgaacaaacaaaaaaaacagaacacatacaaaaaaatgaagattatccaagattatttattctttacaatatgtggtaatgaataaagtgagaaaataagtaattataattaccaggaagatcaacagagaaagtgtgagaatctggagactgagaccaacgaacatgattctcttgatagttattaagagattgagaagctagaacatattcccatggcatcacttgaattgtctgaaaatccatttttttttatagatttctttcttttccttttttcagttgttcttgtggattgattgatttttgggtttctatttatagttaaaaatgaccccacatgaaccatttgagcaagttgctgtctaaacttgaaaagttgatctttaaccctgaaaatataaaaaacttgaaagtcgataataaatgaaacattaagtacaaatcacttgaaaagacgataatagggtggggagaagattgatttatgagaaaaaatccaacaattgtgtcgactcactcacgagtggagaaattctttgtattctcgaaaaagaaatacttgctaaaattagtttaaagtgttttttctcttcccccgacaagcttaaagattgattggacgataaagtattttatactattattgtccactagataatactatggttcccttcaaataaatatatttttagtttctcatattaatgttctatcgattacaaatattttcaaccactcattttggttcgacatcgcaagttgcagataaatagccacttgtctgatattaatgtttgcaatttttagaaagaagaatataatattaactttatcgcggtttatttaccaaagaggaaaatttgcagtaccgtaagaaaaaaaaggagaaattttactcgacccatcttagtgaatatttagttactcaattaccctcaattacaaagattaattacataagtgccactaccacaaaatcttgcagggtttatcaaacacttgttccgaatgattcatcttcttcttcttcttcttctccgatctcatgttattgggggatttcgttctaggccttgattcgattttgttaactgttgtaaatgtgaaaaaaca

SEQ ID NO: 4802 - DNA, 3000 bp, Unknown
  misc_feature (1)..( 3000): cDNA_ID_1825704_gDNA_ID_1620733_Annot_ID_49433 3000 nt of promoter + ATG
ctcgccgtgatttggtttcgtgattacgttagctacattttcacggaggatgctgacgtggctaaagccgtctctgacctctgtccttttcttgccatcaccatcattctcaacggaattcaacctgtcttgtccggtataagttcatttagatttaaactagaaaacttaactggtgcaccttaaccgaacatgaccaaataaatctcggtttggtgttgttgtttgtaggagtggcagtgggatgtggatggcaaacatacgtggcatatgtgaatgttggttgttactacgttgttggtattccggttgggtgtattctcggcttcactttcgattttcaagccaaggttcgctttcaaatatattatgtatagtattagtatatgctttgttactatcagtttaataaaaataattttacgtgaattttggttatagggaatatggaccgggatgattggaggtaccctcatgcaaacactcattttactttacgtcacgtaccgaacagattgggataaagaggtaatgttacatgaaattaagttatatcatagtgtaagctgaatttgattcaaagagtttgtccaaattattaaggtttattattattgtataataatgatacaggtggaaaaagcgaggaaacgtttggatctgtgggacgacaagaaggagcctctccaaaactagtaatggattttacagaataaaagtatatttttaaaaataattaacattaaactttacaatctgatatttaatattcaggttataacaagtttggtggagtgatagacaataaagaaaaggaaataagtgtcgtgtgtgcaggtgatttcaatgtacgtagcttttcatggttattatgcttgttctatggaaatagaacaattaaaatatatttttgtctgatggattattctttatttacgaaaagttgttcttaaattgatgtttctttcctttctcagaatgatttattatgtcttcactctatagacagttattaattatttattatggaattttgatgtaattgggtgtagtaagtaaagtagcacatcaatgtgacatagctatccagttttcttttactgatacattgtaatttaatggatgtttatttgtcgaaatgccattattcaaattaaagtcgtttaatgcatattattgacatataagaataaaagcttctctactcgaaaattagaaacaatgcacagtattgtaacgagaatcgtggatcgcagtttcctgtcatacctaaaatccaaacacgagttacatgggcatctcttgacaaattgtgagggccacgctattaataactatagtgacgggtcagtaatctaaccaatgatacatgattcaaacaaatataaatgtatagttaataggtaaatttcttaagcaaacaaaaataaaattagtcaaacggggaaagtgacaaaaaaatattacgtaaaatttaaatcgatacattgtcttcagtcttcaccaatataattaacaaatgtcactagattgttttttaaagatttattagcaaaatattgaatatattactcgacatattaattattatatgctataaatatggaatgaaatagatttgttgatttttgaagaccgaaaaagaagctaaaaggaaatttttgattaacgatgcaattcatctttcaaaatcatcttttcattaagtcattgagctgataaagtctgttgggcacagccatatataaattacgcgggtaaacggattatatagtaatcgacacttaaaaaacaaacacaaaagttgattttgttgaccgactttttctgtctcttggcctaaattggcgtccaggttttaaaacatataagacatagcctatattttgtcaaaaataaataaaaataagacagctatatacgtacgtttttttctcttttttttctgtcatctggaattatattagaaaattaaaacttcaacacatgaaaccaccgattacaaggctagactaaatcaaagatgaagcgaacaagagttagcttaccacaaggcccaactccaacatattcaagagtggtctatacaaaaaagaatgagctctgaaacattgagtacctcacaaaccaaaccccccatgtacaaaagttgatctcaaacactgagcatcaacaccaaaaagacttctcactagcaaacagaagacaaacctctttcttcaacaaaaacaccattcaaccaagaaagatgcccccacagctacatatataggattgagaccgagacgcatccgtaacactttgggcgatgaggtttgctcctctgtttgcagcagtgtacactgagcatcaacaccgtacgttttgttctatgcaatttttttttttttttgtattaatattagggtgtttattttgctttagattaaaatattcttgcaaagaaaatctacattatattgttttatataacagcttacaatattttattttgtctccgatcacactctaattttctcgttccattagaaaaagaaaatatcaaagaccaaatcaagaagacttttttacacatgtagtattttaaaacacaaaacgccgaaaacggtttgtatttcttatgatcatttagattatattaattaaaacccaaccgatcgtcattctccacccaatttactcctcactctttatataaactaaaacaacagtttagtttcctcttaaaacttatcataaccaaacaagcatagacgttaataaccaaaataataacctatgaatgggtcaaatgagacggtggagagaagaatcgaactccgacgaccgttggtggacacggagaagaaacttccgttagaagtcgggctcgagagcgtgttaacggagagtagcttgccttaccggaggcgcgtgtacttaggcatgtgcatagagttaaaactacttctccggttagcacttccggctatacttgtctatttaatcaacggtggaatg

SEQ ID NO: 4803 - DNA, 3000 bp, Unknown; identical to SEQ ID NO: 3426
  misc_feature (1)..( 3000): cDNA_ID_1825700_gDNA_ID_1620733_Annot_ID_49434 3000 nt of promoter + ATG

SEQ ID NO: 4804 - DNA, 3000 bp, Unknown; identical to SEQ ID NO: 3427
  misc_feature (1)..( 3000): cDNA_ID_1825696_gDNA_ID_1620733_Annot_ID_49436 3000 nt of promoter + ATG

SEQ ID NO: 4805 - DNA, 3000 bp, Unknown; identical to SEQ ID NO: 3428
  misc_feature (1)..( 3000): cDNA_ID_2027168_gDNA_ID_1620733_Annot_ID_49439 3000 nt of promoter + ATG

SEQ ID NO: 4806 - DNA, 3000 bp, Unknown
  misc_feature (1)..( 3000): cDNA_ID_2132902_gDNA_ID_1620733_Annot_ID_166167 3000 nt of promoter + ATG
tagtttccagatatactgatatagtgaagaatatgaactctgaagtagttgccatgtcttctagttcccttctttaaaagtagcaaccgctatatatagcaaagaaggttccaaggaccgtataaattccatgtgatatgagctagttgaaggatttaagcattataagaacaagatttgatcggataacacatttctctttagttatagatgtgacagctttatttcatctctttgtaaagttaatttagcaaccattttttttactttcagtagatttaaagccatcatttaatcaatagatactgtgtggattgtctgaggaggttagtaggttacacttccctcttaagagagatatgagacaaaaccacccaaacacacaaatctcaacattaaccaacaaaatcatacccaatttgagtaataactatgggcctgaaaggcccaatgaagcccatcacaaatatccagtgagccaatgttctggatgtaagttacatatcatgtaacagaaaccgattaaagacaaagtggggcttttcttttgtggtacaaggtttgtgtcttttgtggttaattcggatcccgtggctcacacgttatctcctcactcactctaaaggagagagatctgtgacatcgatggaaattccaggggaccaattgcttaggttaacgactaaagaagggaaattaaaacttgcaagaaaaagcggctcggacacaaacaactgatctctcaccgattttgcagtttgtcaggaccatgtactgagattctcgataactatgatctgaacagagttttatatgacgacgtaaagttaattaagaacacatgagagattcttgaaatgcatgagattatcttgttgccctgatagattcagagttacttgttgttacaaggtctacgaaaaagtgaataattgagactcttttaaaataatttcgtgcatacaatgaatcagtcaaattttcattatttttcgtaagaaactgtaattaattaggaagaagtgaagttgcacatatcgtggtatccactattactagatatatctttcgaaataaagatatatagcgattaacgcacacaaagtccataacatttgggatttggcaacctcatgtctcaaatatttgtattaaaatattaaggcatttgacagactacactcaatcataataactcaacactaagacaatcataatgactcaacactaagacaatgcttagttccacactgacttacttttaagttttaactacataaagtcttagaagttacaaccaactccacagtagtacactatacctgtgttataattaatgaacttggttagcttgttcgcttaaagagaccaaactataaaatcattttctttgtatctatattttttttttttcataggctctttttatatttcagttacccctaacacatactttcctcgtacccatagctatgaaatgtaccttcctatctttaacgagttacaaaaaaaaaaaaaaaaatcgtttccaaaacatctctccatctccaatttttatgattgaatcttttgtaaatatctaatttatatttaatccgcctatcttacaccatatcatctcttatcccaacatcttatgcactttgatcctctcattttcaactgatttttaaagatatcaatatcatactgcaaaagtcaccccttggtcatatatcgaacgattaattccattccgcttatagacatcgttcttgttccaacaattgttgtactttcagcatgttgaagaagctgtgtaggttttttaataattaaacaagataataattaagatctttttttctaagctggactgacaattttgaggctctttacaattattacaacaattaattctttacatttcagggtatgtatgtatttgtattttataaacttcgaggggtcaaataagaaaatctgaaaattagaggtcttgtataaatgttacagatcttaatgcatcgtgctttggaataacgtccctggacccttgcgacgagacccatgaaacgttggattggatatatagcctaacaaattacaaaatcgatttgattcttaccccaccacaaagtctcatgtatttatgtgtgtacggacactggattcagattttttttgcgtgataaatacatatttattactatacttattctcgcagaagatcaataattattcatatagcaatagaaaaagaaaaaccctataactacatattatatatatatatatatatatatcgttggttttcaaaaaaaaaaaaaaatttgatcaagcaagattcgtaatttcttatgaaggacaataatatcacaagccttttcgagtaaattaacattgtcctcttcaaactttaacaatatctataactatagccaaaaaagattagaaagtgtaatttgaaaatggcttaggcaaaagcataatttaagataaagcaagtcttttcatatagtacatagttttttgtcttctagcatgaatcagactctatcaataattttggcaggtcttagtagaaatagtaccaaaggctaccactcctctatctaacccttttaattattatttatttttcacaaaatttaattcatagttatggcaccccaaaaaaaagtacgaaattattacagttttggaggtttctgaaacctctgcctattgtggaggcttttgattcctttgaagcaatcaatgacctctctgtctctcatttgccagcaaagagagattgtttaatgttgtttatggttcacatttttatacaatatcacattttcactgaatcttcctctgcgtctctcaggtaatttaattctctcttttctctcccatcactctgtctcttctctttattgggttttagataaaatgatggaataataatttcatggattcaggaggaagaagatcattcagttgaagcacacatttaaagggttttgttgagaggca

SEQ ID NO: 4807 - DNA, 3000 bp, Unknown; identical to SEQ ID NO: 3434
  misc_feature (1)..( 3000): cDNA_ID_2027168_gDNA_ID_1620733_Annot_ID_166164 3000 nt of promoter + ATG

SEQ ID NO: 4808 - DNA, 3000 bp, Unknown; identical to SEQ ID NO: 4800
  misc_feature (1)..( 3000): cDNA_ID_3091322_gDNA_ID_1620733_Annot_ID_166149 3000 nt of promoter + ATG

SEQ ID NO: 4809 - DNA, 3000 bp, Unknown
  misc_feature (1)..( 3000): cDNA_ID_2132864_gDNA_ID_1620733_Annot_ID_166147 3000 nt of promoter + ATG
attatcgtcttttcaagtgatttgtacttaatgtttcatttattatcgactttcaagttttttatattttcagggttaaagatcaacttttcaagtttagacagcaacttgctcaaatggttcatgtggggtcatttttaactataaatagaaacccaaaaatcaatcaatccacaagaacaactgaaaaaaggaaaagaaagaaatctataaaaaaaaatggattttcagacaattcaagtgatgccatgggaatatgttctagcttctcaatctcttaataactatcaagagaatcatgttcgttggtctcagtctccagattctcacactttctctgttgatcttcctggtaattataattacttattttctcactttattcattaccacatattgtaaagaataaataatcttggataatcttcatttttttgtatgtgttctgttttttttgtttgttcacttcccaaccagggttaaggaaagaagaaataaaagttgagatcgaagattcgatatacttaatcatacgaacggaggcaacccctatgtcgcctccggatcagcctttgaagacttttaagaggaaatttcggttgccggaatcgatagatatgatcggaatatcagctggctacgaagatggtgtgttgactgtgattgtacccaagaggattatgacaaggaggctcattgatccttctgatgttcctgaaagtcttcaacttcttgctagagctgcttaataacgcgttacattgttcttccttgtcccccacgagttcaatctttgtttatctaaacgtctttaaaggaaaacaaaaaagaatgtgtattttttttttcttggtatcgaactattatgtgtagttagtatattaatccaaatccaatgtttatgtttaaatcctaataaaaaaaatggttatatgagagtggttccatcttggtatcgaaccattatttgcctctaaaataacatccatggaaaattggaattcctctaccattcccatatcagctaagaacttaagaagaggcacataagttccttttcctatactggatccgcatttgtttatctctttgagatattcaatggccttcctaatgtgataaagagcagcttctacatcgtcgcttatcctcatcaaaaataagatagaaacatttgaactgaacaaaatttatgctaaataatgccaaagaaaaactaactattttatggatgaatgacttttatttaatttcagttatacttttaacatgtgcatcatatataagataccactactcaaaaatgtgaatataaatgttgggaaaggtaaaaaatagtggaattacgttttcaaaacgtaaaacggtgactatgtggttccatgacttccatctgaccggcatcattaatagagaagctgatcatttgtgatcccttgaattgactcccggtagcttagcgactatacgatgagaaatcttcacattggtattaacattcttaagctgagaagccctactcttaatatgatctttactcttcaaacccttcttagctttcctttcttcaatcatgttcatgttgccgatcatcgcatcattatctaaaagaagagaaaattcaaaagcagaagtcattgtttttgacatatttgagttcaacattgtgtgacactatagctaaagcacatggaaacagtccagcaaatgaaaacattggagatggaaatcagctaaaaataaaccataccgggacttgatacaacagcgcgtggacgtagggttggactggctttggttattggttttacttcaatgtcagctcctctaataggcttattcatttctttggattcactctgagacatgaggacacttggtatgtaaatcttaggaatcttagccacgtatatttgtaaatcatcttcttgattattctctgtcccaacgagaaagagagaacatcagaatagattcttttgaaactttgcattcggttaaattggcaacaacaaagaacccatatcttccacacagacatgatctctctcaaaaaccaagtcaatgttcctaattcctaaacatatagctaaaacatagtcaacgctaaaaccaaaaaaaaaaaaacagagtcaaccctaaaattctagctcaaaatctaaatgagagtcaaactcaaaggaaaaaaaaaaaagaagcagagagaaattaccagagacacgagtttggagatagttcgagttcagacaagaacccttctgcttgtatctaccagcttcattgtcaattttcactttcgggtacactacaaaaattccaagaacaaaaaataaggaaaatttagagaaaatattctgacccttaaacgtggtacagctgatttttgattcgtcacaaacaaacaattgaatcgaagaaatcgatggtcaaataacaaaaactaaaaaaaatccaagcataatgaaacccacttactagttttggttccaatttcgatccaaaatatatatatttttccttgtgtggtatagaaacaaccgtctgattgatcggtctgcacaattgcgttaggttggaaaaagaagaatatgaatgttaatgaaacaaagtccctttattgaggtcaaaatattcatgctcatgttttaaatacgaacgactcttcttctctcaccagccgttagttgcttctttttttccatgtgactttaacttcgaacttctcttttgtcagaggctcatcacatggcctcattaaaccacccttagggtttgaaccaggtacacgaatgattccgacaaggatggcatagctaaacttgaacagagaataatgcaatttcgagtgtatgtatattgggctaaagggcccaaacgtaaggcccaaattagaagagtgttccagagaaaaggaaaaatctgagaaaagattgagagagagtcagaaaaagctgttgtcaagagaagaaggaagagaggagataaaaagccaaacaaatg

SEQ ID NO: 4810 - DNA, 3000 bp, Unknown
  misc_feature (1)..( 3000): cDNA_ID_1384329_gDNA_ID_1620733_Annot_ID_166141 3000 nt of promoter + ATG
aaaacttcaaacataagctaatttcttcctcttgatctctctagcatcattacataaccaaatcatattctcgacatggcaatgaccgcggctgcagttccatcaagtggatctttccagaaacaagacgaagagtggcgtgctgttctgtctcctgagcagtttagggttctcagactaaaaggaacagagtaagtcctctagggtttttttatttatcttatttttctgtttacttgagaagtttacctgaacatgttgttaatggttaatttggtgatttagtaaacgaggcaaaggagagtttacaaagaagttcgaggaagggacttatagttgtgctggttgtggaactgctctttataaatcgaccactaagttcgactccggttgcggttggcctgcgttcttcgacgccatccccggtgctattaaacaaactgtaattcgttgactctctttctctatagcaaataacatatttcgagcatccatattcgtgaaactcatttatatatgtgcatttaattttgacgtttttttagtttggacctaactgatatattggcggaacaacatgagacatcacatgcaattatgcaaattaaagtactttttgttgtttttataattcatcttttggcttcttcttttttatcgtatgactttttatagaagaacccgccaatttgattggccaccacgtcaagattctcgtatgtaaaaaagagttaattagttttttggtgttagaaaagtaattccaaaacaactttaaagattgactattttagcaaaaccggcaaaaccatttaaagattgtaattacaataactaatttgatgtttttttaaatgtatatagccagaagcaggtggaagaagaatggagataacatgtgcagtgtgtgatggacatctaggccatgttttcaaaggcgaaggttactctactccaaccgatcaacgtcactgcgttaacagtgtctctctcaaattcgcttctgctgattcttccaaataatcatcactgatcggtcggaccactttacctcatgttatcaaagaattatgatctacgatacgtgagatgcttgctagtttacattcctactcatgtaatattattgtaataaagcttcgtttaatcatcaatgctctatagttataataaattttggttactataaagaaaatttctatttatctgttccttactttcttctacttgaagaacatattacaacttcttttactttaagattttgtaacaataaaataaagctgggataatagacgtacgcaattaattgcacagcctattgatgtgtcaatcacagagaaattgcttccgctcaccagctttggtagattcgctaataaaaatgaaattgaaattgtttgtgacatcactctgctcaacaaagctagtggtttggatgtcggtgttctagtccctgatgataatgaggatattctgatcatctctttctccttggaaaaattccgatctcccttggcgtttgtacctcttccaagactaagagctaaagaagaagaactcactctattgtctcactatggtaactggaccagacgatccatgcatccctaagaaggaggacaaagaacaaaggtaaatgaggtaacaaaggtgaaatgtaaaggtgaaggaggtaataaaagtaaaggaggtaacaaaggcaaatgtaacggattaatattcatagaaaagacatagacaaaagacatttatatgtacacatttttcttttggtttcttttttttttccatgtagttgaggatcctatctcaagatctgaagacatgaatctggttcatgtgacattcatataaatatatgacaaacgatatgatgctgaagaagaaactgtcatgttatgtcaagttctgaaatcagcaaattcaaacaacacaaacacaagtatgaaacaaaaccaactgaatgatcaactgaacagatcatctatgtttgctgccgaagtttccatacttactctcaggtactgaaattgagcctttgcgtgtgagataacctcaacagtgtgactgagagattttcaagggtaaatagaacttgaaaatgttagctaaaaagaaagctaaaaattactaaaaaacaaggacaaaagataaatagtaactctggccattaagagtatgtatcataaaatcacaatagaccatttttaatctaattttagatatttttttatttaatagaatgcaatatgcgaatttgaattgtactatcacactagattacataacctagttgaacttctaaatatcttacgtacaatttttttttttggttttggttacatagtagtatgtattacacattttcattattttaatacgtacaaaagcttttaaacatgtatgaatcaggtggagtatttgactacgctttgttcaacttgtctgagtctaaactgtgtgtggtaaggacgtaatgcacttaacttagttttttaatctgttcaacgaaaggcttttgatcaaggagcccgatatttaagagggaaaaaaacgtgaccaataatacaataaaatggaaaacaatgtattcgcaacgtgatcaaatgaatattaaacacagtcaaaagtctacatgctgacatgcacaacctcgattttaatatctccctctctctctctccttgctgcatgttaattattttagatctagatctattgcgtaaatgagctgttacctaaattatttgtattattgttatttgtttagtatagtttctttggaagattctcatcagttctttaagaaatactcttctctaagcctatttataccccgacccattttcactttgaatcaccattaaaccaggtctttagtacaaaacttcaaacaaaaggtcaaaagctaatttcttttttttgctaagaaaaactaatttcttcctcttcgacctctcaagcatcattagataaacaaatcctattcccgtcatg

SEQ ID NO: 4811 - DNA, 3 bp, Unknown
  misc_feature (1)..( 3): cDNA_ID_3074273_gDNA_ID_1620733_Annot_ID_166138 3000 nt of promoter + ATG
aag

SEQ ID NO: 4812 - DNA, 3000 bp, Unknown; identical to SEQ ID NO: 4806
  misc_feature (1)..( 3000): cDNA_ID_1825690_gDNA_ID_1620733_Annot_ID_49440 3000 nt of promoter + ATG

SEQ ID NO: 4813 - DNA, 3000 bp, Unknown
  misc_feature (1)..( 3000): cDNA_ID_1825766_gDNA_ID_1620734_Annot_ID_49443 3000 nt of promoter + ATG
attgttgacgttcaagagatggatgcaacaatttcaagccttaacacttctgaagtaaacgaagcaggacctctcgtcctggcatgggcagtattcctgtgtcttatttcatctcttcctgggaaggaggaaagtcctttcctgatggtatgaaagtgagaatacttccattacctagtcagaggacacattgttcatatatatgtatttactcttacttgattaccaggatattgatcacgtgagctatgttcatcaagcctttgaggcagcatccttgagctatttccttgaaatccttcaaagtaatctattgaatgatttcgatgtaagttacgagattaaaattctagataccgtgcttaactttgtctgttttcttgagattggcacttatttttctatcaaataatggtgtgagatctatttcaccaatcctctgcaaattttattcatggtatccttccctatgctgattctatcattacttttcactttcccagggaccaatttctggtcatcgtagtgtcgtgaggacttttatttcagcatttattgcatcttatgagatcaatcttcaggtaaaactctattatctagagatgataaattatataattatgaagtgtttaaaagtcttagtcatctttacatttttggtagctggaagatggcaccctcgagttgatactggacatcctctctaaggtttatcaaggagaggtaaaaatcatatatgcatgttgtccctagctttttcctctatgttagacatccataaatgctcattgtgtgcttaattattcaggagtccctctgttgtcagttttgggatcgaaaaagttttgttgatggccctatccggtgtctcctctttgatctggagagtgaatttccattcagaagtgctgaattcattcgcctcttgtcgtccctgagtgaaggaagttggcctgctgaatgtgtgtaagtatgaactggacaatatactatctgcgtttatgtacttttatatggaacttttctatgtagacgagagcaatgttttgcattcatcaatctaagcttcttttcttgtctcagtacagaatttcttatttactggtttcaaaccatcaccctcctgcaatctgctgttctttttttttgtgcagatacaactttctggataaatcagtcggggtatcaaccttatttgatattactagtgactctccagcggatgatgcctctcaacttgttgaaacttcccggccgttgcatattccaggtctcgaaggtttagttattcccagtaatactcgtgggcgaattctgagagtaatcagtgaaaatactgtccttgtacggtgggaggtaagtgatctcatcattctttgaaaaccttattcatagactcctccaatgttatattttttatggtcttactgattcatgaaatacattttcctttccaagtattcgctatccggcataattgtgttgatcatccgtttggccaataaactctacattggtaacaatcgtgaagcttttgtgactctggagctacttcgtcggatggtgacatttaacaaggtaactgcattgctccattttcatttttatccaggttatgaagtagggattgctttagtatttgtacaccatgaagtagtctatggcttttctgcctttgaatcaattcttctctgaccgttctcaaaatttgaatgaaggctatgcatccgtatttttacttctctgaccaggttctgtaatttgatttcaggccgtatgtttctccttactgaatatcagccacttcttttatgttcaagaatcttatgtgaatgggaagatggaaagtgatgtgaggtgaagtatttgcatttttatttctttcttacatgctctcttccggagtacttgaacagggatttttttgttccagggtggttgatataatttgtaattcagtcagaagcctgacttttgactctggcggtgccgctgtgatggcaatggctattgatatcttagctaaactactgcgatggtaatttttgttgtaatgcttattcttttgctgtcttggttatcaattttttcttcagtatttcttttctagcaaatgcgtgtcataatattacatgtcatgtgcaatgtcttgttatatggtatagtttggaattcggtatcacttctctctggaacattgatagctaattttattttactctttgagcagttccccgtcaagtgttgctcccatggtcttaaagtcaaatatatttgacatgacttcatgttcagacgtccctgacagtggctataatatttcattgaggttggctcttttttaagtttgttcattttcaaatatatcctacccataattatataatatactcattgaagtttaccacgcctagaagattttagtttttcttcttatttagaatcatcggttatccataaggaagtaatctctaacacattgccaacacttgatatgcttctcccaaaaagacaaactctcacaagaatgcttcgtagatcatcgacaaatcctattaattactaggaaccattctattgtttgtaatgaggcacattgtcgaaagtactgttttagtgttttcttagcttttattttgaggaatatctctttttagtaacaaggctttaacaaggcttcttaaaattctcatttattttacttcatcgttttgtgcattctctggctgcatctgaccttttttttactctttccgctgttttttttttaaaaagcggttcttggtctctctctgggaaacttgcaaagatgatcttgattgactgcgagaagaatgataccagctgcccattggtcatatcaggcaagtctgcggcagaattctgtttagtgcgaaatctaaatcaactgtgggctcacagttcttggatatgtcttgactctctatatattgtataatgtgatttgttttatcccttgcagttctggaatttaccatg

SEQ ID NO: 4814 - DNA, 3000 bp, Unknown
  misc_feature (1)..( 3000): cDNA_ID_1825762_gDNA_ID_1620734_Annot_ID_49444 3000 nt of promoter + ATG
cattatataaacgagaagaagtctcactataatcatatcatcaccttccccactaatactctatagtttgtttttgttcttcttataatctttatattttcagcaaacgaaagggaagtgtgtcagaaatctcagagggtgagaatcccaatgaggatcttacccgaacctcgaggttcggttccgtgtcttctccttcttgtgtcggttctcttatcagcgactctctcactcgctcgtgtcgtcgaagttgtcggttacgccgagagcaagatcaaaaccccccatgcattttcaggtatctcataacttacattaatatcttatgtactatatagtttatttttttgtgaatatatatttgatcaatgtgtgatattatttgttataggacttcgagtgacgatcgactgtaaggtgaataaaggccattttgttacaaaaggttcgggaaacattgacgacaaaggaaagtttggtcttaatattcctcatgacattgtctccgacaacggagcgttaaaggaggagtgttacgctcagcttcacagcgcggcgggaacaccttgtccggctcacgacggccttgagtccaccaagatcgtgtttttatccaaatccggggataaacacattttgggtctcaaacaaaatctgaaattttcaccggagatttgcgtttccaaattcttctggcctatgcctaagttgcctccttttaagggctttgatcatcctttccctttacctccacctttggaacttccaccgtttctcaagaagccatgtccacctaaatacagtcctcctgtggaggttccacccccggtaccagtttacgagccgccgccaaagaaagagattcccccgccggttccggtttacgatccaccgcctaagaaagaggttccaccacctgtcccagtttacaagccaccaccaaaggtggagcttccaccgcctattcctaagaagccttgtccacctaaaccgccgaagatagagcacccacctccggttccggtttacaagccaccgccaaagatagagaagccacctccggttccggtttacaagcccccgccaaagatagagcacccacctcccgttccggtacacaagctaccgaagaagccatgtccgcctaagaaagttgatccaccgccggtgccagtccacaaaccaccaacgaagaagccttgtccgcctaagaaagttgatccaccgccggttccagtccacaagccgccgccaaagatagtcattccaccgccgaagatagagcacccacctccagttccggtttacaagccgccgccgaagatagagcatccaccaatctacataccaccaattgtgaagaagccgtgtcctccgccggtaccaatatacaaaccaccggttgtgatccccaagaagccatgccctccgccggtaccagtatacaaaccaccggtagtggtgattccaaagaagccatgtccgccacttccacagctcccaccacttccaaagtttccacctcttcctcctaaatacattcaccaccccaagttcgggaaatggcctccgttgcctccacacccttgagaaacattaaatacgtatatatagatatacgtatactcatgtataatcaacgtgtttgcctttttttaatattttatctttgcatatgttttatatcttgtttcttttgttggctttgagttctctttgtgtagactggttgtttatattcccgcaatcttccaacaataatatggtaatgatacgtttctcttttatcatgagatgatcaacaagaattttgcgttaaagagtcctcgggagaaaaaacttgcttgcgttttcgcgcgcataaacgtttttgaccatatttttgtcactaagcgacaacatatgggagattaatatatacgtacattttttgtaaaaaaggtgaaaaaatgggagatggtaaaagaaaggcagatctttcataagatattcgcataagcctagttttatttgctccctactggtgaatcaatcacctatccatacgttgtcgacagtccactgagactaataatatatctgacgaataaattcaatcttctaaacaatatgaaaaatacatacagaaaaatattttacatgtcggctacaatagtgggaaaacgtagatgggtttttaggccctttagtgataaactgataggataaaattcagggcccattaaacccaaaaagagagaagaattcagggcccaatatgaattactaattggtattttattttcctgaagaaataatttactcaaaagcgcgaaaaaacaaaaaaatccaaaaagctccaatttcatctctctctctctctctctctctctctctctctctctctctctctctctctctctcactggtgtctgtctcactaacttctttcaatggcgaaccctaattctgtcgattcgtcgctctggtgggatccgtttgactctcttctcaccgacctcgagaatgcatctctctccgatgaccttcctcaacccatcgtaatatctttcttcctcttcctcttcatatacgtatgcgatttgggtgttttcgtgggggatactggtgctattttggtctgctctttcaatttcaggcgaagaagttggaggagaatcacgcgtggttcgttggaactctgtcgatgttcaagccaccgagtgagaaatcaaaagaagctttgaattcggatctagtcaaaattaaggagcaccagttggtgataaagccccaattgaaagataaagcgcttcgaatcagctctcatctggttagcttcttttccactcttcaattttcaattgaactcgaaagaaaactttatcatctatttcaaaatagtcttcaatcaagcatgtaggcttcatatatatgctgtattagtgaaaatgattatataagtagaatggatgtggatttctgaatttgttttctgaaaatgattatataagtagaatg

SEQ ID NO: 4815 - DNA, 3000 bp, Unknown
  misc_feature (1)..( 3000): cDNA_ID_3442322_gDNA_ID_1620734_Annot_ID_49445 3000 nt of promoter + ATG
ttgcttaagacttttttggatgtatggtgtatattgagtttgcaaattgttaatgattagactgaaaagatttgtctctattcaaaaattaatattaactttccaacaaattgagttacatgattaaataaaaaatgacttgaataacctcagtcgattttgttttggtacatatagcttcgagttgggtatgaattcgaattcattgcacccatggtgacattgtcagatataagatgtatcaacattgttttacttttgttagataagtagcatttatatattatttcgcacattttcaatccatccgtacaattctggacaccaacctttgtgttttacttctacaagtagtaaaaatctctgggtccttttgtcctttacattcaatatatctatgtgagtttttataaacaatgtaactgtatattcagagaatatgtcaacatccagatctgcattcgtcgggatatttttacgtacgcctcatacatatggagagaaaaaaaacaaattttcatacatacataaaacaattttcgatttaatcaatgtggggaaccatatacagttcacatatttatcgcatgtcacctaacaaaactaatatcgcaaaactcacaccatgtgggactatatccttggttgcccaaaaattagatctttttattttcttgctactttttttctttctcacttcatttattattgctagtttgctacctaatatatatagggtttatctttcttatacatagggctgtaaaatccatatatattatacattgattgttttatacgcacataactttcaagtgttttatcacatactgtaattttaactctgaatgttttgaaaaaaaaacattttttgtgtacagacaatttgtgatttgttttgctaaaacacacgataaggttgtgttttcattataaatagcatatttaactatgttattatacatcataatagtatacataaagcaaaatgcaatataaaaaaaaaaagttaagctctatataattagatatctattggaaaaagaattttccataagacacatctgtttttgcttaaattagcgatcatatatttatttttataaaggaagcatagatagtcgctataggttataccccgatcgactatatacactcaccatctacacaattaggctattgaatacatgtttttacgtacatttaagaatgggccttattagcgattatgtgtacattatgaaagtatatatttcttctgtataccagaaaatgaatatacaataataactttaaacttgaacctcttattgtacaactgtccaaagccaccgtattaatgggcgtggatgagtaggtgtagcttttaatatggcaaccaacattatgatatcgttcacatataatcctcaattctgtatttctagttcgcgttgtaagtttctaacacctagaacgcagtcaggactgtagtttatctttttatatatctaatcaggtcgtctctcgattcgaaagtcggactagctattgcattgcatgcacccatatatatatgcatcatgtcaattttgcgacatcagataatattgctaattttgcataagaacgtgtaaggatttagtagcaactagcaatgaagagtgggtgaaagttttgaatttcaacatttgatatcggtcatttgtgtaaaaacaatatataatagttttcagagaaaattacggcgatacatatgtagctgaattcttgtactatatataaagttgaatttgtaaaagtgctatgcgttcttatttgttatcaagttgatacgttctcatattccataagtgttctttaactcttctattcatttcgaacaaaacgagatttagtaatcaaacgtttacgtatacacttttcatcaaattaaaatgaacaaatagtagttagcttagcttgtccagaaaaaaaaaagaaaaaggaacaaatactagtaggcttttgagctggctgcttttattgaagggccttgccaattaacttcagagacgaagtagattgatgatagatattaacttctatctccatctaaccaaatgccaataaatcatatcagtcctcttctctgacaaatttcgttagtttattactactagctactttattttattgttatgtatatacggttaaaacagtagatatcatggcgtgcataactgcaaatgttaagaatatttgttagcattgtaatggatttccggtaaaataattacttaaatatatacggagtggacaagaaatataagccgacaagtagtgtgactgactatattttttccataaaaacatttaagtttctcttctaaccataatgtgatccgcttcaattttgggttggtggagccgtatacacgcactgattaattcagtttcttttttcaaccatagcgtgtgtgtgaaacaaaaaaaaagtatatgcatgctcatcctgcaatctctataacaataaaattaaccatatttgcggatcaaaagtttcgtgtgtcaaaagttgtacgcatatgtctcgtgcaataacgttgatgagggaaacaaaaaataaaatttgaatgccgttgtcgtattaaggaaaaaaaagtcaatgtgtttcaaccaccctgcatgaaaaatatcataaagtgccgcatagacgaaagtaacaacgagaagatggaccatgacgacattaaataaatgatacacaatacaaaataataggaaccgccgaatccaattattgttggtaaaaaaaaaaaaaactaaacgttaattaattcggaagtaattattacgatcaatcttcagaaaaatctttgataagaccattatataaacgagaagaagtctcactataatcatatcatcaccttccccactaatactctatagtttgtttttgttcttcttataatctttatattttcagcaaacgaaagggaagtgtgtcagaaatctcagagggtgagaatcccaatg

SEQ ID NO: 4816 - DNA, 3000 bp, Unknown
  misc_feature (1)..( 3000): cDNA_ID_1825754_gDNA_ID_1620734_Annot_ID_49447 3000 nt of promoter + ATG
tcaactctctgttttgtgactgttttggccactccctttgagtgacgcccctcaaattgacgtgcaagcagattccctaaccatcgttctagaagaggaactattccgcgaaggaaaaacaaccataccctccacattggagcccaaaatccacaccctggtcctttacccacaggaccagtattgaaacggtaatagatcaagtgtttcaaatccttgcacatcctgatttgtctcataagcctgtacttataacgatacatacctgtcaattgcccaacatgggagaaaatatattgcaggccatcagccaattgaaaggcatcaacattaccaagtcggaactggacatttgcatcaactacaagttttgtcagccggaggatctcacggcagagatggaaagcatttccaaaacgcgacttctttcgttccttggttgtcagagttttcacaggcttgaggttgaagttataatcaaggtgcaggtagttcaaattcttcctgtgaatcaacaggttcagcatattatacccctgccggcagacttgcagacccacttcaacccaatccagttcggtgctctgaaaaaactttgtagctgcaagagatcgaaacaaatgcttcttcttctgagccttagggggtctatggtgcagctcattcagtagataacatttcaaaagcttctggtaactaacccgaactttgacaggatatgctggaggactgcagaaaatgagataactaagaagttaatacaatgtctagtaaatttcaaaaggggaaagagaaccacagtagcatcagaaaaattagcttaccagtgctccttaaaccactctgcaacaaggggtatatcttcagcccgccgagtcctcccagacctcatattgaaaggccgaggggcaaacaacaatgaaatgccaggagctgtagtgtcagtgtagagtggcgagttatttagcaaaggttccagtccttctggtaacacaaagtcatccccatcatcatcataaccattacttttgcgctgttctttattagtgttattagagttacttatggggtgaattaatggatcataataaaaggcaggaaggtcaggatcctcagtctttatgtacataaccataggagtgtgatagacacagagttttactttcctgggcctattattgtacagatgtgggaaagctactttgtactcagttcgcagaggggatcgaattataagcttgttgatgtcattaaattcattccagtcttcatctcctttctccatatcacgatgcaaaggctcaaacttaggaccgcctgaaaaagagtaccaaattgaatcagggaaagagaacagaaggacaacaactgtgaaaacgaagatatcagaacaggagaacatagagtatagcgttacctggtatgcacatgttcagtgcctttgcagtaaagaatgatggcatgtcaaacaagtagaagtagttgcgatcaaccaaatcagacaacaactgggctgcaagcctgtgaagggttgacataattggaagtgagagattccacgtctggtaacttggaccattgatcatttttgtttttacaagtggcttgtggtcgtaaaaccaagagtacacagcagaatcttcttcttcatctagctccaactgaattgcctctagaggatcaacgtccaacaggttatcagcatagtctagagggggctcctcatcatcaaatggtggaaaccgcattctcttgaaatgacgacgatccctcttctcccttctcatcattatccacatagaaccccactgcaaacgaaagaatcatcactagaaaacatgtctcacaaattcacaaatgcacagacacaaaagaagagagagggagattattcacccacctgagccatgtaaataggttccacaacccatcgtacttcgttcacaaatgtaatagctccagtgatgtggtacaagaccttcacgtcccggacctggaaaatatctgagttcaaaattttgagcagagcaggagaacaactaaagcgagatatagatcactaagtgaataattacctgttcccagggcataggcatattctccaggagcttgaaaactgcgtgaggaacgaacttaagtgctccaagatatacacgtttatcaagtcgatgtttctttgatgacatatcaccatgatccctgaatcaaaacgcagagtcagtttcaatctaacttaacccaaacctaataatacaaagaaattggaccagattcgtttcccagtcaactggatttcgaaatcgaaattgaaaaattagaaactcgcctgatgattttcctaacgtgctcaggtggcatgtcctccttctgagtttccacgaacccaaacttcctcttgtcgccgtaccgtttggaatttagctgcatccatgttctcgccttcttctcaagcttcgcctctgcatcctcgggagtaggaaccgtcggagtattccgattagaaggcgccgtgtaagaaggatgatcagcgggatgtgaaggtgtctgcatcctcgaaccgtcggtaccaggaggagctaaggacgtaccatcaatgttccacatagcttcagatttcaaatccaaaggcccagcaaaatcgccgaggagcaaaaccctaaaacctcagtgcgagccttgacgaacacgaaaatccctaaaatcaccgtcgtcgggtgaggttggtaagaaagacgattaaccgaacgaacatatatatacgaaggcattcatgggccttttagaaaaacaatagatacgattatgggcctaatttatggattcagtcacggctcatttagtatttaagagtaagagatgtgtggaaggggtgatttggtaatttacattcaagtcaaccaaaaccagactttttaatctctctcgatcagaagttacctttttcacttttgccgagaaaatcagagacagaagaagaagaaaagcgaaaaaaagcaaaac

SEQ ID NO: 4817 - DNA, 3000 bp, Unknown
  misc_feature (1)..( 3000): cDNA_ID_1808006_gDNA_ID_1620734_Annot_ID_49448 3000 nt of promoter + ATG
aataatagaatcagttagttgttttaaagaaatgataatagctttggtcggtgaccttatcctctatcatatctcaaactagcccctcgtgtcgctcttctcctgtcgtttcagtgttgaaacatcgctttataaatcatcacctagttattattttactagttactgtataaagactgttatagtattttgtttatttattcgttatttacttatgtatgactatttttctctatttatttagtttggctaaactcatacaatttaggtgaactcaacaatttccagtataatgcttgtcctttcttgacggaaaaaaggtttctttttcaaataattaatattttatcaattaaagcttttatctttttaagcattcggtctgcgtaaggtttcattttcgttcaagactttcttgacattttttaaaaacaatatcccatatcacatttttcaatcctcttatttatgacataatctgtgacgaaatcaaacgccgtttcctattttacgaatatccaacaaaaaaacgtacgagtatgagtatcacaaaaactatttagtggaccaaaaacaagttacaagtacaatagtaatatttttttatcgacatggaaaccccaaattacgtcgtgtttcgcatgaatcacgtggattaattaattagatcaagaggacattgattgtagatttgtagttattagctgcaaagatatccaagaagaagtagtaaatctgaatacgaatctctctcttagtggatacaaatcagtatccaattacttatcgttaggtttagcttttggtgtatttaaagaagagacaacgagattaaaccaataaccctctagctgtcttatccgtacatttatttttcatcgtttgtaacgttataataaactatatacaggtcctaaacgaattcactcatgggagtcaagagaaagtgagcaagacagagttcaaagaagtgttgtcggacattttgttgggtatggctgctggtctgaaacgtgatcctatcgtcatcctcaggatggacggtgaggatctctcggagtttgtccacggccctggatatgaaatcgagagcatttctgttttctcagagctctccagtagcaaggacgcatcgctccgtgattgtatcgtcaaagctctccagtctctttctgttgatcatggaatgcctccttccaacgacccatgggtacctatttattttatttttatatatttctgttaagctatggattttcctaatttaacttcaaatctaaatttatatgattgataaaataaagcatataatattaagaaccgtttgtttttgtatttttaccaaaaccgtaaaaatacttttcgggtgttttttttttgttgtacaaaatatcagaacgatacttacatggtgggagtacatatgatacgtaatatgtatccaagttcgtatttgatgttatatatgttgctagagacaactgagttttgcctaaaaagcaaagtccttgtaacaggtgatgagcaacatcgtagaaccaattgttgactcttgtcttgatgaagaagataaaagagagaaaagcgcgtctcaggagagattcttggaagcattcaagagagtcgtggagagtgtggctcagcgtctcaatgaacagcccgtgatcgttgctcacagcgaaaacacctttgatgggagcggtatcaggaggctcttgtccaataaattcgaattcgataaggtaaactaccatacatatatatgttatctagcttttatgctaaaggaaaactttttaaatgatggtaacgagtgatgatgatccggaacggtttggtcgcaggcactaaacgttgccatggagacgattccaaaagaccgtcagggtaaggtgtctaaaggatatctacgagctgtgcttgacactgttgcaccatcggccactttaccaccaataggcgctgtgtcccaggtaaataatgccccgtctaaattattttgtcttttaaattgtttattttgcctttgaatttacatgttacaattatttgttaaacaaatgaaaccagaattagtgttttaatcaaaaattattagtgaatttttatttttattttttgaacggcattgattagttaagtttgtttttgtttataagatggataatatgataatggaagcgttgaagatggtgaatggagatgatggaaatgtggtgaaggaagaagagtttaagaaaacaatggcagagatattggggagtataatgttgcagctcgagggtagtcccatatcggtttcctctaactcggtggttcacgagccgctcacctcggctacctttctgccgtcaacttcgactgatacagaggagccttcaaactaatcatagaagggaataagcagcactagcagcaacaaatgttatatggttttgacttttgagtgtttacccccaaaagttttagattaatgaggaaaaccgtctttactttcagatgtataaaattgaaagtttggggtttcctcttgttggtgtggtgattctactcatgcctttttttttttttttctaatgaccatgggatgcaatgtttactctgttttttaatttcgttaaaatttgtttacgtttatgatgcttgaatggctatgatgaaacatttgagttatctttaaaagtgtgaaataaatattctgaagttaattgaagaatttgaaaatttgattacaagagcttggctaaaactacaaggagaccagattagtacaaaaacttagctaaatttaattaattacggtcattagcacaaaaaaataatttgtttttattatattattattggtaagtggaaacacaaaagaggaccaaaaggtccaaaaacgaataaactgtatctctcattcgccggagtttccagccgtttctttccgattctcggatttttcctgggaatcaaacgcatcgccgagaatcggaagagagggataaggttatg

SEQ ID NO: 4818 - DNA, 3000 bp, Unknown
  misc_feature (1)..( 3000): cDNA_ID_1807890_gDNA_ID_1620734_Annot_ID_49449 3000 nt of promoter + ATG
gataaatgtatctacagggcaagggatggtcaagccgcccattggatgatcaaacccaaactcttgttcagatttactcaacaaagcttgaaatgaaggctggttcaaatatgagactggcactatgtatcttttcatctggctttctccaacgtacactgcaagaaacccttttggtgtcgaagctgccattgatcgaccttgaaagatcttctttgcgcccataagacctcggaacactcccatttttttgttctgctctgatggatcctggaaaaagattcagcttagaagtctcctttagcttatcagattagatgaagaagttgttatgctcacgatatgaaaacaatgcaatatatatatacaaccaatttcgttcatgtgatagaaaccgtgggcttcttatacaagagtgggacatgcataagaagaattcacatggctctgtcttgcatgttataaactgataattgaatatggattatatctgaaaagaattcatgacactagaagactaacaacaacttcgagcgcacttcacatgaaattgtcgatggcacatatacatctctttggaatggtatgtagatgatgtacgtgggacctttatgttatatacctacacagcacctgaaaagtctaagtcactgagtcaagtagccaagtggctacacataattgataatccattatccatctgactaaccctccatattatccgtgagggcactgtcctgcaagtgttgagaagagagaaatagaaaagacagagggcccgccgttttttcacgcttaaaacaacacgtcgttcttctctctgcaccttaactgtgtggcgctttatgggattagcgatcccgttactagttgcaaccaactaaataacacgatgtttctctctttcgcagaaaaactgcatggcgttcaaggatcccctctgtagttcgaagaagaaataagcgaatggggaaaattgcgagatcgacagcttatcgccgatagcgcgtttctacttgtgtgattgggccttaattcaaaatttatcagaacgaagcccaattctcagtgatacaatataaacttataacattttttgtatggatcccggcccgcgtaaaccatttccagtcccgtataagaaaagttggatcgaaagtatgtatttcggtaggtatttaacaaaacaaaaggggttttagcaaaaatataaaacgaaaaggtattacaatctagtgaaagctacttggagtggaacaaagttgtagaatctggtctctcatatctcatttcctcttgttttgtaaagatggcatagtcgccttttgtagcttgtaccagaaaagggaaatgttagggattctgtccttttacattttgttttcttgttaaaattattatgaatctatcctacgttgaagaatgtgtatggtaacaacccctccacttctaattattaggtttatatcttcttcatttttttgtcggcattaggtttatatctacatctacaaaagaacatagaaagtaattcgaaatttaacctatctattattcaaaatatatatatatatatatatatatatgtttttggtttttcttctttttcttttgtgaaatccaaaataatgtcaaatcttaattttggaattattctctccgttttattaataattaaaaaatcacgtcaattaaaaaaaaaatctaataatttaattgccgtgatttagaaaatctgcttaatccatagatagccgcactagagccggccggctttgactttggttgaagtgtttgacgccagctcagaggcgccgaccaatgaaggacgaacacagaaggattaattagcaacaagtgtccccacgatttttcatcaacgattgacacgtcatcacaaatcaagagggtaaattgctcttgtcagaaatctttagctccgtcagttatgtggaaaatataattaattcacacgactcggttactgattttatatttttatccgtggactggcatgtatgcacacaagtgttattgcccgtgtcatacggaccacatccacatagtagcttaagtggtcaagattgttcgatgttccatttatgttttctggagtttgcttagttcgtcggtctctatttataatacgtcatgatcgtgtatttaattacatgtcaactaatattattaattacaagtagtcggaatataagttcaaaaaaatgatacagccaaacattagtcggaaaaagatattaaaaaggaaccgaccattggctaaaaagacacagtcattatgactaaacatcgtgttctttatgattttcttgtcggttactgaagttaaatagcgaacctaacacgccccatgagtaagtaatccagattgtgtgaaaagtttatgtaaaagaaaagatacggtcatgtaatcatgttacaaaaaatgacaaaaacgcgaacggaaattcaatgattttttttggataaagaagttcatgaatattaaattagacttttatgacagattagtttaggtaatcttaggtggggaaaaaaacacaagatgctttcgaagttatagtctagctaaggatatatggttaatatacgtttggtggtggcgagtccacaaatataaaatgaactcaatatatatatatatatatatttttttttgtcggaaactcaatatatataaatttagtcataaatagcaagaaatttataaattctgttttaatcatttttaattaacaactaatattttcctgacttctatacacatataaagaacaggcaagtccgaaccaaatcagaacaaaatactcatacacacacacacttggatttaaagaaaaaaaggagttttccttcttcttttgggtgtgtcaagtttctgttcttccttttctcgtgcttccatcacgagatatctcacaaggctctcgcgactcaagaaaggtaaagataaagaaagaagaagcaaagattccataaatg

SEQ ID NO: 4819 - DNA, 75 bp, Unknown
  misc_feature (1)..( 75): cDNA_ID_1825731_gDNA_ID_1620734_Annot_ID_166212 3000 nt of promoter + ATG
cttgatcttttaggggttttctctagttattggagagtggtgagaattagaaactgcattatccgatctaaaatg

SEQ ID NO: 4820 - DNA, 2495 bp, Unknown
  misc_feature (1)..( 2495): cDNA_ID_3071116_gDNA_ID_1620734_Annot_ID_166211 3000 nt of promoter + ATG
cttgatcttttaggggttttctctagttattggagagtggtgagaattagaaactgcattatccgatctaaaatgggtgatacagagaagtgtaacagtgatatgatccagagacttcattcatctttcggcactacttcttcttccattcccaaaaatcccatttctcagctcgatttaaaccctaatttcatccgctcatcagctcctcaattctccaagcctttcagtgacagtggcaaacgaatcggtgttcctccgtcgcaccccaacttaatcccaccgacttctccgttttctcagatcccgaccacccgacaacccggttcgcataattttaacccgggaggagctaatcattcacggtcaatgtcacagcccaactctttcttctcttttgactccttacctccgttaagcccttctccgtttcgagatcacgatgtttcaatggaggatagagattccggcgtgtttaacagcaaccattcgttgcctccatcgccgttcacgaggtgtaattcgacctcttctagctccttgagagtcggtgagagtttacctccgagaaagtctcatagacgctccaacagtgatatccccagtgggtttaattcgatgcctttgatccctccgagaccattggagaggtctttttctggtggggagtgtgctgattggtcaaagtctaatccttttgtgaagaaggaatcgagctgcgaaagggaaggtgtcggagagagagaagctatggatgatctcttctcagcatatatgaatcttgaaaacattgatgtgttgaactcctctgaagctgatgatagcaagaacggtaatgagaatagggatgatatggagagcagcagagcaagcgggaccaagactaacggtagtgatacggaaggagagagcagcagtgtcaatgagagtgccaataataatatgaattcttctggtgaaaagagagagagcgtgaagagaagagcggctggaggagatattgctcctaccaccagacattacaggagtgtttcagtggacagttgtttcatggagaagttgtcttttggtgatgaatctctaaagccgcctccttctcctggatctatgtcaaggaaagtttcccctaccaattcggttgatgggaactcgggtgctgcttttagcatcgagttcaataacggtgagtttactgcagcggaaatgaagaagatcatggcaaatgataaactagcagagatggccatgtctgaccctaaacgtgtcaaaaggtacaaatattgaatcttgactaacattaccggtttataatcaaatattctgatgtttaaggaatgatcctcttttcagaatcttagcgaaccgtcaatccgcagcacggtcaaaggagaggaagatgcggtacatagtagaattggaacacaaagtgcagactcttcagaccgaggctaccacattgtctgctcagctcacacttttgcaggtgcgttgtttacaatgttataaaagcgcctagattggtcaatttttgttttgttctaacgatcttagttactgcattatccagcgcgatatgatggggttgacaaatcagaacaatgagcttaagttccggcttcaagcaatggagcaacaagcgcgtcttcgcgatggtatacatttctcttcacattgtatcaaatttacgatattattaacatgactttaacaaaaaatggaaccagatcctatatgctttaaaaaaatctccatttttgcgcttaacgaatgtgaaatgacgatttttttcccccgctttgcagctctgaacgaagcactgaatggagaagtccagcgactgaaactggcaatcggtgagagcagtcagaacgaatcagagagatcaaagatgcaatcactcaacgctgagatgttccagcaactcaacatcagccagttaagacagcagccacaacagatgcagcaacagtctcatcagcagaaccaccagaatggaaccatggcaacaaaatctgaatcaaatgaatagagcagagaagttgttgcggtggatcaaagggttggagtttttcaacaagttacatatcaaatcaaacattatatttcatttatgtgcagagtcagttgaatttacatatatatcatataagtccaagaaatttaattttacaatatgttgttatcttagaaagaaaaaattcaatttatagtagatataggtatgaactatgaacacaagttatatgtaatgggattgattgagcttcagacaaaaagattctctgtttgttttgtttttagtttttaatttagtcttggattctgtctctttttgttggtttgtttattttaacattatgggccggtttttggcccattaaacagcatcccaaaacattgttgccttcttcgtctctctctgtgaataatatctaaaaccctaacaaacactatcactcacttcattttcgtgacgacggagcttgaccgctatg

SEQ ID NO: 4821 - DNA, 3000 bp, Unknown; identical to SEQ ID NO: 4818
  misc_feature (1)..( 3000): cDNA_ID_1807890_gDNA_ID_1620734_Annot_ID_166203 3000 nt of promoter + ATG

SEQ ID NO: 4822 - DNA, 3000 bp, Unknown; identical to SEQ ID NO: 4817
  misc_feature (1)..( 3000): cDNA_ID_1808006_gDNA_ID_1620734_Annot_ID_166202 3000 nt of promoter + ATG

SEQ ID NO: 4823 - DNA, 3000 bp, Unknown; identical to SEQ ID NO: 4816
  misc_feature (1)..( 3000): cDNA_ID_3074285_gDNA_ID_1620734_Annot_ID_166201 3000 nt of promoter + ATG
